United States Patent Application Publication US 2007/0042381 A1 - sequence listing, part 47

SEQ ID NO: 2107952 - RNA, 17 nt, Human
ugcuuauuuuaaaauuu

SEQ ID NO: 2107953 - RNA, 21 nt, Human
ugcuucaaacucaaacacaga

SEQ ID NO: 2107954 - RNA, 24 nt, Human
aggaaugccuccucccugggcaga

SEQ ID NO: 2107955 - RNA, 13 nt, Human
aggaaugcuaaca

SEQ ID NO: 2107956 - RNA, 20 nt, Human
aggaaugcuaacaguucacu

SEQ ID NO: 2107957 - RNA, 22 nt, Human
aggaaugcuaacaguucacuug

SEQ ID NO: 2107958 - RNA, 12 nt, Human
aggaaugcuccc

SEQ ID NO: 2107959 - RNA, 16 nt, Human
aggaaugccuguguga

SEQ ID NO: 2107960 - RNA, 13 nt, Human
aggaaugcucccc

SEQ ID NO: 2107961 - RNA, 14 nt, Human
aggaaugcuccccc

SEQ ID NO: 2107962 - RNA, 15 nt, Human
aggaaugcuccccca

SEQ ID NO: 2107963 - RNA, 19 nt, Human
aggaaggagacucaccucu

SEQ ID NO: 2107964 - RNA, 20 nt, Human
aggaagcucagacugguuga

SEQ ID NO: 2107965 - RNA, 21 nt, Human
aggaaggagacucaccucugc

SEQ ID NO: 2107966 - RNA, 22 nt, Human
aggaaugcucccccauccuccc

SEQ ID NO: 2107967 - RNA, 20 nt, Human
aggaaugcucccccauccuc

SEQ ID NO: 2107968 - RNA, 16 nt, Human
aggaaugcuuggaaua

SEQ ID NO: 2107969 - RNA, 20 nt, Human
aggaaugcuuggaauaucug

SEQ ID NO: 2107970 - RNA, 24 nt, Human
aggaaugcuuggaauaucugcugu

SEQ ID NO: 2107971 - RNA, 18 nt, Human
aggaauggaggcucuaau

SEQ ID NO: 2107972 - RNA, 20 nt, Human
aggaauggaggcucuaauug

SEQ ID NO: 2107973 - RNA, 21 nt, Human
aggaauggaggcucuaauuga

SEQ ID NO: 2107974 - RNA, 20 nt, Human
ugcuggccccucaccugggc

SEQ ID NO: 2107975 - RNA, 22 nt, Human
ugcuggccccucaccugggcac

SEQ ID NO: 2107976 - RNA, 24 nt, Human
ugcuggccccucaccugggcaccu

SEQ ID NO: 2107977 - RNA, 18 nt, Human
ugcuggcacauuucccca

SEQ ID NO: 2107978 - RNA, 20 nt, Human
ugcuggcacauuuccccaga

SEQ ID NO: 2107979 - RNA, 19 nt, Human
ugcuggaucucccagggcu

SEQ ID NO: 2107980 - RNA, 20 nt, Human
ugcuggaucucccagggcua

SEQ ID NO: 2107981 - RNA, 15 nt, Human
ugcuggauaaaauga

SEQ ID NO: 2107982 - RNA, 17 nt, Human
ugcuggauaaaaugagg

SEQ ID NO: 2107983 - RNA, 16 nt, Human
ugcuggauauuuucaa

SEQ ID NO: 2107984 - RNA, 17 nt, Human
ugcuggauauuuucaaa

SEQ ID NO: 2107985 - RNA, 22 nt, Human
ugcuggauauuuucaaauugua

SEQ ID NO: 2107986 - RNA, 17 nt, Human
ugcugggauuacaggug

SEQ ID NO: 2107987 - RNA, 21 nt, Human
ugcugggauuacaagcgugag

SEQ ID NO: 2107988 - RNA, 16 nt, Human
ugcuggccgggcacag

SEQ ID NO: 2107989 - RNA, 17 nt, Human
ugcuggccgggcacagc

SEQ ID NO: 2107990 - RNA, 18 nt, Human
ugcuggccgggcacagcu

SEQ ID NO: 2107991 - RNA, 19 nt, Human
ugcuggccgggcacagcug

SEQ ID NO: 2107992 - RNA, 13 nt, Human
ugcuggcugccuu

SEQ ID NO: 2107993 - RNA, 15 nt, Human
ugcuggcucccaggg

SEQ ID NO: 2107994 - RNA, 16 nt, Human
ugcuggcucccagggc

SEQ ID NO: 2107995 - RNA, 18 nt, Human
ugcuggcucccagggcca

SEQ ID NO: 2107996 - RNA, 13 nt, Human
ugcuggcugccca

SEQ ID NO: 2107997 - RNA, 14 nt, Human
ugcuggcugcccag

SEQ ID NO: 2107998 - RNA, 21 nt, Human
ugcuggcugcccagaccccuc

SEQ ID NO: 2107999 - RNA, 21 nt, Human
ugcuggcuguuggcugggggc

SEQ ID NO: 2108000 - RNA, 19 nt, Human
ugcuggcuguuggcugggg

SEQ ID NO: 2108001 - RNA, 19 nt, Human
ugcugggauuacaagcgug

SEQ ID NO: 2108002 - RNA, 19 nt, Human
ugcugacuguacuccuccc

SEQ ID NO: 2108003 - RNA, 16 nt, Human
ugcugacuguacuccu

SEQ ID NO: 2108004 - RNA, 14 nt, Human
ugcugacuguacuc

SEQ ID NO: 2108005 - RNA, 16 nt, Human
ugcucuggacaggcau

SEQ ID NO: 2108006 - RNA, 15 nt, Human
ugcucuggacaggca

SEQ ID NO: 2108007 - RNA, 14 nt, Human
ugcucuggacaggc

SEQ ID NO: 2108008 - RNA, 11 nt, Human
ugcuccuccag

SEQ ID NO: 2108009 - RNA, 12 nt, Human
ugcuccuccagg

SEQ ID NO: 2108010 - RNA, 13 nt, Human
ugcuccuccaggg

SEQ ID NO: 2108011 - RNA, 16 nt, Human
ugcuccuccagggcca

SEQ ID NO: 2108012 - RNA, 21 nt, Human
ugcuccuccagggccacgugc

SEQ ID NO: 2108013 - RNA, 22 nt, Human
ugcuccuccagggccacgugcc

SEQ ID NO: 2108014 - RNA, 13 nt, Human
ugcuccgugcuug

SEQ ID NO: 2108015 - RNA, 22 nt, Human
ugcucccccauccuccccuucc

SEQ ID NO: 2108016 - RNA, 23 nt, Human
ugcucccccauccuccccuuccc

SEQ ID NO: 2108017 - RNA, 14 nt, Human
ugcuccccucccuc

SEQ ID NO: 2108018 - RNA, 16 nt, Human
ugcuccccucccuccu

SEQ ID NO: 2108019 - RNA, 17 nt, Human
ugcuccccucccuccuc

SEQ ID NO: 2108020 - RNA, 16 nt, Human
ugcucccuaccaccuc

SEQ ID NO: 2108021 - RNA, 20 nt, Human
ugcucccuaccaccucccca

SEQ ID NO: 2108022 - RNA, 13 nt, Human
ugcucccuccccu

SEQ ID NO: 2108023 - RNA, 14 nt, Human
ugcucccuccccug

SEQ ID NO: 2108024 - RNA, 15 nt, Human
ugcucccuccccugc

SEQ ID NO: 2108025 - RNA, 17 nt, Human
ugcucccuccccugccc

SEQ ID NO: 2108026 - RNA, 18 nt, Human
ugcucccuccccugcccu

SEQ ID NO: 2108027 - RNA, 22 nt, Human
ugcucaugguccccauggcaug

SEQ ID NO: 2108028 - RNA, 14 nt, Human
ugcucauuucaugg

SEQ ID NO: 2108029 - RNA, 14 nt, Human
ugcuccaccacauc

SEQ ID NO: 2108030 - RNA, 18 nt, Human
ugcucccccauccucccc

SEQ ID NO: 2108031 - RNA, 19 nt, Human
ugcucccccauccuccccu

SEQ ID NO: 2108032 - RNA, 20 nt, Human
ugcucccccauccuccccuu

SEQ ID NO: 2108033 - RNA, 21 nt, Human
ugcucccccauccuccccuuc

SEQ ID NO: 2108034 - RNA, 22 nt, Human
ugcuauggggagaaaagacaug

SEQ ID NO: 2108035 - RNA, 17 nt, Human
agcuuucaaagaaggaa

SEQ ID NO: 2108036 - RNA, 16 nt, Human
ugcuauugacaaguca

SEQ ID NO: 2108037 - RNA, 16 nt, Human
agcuuuauguaauaau

SEQ ID NO: 2108038 - RNA, 22 nt, Human
agcuuguuuuguuucauccugu

SEQ ID NO: 2108039 - RNA, 19 nt, Human
agcuuuauuuuuuaaguau

SEQ ID NO: 2108040 - RNA, 22 nt, Human
agcuuuauuuuuuaaguauuua

SEQ ID NO: 2108041 - RNA, 14 nt, Human
agcuuuauguaaua

SEQ ID NO: 2108042 - RNA, 22 nt, Human
agcuuuauguaauaaugugaau

SEQ ID NO: 2108043 - RNA, 21 nt, Human
agcuugggggaugacuagagg

SEQ ID NO: 2108044 - RNA, 13 nt, Human
agcuuuacccuca

SEQ ID NO: 2108045 - RNA, 17 nt, Human
agcuuuacccucaggca

SEQ ID NO: 2108046 - RNA, 20 nt, Human
agcuuuacccucaggcauag

SEQ ID NO: 2108047 - RNA, 18 nt, Human
agcuuuacccucaggcau

SEQ ID NO: 2108048 - RNA, 15 nt, Human
agcuuuacuguuugu

SEQ ID NO: 2108049 - RNA, 20 nt, Human
aggaagccgugcccugcccc

SEQ ID NO: 2108050 - RNA, 21 nt, Human
aggaagccgugcccugccccc

SEQ ID NO: 2108051 - RNA, 14 nt, Human
aggaagcucagacu

SEQ ID NO: 2108052 - RNA, 16 nt, Human
aggaagcucagacugg

SEQ ID NO: 2108053 - RNA, 17 nt, Human
aggaagcucagacuggu

SEQ ID NO: 2108054 - RNA, 12 nt, Human
aggaaggaaaga

SEQ ID NO: 2108055 - RNA, 22 nt, Human
ugcugacuguacuccucccagg

SEQ ID NO: 2108056 - RNA, 21 nt, Human
ugcugacuguacuccucccag

SEQ ID NO: 2108057 - RNA, 16 nt, Human
ugcugacuguuuucuc

SEQ ID NO: 2108058 - RNA, 24 nt, Human
aggaaaggccagcuggcagcagag

SEQ ID NO: 2108059 - RNA, 19 nt, Human
aggaaauaaaaccuuucaa

SEQ ID NO: 2108060 - RNA, 20 nt, Human
aggaaauaaaaccuuucaaa

SEQ ID NO: 2108061 - RNA, 21 nt, Human
aggaaauaaaaccuuucaaau

SEQ ID NO: 2108062 - RNA, 22 nt, Human
aggaaauaaaaccuuucaaauu

SEQ ID NO: 2108063 - RNA, 20 nt, Human
aggaaauauauaugugugug

SEQ ID NO: 2108064 - RNA, 22 nt, Human
ugcggacagccacggccaggcc

SEQ ID NO: 2108065 - RNA, 23 nt, Human
ugcggacagccacggccaggcca

SEQ ID NO: 2108066 - RNA, 14 nt, Human
ugcggacgggcugu

SEQ ID NO: 2108067 - RNA, 18 nt, Human
ugcggccgcauucccuga

SEQ ID NO: 2108068 - RNA, 10 nt, Human
ugccuuuccu

SEQ ID NO: 2108069 - RNA, 12 nt, Human
ugccuuuccugu

SEQ ID NO: 2108070 - RNA, 13 nt, Human
ugccuuuccuguu

SEQ ID NO: 2108071 - RNA, 14 nt, Human
ugccuuuccuguuc

SEQ ID NO: 2108072 - RNA, 16 nt, Human
ugccuuuccuguucag

SEQ ID NO: 2108073 - RNA, 19 nt, Human
ugccuuuccuguucagcau

SEQ ID NO: 2108074 - RNA, 20 nt, Human
ugccuuuccuguucagcauu

SEQ ID NO: 2108075 - RNA, 11 nt, Human
ugccuuuguaa

SEQ ID NO: 2108076 - RNA, 12 nt, Human
ugccuuuguaag

SEQ ID NO: 2108077 - RNA, 13 nt, Human
ugccuuuguaagu

SEQ ID NO: 2108078 - RNA, 15 nt, Human
ugccuuuguaaguua

SEQ ID NO: 2108079 - RNA, 16 nt, Human
ugccuuuguaaguuau

SEQ ID NO: 2108080 - RNA, 15 nt, Human
ugccuuuguuuugau

SEQ ID NO: 2108081 - RNA, 18 nt, Human
ugccuuugaguuuccuca

SEQ ID NO: 2108082 - RNA, 19 nt, Human
ugccuuugaguuuccucag

SEQ ID NO: 2108083 - RNA, 21 nt, Human
ugccuuugaguuuccucaggc

SEQ ID NO: 2108084 - RNA, 22 nt, Human
ugccuuugaguuuccucaggcu

SEQ ID NO: 2108085 - RNA, 14 nt, Human
ugccuuugcagaaa

SEQ ID NO: 2108086 - RNA, 15 nt, Human
ugccuuugcagaaac

SEQ ID NO: 2108087 - RNA, 17 nt, Human
ugccuuugcagaaacag

SEQ ID NO: 2108088 - RNA, 18 nt, Human
ugccuuugcagaaacaga

SEQ ID NO: 2108089 - RNA, 18 nt, Human
ugcgguccacccaggagc

SEQ ID NO: 2108090 - RNA, 17 nt, Human
ugcgggcugggcagcug

SEQ ID NO: 2108091 - RNA, 21 nt, Human
ugcgggaccgguacagaaagg

SEQ ID NO: 2108092 - RNA, 17 nt, Human
ugcgggcuuuuccccgg

SEQ ID NO: 2108093 - RNA, 17 nt, Human
ugcgguccacccaggag

SEQ ID NO: 2108094 - RNA, 19 nt, Human
ugcggccgcauucccugag

SEQ ID NO: 2108095 - RNA, 17 nt, Human
ugcggccuuuggcuuca

SEQ ID NO: 2108096 - RNA, 19 nt, Human
ugcggccuuuggcuucacg

SEQ ID NO: 2108097 - RNA, 16 nt, Human
ugcgggcacaauaaau

SEQ ID NO: 2108098 - RNA, 17 nt, Human
ugcgggcacaauaaauc

SEQ ID NO: 2108099 - RNA, 13 nt, Human
ugcgggcugggca

SEQ ID NO: 2108100 - RNA, 14 nt, Human
ugcgggcugggcag

SEQ ID NO: 2108101 - RNA, 15 nt, Human
ugcgggcugggcagc

SEQ ID NO: 2108102 - RNA, 16 nt, Human
ugcgggcugggcagcu

SEQ ID NO: 2108103 - RNA, 17 nt, Human
ugcgggaugguccuggg

SEQ ID NO: 2108104 - RNA, 18 nt, Human
ugcgggaugguccugggg

SEQ ID NO: 2108105 - RNA, 19 nt, Human
ugcgggaugguccuggggc

SEQ ID NO: 2108106 - RNA, 14 nt, Human
agcuguugagcugu

SEQ ID NO: 2108107 - RNA, 13 nt, Human
agcuguugagcug

SEQ ID NO: 2108108 - RNA, 17 nt, Human
agcuguugagcuguuuu

SEQ ID NO: 2108109 - RNA, 16 nt, Human
agcuguugagcuguuu

SEQ ID NO: 2108110 - RNA, 15 nt, Human
agcuguugagcuguu

SEQ ID NO: 2108111 - RNA, 22 nt, Human
agcuugaagaucguuaguaucu

SEQ ID NO: 2108112 - RNA, 22 nt, Human
agcuugaaaguuuucagaaccu

SEQ ID NO: 2108113 - RNA, 16 nt, Human
agcuugaaaguuuuca

SEQ ID NO: 2108114 - RNA, 17 nt, Human
agcuugaaaguuuucag

SEQ ID NO: 2108115 - RNA, 17 nt, Human
agcuuaccucccaccuu

SEQ ID NO: 2108116 - RNA, 14 nt, Human
agcuuacaugagaa

SEQ ID NO: 2108117 - RNA, 16 nt, Human
agcuuacaugagaaca

SEQ ID NO: 2108118 - RNA, 14 nt, Human
agcuuagaccucag

SEQ ID NO: 2108119 - RNA, 15 nt, Human
agcuuagaccucagc

SEQ ID NO: 2108120 - RNA, 20 nt, Human
agcuuagaccucagccugug

SEQ ID NO: 2108121 - RNA, 16 nt, Human
agcuuagaccucagcc

SEQ ID NO: 2108122 - RNA, 17 nt, Human
agcuuagaccucagccu

SEQ ID NO: 2108123 - RNA, 18 nt, Human
agcuuagaccucagccug

SEQ ID NO: 2108124 - RNA, 19 nt, Human
agcuuagaccucagccugu

SEQ ID NO: 2108125 - RNA, 18 nt, Human
agcuuguaaauagcucag

SEQ ID NO: 2108126 - RNA, 18 nt, Human
agcuuggguuuuuguuac

SEQ ID NO: 2108127 - RNA, 18 nt, Human
agcuugggaggcuucccc

SEQ ID NO: 2108128 - RNA, 18 nt, Human
agcuugaggguugggcug

SEQ ID NO: 2108129 - RNA, 14 nt, Human
agcuugaggguugg

SEQ ID NO: 2108130 - RNA, 19 nt, Human
agcuugaaggaucuguuuu

SEQ ID NO: 2108131 - RNA, 20 nt, Human
agcugccuguucagcuccag

SEQ ID NO: 2108132 - RNA, 13 nt, Human
agcugccucacuu

SEQ ID NO: 2108133 - RNA, 13 nt, Human
agcugccuaagag

SEQ ID NO: 2108134 - RNA, 14 nt, Human
agcugccuaagagg

SEQ ID NO: 2108135 - RNA, 13 nt, Human
agcugccgaccag

SEQ ID NO: 2108136 - RNA, 17 nt, Human
agcugccgaccagagcc

SEQ ID NO: 2108137 - RNA, 18 nt, Human
agcugccgaccagagccc

SEQ ID NO: 2108138 - RNA, 14 nt, Human
ugccuggagcccca

SEQ ID NO: 2108139 - RNA, 20 nt, Human
ugccuggagccccacugccc

SEQ ID NO: 2108140 - RNA, 11 nt, Human
ugccuggagcu

SEQ ID NO: 2108141 - RNA, 16 nt, Human
ugccuggagcuccugg

SEQ ID NO: 2108142 - RNA, 17 nt, Human
ugccuggagcuccuggg

SEQ ID NO: 2108143 - RNA, 18 nt, Human
ugccuggagcuccuggga

SEQ ID NO: 2108144 - RNA, 22 nt, Human
agcugccuguucagcuccagcu

SEQ ID NO: 2108145 - RNA, 21 nt, Human
agcugccuguucagcuccagc

SEQ ID NO: 2108146 - RNA, 19 nt, Human
agcugccuguucagcucca

SEQ ID NO: 2108147 - RNA, 21 nt, Human
agcugcuuuugucuaugggac

SEQ ID NO: 2108148 - RNA, 22 nt, Human
agcuggaucuccauucucucag

SEQ ID NO: 2108149 - RNA, 15 nt, Human
ugccucugccucuga

SEQ ID NO: 2108150 - RNA, 13 nt, Human
ugccugcccaggc

SEQ ID NO: 2108151 - RNA, 14 nt, Human
ugccucugccucug

SEQ ID NO: 2108152 - RNA, 13 nt, Human
ugccucugccucu

SEQ ID NO: 2108153 - RNA, 14 nt, Human
ugcccaggcagguc

SEQ ID NO: 2108154 - RNA, 13 nt, Human
ugcccaggcaggu

SEQ ID NO: 2108155 - RNA, 12 nt, Human
ugcccaggcagg

SEQ ID NO: 2108156 - RNA, 22 nt, Human
ugcccaggagagccagcccucc

SEQ ID NO: 2108157 - RNA, 23 nt, Human
ugcccaggagagccagcccuccc

SEQ ID NO: 2108158 - RNA, 16 nt, Human
ugccugcccaggcccc

SEQ ID NO: 2108159 - RNA, 24 nt, Human
ugccugcccaggccccugccaccc

SEQ ID NO: 2108160 - RNA, 15 nt, Human
ugccugcccaggccc

SEQ ID NO: 2108161 - RNA, 14 nt, Human
ugccugcccaggcc

SEQ ID NO: 2108162 - RNA, 20 nt, Human
ugccugccccaaacaaauau

SEQ ID NO: 2108163 - RNA, 18 nt, Human
ugccugccccaaacaaau

SEQ ID NO: 2108164 - RNA, 20 nt, Human
ugccuguucagcuccagcuc

SEQ ID NO: 2108165 - RNA, 18 nt, Human
ugccuguucagcuccagc

SEQ ID NO: 2108166 - RNA, 13 nt, Human
agcuguucagcug

SEQ ID NO: 2108167 - RNA, 14 nt, Human
agcuguucagcugg

SEQ ID NO: 2108168 - RNA, 15 nt, Human
ugccuuaaaacuuua

SEQ ID NO: 2108169 - RNA, 21 nt, Human
ugccuguucagcuccagcuca

SEQ ID NO: 2108170 - RNA, 14 nt, Human
agcugucccuguca

SEQ ID NO: 2108171 - RNA, 15 nt, Human
agcugucccugucac

SEQ ID NO: 2108172 - RNA, 18 nt, Human
agcugucccugucaccaa

SEQ ID NO: 2108173 - RNA, 22 nt, Human
agcugucccugucaccaagcuc

SEQ ID NO: 2108174 - RNA, 21 nt, Human
agcuggccgaggguccuggcu

SEQ ID NO: 2108175 - RNA, 16 nt, Human
agcuggcagcagagug

SEQ ID NO: 2108176 - RNA, 20 nt, Human
agcuggccgaggguccuggc

SEQ ID NO: 2108177 - RNA, 20 nt, Human
agcugugcucuggacaggca

SEQ ID NO: 2108178 - RNA, 19 nt, Human
agcugugcucuggacaggc

SEQ ID NO: 2108179 - RNA, 19 nt, Human
agcugucucaaaccuccaa

SEQ ID NO: 2108180 - RNA, 20 nt, Human
agcugucccugucaccaagc

SEQ ID NO: 2108181 - RNA, 23 nt, Human
agcugugcucuggacaggcaugu

SEQ ID NO: 2108182 - RNA, 21 nt, Human
agcugugcucuggacaggcau

SEQ ID NO: 2108183 - RNA, 18 nt, Human
uggucucaaacuccugac

SEQ ID NO: 2108184 - RNA, 23 nt, Human
uggucucaaacucuugaccucag

SEQ ID NO: 2108185 - RNA, 17 nt, Human
uggucucaaacucuuga

SEQ ID NO: 2108186 - RNA, 13 nt, Human
uggucccacucag

SEQ ID NO: 2108187 - RNA, 21 nt, Human
uggucagguuauacuccuccu

SEQ ID NO: 2108188 - RNA, 22 nt, Human
uggucaguuugguuguguaaga

SEQ ID NO: 2108189 - RNA, 16 nt, Human
uggucucaaacucuug

SEQ ID NO: 2108190 - RNA, 18 nt, Human
ugguaggaauagcauguc

SEQ ID NO: 2108191 - RNA, 18 nt, Human
uggucaccaaaucagcug

SEQ ID NO: 2108192 - RNA, 22 nt, Human
uggucagauuugaacucuucaa

SEQ ID NO: 2108193 - RNA, 20 nt, Human
uggucaccaaaucagcugcu

SEQ ID NO: 2108194 - RNA, 22 nt, Human
aggguguccggucccuguccca

SEQ ID NO: 2108195 - RNA, 21 nt, Human
aggguggugaccucugccuga

SEQ ID NO: 2108196 - RNA, 13 nt, Human
aggguuauaauaa

SEQ ID NO: 2108197 - RNA, 13 nt, Human
aggguuagggagg

SEQ ID NO: 2108198 - RNA, 15 nt, Human
aggguuagggagggg

SEQ ID NO: 2108199 - RNA, 16 nt, Human
aggguuagggaggggu

SEQ ID NO: 2108200 - RNA, 18 nt, Human
aggguuacuaugcacaau

SEQ ID NO: 2108201 - RNA, 15 nt, Human
aggguuauauuuuac

SEQ ID NO: 2108202 - RNA, 14 nt, Human
uggucuuucuggag

SEQ ID NO: 2108203 - RNA, 15 nt, Human
uggucuuucuggaga

SEQ ID NO: 2108204 - RNA, 17 nt, Human
uggucuuucuggagagg

SEQ ID NO: 2108205 - RNA, 13 nt, Human
uggucuuguaaga

SEQ ID NO: 2108206 - RNA, 14 nt, Human
uggucuuguaagag

SEQ ID NO: 2108207 - RNA, 21 nt, Human
uggucuuguaagagcuauaca

SEQ ID NO: 2108208 - RNA, 23 nt, Human
uggucuuguaagagcuauacagu

SEQ ID NO: 2108209 - RNA, 17 nt, Human
uggucuugagaugucuu

SEQ ID NO: 2108210 - RNA, 18 nt, Human
uggucugaauguucugac

SEQ ID NO: 2108211 - RNA, 19 nt, Human
uggucugaauguucugaca

SEQ ID NO: 2108212 - RNA, 21 nt, Human
uggucugaauguucugacauu

SEQ ID NO: 2108213 - RNA, 22 nt, Human
uggucugaauguucugacauua

SEQ ID NO: 2108214 - RNA, 17 nt, Human
uggucugacccacugcu

SEQ ID NO: 2108215 - RNA, 16 nt, Human
uggucugacccacugc

SEQ ID NO: 2108216 - RNA, 14 nt, Human
uggucugaauguuc

SEQ ID NO: 2108217 - RNA, 15 nt, Human
uggucugaauguucu

SEQ ID NO: 2108218 - RNA, 16 nt, Human
uggucugaauguucug

SEQ ID NO: 2108219 - RNA, 17 nt, Human
uggucugaauguucuga

SEQ ID NO: 2108220 - RNA, 20 nt, Human
uggucuccucuuuguuuugu

SEQ ID NO: 2108221 - RNA, 14 nt, Human
uggucuccugcccc

SEQ ID NO: 2108222 - RNA, 17 nt, Human
uggucuccugcccccac

SEQ ID NO: 2108223 - RNA, 18 nt, Human
uggucuccugcccccaca

SEQ ID NO: 2108224 - RNA, 15 nt, Human
aggguugggcccaga

SEQ ID NO: 2108225 - RNA, 17 nt, Human
aggguuggccccugccc

SEQ ID NO: 2108226 - RNA, 23 nt, Human
aggguuggccccugcccggcugc

SEQ ID NO: 2108227 - RNA, 18 nt, Human
aggguuggccccugcccg

SEQ ID NO: 2108228 - RNA, 11 nt, Human
agguacuuuug

SEQ ID NO: 2108229 - RNA, 16 nt, Human
agguacuuuuggaauc

SEQ ID NO: 2108230 - RNA, 17 nt, Human
agguacuuuuggaaucu

SEQ ID NO: 2108231 - RNA, 17 nt, Human
agguagaaauaucugaa

SEQ ID NO: 2108232 - RNA, 19 nt, Human
agguagaaauaucugaaaa

SEQ ID NO: 2108233 - RNA, 20 nt, Human
agguagguggaucaccugag

SEQ ID NO: 2108234 - RNA, 23 nt, Human
agguagaaauaucugaaaaugua

SEQ ID NO: 2108235 - RNA, 11 nt, Human
agguauaauuu

SEQ ID NO: 2108236 - RNA, 15 nt, Human
agguauaauuuuaug

SEQ ID NO: 2108237 - RNA, 21 nt, Human
agguaugcaaucaaaucugcu

SEQ ID NO: 2108238 - RNA, 23 nt, Human
aggucaucuccuuucauccccac

SEQ ID NO: 2108239 - RNA, 12 nt, Human
aggucagagccu

SEQ ID NO: 2108240 - RNA, 12 nt, Human
aggucccaaggc

SEQ ID NO: 2108241 - RNA, 16 nt, Human
aggucccaaggcaagg

SEQ ID NO: 2108242 - RNA, 11 nt, Human
aggucccaggc

SEQ ID NO: 2108243 - RNA, 12 nt, Human
aggucccaggca

SEQ ID NO: 2108244 - RNA, 13 nt, Human
aggucccaggcag

SEQ ID NO: 2108245 - RNA, 14 nt, Human
aggucacuccuggg

SEQ ID NO: 2108246 - RNA, 15 nt, Human
aggucacuccugggg

SEQ ID NO: 2108247 - RNA, 18 nt, Human
aggucacuccuggggccu

SEQ ID NO: 2108248 - RNA, 19 nt, Human
aggucacuccuggggccuc

SEQ ID NO: 2108249 - RNA, 22 nt, Human
agguauuccuuuuguguacagu

SEQ ID NO: 2108250 - RNA, 20 nt, Human
agguauggaaggguuugugg

SEQ ID NO: 2108251 - RNA, 22 nt, Human
agguauggaaggguuuguggcu

SEQ ID NO: 2108252 - RNA, 22 nt, Human
aggucaaguaagaagacaugaa

SEQ ID NO: 2108253 - RNA, 17 nt, Human
agguauucgugcagcau

SEQ ID NO: 2108254 - RNA, 18 nt, Human
aggucaauacaguacagg

SEQ ID NO: 2108255 - RNA, 23 nt, Human
aggucaauacaguacaggcagca

SEQ ID NO: 2108256 - RNA, 21 nt, Human
aggucaauacaguacaggcag

SEQ ID NO: 2108257 - RNA, 22 nt, Human
aggucaauacaguacaggcagc

SEQ ID NO: 2108258 - RNA, 17 nt, Human
ugguacucauuaaaaaa

SEQ ID NO: 2108259 - RNA, 20 nt, Human
ugguacuacuagaugucuuu

SEQ ID NO: 2108260 - RNA, 18 nt, Human
ugguacggagauguuuca

SEQ ID NO: 2108261 - RNA, 16 nt, Human
ugguacuaacuuuccu

SEQ ID NO: 2108262 - RNA, 20 nt, Human
ugguagcuuuucccuucuuu

SEQ ID NO: 2108263 - RNA, 17 nt, Human
ugguacuugcugcuauu

SEQ ID NO: 2108264 - RNA, 18 nt, Human
ugguacuugcugcuauuu

SEQ ID NO: 2108265 - RNA, 19 nt, Human
ugguacuugcugcuauuuu

SEQ ID NO: 2108266 - RNA, 20 nt, Human
uggucacaggacucugccuc

SEQ ID NO: 2108267 - RNA, 23 nt, Human
uggucacaggacucugccuccuc

SEQ ID NO: 2108268 - RNA, 22 nt, Human
uggucacaggacucugccuccu

SEQ ID NO: 2108269 - RNA, 17 nt, Human
ugguagcuuuucccuuc

SEQ ID NO: 2108270 - RNA, 17 nt, Human
ugguaggaauagcaugu

SEQ ID NO: 2108271 - RNA, 21 nt, Human
ugguagcuuuucccuucuuuu

SEQ ID NO: 2108272 - RNA, 13 nt, Human
ugguaagcuucca

SEQ ID NO: 2108273 - RNA, 19 nt, Human
ugguaagcuuccaggaaaa

SEQ ID NO: 2108274 - RNA, 20 nt, Human
ugguaagcuuccaggaaaaa

SEQ ID NO: 2108275 - RNA, 13 nt, Human
ugguaagggaaaa

SEQ ID NO: 2108276 - RNA, 16 nt, Human
ugguaagggccaaguc

SEQ ID NO: 2108277 - RNA, 13 nt, Human
uggguggggcugc

SEQ ID NO: 2108278 - RNA, 14 nt, Human
ugggugcuggcugc

SEQ ID NO: 2108279 - RNA, 18 nt, Human
ugggugcuggcugcccag

SEQ ID NO: 2108280 - RNA, 14 nt, Human
uggguggggaggga

SEQ ID NO: 2108281 - RNA, 21 nt, Human
uggguggggcugcuccuccag

SEQ ID NO: 2108282 - RNA, 21 nt, Human
agggucucacucugucgccca

SEQ ID NO: 2108283 - RNA, 22 nt, Human
agggucucacucugucgcccag

SEQ ID NO: 2108284 - RNA, 14 nt, Human
aggguggcagguga

SEQ ID NO: 2108285 - RNA, 15 nt, Human
aggguggcaucccag

SEQ ID NO: 2108286 - RNA, 21 nt, Human
aggguggcaucccaguggccu

SEQ ID NO: 2108287 - RNA, 21 nt, Human
aggguggcuggguccagggga

SEQ ID NO: 2108288 - RNA, 18 nt, Human
aggguggcccuugcaguu

SEQ ID NO: 2108289 - RNA, 11 nt, Human
aggguggcccu

SEQ ID NO: 2108290 - RNA, 14 nt, Human
aggguggcccuugc

SEQ ID NO: 2108291 - RNA, 16 nt, Human
agggugggagagccca

SEQ ID NO: 2108292 - RNA, 17 nt, Human
agggugggagagcccag

SEQ ID NO: 2108293 - RNA, 18 nt, Human
agggugggagagcccagc

SEQ ID NO: 2108294 - RNA, 19 nt, Human
agggugggagagcccagcc

SEQ ID NO: 2108295 - RNA, 23 nt, Human
ugggucuaagggguugguugagg

SEQ ID NO: 2108296 - RNA, 20 nt, Human
ugggucucgcuuuguugccc

SEQ ID NO: 2108297 - RNA, 22 nt, Human
ugggucucgcuuuguugcccag

SEQ ID NO: 2108298 - RNA, 14 nt, Human
ugggucugugucuc

SEQ ID NO: 2108299 - RNA, 19 nt, Human
ugggucugugucucuuuuc

SEQ ID NO: 2108300 - RNA, 20 nt, Human
ugggucugugucucuuuucu

SEQ ID NO: 2108301 - RNA, 22 nt, Human
uggguggcaccagcagccugga

SEQ ID NO: 2108302 - RNA, 13 nt, Human
ugggugcucccua

SEQ ID NO: 2108303 - RNA, 23 nt, Human
agggucucacuauguugcccagg

SEQ ID NO: 2108304 - RNA, 22 nt, Human
agggucucacuauguugcccag

SEQ ID NO: 2108305 - RNA, 21 nt, Human
agggucucacuauguugccca

SEQ ID NO: 2108306 - RNA, 18 nt, Human
aggggugguccugacuca

SEQ ID NO: 2108307 - RNA, 13 nt, Human
aggggugguccug

SEQ ID NO: 2108308 - RNA, 15 nt, Human
aggggugguccugac

SEQ ID NO: 2108309 - RNA, 20 nt, Human
agggguggguuccucuuccc

SEQ ID NO: 2108310 - RNA, 21 nt, Human
agggguggguuccucuucccc

SEQ ID NO: 2108311 - RNA, 22 nt, Human
aggggacucagcccugagguga

SEQ ID NO: 2108312 - RNA, 14 nt, Human
aggggacucagccc

SEQ ID NO: 2108313 - RNA, 17 nt, Human
aggggacucagcccuga

SEQ ID NO: 2108314 - RNA, 19 nt, Human
aggggacuauuuaugaagg

SEQ ID NO: 2108315 - RNA, 23 nt, Human
aggggccuggcagccgugccuuc

SEQ ID NO: 2108316 - RNA, 18 nt, Human
aggggccuggcagccgug

SEQ ID NO: 2108317 - RNA, 17 nt, Human
aggggagagggucugga

SEQ ID NO: 2108318 - RNA, 10 nt, Human
aggggagagg

SEQ ID NO: 2108319 - RNA, 15 nt, Human
aggggccuggcagcc

SEQ ID NO: 2108320 - RNA, 23 nt, Human
aggggagcaaaaucgaugcagug

SEQ ID NO: 2108321 - RNA, 14 nt, Human
aggggcguguggcu

SEQ ID NO: 2108322 - RNA, 17 nt, Human
aggggcguguggcucac

SEQ ID NO: 2108323 - RNA, 14 nt, Human
aggggcggcaggag

SEQ ID NO: 2108324 - RNA, 17 nt, Human
aggggcggcaggaggga

SEQ ID NO: 2108325 - RNA, 18 nt, Human
aggggcggcaggagggag

SEQ ID NO: 2108326 - RNA, 20 nt, Human
aggggcggcaggagggaggu

SEQ ID NO: 2108327 - RNA, 20 nt, Human
agggggaggggguuacaaac

SEQ ID NO: 2108328 - RNA, 22 nt, Human
agggggaggggguuacaaacug

SEQ ID NO: 2108329 - RNA, 15 nt, Human
ugggcugcuccucau

SEQ ID NO: 2108330 - RNA, 16 nt, Human
ugggcugcuccucaug

SEQ ID NO: 2108331 - RNA, 14 nt, Human
uggggaagacugug

SEQ ID NO: 2108332 - RNA, 24 nt, Human
uggggaagacuguggcugcuagca

SEQ ID NO: 2108333 - RNA, 16 nt, Human
uggggaagacuguggc

SEQ ID NO: 2108334 - RNA, 17 nt, Human
uggggaagacuguggcu

SEQ ID NO: 2108335 - RNA, 13 nt, Human
uggggaaggaggc

SEQ ID NO: 2108336 - RNA, 18 nt, Human
uggggaagcuucuuaaau

SEQ ID NO: 2108337 - RNA, 17 nt, Human
uggggacagagcagaac

SEQ ID NO: 2108338 - RNA, 23 nt, Human
agggcuucugccauuucugagau

SEQ ID NO: 2108339 - RNA, 15 nt, Human
agggccuccagcccu

SEQ ID NO: 2108340 - RNA, 20 nt, Human
agggccuccauuccuggagc

SEQ ID NO: 2108341 - RNA, 21 nt, Human
ugggcugcccuggugcugcca

SEQ ID NO: 2108342 - RNA, 16 nt, Human
ugggcugcccuggugc

SEQ ID NO: 2108343 - RNA, 17 nt, Human
ugggcugcuacccagaa

SEQ ID NO: 2108344 - RNA, 20 nt, Human
ugggcugcccuggugcugcc

SEQ ID NO: 2108345 - RNA, 19 nt, Human
ugggcugcccuggugcugc

SEQ ID NO: 2108346 - RNA, 17 nt, Human
ugggcugcccuggugcu

SEQ ID NO: 2108347 - RNA, 17 nt, Human
ugggcugagcccuggca

SEQ ID NO: 2108348 - RNA, 18 nt, Human
ugggcugagcccuggcag

SEQ ID NO: 2108349 - RNA, 15 nt, Human
ugggcugagcccugg

SEQ ID NO: 2108350 - RNA, 16 nt, Human
ugggcugagcccuggc

SEQ ID NO: 2108351 - RNA, 14 nt, Human
ugggcugagacugg

SEQ ID NO: 2108352 - RNA, 15 nt, Human
ugggcugagacugga

SEQ ID NO: 2108353 - RNA, 23 nt, Human
ugggcugagacuggauacugccc

SEQ ID NO: 2108354 - RNA, 12 nt, Human
ugggcugagccc

SEQ ID NO: 2108355 - RNA, 14 nt, Human
ugggguacccacug

SEQ ID NO: 2108356 - RNA, 13 nt, Human
uggggcuucuugg

SEQ ID NO: 2108357 - RNA, 17 nt, Human
uggggcucugugcaggg

SEQ ID NO: 2108358 - RNA, 11 nt, Human
uggggcugaac

SEQ ID NO: 2108359 - RNA, 17 nt, Human
uggggcugaucucaggg

SEQ ID NO: 2108360 - RNA, 18 nt, Human
uggggcugaucucaggga

SEQ ID NO: 2108361 - RNA, 19 nt, Human
uggggcugaucucagggaa

SEQ ID NO: 2108362 - RNA, 20 nt, Human
uggggcugaucucagggaag

SEQ ID NO: 2108363 - RNA, 21 nt, Human
uggggcugaucucagggaagc

SEQ ID NO: 2108364 - RNA, 22 nt, Human
uggggcugaucucagggaagcc

SEQ ID NO: 2108365 - RNA, 11 nt, Human
uggggcugggg

SEQ ID NO: 2108366 - RNA, 20 nt, Human
ugggguacccacugcucugg

SEQ ID NO: 2108367 - RNA, 15 nt, Human
uggggguuggcuggg

SEQ ID NO: 2108368 - RNA, 16 nt, Human
uggggguuggcugggu

SEQ ID NO: 2108369 - RNA, 14 nt, Human
ugggggaagcccug

SEQ ID NO: 2108370 - RNA, 18 nt, Human
ugggguagcuagaggaac

SEQ ID NO: 2108371 - RNA, 20 nt, Human
ugggguagcuagaggaacca

SEQ ID NO: 2108372 - RNA, 16 nt, Human
ugggguacccacugcu

SEQ ID NO: 2108373 - RNA, 15 nt, Human
ugggguacccacugc

SEQ ID NO: 2108374 - RNA, 13 nt, Human
ugggguagggcug

SEQ ID NO: 2108375 - RNA, 16 nt, Human
ugggguagggcugacu

SEQ ID NO: 2108376 - RNA, 18 nt, Human
uggggcggugagagggga

SEQ ID NO: 2108377 - RNA, 13 nt, Human
uggggcucuggga

SEQ ID NO: 2108378 - RNA, 15 nt, Human
uggggcucugugcag

SEQ ID NO: 2108379 - RNA, 12 nt, Human
uggggccuuggu

SEQ ID NO: 2108380 - RNA, 18 nt, Human
uggggccuagauccacac

SEQ ID NO: 2108381 - RNA, 17 nt, Human
uggggagacaccucaga

SEQ ID NO: 2108382 - RNA, 18 nt, Human
uggggagacaccucagag

SEQ ID NO: 2108383 - RNA, 20 nt, Human
uggggagacaccucagagcc

SEQ ID NO: 2108384 - RNA, 21 nt, Human
uggggacguccugccaccugg

SEQ ID NO: 2108385 - RNA, 12 nt, Human
uggggagaaagu

SEQ ID NO: 2108386 - RNA, 20 nt, Human
uggggacguccugccaccug

SEQ ID NO: 2108387 - RNA, 16 nt, Human
uggggagugggacaga

SEQ ID NO: 2108388 - RNA, 19 nt, Human
uggggagugggacagaguc

SEQ ID NO: 2108389 - RNA, 19 nt, Human
uggggaguaggacauacca

SEQ ID NO: 2108390 - RNA, 13 nt, Human
uggggagugggac

SEQ ID NO: 2108391 - RNA, 12 nt, Human
ugggcccagaag

SEQ ID NO: 2108392 - RNA, 23 nt, Human
ugggcccaagacagaugccccag

SEQ ID NO: 2108393 - RNA, 22 nt, Human
ugggcccaagacagaugcccca

SEQ ID NO: 2108394 - RNA, 17 nt, Human
ugggcccagaggcacag

SEQ ID NO: 2108395 - RNA, 18 nt, Human
ugggcccagaggcacagc

SEQ ID NO: 2108396 - RNA, 19 nt, Human
ugggcccagaggcacagcc

SEQ ID NO: 2108397 - RNA, 13 nt, Human
ugggcccagaucu

SEQ ID NO: 2108398 - RNA, 14 nt, Human
ugggcccagaucug

SEQ ID NO: 2108399 - RNA, 15 nt, Human
agggagggcuucugc

SEQ ID NO: 2108400 - RNA, 12 nt, Human
agggaggggacu

SEQ ID NO: 2108401 - RNA, 17 nt, Human
ugggccccaccaccuag

SEQ ID NO: 2108402 - RNA, 18 nt, Human
ugggccccaccaccuagg

SEQ ID NO: 2108403 - RNA, 23 nt, Human
ugggccccaccaccuaggccacu

SEQ ID NO: 2108404 - RNA, 19 nt, Human
agggagugacagaggcagc

SEQ ID NO: 2108405 - RNA, 18 nt, Human
agggagugacagaggcag

SEQ ID NO: 2108406 - RNA, 17 nt, Human
agggagugacagaggca

SEQ ID NO: 2108407 - RNA, 17 nt, Human
agggaggugaccccagg

SEQ ID NO: 2108408 - RNA, 20 nt, Human
agggcaggcccaaauuauca

SEQ ID NO: 2108409 - RNA, 13 nt, Human
agggcagggcauc

SEQ ID NO: 2108410 - RNA, 15 nt, Human
agggcagccugccug

SEQ ID NO: 2108411 - RNA, 16 nt, Human
agggcagccugccugg

SEQ ID NO: 2108412 - RNA, 17 nt, Human
agggcagccugccugga

SEQ ID NO: 2108413 - RNA, 18 nt, Human
agggcagccugccuggag

SEQ ID NO: 2108414 - RNA, 14 nt, Human
agggcagcagaucu

SEQ ID NO: 2108415 - RNA, 16 nt, Human
agggccagaucuguua

SEQ ID NO: 2108416 - RNA, 15 nt, Human
agggcagggcucuga

SEQ ID NO: 2108417 - RNA, 16 nt, Human
agggcagggcucugau

SEQ ID NO: 2108418 - RNA, 17 nt, Human
agggcagggcaucuccu

SEQ ID NO: 2108419 - RNA, 18 nt, Human
agggcccagagagggugg

SEQ ID NO: 2108420 - RNA, 17 nt, Human
agggccaguccugccug

SEQ ID NO: 2108421 - RNA, 18 nt, Human
agggccaguccugccugg

SEQ ID NO: 2108422 - RNA, 23 nt, Human
agggcccagagaggguggugacc

SEQ ID NO: 2108423 - RNA, 12 nt, Human
agggccagggcc

SEQ ID NO: 2108424 - RNA, 14 nt, Human
agggccagggcccu

SEQ ID NO: 2108425 - RNA, 15 nt, Human
agggccagggcccug

SEQ ID NO: 2108426 - RNA, 19 nt, Human
agggccagggcccugcaga

SEQ ID NO: 2108427 - RNA, 22 nt, Human
agggccagggcccugcagaggg

SEQ ID NO: 2108428 - RNA, 13 nt, Human
agggccaguccug

SEQ ID NO: 2108429 - RNA, 16 nt, Human
agggccaguccugccu

SEQ ID NO: 2108430 - RNA, 16 nt, Human
ugggcaacccccagcc

SEQ ID NO: 2108431 - RNA, 10 nt, Human
ugggauugcu

SEQ ID NO: 2108432 - RNA, 20 nt, Human
ugggagguggagguugcagu

SEQ ID NO: 2108433 - RNA, 13 nt, Human
ugggaggucgagg

SEQ ID NO: 2108434 - RNA, 18 nt, Human
ugggaggucaaggcugca

SEQ ID NO: 2108435 - RNA, 19 nt, Human
ugggaggucaaggcugcag

SEQ ID NO: 2108436 - RNA, 20 nt, Human
ugggaggucaaggcugcagu

SEQ ID NO: 2108437 - RNA, 23 nt, Human
ugggaggucaaggcugcagugag

SEQ ID NO: 2108438 - RNA, 17 nt, Human
ugggaggucaaggcugc

SEQ ID NO: 2108439 - RNA, 20 nt, Human
ugggcaacccccagccugcu

SEQ ID NO: 2108440 - RNA, 17 nt, Human
ugggcaacccccagccu

SEQ ID NO: 2108441 - RNA, 17 nt, Human
ugggcaccuauaauacc

SEQ ID NO: 2108442 - RNA, 22 nt, Human
ugggcaccaagagccaauggag

SEQ ID NO: 2108443 - RNA, 13 nt, Human
ugggccagccccu

SEQ ID NO: 2108444 - RNA, 14 nt, Human
ugggccagccccuc

SEQ ID NO: 2108445 - RNA, 15 nt, Human
ugggccagccccucc

SEQ ID NO: 2108446 - RNA, 16 nt, Human
ugggccagccccuccc

SEQ ID NO: 2108447 - RNA, 18 nt, Human
ugggccagccccucccac

SEQ ID NO: 2108448 - RNA, 20 nt, Human
ugggccagccccucccacca

SEQ ID NO: 2108449 - RNA, 14 nt, Human
ugggccaggacagg

SEQ ID NO: 2108450 - RNA, 22 nt, Human
ugggccagccccucccaccaca

SEQ ID NO: 2108451 - RNA, 23 nt, Human
ugggccagccccucccaccacag

SEQ ID NO: 2108452 - RNA, 17 nt, Human
ugggccaggacaggccc

SEQ ID NO: 2108453 - RNA, 18 nt, Human
ugggccaggacaggcccg

SEQ ID NO: 2108454 - RNA, 14 nt, Human
aguaauccaccugc

SEQ ID NO: 2108455 - RNA, 19 nt, Human
aguaaguaccacucaggcc

SEQ ID NO: 2108456 - RNA, 14 nt, Human
aguaauuucuucuc

SEQ ID NO: 2108457 - RNA, 20 nt, Human
aguagaaagacagagcuggg

SEQ ID NO: 2108458 - RNA, 21 nt, Human
aguagaaagacagagcuggga

SEQ ID NO: 2108459 - RNA, 12 nt, Human
aguagagacagg

SEQ ID NO: 2108460 - RNA, 18 nt, Human
aguagaaauaauaugcau

SEQ ID NO: 2108461 - RNA, 19 nt, Human
aguagaaauaauaugcauu

SEQ ID NO: 2108462 - RNA, 14 nt, Human
aguagaaauuuuac

SEQ ID NO: 2108463 - RNA, 17 nt, Human
aguagaaauuuuacaau

SEQ ID NO: 2108464 - RNA, 14 nt, Human
aguagagucaucuc

SEQ ID NO: 2108465 - RNA, 16 nt, Human
aguagagucaucucca

SEQ ID NO: 2108466 - RNA, 23 nt, Human
aguagagucaucuccaucagcug

SEQ ID NO: 2108467 - RNA, 17 nt, Human
aguagaagucuuagaug

SEQ ID NO: 2108468 - RNA, 19 nt, Human
aguagagauggggaaagaa

SEQ ID NO: 2108469 - RNA, 20 nt, Human
aguagagauggggaaagaau

SEQ ID NO: 2108470 - RNA, 18 nt, Human
uguaggaagguuaauguu

SEQ ID NO: 2108471 - RNA, 17 nt, Human
aguagagucaucuccau

SEQ ID NO: 2108472 - RNA, 20 nt, Human
uguaggaagguuaauguuca

SEQ ID NO: 2108473 - RNA, 11 nt, Human
uguaggagaau

SEQ ID NO: 2108474 - RNA, 20 nt, Human
uguaggagagguugucugug

SEQ ID NO: 2108475 - RNA, 17 nt, Human
uguagguaugaauaagu

SEQ ID NO: 2108476 - RNA, 13 nt, Human
uguagagugggag

SEQ ID NO: 2108477 - RNA, 14 nt, Human
uguagagugggagc

SEQ ID NO: 2108478 - RNA, 16 nt, Human
uguacuuuuaaggcag

SEQ ID NO: 2108479 - RNA, 15 nt, Human
uguacuuuuuccaga

SEQ ID NO: 2108480 - RNA, 21 nt, Human
uguaccaugaaacaaagcugc

SEQ ID NO: 2108481 - RNA, 19 nt, Human
aguaaaaauacaaaaauua

SEQ ID NO: 2108482 - RNA, 14 nt, Human
aguaagcugcuuuu

SEQ ID NO: 2108483 - RNA, 17 nt, Human
aguaaguaccacucagg

SEQ ID NO: 2108484 - RNA, 12 nt, Human
aguaaaaauaaa

SEQ ID NO: 2108485 - RNA, 15 nt, Human
aguaaaaauaaaauu

SEQ ID NO: 2108486 - RNA, 13 nt, Human
aguaaaaauacaa

SEQ ID NO: 2108487 - RNA, 12 nt, Human
aguaaaaauaca

SEQ ID NO: 2108488 - RNA, 20 nt, Human
aguaagccgugauuuucauu

SEQ ID NO: 2108489 - RNA, 13 nt, Human
agguuuuguaaag

SEQ ID NO: 2108490 - RNA, 13 nt, Human
agguuuuguacaa

SEQ ID NO: 2108491 - RNA, 15 nt, Human
agguuuuguaaagau

SEQ ID NO: 2108492 - RNA, 19 nt, Human
uguaagaucguucucugcc

SEQ ID NO: 2108493 - RNA, 20 nt, Human
uguaagaucguucucugccu

SEQ ID NO: 2108494 - RNA, 17 nt, Human
uguaagagcuauacagu

SEQ ID NO: 2108495 - RNA, 21 nt, Human
uguaagagcuuuacaaaaaga

SEQ ID NO: 2108496 - RNA, 13 nt, Human
uguaagauaaaaa

SEQ ID NO: 2108497 - RNA, 14 nt, Human
uguaagauuuugaa

SEQ ID NO: 2108498 - RNA, 15 nt, Human
uguaagauuuugaaa

SEQ ID NO: 2108499 - RNA, 16 nt, Human
uguaagauuuugaaaa

SEQ ID NO: 2108500 - RNA, 17 nt, Human
uguaagauuuugaaaac

SEQ ID NO: 2108501 - RNA, 16 nt, Human
uguaaguuauuucuug

SEQ ID NO: 2108502 - RNA, 22 nt, Human
uguaaguuauuucuuguuuguu

SEQ ID NO: 2108503 - RNA, 12 nt, Human
uguaagugugag

SEQ ID NO: 2108504 - RNA, 14 nt, Human
uguaagugugagua

SEQ ID NO: 2108505 - RNA, 17 nt, Human
uguaagugugaguaaga

SEQ ID NO: 2108506 - RNA, 21 nt, Human
uguaagugugaguaagagcug

SEQ ID NO: 2108507 - RNA, 18 nt, Human
uguaagugagagagacaa

SEQ ID NO: 2108508 - RNA, 17 nt, Human
uguaaguaaacugcccu

SEQ ID NO: 2108509 - RNA, 18 nt, Human
uguaaguaaacugcccug

SEQ ID NO: 2108510 - RNA, 16 nt, Human
uguaaguaaaugucug

SEQ ID NO: 2108511 - RNA, 17 nt, Human
uguaaguaaaugucugu

SEQ ID NO: 2108512 - RNA, 21 nt, Human
uguaaguaaaugucuguggcc

SEQ ID NO: 2108513 - RNA, 14 nt, Human
uguaaguaauuauc

SEQ ID NO: 2108514 - RNA, 23 nt, Human
uguaauuaaguacuauguaucaa

SEQ ID NO: 2108515 - RNA, 17 nt, Human
aggugguuauggagagg

SEQ ID NO: 2108516 - RNA, 17 nt, Human
agguugaggggcuccug

SEQ ID NO: 2108517 - RNA, 20 nt, Human
agguugaggggcuccuggaa

SEQ ID NO: 2108518 - RNA, 16 nt, Human
agguugggguguacua

SEQ ID NO: 2108519 - RNA, 19 nt, Human
agguugggagccaaaugug

SEQ ID NO: 2108520 - RNA, 18 nt, Human
agguugcagggagccgag

SEQ ID NO: 2108521 - RNA, 12 nt, Human
agguugcaggga

SEQ ID NO: 2108522 - RNA, 17 nt, Human
agguuguaaauguguuu

SEQ ID NO: 2108523 - RNA, 19 nt, Human
agguugggguguacuaguu

SEQ ID NO: 2108524 - RNA, 17 nt, Human
agguuguaguaaagaaa

SEQ ID NO: 2108525 - RNA, 14 nt, Human
agguuggugggggc

SEQ ID NO: 2108526 - RNA, 17 nt, Human
uguaagagaauguugaa

SEQ ID NO: 2108527 - RNA, 15 nt, Human
uguaagaaucauugu

SEQ ID NO: 2108528 - RNA, 17 nt, Human
uguaagaagagacuggg

SEQ ID NO: 2108529 - RNA, 21 nt, Human
uguaagaagagacugggaaga

SEQ ID NO: 2108530 - RNA, 19 nt, Human
uguaagaagagacugggaa

SEQ ID NO: 2108531 - RNA, 11 nt, Human
aggugcagugg

SEQ ID NO: 2108532 - RNA, 16 nt, Human
aggugcaguggcucac

SEQ ID NO: 2108533 - RNA, 14 nt, Human
agguggccacucca

SEQ ID NO: 2108534 - RNA, 17 nt, Human
agguggccacuccagac

SEQ ID NO: 2108535 - RNA, 23 nt, Human
aggugcacagacgucccuccacg

SEQ ID NO: 2108536 - RNA, 19 nt, Human
aggugcagagugcccagaa

SEQ ID NO: 2108537 - RNA, 20 nt, Human
aggugcagagugcccagaac

SEQ ID NO: 2108538 - RNA, 17 nt, Human
aggugcagagugcccag

SEQ ID NO: 2108539 - RNA, 18 nt, Human
aggugcagagugcccaga

SEQ ID NO: 2108540 - RNA, 22 nt, Human
aggugcacagacgucccuccac

SEQ ID NO: 2108541 - RNA, 19 nt, Human
aggugggcacuggauuagu

SEQ ID NO: 2108542 - RNA, 21 nt, Human
agguggcugacccagucccug

SEQ ID NO: 2108543 - RNA, 22 nt, Human
agguggcugacccagucccugg

SEQ ID NO: 2108544 - RNA, 23 nt, Human
agguggcucuggaaugacaugug

SEQ ID NO: 2108545 - RNA, 19 nt, Human
agguggcugacccaguccc

SEQ ID NO: 2108546 - RNA, 20 nt, Human
agguggcugacccagucccu

SEQ ID NO: 2108547 - RNA, 14 nt, Human
aggugggccagccc

SEQ ID NO: 2108548 - RNA, 15 nt, Human
aggugggccagcccc

SEQ ID NO: 2108549 - RNA, 16 nt, Human
aggugggccagccccu

SEQ ID NO: 2108550 - RNA, 17 nt, Human
aggugggccagccccuc

SEQ ID NO: 2108551 - RNA, 18 nt, Human
aggugggccagccccucc

SEQ ID NO: 2108552 - RNA, 19 nt, Human
aggugggccagccccuccc

SEQ ID NO: 2108553 - RNA, 21 nt, Human
aggugggccagccccucccac

SEQ ID NO: 2108554 - RNA, 22 nt, Human
aggugggccagccccucccacc

SEQ ID NO: 2108555 - RNA, 19 nt, Human
agguggucugaauguucug

SEQ ID NO: 2108556 - RNA, 20 nt, Human
agguggucugaauguucuga

SEQ ID NO: 2108557 - RNA, 21 nt, Human
agguggucugaauguucugac

SEQ ID NO: 2108558 - RNA, 22 nt, Human
agguggucugaauguucugaca

SEQ ID NO: 2108559 - RNA, 23 nt, Human
agguggucugaauguucugacau

SEQ ID NO: 2108560 - RNA, 23 nt, Human
aggucuugaacuccuggccucaa

SEQ ID NO: 2108561 - RNA, 14 nt, Human
aggucccaggcaga

SEQ ID NO: 2108562 - RNA, 20 nt, Human
aggucuugauuuguuuuaga

SEQ ID NO: 2108563 - RNA, 14 nt, Human
aggucuuuugacau

SEQ ID NO: 2108564 - RNA, 15 nt, Human
aggucuuuugacaug

SEQ ID NO: 2108565 - RNA, 16 nt, Human
aggucuuuugacaugu

SEQ ID NO: 2108566 - RNA, 18 nt, Human
aggucuuuugacaugugg

SEQ ID NO: 2108567 - RNA, 20 nt, Human
uguaaauccuuuuucuuuau

SEQ ID NO: 2108568 - RNA, 22 nt, Human
uguaaauccuuuuucuuuauaa

SEQ ID NO: 2108569 - RNA, 19 nt, Human
aggucuuuugacaugugga

SEQ ID NO: 2108570 - RNA, 12 nt, Human
uguaaauccuuu

SEQ ID NO: 2108571 - RNA, 19 nt, Human
uguaaauccuuuuucuuua

SEQ ID NO: 2108572 - RNA, 16 nt, Human
agucuaggagcuggga

SEQ ID NO: 2108573 - RNA, 17 nt, Human
agucucacuguugccca

SEQ ID NO: 2108574 - RNA, 16 nt, Human
agucucacuguugccc

SEQ ID NO: 2108575 - RNA, 23 nt, Human
agucccuuccccucccuggcucc

SEQ ID NO: 2108576 - RNA, 23 nt, Human
aguccgaaagggacuuggaagcu

SEQ ID NO: 2108577 - RNA, 14 nt, Human
agucccuuccaggc

SEQ ID NO: 2108578 - RNA, 13 nt, Human
agucccuuccccu

SEQ ID NO: 2108579 - RNA, 14 nt, Human
agucccuuccccuc

SEQ ID NO: 2108580 - RNA, 15 nt, Human
agucccuuccccucc

SEQ ID NO: 2108581 - RNA, 17 nt, Human
agucccuuccccucccu

SEQ ID NO: 2108582 - RNA, 19 nt, Human
agucccuuccccucccugg

SEQ ID NO: 2108583 - RNA, 20 nt, Human
agucccuuccccucccuggc

SEQ ID NO: 2108584 - RNA, 21 nt, Human
agucccuuccccucccuggcu

SEQ ID NO: 2108585 - RNA, 22 nt, Human
agucccuuccccucccuggcuc

SEQ ID NO: 2108586 - RNA, 14 nt, Human
agucccugggggaa

SEQ ID NO: 2108587 - RNA, 17 nt, Human
agucccugggggaagcc

SEQ ID NO: 2108588 - RNA, 20 nt, Human
agucccugggggaagcccug

SEQ ID NO: 2108589 - RNA, 21 nt, Human
agucccugggggaagcccugg

SEQ ID NO: 2108590 - RNA, 21 nt, Human
agucccugugaagacugggug

SEQ ID NO: 2108591 - RNA, 22 nt, Human
agucccugggggaagcccugga

SEQ ID NO: 2108592 - RNA, 21 nt, Human
agucccugacucucugugacc

SEQ ID NO: 2108593 - RNA, 12 nt, Human
aguccaggcccc

SEQ ID NO: 2108594 - RNA, 22 nt, Human
agucaggccuuaauuuucagua

SEQ ID NO: 2108595 - RNA, 19 nt, Human
agucagggaccccugcccu

SEQ ID NO: 2108596 - RNA, 16 nt, Human
agucagggaccccugc

SEQ ID NO: 2108597 - RNA, 13 nt, Human
aguccaggcccca

SEQ ID NO: 2108598 - RNA, 18 nt, Human
aguccaggccccaaaacc

SEQ ID NO: 2108599 - RNA, 19 nt, Human
agucccugacucucuguga

SEQ ID NO: 2108600 - RNA, 23 nt, Human
aguccaggccccaaaaccacagc

SEQ ID NO: 2108601 - RNA, 15 nt, Human
agucccgucaggacg

SEQ ID NO: 2108602 - RNA, 15 nt, Human
agucagacugcuggg

SEQ ID NO: 2108603 - RNA, 13 nt, Human
ugucuaaaaacac

SEQ ID NO: 2108604 - RNA, 14 nt, Human
agucagagagaauc

SEQ ID NO: 2108605 - RNA, 23 nt, Human
agucagacuggauaguccgucuc

SEQ ID NO: 2108606 - RNA, 17 nt, Human
agucagagagaguguuu

SEQ ID NO: 2108607 - RNA, 15 nt, Human
ugucgcccagucugg

SEQ ID NO: 2108608 - RNA, 14 nt, Human
ugucgcccagucug

SEQ ID NO: 2108609 - RNA, 22 nt, Human
ugucgauuaaaaucacucucag

SEQ ID NO: 2108610 - RNA, 17 nt, Human
ugucgcccagugcccug

SEQ ID NO: 2108611 - RNA, 23 nt, Human
ugucgguuuuuuuuaaauaaaag

SEQ ID NO: 2108612 - RNA, 23 nt, Human
ugucguagccaaggugggcugag

SEQ ID NO: 2108613 - RNA, 21 nt, Human
ugucguggguguguguagcca

SEQ ID NO: 2108614 - RNA, 19 nt, Human
ugucgauauuuccaucauu

SEQ ID NO: 2108615 - RNA, 17 nt, Human
uguccuuuuuguuauua

SEQ ID NO: 2108616 - RNA, 16 nt, Human
uguccuuuuuguuauu

SEQ ID NO: 2108617 - RNA, 16 nt, Human
uguccuacccacccuc

SEQ ID NO: 2108618 - RNA, 18 nt, Human
uguccuuucccuccacuc

SEQ ID NO: 2108619 - RNA, 13 nt, Human
uguccgagcuuug

SEQ ID NO: 2108620 - RNA, 14 nt, Human
uguccgagcuuuga

SEQ ID NO: 2108621 - RNA, 13 nt, Human
uguccgagaacua

SEQ ID NO: 2108622 - RNA, 22 nt, Human
uguccgagaacuaaagccaagg

SEQ ID NO: 2108623 - RNA, 12 nt, Human
uguccgcccucu

SEQ ID NO: 2108624 - RNA, 13 nt, Human
uguccgcccucuu

SEQ ID NO: 2108625 - RNA, 15 nt, Human
uguccgcccucuucc

SEQ ID NO: 2108626 - RNA, 17 nt, Human
uguccgcccucuucccc

SEQ ID NO: 2108627 - RNA, 15 nt, Human
ugucauuuuugcagu

SEQ ID NO: 2108628 - RNA, 12 nt, Human
ugucauuuugaa

SEQ ID NO: 2108629 - RNA, 15 nt, Human
ugucauuuugaagcu

SEQ ID NO: 2108630 - RNA, 17 nt, Human
ugucauuuugaagcuaa

SEQ ID NO: 2108631 - RNA, 18 nt, Human
ugucauuuugaagcuaau

SEQ ID NO: 2108632 - RNA, 19 nt, Human
ugucauuuugaagcuaauu

SEQ ID NO: 2108633 - RNA, 22 nt, Human
ugucauuuugaagcuaauuauu

SEQ ID NO: 2108634 - RNA, 18 nt, Human
ugucauuuuugcaguaga

SEQ ID NO: 2108635 - RNA, 19 nt, Human
ugucaagagggucugagga

SEQ ID NO: 2108636 - RNA, 15 nt, Human
ugucaagccauaauu

SEQ ID NO: 2108637 - RNA, 12 nt, Human
ugucaauaaaca

SEQ ID NO: 2108638 - RNA, 14 nt, Human
ugucaagaaagagc

SEQ ID NO: 2108639 - RNA, 23 nt, Human
uguauucacgugcagcagcaaca

SEQ ID NO: 2108640 - RNA, 17 nt, Human
uguauucagugaggguc

SEQ ID NO: 2108641 - RNA, 16 nt, Human
uguauuauucugcagc

SEQ ID NO: 2108642 - RNA, 19 nt, Human
uguaguaaacuauuuaucu

SEQ ID NO: 2108643 - RNA, 13 nt, Human
uguaguaaagaaa

SEQ ID NO: 2108644 - RNA, 15 nt, Human
uguaguaaagaaauu

SEQ ID NO: 2108645 - RNA, 16 nt, Human
ugucaauaaacagcuu

SEQ ID NO: 2108646 - RNA, 21 nt, Human
ugucaauaaacagcuucaugc

SEQ ID NO: 2108647 - RNA, 23 nt, Human
ugucaauaaacagcuucaugccu

SEQ ID NO: 2108648 - RNA, 14 nt, Human
aguagucauuucau

SEQ ID NO: 2108649 - RNA, 12 nt, Human
aguagucauuuc

SEQ ID NO: 2108650 - RNA, 13 nt, Human
aguagucauuuca

SEQ ID NO: 2108651 - RNA, 15 nt, Human
aguagugagaagaau

SEQ ID NO: 2108652 - RNA, 17 nt, Human
aguagugagaagaauau

SEQ ID NO: 2108653 - RNA, 18 nt, Human
aguagugagaagaauauu

SEQ ID NO: 2108654 - RNA, 20 nt, Human
aguagugagaagaauauugu

SEQ ID NO: 2108655 - RNA, 21 nt, Human
aguagugagaagaauauuguu

SEQ ID NO: 2108656 - RNA, 16 nt, Human
ugucagguggggcagc

SEQ ID NO: 2108657 - RNA, 18 nt, Human
ugucaggaacagaaggau

SEQ ID NO: 2108658 - RNA, 20 nt, Human
ugucaggaacagaaggauga

SEQ ID NO: 2108659 - RNA, 21 nt, Human
agucacugccucucccuggcc

SEQ ID NO: 2108660 - RNA, 16 nt, Human
ugucaggaacagaagg

SEQ ID NO: 2108661 - RNA, 17 nt, Human
ugucaggaacagaagga

SEQ ID NO: 2108662 - RNA, 19 nt, Human
ugucagcugaaccugggua

SEQ ID NO: 2108663 - RNA, 14 nt, Human
agucacugccucuc

SEQ ID NO: 2108664 - RNA, 17 nt, Human
agucacugccucucccu

SEQ ID NO: 2108665 - RNA, 20 nt, Human
agucacugccucucccuggc

SEQ ID NO: 2108666 - RNA, 13 nt, Human
agucacugcacag

SEQ ID NO: 2108667 - RNA, 16 nt, Human
ugucagcugaaccugg

SEQ ID NO: 2108668 - RNA, 14 nt, Human
agucaccaagccca

SEQ ID NO: 2108669 - RNA, 13 nt, Human
agucaccaagccc

SEQ ID NO: 2108670 - RNA, 17 nt, Human
aguauuucagaugcuuu

SEQ ID NO: 2108671 - RNA, 19 nt, Human
aguauuucagaugcuuuag

SEQ ID NO: 2108672 - RNA, 16 nt, Human
aguauuugcauauucu

SEQ ID NO: 2108673 - RNA, 17 nt, Human
agugcugggauuacagg

SEQ ID NO: 2108674 - RNA, 19 nt, Human
agugcugggauuacaggug

SEQ ID NO: 2108675 - RNA, 16 nt, Human
agugcuuaaaaaucau

SEQ ID NO: 2108676 - RNA, 17 nt, Human
agugcuuaaaaaucauu

SEQ ID NO: 2108677 - RNA, 19 nt, Human
agugcuuaaaaaucauuga

SEQ ID NO: 2108678 - RNA, 14 nt, Human
agugcuucagccug

SEQ ID NO: 2108679 - RNA, 20 nt, Human
agugcugggauuacaagcgu

SEQ ID NO: 2108680 - RNA, 17 nt, Human
agugccugggaauguau

SEQ ID NO: 2108681 - RNA, 18 nt, Human
agugccugggaauguauu

SEQ ID NO: 2108682 - RNA, 22 nt, Human
agugccugggaauguauuauuc

SEQ ID NO: 2108683 - RNA, 22 nt, Human
agugcccuggggcugaucucag

SEQ ID NO: 2108684 - RNA, 23 nt, Human
agugcccuggggcugaucucagg

SEQ ID NO: 2108685 - RNA, 12 nt, Human
agugccugcuga

SEQ ID NO: 2108686 - RNA, 13 nt, Human
agugccugggaau

SEQ ID NO: 2108687 - RNA, 16 nt, Human
agugcuuccaaggaug

SEQ ID NO: 2108688 - RNA, 15 nt, Human
agugcuucagccuga

SEQ ID NO: 2108689 - RNA, 16 nt, Human
agugcuucagccugag

SEQ ID NO: 2108690 - RNA, 17 nt, Human
agugcuucagccugagg

SEQ ID NO: 2108691 - RNA, 18 nt, Human
agugcuucagccugaggc

SEQ ID NO: 2108692 - RNA, 14 nt, Human
agugcuucuuacua

SEQ ID NO: 2108693 - RNA, 21 nt, Human
agugcuucuuacuauuaagca

SEQ ID NO: 2108694 - RNA, 19 nt, Human
agugcuugaguuuggggaa

SEQ ID NO: 2108695 - RNA, 19 nt, Human
agugcuucagccugaggcu

SEQ ID NO: 2108696 - RNA, 20 nt, Human
agugcuucagccugaggcug

SEQ ID NO: 2108697 - RNA, 14 nt, Human
agugcuucucuaca

SEQ ID NO: 2108698 - RNA, 21 nt, Human
agugcuucuuaaagaguucuu

SEQ ID NO: 2108699 - RNA, 19 nt, Human
ugugucagcauagaaguaa

SEQ ID NO: 2108700 - RNA, 12 nt, Human
ugugguuucauu

SEQ ID NO: 2108701 - RNA, 20 nt, Human
ugugguuaaugccauggaca

SEQ ID NO: 2108702 - RNA, 15 nt, Human
ugugguuaaugccau

SEQ ID NO: 2108703 - RNA, 19 nt, Human
ugugguugacuuaugggcc

SEQ ID NO: 2108704 - RNA, 18 nt, Human
ugugguuauuuuuauaca

SEQ ID NO: 2108705 - RNA, 19 nt, Human
ugugguuauuuuuauacag

SEQ ID NO: 2108706 - RNA, 20 nt, Human
ugugguuauuuuuauacagu

SEQ ID NO: 2108707 - RNA, 21 nt, Human
ugugguuauuuuuauacagua

SEQ ID NO: 2108708 - RNA, 15 nt, Human
ugugguuuaguguaa

SEQ ID NO: 2108709 - RNA, 21 nt, Human
ugugguuuaguguaaaaauga

SEQ ID NO: 2108710 - RNA, 19 nt, Human
uguggugagguugggcagc

SEQ ID NO: 2108711 - RNA, 14 nt, Human
ugugguuaaugcca

SEQ ID NO: 2108712 - RNA, 19 nt, Human
ugugucuaggcaggaccug

SEQ ID NO: 2108713 - RNA, 20 nt, Human
ugugucuaggcaggaccugu

SEQ ID NO: 2108714 - RNA, 12 nt, Human
ugugugugugca

SEQ ID NO: 2108715 - RNA, 13 nt, Human
ugugucuccugca

SEQ ID NO: 2108716 - RNA, 19 nt, Human
ugugucuccugcaugcaga

SEQ ID NO: 2108717 - RNA, 11 nt, Human
ugugugugugu

SEQ ID NO: 2108718 - RNA, 19 nt, Human
ugugucagguggggcagcu

SEQ ID NO: 2108719 - RNA, 17 nt, Human
ugugucagguggggcag

SEQ ID NO: 2108720 - RNA, 13 nt, Human
uguguuauuuaaa

SEQ ID NO: 2108721 - RNA, 14 nt, Human
uguguuauuuaaau

SEQ ID NO: 2108722 - RNA, 16 nt, Human
uguguuauuuaaauga

SEQ ID NO: 2108723 - RNA, 14 nt, Human
uguguuaugaagca

SEQ ID NO: 2108724 - RNA, 12 nt, Human
ugugugugugug

SEQ ID NO: 2108725 - RNA, 15 nt, Human
uguguguguguauga

SEQ ID NO: 2108726 - RNA, 21 nt, Human
uguuaacauggacaugaucuu

SEQ ID NO: 2108727 - RNA, 15 nt, Human
uguuaaccucagugu

SEQ ID NO: 2108728 - RNA, 16 nt, Human
uguuaaccagaauaaa

SEQ ID NO: 2108729 - RNA, 19 nt, Human
uguuaaccucagugucauu

SEQ ID NO: 2108730 - RNA, 17 nt, Human
uguuaaccucaguguca

SEQ ID NO: 2108731 - RNA, 12 nt, Human
uguguuggcugu

SEQ ID NO: 2108732 - RNA, 18 nt, Human
uguguugccaugugugcu

SEQ ID NO: 2108733 - RNA, 19 nt, Human
uguuaaugauagcuacugu

SEQ ID NO: 2108734 - RNA, 14 nt, Human
uguuaauccuagcu

SEQ ID NO: 2108735 - RNA, 20 nt, Human
uguuaauccuagcugugugc

SEQ ID NO: 2108736 - RNA, 17 nt, Human
uguuaaugguuugaaua

SEQ ID NO: 2108737 - RNA, 23 nt, Human
uguuaaucuuaggggagagcuuu

SEQ ID NO: 2108738 - RNA, 14 nt, Human
uguuaaugaaaaug

SEQ ID NO: 2108739 - RNA, 17 nt, Human
uguuaaugaaaauguca

SEQ ID NO: 2108740 - RNA, 19 nt, Human
uguuaaugaaaaugucaga

SEQ ID NO: 2108741 - RNA, 11 nt, Human
aguggaaaaau

SEQ ID NO: 2108742 - RNA, 20 nt, Human
uguuaauggugcaaauccua

SEQ ID NO: 2108743 - RNA, 13 nt, Human
agugcuuuguaau

SEQ ID NO: 2108744 - RNA, 18 nt, Human
aguggaaaaauagccugc

SEQ ID NO: 2108745 - RNA, 19 nt, Human
aguggaaaaauagccugcc

SEQ ID NO: 2108746 - RNA, 18 nt, Human
agugcaaugacacagucu

SEQ ID NO: 2108747 - RNA, 22 nt, Human
agugcaaugguauaaauuucaa

SEQ ID NO: 2108748 - RNA, 16 nt, Human
agugcaaugacacagu

SEQ ID NO: 2108749 - RNA, 21 nt, Human
agugauuucuggggccccacc

SEQ ID NO: 2108750 - RNA, 16 nt, Human
agugauuuuuauccaa

SEQ ID NO: 2108751 - RNA, 22 nt, Human
agugauuuuuauccaaucuugu

SEQ ID NO: 2108752 - RNA, 21 nt, Human
agugaguguggcuccccucua

SEQ ID NO: 2108753 - RNA, 22 nt, Human
agugauucuccugccucagccu

SEQ ID NO: 2108754 - RNA, 24 nt, Human
agugauucuccugccucagccucc

SEQ ID NO: 2108755 - RNA, 16 nt, Human
agugagucucuucaga

SEQ ID NO: 2108756 - RNA, 16 nt, Human
agugaguguggcuccc

SEQ ID NO: 2108757 - RNA, 18 nt, Human
agugaguguggcuccccu

SEQ ID NO: 2108758 - RNA, 19 nt, Human
agugaguguggcuccccuc

SEQ ID NO: 2108759 - RNA, 16 nt, Human
agugagucgaggacag

SEQ ID NO: 2108760 - RNA, 17 nt, Human
uguggcccuggccugcu

SEQ ID NO: 2108761 - RNA, 14 nt, Human
uguggcccuggccu

SEQ ID NO: 2108762 - RNA, 20 nt, Human
uguggcccuggccugcuggg

SEQ ID NO: 2108763 - RNA, 22 nt, Human
uguggccaugguccccaagacc

SEQ ID NO: 2108764 - RNA, 12 nt, Human
uguggccccuuc

SEQ ID NO: 2108765 - RNA, 13 nt, Human
uguggccccuuca

SEQ ID NO: 2108766 - RNA, 12 nt, Human
uguggcccuggc

SEQ ID NO: 2108767 - RNA, 14 nt, Human
agugcccacaggau

SEQ ID NO: 2108768 - RNA, 16 nt, Human
agugcccaccaacauc

SEQ ID NO: 2108769 - RNA, 17 nt, Human
agugcccaacuguuaua

SEQ ID NO: 2108770 - RNA, 20 nt, Human
agugcccaccaacaucccau

SEQ ID NO: 2108771 - RNA, 19 nt, Human
agugcccaccaacauccca

SEQ ID NO: 2108772 - RNA, 23 nt, Human
agugcccagaacuggacucagga

SEQ ID NO: 2108773 - RNA, 13 nt, Human
agugccccaccug

SEQ ID NO: 2108774 - RNA, 14 nt, Human
agugccccaccugc

SEQ ID NO: 2108775 - RNA, 15 nt, Human
agugccccaccugcc

SEQ ID NO: 2108776 - RNA, 16 nt, Human
agugccccaccugcca

SEQ ID NO: 2108777 - RNA, 17 nt, Human
agugccccaccugccac

SEQ ID NO: 2108778 - RNA, 23 nt, Human
agugccccaccugccacuaggcu

SEQ ID NO: 2108779 - RNA, 14 nt, Human
agugccaagcacag

SEQ ID NO: 2108780 - RNA, 20 nt, Human
agugccacugcccgagcugg

SEQ ID NO: 2108781 - RNA, 19 nt, Human
agugccaagcacagugccu

SEQ ID NO: 2108782 - RNA, 21 nt, Human
agugccacugcccgagcuggu

SEQ ID NO: 2108783 - RNA, 22 nt, Human
agugccacugcccgagcuggug

SEQ ID NO: 2108784 - RNA, 17 nt, Human
agugcaucucagcccac

SEQ ID NO: 2108785 - RNA, 16 nt, Human
agugcaucucagccca

SEQ ID NO: 2108786 - RNA, 15 nt, Human
agugcaugcucucug

SEQ ID NO: 2108787 - RNA, 16 nt, Human
agugcaugcucucugc

SEQ ID NO: 2108788 - RNA, 17 nt, Human
agugcaugcucucugca

SEQ ID NO: 2108789 - RNA, 20 nt, Human
agugcaugcucucugcagcc

SEQ ID NO: 2108790 - RNA, 22 nt, Human
agugcaugcucucugcagccag

SEQ ID NO: 2108791 - RNA, 14 nt, Human
agugcaucucagcc

SEQ ID NO: 2108792 - RNA, 15 nt, Human
agugcaucucagccc

SEQ ID NO: 2108793 - RNA, 11 nt, Human
agugcaggcug

SEQ ID NO: 2108794 - RNA, 13 nt, Human
agugcaggcuggc

SEQ ID NO: 2108795 - RNA, 15 nt, Human
agugcaggcuggcac

SEQ ID NO: 2108796 - RNA, 18 nt, Human
agugcagcugauuuuaac

SEQ ID NO: 2108797 - RNA, 20 nt, Human
agugcagcugauuuuaacaa

SEQ ID NO: 2108798 - RNA, 14 nt, Human
agugcagcugauuu

SEQ ID NO: 2108799 - RNA, 15 nt, Human
agugcagcugauuuu

SEQ ID NO: 2108800 - RNA, 16 nt, Human
agugcagcugauuuua

SEQ ID NO: 2108801 - RNA, 17 nt, Human
agugcagcugauuuuaa

SEQ ID NO: 2108802 - RNA, 17 nt, Human
agugcacccacucugcu

SEQ ID NO: 2108803 - RNA, 23 nt, Human
agugcagcccguguggccccuuc

SEQ ID NO: 2108804 - RNA, 24 nt, Human
agugcagcccguguggccccuuca

SEQ ID NO: 2108805 - RNA, 13 nt, Human
agugcacccacuc

SEQ ID NO: 2108806 - RNA, 15 nt, Human
ugugcucuggacagg

SEQ ID NO: 2108807 - RNA, 23 nt, Human
ugugcucugaucauccacugugc

SEQ ID NO: 2108808 - RNA, 12 nt, Human
ugugcucugauc

SEQ ID NO: 2108809 - RNA, 22 nt, Human
ugugcucugaucauccacugug

SEQ ID NO: 2108810 - RNA, 13 nt, Human
ugugccucugccu

SEQ ID NO: 2108811 - RNA, 12 nt, Human
ugugccucugcc

SEQ ID NO: 2108812 - RNA, 19 nt, Human
agucucacuguugcccagg

SEQ ID NO: 2108813 - RNA, 18 nt, Human
agucucacuguugcccag

SEQ ID NO: 2108814 - RNA, 20 nt, Human
agucucacuguugcccaggc

SEQ ID NO: 2108815 - RNA, 14 nt, Human
agucucacuccccu

SEQ ID NO: 2108816 - RNA, 16 nt, Human
agucucacuccccucc

SEQ ID NO: 2108817 - RNA, 21 nt, Human
agucucacuccccuccuuucc

SEQ ID NO: 2108818 - RNA, 21 nt, Human
agucucacuguugcccaggcu

SEQ ID NO: 2108819 - RNA, 19 nt, Human
ugugcucuggacaggcaug

SEQ ID NO: 2108820 - RNA, 18 nt, Human
ugugcucuggacaggcau

SEQ ID NO: 2108821 - RNA, 16 nt, Human
ugugcucuggacaggc

SEQ ID NO: 2108822 - RNA, 19 nt, Human
uguggagagugcaacagua

SEQ ID NO: 2108823 - RNA, 20 nt, Human
uguggagcacaaaagccucu

SEQ ID NO: 2108824 - RNA, 16 nt, Human
uguggagcccgcaccc

SEQ ID NO: 2108825 - RNA, 18 nt, Human
uguggagcccgcaccccc

SEQ ID NO: 2108826 - RNA, 19 nt, Human
uguggagcccgcaccccca

SEQ ID NO: 2108827 - RNA, 22 nt, Human
uguggcaaagccuucauugccu

SEQ ID NO: 2108828 - RNA, 14 nt, Human
uguggcacauuuuu

SEQ ID NO: 2108829 - RNA, 15 nt, Human
uguugcccaggcugg

SEQ ID NO: 2108830 - RNA, 14 nt, Human
uguugcccaggcug

SEQ ID NO: 2108831 - RNA, 21 nt, Human
uguugcccaggcuggagugca

SEQ ID NO: 2108832 - RNA, 13 nt, Human
uguugcccaggcu

SEQ ID NO: 2108833 - RNA, 19 nt, Human
uguucuugccacugcacuc

SEQ ID NO: 2108834 - RNA, 22 nt, Human
aguguuauuuucuuugaaauug

SEQ ID NO: 2108835 - RNA, 12 nt, Human
aguguguucuga

SEQ ID NO: 2108836 - RNA, 13 nt, Human
aguguguucugau

SEQ ID NO: 2108837 - RNA, 17 nt, Human
aguguguucugauuaga

SEQ ID NO: 2108838 - RNA, 20 nt, Human
aguguguucugauuagaaau

SEQ ID NO: 2108839 - RNA, 21 nt, Human
aguguguucugauuagaaaug

SEQ ID NO: 2108840 - RNA, 19 nt, Human
aguguguuuccuucagugc

SEQ ID NO: 2108841 - RNA, 20 nt, Human
aguguguuuccuucagugca

SEQ ID NO: 2108842 - RNA, 21 nt, Human
aguguuaaaaaauuuuugaaa

SEQ ID NO: 2108843 - RNA, 15 nt, Human
aguuacucugaaggg

SEQ ID NO: 2108844 - RNA, 16 nt, Human
aguuacucugaagggc

SEQ ID NO: 2108845 - RNA, 17 nt, Human
aguuacuguuauagagg

SEQ ID NO: 2108846 - RNA, 14 nt, Human
aguuacuuccuauc

SEQ ID NO: 2108847 - RNA, 15 nt, Human
aguuacuuccuauca

SEQ ID NO: 2108848 - RNA, 19 nt, Human
aguuacuuugucagaggca

SEQ ID NO: 2108849 - RNA, 16 nt, Human
aguggaaccagcccag

SEQ ID NO: 2108850 - RNA, 15 nt, Human
aguggaaauguucua

SEQ ID NO: 2108851 - RNA, 22 nt, Human
aguggaaagacagcuucucauc

SEQ ID NO: 2108852 - RNA, 22 nt, Human
aguggacuuuccacccccuccc

SEQ ID NO: 2108853 - RNA, 17 nt, Human
aguggacuuuccacccc

SEQ ID NO: 2108854 - RNA, 18 nt, Human
aguggacuuuccaccccc

SEQ ID NO: 2108855 - RNA, 19 nt, Human
aguggacuuuccacccccu

SEQ ID NO: 2108856 - RNA, 20 nt, Human
aguggacuuuccacccccuc

SEQ ID NO: 2108857 - RNA, 16 nt, Human
aguggaagaagaaaac

SEQ ID NO: 2108858 - RNA, 12 nt, Human
aguggaaggaaa

SEQ ID NO: 2108859 - RNA, 13 nt, Human
aguggaaggaaag

SEQ ID NO: 2108860 - RNA, 15 nt, Human
aguggaaggaaagau

SEQ ID NO: 2108861 - RNA, 15 nt, Human
aguggacuuuccacc

SEQ ID NO: 2108862 - RNA, 23 nt, Human
aguggagguuaaggcugaggaaa

SEQ ID NO: 2108863 - RNA, 22 nt, Human
aguggagguuaaggcugaggaa

SEQ ID NO: 2108864 - RNA, 14 nt, Human
aguggaggugcugc

SEQ ID NO: 2108865 - RNA, 12 nt, Human
aguggagaggga

SEQ ID NO: 2108866 - RNA, 15 nt, Human
aguggauagaugccc

SEQ ID NO: 2108867 - RNA, 21 nt, Human
aguggauagaugcccugcuag

SEQ ID NO: 2108868 - RNA, 21 nt, Human
agugugguagggacuuaaaaa

SEQ ID NO: 2108869 - RNA, 13 nt, Human
uguuauugaaaaa

SEQ ID NO: 2108870 - RNA, 14 nt, Human
uguuauugaaaaaa

SEQ ID NO: 2108871 - RNA, 16 nt, Human
uguuauugaaaaaaau

SEQ ID NO: 2108872 - RNA, 23 nt, Human
uguuauugaaaaaaauuggcauu

SEQ ID NO: 2108873 - RNA, 12 nt, Human
uguuauuauaua

SEQ ID NO: 2108874 - RNA, 14 nt, Human
uguuauuacauccu

SEQ ID NO: 2108875 - RNA, 17 nt, Human
uguuauuacauccuugu

SEQ ID NO: 2108876 - RNA, 20 nt, Human
uguuauuacauccuuguggc

SEQ ID NO: 2108877 - RNA, 22 nt, Human
uguuauuucuauuuuuguagaa

SEQ ID NO: 2108878 - RNA, 21 nt, Human
uguuauuucuauuuuuguaga

SEQ ID NO: 2108879 - RNA, 15 nt, Human
uguuauuuaaaugag

SEQ ID NO: 2108880 - RNA, 22 nt, Human
uguuccccuuugcuucauucaa

SEQ ID NO: 2108881 - RNA, 18 nt, Human
uguucccucucccuguug

SEQ ID NO: 2108882 - RNA, 18 nt, Human
uguucuuaguuugcaguu

SEQ ID NO: 2108883 - RNA, 18 nt, Human
uguucuacucauauauau

SEQ ID NO: 2108884 - RNA, 20 nt, Human
uguuguuaaugaaaauguca

SEQ ID NO: 2108885 - RNA, 21 nt, Human
uguuguuaaugaaaaugucag

SEQ ID NO: 2108886 - RNA, 17 nt, Human
uguuguuaaugaaaaug

SEQ ID NO: 2108887 - RNA, 18 nt, Human
uguuguuaaugaaaaugu

SEQ ID NO: 2108888 - RNA, 21 nt, Human
uguuguguacguggagaggga

SEQ ID NO: 2108889 - RNA, 16 nt, Human
uguugugguuuguugc

SEQ ID NO: 2108890 - RNA, 15 nt, Human
uguugguauuuaucu

SEQ ID NO: 2108891 - RNA, 18 nt, Human
uguugguauuuaucuauu

SEQ ID NO: 2108892 - RNA, 14 nt, Human
aguucacuugcagu

SEQ ID NO: 2108893 - RNA, 18 nt, Human
uguugugaagauguuugc

SEQ ID NO: 2108894 - RNA, 14 nt, Human
uguuuauuuuuaua

SEQ ID NO: 2108895 - RNA, 15 nt, Human
uguuuauuuuuauau

SEQ ID NO: 2108896 - RNA, 22 nt, Human
uguuuauuuuuauauagcuuga

SEQ ID NO: 2108897 - RNA, 23 nt, Human
uguuuauuuuuauauagcuugaa

SEQ ID NO: 2108898 - RNA, 24 nt, Human
uguuuauggccucagcugccucac

SEQ ID NO: 2108899 - RNA, 14 nt, Human
uguuuaugagccag

SEQ ID NO: 2108900 - RNA, 16 nt, Human
uguuuaugagccagac

SEQ ID NO: 2108901 - RNA, 21 nt, Human
uguuuaugagccagacaaaug

SEQ ID NO: 2108902 - RNA, 21 nt, Human
uguuuaugcaaggaaggaaag

SEQ ID NO: 2108903 - RNA, 13 nt, Human
uguuuauggccuc

SEQ ID NO: 2108904 - RNA, 14 nt, Human
uguuuauggccuca

SEQ ID NO: 2108905 - RNA, 15 nt, Human
uguuuauggccucag

SEQ ID NO: 2108906 - RNA, 23 nt, Human
uguuuauggccucagcugccuca

SEQ ID NO: 2108907 - RNA, 13 nt, Human
aguucaaggacca

SEQ ID NO: 2108908 - RNA, 15 nt, Human
aguucaaggaccaac

SEQ ID NO: 2108909 - RNA, 16 nt, Human
aguucaauucucauuu

SEQ ID NO: 2108910 - RNA, 17 nt, Human
aguuauauaaagagaaa

SEQ ID NO: 2108911 - RNA, 19 nt, Human
aguuauauaaagagaaaau

SEQ ID NO: 2108912 - RNA, 20 nt, Human
aguuauauaaagagaaaauu

SEQ ID NO: 2108913 - RNA, 21 nt, Human
aguuauauaaagagaaaauug

SEQ ID NO: 2108914 - RNA, 22 nt, Human
aguuauauaaagagaaaauuga

SEQ ID NO: 2108915 - RNA, 16 nt, Human
aguucaagaccagccu

SEQ ID NO: 2108916 - RNA, 18 nt, Human
aguucaagaccagccugg

SEQ ID NO: 2108917 - RNA, 19 nt, Human
aguucaagaccagccuggc

SEQ ID NO: 2108918 - RNA, 15 nt, Human
aguucccauguuaaa

SEQ ID NO: 2108919 - RNA, 15 nt, Human
aguucccuacuuccu

SEQ ID NO: 2108920 - RNA, 23 nt, Human
aguuccucauuagcauuuugcua

SEQ ID NO: 2108921 - RNA, 17 nt, Human
aguucaccuauuucaaa

SEQ ID NO: 2108922 - RNA, 22 nt, Human
aguucaccuauuucaaaaauuu

SEQ ID NO: 2108923 - RNA, 16 nt, Human
aguucacuauaaaugg

SEQ ID NO: 2108924 - RNA, 21 nt, Human
aguucacuauaaaugguguuu

SEQ ID NO: 2108925 - RNA, 15 nt, Human
aguucuauuuaagug

SEQ ID NO: 2108926 - RNA, 14 nt, Human
aguucuauuucuau

SEQ ID NO: 2108927 - RNA, 22 nt, Human
aguucuauuucuaucccaaacu

SEQ ID NO: 2108928 - RNA, 12 nt, Human
aguuccucgccc

SEQ ID NO: 2108929 - RNA, 13 nt, Human
aguuccucgcccu

SEQ ID NO: 2108930 - RNA, 14 nt, Human
aguuccucgcccug

SEQ ID NO: 2108931 - RNA, 15 nt, Human
aguuccucgcccugg

SEQ ID NO: 2108932 - RNA, 18 nt, Human
aguuccucuagugcccuc

SEQ ID NO: 2108933 - RNA, 16 nt, Human
aguuccucgcccuggg

SEQ ID NO: 2108934 - RNA, 17 nt, Human
aguuccucgcccugggu

SEQ ID NO: 2108935 - RNA, 18 nt, Human
aguuccugaugacccagg

SEQ ID NO: 2108936 - RNA, 19 nt, Human
aguuccugaugacccaggc

SEQ ID NO: 2108937 - RNA, 15 nt, Human
aguuuuuauugcuug

SEQ ID NO: 2108938 - RNA, 17 nt, Human
aguuuuuauggggcuga

SEQ ID NO: 2108939 - RNA, 18 nt, Human
aguuuuuauuccuuguga

SEQ ID NO: 2108940 - RNA, 16 nt, Human
auaaaagcagcaucug

SEQ ID NO: 2108941 - RNA, 20 nt, Human
auaaaagcagcaucugcuaa

SEQ ID NO: 2108942 - RNA, 15 nt, Human
auaaaagcauaaaug

SEQ ID NO: 2108943 - RNA, 18 nt, Human
auaaaagcauaaaugcaa

SEQ ID NO: 2108944 - RNA, 20 nt, Human
auaaaagcauaaaugcaaac

SEQ ID NO: 2108945 - RNA, 14 nt, Human
uuaaaaaaaacuca

SEQ ID NO: 2108946 - RNA, 17 nt, Human
uuaagaaaauacaauaa

SEQ ID NO: 2108947 - RNA, 18 nt, Human
uuaagaaaauacaauaaa

SEQ ID NO: 2108948 - RNA, 19 nt, Human
uuaagaaaauacaauaaac

SEQ ID NO: 2108949 - RNA, 18 nt, Human
auaaaauaucauucagca

SEQ ID NO: 2108950 - RNA, 19 nt, Human
auaaaauaucauucagcaa

SEQ ID NO: 2108951 - RNA, 13 nt, Human
auaaaauaucauu

SEQ ID NO: 2108952 - RNA, 15 nt, Human
auaaaauaucauuca

SEQ ID NO: 2108953 - RNA, 16 nt, Human
auaaaauaucauucag

SEQ ID NO: 2108954 - RNA, 17 nt, Human
auaaaauaucauucagc

SEQ ID NO: 2108955 - RNA, 15 nt, Human
auaaaauauaauugu

SEQ ID NO: 2108956 - RNA, 12 nt, Human
aguuuuguaaau

SEQ ID NO: 2108957 - RNA, 15 nt, Human
aguuuuguaaauuuc

SEQ ID NO: 2108958 - RNA, 17 nt, Human
aguuuuuaccuaccaca

SEQ ID NO: 2108959 - RNA, 21 nt, Human
aguuuuuaccuaccacagugu

SEQ ID NO: 2108960 - RNA, 22 nt, Human
aguuuuuaccuaccacaguguc

SEQ ID NO: 2108961 - RNA, 23 nt, Human
aguuuuuaccuaccacagugucu

SEQ ID NO: 2108962 - RNA, 16 nt, Human
aguuuuuacuuucugu

SEQ ID NO: 2108963 - RNA, 19 nt, Human
aguuuugccagaacaguuu

SEQ ID NO: 2108964 - RNA, 16 nt, Human
aguuuugcauuuaugg

SEQ ID NO: 2108965 - RNA, 13 nt, Human
aguuuccucaggc

SEQ ID NO: 2108966 - RNA, 17 nt, Human
aguuuccccaccaguga

SEQ ID NO: 2108967 - RNA, 23 nt, Human
aguuuccccaccagugaaugaaa

SEQ ID NO: 2108968 - RNA, 22 nt, Human
aguuuccccaccagugaaugaa

SEQ ID NO: 2108969 - RNA, 22 nt, Human
aguuuccguuuccagguguuua

SEQ ID NO: 2108970 - RNA, 23 nt, Human
aguuuccguuuccagguguuuau

SEQ ID NO: 2108971 - RNA, 15 nt, Human
aguuuccuaaaaguu

SEQ ID NO: 2108972 - RNA, 17 nt, Human
aguuuccuaaaaguuca

SEQ ID NO: 2108973 - RNA, 13 nt, Human
aguuucauuuaug

SEQ ID NO: 2108974 - RNA, 21 nt, Human
aguuucauuuaugauacaaaa

SEQ ID NO: 2108975 - RNA, 15 nt, Human
aguuuccaagcaaau

SEQ ID NO: 2108976 - RNA, 17 nt, Human
aguuuccaagcaaaugu

SEQ ID NO: 2108977 - RNA, 18 nt, Human
aguuuccaagcaaauguu

SEQ ID NO: 2108978 - RNA, 19 nt, Human
aguuuccaagcaaauguua

SEQ ID NO: 2108979 - RNA, 20 nt, Human
aguuuccaagcaaauguuac

SEQ ID NO: 2108980 - RNA, 22 nt, Human
aguuuccaagcaaauguuacau

SEQ ID NO: 2108981 - RNA, 17 nt, Human
aguuuccucaggcugcu

SEQ ID NO: 2108982 - RNA, 21 nt, Human
uuaauugacuuauuuauauaa

SEQ ID NO: 2108983 - RNA, 14 nt, Human
uuaauugaaggaaa

SEQ ID NO: 2108984 - RNA, 15 nt, Human
uuaauugaaggaaag

SEQ ID NO: 2108985 - RNA, 19 nt, Human
uuaaugaaagacuguacaa

SEQ ID NO: 2108986 - RNA, 14 nt, Human
uuaaugaaaauguc

SEQ ID NO: 2108987 - RNA, 15 nt, Human
uuaaugaaaauguca

SEQ ID NO: 2108988 - RNA, 16 nt, Human
uuaaugaaaaugucag

SEQ ID NO: 2108989 - RNA, 18 nt, Human
uuaaugaaagacuguaca

SEQ ID NO: 2108990 - RNA, 22 nt, Human
uuaaucugguuuauuuuuguuc

SEQ ID NO: 2108991 - RNA, 12 nt, Human
uuaauauuugcu

SEQ ID NO: 2108992 - RNA, 19 nt, Human
uuaauauuugcugacagcu

SEQ ID NO: 2108993 - RNA, 20 nt, Human
uuaauauuugcugacagcug

SEQ ID NO: 2108994 - RNA, 16 nt, Human
uuaagaacacaaagcg

SEQ ID NO: 2108995 - RNA, 20 nt, Human
auaaaauaucauucagcaac

SEQ ID NO: 2108996 - RNA, 12 nt, Human
uuaagaaacacu

SEQ ID NO: 2108997 - RNA, 14 nt, Human
uuaagaaacacuga

SEQ ID NO: 2108998 - RNA, 22 nt, Human
uuaagaaagacuaucuaaaugu

SEQ ID NO: 2108999 - RNA, 21 nt, Human
uuaagggauggaaaaggaaga

SEQ ID NO: 2109000 - RNA, 16 nt, Human
uuaaggucucucuuug

SEQ ID NO: 2109001 - RNA, 17 nt, Human
uuaaggucucucuuugg

SEQ ID NO: 2109002 - RNA, 19 nt, Human
uuaagucuaaauauuuccu

SEQ ID NO: 2109003 - RNA, 17 nt, Human
uuaaguauuuauauauu

SEQ ID NO: 2109004 - RNA, 19 nt, Human
uuaaguauuuauauauuua

SEQ ID NO: 2109005 - RNA, 15 nt, Human
uuaaguauucaagaa

SEQ ID NO: 2109006 - RNA, 11 nt, Human
uuaaguauuua

SEQ ID NO: 2109007 - RNA, 16 nt, Human
uuaaguauuuauauau

SEQ ID NO: 2109008 - RNA, 18 nt, Human
aguuuaauugacuuauuu

SEQ ID NO: 2109009 - RNA, 14 nt, Human
aguuuaauugacuu

SEQ ID NO: 2109010 - RNA, 15 nt, Human
aguuuaauugacuua

SEQ ID NO: 2109011 - RNA, 13 nt, Human
uuaaaaaaaaucc

SEQ ID NO: 2109012 - RNA, 19 nt, Human
uuaaaaaaaauccuucuaa

SEQ ID NO: 2109013 - RNA, 20 nt, Human
uuaaaaaaaauccuucuaau

SEQ ID NO: 2109014 - RNA, 12 nt, Human
uuaaaaaaaaua

SEQ ID NO: 2109015 - RNA, 13 nt, Human
uuaaaaaaaauaa

SEQ ID NO: 2109016 - RNA, 14 nt, Human
uuaaaaaaaauaau

SEQ ID NO: 2109017 - RNA, 17 nt, Human
uuaaaaaaaauaauaaa

SEQ ID NO: 2109018 - RNA, 18 nt, Human
uuaaaaaaaauaauaaau

SEQ ID NO: 2109019 - RNA, 19 nt, Human
uuaaaaaaaauaauaaauu

SEQ ID NO: 2109020 - RNA, 14 nt, Human
uuaaaaaaaugaca

SEQ ID NO: 2109021 - RNA, 12 nt, Human
aguuuaaagcaa

SEQ ID NO: 2109022 - RNA, 13 nt, Human
aguuuaaaaugua

SEQ ID NO: 2109023 - RNA, 14 nt, Human
aguuuaaaauguau

SEQ ID NO: 2109024 - RNA, 15 nt, Human
aguuuaaaauguaua

SEQ ID NO: 2109025 - RNA, 17 nt, Human
aguugguaagcuuccag

SEQ ID NO: 2109026 - RNA, 22 nt, Human
aguugguaagcuuccaggaaaa

SEQ ID NO: 2109027 - RNA, 20 nt, Human
aguuggacagcaaaaccauu

SEQ ID NO: 2109028 - RNA, 14 nt, Human
aguugcugucauaa

SEQ ID NO: 2109029 - RNA, 19 nt, Human
aguuggagugaguguggcu

SEQ ID NO: 2109030 - RNA, 13 nt, Human
aguuggacugggu

SEQ ID NO: 2109031 - RNA, 17 nt, Human
aguuggacuggguugcg

SEQ ID NO: 2109032 - RNA, 13 nt, Human
aguugggcuuccu

SEQ ID NO: 2109033 - RNA, 19 nt, Human
aguugggcuuccucauagu

SEQ ID NO: 2109034 - RNA, 16 nt, Human
uguuucaaaauaaaaa

SEQ ID NO: 2109035 - RNA, 22 nt, Human
uuaaacaaauguaugauuacau

SEQ ID NO: 2109036 - RNA, 16 nt, Human
uuaaacaauuuauuuu

SEQ ID NO: 2109037 - RNA, 18 nt, Human
uuaaacaauuuauuuuau

SEQ ID NO: 2109038 - RNA, 13 nt, Human
uuaaaguauauau

SEQ ID NO: 2109039 - RNA, 16 nt, Human
uuaaaguauauauuua

SEQ ID NO: 2109040 - RNA, 13 nt, Human
uuaaacauugaag

SEQ ID NO: 2109041 - RNA, 15 nt, Human
uuaaacauugaagua

SEQ ID NO: 2109042 - RNA, 18 nt, Human
uuaaaguguauuauaaca

SEQ ID NO: 2109043 - RNA, 19 nt, Human
uuaaaguguauuauaacag

SEQ ID NO: 2109044 - RNA, 20 nt, Human
uuaaaguguauuauaacagu

SEQ ID NO: 2109045 - RNA, 18 nt, Human
uuaaagucagguccaauu

SEQ ID NO: 2109046 - RNA, 19 nt, Human
uuaaauagaguauaugcac

SEQ ID NO: 2109047 - RNA, 18 nt, Human
uuaacaauaacuacugug

SEQ ID NO: 2109048 - RNA, 19 nt, Human
uuaacaauaacuacugugu

SEQ ID NO: 2109049 - RNA, 20 nt, Human
uuaacaauaacuacuguguu

SEQ ID NO: 2109050 - RNA, 21 nt, Human
uuaacaauaacuacuguguuc

SEQ ID NO: 2109051 - RNA, 23 nt, Human
uuaacaauaacuacuguguuccu

SEQ ID NO: 2109052 - RNA, 18 nt, Human
uuaacaaugcgaauggua

SEQ ID NO: 2109053 - RNA, 21 nt, Human
uuaacaaugucuuguaagcaa

SEQ ID NO: 2109054 - RNA, 14 nt, Human
uuaacagagacaga

SEQ ID NO: 2109055 - RNA, 16 nt, Human
uuaacaauuccaaagg

SEQ ID NO: 2109056 - RNA, 14 nt, Human
uuaacacacauaaa

SEQ ID NO: 2109057 - RNA, 16 nt, Human
uuaacacacauaaagg

SEQ ID NO: 2109058 - RNA, 18 nt, Human
uuaacacacauaaaggau

SEQ ID NO: 2109059 - RNA, 18 nt, Human
auaaucucuccauucccg

SEQ ID NO: 2109060 - RNA, 22 nt, Human
auaaucggcccacagcucccac

SEQ ID NO: 2109061 - RNA, 20 nt, Human
auaaucuggacuccucuguc

SEQ ID NO: 2109062 - RNA, 19 nt, Human
auaaucuggacuccucugu

SEQ ID NO: 2109063 - RNA, 18 nt, Human
auaaucuggacuccucug

SEQ ID NO: 2109064 - RNA, 13 nt, Human
uuagaaaugcaaa

SEQ ID NO: 2109065 - RNA, 15 nt, Human
auaaugaaugaaaca

SEQ ID NO: 2109066 - RNA, 14 nt, Human
auaauucuuugauu

SEQ ID NO: 2109067 - RNA, 16 nt, Human
auaauucuuugauuau

SEQ ID NO: 2109068 - RNA, 22 nt, Human
auaauugacaggauuauuggaa

SEQ ID NO: 2109069 - RNA, 14 nt, Human
auaauucuuguaua

SEQ ID NO: 2109070 - RNA, 19 nt, Human
auaauucuuguauauuaug

SEQ ID NO: 2109071 - RNA, 12 nt, Human
auaauaaaguau

SEQ ID NO: 2109072 - RNA, 13 nt, Human
auaauaaaguauu

SEQ ID NO: 2109073 - RNA, 22 nt, Human
auaauaaaguauuccaccuuaa

SEQ ID NO: 2109074 - RNA, 23 nt, Human
auaauaaaguauuccaccuuaaa

SEQ ID NO: 2109075 - RNA, 20 nt, Human
auaagagagaacaacuacug

SEQ ID NO: 2109076 - RNA, 19 nt, Human
auaagagagccuugguuca

SEQ ID NO: 2109077 - RNA, 14 nt, Human
auaauaaacugucc

SEQ ID NO: 2109078 - RNA, 12 nt, Human
auaauaaacuuu

SEQ ID NO: 2109079 - RNA, 19 nt, Human
auaauaaacuuuuuugaaa

SEQ ID NO: 2109080 - RNA, 16 nt, Human
auaagaaugcugguuu

SEQ ID NO: 2109081 - RNA, 19 nt, Human
auaagaaugcugguuuucc

SEQ ID NO: 2109082 - RNA, 22 nt, Human
auaagaaugcugguuuuccuaa

SEQ ID NO: 2109083 - RNA, 21 nt, Human
auaagaaugcugguuuuccua

SEQ ID NO: 2109084 - RNA, 23 nt, Human
uuagacagucaaggaguggcuua

SEQ ID NO: 2109085 - RNA, 12 nt, Human
auaauagaagaa

SEQ ID NO: 2109086 - RNA, 13 nt, Human
auaauagaagaac

SEQ ID NO: 2109087 - RNA, 14 nt, Human
uuagcggagacgga

SEQ ID NO: 2109088 - RNA, 20 nt, Human
uuagccuguggcaguaaaga

SEQ ID NO: 2109089 - RNA, 22 nt, Human
uuagccuguggcaguaaagaga

SEQ ID NO: 2109090 - RNA, 21 nt, Human
uuagcaugacaagccccaggc

SEQ ID NO: 2109091 - RNA, 22 nt, Human
uuagcaugacaagccccaggca

SEQ ID NO: 2109092 - RNA, 24 nt, Human
uuagcaugacaagccccaggcagg

SEQ ID NO: 2109093 - RNA, 18 nt, Human
uuagccaagugugguaga

SEQ ID NO: 2109094 - RNA, 19 nt, Human
uuagccagguaaugugaau

SEQ ID NO: 2109095 - RNA, 15 nt, Human
uuagcaugcacaaag

SEQ ID NO: 2109096 - RNA, 17 nt, Human
uuagcauguguugaaaa

SEQ ID NO: 2109097 - RNA, 22 nt, Human
uuagcauuuaguccaaugucuu

SEQ ID NO: 2109098 - RNA, 13 nt, Human
uuagccacaaaau

SEQ ID NO: 2109099 - RNA, 14 nt, Human
auaauuguuuuuua

SEQ ID NO: 2109100 - RNA, 18 nt, Human
auaauuguuuuuuaucuu

SEQ ID NO: 2109101 - RNA, 19 nt, Human
auaauuguuuuuuaucuuu

SEQ ID NO: 2109102 - RNA, 21 nt, Human
auaauuguuuuuuaucuuuuc

SEQ ID NO: 2109103 - RNA, 23 nt, Human
auaauuguuuuuuaucuuuucua

SEQ ID NO: 2109104 - RNA, 15 nt, Human
auaauuuaaugcaug

SEQ ID NO: 2109105 - RNA, 20 nt, Human
uuagcaaagaguuaauauau

SEQ ID NO: 2109106 - RNA, 13 nt, Human
uuagcaaagaguu

SEQ ID NO: 2109107 - RNA, 19 nt, Human
uuagcaaagaguuaauaua

SEQ ID NO: 2109108 - RNA, 17 nt, Human
uuagcacaaaaaaaauu

SEQ ID NO: 2109109 - RNA, 18 nt, Human
uuagcaaauucuguuuuu

SEQ ID NO: 2109110 - RNA, 13 nt, Human
uuagggaagagaa

SEQ ID NO: 2109111 - RNA, 14 nt, Human
uuagggaagagaaa

SEQ ID NO: 2109112 - RNA, 16 nt, Human
uuagggaagagaaaca

SEQ ID NO: 2109113 - RNA, 17 nt, Human
uuagggaagagaaacag

SEQ ID NO: 2109114 - RNA, 18 nt, Human
uuagggaagagaaacagg

SEQ ID NO: 2109115 - RNA, 14 nt, Human
uuaguuucuuuggg

SEQ ID NO: 2109116 - RNA, 22 nt, Human
uuaguuugcaguuacacuaaaa

SEQ ID NO: 2109117 - RNA, 22 nt, Human
uuaguuuguaugccaagugaga

SEQ ID NO: 2109118 - RNA, 15 nt, Human
uuaguaaagaaauga

SEQ ID NO: 2109119 - RNA, 14 nt, Human
uuaguaaagaaaug

SEQ ID NO: 2109120 - RNA, 16 nt, Human
uuagguuuuguacaau

SEQ ID NO: 2109121 - RNA, 19 nt, Human
uuagguuuuuuuguauagu

SEQ ID NO: 2109122 - RNA, 14 nt, Human
uuagguuuaacaua

SEQ ID NO: 2109123 - RNA, 14 nt, Human
uuagguuuuguaca

SEQ ID NO: 2109124 - RNA, 22 nt, Human
uuagguuuuguacaauugaacu

SEQ ID NO: 2109125 - RNA, 14 nt, Human
auaaauagcuauau

SEQ ID NO: 2109126 - RNA, 15 nt, Human
auaaauagcuauauc

SEQ ID NO: 2109127 - RNA, 21 nt, Human
auaaauagcuauauccaugua

SEQ ID NO: 2109128 - RNA, 20 nt, Human
auaaauauuuauguagaugu

SEQ ID NO: 2109129 - RNA, 14 nt, Human
auaaauauuuaugu

SEQ ID NO: 2109130 - RNA, 14 nt, Human
auaaaucaauguca

SEQ ID NO: 2109131 - RNA, 16 nt, Human
auaaagguugacaaua

SEQ ID NO: 2109132 - RNA, 21 nt, Human
auaaagguugacaauaaaugu

SEQ ID NO: 2109133 - RNA, 22 nt, Human
auaaagguugacaauaaaugug

SEQ ID NO: 2109134 - RNA, 20 nt, Human
uuaauugugaauugauaaua

SEQ ID NO: 2109135 - RNA, 22 nt, Human
uuaauugugaauugauaauaaa

SEQ ID NO: 2109136 - RNA, 12 nt, Human
uuaauuguaaac

SEQ ID NO: 2109137 - RNA, 14 nt, Human
uuaauuguaaacug

SEQ ID NO: 2109138 - RNA, 15 nt, Human
uuaauuguaaacugu

SEQ ID NO: 2109139 - RNA, 18 nt, Human
uuaauuguaaacuguacu

SEQ ID NO: 2109140 - RNA, 16 nt, Human
auaaagguuauuuucu

SEQ ID NO: 2109141 - RNA, 19 nt, Human
auaaagguuauuuucuccu

SEQ ID NO: 2109142 - RNA, 20 nt, Human
auaaagguuauuuucuccug

SEQ ID NO: 2109143 - RNA, 20 nt, Human
auaaaggugguaugugugug

SEQ ID NO: 2109144 - RNA, 21 nt, Human
auaaaggugguaugugugugu

SEQ ID NO: 2109145 - RNA, 19 nt, Human
auaaaggugguaugugugu

SEQ ID NO: 2109146 - RNA, 14 nt, Human
auaacgaaguuggg

SEQ ID NO: 2109147 - RNA, 17 nt, Human
auaacgaaguugggcaa

SEQ ID NO: 2109148 - RNA, 12 nt, Human
auaacuuaaaaa

SEQ ID NO: 2109149 - RNA, 16 nt, Human
auaacuuaaaaaaaug

SEQ ID NO: 2109150 - RNA, 19 nt, Human
auaacuuaaaaaaaugaca

SEQ ID NO: 2109151 - RNA, 15 nt, Human
auaaaucaaugucac

SEQ ID NO: 2109152 - RNA, 11 nt, Human
auaaauuauuu

SEQ ID NO: 2109153 - RNA, 22 nt, Human
auaaauucagauauauuuuuca

SEQ ID NO: 2109154 - RNA, 12 nt, Human
auaaauucagau

SEQ ID NO: 2109155 - RNA, 13 nt, Human
auaaauucagaua

SEQ ID NO: 2109156 - RNA, 16 nt, Human
auaaauucagauauau

SEQ ID NO: 2109157 - RNA, 15 nt, Human
auaaauuccacugga

SEQ ID NO: 2109158 - RNA, 20 nt, Human
auaaccccagcucccuagga

SEQ ID NO: 2109159 - RNA, 16 nt, Human
auaaccccauucuuug

SEQ ID NO: 2109160 - RNA, 18 nt, Human
auaaccccauucuuugcu

SEQ ID NO: 2109161 - RNA, 15 nt, Human
uuacaggcaccgaga

SEQ ID NO: 2109162 - RNA, 17 nt, Human
uuacaggcaccgagaau

SEQ ID NO: 2109163 - RNA, 12 nt, Human
auaacuuaaaau

SEQ ID NO: 2109164 - RNA, 16 nt, Human
auaacuuaaaauauuu

SEQ ID NO: 2109165 - RNA, 18 nt, Human
uuacaggcaccgagaaug

SEQ ID NO: 2109166 - RNA, 24 nt, Human
uuacaggcaccgagaauguuguau

SEQ ID NO: 2109167 - RNA, 14 nt, Human
uuaccccucuacca

SEQ ID NO: 2109168 - RNA, 14 nt, Human
uuaccccuuagccu

SEQ ID NO: 2109169 - RNA, 16 nt, Human
uuacccagaaugucag

SEQ ID NO: 2109170 - RNA, 14 nt, Human
uuaccuucaauaaa

SEQ ID NO: 2109171 - RNA, 15 nt, Human
uuaccuucaauaaag

SEQ ID NO: 2109172 - RNA, 16 nt, Human
uuaccuucaauaaagu

SEQ ID NO: 2109173 - RNA, 17 nt, Human
uuaccuucaauaaagua

SEQ ID NO: 2109174 - RNA, 18 nt, Human
uuaccuucaauaaaguau

SEQ ID NO: 2109175 - RNA, 19 nt, Human
uuaccuucaauaaaguauc

SEQ ID NO: 2109176 - RNA, 19 nt, Human
uuaccuccugcccaggaga

SEQ ID NO: 2109177 - RNA, 12 nt, Human
uuaccuccugcc

SEQ ID NO: 2109178 - RNA, 13 nt, Human
uuaccuccugccc

SEQ ID NO: 2109179 - RNA, 14 nt, Human
uuaccuccugccca

SEQ ID NO: 2109180 - RNA, 15 nt, Human
uuaccuccugcccag

SEQ ID NO: 2109181 - RNA, 20 nt, Human
uuaccuaguagucauuucau

SEQ ID NO: 2109182 - RNA, 22 nt, Human
uuacccucaggcauaggccugg

SEQ ID NO: 2109183 - RNA, 16 nt, Human
uuaccccuuagccucc

SEQ ID NO: 2109184 - RNA, 16 nt, Human
uuaccuaccacagugu

SEQ ID NO: 2109185 - RNA, 17 nt, Human
uuaccuaccacaguguc

SEQ ID NO: 2109186 - RNA, 18 nt, Human
uuaccuaccacagugucu

SEQ ID NO: 2109187 - RNA, 21 nt, Human
uuaccuaccacagugucugua

SEQ ID NO: 2109188 - RNA, 17 nt, Human
uuagaaauugcauuucc

SEQ ID NO: 2109189 - RNA, 12 nt, Human
uuagaacacuau

SEQ ID NO: 2109190 - RNA, 13 nt, Human
uuagaacacuauu

SEQ ID NO: 2109191 - RNA, 14 nt, Human
uuagaacacuauuu

SEQ ID NO: 2109192 - RNA, 17 nt, Human
uuagaacacuauuuuca

SEQ ID NO: 2109193 - RNA, 19 nt, Human
uuagaacacuauuuucaga

SEQ ID NO: 2109194 - RNA, 20 nt, Human
uuagaacacuauuuucagaa

SEQ ID NO: 2109195 - RNA, 21 nt, Human
uuagaacacuauuuucagaau

SEQ ID NO: 2109196 - RNA, 18 nt, Human
uuagaaaugaccaauauu

SEQ ID NO: 2109197 - RNA, 17 nt, Human
uuagaaaugaccaauau

SEQ ID NO: 2109198 - RNA, 20 nt, Human
uuagacagagucucacuguu

SEQ ID NO: 2109199 - RNA, 13 nt, Human
uuagacagagucu

SEQ ID NO: 2109200 - RNA, 15 nt, Human
uuagaacagaaaaca

SEQ ID NO: 2109201 - RNA, 16 nt, Human
uuagaacagaaaacaa

SEQ ID NO: 2109202 - RNA, 17 nt, Human
uuagaacagaaaacaac

SEQ ID NO: 2109203 - RNA, 22 nt, Human
uuagaacagaaaacaacaaaaa

SEQ ID NO: 2109204 - RNA, 16 nt, Human
uuacucuccaaccugg

SEQ ID NO: 2109205 - RNA, 22 nt, Human
uuacucugaagggcaucaugca

SEQ ID NO: 2109206 - RNA, 19 nt, Human
uuacucuccaaccuggaca

SEQ ID NO: 2109207 - RNA, 13 nt, Human
uuacucugaaggg

SEQ ID NO: 2109208 - RNA, 14 nt, Human
uuacucuuguaaga

SEQ ID NO: 2109209 - RNA, 16 nt, Human
uuacucuuguaagauu

SEQ ID NO: 2109210 - RNA, 17 nt, Human
uuacucuuguaagauuu

SEQ ID NO: 2109211 - RNA, 18 nt, Human
uuacucuuguaagauuuu

SEQ ID NO: 2109212 - RNA, 21 nt, Human
uuacucuuguaagauuuugaa

SEQ ID NO: 2109213 - RNA, 22 nt, Human
uuacucuuguaagauuuugaaa

SEQ ID NO: 2109214 - RNA, 23 nt, Human
uuacucuuguaagauuuugaaaa

SEQ ID NO: 2109215 - RNA, 18 nt, Human
uuacugaagguaaaauug

SEQ ID NO: 2109216 - RNA, 19 nt, Human
uuacugaagguaaaauuga

SEQ ID NO: 2109217 - RNA, 20 nt, Human
uuacugaagguaaaauugaa

SEQ ID NO: 2109218 - RNA, 19 nt, Human
uuagaaacuuaucuuacaa

SEQ ID NO: 2109219 - RNA, 22 nt, Human
uuagaaagaagcccaauauuau

SEQ ID NO: 2109220 - RNA, 15 nt, Human
uuugcuucaaaaaca

SEQ ID NO: 2109221 - RNA, 15 nt, Human
uuugcuuauuguucc

SEQ ID NO: 2109222 - RNA, 16 nt, Human
uuugcuuauuguucca

SEQ ID NO: 2109223 - RNA, 17 nt, Human
uuugcuuauuguuccaa

SEQ ID NO: 2109224 - RNA, 19 nt, Human
uuugcuuauuguuccaaga

SEQ ID NO: 2109225 - RNA, 12 nt, Human
uuuggcccccga

SEQ ID NO: 2109226 - RNA, 20 nt, Human
uuuggcccccgagcuggggg

SEQ ID NO: 2109227 - RNA, 21 nt, Human
uuuggcccccgagcugggggc

SEQ ID NO: 2109228 - RNA, 13 nt, Human
uuugcuguagaag

SEQ ID NO: 2109229 - RNA, 21 nt, Human
uuugcuguagaagauggcacu

SEQ ID NO: 2109230 - RNA, 18 nt, Human
uuugcucagcuucuccaa

SEQ ID NO: 2109231 - RNA, 22 nt, Human
uuugggaggccaaggugggagg

SEQ ID NO: 2109232 - RNA, 17 nt, Human
uuugggaggcugaggcg

SEQ ID NO: 2109233 - RNA, 20 nt, Human
uuuggggagcagagacacua

SEQ ID NO: 2109234 - RNA, 17 nt, Human
uuuggccugcacuaauu

SEQ ID NO: 2109235 - RNA, 16 nt, Human
uuuggcuaguccuugu

SEQ ID NO: 2109236 - RNA, 14 nt, Human
uuuggcgggccaag

SEQ ID NO: 2109237 - RNA, 17 nt, Human
uuuggcgggccaaggac

SEQ ID NO: 2109238 - RNA, 19 nt, Human
uuuggcgggccaaggacug

SEQ ID NO: 2109239 - RNA, 22 nt, Human
uuugccauguuggccaggcugg

SEQ ID NO: 2109240 - RNA, 16 nt, Human
uuugcccaaccucagc

SEQ ID NO: 2109241 - RNA, 17 nt, Human
uuugcccaaccucagca

SEQ ID NO: 2109242 - RNA, 15 nt, Human
uuugcccauuuacac

SEQ ID NO: 2109243 - RNA, 18 nt, Human
uuugcccauuuacacuuu

SEQ ID NO: 2109244 - RNA, 19 nt, Human
uuugcccauuuacacuuuu

SEQ ID NO: 2109245 - RNA, 19 nt, Human
uuugcccugguuucacugg

SEQ ID NO: 2109246 - RNA, 13 nt, Human
uuugcuauugaca

SEQ ID NO: 2109247 - RNA, 20 nt, Human
uuugcuauugacaagucauu

SEQ ID NO: 2109248 - RNA, 23 nt, Human
uuugcuauugacaagucauuuua

SEQ ID NO: 2109249 - RNA, 16 nt, Human
uuugcucaccuggggu

SEQ ID NO: 2109250 - RNA, 17 nt, Human
uuugcucagaacacauu

SEQ ID NO: 2109251 - RNA, 19 nt, Human
uuugcucagaacacauucu

SEQ ID NO: 2109252 - RNA, 22 nt, Human
uuugggggaaaauuuagaaaua

SEQ ID NO: 2109253 - RNA, 15 nt, Human
auguaucaaugagua

SEQ ID NO: 2109254 - RNA, 17 nt, Human
auguauaaagaacaagg

SEQ ID NO: 2109255 - RNA, 15 nt, Human
auguauccaguacau

SEQ ID NO: 2109256 - RNA, 17 nt, Human
auguauccaguacauuu

SEQ ID NO: 2109257 - RNA, 20 nt, Human
auguauccaugggggcaggg

SEQ ID NO: 2109258 - RNA, 21 nt, Human
auguaucaggaaauauauaug

SEQ ID NO: 2109259 - RNA, 13 nt, Human
auguaucaggaaa

SEQ ID NO: 2109260 - RNA, 15 nt, Human
auguaucugagcagg

SEQ ID NO: 2109261 - RNA, 18 nt, Human
auguauggaauacagugu

SEQ ID NO: 2109262 - RNA, 20 nt, Human
auguauggaauacaguguua

SEQ ID NO: 2109263 - RNA, 21 nt, Human
auguauggaauacaguguuau

SEQ ID NO: 2109264 - RNA, 12 nt, Human
auguauguaaaa

SEQ ID NO: 2109265 - RNA, 13 nt, Human
auguauguaaaaa

SEQ ID NO: 2109266 - RNA, 14 nt, Human
auguauguaaaaau

SEQ ID NO: 2109267 - RNA, 15 nt, Human
auguauguaaaaaug

SEQ ID NO: 2109268 - RNA, 12 nt, Human
auguauguguaa

SEQ ID NO: 2109269 - RNA, 15 nt, Human
augucaggaacagaa

SEQ ID NO: 2109270 - RNA, 17 nt, Human
augucaggaacagaagg

SEQ ID NO: 2109271 - RNA, 19 nt, Human
augucaggaacagaaggau

SEQ ID NO: 2109272 - RNA, 20 nt, Human
augucaggaacagaaggaug

SEQ ID NO: 2109273 - RNA, 19 nt, Human
auguccauaucuaaccagu

SEQ ID NO: 2109274 - RNA, 17 nt, Human
augucccauuuucagac

SEQ ID NO: 2109275 - RNA, 21 nt, Human
augucccuacaccccuccccu

SEQ ID NO: 2109276 - RNA, 24 nt, Human
augucccuaccgagucucuucucc

SEQ ID NO: 2109277 - RNA, 20 nt, Human
augucccaacuuguaaaaau

SEQ ID NO: 2109278 - RNA, 14 nt, Human
augucccuugcugu

SEQ ID NO: 2109279 - RNA, 20 nt, Human
augucucaauaguaaaagau

SEQ ID NO: 2109280 - RNA, 16 nt, Human
auguccacagaugccu

SEQ ID NO: 2109281 - RNA, 20 nt, Human
auguccacagaugccuccac

SEQ ID NO: 2109282 - RNA, 21 nt, Human
uuuuaacaauaacuacugugu

SEQ ID NO: 2109283 - RNA, 22 nt, Human
uuuuaacaauaacuacuguguu

SEQ ID NO: 2109284 - RNA, 18 nt, Human
uuuuaacacacauaaagg

SEQ ID NO: 2109285 - RNA, 19 nt, Human
uuuuaacacacauaaagga

SEQ ID NO: 2109286 - RNA, 22 nt, Human
uuuuaaaacacuuccauaaucu

SEQ ID NO: 2109287 - RNA, 16 nt, Human
uuuuaaaacacuucca

SEQ ID NO: 2109288 - RNA, 22 nt, Human
uuuuaaaacaagaaaguuuccc

SEQ ID NO: 2109289 - RNA, 15 nt, Human
uuuuaaaaaucauaa

SEQ ID NO: 2109290 - RNA, 22 nt, Human
uuuuaaaaaucauaaacugugu

SEQ ID NO: 2109291 - RNA, 23 nt, Human
uuuuaaaaaucauaaacugugug

SEQ ID NO: 2109292 - RNA, 14 nt, Human
uuuuaaaaagcaaa

SEQ ID NO: 2109293 - RNA, 13 nt, Human
uuuguuugugcau

SEQ ID NO: 2109294 - RNA, 15 nt, Human
uuuuaagaggcaggg

SEQ ID NO: 2109295 - RNA, 16 nt, Human
uuuuaagaggcagggu

SEQ ID NO: 2109296 - RNA, 22 nt, Human
uuuuaagauaaauuauaaguua

SEQ ID NO: 2109297 - RNA, 13 nt, Human
uuuuaacauggaa

SEQ ID NO: 2109298 - RNA, 12 nt, Human
uuuuaacucacc

SEQ ID NO: 2109299 - RNA, 12 nt, Human
uuuuaacuagaa

SEQ ID NO: 2109300 - RNA, 16 nt, Human
uuuuaacuagaauuua

SEQ ID NO: 2109301 - RNA, 13 nt, Human
uuuuaacucaaua

SEQ ID NO: 2109302 - RNA, 23 nt, Human
uuuuaagcccaucaauuauagaa

SEQ ID NO: 2109303 - RNA, 15 nt, Human
uuuuaagcaaaauau

SEQ ID NO: 2109304 - RNA, 12 nt, Human
uuuuaagcauua

SEQ ID NO: 2109305 - RNA, 16 nt, Human
uuuuaagcauuacucu

SEQ ID NO: 2109306 - RNA, 19 nt, Human
uuuuaagcauuacucuugu

SEQ ID NO: 2109307 - RNA, 22 nt, Human
uuuuaagcauuacucuuguaag

SEQ ID NO: 2109308 - RNA, 23 nt, Human
uuuuaagcauuacucuuguaaga

SEQ ID NO: 2109309 - RNA, 18 nt, Human
uuuuaagauuccuuuucu

SEQ ID NO: 2109310 - RNA, 21 nt, Human
uuuuaagauuccuuuucuugu

SEQ ID NO: 2109311 - RNA, 22 nt, Human
uuuuaagauuccuuuucuuguu

SEQ ID NO: 2109312 - RNA, 20 nt, Human
uuuuaaggguuuguggaaaa

SEQ ID NO: 2109313 - RNA, 12 nt, Human
uuuuaagcuguu

SEQ ID NO: 2109314 - RNA, 23 nt, Human
uuuuaaggguuuguggaaaauga

SEQ ID NO: 2109315 - RNA, 14 nt, Human
uuuuaaggcuucaa

SEQ ID NO: 2109316 - RNA, 17 nt, Human
uuuuaaguauuuauaua

SEQ ID NO: 2109317 - RNA, 18 nt, Human
uuuuaaguauuuauauau

SEQ ID NO: 2109318 - RNA, 17 nt, Human
uuuguaccaugguguga

SEQ ID NO: 2109319 - RNA, 13 nt, Human
uuuguagagccag

SEQ ID NO: 2109320 - RNA, 19 nt, Human
uuuguacauauguaaaaua

SEQ ID NO: 2109321 - RNA, 14 nt, Human
uuuguaccauggug

SEQ ID NO: 2109322 - RNA, 20 nt, Human
augucugcugaauaauaaac

SEQ ID NO: 2109323 - RNA, 22 nt, Human
augucuggagaauaauucuuug

SEQ ID NO: 2109324 - RNA, 18 nt, Human
augucuguagcuccucaa

SEQ ID NO: 2109325 - RNA, 19 nt, Human
augucuguagcuccucaac

SEQ ID NO: 2109326 - RNA, 16 nt, Human
augucuguagcuccuc

SEQ ID NO: 2109327 - RNA, 16 nt, Human
augucuguggccuugu

SEQ ID NO: 2109328 - RNA, 21 nt, Human
augucuguggccuuguucucu

SEQ ID NO: 2109329 - RNA, 22 nt, Human
uuugucgauauuuccaucauua

SEQ ID NO: 2109330 - RNA, 17 nt, Human
uuugucuacguuuaguu

SEQ ID NO: 2109331 - RNA, 21 nt, Human
uuugucuacguuuaguuuccg

SEQ ID NO: 2109332 - RNA, 17 nt, Human
uuugucugucuucauag

SEQ ID NO: 2109333 - RNA, 22 nt, Human
uuuguccuuggggacaucucau

SEQ ID NO: 2109334 - RNA, 16 nt, Human
uuuguuucuuccaaag

SEQ ID NO: 2109335 - RNA, 12 nt, Human
uuugugagagcg

SEQ ID NO: 2109336 - RNA, 16 nt, Human
auguuggccaggcugg

SEQ ID NO: 2109337 - RNA, 14 nt, Human
auguuggccaggcu

SEQ ID NO: 2109338 - RNA, 13 nt, Human
auguuggccaggc

SEQ ID NO: 2109339 - RNA, 12 nt, Human
auguugaauauu

SEQ ID NO: 2109340 - RNA, 22 nt, Human
auguugaaugcccacaggcaaa

SEQ ID NO: 2109341 - RNA, 18 nt, Human
auguugagccaggccugg

SEQ ID NO: 2109342 - RNA, 14 nt, Human
auguugagggaaca

SEQ ID NO: 2109343 - RNA, 20 nt, Human
auguugagggaacagacagg

SEQ ID NO: 2109344 - RNA, 20 nt, Human
uuuuagcaguucugcaaaua

SEQ ID NO: 2109345 - RNA, 11 nt, Human
uuuuagcaugu

SEQ ID NO: 2109346 - RNA, 21 nt, Human
uuuuagcaauuuauacaauau

SEQ ID NO: 2109347 - RNA, 22 nt, Human
uuuuagcauguguuugguucug

SEQ ID NO: 2109348 - RNA, 19 nt, Human
uuuuagccuaguucaucca

SEQ ID NO: 2109349 - RNA, 19 nt, Human
uuuuagaugguuacacugu

SEQ ID NO: 2109350 - RNA, 13 nt, Human
uuuuaguuuuagu

SEQ ID NO: 2109351 - RNA, 21 nt, Human
uuuuaaguuacacauuuuuca

SEQ ID NO: 2109352 - RNA, 22 nt, Human
uuuuaaguuacacauuuuucag

SEQ ID NO: 2109353 - RNA, 17 nt, Human
uuuuaaggaagaaaaau

SEQ ID NO: 2109354 - RNA, 14 nt, Human
auguuauagugaau

SEQ ID NO: 2109355 - RNA, 15 nt, Human
auguuauagugaauu

SEQ ID NO: 2109356 - RNA, 17 nt, Human
uuuuaagugcuuuguaa

SEQ ID NO: 2109357 - RNA, 19 nt, Human
uuuuaagugcuuuguaaug

SEQ ID NO: 2109358 - RNA, 19 nt, Human
uuuuaaguauuuauauauu

SEQ ID NO: 2109359 - RNA, 21 nt, Human
auguucaucauccuaagcuau

SEQ ID NO: 2109360 - RNA, 14 nt, Human
auguucauuguaau

SEQ ID NO: 2109361 - RNA, 21 nt, Human
auguucauuguaauguuacug

SEQ ID NO: 2109362 - RNA, 22 nt, Human
auguucauuguaauguuacuga

SEQ ID NO: 2109363 - RNA, 23 nt, Human
auguucauuguaauguuacugau

SEQ ID NO: 2109364 - RNA, 22 nt, Human
uuuucagauauaaaagacugac

SEQ ID NO: 2109365 - RNA, 19 nt, Human
uuuucagauauaaaagacu

SEQ ID NO: 2109366 - RNA, 21 nt, Human
uuuucagauauaaaagacuga

SEQ ID NO: 2109367 - RNA, 17 nt, Human
uuuucagauauaaaaga

SEQ ID NO: 2109368 - RNA, 14 nt, Human
uuuuauucaaggua

SEQ ID NO: 2109369 - RNA, 23 nt, Human
uuuuauucaagguaaaauucuaa

SEQ ID NO: 2109370 - RNA, 19 nt, Human
uuuuccagguuuaagcugu

SEQ ID NO: 2109371 - RNA, 11 nt, Human
uuuuccaugaa

SEQ ID NO: 2109372 - RNA, 14 nt, Human
uuuuccaugaaaac

SEQ ID NO: 2109373 - RNA, 16 nt, Human
uuuuccaugaaaacgu

SEQ ID NO: 2109374 - RNA, 18 nt, Human
uuuuccaugaaaaugcaa

SEQ ID NO: 2109375 - RNA, 19 nt, Human
uuuuccaugaaaaugcaac

SEQ ID NO: 2109376 - RNA, 14 nt, Human
uuuucaugugugau

SEQ ID NO: 2109377 - RNA, 20 nt, Human
uuuucauuccaugugcccag

SEQ ID NO: 2109378 - RNA, 21 nt, Human
uuuucauuccaugugcccagu

SEQ ID NO: 2109379 - RNA, 19 nt, Human
uuuuauaaaaaaaaugaaa

SEQ ID NO: 2109380 - RNA, 20 nt, Human
uuuuauaaaaaaaaugaaau

SEQ ID NO: 2109381 - RNA, 21 nt, Human
uuuuauaaaaaaaaugaaaug

SEQ ID NO: 2109382 - RNA, 20 nt, Human
uuuuauaaaauuaaagaaaa

SEQ ID NO: 2109383 - RNA, 21 nt, Human
uuuuauaaaauuaaagaaaau

SEQ ID NO: 2109384 - RNA, 22 nt, Human
uuuuauaaaauuaaagaaaaua

SEQ ID NO: 2109385 - RNA, 20 nt, Human
uuuuauaacuaguccuuuac

SEQ ID NO: 2109386 - RNA, 12 nt, Human
uuuuauaaauua

SEQ ID NO: 2109387 - RNA, 13 nt, Human
uuuuauaaauuaa

SEQ ID NO: 2109388 - RNA, 15 nt, Human
uuuuauaaauuaaau

SEQ ID NO: 2109389 - RNA, 16 nt, Human
uuuuauaaauuaaaua

SEQ ID NO: 2109390 - RNA, 19 nt, Human
uuuuaugccuuuuauuucu

SEQ ID NO: 2109391 - RNA, 12 nt, Human
uuuuauuaugcu

SEQ ID NO: 2109392 - RNA, 21 nt, Human
uuuuauuaugcuguauuuucu

SEQ ID NO: 2109393 - RNA, 18 nt, Human
uuuuaugugagagaaagu

SEQ ID NO: 2109394 - RNA, 22 nt, Human
auguuuacagguggacacacaa

SEQ ID NO: 2109395 - RNA, 13 nt, Human
auguuuauuuaua

SEQ ID NO: 2109396 - RNA, 14 nt, Human
auguugugaagaug

SEQ ID NO: 2109397 - RNA, 16 nt, Human
auguugugguuuguug

SEQ ID NO: 2109398 - RNA, 16 nt, Human
auguuguguucuaaua

SEQ ID NO: 2109399 - RNA, 16 nt, Human
uuuuccaucauaauuc

SEQ ID NO: 2109400 - RNA, 17 nt, Human
auuaaaaaauuuccagu

SEQ ID NO: 2109401 - RNA, 12 nt, Human
auuaaaaaauuu

SEQ ID NO: 2109402 - RNA, 19 nt, Human
auuaaaauaaauaaaugca

SEQ ID NO: 2109403 - RNA, 18 nt, Human
auguuuuucuucucccuc

SEQ ID NO: 2109404 - RNA, 17 nt, Human
auguuuuuguguauuug

SEQ ID NO: 2109405 - RNA, 17 nt, Human
auguuuuucuucucccu

SEQ ID NO: 2109406 - RNA, 18 nt, Human
auguuuucuuugcuuuaa

SEQ ID NO: 2109407 - RNA, 22 nt, Human
auuaacauugggaaaucuuaua

SEQ ID NO: 2109408 - RNA, 18 nt, Human
auuaaccagaaauccagu

SEQ ID NO: 2109409 - RNA, 15 nt, Human
auuaaccauagaugu

SEQ ID NO: 2109410 - RNA, 18 nt, Human
auuaaccacuucagcuga

SEQ ID NO: 2109411 - RNA, 20 nt, Human
auuaaccacuucagcugacu

SEQ ID NO: 2109412 - RNA, 17 nt, Human
auuaaccacuucagcug

SEQ ID NO: 2109413 - RNA, 19 nt, Human
auuaacauugggaaaucuu

SEQ ID NO: 2109414 - RNA, 21 nt, Human
auuaacauugggaaaucuuau

SEQ ID NO: 2109415 - RNA, 17 nt, Human
auuaaagcuaaaguauc

SEQ ID NO: 2109416 - RNA, 18 nt, Human
auuaaagcuaaaguaucu

SEQ ID NO: 2109417 - RNA, 16 nt, Human
auuaaccuggugcugg

SEQ ID NO: 2109418 - RNA, 17 nt, Human
auuaacuaaucuauugg

SEQ ID NO: 2109419 - RNA, 14 nt, Human
auuaaccuggugcu

SEQ ID NO: 2109420 - RNA, 17 nt, Human
auuaaccuggugcugga

SEQ ID NO: 2109421 - RNA, 15 nt, Human
auuaacuuagcaugu

SEQ ID NO: 2109422 - RNA, 13 nt, Human
auuaagaaagacu

SEQ ID NO: 2109423 - RNA, 14 nt, Human
auuaagaaagacua

SEQ ID NO: 2109424 - RNA, 23 nt, Human
auuccaugaauguaucaggaaau

SEQ ID NO: 2109425 - RNA, 17 nt, Human
auuccaugaauguauca

SEQ ID NO: 2109426 - RNA, 18 nt, Human
auuccaugaauguaucag

SEQ ID NO: 2109427 - RNA, 15 nt, Human
auuccaugaauguau

SEQ ID NO: 2109428 - RNA, 16 nt, Human
auuccaugaauguauc

SEQ ID NO: 2109429 - RNA, 12 nt, Human
auuccacuggac

SEQ ID NO: 2109430 - RNA, 16 nt, Human
auuccagaaaggauau

SEQ ID NO: 2109431 - RNA, 15 nt, Human
auuccaugugcccag

SEQ ID NO: 2109432 - RNA, 14 nt, Human
auuccaugugccca

SEQ ID NO: 2109433 - RNA, 16 nt, Human
auuccaugugcccagu

SEQ ID NO: 2109434 - RNA, 11 nt, Human
auucauaauaa

SEQ ID NO: 2109435 - RNA, 14 nt, Human
auuccaccuuaaau

SEQ ID NO: 2109436 - RNA, 16 nt, Human
auuccaccuuaaauua

SEQ ID NO: 2109437 - RNA, 17 nt, Human
auuccaccuuaaauuaa

SEQ ID NO: 2109438 - RNA, 18 nt, Human
auuccaccuuaaauuaaa

SEQ ID NO: 2109439 - RNA, 19 nt, Human
auuccaccuuaaauuaaac

SEQ ID NO: 2109440 - RNA, 20 nt, Human
auuccaccuuaaauuaaaca

SEQ ID NO: 2109441 - RNA, 22 nt, Human
auuccaccuuaaauuaaacaau

SEQ ID NO: 2109442 - RNA, 23 nt, Human
auuccaccuuaaauuaaacaauu

SEQ ID NO: 2109443 - RNA, 19 nt, Human
auucccuguacaauauuua

SEQ ID NO: 2109444 - RNA, 21 nt, Human
auucccuguacaauauuuaaa

SEQ ID NO: 2109445 - RNA, 21 nt, Human
auuccgacaaccgaugcucca

SEQ ID NO: 2109446 - RNA, 22 nt, Human
auuccccacccugaaagcccug

SEQ ID NO: 2109447 - RNA, 20 nt, Human
auuccccagauugcaacagg

SEQ ID NO: 2109448 - RNA, 15 nt, Human
auuccauugugugag

SEQ ID NO: 2109449 - RNA, 16 nt, Human
auuccauugugugagu

SEQ ID NO: 2109450 - RNA, 14 nt, Human
auuccccagccucu

SEQ ID NO: 2109451 - RNA, 20 nt, Human
auuccccagccucucuuccu

SEQ ID NO: 2109452 - RNA, 21 nt, Human
auuccccagccucucuuccua

SEQ ID NO: 2109453 - RNA, 16 nt, Human
auucaaaaguugaaau

SEQ ID NO: 2109454 - RNA, 14 nt, Human
auucagcucugcaa

SEQ ID NO: 2109455 - RNA, 18 nt, Human
auucagcucugcaagaau

SEQ ID NO: 2109456 - RNA, 21 nt, Human
auuauucaguuaagaaaaaaa

SEQ ID NO: 2109457 - RNA, 17 nt, Human
auuauucccuguacaau

SEQ ID NO: 2109458 - RNA, 21 nt, Human
auuauucccuguacaauauuu

SEQ ID NO: 2109459 - RNA, 22 nt, Human
auuauucccuguacaauauuua

SEQ ID NO: 2109460 - RNA, 13 nt, Human
auuauucugcagc

SEQ ID NO: 2109461 - RNA, 15 nt, Human
auuauuuauuaaauu

SEQ ID NO: 2109462 - RNA, 14 nt, Human
auuauuuuaaauua

SEQ ID NO: 2109463 - RNA, 16 nt, Human
auuauuuuaaauuaua

SEQ ID NO: 2109464 - RNA, 17 nt, Human
auuauuuuaaauuauaa

SEQ ID NO: 2109465 - RNA, 18 nt, Human
auuauuuuaaauuauaag

SEQ ID NO: 2109466 - RNA, 20 nt, Human
auuauuuuaaauuauaagga

SEQ ID NO: 2109467 - RNA, 22 nt, Human
auuauuuuaaauuauaaggacu

SEQ ID NO: 2109468 - RNA, 23 nt, Human
auuauuuuaaauuauaaggacug

SEQ ID NO: 2109469 - RNA, 15 nt, Human
auuauuuuaauuagg

SEQ ID NO: 2109470 - RNA, 18 nt, Human
auuauuuuaauuagguua

SEQ ID NO: 2109471 - RNA, 12 nt, Human
auuaucuuaaaa

SEQ ID NO: 2109472 - RNA, 18 nt, Human
auuaucuuuguaauuauu

SEQ ID NO: 2109473 - RNA, 15 nt, Human
auuaucuauuuguau

SEQ ID NO: 2109474 - RNA, 18 nt, Human
auuaucuuggaaagaaac

SEQ ID NO: 2109475 - RNA, 20 nt, Human
auuaucgggagcagugucuu

SEQ ID NO: 2109476 - RNA, 21 nt, Human
auuaucgggagcagugucuuc

SEQ ID NO: 2109477 - RNA, 22 nt, Human
auuaucgggaacaguguuuccc

SEQ ID NO: 2109478 - RNA, 16 nt, Human
auuaucgggagcagug

SEQ ID NO: 2109479 - RNA, 17 nt, Human
auuaucgggagcagugu

SEQ ID NO: 2109480 - RNA, 19 nt, Human
auuaucgggagcagugucu

SEQ ID NO: 2109481 - RNA, 17 nt, Human
auuaucggaagcagugc

SEQ ID NO: 2109482 - RNA, 19 nt, Human
auuaucggaagcagugccu

SEQ ID NO: 2109483 - RNA, 21 nt, Human
auuaucggaagcagugccuuc

SEQ ID NO: 2109484 - RNA, 16 nt, Human
auuaucgggaacagug

SEQ ID NO: 2109485 - RNA, 17 nt, Human
auuaucgggaacagugu

SEQ ID NO: 2109486 - RNA, 18 nt, Human
auuaucgggaacaguguu

SEQ ID NO: 2109487 - RNA, 19 nt, Human
auuaucgggaacaguguuu

SEQ ID NO: 2109488 - RNA, 20 nt, Human
auuaucgggaacaguguuuc

SEQ ID NO: 2109489 - RNA, 23 nt, Human
auuaucaagcuaauaaaauauca

SEQ ID NO: 2109490 - RNA, 15 nt, Human
auuaucaagcuaaua

SEQ ID NO: 2109491 - RNA, 16 nt, Human
auuaucaagcuaauaa

SEQ ID NO: 2109492 - RNA, 17 nt, Human
auuaucaagcuaauaaa

SEQ ID NO: 2109493 - RNA, 22 nt, Human
auuaucaagcuaauaaaauauc

SEQ ID NO: 2109494 - RNA, 18 nt, Human
auuaucgccuuuugacag

SEQ ID NO: 2109495 - RNA, 16 nt, Human
auuaucggaagcagug

SEQ ID NO: 2109496 - RNA, 19 nt, Human
auuaucaauuaccacacca

SEQ ID NO: 2109497 - RNA, 15 nt, Human
auuaucaugcaaaug

SEQ ID NO: 2109498 - RNA, 17 nt, Human
auuaucaugcaaaugcu

SEQ ID NO: 2109499 - RNA, 20 nt, Human
auuauaacuuaaaauauuuu

SEQ ID NO: 2109500 - RNA, 10 nt, Human
auuauaagga

SEQ ID NO: 2109501 - RNA, 12 nt, Human
auuauaaggacu

SEQ ID NO: 2109502 - RNA, 13 nt, Human
auuauaaggacug

SEQ ID NO: 2109503 - RNA, 14 nt, Human
auuauaaggacugc

SEQ ID NO: 2109504 - RNA, 15 nt, Human
auuauaaggacugca

SEQ ID NO: 2109505 - RNA, 16 nt, Human
auuauaaggacugcau

SEQ ID NO: 2109506 - RNA, 17 nt, Human
auuauaaggacugcaug

SEQ ID NO: 2109507 - RNA, 18 nt, Human
auuauaaggacugcaugg

SEQ ID NO: 2109508 - RNA, 21 nt, Human
auuagagcagaugaccccucc

SEQ ID NO: 2109509 - RNA, 14 nt, Human
auuagaaguguuaa

SEQ ID NO: 2109510 - RNA, 18 nt, Human
auuagaaguguuaacuua

SEQ ID NO: 2109511 - RNA, 20 nt, Human
auuagaaguguuaacuuagc

SEQ ID NO: 2109512 - RNA, 15 nt, Human
auuagaaauuagcug

SEQ ID NO: 2109513 - RNA, 20 nt, Human
auuagaaauuagcuguguga

SEQ ID NO: 2109514 - RNA, 23 nt, Human
auuagaaauuagcugugugaaau

SEQ ID NO: 2109515 - RNA, 17 nt, Human
auuagaaauuggcugga

SEQ ID NO: 2109516 - RNA, 15 nt, Human
auuagaaauaaagca

SEQ ID NO: 2109517 - RNA, 16 nt, Human
auuagaaauagacagu

SEQ ID NO: 2109518 - RNA, 22 nt, Human
auuagaaauagacaguauauuu

SEQ ID NO: 2109519 - RNA, 11 nt, Human
auuagaaauga

SEQ ID NO: 2109520 - RNA, 15 nt, Human
auuauaauuuaaugc

SEQ ID NO: 2109521 - RNA, 13 nt, Human
auuauaaugaauu

SEQ ID NO: 2109522 - RNA, 16 nt, Human
auuauaggccaaacug

SEQ ID NO: 2109523 - RNA, 22 nt, Human
uuuuuguuccacaaguuaaaua

SEQ ID NO: 2109524 - RNA, 15 nt, Human
auuaagauggauucu

SEQ ID NO: 2109525 - RNA, 20 nt, Human
auuaagauggauucucagau

SEQ ID NO: 2109526 - RNA, 23 nt, Human
auuaagauggauucucagauauu

SEQ ID NO: 2109527 - RNA, 12 nt, Human
auuaagaauguu

SEQ ID NO: 2109528 - RNA, 18 nt, Human
auuaagaauguucucaau

SEQ ID NO: 2109529 - RNA, 15 nt, Human
auuaaguaaacuaau

SEQ ID NO: 2109530 - RNA, 18 nt, Human
auuaaguaaacuaaugag

SEQ ID NO: 2109531 - RNA, 16 nt, Human
uuuuuguuuguuuugu

SEQ ID NO: 2109532 - RNA, 17 nt, Human
uuuuuguuguguucugu

SEQ ID NO: 2109533 - RNA, 24 nt, Human
auuaagauggauucucagauauuu

SEQ ID NO: 2109534 - RNA, 20 nt, Human
auuaauauggggaugcagca

SEQ ID NO: 2109535 - RNA, 16 nt, Human
auuaauauucauugua

SEQ ID NO: 2109536 - RNA, 16 nt, Human
auuaaugacagagcca

SEQ ID NO: 2109537 - RNA, 12 nt, Human
auuaccacugaa

SEQ ID NO: 2109538 - RNA, 14 nt, Human
auuaccacugaaga

SEQ ID NO: 2109539 - RNA, 18 nt, Human
auuaccacugaagauaga

SEQ ID NO: 2109540 - RNA, 19 nt, Human
auuaccacugaagauagaa

SEQ ID NO: 2109541 - RNA, 22 nt, Human
auuaccacugaagauagaagaa

SEQ ID NO: 2109542 - RNA, 20 nt, Human
auuaccagacgguucaccag

SEQ ID NO: 2109543 - RNA, 23 nt, Human
auuaccagacgguucaccagccu

SEQ ID NO: 2109544 - RNA, 21 nt, Human
auuaccuaguagucauuucau

SEQ ID NO: 2109545 - RNA, 13 nt, Human
auuaccucugaua

SEQ ID NO: 2109546 - RNA, 12 nt, Human
auuacucuugua

SEQ ID NO: 2109547 - RNA, 13 nt, Human
auuacucuuguaa

SEQ ID NO: 2109548 - RNA, 15 nt, Human
auuacucuuguaaga

SEQ ID NO: 2109549 - RNA, 16 nt, Human
auuacucuuguaagau

SEQ ID NO: 2109550 - RNA, 17 nt, Human
auuacucuuguaagauu

SEQ ID NO: 2109551 - RNA, 18 nt, Human
auuacucuuguaagauuu

SEQ ID NO: 2109552 - RNA, 19 nt, Human
auuacucuuguaagauuuu

SEQ ID NO: 2109553 - RNA, 21 nt, Human
auuacucuuguaagauuuuga

SEQ ID NO: 2109554 - RNA, 22 nt, Human
auuacucuuguaagauuuugaa

SEQ ID NO: 2109555 - RNA, 15 nt, Human
auuacucugaaauug

SEQ ID NO: 2109556 - RNA, 19 nt, Human
auuuacccuucuuuucuga

SEQ ID NO: 2109557 - RNA, 19 nt, Human
auuuacccagaaugucaga

SEQ ID NO: 2109558 - RNA, 23 nt, Human
auuuaauuuuuuugagacagagu

SEQ ID NO: 2109559 - RNA, 19 nt, Human
auuuaauuuuuuugagaca

SEQ ID NO: 2109560 - RNA, 20 nt, Human
auuuaacuuaacauucugua

SEQ ID NO: 2109561 - RNA, 13 nt, Human
auuuaacuggcuu

SEQ ID NO: 2109562 - RNA, 21 nt, Human
auuuaacuuaacauucuguaa

SEQ ID NO: 2109563 - RNA, 17 nt, Human
auuuaauuugccaaaau

SEQ ID NO: 2109564 - RNA, 21 nt, Human
auuuaauuugccaaaauaaug

SEQ ID NO: 2109565 - RNA, 22 nt, Human
auuuaauuugccaaaauaaugu

SEQ ID NO: 2109566 - RNA, 14 nt, Human
auuuaacccagcuc

SEQ ID NO: 2109567 - RNA, 19 nt, Human
auuuaaaggcuaccuuauu

SEQ ID NO: 2109568 - RNA, 21 nt, Human
auuuaaaggcuaccuuauugu

SEQ ID NO: 2109569 - RNA, 22 nt, Human
auuuaaaggcuaccuuauugua

SEQ ID NO: 2109570 - RNA, 13 nt, Human
auuuaaaacauua

SEQ ID NO: 2109571 - RNA, 19 nt, Human
auuuaaacaauaaaugugc

SEQ ID NO: 2109572 - RNA, 15 nt, Human
auuuaaaagacacug

SEQ ID NO: 2109573 - RNA, 14 nt, Human
auugucuuuauaug

SEQ ID NO: 2109574 - RNA, 17 nt, Human
auugucuuuauaugaac

SEQ ID NO: 2109575 - RNA, 20 nt, Human
auugucuuuauaugaacaua

SEQ ID NO: 2109576 - RNA, 13 nt, Human
auuguuugcuuau

SEQ ID NO: 2109577 - RNA, 14 nt, Human
auuguuugcuuauu

SEQ ID NO: 2109578 - RNA, 15 nt, Human
auuguuugcuuauug

SEQ ID NO: 2109579 - RNA, 16 nt, Human
auuguuugcuuauugu

SEQ ID NO: 2109580 - RNA, 18 nt, Human
auuguuugcuuauuguuc

SEQ ID NO: 2109581 - RNA, 22 nt, Human
auuguuugcuuauuguuccaag

SEQ ID NO: 2109582 - RNA, 19 nt, Human
auuguuugcuuauuguucc

SEQ ID NO: 2109583 - RNA, 21 nt, Human
auuguuugcuuauuguuccaa

SEQ ID NO: 2109584 - RNA, 23 nt, Human
auuguuugcuuauuguuccaaga

SEQ ID NO: 2109585 - RNA, 22 nt, Human
auuguuucauugcgaaucuuuu

SEQ ID NO: 2109586 - RNA, 23 nt, Human
auuggcuuuggguugcaggaccu

SEQ ID NO: 2109587 - RNA, 21 nt, Human
auuguauaaaaauagaagaau

SEQ ID NO: 2109588 - RNA, 16 nt, Human
auuggcuuuucaugcg

SEQ ID NO: 2109589 - RNA, 20 nt, Human
auugcgucuuagcagugauu

SEQ ID NO: 2109590 - RNA, 21 nt, Human
auugcgucuuagcagugauuu

SEQ ID NO: 2109591 - RNA, 19 nt, Human
auugcgccauugcacucca

SEQ ID NO: 2109592 - RNA, 14 nt, Human
auuguaucuagugc

SEQ ID NO: 2109593 - RNA, 15 nt, Human
auuguaucuagugca

SEQ ID NO: 2109594 - RNA, 16 nt, Human
auuguaucuagugcag

SEQ ID NO: 2109595 - RNA, 18 nt, Human
auuguaucuagugcagcu

SEQ ID NO: 2109596 - RNA, 19 nt, Human
auuguaucuagugcagcug

SEQ ID NO: 2109597 - RNA, 21 nt, Human
auuguaucuagugcagcugau

SEQ ID NO: 2109598 - RNA, 12 nt, Human
auugcaauagaa

SEQ ID NO: 2109599 - RNA, 17 nt, Human
auugcaauuuuaacaca

SEQ ID NO: 2109600 - RNA, 18 nt, Human
auugcacaaaauauaaag

SEQ ID NO: 2109601 - RNA, 16 nt, Human
auugcaaugaaggaaa

SEQ ID NO: 2109602 - RNA, 21 nt, Human
auugcaacaggcugggcuuca

SEQ ID NO: 2109603 - RNA, 16 nt, Human
auugcaacaggcuggg

SEQ ID NO: 2109604 - RNA, 19 nt, Human
auugcagcugggagaaggg

SEQ ID NO: 2109605 - RNA, 15 nt, Human
auugcaacaggcugg

SEQ ID NO: 2109606 - RNA, 18 nt, Human
auugacaggauuauugga

SEQ ID NO: 2109607 - RNA, 17 nt, Human
auugcauuuccugacag

SEQ ID NO: 2109608 - RNA, 16 nt, Human
auugcauuuccugaca

SEQ ID NO: 2109609 - RNA, 18 nt, Human
auugcauuuuuuaaaaca

SEQ ID NO: 2109610 - RNA, 19 nt, Human
auugcauuuuuuaaaacaa

SEQ ID NO: 2109611 - RNA, 20 nt, Human
auugcauuuuuuaaaacaag

SEQ ID NO: 2109612 - RNA, 21 nt, Human
auugcauuuuuuaaaacaaga

SEQ ID NO: 2109613 - RNA, 14 nt, Human
auugccaccaggag

SEQ ID NO: 2109614 - RNA, 15 nt, Human
auugccaccaggaga

SEQ ID NO: 2109615 - RNA, 21 nt, Human
auugccaccaggagaaccacu

SEQ ID NO: 2109616 - RNA, 14 nt, Human
auugccagugacau

SEQ ID NO: 2109617 - RNA, 14 nt, Human
auugccagugucuu

SEQ ID NO: 2109618 - RNA, 15 nt, Human
auugccagugucuuu

SEQ ID NO: 2109619 - RNA, 16 nt, Human
auugccagugucuuuc

SEQ ID NO: 2109620 - RNA, 18 nt, Human
auugccagugucuuucuu

SEQ ID NO: 2109621 - RNA, 20 nt, Human
auugccagugucuuucuuug

SEQ ID NO: 2109622 - RNA, 21 nt, Human
auugccagugucuuucuuugg

SEQ ID NO: 2109623 - RNA, 21 nt, Human
auugcccacgcuggagugcag

SEQ ID NO: 2109624 - RNA, 17 nt, Human
auugcccacgcuggagu

SEQ ID NO: 2109625 - RNA, 19 nt, Human
auugcggacagccacggcc

SEQ ID NO: 2109626 - RNA, 18 nt, Human
auugcggacagccacggc

SEQ ID NO: 2109627 - RNA, 16 nt, Human
auugcggacagccacg

SEQ ID NO: 2109628 - RNA, 11 nt, Human
auugcccuggu

SEQ ID NO: 2109629 - RNA, 18 nt, Human
auucucagaaucucaaau

SEQ ID NO: 2109630 - RNA, 20 nt, Human
auucucagaaucucaaauaa

SEQ ID NO: 2109631 - RNA, 23 nt, Human
auucucagauauuuauauuuuua

SEQ ID NO: 2109632 - RNA, 17 nt, Human
auucucacuccaccacc

SEQ ID NO: 2109633 - RNA, 16 nt, Human
auucucagauauuuau

SEQ ID NO: 2109634 - RNA, 14 nt, Human
auucucacuccacc

SEQ ID NO: 2109635 - RNA, 15 nt, Human
auucucacuccacca

SEQ ID NO: 2109636 - RNA, 16 nt, Human
auucucacuccaccac

SEQ ID NO: 2109637 - RNA, 14 nt, Human
auucucagaaucuc

SEQ ID NO: 2109638 - RNA, 13 nt, Human
auucuacuuugag

SEQ ID NO: 2109639 - RNA, 16 nt, Human
auucuacuuugagugc

SEQ ID NO: 2109640 - RNA, 14 nt, Human
auuccguuuacauu

SEQ ID NO: 2109641 - RNA, 19 nt, Human
auuccguuuacauuuuaga

SEQ ID NO: 2109642 - RNA, 20 nt, Human
auuccguuuacauuuuagac

SEQ ID NO: 2109643 - RNA, 14 nt, Human
auugcuacuguccu

SEQ ID NO: 2109644 - RNA, 19 nt, Human
auuugaguguuuuaagaua

SEQ ID NO: 2109645 - RNA, 12 nt, Human
auuugaguguuu

SEQ ID NO: 2109646 - RNA, 22 nt, Human
auuugaguaaucugaucguucu

SEQ ID NO: 2109647 - RNA, 23 nt, Human
auuugaguaaucugaucguucuu

SEQ ID NO: 2109648 - RNA, 17 nt, Human
auuugagcagggcucag

SEQ ID NO: 2109649 - RNA, 13 nt, Human
auuugaggucaag

SEQ ID NO: 2109650 - RNA, 22 nt, Human
auuugaggucaaguaagaagac

SEQ ID NO: 2109651 - RNA, 19 nt, Human
auuugaaugaaaaauuuaa

SEQ ID NO: 2109652 - RNA, 17 nt, Human
auuugaauggguccauu

SEQ ID NO: 2109653 - RNA, 18 nt, Human
auuugaauggguccauuu

SEQ ID NO: 2109654 - RNA, 22 nt, Human
auuuguaaaaacagcauugcuu

SEQ ID NO: 2109655 - RNA, 15 nt, Human
auuuggugaauuuga

SEQ ID NO: 2109656 - RNA, 19 nt, Human
auuuggugaauuugaaucu

SEQ ID NO: 2109657 - RNA, 23 nt, Human
auuuguaaaaacagcauugcuuu

SEQ ID NO: 2109658 - RNA, 23 nt, Human
auuuggucaagauuuugaaugcu

SEQ ID NO: 2109659 - RNA, 21 nt, Human
auuugguaaauuaguauuuau

SEQ ID NO: 2109660 - RNA, 16 nt, Human
auuugggugguaagag

SEQ ID NO: 2109661 - RNA, 17 nt, Human
auuugggguugcaucag

SEQ ID NO: 2109662 - RNA, 22 nt, Human
auuugggguugcaucagaaaug

SEQ ID NO: 2109663 - RNA, 23 nt, Human
auuugggguugcaucagaaaugu

SEQ ID NO: 2109664 - RNA, 16 nt, Human
auuuggguaaaucaug

SEQ ID NO: 2109665 - RNA, 23 nt, Human
auuugggguagcuagaggaacca

SEQ ID NO: 2109666 - RNA, 21 nt, Human
auuugggguagcuagaggaac

SEQ ID NO: 2109667 - RNA, 15 nt, Human
auuuggaauucuguu

SEQ ID NO: 2109668 - RNA, 18 nt, Human
auuuagggaacugcuuga

SEQ ID NO: 2109669 - RNA, 15 nt, Human
auuuagggcaaggag

SEQ ID NO: 2109670 - RNA, 22 nt, Human
auuuaggcagauugaaaaggac

SEQ ID NO: 2109671 - RNA, 16 nt, Human
auuuagggaacugcuu

SEQ ID NO: 2109672 - RNA, 15 nt, Human
auuuagcuguaucaa

SEQ ID NO: 2109673 - RNA, 19 nt, Human
auuuagcuguaucaaacua

SEQ ID NO: 2109674 - RNA, 12 nt, Human
auuuaggaacuu

SEQ ID NO: 2109675 - RNA, 18 nt, Human
auuuagcguagcuaagug

SEQ ID NO: 2109676 - RNA, 14 nt, Human
auuuccugugucuu

SEQ ID NO: 2109677 - RNA, 18 nt, Human
auuuccuuaaacugugug

SEQ ID NO: 2109678 - RNA, 15 nt, Human
auuucuaacucugau

SEQ ID NO: 2109679 - RNA, 16 nt, Human
auuucuaacucugaug

SEQ ID NO: 2109680 - RNA, 18 nt, Human
auuucuaacucugaugua

SEQ ID NO: 2109681 - RNA, 19 nt, Human
auuucuaacucugauguaa

SEQ ID NO: 2109682 - RNA, 20 nt, Human
auuucuaacucugauguaaa

SEQ ID NO: 2109683 - RNA, 21 nt, Human
auuucuaacucugauguaaau

SEQ ID NO: 2109684 - RNA, 22 nt, Human
auuucuaacucugauguaaaug

SEQ ID NO: 2109685 - RNA, 23 nt, Human
auuucuaacucugauguaaauga

SEQ ID NO: 2109686 - RNA, 21 nt, Human
auuuuacuuuaaaaggagcca

SEQ ID NO: 2109687 - RNA, 18 nt, Human
auuuuacuacuguggaaa

SEQ ID NO: 2109688 - RNA, 20 nt, Human
auuuuauuacaucuuucaca

SEQ ID NO: 2109689 - RNA, 15 nt, Human
auuuuauuuuagcag

SEQ ID NO: 2109690 - RNA, 11 nt, Human
auuuuacaaaa

SEQ ID NO: 2109691 - RNA, 15 nt, Human
auuuuacaaaagaug

SEQ ID NO: 2109692 - RNA, 16 nt, Human
auuuuacaaaagaugu

SEQ ID NO: 2109693 - RNA, 17 nt, Human
auuuuacaaaagaugua

SEQ ID NO: 2109694 - RNA, 20 nt, Human
auuuuacaauaggugcuuau

SEQ ID NO: 2109695 - RNA, 13 nt, Human
auuuuacaauuga

SEQ ID NO: 2109696 - RNA, 18 nt, Human
auuuuaauuuaugaguuu

SEQ ID NO: 2109697 - RNA, 17 nt, Human
auuuuacaauugaaaug

SEQ ID NO: 2109698 - RNA, 21 nt, Human
auuuuacaauugaaaugacua

SEQ ID NO: 2109699 - RNA, 17 nt, Human
auuuuacuacuguggaa

SEQ ID NO: 2109700 - RNA, 22 nt, Human
auuuuacuacuguggaaaaaua

SEQ ID NO: 2109701 - RNA, 13 nt, Human
auuuuacugucuu

SEQ ID NO: 2109702 - RNA, 14 nt, Human
auuuuacugucuua

SEQ ID NO: 2109703 - RNA, 15 nt, Human
auuuuacugucuuaa

SEQ ID NO: 2109704 - RNA, 16 nt, Human
auuuuacugucuuaau

SEQ ID NO: 2109705 - RNA, 20 nt, Human
auuuuacugucuuaauuaag

SEQ ID NO: 2109706 - RNA, 23 nt, Human
auuuuacugucuuaauuaaguaa

SEQ ID NO: 2109707 - RNA, 18 nt, Human
auuuuacuucuagagaua

SEQ ID NO: 2109708 - RNA, 20 nt, Human
auuuguagaaggguuauauu

SEQ ID NO: 2109709 - RNA, 14 nt, Human
auuuguauaaaaug

SEQ ID NO: 2109710 - RNA, 16 nt, Human
auuuguaggguuucua

SEQ ID NO: 2109711 - RNA, 15 nt, Human
auuuguauauauaca

SEQ ID NO: 2109712 - RNA, 16 nt, Human
auuuguauauauacau

SEQ ID NO: 2109713 - RNA, 18 nt, Human
auuuguauauauacauaa

SEQ ID NO: 2109714 - RNA, 16 nt, Human
auuuguauguugugaa

SEQ ID NO: 2109715 - RNA, 18 nt, Human
auuuguauguugugaaga

SEQ ID NO: 2109716 - RNA, 16 nt, Human
auauaaaagacugacc

SEQ ID NO: 2109717 - RNA, 18 nt, Human
auauaaagagaaaauuga

SEQ ID NO: 2109718 - RNA, 19 nt, Human
auauaaagagaaaauugaa

SEQ ID NO: 2109719 - RNA, 20 nt, Human
auauaaagagaaaauugaau

SEQ ID NO: 2109720 - RNA, 21 nt, Human
auauaaagagaaaauugaauu

SEQ ID NO: 2109721 - RNA, 22 nt, Human
auauaaagagaaaauugaauuu

SEQ ID NO: 2109722 - RNA, 18 nt, Human
auauaaagcaucuaaacu

SEQ ID NO: 2109723 - RNA, 19 nt, Human
auauaaagcaucuaaacuu

SEQ ID NO: 2109724 - RNA, 20 nt, Human
auauaaagcaucuaaacuuu

SEQ ID NO: 2109725 - RNA, 18 nt, Human
auauaaauaaaacauuuu

SEQ ID NO: 2109726 - RNA, 15 nt, Human
auauaaauaaaacau

SEQ ID NO: 2109727 - RNA, 13 nt, Human
auauaacuaacaa

SEQ ID NO: 2109728 - RNA, 13 nt, Human
auauaacugccuu

SEQ ID NO: 2109729 - RNA, 20 nt, Human
auauaacugccuuaaaacuu

SEQ ID NO: 2109730 - RNA, 11 nt, Human
auauaaccaau

SEQ ID NO: 2109731 - RNA, 16 nt, Human
auauaaccaauguuua

SEQ ID NO: 2109732 - RNA, 17 nt, Human
auauaaccaauguuuaa

SEQ ID NO: 2109733 - RNA, 20 nt, Human
auauaaccaauguuuaaaaa

SEQ ID NO: 2109734 - RNA, 15 nt, Human
auauaucuaucuuau

SEQ ID NO: 2109735 - RNA, 14 nt, Human
auauaucuaucuua

SEQ ID NO: 2109736 - RNA, 20 nt, Human
auauauauguguguguaugu

SEQ ID NO: 2109737 - RNA, 18 nt, Human
auauauauguugauuucu

SEQ ID NO: 2109738 - RNA, 13 nt, Human
auauauauuuuaa

SEQ ID NO: 2109739 - RNA, 23 nt, Human
auauauauucuggcugauaaaag

SEQ ID NO: 2109740 - RNA, 13 nt, Human
auauauacacaca

SEQ ID NO: 2109741 - RNA, 14 nt, Human
auagugacgauacu

SEQ ID NO: 2109742 - RNA, 13 nt, Human
auagucuguguga

SEQ ID NO: 2109743 - RNA, 15 nt, Human
auaggccuucuugug

SEQ ID NO: 2109744 - RNA, 17 nt, Human
auaggccuucuugugau

SEQ ID NO: 2109745 - RNA, 11 nt, Human
auaggcucugc

SEQ ID NO: 2109746 - RNA, 12 nt, Human
auaggcucugca

SEQ ID NO: 2109747 - RNA, 13 nt, Human
auaggcucugcac

SEQ ID NO: 2109748 - RNA, 14 nt, Human
auaggcucugcaca

SEQ ID NO: 2109749 - RNA, 15 nt, Human
auaggcucugcacag

SEQ ID NO: 2109750 - RNA, 19 nt, Human
auaggcucugcacagaugg

SEQ ID NO: 2109751 - RNA, 22 nt, Human
auaggcucugcacagauggauu

SEQ ID NO: 2109752 - RNA, 17 nt, Human
auaguggcuuaaaacaa

SEQ ID NO: 2109753 - RNA, 17 nt, Human
auagugcuuaaaaauca

SEQ ID NO: 2109754 - RNA, 13 nt, Human
auaguggccagac

SEQ ID NO: 2109755 - RNA, 21 nt, Human
auaguggccagaccagagcuc

SEQ ID NO: 2109756 - RNA, 13 nt, Human
auagugugaggga

SEQ ID NO: 2109757 - RNA, 12 nt, Human
auaguguguucu

SEQ ID NO: 2109758 - RNA, 13 nt, Human
auaguguguucug

SEQ ID NO: 2109759 - RNA, 14 nt, Human
auaguguguucuga

SEQ ID NO: 2109760 - RNA, 15 nt, Human
auaguguaggcuuua

SEQ ID NO: 2109761 - RNA, 17 nt, Human
auaguguaggcuuuacu

SEQ ID NO: 2109762 - RNA, 20 nt, Human
auaguguaggcuuuacuuag

SEQ ID NO: 2109763 - RNA, 21 nt, Human
auagugguguuuuaaagagaa

SEQ ID NO: 2109764 - RNA, 17 nt, Human
auagugguucuuggaaa

SEQ ID NO: 2109765 - RNA, 18 nt, Human
auagugguucuuggaaaa

SEQ ID NO: 2109766 - RNA, 21 nt, Human
auagugguucuuggaaaaaug

SEQ ID NO: 2109767 - RNA, 15 nt, Human
auaguguguucugau

SEQ ID NO: 2109768 - RNA, 17 nt, Human
auaguguguucugauua

SEQ ID NO: 2109769 - RNA, 19 nt, Human
auaguguguucugauuaga

SEQ ID NO: 2109770 - RNA, 21 nt, Human
auaguguguucugauuagaaa

SEQ ID NO: 2109771 - RNA, 23 nt, Human
auaguguguucugauuagaaaug

SEQ ID NO: 2109772 - RNA, 22 nt, Human
auaguuggcuaggaccccucca

SEQ ID NO: 2109773 - RNA, 19 nt, Human
auaguugcuccgccucugc

SEQ ID NO: 2109774 - RNA, 14 nt, Human
auaguuuauugaca

SEQ ID NO: 2109775 - RNA, 13 nt, Human
auaguuuauugac

SEQ ID NO: 2109776 - RNA, 15 nt, Human
auaguuuacuauuuu

SEQ ID NO: 2109777 - RNA, 16 nt, Human
auaguuuacuauuuua

SEQ ID NO: 2109778 - RNA, 22 nt, Human
auaguuuacuauuuuacuucua

SEQ ID NO: 2109779 - RNA, 23 nt, Human
auauaaaaaccccaaacuguuga

SEQ ID NO: 2109780 - RNA, 22 nt, Human
auaguuaagcgugcauaaguua

SEQ ID NO: 2109781 - RNA, 15 nt, Human
auaguucaaagccaa

SEQ ID NO: 2109782 - RNA, 17 nt, Human
auaguucccauguuaaa

SEQ ID NO: 2109783 - RNA, 14 nt, Human
auaggccugggugc

SEQ ID NO: 2109784 - RNA, 22 nt, Human
auaggagagagaucaugagaaa

SEQ ID NO: 2109785 - RNA, 21 nt, Human
auaggaaaguauuuuuuuaag

SEQ ID NO: 2109786 - RNA, 15 nt, Human
auaggaacauaugaa

SEQ ID NO: 2109787 - RNA, 16 nt, Human
auaggaacauaugaaa

SEQ ID NO: 2109788 - RNA, 18 nt, Human
auaggaacauaugaaaau

SEQ ID NO: 2109789 - RNA, 21 nt, Human
auaggaacauaugaaaauaca

SEQ ID NO: 2109790 - RNA, 22 nt, Human
uucacauuaauauuugcugaca

SEQ ID NO: 2109791 - RNA, 16 nt, Human
uucaaguaauugugaa

SEQ ID NO: 2109792 - RNA, 20 nt, Human
uucaagucugugccuggagc

SEQ ID NO: 2109793 - RNA, 21 nt, Human
uucaagucugugccuggagcu

SEQ ID NO: 2109794 - RNA, 17 nt, Human
uucaagugaaucuaaaa

SEQ ID NO: 2109795 - RNA, 21 nt, Human
uucacacugcaagagccuugg

SEQ ID NO: 2109796 - RNA, 12 nt, Human
uucacacuucca

SEQ ID NO: 2109797 - RNA, 15 nt, Human
uucacacuuccacca

SEQ ID NO: 2109798 - RNA, 16 nt, Human
uucaagucaccuccuu

SEQ ID NO: 2109799 - RNA, 13 nt, Human
uucacaagcugcc

SEQ ID NO: 2109800 - RNA, 14 nt, Human
uucacaagcugccu

SEQ ID NO: 2109801 - RNA, 16 nt, Human
uucacaagcugccucc

SEQ ID NO: 2109802 - RNA, 17 nt, Human
uucacaagcugccuccc

SEQ ID NO: 2109803 - RNA, 18 nt, Human
uucacaagcugccucccu

SEQ ID NO: 2109804 - RNA, 19 nt, Human
uucacaagcugccucccug

SEQ ID NO: 2109805 - RNA, 13 nt, Human
uucacaauagaaa

SEQ ID NO: 2109806 - RNA, 20 nt, Human
uucacaaugaaaugcucucc

SEQ ID NO: 2109807 - RNA, 21 nt, Human
uucacacacaggcaacugagg

SEQ ID NO: 2109808 - RNA, 22 nt, Human
uucacaauggugcucauuucau

SEQ ID NO: 2109809 - RNA, 20 nt, Human
uucacacuuccaccagccug

SEQ ID NO: 2109810 - RNA, 18 nt, Human
uucacacuuccaccagcc

SEQ ID NO: 2109811 - RNA, 19 nt, Human
uucacacuuccaccagccu

SEQ ID NO: 2109812 - RNA, 18 nt, Human
uucacaugcaucaaguua

SEQ ID NO: 2109813 - RNA, 21 nt, Human
uucacauccuguguuucuagg

SEQ ID NO: 2109814 - RNA, 13 nt, Human
uucacaguuuuuc

SEQ ID NO: 2109815 - RNA, 13 nt, Human
uuauuuuuagaug

SEQ ID NO: 2109816 - RNA, 23 nt, Human
uuauuuuuguuucuuccaaagca

SEQ ID NO: 2109817 - RNA, 18 nt, Human
uuauuuuuuaaguauuua

SEQ ID NO: 2109818 - RNA, 18 nt, Human
uuauuuuuuacauuauua

SEQ ID NO: 2109819 - RNA, 14 nt, Human
uuauuuuuuacauu

SEQ ID NO: 2109820 - RNA, 13 nt, Human
uuauuuuuuauac

SEQ ID NO: 2109821 - RNA, 14 nt, Human
uuauuuuuuauaca

SEQ ID NO: 2109822 - RNA, 15 nt, Human
uuauuuuuuauacag

SEQ ID NO: 2109823 - RNA, 14 nt, Human
uuauuuuuuucuac

SEQ ID NO: 2109824 - RNA, 15 nt, Human
uuaguuuuaguugca

SEQ ID NO: 2109825 - RNA, 17 nt, Human
uuaguuuuaguugcaga

SEQ ID NO: 2109826 - RNA, 17 nt, Human
uuaguuuuuguaauuua

SEQ ID NO: 2109827 - RNA, 18 nt, Human
uuaguuuuuguaauuuau

SEQ ID NO: 2109828 - RNA, 19 nt, Human
uuaguuuuuguaauuuauu

SEQ ID NO: 2109829 - RNA, 17 nt, Human
uuauuuuuagacagagu

SEQ ID NO: 2109830 - RNA, 13 nt, Human
uuauuuuuauaca

SEQ ID NO: 2109831 - RNA, 14 nt, Human
uuauuuuuauacag

SEQ ID NO: 2109832 - RNA, 15 nt, Human
uuauuuuuauacagu

SEQ ID NO: 2109833 - RNA, 16 nt, Human
uuauuuuuauacagua

SEQ ID NO: 2109834 - RNA, 17 nt, Human
uuauuuuuauacaguag

SEQ ID NO: 2109835 - RNA, 20 nt, Human
uuauuuuuauacaguaguga

SEQ ID NO: 2109836 - RNA, 22 nt, Human
uuauuuuuauacaguagugaga

SEQ ID NO: 2109837 - RNA, 19 nt, Human
uuauuuuuauauagcuuga

SEQ ID NO: 2109838 - RNA, 18 nt, Human
uuauuuuuagacagaguc

SEQ ID NO: 2109839 - RNA, 14 nt, Human
uucaagaccagccu

SEQ ID NO: 2109840 - RNA, 17 nt, Human
uucaagaccagccuggc

SEQ ID NO: 2109841 - RNA, 18 nt, Human
uucaagaccuucucccca

SEQ ID NO: 2109842 - RNA, 23 nt, Human
uucaagcaucuccugaggaucag

SEQ ID NO: 2109843 - RNA, 17 nt, Human
uucaagcagauuggaga

SEQ ID NO: 2109844 - RNA, 21 nt, Human
uucaagcgauucuucugcuuc

SEQ ID NO: 2109845 - RNA, 12 nt, Human
uucaaggaauca

SEQ ID NO: 2109846 - RNA, 20 nt, Human
uucaagguaaaauucuaaau

SEQ ID NO: 2109847 - RNA, 14 nt, Human
uucaaaauaaaaac

SEQ ID NO: 2109848 - RNA, 17 nt, Human
uucaaaauaaaaaugag

SEQ ID NO: 2109849 - RNA, 21 nt, Human
uucaaaagaaucagaaacagg

SEQ ID NO: 2109850 - RNA, 16 nt, Human
uucaaaaguugaaauu

SEQ ID NO: 2109851 - RNA, 17 nt, Human
uucaaaaguugaaauua

SEQ ID NO: 2109852 - RNA, 18 nt, Human
uucauacacagccugggc

SEQ ID NO: 2109853 - RNA, 10 nt, Human
uucagugccc

SEQ ID NO: 2109854 - RNA, 14 nt, Human
uucagugcccacca

SEQ ID NO: 2109855 - RNA, 13 nt, Human
uucagaaauaugu

SEQ ID NO: 2109856 - RNA, 11 nt, Human
auauauguaug

SEQ ID NO: 2109857 - RNA, 12 nt, Human
auauauguaugu

SEQ ID NO: 2109858 - RNA, 15 nt, Human
auauauguauguaaa

SEQ ID NO: 2109859 - RNA, 16 nt, Human
auauauguauguaaaa

SEQ ID NO: 2109860 - RNA, 19 nt, Human
auauauguauguaaaaaug

SEQ ID NO: 2109861 - RNA, 21 nt, Human
uucaucccacuccaacucuuc

SEQ ID NO: 2109862 - RNA, 19 nt, Human
auauauguguguguauguu

SEQ ID NO: 2109863 - RNA, 16 nt, Human
auauauguguguguau

SEQ ID NO: 2109864 - RNA, 12 nt, Human
auauauucucuu

SEQ ID NO: 2109865 - RNA, 14 nt, Human
auauauucucuuug

SEQ ID NO: 2109866 - RNA, 16 nt, Human
auauauucucuuuggu

SEQ ID NO: 2109867 - RNA, 23 nt, Human
auauauucucuuugguguacaaa

SEQ ID NO: 2109868 - RNA, 20 nt, Human
auauauucuggcugauaaaa

SEQ ID NO: 2109869 - RNA, 22 nt, Human
auauauucuggcugauaaaaga

SEQ ID NO: 2109870 - RNA, 20 nt, Human
auauguaaaauaaaauuaug

SEQ ID NO: 2109871 - RNA, 17 nt, Human
auauguaacaagccacc

SEQ ID NO: 2109872 - RNA, 21 nt, Human
auaugauuaguaaagaaauga

SEQ ID NO: 2109873 - RNA, 12 nt, Human
auauguaaaaua

SEQ ID NO: 2109874 - RNA, 16 nt, Human
auauguaacaagccac

SEQ ID NO: 2109875 - RNA, 13 nt, Human
auauguaaaauaa

SEQ ID NO: 2109876 - RNA, 14 nt, Human
auauguaaaauaaa

SEQ ID NO: 2109877 - RNA, 15 nt, Human
auauguaaaauaaaa

SEQ ID NO: 2109878 - RNA, 16 nt, Human
auauguaaaauaaaau

SEQ ID NO: 2109879 - RNA, 15 nt, Human
auaugauauugcaua

SEQ ID NO: 2109880 - RNA, 16 nt, Human
auaugauauugcauau

SEQ ID NO: 2109881 - RNA, 14 nt, Human
auaugauauguaaa

SEQ ID NO: 2109882 - RNA, 16 nt, Human
auaugauauguaaaca

SEQ ID NO: 2109883 - RNA, 20 nt, Human
auaugagcuuuauguaauaa

SEQ ID NO: 2109884 - RNA, 23 nt, Human
auaugaaaauacaacuuaaauaa

SEQ ID NO: 2109885 - RNA, 23 nt, Human
auaugaggaugcagagucagcag

SEQ ID NO: 2109886 - RNA, 22 nt, Human
auauggguugcauuuggucaag

SEQ ID NO: 2109887 - RNA, 16 nt, Human
auaucugaaaauguau

SEQ ID NO: 2109888 - RNA, 17 nt, Human
auaucugaaaauguaug

SEQ ID NO: 2109889 - RNA, 20 nt, Human
auaucugaaaauguaugugu

SEQ ID NO: 2109890 - RNA, 16 nt, Human
auaugaaaauacaacu

SEQ ID NO: 2109891 - RNA, 18 nt, Human
auaugaaaaauaugauau

SEQ ID NO: 2109892 - RNA, 19 nt, Human
auaugaaaaauaugauauu

SEQ ID NO: 2109893 - RNA, 14 nt, Human
auaucuuuuuauug

SEQ ID NO: 2109894 - RNA, 15 nt, Human
auaucuuuuuauuga

SEQ ID NO: 2109895 - RNA, 16 nt, Human
auaucuuuuuauugau

SEQ ID NO: 2109896 - RNA, 21 nt, Human
auaucuuuuuauugaugugca

SEQ ID NO: 2109897 - RNA, 22 nt, Human
auaucuuuuuauugaugugcaa

SEQ ID NO: 2109898 - RNA, 13 nt, Human
auaugaaaaauau

SEQ ID NO: 2109899 - RNA, 14 nt, Human
auaugaaaaauaug

SEQ ID NO: 2109900 - RNA, 17 nt, Human
auaugaaaaauaugaua

SEQ ID NO: 2109901 - RNA, 22 nt, Human
uucauuuagagcuagucuuuca

SEQ ID NO: 2109902 - RNA, 12 nt, Human
uucauugugguu

SEQ ID NO: 2109903 - RNA, 17 nt, Human
uucauugugguuauuuu

SEQ ID NO: 2109904 - RNA, 19 nt, Human
uucauugugguuauuuuua

SEQ ID NO: 2109905 - RNA, 21 nt, Human
uucauugugguuauuuuuaua

SEQ ID NO: 2109906 - RNA, 23 nt, Human
uucauugugguuauuuuuauaca

SEQ ID NO: 2109907 - RNA, 24 nt, Human
uucauugugguuauuuuuauacag

SEQ ID NO: 2109908 - RNA, 13 nt, Human
uucauuguauaaa

SEQ ID NO: 2109909 - RNA, 17 nt, Human
uucauuguauaaaaaua

SEQ ID NO: 2109910 - RNA, 15 nt, Human
uuccaaggguacuaa

SEQ ID NO: 2109911 - RNA, 17 nt, Human
uuccaaggguacuaagg

SEQ ID NO: 2109912 - RNA, 12 nt, Human
uuccaagagcug

SEQ ID NO: 2109913 - RNA, 13 nt, Human
uuccaagagcuga

SEQ ID NO: 2109914 - RNA, 18 nt, Human
uucauuccuaacacagca

SEQ ID NO: 2109915 - RNA, 18 nt, Human
uucauuguaauguuacug

SEQ ID NO: 2109916 - RNA, 20 nt, Human
uucauuguaauguuacugau

SEQ ID NO: 2109917 - RNA, 18 nt, Human
auaugugcuugccucagu

SEQ ID NO: 2109918 - RNA, 16 nt, Human
uuccaagcaaauguua

SEQ ID NO: 2109919 - RNA, 19 nt, Human
uuccaagcaaauguuacau

SEQ ID NO: 2109920 - RNA, 13 nt, Human
uuccaaggagcug

SEQ ID NO: 2109921 - RNA, 18 nt, Human
uuccaaggagcugagaau

SEQ ID NO: 2109922 - RNA, 22 nt, Human
uuccaaggagcugagaauagaa

SEQ ID NO: 2109923 - RNA, 23 nt, Human
uuccaaggagcugagaauagaag

SEQ ID NO: 2109924 - RNA, 15 nt, Human
uuccaauccuggcuc

SEQ ID NO: 2109925 - RNA, 23 nt, Human
uuccaauccuggcucuguggcuu

SEQ ID NO: 2109926 - RNA, 19 nt, Human
uuccacaagauucccagag

SEQ ID NO: 2109927 - RNA, 20 nt, Human
uuccacaagauucccagaga

SEQ ID NO: 2109928 - RNA, 21 nt, Human
uuccacaagauucccagagac

SEQ ID NO: 2109929 - RNA, 19 nt, Human
uuccacaccuagcaucuca

SEQ ID NO: 2109930 - RNA, 18 nt, Human
uuccacacucaccucuaa

SEQ ID NO: 2109931 - RNA, 11 nt, Human
uuccaggcucc

SEQ ID NO: 2109932 - RNA, 16 nt, Human
uuccaggcugcauaga

SEQ ID NO: 2109933 - RNA, 19 nt, Human
uuccaggcugcauagaagg

SEQ ID NO: 2109934 - RNA, 20 nt, Human
uuccaggcugcauagaagga

SEQ ID NO: 2109935 - RNA, 21 nt, Human
uuccaggcugcauagaaggag

SEQ ID NO: 2109936 - RNA, 13 nt, Human
uuccaggaaaaag

SEQ ID NO: 2109937 - RNA, 17 nt, Human
uuccaggaaaaaggaca

SEQ ID NO: 2109938 - RNA, 12 nt, Human
uuccacccccuc

SEQ ID NO: 2109939 - RNA, 13 nt, Human
uuccacccccucc

SEQ ID NO: 2109940 - RNA, 14 nt, Human
uuccacccccuccc

SEQ ID NO: 2109941 - RNA, 15 nt, Human
uuccacccccucccu

SEQ ID NO: 2109942 - RNA, 18 nt, Human
uuccacccccucccuggc

SEQ ID NO: 2109943 - RNA, 20 nt, Human
uuccacccccucccuggccu

SEQ ID NO: 2109944 - RNA, 11 nt, Human
uuccacccugg

SEQ ID NO: 2109945 - RNA, 13 nt, Human
uuccacccuggaa

SEQ ID NO: 2109946 - RNA, 14 nt, Human
uuccauaguauauu

SEQ ID NO: 2109947 - RNA, 17 nt, Human
uuccauaguauauuaaa

SEQ ID NO: 2109948 - RNA, 18 nt, Human
uuccauaguauauuaaaa

SEQ ID NO: 2109949 - RNA, 22 nt, Human
uuccauaguauauuaaaaaugg

SEQ ID NO: 2109950 - RNA, 23 nt, Human
uuccauaguauauuaaaaauggu

SEQ ID NO: 2109951 - RNA, 18 nt, Human
uuccauaauuaugacagu

SEQ ID NO: 2109952 - RNA, 22 nt, Human
uuccauaauuaugacaguuaua

SEQ ID NO: 2109953 - RNA, 17 nt, Human
uuccauaaggaauguag

SEQ ID NO: 2109954 - RNA, 19 nt, Human
uuccauaaggaauguagcu

SEQ ID NO: 2109955 - RNA, 16 nt, Human
uuccauaauguauaaa

SEQ ID NO: 2109956 - RNA, 19 nt, Human
uuccauaauguauaaagaa

SEQ ID NO: 2109957 - RNA, 12 nt, Human
uuccauaauuau

SEQ ID NO: 2109958 - RNA, 13 nt, Human
uuccauaauuaug

SEQ ID NO: 2109959 - RNA, 14 nt, Human
uuccauaauuauga

SEQ ID NO: 2109960 - RNA, 16 nt, Human
uuccauaauuaugaca

SEQ ID NO: 2109961 - RNA, 23 nt, Human
uuccauaaucuggacuccucugu

SEQ ID NO: 2109962 - RNA, 22 nt, Human
uuccauaaucuggacuccucug

SEQ ID NO: 2109963 - RNA, 19 nt, Human
uuccauaaucuggacuccu

SEQ ID NO: 2109964 - RNA, 11 nt, Human
uuccaguuccc

SEQ ID NO: 2109965 - RNA, 20 nt, Human
uuccaguuuguuuauuacuu

SEQ ID NO: 2109966 - RNA, 17 nt, Human
uuccagguguuuauagu

SEQ ID NO: 2109967 - RNA, 23 nt, Human
uuccagguucugguuagcucagc

SEQ ID NO: 2109968 - RNA, 16 nt, Human
uuccaguggccuggcu

SEQ ID NO: 2109969 - RNA, 17 nt, Human
uuccaguggccuggcuc

SEQ ID NO: 2109970 - RNA, 22 nt, Human
uuccaguggccuggcuccgcug

SEQ ID NO: 2109971 - RNA, 21 nt, Human
uuccagugcaacacugaagcu

SEQ ID NO: 2109972 - RNA, 19 nt, Human
uuccagugcaacacugaag

SEQ ID NO: 2109973 - RNA, 15 nt, Human
uuccagugcaacacu

SEQ ID NO: 2109974 - RNA, 22 nt, Human
uuccagguagcugaaaggggaa

SEQ ID NO: 2109975 - RNA, 22 nt, Human
uuccaaguagaauugauuuccc

SEQ ID NO: 2109976 - RNA, 16 nt, Human
uucccaagcucugcuc

SEQ ID NO: 2109977 - RNA, 15 nt, Human
uucccaagcucugcu

SEQ ID NO: 2109978 - RNA, 14 nt, Human
uucccaagcucugc

SEQ ID NO: 2109979 - RNA, 13 nt, Human
uucccaagcucug

SEQ ID NO: 2109980 - RNA, 15 nt, Human
uucccaacugcaagu

SEQ ID NO: 2109981 - RNA, 19 nt, Human
uucccaacacuucagacug

SEQ ID NO: 2109982 - RNA, 18 nt, Human
uucccaagcucugcuccu

SEQ ID NO: 2109983 - RNA, 12 nt, Human
uucccaauaaau

SEQ ID NO: 2109984 - RNA, 14 nt, Human
uucccaauuaggaa

SEQ ID NO: 2109985 - RNA, 21 nt, Human
uucccaauagcacuuucauug

SEQ ID NO: 2109986 - RNA, 18 nt, Human
uucccaccaggcugcuca

SEQ ID NO: 2109987 - RNA, 15 nt, Human
aucccaccaacccuc

SEQ ID NO: 2109988 - RNA, 14 nt, Human
aucccacacccugg

SEQ ID NO: 2109989 - RNA, 15 nt, Human
aucccaagugccagu

SEQ ID NO: 2109990 - RNA, 18 nt, Human
auccauuucaucuauuuc

SEQ ID NO: 2109991 - RNA, 20 nt, Human
auccauuucaucuauuucug

SEQ ID NO: 2109992 - RNA, 21 nt, Human
auccauuucaucuauuucuga

SEQ ID NO: 2109993 - RNA, 22 nt, Human
auccauuucaucuauuucugag

SEQ ID NO: 2109994 - RNA, 23 nt, Human
auccauuucaucuauuucugaga

SEQ ID NO: 2109995 - RNA, 19 nt, Human
auccaaggagaaacagaga

SEQ ID NO: 2109996 - RNA, 22 nt, Human
auccaaggagaaacagagacag

SEQ ID NO: 2109997 - RNA, 13 nt, Human
auccaaggagaaa

SEQ ID NO: 2109998 - RNA, 14 nt, Human
auccaaggagaaac

SEQ ID NO: 2109999 - RNA, 16 nt, Human
auccaauaggaaugcu

SEQ ID NO: 2110000 - RNA, 14 nt, Human
auccaauccucacu

SEQ ID NO: 2110001 - RNA, 17 nt, Human
auccaauccucacuggg

SEQ ID NO: 2110002 - RNA, 18 nt, Human
auccaauccucacugggu

SEQ ID NO: 2110003 - RNA, 19 nt, Human
auccaauccucacugggug

SEQ ID NO: 2110004 - RNA, 20 nt, Human
auccaauccucacugggugg

SEQ ID NO: 2110005 - RNA, 19 nt, Human
auccaaucuuguuuccaaa

SEQ ID NO: 2110006 - RNA, 22 nt, Human
auccaaugcucaagaaacaacu

SEQ ID NO: 2110007 - RNA, 20 nt, Human
uucuguaguacuccuuaaga

SEQ ID NO: 2110008 - RNA, 21 nt, Human
uucuguaguacuccuuaagaa

SEQ ID NO: 2110009 - RNA, 17 nt, Human
uucuguaaaaugucugu

SEQ ID NO: 2110010 - RNA, 21 nt, Human
uucugguucuuguguuggcug

SEQ ID NO: 2110011 - RNA, 15 nt, Human
uucugguuagcucag

SEQ ID NO: 2110012 - RNA, 16 nt, Human
uucugguuagcucagc

SEQ ID NO: 2110013 - RNA, 19 nt, Human
uucugguuagcucagcccc

SEQ ID NO: 2110014 - RNA, 22 nt, Human
uucugguuagcucagccccagc

SEQ ID NO: 2110015 - RNA, 17 nt, Human
uucucuacucuagggaa

SEQ ID NO: 2110016 - RNA, 20 nt, Human
uucucuacagacuucuccag

SEQ ID NO: 2110017 - RNA, 15 nt, Human
uucucuuuaacucag

SEQ ID NO: 2110018 - RNA, 17 nt, Human
uucucuuuaacucagga

SEQ ID NO: 2110019 - RNA, 21 nt, Human
uucucuuuaacucaggacucc

SEQ ID NO: 2110020 - RNA, 16 nt, Human
uucucuuuucaaaaca

SEQ ID NO: 2110021 - RNA, 17 nt, Human
uucucuuugguguacaa

SEQ ID NO: 2110022 - RNA, 15 nt, Human
uucucuuuuccuuug

SEQ ID NO: 2110023 - RNA, 14 nt, Human
uucugaccauuuca

SEQ ID NO: 2110024 - RNA, 14 nt, Human
uucugaccacacuu

SEQ ID NO: 2110025 - RNA, 22 nt, Human
uucugaccacacuuccugucca

SEQ ID NO: 2110026 - RNA, 23 nt, Human
uucugacaucuuaguauuugcau

SEQ ID NO: 2110027 - RNA, 14 nt, Human
uucugacauuaaca

SEQ ID NO: 2110028 - RNA, 15 nt, Human
uucugacauuaacag

SEQ ID NO: 2110029 - RNA, 20 nt, Human
uucugacauuaacaguuuuc

SEQ ID NO: 2110030 - RNA, 22 nt, Human
uucugacauuaacaguuuucca

SEQ ID NO: 2110031 - RNA, 23 nt, Human
uucugacauuaacaguuuuccau

SEQ ID NO: 2110032 - RNA, 13 nt, Human
uucugaccacacu

SEQ ID NO: 2110033 - RNA, 21 nt, Human
uucugcagcaugaccugugac

SEQ ID NO: 2110034 - RNA, 22 nt, Human
uucugcagcaugaccugugacc

SEQ ID NO: 2110035 - RNA, 23 nt, Human
uucugcagcaugaccugugacca

SEQ ID NO: 2110036 - RNA, 20 nt, Human
uucugcagcaugaccuguga

SEQ ID NO: 2110037 - RNA, 15 nt, Human
uucugcaccuuaucu

SEQ ID NO: 2110038 - RNA, 16 nt, Human
uucugcaccuuaucuu

SEQ ID NO: 2110039 - RNA, 22 nt, Human
aucauuuauuuuuuacauuauu

SEQ ID NO: 2110040 - RNA, 19 nt, Human
aucauuuauuuuuuacauu

SEQ ID NO: 2110041 - RNA, 21 nt, Human
uucucuaacuucaaggcccau

SEQ ID NO: 2110042 - RNA, 14 nt, Human
uucuccucuccccu

SEQ ID NO: 2110043 - RNA, 11 nt, Human
aucauugcuua

SEQ ID NO: 2110044 - RNA, 18 nt, Human
aucauugauugucagcua

SEQ ID NO: 2110045 - RNA, 16 nt, Human
aucauuguaaacauua

SEQ ID NO: 2110046 - RNA, 15 nt, Human
uucuuacaaacaugu

SEQ ID NO: 2110047 - RNA, 17 nt, Human
uucuuaaacaaauguau

SEQ ID NO: 2110048 - RNA, 15 nt, Human
uucuuaaaauauauu

SEQ ID NO: 2110049 - RNA, 13 nt, Human
uucuuaaagaguu

SEQ ID NO: 2110050 - RNA, 13 nt, Human
uucuuccucugcu

SEQ ID NO: 2110051 - RNA, 12 nt, Human
uucuuccucugc

SEQ ID NO: 2110052 - RNA, 11 nt, Human
uucuuccucug

SEQ ID NO: 2110053 - RNA, 23 nt, Human
uucuuccucccucccucuuuccc

SEQ ID NO: 2110054 - RNA, 20 nt, Human
aucccaccucuggauaauuu

SEQ ID NO: 2110055 - RNA, 21 nt, Human
uucuguuuugccugaaguugg

SEQ ID NO: 2110056 - RNA, 12 nt, Human
uucuguuuuguu

SEQ ID NO: 2110057 - RNA, 17 nt, Human
uucuguuuugccugaag

SEQ ID NO: 2110058 - RNA, 21 nt, Human
uucuguuggccagugugacaa

SEQ ID NO: 2110059 - RNA, 14 nt, Human
uucuuaaaaaguua

SEQ ID NO: 2110060 - RNA, 21 nt, Human
uucuuaaaauauauuucagau

SEQ ID NO: 2110061 - RNA, 20 nt, Human
uucuguuuuucuaggccugg

SEQ ID NO: 2110062 - RNA, 21 nt, Human
uucuugaugacuggaauuuuu

SEQ ID NO: 2110063 - RNA, 22 nt, Human
uucuugaugacuggaauuuuua

SEQ ID NO: 2110064 - RNA, 18 nt, Human
uucuuccuuaaacuccug

SEQ ID NO: 2110065 - RNA, 14 nt, Human
uucuugcugguugu

SEQ ID NO: 2110066 - RNA, 14 nt, Human
uucuuggcuuuguu

SEQ ID NO: 2110067 - RNA, 14 nt, Human
uucuugggcccucc

SEQ ID NO: 2110068 - RNA, 23 nt, Human
uucuugcugguugucauuuuugc

SEQ ID NO: 2110069 - RNA, 15 nt, Human
uucuuucuuccucug

SEQ ID NO: 2110070 - RNA, 13 nt, Human
uucuuucuuccuc

SEQ ID NO: 2110071 - RNA, 15 nt, Human
uucuuugaaauuguu

SEQ ID NO: 2110072 - RNA, 18 nt, Human
uucuuuguuuuuagagac

SEQ ID NO: 2110073 - RNA, 21 nt, Human
uucuuuuaaaggggcagaaaa

SEQ ID NO: 2110074 - RNA, 16 nt, Human
uucuuuguuacaggca

SEQ ID NO: 2110075 - RNA, 19 nt, Human
auccuaaugaaugcauaaa

SEQ ID NO: 2110076 - RNA, 19 nt, Human
auccuaaucauccaaugcu

SEQ ID NO: 2110077 - RNA, 13 nt, Human
auccuaaugaaug

SEQ ID NO: 2110078 - RNA, 12 nt, Human
auccuaaugaau

SEQ ID NO: 2110079 - RNA, 21 nt, Human
auccuaggcauuugcugaaua

SEQ ID NO: 2110080 - RNA, 14 nt, Human
uugaaccaaaacau

SEQ ID NO: 2110081 - RNA, 15 nt, Human
uugaaccaaaacauu

SEQ ID NO: 2110082 - RNA, 18 nt, Human
uugaaccaaaacauuccg

SEQ ID NO: 2110083 - RNA, 13 nt, Human
uugaacacugggg

SEQ ID NO: 2110084 - RNA, 13 nt, Human
uugaacacaguau

SEQ ID NO: 2110085 - RNA, 14 nt, Human
uugaacacaguauu

SEQ ID NO: 2110086 - RNA, 18 nt, Human
uugaacacaguauuuucc

SEQ ID NO: 2110087 - RNA, 20 nt, Human
uugaacacaguauuuuccca

SEQ ID NO: 2110088 - RNA, 17 nt, Human
uugaacccaggaguuca

SEQ ID NO: 2110089 - RNA, 12 nt, Human
uugaacccagga

SEQ ID NO: 2110090 - RNA, 13 nt, Human
uugaacccaggag

SEQ ID NO: 2110091 - RNA, 19 nt, Human
auccuaaguuaccuuucua

SEQ ID NO: 2110092 - RNA, 21 nt, Human
uugaaaugaaaguauaacuga

SEQ ID NO: 2110093 - RNA, 21 nt, Human
uugaaauuuuuauuaaauuau

SEQ ID NO: 2110094 - RNA, 20 nt, Human
uugaacaaguuguuucauug

SEQ ID NO: 2110095 - RNA, 17 nt, Human
uugaaaguuuucagaac

SEQ ID NO: 2110096 - RNA, 15 nt, Human
uugaaauaauaaauc

SEQ ID NO: 2110097 - RNA, 16 nt, Human
uugaaauauaaugcaa

SEQ ID NO: 2110098 - RNA, 19 nt, Human
uugaaauauaaugcaaacc

SEQ ID NO: 2110099 - RNA, 16 nt, Human
uucuuuuuauuuucuu

SEQ ID NO: 2110100 - RNA, 16 nt, Human
uucuuuuuauuuuuua

SEQ ID NO: 2110101 - RNA, 15 nt, Human
uucuuuuuauuuucu

SEQ ID NO: 2110102 - RNA, 21 nt, Human
uucuuuuauaaaaaaaaugaa

SEQ ID NO: 2110103 - RNA, 12 nt, Human
uucuuuuaucac

SEQ ID NO: 2110104 - RNA, 19 nt, Human
uucuuuuacucaugaucuu

SEQ ID NO: 2110105 - RNA, 23 nt, Human
uucuuuucgccguggcugcggca

SEQ ID NO: 2110106 - RNA, 22 nt, Human
aucagacuagugacaagcuccu

SEQ ID NO: 2110107 - RNA, 18 nt, Human
aucagacuucacacugca

SEQ ID NO: 2110108 - RNA, 14 nt, Human
aucagacccuaccc

SEQ ID NO: 2110109 - RNA, 15 nt, Human
aucagacccuacccc

SEQ ID NO: 2110110 - RNA, 16 nt, Human
aucagacccuacccca

SEQ ID NO: 2110111 - RNA, 18 nt, Human
aucagacccuaccccacc

SEQ ID NO: 2110112 - RNA, 19 nt, Human
aucagacccuaccccacca

SEQ ID NO: 2110113 - RNA, 20 nt, Human
aucagacccuaccccaccac

SEQ ID NO: 2110114 - RNA, 13 nt, Human
uucucagcuccca

SEQ ID NO: 2110115 - RNA, 13 nt, Human
uucucagaaucuc

SEQ ID NO: 2110116 - RNA, 13 nt, Human
uucucagauauuu

SEQ ID NO: 2110117 - RNA, 14 nt, Human
uucucagauauuua

SEQ ID NO: 2110118 - RNA, 15 nt, Human
uucucagauauuuau

SEQ ID NO: 2110119 - RNA, 20 nt, Human
uucucagauauuuauauuuu

SEQ ID NO: 2110120 - RNA, 14 nt, Human
aucacuuuucugua

SEQ ID NO: 2110121 - RNA, 12 nt, Human
aucacuuugcuc

SEQ ID NO: 2110122 - RNA, 15 nt, Human
aucacuuugcucuga

SEQ ID NO: 2110123 - RNA, 20 nt, Human
uucuagagccugcuggaucu

SEQ ID NO: 2110124 - RNA, 21 nt, Human
uucuagagagggaauucucuu

SEQ ID NO: 2110125 - RNA, 21 nt, Human
uucuagaacaucccugccagc

SEQ ID NO: 2110126 - RNA, 22 nt, Human
uucuagaacaucccugccagcu

SEQ ID NO: 2110127 - RNA, 15 nt, Human
uucuagaauuuauca

SEQ ID NO: 2110128 - RNA, 21 nt, Human
uucuagaauuuaucacacuuc

SEQ ID NO: 2110129 - RNA, 21 nt, Human
uucucacugccaugccagcuu

SEQ ID NO: 2110130 - RNA, 20 nt, Human
uucgauacaccgggccugga

SEQ ID NO: 2110131 - RNA, 22 nt, Human
uucgagcuauauuuaaguauuc

SEQ ID NO: 2110132 - RNA, 21 nt, Human
uucgaugggcccaauucuuac

SEQ ID NO: 2110133 - RNA, 20 nt, Human
uucgaugggcccaauucuua

SEQ ID NO: 2110134 - RNA, 18 nt, Human
uucgaucucauucaguau

SEQ ID NO: 2110135 - RNA, 21 nt, Human
uucgcaggauucuuccucccu

SEQ ID NO: 2110136 - RNA, 19 nt, Human
uucgcccaaagccagacag

SEQ ID NO: 2110137 - RNA, 14 nt, Human
uucgccguggcugc

SEQ ID NO: 2110138 - RNA, 20 nt, Human
uucgccguggcugcggcacc

SEQ ID NO: 2110139 - RNA, 21 nt, Human
uucgccguggcugcggcaccc

SEQ ID NO: 2110140 - RNA, 14 nt, Human
uucgagaccagccu

SEQ ID NO: 2110141 - RNA, 18 nt, Human
uucgagaccaaccugacc

SEQ ID NO: 2110142 - RNA, 19 nt, Human
uucgagaccagccuggcca

SEQ ID NO: 2110143 - RNA, 17 nt, Human
uucgagaccagccuggc

SEQ ID NO: 2110144 - RNA, 16 nt, Human
uucgagaccagccugg

SEQ ID NO: 2110145 - RNA, 15 nt, Human
uucgagaccagccug

SEQ ID NO: 2110146 - RNA, 19 nt, Human
uucgacugugaccuguggg

SEQ ID NO: 2110147 - RNA, 22 nt, Human
uucgaagcucagcccacccccc

SEQ ID NO: 2110148 - RNA, 14 nt, Human
uucgaagcucagcc

SEQ ID NO: 2110149 - RNA, 16 nt, Human
uucgaagcucagccca

SEQ ID NO: 2110150 - RNA, 15 nt, Human
aucaauaaaauguga

SEQ ID NO: 2110151 - RNA, 16 nt, Human
aucaauaaaaugugau

SEQ ID NO: 2110152 - RNA, 17 nt, Human
aucaauaaaaugugauu

SEQ ID NO: 2110153 - RNA, 18 nt, Human
uucuaaccagagcaagcu

SEQ ID NO: 2110154 - RNA, 16 nt, Human
uucuaacucugaugua

SEQ ID NO: 2110155 - RNA, 17 nt, Human
uucuaacucugauguaa

SEQ ID NO: 2110156 - RNA, 23 nt, Human
uucuaacucugauguaaaugaag

SEQ ID NO: 2110157 - RNA, 15 nt, Human
uucuaacuccaguga

SEQ ID NO: 2110158 - RNA, 14 nt, Human
uucuaaggaauaug

SEQ ID NO: 2110159 - RNA, 18 nt, Human
uucuaaggaauaugagcu

SEQ ID NO: 2110160 - RNA, 22 nt, Human
uucuaaauaaaauauaauuguu

SEQ ID NO: 2110161 - RNA, 23 nt, Human
uucuaaauaaaauauaauuguuu

SEQ ID NO: 2110162 - RNA, 13 nt, Human
uucuaaauagcaa

SEQ ID NO: 2110163 - RNA, 13 nt, Human
uucgcuccugugu

SEQ ID NO: 2110164 - RNA, 13 nt, Human
uucccuacuuccu

SEQ ID NO: 2110165 - RNA, 23 nt, Human
uuccccuugcccagggcucagcc

SEQ ID NO: 2110166 - RNA, 22 nt, Human
uuccccuugcccagggcucagc

SEQ ID NO: 2110167 - RNA, 16 nt, Human
uucccuacuuccugug

SEQ ID NO: 2110168 - RNA, 14 nt, Human
uucccuacuuccug

SEQ ID NO: 2110169 - RNA, 17 nt, Human
uucccuacuuccuguga

SEQ ID NO: 2110170 - RNA, 18 nt, Human
uucccuagggcugggugu

SEQ ID NO: 2110171 - RNA, 12 nt, Human
uucccuaucacu

SEQ ID NO: 2110172 - RNA, 14 nt, Human
uuccccuguucacu

SEQ ID NO: 2110173 - RNA, 17 nt, Human
uuccccuguucacucua

SEQ ID NO: 2110174 - RNA, 13 nt, Human
uucccuaucuuuu

SEQ ID NO: 2110175 - RNA, 17 nt, Human
uucccuuuuacauacug

SEQ ID NO: 2110176 - RNA, 18 nt, Human
uucccuuuuacauacugc

SEQ ID NO: 2110177 - RNA, 19 nt, Human
uucccuuuuacauacugcu

SEQ ID NO: 2110178 - RNA, 21 nt, Human
uucccuuuuacauacugcugu

SEQ ID NO: 2110179 - RNA, 14 nt, Human
uucccccucuccca

SEQ ID NO: 2110180 - RNA, 18 nt, Human
uucccccucucccaguug

SEQ ID NO: 2110181 - RNA, 17 nt, Human
uucccccucucccaguu

SEQ ID NO: 2110182 - RNA, 15 nt, Human
uucccccucccaggg

SEQ ID NO: 2110183 - RNA, 17 nt, Human
uuccccggucccuugag

SEQ ID NO: 2110184 - RNA, 19 nt, Human
uuccccuaaccucauuccc

SEQ ID NO: 2110185 - RNA, 19 nt, Human
uuccccgcauuccaggcuc

SEQ ID NO: 2110186 - RNA, 16 nt, Human
uuccccggucccuuga

SEQ ID NO: 2110187 - RNA, 17 nt, Human
uuccccuccuucucccu

SEQ ID NO: 2110188 - RNA, 18 nt, Human
uuccccuccuucucccuu

SEQ ID NO: 2110189 - RNA, 13 nt, Human
uuccccucccugg

SEQ ID NO: 2110190 - RNA, 16 nt, Human
uuccccucccuggcuc

SEQ ID NO: 2110191 - RNA, 17 nt, Human
uuccccucccuggcucc

SEQ ID NO: 2110192 - RNA, 19 nt, Human
uucccagagacaggaaaau

SEQ ID NO: 2110193 - RNA, 22 nt, Human
uucccagagacaggaaaauccu

SEQ ID NO: 2110194 - RNA, 15 nt, Human
uucccagagacagga

SEQ ID NO: 2110195 - RNA, 11 nt, Human
auauuuuaauu

SEQ ID NO: 2110196 - RNA, 14 nt, Human
auauuuuaagcauu

SEQ ID NO: 2110197 - RNA, 15 nt, Human
auauuuuaagcauua

SEQ ID NO: 2110198 - RNA, 17 nt, Human
auauuuuaagcauuacu

SEQ ID NO: 2110199 - RNA, 21 nt, Human
auauuuuaagcauuacucuug

SEQ ID NO: 2110200 - RNA, 23 nt, Human
auauuuuaagcauuacucuugua

SEQ ID NO: 2110201 - RNA, 14 nt, Human
uucccagauacuuc

SEQ ID NO: 2110202 - RNA, 22 nt, Human
aucaaccccuucgcuccugugu

SEQ ID NO: 2110203 - RNA, 20 nt, Human
aucaaccccuucgcuccugu

SEQ ID NO: 2110204 - RNA, 19 nt, Human
aucaaccccuucgcuccug

SEQ ID NO: 2110205 - RNA, 23 nt, Human
aucaaguuggcuucuaaucaaag

SEQ ID NO: 2110206 - RNA, 15 nt, Human
aucaaguuuccaagc

SEQ ID NO: 2110207 - RNA, 18 nt, Human
aucaaguuuccaagcaaa

SEQ ID NO: 2110208 - RNA, 20 nt, Human
aucaaguuuccaagcaaaug

SEQ ID NO: 2110209 - RNA, 21 nt, Human
aucaaguuuccaagcaaaugu

SEQ ID NO: 2110210 - RNA, 22 nt, Human
aucaaguuuccaagcaaauguu

SEQ ID NO: 2110211 - RNA, 23 nt, Human
aucaaguuuccaagcaaauguua

SEQ ID NO: 2110212 - RNA, 22 nt, Human
aucaaguuggcuucuaaucaaa

SEQ ID NO: 2110213 - RNA, 22 nt, Human
aucaaguuauugacaaacucuc

SEQ ID NO: 2110214 - RNA, 17 nt, Human
aucaaguggcaugugcu

SEQ ID NO: 2110215 - RNA, 12 nt, Human
aucaagucaccg

SEQ ID NO: 2110216 - RNA, 19 nt, Human
auauuuuuauagacaaaua

SEQ ID NO: 2110217 - RNA, 19 nt, Human
auauuuucuuccaagcaaa

SEQ ID NO: 2110218 - RNA, 15 nt, Human
auauuuuuaauaaaa

SEQ ID NO: 2110219 - RNA, 19 nt, Human
auauuuuuaauaaaaguug

SEQ ID NO: 2110220 - RNA, 15 nt, Human
auauuuuuaauuaaa

SEQ ID NO: 2110221 - RNA, 13 nt, Human
auauuuuuauaga

SEQ ID NO: 2110222 - RNA, 14 nt, Human
auauuuuuauagac

SEQ ID NO: 2110223 - RNA, 17 nt, Human
uuccuucacauccugug

SEQ ID NO: 2110224 - RNA, 21 nt, Human
uuccuuagcuuagaccucagc

SEQ ID NO: 2110225 - RNA, 14 nt, Human
uuccuuagcauugu

SEQ ID NO: 2110226 - RNA, 20 nt, Human
uuccuuagcuuagaccucag

SEQ ID NO: 2110227 - RNA, 22 nt, Human
uuccuuagcuuagaccucagcc

SEQ ID NO: 2110228 - RNA, 23 nt, Human
uuccuuagcuuagaccucagccu

SEQ ID NO: 2110229 - RNA, 23 nt, Human
uuccuuauguauauuuaaaagaa

SEQ ID NO: 2110230 - RNA, 23 nt, Human
auauuuucuuccaagcaaaggug

SEQ ID NO: 2110231 - RNA, 18 nt, Human
auauuuuccaugaaaaug

SEQ ID NO: 2110232 - RNA, 16 nt, Human
auauuuuccaugaaaa

SEQ ID NO: 2110233 - RNA, 18 nt, Human
uuccuacuuuuccuuccc

SEQ ID NO: 2110234 - RNA, 19 nt, Human
uuccuacuuuuccuucccu

SEQ ID NO: 2110235 - RNA, 12 nt, Human
uuccucuccacu

SEQ ID NO: 2110236 - RNA, 21 nt, Human
uuccucucauccuuuucuccu

SEQ ID NO: 2110237 - RNA, 23 nt, Human
uuccucucauccuuuucuccuau

SEQ ID NO: 2110238 - RNA, 15 nt, Human
uuccucuccacugcc

SEQ ID NO: 2110239 - RNA, 14 nt, Human
uuccucuccacugc

SEQ ID NO: 2110240 - RNA, 13 nt, Human
uuccucuccacug

SEQ ID NO: 2110241 - RNA, 15 nt, Human
uuccuguccagagag

SEQ ID NO: 2110242 - RNA, 14 nt, Human
augauuuuuaaaga

SEQ ID NO: 2110243 - RNA, 14 nt, Human
augauuuuacuuag

SEQ ID NO: 2110244 - RNA, 21 nt, Human
augauuuuacuuagcaauguu

SEQ ID NO: 2110245 - RNA, 16 nt, Human
augauuuuuaaagaaa

SEQ ID NO: 2110246 - RNA, 13 nt, Human
augcaccagcccu

SEQ ID NO: 2110247 - RNA, 14 nt, Human
augcacaucccugg

SEQ ID NO: 2110248 - RNA, 13 nt, Human
augcacauuucau

SEQ ID NO: 2110249 - RNA, 14 nt, Human
augcaacaacaugu

SEQ ID NO: 2110250 - RNA, 16 nt, Human
augcaacaacauguau

SEQ ID NO: 2110251 - RNA, 21 nt, Human
augcaacaacauguauaauau

SEQ ID NO: 2110252 - RNA, 14 nt, Human
augcaccagcccuu

SEQ ID NO: 2110253 - RNA, 14 nt, Human
augcaaauucucaa

SEQ ID NO: 2110254 - RNA, 15 nt, Human
augauuaguaaagaa

SEQ ID NO: 2110255 - RNA, 14 nt, Human
augauuagcaaguu

SEQ ID NO: 2110256 - RNA, 23 nt, Human
augauuagcaaguuacagugaug

SEQ ID NO: 2110257 - RNA, 20 nt, Human
augauuaaccacuucagcug

SEQ ID NO: 2110258 - RNA, 21 nt, Human
augauuaaccacuucagcuga

SEQ ID NO: 2110259 - RNA, 19 nt, Human
augauuaaccacuucagcu

SEQ ID NO: 2110260 - RNA, 11 nt, Human
uuguggccuca

SEQ ID NO: 2110261 - RNA, 12 nt, Human
uuguggccucag

SEQ ID NO: 2110262 - RNA, 18 nt, Human
uugugagccaccacgucc

SEQ ID NO: 2110263 - RNA, 20 nt, Human
uugugaggcccaugguugag

SEQ ID NO: 2110264 - RNA, 13 nt, Human
uuguggccuggga

SEQ ID NO: 2110265 - RNA, 13 nt, Human
uuguggccucaga

SEQ ID NO: 2110266 - RNA, 15 nt, Human
uuguggcugucagca

SEQ ID NO: 2110267 - RNA, 20 nt, Human
uuguggcugucagcaggaag

SEQ ID NO: 2110268 - RNA, 14 nt, Human
uuguggcugggggc

SEQ ID NO: 2110269 - RNA, 16 nt, Human
augagacugaacugug

SEQ ID NO: 2110270 - RNA, 11 nt, Human
uugugagagcg

SEQ ID NO: 2110271 - RNA, 15 nt, Human
uugugagagcgaggc

SEQ ID NO: 2110272 - RNA, 13 nt, Human
uugugacuagugc

SEQ ID NO: 2110273 - RNA, 16 nt, Human
uugugacuagugcuga

SEQ ID NO: 2110274 - RNA, 17 nt, Human
uugugacuagugcugaa

SEQ ID NO: 2110275 - RNA, 21 nt, Human
uugugacuagugcugaagcuu

SEQ ID NO: 2110276 - RNA, 23 nt, Human
uugugacuagugcugaagcuuau

SEQ ID NO: 2110277 - RNA, 22 nt, Human
uugugacuagugcugaagcuua

SEQ ID NO: 2110278 - RNA, 15 nt, Human
uuguguguuauuuaa

SEQ ID NO: 2110279 - RNA, 16 nt, Human
uuguguguuauuuaaa

SEQ ID NO: 2110280 - RNA, 20 nt, Human
uuguguaagagaauguugaa

SEQ ID NO: 2110281 - RNA, 22 nt, Human
uuguguaagagaauguugaaua

SEQ ID NO: 2110282 - RNA, 14 nt, Human
uuguguaauaaagu

SEQ ID NO: 2110283 - RNA, 16 nt, Human
uuguguaauaaagugu

SEQ ID NO: 2110284 - RNA, 13 nt, Human
uugugguuaaucu

SEQ ID NO: 2110285 - RNA, 14 nt, Human
uugugguuauuuuu

SEQ ID NO: 2110286 - RNA, 19 nt, Human
uugugguuauuuuuauaca

SEQ ID NO: 2110287 - RNA, 13 nt, Human
uugugguuuguug

SEQ ID NO: 2110288 - RNA, 12 nt, Human
uugugugugugc

SEQ ID NO: 2110289 - RNA, 20 nt, Human
uuguguguuauuuaaaugag

SEQ ID NO: 2110290 - RNA, 21 nt, Human
uuguguguuauuuaaaugagu

SEQ ID NO: 2110291 - RNA, 15 nt, Human
augcaguuuuccuua

SEQ ID NO: 2110292 - RNA, 15 nt, Human
augcauaaagucagu

SEQ ID NO: 2110293 - RNA, 14 nt, Human
augccaacuugucc

SEQ ID NO: 2110294 - RNA, 22 nt, Human
augccaaagcuaggguggcccu

SEQ ID NO: 2110295 - RNA, 20 nt, Human
augccacccuguuuucagcu

SEQ ID NO: 2110296 - RNA, 22 nt, Human
augccacgcgguacaaaggaaa

SEQ ID NO: 2110297 - RNA, 23 nt, Human
augccacgcgguacaaaggaaaa

SEQ ID NO: 2110298 - RNA, 20 nt, Human
augcccagagggcccaggca

SEQ ID NO: 2110299 - RNA, 21 nt, Human
augcccagagggcccaggcag

SEQ ID NO: 2110300 - RNA, 22 nt, Human
augcccagagggcccaggcagg

SEQ ID NO: 2110301 - RNA, 23 nt, Human
augcccagagggcccaggcaggc

SEQ ID NO: 2110302 - RNA, 20 nt, Human
augcccaccugcccaucaca

SEQ ID NO: 2110303 - RNA, 21 nt, Human
augcccaccugcccaucacag

SEQ ID NO: 2110304 - RNA, 15 nt, Human
augcccaccugccca

SEQ ID NO: 2110305 - RNA, 16 nt, Human
augcccaccugcccau

SEQ ID NO: 2110306 - RNA, 19 nt, Human
augcccaccugcccaucac

SEQ ID NO: 2110307 - RNA, 16 nt, Human
augcagugaauuguga

SEQ ID NO: 2110308 - RNA, 17 nt, Human
augcagugccuuucuuc

SEQ ID NO: 2110309 - RNA, 17 nt, Human
augcaggggcaaacacc

SEQ ID NO: 2110310 - RNA, 20 nt, Human
augcaggggcaaacaccugc

SEQ ID NO: 2110311 - RNA, 22 nt, Human
augcaggggcaaacaccugcug

SEQ ID NO: 2110312 - RNA, 14 nt, Human
uuuaauuuuguaaa

SEQ ID NO: 2110313 - RNA, 19 nt, Human
uuuaaauucacaauagaaa

SEQ ID NO: 2110314 - RNA, 21 nt, Human
uuuaaauucacaauagaaacu

SEQ ID NO: 2110315 - RNA, 20 nt, Human
uuuaaauuauaacuuaaaau

SEQ ID NO: 2110316 - RNA, 15 nt, Human
uuuaaauuauaagga

SEQ ID NO: 2110317 - RNA, 16 nt, Human
uuuaaauuauaaggac

SEQ ID NO: 2110318 - RNA, 17 nt, Human
uuuaaauuauaaggacu

SEQ ID NO: 2110319 - RNA, 18 nt, Human
uuuaaauuauaaggacug

SEQ ID NO: 2110320 - RNA, 19 nt, Human
uuuaaauuauaaggacugc

SEQ ID NO: 2110321 - RNA, 20 nt, Human
uuuaaauuauaaggacugca

SEQ ID NO: 2110322 - RNA, 21 nt, Human
uuuaaauuauaaggacugcau

SEQ ID NO: 2110323 - RNA, 22 nt, Human
uuuaaauuauaaggacugcaug

SEQ ID NO: 2110324 - RNA, 15 nt, Human
uuuaagauaaauuau

SEQ ID NO: 2110325 - RNA, 15 nt, Human
uuuaagcauuacucu

SEQ ID NO: 2110326 - RNA, 16 nt, Human
uuuaagcauuacucuu

SEQ ID NO: 2110327 - RNA, 20 nt, Human
uuuaagcauuacucuuguaa

SEQ ID NO: 2110328 - RNA, 21 nt, Human
uuuaagcauuacucuuguaag

SEQ ID NO: 2110329 - RNA, 23 nt, Human
uuuaagcauuacucuuguaagau

SEQ ID NO: 2110330 - RNA, 13 nt, Human
uuuaagcauuguu

SEQ ID NO: 2110331 - RNA, 14 nt, Human
uuuaagcauuguuu

SEQ ID NO: 2110332 - RNA, 21 nt, Human
uuuaagcauuguuugcuuauu

SEQ ID NO: 2110333 - RNA, 22 nt, Human
uuuaagaugugucuucaauuug

SEQ ID NO: 2110334 - RNA, 17 nt, Human
uuuaagauuccuuuucu

SEQ ID NO: 2110335 - RNA, 18 nt, Human
uuuaagauuccuuuucuu

SEQ ID NO: 2110336 - RNA, 22 nt, Human
uuuaagauuccuuuucuuguuu

SEQ ID NO: 2110337 - RNA, 11 nt, Human
uuuaagauuua

SEQ ID NO: 2110338 - RNA, 22 nt, Human
uuuaagauuuaauuugccaaaa

SEQ ID NO: 2110339 - RNA, 13 nt, Human
uuguuuucagugu

SEQ ID NO: 2110340 - RNA, 16 nt, Human
uuguuuucaguguaca

SEQ ID NO: 2110341 - RNA, 15 nt, Human
uuuaauugaaggaaa

SEQ ID NO: 2110342 - RNA, 16 nt, Human
uuuaauugaaggaaag

SEQ ID NO: 2110343 - RNA, 19 nt, Human
uuuaauugaaggaaagauu

SEQ ID NO: 2110344 - RNA, 12 nt, Human
uuuaauuguaaa

SEQ ID NO: 2110345 - RNA, 15 nt, Human
uuuaauuguaaacug

SEQ ID NO: 2110346 - RNA, 16 nt, Human
uuuaauuguaaacugu

SEQ ID NO: 2110347 - RNA, 17 nt, Human
uuuaauuguaaacugua

SEQ ID NO: 2110348 - RNA, 19 nt, Human
uuuaauuguaaacuguacu

SEQ ID NO: 2110349 - RNA, 18 nt, Human
uuuaauuugaugaaagcu

SEQ ID NO: 2110350 - RNA, 19 nt, Human
uuuaauuugaugaaagcug

SEQ ID NO: 2110351 - RNA, 21 nt, Human
uuuaauuugaugaaagcugau

SEQ ID NO: 2110352 - RNA, 22 nt, Human
uuuaauuugaugaaagcugauu

SEQ ID NO: 2110353 - RNA, 20 nt, Human
uuuaauuugccaaaauaaug

SEQ ID NO: 2110354 - RNA, 21 nt, Human
uuuaauuugccaaaauaaugu

SEQ ID NO: 2110355 - RNA, 23 nt, Human
uuuaauucauguuucuuaaaugg

SEQ ID NO: 2110356 - RNA, 14 nt, Human
uuuaauucauguuu

SEQ ID NO: 2110357 - RNA, 16 nt, Human
uuuaauucauguuucu

SEQ ID NO: 2110358 - RNA, 19 nt, Human
uuuaauggggugcaccugu

SEQ ID NO: 2110359 - RNA, 20 nt, Human
uuuaagcccaucaauuauag

SEQ ID NO: 2110360 - RNA, 23 nt, Human
uuuaagcauuguuugcuuauugu

SEQ ID NO: 2110361 - RNA, 22 nt, Human
uuuaugggucagaguuccgacu

SEQ ID NO: 2110362 - RNA, 14 nt, Human
uuuauauaauuaug

SEQ ID NO: 2110363 - RNA, 17 nt, Human
uuuauauaauuauguua

SEQ ID NO: 2110364 - RNA, 19 nt, Human
uuuauauaauuauguuauu

SEQ ID NO: 2110365 - RNA, 22 nt, Human
uuuauggggcugaacggggaga

SEQ ID NO: 2110366 - RNA, 16 nt, Human
uuuauagcucaguuua

SEQ ID NO: 2110367 - RNA, 15 nt, Human
uuuauaguuuauaca

SEQ ID NO: 2110368 - RNA, 18 nt, Human
uuuauaguuuauacaguu

SEQ ID NO: 2110369 - RNA, 12 nt, Human
uuuauauaauaa

SEQ ID NO: 2110370 - RNA, 15 nt, Human
uuuauauaauaaagu

SEQ ID NO: 2110371 - RNA, 17 nt, Human
uuuauauaauaaaguau

SEQ ID NO: 2110372 - RNA, 20 nt, Human
uuuauauaauaaaguauucc

SEQ ID NO: 2110373 - RNA, 21 nt, Human
uuuauauaauaaaguauucca

SEQ ID NO: 2110374 - RNA, 13 nt, Human
uuuauuaaaaucu

SEQ ID NO: 2110375 - RNA, 12 nt, Human
uuuauguuuugu

SEQ ID NO: 2110376 - RNA, 17 nt, Human
uuuauguuuuguuucug

SEQ ID NO: 2110377 - RNA, 18 nt, Human
uuuauguuuuguuucuga

SEQ ID NO: 2110378 - RNA, 20 nt, Human
uuuauguuuuguuucugaaa

SEQ ID NO: 2110379 - RNA, 14 nt, Human
uuuauuaaaaucuu

SEQ ID NO: 2110380 - RNA, 15 nt, Human
uuuauuaaaaucuua

SEQ ID NO: 2110381 - RNA, 16 nt, Human
uuuauuaaaaucuuaa

SEQ ID NO: 2110382 - RNA, 18 nt, Human
uuuaugugugaggagcug

SEQ ID NO: 2110383 - RNA, 22 nt, Human
uuuaugugugaggagcugcugg

SEQ ID NO: 2110384 - RNA, 16 nt, Human
uuuagcuguaucaaac

SEQ ID NO: 2110385 - RNA, 15 nt, Human
uuuaguagagacagg

SEQ ID NO: 2110386 - RNA, 14 nt, Human
uuuagcaguucugc

SEQ ID NO: 2110387 - RNA, 15 nt, Human
uuuagcaguucugca

SEQ ID NO: 2110388 - RNA, 15 nt, Human
augccccagagcugu

SEQ ID NO: 2110389 - RNA, 14 nt, Human
uuuagauugaguaa

SEQ ID NO: 2110390 - RNA, 14 nt, Human
uuuagaugguuaca

SEQ ID NO: 2110391 - RNA, 17 nt, Human
uuuagaugguuacacug

SEQ ID NO: 2110392 - RNA, 18 nt, Human
uuuagaugguuacacugu

SEQ ID NO: 2110393 - RNA, 20 nt, Human
uuuagaugguuacacuguua

SEQ ID NO: 2110394 - RNA, 14 nt, Human
uuuagcacaaaaaa

SEQ ID NO: 2110395 - RNA, 13 nt, Human
uuuagcaccccca

SEQ ID NO: 2110396 - RNA, 18 nt, Human
uuuagcacguuuaaaguu

SEQ ID NO: 2110397 - RNA, 19 nt, Human
uuuagcacguuuaaaguuc

SEQ ID NO: 2110398 - RNA, 21 nt, Human
uuuagcacguuuaaaguucug

SEQ ID NO: 2110399 - RNA, 22 nt, Human
uuuagcacguuuaaaguucugu

SEQ ID NO: 2110400 - RNA, 18 nt, Human
uuuagcagaaucaaaaug

SEQ ID NO: 2110401 - RNA, 13 nt, Human
augcugguuuuuc

SEQ ID NO: 2110402 - RNA, 22 nt, Human
augcugguuuuccuaaaugcag

SEQ ID NO: 2110403 - RNA, 15 nt, Human
augcucugcauguua

SEQ ID NO: 2110404 - RNA, 23 nt, Human
augcucucugcagccagcccagc

SEQ ID NO: 2110405 - RNA, 15 nt, Human
uuuauuacccuucuu

SEQ ID NO: 2110406 - RNA, 14 nt, Human
augcucuccuuucc

SEQ ID NO: 2110407 - RNA, 13 nt, Human
augcucucugcag

SEQ ID NO: 2110408 - RNA, 19 nt, Human
augcucucugcagccagcc

SEQ ID NO: 2110409 - RNA, 21 nt, Human
augcucucugcagccagccca

SEQ ID NO: 2110410 - RNA, 22 nt, Human
augcucucugcagccagcccag

SEQ ID NO: 2110411 - RNA, 23 nt, Human
augcuggcauuugcaccuaccuc

SEQ ID NO: 2110412 - RNA, 20 nt, Human
uuuauuaccucugauaccuc

SEQ ID NO: 2110413 - RNA, 14 nt, Human
uuuauuaccucuga

SEQ ID NO: 2110414 - RNA, 13 nt, Human
uuuauuaccucug

SEQ ID NO: 2110415 - RNA, 16 nt, Human
uuuauuacaucuuuca

SEQ ID NO: 2110416 - RNA, 22 nt, Human
auggaacucauuccugccuguc

SEQ ID NO: 2110417 - RNA, 21 nt, Human
auggaacucuagggauaguca

SEQ ID NO: 2110418 - RNA, 15 nt, Human
augcuucaugaaaau

SEQ ID NO: 2110419 - RNA, 18 nt, Human
augcuucaugaaaauccu

SEQ ID NO: 2110420 - RNA, 21 nt, Human
augcuucaugaaaauccuacc

SEQ ID NO: 2110421 - RNA, 19 nt, Human
auggaacucauuccugccu

SEQ ID NO: 2110422 - RNA, 13 nt, Human
auggccuuugcuu

SEQ ID NO: 2110423 - RNA, 19 nt, Human
auggcgauucccauugaaa

SEQ ID NO: 2110424 - RNA, 21 nt, Human
auggcgauucccauugaaaau

SEQ ID NO: 2110425 - RNA, 22 nt, Human
auggcgauucccauugaaaaug

SEQ ID NO: 2110426 - RNA, 19 nt, Human
auggccugccuugaagcca

SEQ ID NO: 2110427 - RNA, 20 nt, Human
auggccugccuugaagccac

SEQ ID NO: 2110428 - RNA, 13 nt, Human
auggccucagcug

SEQ ID NO: 2110429 - RNA, 15 nt, Human
auggccucagcugcc

SEQ ID NO: 2110430 - RNA, 14 nt, Human
auggccucagcugc

SEQ ID NO: 2110431 - RNA, 16 nt, Human
auggccagguggccac

SEQ ID NO: 2110432 - RNA, 22 nt, Human
auggccagguggccacuccaga

SEQ ID NO: 2110433 - RNA, 21 nt, Human
auggccgggcgcgguggcuca

SEQ ID NO: 2110434 - RNA, 13 nt, Human
auggccggccggg

SEQ ID NO: 2110435 - RNA, 19 nt, Human
auggcaccaaagccaccag

SEQ ID NO: 2110436 - RNA, 19 nt, Human
auggcaaggacugcaggga

SEQ ID NO: 2110437 - RNA, 23 nt, Human
auggcaauucuuugaccucaacc

SEQ ID NO: 2110438 - RNA, 23 nt, Human
auggcacagcccaaagaaggaaa

SEQ ID NO: 2110439 - RNA, 18 nt, Human
auggauuuccagccaaag

SEQ ID NO: 2110440 - RNA, 21 nt, Human
auggauuugccugugccaccc

SEQ ID NO: 2110441 - RNA, 14 nt, Human
auggauuugccugu

SEQ ID NO: 2110442 - RNA, 18 nt, Human
uuucacugcuggcugccu

SEQ ID NO: 2110443 - RNA, 17 nt, Human
uuucacugcuggcugcc

SEQ ID NO: 2110444 - RNA, 14 nt, Human
uuucacugcuggcu

SEQ ID NO: 2110445 - RNA, 22 nt, Human
uuucacugcuggcugccuuaga

SEQ ID NO: 2110446 - RNA, 20 nt, Human
uuucacugcuggcugccuua

SEQ ID NO: 2110447 - RNA, 15 nt, Human
auggaauacaguguu

SEQ ID NO: 2110448 - RNA, 16 nt, Human
auggaauacaguguua

SEQ ID NO: 2110449 - RNA, 17 nt, Human
auggaauacaguguuau

SEQ ID NO: 2110450 - RNA, 22 nt, Human
auggaauacaguguuauuuucu

SEQ ID NO: 2110451 - RNA, 18 nt, Human
uuucagaaccucuucccc

SEQ ID NO: 2110452 - RNA, 19 nt, Human
uuucagaaccucuucccca

SEQ ID NO: 2110453 - RNA, 20 nt, Human
uuucagaaccucuuccccag

SEQ ID NO: 2110454 - RNA, 23 nt, Human
uuucagaaccucuuccccagaaa

SEQ ID NO: 2110455 - RNA, 14 nt, Human
uuucagaccccagc

SEQ ID NO: 2110456 - RNA, 11 nt, Human
uuucagaaucu

SEQ ID NO: 2110457 - RNA, 14 nt, Human
uuucagaaucugaa

SEQ ID NO: 2110458 - RNA, 17 nt, Human
uuucagaaucugaaugu

SEQ ID NO: 2110459 - RNA, 19 nt, Human
uuucagaaucugaauguaa

SEQ ID NO: 2110460 - RNA, 20 nt, Human
uuucagaaucugaauguaau

SEQ ID NO: 2110461 - RNA, 23 nt, Human
uuucagaaucugaauguaauuug

SEQ ID NO: 2110462 - RNA, 10 nt, Human
uuucagaccc

SEQ ID NO: 2110463 - RNA, 14 nt, Human
auggacaugaucuu

SEQ ID NO: 2110464 - RNA, 19 nt, Human
auggacagaagaaggcagc

SEQ ID NO: 2110465 - RNA, 20 nt, Human
auggacagaagaaggcagca

SEQ ID NO: 2110466 - RNA, 15 nt, Human
uuucccccaaagugg

SEQ ID NO: 2110467 - RNA, 19 nt, Human
uuuccccccacucucccca

SEQ ID NO: 2110468 - RNA, 17 nt, Human
uuuccccccacucuccc

SEQ ID NO: 2110469 - RNA, 12 nt, Human
uuuccccccacu

SEQ ID NO: 2110470 - RNA, 13 nt, Human
uuuccccccacuc

SEQ ID NO: 2110471 - RNA, 13 nt, Human
uuucauuaaagca

SEQ ID NO: 2110472 - RNA, 14 nt, Human
uuucauuaaagcau

SEQ ID NO: 2110473 - RNA, 16 nt, Human
uuucauuaaagcauuu

SEQ ID NO: 2110474 - RNA, 21 nt, Human
uuucaugauuagcaaguuaca

SEQ ID NO: 2110475 - RNA, 17 nt, Human
augagaaaaugucuuua

SEQ ID NO: 2110476 - RNA, 13 nt, Human
augacuucccaac

SEQ ID NO: 2110477 - RNA, 23 nt, Human
augaccaauauuauacuaagaaa

SEQ ID NO: 2110478 - RNA, 22 nt, Human
augaauuuuuuucaucuucucu

SEQ ID NO: 2110479 - RNA, 21 nt, Human
augaauuuuuuucaucuucuc

SEQ ID NO: 2110480 - RNA, 14 nt, Human
augacaaugaugau

SEQ ID NO: 2110481 - RNA, 18 nt, Human
augagaaggaauuugagu

SEQ ID NO: 2110482 - RNA, 21 nt, Human
augagacccauuccuauuucu

SEQ ID NO: 2110483 - RNA, 16 nt, Human
augagaauucagcugc

SEQ ID NO: 2110484 - RNA, 18 nt, Human
augagaauucagcugccc

SEQ ID NO: 2110485 - RNA, 19 nt, Human
augagaauucagcugcccc

SEQ ID NO: 2110486 - RNA, 13 nt, Human
augagaacagacu

SEQ ID NO: 2110487 - RNA, 14 nt, Human
augagaacagacug

SEQ ID NO: 2110488 - RNA, 19 nt, Human
augagaacagacuggccug

SEQ ID NO: 2110489 - RNA, 23 nt, Human
augagaacagacuggccugagga

SEQ ID NO: 2110490 - RNA, 14 nt, Human
augagaacucugag

SEQ ID NO: 2110491 - RNA, 12 nt, Human
augagaacaugu

SEQ ID NO: 2110492 - RNA, 17 nt, Human
augagaacauguuggua

SEQ ID NO: 2110493 - RNA, 19 nt, Human
augagaacauguugguauu

SEQ ID NO: 2110494 - RNA, 21 nt, Human
augagaacauguugguauuua

SEQ ID NO: 2110495 - RNA, 22 nt, Human
augagaaagguugaagcaccaa

SEQ ID NO: 2110496 - RNA, 21 nt, Human
augagaaagguugaagcacca

SEQ ID NO: 2110497 - RNA, 23 nt, Human
augaauuuuguuuggacuucuuu

SEQ ID NO: 2110498 - RNA, 22 nt, Human
augaauuuucaaguaauuguga

SEQ ID NO: 2110499 - RNA, 18 nt, Human
augaauuuucaaguaauu

SEQ ID NO: 2110500 - RNA, 19 nt, Human
uuguauauugucagauauu

SEQ ID NO: 2110501 - RNA, 13 nt, Human
augaauuucucua

SEQ ID NO: 2110502 - RNA, 15 nt, Human
augaauuuggagacu

SEQ ID NO: 2110503 - RNA, 20 nt, Human
augaauuuggagacucugug

SEQ ID NO: 2110504 - RNA, 21 nt, Human
augaauuuggagacucugugg

SEQ ID NO: 2110505 - RNA, 20 nt, Human
uuguauaccuuguaauuuga

SEQ ID NO: 2110506 - RNA, 14 nt, Human
uuguauaguaaagu

SEQ ID NO: 2110507 - RNA, 15 nt, Human
uuguauaguaaagug

SEQ ID NO: 2110508 - RNA, 16 nt, Human
uuguauauugucagau

SEQ ID NO: 2110509 - RNA, 18 nt, Human
uuguaguaaagaaauuua

SEQ ID NO: 2110510 - RNA, 16 nt, Human
uuguagguacuuuugg

SEQ ID NO: 2110511 - RNA, 18 nt, Human
uuguagguacuuuuggaa

SEQ ID NO: 2110512 - RNA, 20 nt, Human
uuguagguacuuuuggaauc

SEQ ID NO: 2110513 - RNA, 22 nt, Human
uuguagguacuuuuggaaucua

SEQ ID NO: 2110514 - RNA, 13 nt, Human
uuguaggguuucu

SEQ ID NO: 2110515 - RNA, 14 nt, Human
uuguaggguuucua

SEQ ID NO: 2110516 - RNA, 19 nt, Human
uugguucuaauagaacuca

SEQ ID NO: 2110517 - RNA, 15 nt, Human
uugguucuaauagaa

SEQ ID NO: 2110518 - RNA, 14 nt, Human
uugguucuggggcc

SEQ ID NO: 2110519 - RNA, 13 nt, Human
uugguucuggggc

SEQ ID NO: 2110520 - RNA, 13 nt, Human
augaauuaaauuu

SEQ ID NO: 2110521 - RNA, 12 nt, Human
uugggcccuccu

SEQ ID NO: 2110522 - RNA, 16 nt, Human
uugguucccuuugcuc

SEQ ID NO: 2110523 - RNA, 14 nt, Human
uugguucccuugug

SEQ ID NO: 2110524 - RNA, 22 nt, Human
uuggggggcugaggugggagga

SEQ ID NO: 2110525 - RNA, 23 nt, Human
uuggggggggcccgccuggcaga

SEQ ID NO: 2110526 - RNA, 16 nt, Human
uugggggcugugggga

SEQ ID NO: 2110527 - RNA, 14 nt, Human
uuggggcuucuugg

SEQ ID NO: 2110528 - RNA, 15 nt, Human
augaacggccuugcu

SEQ ID NO: 2110529 - RNA, 15 nt, Human
augaacggugagcau

SEQ ID NO: 2110530 - RNA, 16 nt, Human
augaacggugagcauu

SEQ ID NO: 2110531 - RNA, 13 nt, Human
augaacugcaugu

SEQ ID NO: 2110532 - RNA, 18 nt, Human
augaacugcauguauaaa

SEQ ID NO: 2110533 - RNA, 19 nt, Human
augaacugcauguauaaau

SEQ ID NO: 2110534 - RNA, 20 nt, Human
augaacugcauguauaaaug

SEQ ID NO: 2110535 - RNA, 12 nt, Human
augaacuggagg

SEQ ID NO: 2110536 - RNA, 18 nt, Human
augaacuggaggccagga

SEQ ID NO: 2110537 - RNA, 19 nt, Human
augaacuggaggccaggaa

SEQ ID NO: 2110538 - RNA, 15 nt, Human
augaaagggcccaga

SEQ ID NO: 2110539 - RNA, 19 nt, Human
augaaugaggucccaggca

SEQ ID NO: 2110540 - RNA, 20 nt, Human
augaaugaggucccaggcag

SEQ ID NO: 2110541 - RNA, 15 nt, Human
augaaugcacacuag

SEQ ID NO: 2110542 - RNA, 14 nt, Human
uuggcgggccaagg

SEQ ID NO: 2110543 - RNA, 23 nt, Human
aucuugcuuucuuuguuuggcug

SEQ ID NO: 2110544 - RNA, 23 nt, Human
aucuugcuuuuuuucaccaauau

SEQ ID NO: 2110545 - RNA, 22 nt, Human
uuggauaaugcuguugccucau

SEQ ID NO: 2110546 - RNA, 18 nt, Human
aucuuuuuauugaugugc

SEQ ID NO: 2110547 - RNA, 19 nt, Human
aucuuuuuauugaugugca

SEQ ID NO: 2110548 - RNA, 22 nt, Human
aucuuuuuauugaugugcaaaa

SEQ ID NO: 2110549 - RNA, 14 nt, Human
aucuuuuucucuaa

SEQ ID NO: 2110550 - RNA, 16 nt, Human
aucuuuuuuagcauaa

SEQ ID NO: 2110551 - RNA, 18 nt, Human
aucuuuuuuagcauaaaa

SEQ ID NO: 2110552 - RNA, 19 nt, Human
aucuuuuuuagcauaaaau

SEQ ID NO: 2110553 - RNA, 23 nt, Human
aucuuuuuuagcauaaaauuuuc

SEQ ID NO: 2110554 - RNA, 12 nt, Human
augaaagcaugu

SEQ ID NO: 2110555 - RNA, 18 nt, Human
augaaagcauguggcaug

SEQ ID NO: 2110556 - RNA, 21 nt, Human
augaaagcugauuacugucaa

SEQ ID NO: 2110557 - RNA, 22 nt, Human
augaaagcugauuacugucaau

SEQ ID NO: 2110558 - RNA, 23 nt, Human
augaaagcugauuacugucaaua

SEQ ID NO: 2110559 - RNA, 22 nt, Human
aucuuugccuugggcugcuccu

SEQ ID NO: 2110560 - RNA, 13 nt, Human
uuggcugcaggga

SEQ ID NO: 2110561 - RNA, 18 nt, Human
aucuuugcagacaggcaa

SEQ ID NO: 2110562 - RNA, 14 nt, Human
aucuuugccuuggg

SEQ ID NO: 2110563 - RNA, 20 nt, Human
aucuuugccuugggcugcuc

SEQ ID NO: 2110564 - RNA, 13 nt, Human
aucuuugccuugg

SEQ ID NO: 2110565 - RNA, 19 nt, Human
uugcacaaaccaauuaaac

SEQ ID NO: 2110566 - RNA, 12 nt, Human
uugaugguuuau

SEQ ID NO: 2110567 - RNA, 20 nt, Human
uugcaauuuuaacacacaua

SEQ ID NO: 2110568 - RNA, 17 nt, Human
uugcacacuccccugca

SEQ ID NO: 2110569 - RNA, 22 nt, Human
uugcacacuccccugcacugga

SEQ ID NO: 2110570 - RNA, 13 nt, Human
uugcacacuugug

SEQ ID NO: 2110571 - RNA, 16 nt, Human
uugaugugugucuagg

SEQ ID NO: 2110572 - RNA, 18 nt, Human
uugaugugcaaaaauuuu

SEQ ID NO: 2110573 - RNA, 23 nt, Human
uugauggugaugaaauguaaaua

SEQ ID NO: 2110574 - RNA, 21 nt, Human
uugauggucagacacaaacaa

SEQ ID NO: 2110575 - RNA, 16 nt, Human
aucucuuauuuuacaa

SEQ ID NO: 2110576 - RNA, 19 nt, Human
aucucuuauuuuacaauaa

SEQ ID NO: 2110577 - RNA, 14 nt, Human
uugauggggaagga

SEQ ID NO: 2110578 - RNA, 14 nt, Human
aucucaauuugagu

SEQ ID NO: 2110579 - RNA, 14 nt, Human
aucucagggccugg

SEQ ID NO: 2110580 - RNA, 16 nt, Human
aucucagggaagccca

SEQ ID NO: 2110581 - RNA, 17 nt, Human
aucucagggaagcccag

SEQ ID NO: 2110582 - RNA, 18 nt, Human
aucucagggaagcccagc

SEQ ID NO: 2110583 - RNA, 19 nt, Human
aucucagggaagcccagcu

SEQ ID NO: 2110584 - RNA, 20 nt, Human
aucucagggaagcccagcuc

SEQ ID NO: 2110585 - RNA, 22 nt, Human
aucucagggaagcccagcucca

SEQ ID NO: 2110586 - RNA, 23 nt, Human
aucucagggaagcccagcuccag

SEQ ID NO: 2110587 - RNA, 19 nt, Human
aucucaggccaccugcccc

SEQ ID NO: 2110588 - RNA, 20 nt, Human
aucucaggccaccugccccc

SEQ ID NO: 2110589 - RNA, 14 nt, Human
aucucaggccaccu

SEQ ID NO: 2110590 - RNA, 15 nt, Human
aucucaggccaccug

SEQ ID NO: 2110591 - RNA, 17 nt, Human
aucucaggccaccugcc

SEQ ID NO: 2110592 - RNA, 20 nt, Human
aucucagaauuccuuuucua

SEQ ID NO: 2110593 - RNA, 11 nt, Human
aucucagccca

SEQ ID NO: 2110594 - RNA, 15 nt, Human
aucucacuuuucucc

SEQ ID NO: 2110595 - RNA, 19 nt, Human
aucucacuuuucuccauga

SEQ ID NO: 2110596 - RNA, 19 nt, Human
auccuaucaacaacaaggu

SEQ ID NO: 2110597 - RNA, 16 nt, Human
auccuaucucuccaac

SEQ ID NO: 2110598 - RNA, 21 nt, Human
auccuaucucuccaaccagau

SEQ ID NO: 2110599 - RNA, 15 nt, Human
aucuccacuccagau

SEQ ID NO: 2110600 - RNA, 17 nt, Human
aucucagugcuguaaaa

SEQ ID NO: 2110601 - RNA, 15 nt, Human
aucugcaccccccug

SEQ ID NO: 2110602 - RNA, 17 nt, Human
aucugcaccccccuggg

SEQ ID NO: 2110603 - RNA, 18 nt, Human
aucugcaccccccugggc

SEQ ID NO: 2110604 - RNA, 19 nt, Human
aucugcaccccccugggcu

SEQ ID NO: 2110605 - RNA, 21 nt, Human
aucugcaccccccugggcuga

SEQ ID NO: 2110606 - RNA, 21 nt, Human
aucugcacccucgaugaagcc

SEQ ID NO: 2110607 - RNA, 18 nt, Human
aucugaugcaagcaagaa

SEQ ID NO: 2110608 - RNA, 16 nt, Human
aucugaucguucuuuc

SEQ ID NO: 2110609 - RNA, 18 nt, Human
aucugaucguucuuucua

SEQ ID NO: 2110610 - RNA, 20 nt, Human
aucugaucguucuuucuagc

SEQ ID NO: 2110611 - RNA, 17 nt, Human
uugccuacuaugccaga

SEQ ID NO: 2110612 - RNA, 18 nt, Human
uugccuccauggugccuc

SEQ ID NO: 2110613 - RNA, 20 nt, Human
uugccuccauggugccucug

SEQ ID NO: 2110614 - RNA, 22 nt, Human
aucugaggaaucaacagggcag

SEQ ID NO: 2110615 - RNA, 23 nt, Human
aucugaggaaucaacagggcagc

SEQ ID NO: 2110616 - RNA, 18 nt, Human
uugcccuuucuguaccau

SEQ ID NO: 2110617 - RNA, 15 nt, Human
uugccgaaacuggaa

SEQ ID NO: 2110618 - RNA, 16 nt, Human
uugccgaaacuggaag

SEQ ID NO: 2110619 - RNA, 17 nt, Human
uugccgaaacuggaagu

SEQ ID NO: 2110620 - RNA, 18 nt, Human
uugccgaaacuggaaguu

SEQ ID NO: 2110621 - RNA, 23 nt, Human
uugcccugguuucacuggcccaa

SEQ ID NO: 2110622 - RNA, 14 nt, Human
uugcccuucacagu

SEQ ID NO: 2110623 - RNA, 16 nt, Human
uugcccuucacagugu

SEQ ID NO: 2110624 - RNA, 17 nt, Human
uugcccuucacaguguu

SEQ ID NO: 2110625 - RNA, 18 nt, Human
uugcccuucacaguguuu

SEQ ID NO: 2110626 - RNA, 10 nt, Human
uugcccuggu

SEQ ID NO: 2110627 - RNA, 20 nt, Human
uugcccuuucuguaccauuu

SEQ ID NO: 2110628 - RNA, 18 nt, Human
uugccuaaguauuccuuu

SEQ ID NO: 2110629 - RNA, 19 nt, Human
uugccuaauaaacauccuu

SEQ ID NO: 2110630 - RNA, 18 nt, Human
uugccuaauacauuaaag

SEQ ID NO: 2110631 - RNA, 19 nt, Human
uugccuaauacauuaaagc

SEQ ID NO: 2110632 - RNA, 21 nt, Human
uugccuaauacauuaaagcag

SEQ ID NO: 2110633 - RNA, 22 nt, Human
uugccuaauacauuaaagcagu

SEQ ID NO: 2110634 - RNA, 23 nt, Human
uugccuaauacauuaaagcaguc

SEQ ID NO: 2110635 - RNA, 19 nt, Human
aucuggguucacugcaacc

SEQ ID NO: 2110636 - RNA, 21 nt, Human
uugccguugccaagaacugaa

SEQ ID NO: 2110637 - RNA, 23 nt, Human
aucugcauuuucuggguucuggg

SEQ ID NO: 2110638 - RNA, 17 nt, Human
aucugguagauuuuuaa

SEQ ID NO: 2110639 - RNA, 17 nt, Human
aucuggguucacugcaa

SEQ ID NO: 2110640 - RNA, 22 nt, Human
aucugcauuuucaccccacccu

SEQ ID NO: 2110641 - RNA, 23 nt, Human
aucugcauuuucaccccacccuu

SEQ ID NO: 2110642 - RNA, 11 nt, Human
aucugcauuua

SEQ ID NO: 2110643 - RNA, 14 nt, Human
aucugcauuuagca

SEQ ID NO: 2110644 - RNA, 15 nt, Human
aucugcauuuagcac

SEQ ID NO: 2110645 - RNA, 16 nt, Human
aucugcauuuagcaca

SEQ ID NO: 2110646 - RNA, 17 nt, Human
aucugcauuuagcacaa

SEQ ID NO: 2110647 - RNA, 19 nt, Human
aucugcauuuucaccccac

SEQ ID NO: 2110648 - RNA, 16 nt, Human
aucuguaagcucuuug

SEQ ID NO: 2110649 - RNA, 17 nt, Human
aucuggucccuugcagc

SEQ ID NO: 2110650 - RNA, 20 nt, Human
aucugguagggggaaaaugu

SEQ ID NO: 2110651 - RNA, 17 nt, Human
aucuguacuucuucgau

SEQ ID NO: 2110652 - RNA, 12 nt, Human
aucuguagauac

SEQ ID NO: 2110653 - RNA, 22 nt, Human
aucuguagauacuagcuaucua

SEQ ID NO: 2110654 - RNA, 19 nt, Human
aucuugcucugcugacaga

SEQ ID NO: 2110655 - RNA, 17 nt, Human
aucuugcucugcugaca

SEQ ID NO: 2110656 - RNA, 23 nt, Human
aucuugaccaagcaggaagcuca

SEQ ID NO: 2110657 - RNA, 17 nt, Human
aucuugaccaagcagga

SEQ ID NO: 2110658 - RNA, 19 nt, Human
aucuugaccaagcaggaag

SEQ ID NO: 2110659 - RNA, 21 nt, Human
aucuugaccaagcaggaagcu

SEQ ID NO: 2110660 - RNA, 22 nt, Human
aucuugaccaagcaggaagcuc

SEQ ID NO: 2110661 - RNA, 15 nt, Human
aucuuagcugccaag

SEQ ID NO: 2110662 - RNA, 16 nt, Human
aucuuagcugccaagu

SEQ ID NO: 2110663 - RNA, 20 nt, Human
aucuuaggggagagcuuucu

SEQ ID NO: 2110664 - RNA, 21 nt, Human
aucugugaaaugcuggcauuu

SEQ ID NO: 2110665 - RNA, 21 nt, Human
aucuguuguguacguggagag

SEQ ID NO: 2110666 - RNA, 16 nt, Human
aucuguguuuuugaaa

SEQ ID NO: 2110667 - RNA, 18 nt, Human
aucuguguuuuugaaaua

SEQ ID NO: 2110668 - RNA, 21 nt, Human
aucuguguuuuugaaauauua

SEQ ID NO: 2110669 - RNA, 14 nt, Human
aucuuacugaaggu

SEQ ID NO: 2110670 - RNA, 15 nt, Human
aucuuacugaaggua

SEQ ID NO: 2110671 - RNA, 23 nt, Human
aucuguuguguacguggagaggg

SEQ ID NO: 2110672 - RNA, 21 nt, Human
aucuguuuaaaguagauuaga

SEQ ID NO: 2110673 - RNA, 14 nt, Human
aucuuacaaagugu

SEQ ID NO: 2110674 - RNA, 18 nt, Human
aucuuacaaaguguauuu

SEQ ID NO: 2110675 - RNA, 22 nt, Human
aucuuacaaaguguauuuuaua

SEQ ID NO: 2110676 - RNA, 12 nt, Human
caaagaaauuuc

SEQ ID NO: 2110677 - RNA, 18 nt, Human
caaagaaauuuccacuca

SEQ ID NO: 2110678 - RNA, 19 nt, Human
caaagaaauuuccacucag

SEQ ID NO: 2110679 - RNA, 21 nt, Human
caaacucuugaccucagguga

SEQ ID NO: 2110680 - RNA, 14 nt, Human
caaacugaagccag

SEQ ID NO: 2110681 - RNA, 15 nt, Human
caaacugaagccaga

SEQ ID NO: 2110682 - RNA, 20 nt, Human
caaacucuugaccucaggug

SEQ ID NO: 2110683 - RNA, 19 nt, Human
caaacucuugaccucaggu

SEQ ID NO: 2110684 - RNA, 17 nt, Human
caaacucuugaccucag

SEQ ID NO: 2110685 - RNA, 16 nt, Human
caaacucugccagcca

SEQ ID NO: 2110686 - RNA, 12 nt, Human
caaaccuggaga

SEQ ID NO: 2110687 - RNA, 13 nt, Human
caaaccuggagau

SEQ ID NO: 2110688 - RNA, 13 nt, Human
caaaccugcccca

SEQ ID NO: 2110689 - RNA, 16 nt, Human
caaaccugccccaucc

SEQ ID NO: 2110690 - RNA, 18 nt, Human
caaaccuuuauuuuagaa

SEQ ID NO: 2110691 - RNA, 20 nt, Human
caaaccuuuauuuuagaauu

SEQ ID NO: 2110692 - RNA, 14 nt, Human
caaacaccugcuga

SEQ ID NO: 2110693 - RNA, 22 nt, Human
caaacaccugcugauguggcaa

SEQ ID NO: 2110694 - RNA, 17 nt, Human
caaacaaauaugcaaaa

SEQ ID NO: 2110695 - RNA, 20 nt, Human
caaacaaagccagaagcuga

SEQ ID NO: 2110696 - RNA, 20 nt, Human
caaacaaccccccaucacaa

SEQ ID NO: 2110697 - RNA, 15 nt, Human
caaacaaauaugcaa

SEQ ID NO: 2110698 - RNA, 14 nt, Human
caaacaaauaugca

SEQ ID NO: 2110699 - RNA, 17 nt, Human
caaaaucacuuccauag

SEQ ID NO: 2110700 - RNA, 15 nt, Human
caaacaaacaagcua

SEQ ID NO: 2110701 - RNA, 13 nt, Human
caaacaaagccag

SEQ ID NO: 2110702 - RNA, 14 nt, Human
caaacaaagccaga

SEQ ID NO: 2110703 - RNA, 16 nt, Human
caaacaaagccagaag

SEQ ID NO: 2110704 - RNA, 21 nt, Human
caaaaucuguagagcagggca

SEQ ID NO: 2110705 - RNA, 13 nt, Human
caaaaucugucca

SEQ ID NO: 2110706 - RNA, 21 nt, Human
caaaaucuguccaaaggaggc

SEQ ID NO: 2110707 - RNA, 14 nt, Human
caaaaugacaauga

SEQ ID NO: 2110708 - RNA, 15 nt, Human
caaaaugacaaugau

SEQ ID NO: 2110709 - RNA, 20 nt, Human
caaaauuuccaguaccuuug

SEQ ID NO: 2110710 - RNA, 12 nt, Human
caaaauuugaaa

SEQ ID NO: 2110711 - RNA, 14 nt, Human
caaaauuugaaauu

SEQ ID NO: 2110712 - RNA, 14 nt, Human
caaaauuuccagua

SEQ ID NO: 2110713 - RNA, 15 nt, Human
caaaauuuccaguac

SEQ ID NO: 2110714 - RNA, 17 nt, Human
caaaauuuccaguaccu

SEQ ID NO: 2110715 - RNA, 18 nt, Human
caaaauuuccaguaccuu

SEQ ID NO: 2110716 - RNA, 19 nt, Human
caaaauuuccaguaccuuu

SEQ ID NO: 2110717 - RNA, 23 nt, Human
caaaauuuuauagcucaguuuau

SEQ ID NO: 2110718 - RNA, 18 nt, Human
caaaauuuuauuccuaua

SEQ ID NO: 2110719 - RNA, 21 nt, Human
caaaauuuuauagcucaguuu

SEQ ID NO: 2110720 - RNA, 13 nt, Human
caaaauuuuauuc

SEQ ID NO: 2110721 - RNA, 14 nt, Human
caaaauuuuauucc

SEQ ID NO: 2110722 - RNA, 21 nt, Human
caaaaucgaugcagugcuucc

SEQ ID NO: 2110723 - RNA, 16 nt, Human
caaaaucauuuuaaug

SEQ ID NO: 2110724 - RNA, 14 nt, Human
caaaauauguucuu

SEQ ID NO: 2110725 - RNA, 13 nt, Human
caaaauauaaagc

SEQ ID NO: 2110726 - RNA, 19 nt, Human
caaaauauguugaugaaaa

SEQ ID NO: 2110727 - RNA, 14 nt, Human
caaaauaaugucuu

SEQ ID NO: 2110728 - RNA, 15 nt, Human
caaaauaaugucuug

SEQ ID NO: 2110729 - RNA, 16 nt, Human
caaaauaaugucuugu

SEQ ID NO: 2110730 - RNA, 17 nt, Human
caaaauaaugucuuguu

SEQ ID NO: 2110731 - RNA, 18 nt, Human
caaaauaaugucuuguua

SEQ ID NO: 2110732 - RNA, 20 nt, Human
caaaauaaugucuuguuaau

SEQ ID NO: 2110733 - RNA, 21 nt, Human
caaaauaaugucuuguuaaua

SEQ ID NO: 2110734 - RNA, 18 nt, Human
caaaauaaaguuacauug

SEQ ID NO: 2110735 - RNA, 19 nt, Human
caaaauaaaguuacauugc

SEQ ID NO: 2110736 - RNA, 23 nt, Human
caaaauaaaguuacauugcuggu

SEQ ID NO: 2110737 - RNA, 11 nt, Human
caaaauaaauu

SEQ ID NO: 2110738 - RNA, 14 nt, Human
caaaauaaauugaa

SEQ ID NO: 2110739 - RNA, 18 nt, Human
caaaauaaauugaaauau

SEQ ID NO: 2110740 - RNA, 11 nt, Human
caaaauaaaaa

SEQ ID NO: 2110741 - RNA, 15 nt, Human
caaaauaaaaaccaa

SEQ ID NO: 2110742 - RNA, 14 nt, Human
caaaaguuucucuu

SEQ ID NO: 2110743 - RNA, 16 nt, Human
caaaacuccugucuuu

SEQ ID NO: 2110744 - RNA, 21 nt, Human
caaaacucauuuccuauguaa

SEQ ID NO: 2110745 - RNA, 13 nt, Human
caaaacggggcag

SEQ ID NO: 2110746 - RNA, 19 nt, Human
caaaacgcauggagugugu

SEQ ID NO: 2110747 - RNA, 23 nt, Human
caaaacgcauggaguguguauug

SEQ ID NO: 2110748 - RNA, 15 nt, Human
caaaacgguuuuacu

SEQ ID NO: 2110749 - RNA, 21 nt, Human
caaaacgguuuuacugcagcu

SEQ ID NO: 2110750 - RNA, 13 nt, Human
caacaggcugggc

SEQ ID NO: 2110751 - RNA, 22 nt, Human
caaauaaccaacccuucccuga

SEQ ID NO: 2110752 - RNA, 13 nt, Human
caacgaaaagcac

SEQ ID NO: 2110753 - RNA, 18 nt, Human
caacgaaaagcacaucca

SEQ ID NO: 2110754 - RNA, 22 nt, Human
caacgaaaagcacauccaggca

SEQ ID NO: 2110755 - RNA, 13 nt, Human
caacgaagaaaaa

SEQ ID NO: 2110756 - RNA, 14 nt, Human
caacgaagaaaaaa

SEQ ID NO: 2110757 - RNA, 20 nt, Human
caacgaagaaaaaaaauaac

SEQ ID NO: 2110758 - RNA, 13 nt, Human
caacgacaaagcc

SEQ ID NO: 2110759 - RNA, 13 nt, Human
caacaucaauguu

SEQ ID NO: 2110760 - RNA, 14 nt, Human
caacguggcccaga

SEQ ID NO: 2110761 - RNA, 13 nt, Human
caacguggcccag

SEQ ID NO: 2110762 - RNA, 12 nt, Human
caacguggggca

SEQ ID NO: 2110763 - RNA, 15 nt, Human
caacguggggcagca

SEQ ID NO: 2110764 - RNA, 17 nt, Human
caacguggggcagcaca

SEQ ID NO: 2110765 - RNA, 21 nt, Human
caacguggcccagagaagcca

SEQ ID NO: 2110766 - RNA, 20 nt, Human
caacguggcccagagaagcc

SEQ ID NO: 2110767 - RNA, 19 nt, Human
caacguggcccagagaagc

SEQ ID NO: 2110768 - RNA, 17 nt, Human
caacguggcccagagaa

SEQ ID NO: 2110769 - RNA, 18 nt, Human
caacguggggcagcacag

SEQ ID NO: 2110770 - RNA, 16 nt, Human
caacuuguaaaugugg

SEQ ID NO: 2110771 - RNA, 12 nt, Human
caacuugggaac

SEQ ID NO: 2110772 - RNA, 23 nt, Human
caacuuguauuaaagacagaggc

SEQ ID NO: 2110773 - RNA, 17 nt, Human
caacuugucuuuuucug

SEQ ID NO: 2110774 - RNA, 19 nt, Human
caacuugucuuuuucugga

SEQ ID NO: 2110775 - RNA, 22 nt, Human
caacuugucuuuuucuggacug

SEQ ID NO: 2110776 - RNA, 14 nt, Human
caagaggagaucca

SEQ ID NO: 2110777 - RNA, 12 nt, Human
caagagcugagg

SEQ ID NO: 2110778 - RNA, 18 nt, Human
caagagcgaaacuccguc

SEQ ID NO: 2110779 - RNA, 22 nt, Human
caagagccuugguguccaccug

SEQ ID NO: 2110780 - RNA, 13 nt, Human
caagagcccagca

SEQ ID NO: 2110781 - RNA, 19 nt, Human
caagagcccagcagggccu

SEQ ID NO: 2110782 - RNA, 23 nt, Human
caagagccuugguguccaccugg

SEQ ID NO: 2110783 - RNA, 13 nt, Human
caagagccacagu

SEQ ID NO: 2110784 - RNA, 21 nt, Human
caagagcagccuguggcaucu

SEQ ID NO: 2110785 - RNA, 18 nt, Human
caagagcagccuguggca

SEQ ID NO: 2110786 - RNA, 20 nt, Human
caagagcagccuguggcauc

SEQ ID NO: 2110787 - RNA, 15 nt, Human
caagagcagaggcag

SEQ ID NO: 2110788 - RNA, 16 nt, Human
caagagcagaggcagc

SEQ ID NO: 2110789 - RNA, 14 nt, Human
caagagcagccugu

SEQ ID NO: 2110790 - RNA, 15 nt, Human
caagagcagccugug

SEQ ID NO: 2110791 - RNA, 16 nt, Human
caagagcagccugugg

SEQ ID NO: 2110792 - RNA, 17 nt, Human
caagagcagccuguggc

SEQ ID NO: 2110793 - RNA, 13 nt, Human
caagagagauguu

SEQ ID NO: 2110794 - RNA, 15 nt, Human
caagagagauguuuu

SEQ ID NO: 2110795 - RNA, 14 nt, Human
caagagagaaagaa

SEQ ID NO: 2110796 - RNA, 17 nt, Human
caagagagaaagaagua

SEQ ID NO: 2110797 - RNA, 23 nt, Human
caagagaugaagagugagagggc

SEQ ID NO: 2110798 - RNA, 22 nt, Human
caagagaauugcuugaacccag

SEQ ID NO: 2110799 - RNA, 13 nt, Human
caagagagaaaga

SEQ ID NO: 2110800 - RNA, 19 nt, Human
caagagaaggggaagcacu

SEQ ID NO: 2110801 - RNA, 13 nt, Human
caacuaacaagaa

SEQ ID NO: 2110802 - RNA, 15 nt, Human
caacagcucaagucu

SEQ ID NO: 2110803 - RNA, 22 nt, Human
caacagcucaagucuucccuga

SEQ ID NO: 2110804 - RNA, 14 nt, Human
caacaggaacugug

SEQ ID NO: 2110805 - RNA, 14 nt, Human
caacaggagcuggg

SEQ ID NO: 2110806 - RNA, 15 nt, Human
caacaggagcuggga

SEQ ID NO: 2110807 - RNA, 21 nt, Human
caacaggagcugggauccuaa

SEQ ID NO: 2110808 - RNA, 12 nt, Human
caacaggcuggg

SEQ ID NO: 2110809 - RNA, 22 nt, Human
caacaggagcugggauccuaag

SEQ ID NO: 2110810 - RNA, 18 nt, Human
caaccugcucuccucuug

SEQ ID NO: 2110811 - RNA, 23 nt, Human
caaccugcucuccucuugccacu

SEQ ID NO: 2110812 - RNA, 21 nt, Human
caaccugcucuccucuugcca

SEQ ID NO: 2110813 - RNA, 23 nt, Human
caacauagugagaccccugucuc

SEQ ID NO: 2110814 - RNA, 20 nt, Human
caaccuucuguggcucacag

SEQ ID NO: 2110815 - RNA, 19 nt, Human
caaccuucuguggcucaca

SEQ ID NO: 2110816 - RNA, 17 nt, Human
caaccuucuguggcuca

SEQ ID NO: 2110817 - RNA, 16 nt, Human
caaccuucuguggcuc

SEQ ID NO: 2110818 - RNA, 16 nt, Human
caaccuggucacagga

SEQ ID NO: 2110819 - RNA, 19 nt, Human
caaauuuguaggguuucua

SEQ ID NO: 2110820 - RNA, 21 nt, Human
caaauuagguuuuguacaauu

SEQ ID NO: 2110821 - RNA, 18 nt, Human
caaauuagguuuuguaca

SEQ ID NO: 2110822 - RNA, 19 nt, Human
caaauuagguuuuguacaa

SEQ ID NO: 2110823 - RNA, 20 nt, Human
caaauuagguuuuguacaau

SEQ ID NO: 2110824 - RNA, 15 nt, Human
caacacuucagacug

SEQ ID NO: 2110825 - RNA, 19 nt, Human
caacacuucagacugcaag

SEQ ID NO: 2110826 - RNA, 15 nt, Human
caacagaagcuucca

SEQ ID NO: 2110827 - RNA, 20 nt, Human
caacagaagucaugaagccc

SEQ ID NO: 2110828 - RNA, 22 nt, Human
caacagaagucaugaagcccaa

SEQ ID NO: 2110829 - RNA, 23 nt, Human
caacagaagucaugaagcccaag

SEQ ID NO: 2110830 - RNA, 18 nt, Human
caacagagaaggcaggaa

SEQ ID NO: 2110831 - RNA, 17 nt, Human
caacagagaaggcagga

SEQ ID NO: 2110832 - RNA, 14 nt, Human
caacagauacugga

SEQ ID NO: 2110833 - RNA, 17 nt, Human
caacagauacuggaagu

SEQ ID NO: 2110834 - RNA, 19 nt, Human
caacagagugagacccugu

SEQ ID NO: 2110835 - RNA, 23 nt, Human
caacagagugagacccugucucu

SEQ ID NO: 2110836 - RNA, 16 nt, Human
caaaucaaguuuccaa

SEQ ID NO: 2110837 - RNA, 21 nt, Human
caaaucaaguuuccaagcaaa

SEQ ID NO: 2110838 - RNA, 22 nt, Human
caaaucaaguuuccaagcaaau

SEQ ID NO: 2110839 - RNA, 23 nt, Human
caaaucaaguuuccaagcaaaug

SEQ ID NO: 2110840 - RNA, 24 nt, Human
caaaucaaguuuccaagcaaaugu

SEQ ID NO: 2110841 - RNA, 15 nt, Human
caaauauauucucuu

SEQ ID NO: 2110842 - RNA, 17 nt, Human
caaauauauucucuuug

SEQ ID NO: 2110843 - RNA, 18 nt, Human
caaauauauucucuuugg

SEQ ID NO: 2110844 - RNA, 20 nt, Human
caaauauauucucuuuggug

SEQ ID NO: 2110845 - RNA, 14 nt, Human
caaauggaggaaua

SEQ ID NO: 2110846 - RNA, 14 nt, Human
caaauguuacauag

SEQ ID NO: 2110847 - RNA, 15 nt, Human
caaauguuacauagu

SEQ ID NO: 2110848 - RNA, 18 nt, Human
caaauguuacauagugua

SEQ ID NO: 2110849 - RNA, 13 nt, Human
caaauguuaugca

SEQ ID NO: 2110850 - RNA, 21 nt, Human
caaauguuaugcauaaaguca

SEQ ID NO: 2110851 - RNA, 19 nt, Human
caaagugcugggauuacaa

SEQ ID NO: 2110852 - RNA, 13 nt, Human
caaagugcuggga

SEQ ID NO: 2110853 - RNA, 19 nt, Human
caaagagaguuaaucaacu

SEQ ID NO: 2110854 - RNA, 19 nt, Human
caaagaaggaaaaggcagg

SEQ ID NO: 2110855 - RNA, 14 nt, Human
caaagaagacaaca

SEQ ID NO: 2110856 - RNA, 17 nt, Human
caaagaaggaauucuag

SEQ ID NO: 2110857 - RNA, 20 nt, Human
caaaguucccuacuuccugu

SEQ ID NO: 2110858 - RNA, 16 nt, Human
caaaguuaaccuaccu

SEQ ID NO: 2110859 - RNA, 17 nt, Human
caaaguuaaccuaccug

SEQ ID NO: 2110860 - RNA, 20 nt, Human
caaaguuaaccuaccuguaa

SEQ ID NO: 2110861 - RNA, 21 nt, Human
caaaguuaaccuaccuguaac

SEQ ID NO: 2110862 - RNA, 11 nt, Human
caaaguguuaa

SEQ ID NO: 2110863 - RNA, 13 nt, Human
caaagagcugccu

SEQ ID NO: 2110864 - RNA, 14 nt, Human
caaagagcugccua

SEQ ID NO: 2110865 - RNA, 16 nt, Human
caaagagaaugccauu

SEQ ID NO: 2110866 - RNA, 19 nt, Human
caaaguguauuuuauaaaa

SEQ ID NO: 2110867 - RNA, 22 nt, Human
caaaguguauuuuauaaaauua

SEQ ID NO: 2110868 - RNA, 23 nt, Human
caaaguguauuuuauaaaauuaa

SEQ ID NO: 2110869 - RNA, 23 nt, Human
caaagugcugggauuacaagcgu

SEQ ID NO: 2110870 - RNA, 19 nt, Human
caauagauauuuaccuuuu

SEQ ID NO: 2110871 - RNA, 23 nt, Human
caauagaaacucaccauguaaaa

SEQ ID NO: 2110872 - RNA, 21 nt, Human
caauaagagcguuugcccaaa

SEQ ID NO: 2110873 - RNA, 12 nt, Human
caauagagacug

SEQ ID NO: 2110874 - RNA, 14 nt, Human
caauagagacugua

SEQ ID NO: 2110875 - RNA, 15 nt, Human
caauagagacuguag

SEQ ID NO: 2110876 - RNA, 16 nt, Human
caauagagacuguaga

SEQ ID NO: 2110877 - RNA, 22 nt, Human
caauagagacuguagauugcuu

SEQ ID NO: 2110878 - RNA, 23 nt, Human
caauagaaggauguacauuucca

SEQ ID NO: 2110879 - RNA, 14 nt, Human
caauaacuacugug

SEQ ID NO: 2110880 - RNA, 15 nt, Human
caauaacuacugugu

SEQ ID NO: 2110881 - RNA, 16 nt, Human
caauaacuacuguguu

SEQ ID NO: 2110882 - RNA, 17 nt, Human
caauaacuacuguguuc

SEQ ID NO: 2110883 - RNA, 18 nt, Human
caauaacuacuguguucc

SEQ ID NO: 2110884 - RNA, 19 nt, Human
caauaacuacuguguuccu

SEQ ID NO: 2110885 - RNA, 20 nt, Human
caauaacuacuguguuccug

SEQ ID NO: 2110886 - RNA, 21 nt, Human
caauaacuacuguguuccugg

SEQ ID NO: 2110887 - RNA, 18 nt, Human
caauaagcaucaaacucu

SEQ ID NO: 2110888 - RNA, 19 nt, Human
caauaagcaucaaacucuu

SEQ ID NO: 2110889 - RNA, 22 nt, Human
caauaacuacuguguuccuggc

SEQ ID NO: 2110890 - RNA, 14 nt, Human
caauaguguguucu

SEQ ID NO: 2110891 - RNA, 15 nt, Human
caauaguguguucug

SEQ ID NO: 2110892 - RNA, 16 nt, Human
caauaguguguucuga

SEQ ID NO: 2110893 - RNA, 17 nt, Human
caauaguguguucugau

SEQ ID NO: 2110894 - RNA, 23 nt, Human
caauaguguguucugauuagaaa

SEQ ID NO: 2110895 - RNA, 17 nt, Human
caauagcacuuucauug

SEQ ID NO: 2110896 - RNA, 20 nt, Human
caauagcacuuucauugcca

SEQ ID NO: 2110897 - RNA, 21 nt, Human
caauagcacuuucauugccag

SEQ ID NO: 2110898 - RNA, 23 nt, Human
caauagcacuuucauugccagug

SEQ ID NO: 2110899 - RNA, 19 nt, Human
caaggguucagagacucag

SEQ ID NO: 2110900 - RNA, 17 nt, Human
caagggucuagggagag

SEQ ID NO: 2110901 - RNA, 16 nt, Human
caaggguggcauccca

SEQ ID NO: 2110902 - RNA, 21 nt, Human
caaggguggcaucccaguggc

SEQ ID NO: 2110903 - RNA, 14 nt, Human
caauaaauguauuc

SEQ ID NO: 2110904 - RNA, 15 nt, Human
caauaaauguauuca

SEQ ID NO: 2110905 - RNA, 18 nt, Human
caauaaauguauucaaau

SEQ ID NO: 2110906 - RNA, 17 nt, Human
caauaaaugugcuuaug

SEQ ID NO: 2110907 - RNA, 12 nt, Human
caauaaaugaau

SEQ ID NO: 2110908 - RNA, 16 nt, Human
caauaaauagaccauu

SEQ ID NO: 2110909 - RNA, 16 nt, Human
caagggucuagggaga

SEQ ID NO: 2110910 - RNA, 23 nt, Human
caaggguauccaaguuggacugg

SEQ ID NO: 2110911 - RNA, 18 nt, Human
caaggcugggggaagaag

SEQ ID NO: 2110912 - RNA, 13 nt, Human
caagcuuuuuuau

SEQ ID NO: 2110913 - RNA, 14 nt, Human
caagcuuuuuuauu

SEQ ID NO: 2110914 - RNA, 15 nt, Human
caagcuuuuuuauuu

SEQ ID NO: 2110915 - RNA, 23 nt, Human
caagcuuuuuuauuuuuuauaca

SEQ ID NO: 2110916 - RNA, 14 nt, Human
caaggagaaacaga

SEQ ID NO: 2110917 - RNA, 16 nt, Human
caaggagaaacagaga

SEQ ID NO: 2110918 - RNA, 18 nt, Human
caaggagaaacagagaca

SEQ ID NO: 2110919 - RNA, 20 nt, Human
caaggagaaacagagacagg

SEQ ID NO: 2110920 - RNA, 19 nt, Human
caaggagaaacagagacag

SEQ ID NO: 2110921 - RNA, 23 nt, Human
caagcuggucccacucaguccau

SEQ ID NO: 2110922 - RNA, 22 nt, Human
caagcuggucccacucagucca

SEQ ID NO: 2110923 - RNA, 23 nt, Human
caaggagaugaagcaaacacauu

SEQ ID NO: 2110924 - RNA, 13 nt, Human
caaggagaugaag

SEQ ID NO: 2110925 - RNA, 17 nt, Human
caaggcugcagugagcc

SEQ ID NO: 2110926 - RNA, 22 nt, Human
caaggcugcagugagccgagau

SEQ ID NO: 2110927 - RNA, 18 nt, Human
caagcgauucuucugcuu

SEQ ID NO: 2110928 - RNA, 21 nt, Human
caagcugcacccucaggcagg

SEQ ID NO: 2110929 - RNA, 17 nt, Human
caagcgauucuucugcu

SEQ ID NO: 2110930 - RNA, 15 nt, Human
caagcgauucuucug

SEQ ID NO: 2110931 - RNA, 21 nt, Human
caagcuggucccacucagucc

SEQ ID NO: 2110932 - RNA, 12 nt, Human
caagcugccucc

SEQ ID NO: 2110933 - RNA, 13 nt, Human
caagcugccuccc

SEQ ID NO: 2110934 - RNA, 14 nt, Human
caagcugccucccu

SEQ ID NO: 2110935 - RNA, 15 nt, Human
caagcugccucccug

SEQ ID NO: 2110936 - RNA, 19 nt, Human
caagcugccucccugucca

SEQ ID NO: 2110937 - RNA, 20 nt, Human
caagcugccucccuguccac

SEQ ID NO: 2110938 - RNA, 14 nt, Human
caagcugcuguggc

SEQ ID NO: 2110939 - RNA, 22 nt, Human
caagcugcacccucaggcaggu

SEQ ID NO: 2110940 - RNA, 14 nt, Human
caagauaaaggaca

SEQ ID NO: 2110941 - RNA, 16 nt, Human
caagauaaaggacagu

SEQ ID NO: 2110942 - RNA, 18 nt, Human
caagauaaaggacaguga

SEQ ID NO: 2110943 - RNA, 18 nt, Human
caagaguuuucuuccuug

SEQ ID NO: 2110944 - RNA, 14 nt, Human
caagagugauucuu

SEQ ID NO: 2110945 - RNA, 15 nt, Human
caagagugauucuug

SEQ ID NO: 2110946 - RNA, 16 nt, Human
caagagugauucuugc

SEQ ID NO: 2110947 - RNA, 19 nt, Human
caagagugauucuugcugc

SEQ ID NO: 2110948 - RNA, 15 nt, Human
caagaggcugaggca

SEQ ID NO: 2110949 - RNA, 18 nt, Human
caagccuguaaucccagc

SEQ ID NO: 2110950 - RNA, 21 nt, Human
caagccuguaaucccagcuac

SEQ ID NO: 2110951 - RNA, 17 nt, Human
caagcgaggucaacaga

SEQ ID NO: 2110952 - RNA, 20 nt, Human
caagcgaggucaacagagaa

SEQ ID NO: 2110953 - RNA, 11 nt, Human
cacacacagcu

SEQ ID NO: 2110954 - RNA, 13 nt, Human
cacaaaggagagc

SEQ ID NO: 2110955 - RNA, 18 nt, Human
cacaaagcggggggaggg

SEQ ID NO: 2110956 - RNA, 19 nt, Human
cacaaagcggggggagggu

SEQ ID NO: 2110957 - RNA, 18 nt, Human
caauuccaugcuauaaaa

SEQ ID NO: 2110958 - RNA, 14 nt, Human
cacaaguuguguuu

SEQ ID NO: 2110959 - RNA, 21 nt, Human
cacacaaaauguacccaguau

SEQ ID NO: 2110960 - RNA, 13 nt, Human
cacacaaagagag

SEQ ID NO: 2110961 - RNA, 14 nt, Human
cacacaaagagagu

SEQ ID NO: 2110962 - RNA, 17 nt, Human
cacacaaagagaguuaa

SEQ ID NO: 2110963 - RNA, 13 nt, Human
cacacaaagguau

SEQ ID NO: 2110964 - RNA, 18 nt, Human
cacacaaagguauaauuu

SEQ ID NO: 2110965 - RNA, 13 nt, Human
cacacacacacac

SEQ ID NO: 2110966 - RNA, 15 nt, Human
cacacacacacacaa

SEQ ID NO: 2110967 - RNA, 15 nt, Human
cacacacacacacag

SEQ ID NO: 2110968 - RNA, 11 nt, Human
cacaauauuuu

SEQ ID NO: 2110969 - RNA, 22 nt, Human
cacaaugaaaugcucuccuuuc

SEQ ID NO: 2110970 - RNA, 22 nt, Human
cacaaugcagugccuuucuucu

SEQ ID NO: 2110971 - RNA, 11 nt, Human
cacaaugucuu

SEQ ID NO: 2110972 - RNA, 12 nt, Human
cacaaugucuug

SEQ ID NO: 2110973 - RNA, 14 nt, Human
cacaaugucuuggu

SEQ ID NO: 2110974 - RNA, 13 nt, Human
cacaauacaauaa

SEQ ID NO: 2110975 - RNA, 12 nt, Human
cacaauaugaau

SEQ ID NO: 2110976 - RNA, 19 nt, Human
cacaauaaauguauucaaa

SEQ ID NO: 2110977 - RNA, 20 nt, Human
cacaauaaauguauucaaau

SEQ ID NO: 2110978 - RNA, 17 nt, Human
cacacacgcgugcacac

SEQ ID NO: 2110979 - RNA, 12 nt, Human
cacacacguuau

SEQ ID NO: 2110980 - RNA, 23 nt, Human
cacacacagaggaagagcaggca

SEQ ID NO: 2110981 - RNA, 15 nt, Human
cacacaccuguaguc

SEQ ID NO: 2110982 - RNA, 20 nt, Human
cacacaccuguagucccagc

SEQ ID NO: 2110983 - RNA, 19 nt, Human
cacacaccuguagucccag

SEQ ID NO: 2110984 - RNA, 12 nt, Human
cacacacagagg

SEQ ID NO: 2110985 - RNA, 14 nt, Human
cacacacagaggaa

SEQ ID NO: 2110986 - RNA, 13 nt, Human
cacacacacucua

SEQ ID NO: 2110987 - RNA, 16 nt, Human
cacacacacacacagg

SEQ ID NO: 2110988 - RNA, 13 nt, Human
cacacacacacag

SEQ ID NO: 2110989 - RNA, 14 nt, Human
cacacacacacagg

SEQ ID NO: 2110990 - RNA, 16 nt, Human
cacacacacacaggag

SEQ ID NO: 2110991 - RNA, 14 nt, Human
cacacacacaggag

SEQ ID NO: 2110992 - RNA, 12 nt, Human
cacacacacagg

SEQ ID NO: 2110993 - RNA, 13 nt, Human
cacacacacagga

SEQ ID NO: 2110994 - RNA, 16 nt, Human
caauguuuaaaaaagu

SEQ ID NO: 2110995 - RNA, 18 nt, Human
caauguuuaaaaaaguuu

SEQ ID NO: 2110996 - RNA, 20 nt, Human
caauguuuaaaaaaguuuaa

SEQ ID NO: 2110997 - RNA, 21 nt, Human
caauguuuaaaaaaguuuaaa

SEQ ID NO: 2110998 - RNA, 23 nt, Human
caauguuuaaaaaaguuuaaaau

SEQ ID NO: 2110999 - RNA, 20 nt, Human
caauguuuaugcaaggaagg

SEQ ID NO: 2111000 - RNA, 23 nt, Human
caauguuuaugcaaggaaggaaa

SEQ ID NO: 2111001 - RNA, 13 nt, Human
caauguuucuuuu

SEQ ID NO: 2111002 - RNA, 16 nt, Human
caauguuucuuuuauc

SEQ ID NO: 2111003 - RNA, 18 nt, Human
caauguuucuuuuaucac

SEQ ID NO: 2111004 - RNA, 21 nt, Human
caauguggccuaaaaaugcaa

SEQ ID NO: 2111005 - RNA, 23 nt, Human
caaugugcuacugauuguuucau

SEQ ID NO: 2111006 - RNA, 21 nt, Human
caaugugguugcaaggccgcu

SEQ ID NO: 2111007 - RNA, 13 nt, Human
caauauccucgcu

SEQ ID NO: 2111008 - RNA, 14 nt, Human
caauauccucgcuc

SEQ ID NO: 2111009 - RNA, 19 nt, Human
caauauccucgcucccggg

SEQ ID NO: 2111010 - RNA, 22 nt, Human
caaugugaaaagaaaaaugagc

SEQ ID NO: 2111011 - RNA, 14 nt, Human
caaugugaaucaga

SEQ ID NO: 2111012 - RNA, 18 nt, Human
caaugugaaucagacccu

SEQ ID NO: 2111013 - RNA, 19 nt, Human
caaugugaaucagacccua

SEQ ID NO: 2111014 - RNA, 13 nt, Human
caaugugccccca

SEQ ID NO: 2111015 - RNA, 16 nt, Human
caaugugcuacugauu

SEQ ID NO: 2111016 - RNA, 15 nt, Human
caauuaggaagugua

SEQ ID NO: 2111017 - RNA, 16 nt, Human
caauuaggaaguguaa

SEQ ID NO: 2111018 - RNA, 20 nt, Human
caauuaggaaguguaacagc

SEQ ID NO: 2111019 - RNA, 23 nt, Human
caauuaggaaguguaacagcuga

SEQ ID NO: 2111020 - RNA, 22 nt, Human
caauuaggaaguguaacagcug

SEQ ID NO: 2111021 - RNA, 14 nt, Human
caauuccucuggga

SEQ ID NO: 2111022 - RNA, 13 nt, Human
caauuccucuggg

SEQ ID NO: 2111023 - RNA, 15 nt, Human
caauuccuagauaaa

SEQ ID NO: 2111024 - RNA, 16 nt, Human
caauuccuagauaaaa

SEQ ID NO: 2111025 - RNA, 18 nt, Human
caauuccuagauaaaaag

SEQ ID NO: 2111026 - RNA, 22 nt, Human
caauuccuagauaaaaagaugg

SEQ ID NO: 2111027 - RNA, 15 nt, Human
caauuccucugggaa

SEQ ID NO: 2111028 - RNA, 12 nt, Human
caauuccugggc

SEQ ID NO: 2111029 - RNA, 16 nt, Human
caauuccugggcccca

SEQ ID NO: 2111030 - RNA, 13 nt, Human
caauuccugggcc

SEQ ID NO: 2111031 - RNA, 22 nt, Human
cacaaaaaaaauuuaaaaaaau

SEQ ID NO: 2111032 - RNA, 15 nt, Human
cacaaaaucugucca

SEQ ID NO: 2111033 - RNA, 16 nt, Human
cacaaaauugggaaag

SEQ ID NO: 2111034 - RNA, 14 nt, Human
cacaaacaaacaag

SEQ ID NO: 2111035 - RNA, 18 nt, Human
cacaaacaaacaagcuag

SEQ ID NO: 2111036 - RNA, 19 nt, Human
cacaaacaaacaagcuagg

SEQ ID NO: 2111037 - RNA, 18 nt, Human
cacaaagcccuuccaugu

SEQ ID NO: 2111038 - RNA, 17 nt, Human
cacacuccccugcacug

SEQ ID NO: 2111039 - RNA, 14 nt, Human
cacacuccaucagc

SEQ ID NO: 2111040 - RNA, 15 nt, Human
cacacuccaucagcu

SEQ ID NO: 2111041 - RNA, 17 nt, Human
cacacuccaucagcuua

SEQ ID NO: 2111042 - RNA, 12 nt, Human
cacagagaaagu

SEQ ID NO: 2111043 - RNA, 13 nt, Human
cacagaggaagag

SEQ ID NO: 2111044 - RNA, 21 nt, Human
cacagagaaaguacuucucca

SEQ ID NO: 2111045 - RNA, 20 nt, Human
cacagagaaaguacuucucc

SEQ ID NO: 2111046 - RNA, 19 nt, Human
cacagagaaaguacuucuc

SEQ ID NO: 2111047 - RNA, 12 nt, Human
cacagauggauu

SEQ ID NO: 2111048 - RNA, 11 nt, Human
cacagaugccu

SEQ ID NO: 2111049 - RNA, 19 nt, Human
cacagauggauuugccugu

SEQ ID NO: 2111050 - RNA, 17 nt, Human
cacagauggauuugccu

SEQ ID NO: 2111051 - RNA, 18 nt, Human
cacagaguggucuuucug

SEQ ID NO: 2111052 - RNA, 22 nt, Human
cacagaucacagcuucagccag

SEQ ID NO: 2111053 - RNA, 19 nt, Human
cacagaucacagcuucagc

SEQ ID NO: 2111054 - RNA, 14 nt, Human
cacagaucacagcu

SEQ ID NO: 2111055 - RNA, 18 nt, Human
cacagaggcuucuucaga

SEQ ID NO: 2111056 - RNA, 17 nt, Human
cacagaggaagagcagg

SEQ ID NO: 2111057 - RNA, 15 nt, Human
cacagaggaagagca

SEQ ID NO: 2111058 - RNA, 16 nt, Human
cacagaggaagagcag

SEQ ID NO: 2111059 - RNA, 13 nt, Human
cacagaggcugcc

SEQ ID NO: 2111060 - RNA, 23 nt, Human
cacagcccugucagugcagcccg

SEQ ID NO: 2111061 - RNA, 18 nt, Human
cacagcugcagagacaga

SEQ ID NO: 2111062 - RNA, 19 nt, Human
cacagcugcagagacagag

SEQ ID NO: 2111063 - RNA, 21 nt, Human
cacagcccugucagugcagcc

SEQ ID NO: 2111064 - RNA, 14 nt, Human
cacagcccugucag

SEQ ID NO: 2111065 - RNA, 12 nt, Human
cacagcccuguc

SEQ ID NO: 2111066 - RNA, 18 nt, Human
cacagcccugucagugca

SEQ ID NO: 2111067 - RNA, 13 nt, Human
cacagcccuguca

SEQ ID NO: 2111068 - RNA, 10 nt, Human
cacagcccug

SEQ ID NO: 2111069 - RNA, 11 nt, Human
cacagcccugu

SEQ ID NO: 2111070 - RNA, 13 nt, Human
cacagccagaacc

SEQ ID NO: 2111071 - RNA, 16 nt, Human
cacagccagaaccccg

SEQ ID NO: 2111072 - RNA, 19 nt, Human
cacagccagaaccccgagc

SEQ ID NO: 2111073 - RNA, 14 nt, Human
cacagcccaggccu

SEQ ID NO: 2111074 - RNA, 16 nt, Human
cacagcccaggccucc

SEQ ID NO: 2111075 - RNA, 21 nt, Human
cacagcccaggccuccagcuc

SEQ ID NO: 2111076 - RNA, 22 nt, Human
cacagcccaggccuccagcuca

SEQ ID NO: 2111077 - RNA, 15 nt, Human
cacagcccgcaugca

SEQ ID NO: 2111078 - RNA, 17 nt, Human
cacagcccgcaugcagc

SEQ ID NO: 2111079 - RNA, 18 nt, Human
cacagcccgcaugcagca

SEQ ID NO: 2111080 - RNA, 21 nt, Human
cacagcccgcaugcagcagcu

SEQ ID NO: 2111081 - RNA, 23 nt, Human
cacagcccgcaugcagcagcuug

SEQ ID NO: 2111082 - RNA, 13 nt, Human
cacaguggaacca

SEQ ID NO: 2111083 - RNA, 19 nt, Human
cacaguggaaccagcccag

SEQ ID NO: 2111084 - RNA, 13 nt, Human
cacaguguguuug

SEQ ID NO: 2111085 - RNA, 16 nt, Human
cacaguguguuuguga

SEQ ID NO: 2111086 - RNA, 14 nt, Human
cacaguguugccca

SEQ ID NO: 2111087 - RNA, 19 nt, Human
cacaguguugcccaggcug

SEQ ID NO: 2111088 - RNA, 17 nt, Human
cacaguucaauucucau

SEQ ID NO: 2111089 - RNA, 10 nt, Human
cacaguguuu

SEQ ID NO: 2111090 - RNA, 19 nt, Human
cacagugcaucucagccca

SEQ ID NO: 2111091 - RNA, 18 nt, Human
cacagugcaucucagccc

SEQ ID NO: 2111092 - RNA, 17 nt, Human
cacagugcaucucagcc

SEQ ID NO: 2111093 - RNA, 21 nt, Human
cacaggcccuuccucuccacu

SEQ ID NO: 2111094 - RNA, 22 nt, Human
cacaguggaaagacagcuucuc

SEQ ID NO: 2111095 - RNA, 22 nt, Human
cacagugcuuuccguggcacug

SEQ ID NO: 2111096 - RNA, 16 nt, Human
cacagcuuccccucuc

SEQ ID NO: 2111097 - RNA, 22 nt, Human
cacagcuuccccucucuccucc

SEQ ID NO: 2111098 - RNA, 23 nt, Human
cacagcuuccccucucuccuccu

SEQ ID NO: 2111099 - RNA, 12 nt, Human
cacagcuugggg

SEQ ID NO: 2111100 - RNA, 15 nt, Human
cacagcuuggggcca

SEQ ID NO: 2111101 - RNA, 18 nt, Human
cacagcuuggggccaucg

SEQ ID NO: 2111102 - RNA, 19 nt, Human
cacaggcccuuccucucca

SEQ ID NO: 2111103 - RNA, 18 nt, Human
cacaggcccuuccucucc

SEQ ID NO: 2111104 - RNA, 17 nt, Human
cacaggcccuuccucuc

SEQ ID NO: 2111105 - RNA, 16 nt, Human
cacaggcccuuccucu

SEQ ID NO: 2111106 - RNA, 21 nt, Human
cacagcuuuuaguacccaccu

SEQ ID NO: 2111107 - RNA, 23 nt, Human
cacagcuuuuaguacccaccuga

SEQ ID NO: 2111108 - RNA, 13 nt, Human
cauaacuagaacu

SEQ ID NO: 2111109 - RNA, 12 nt, Human
cauaagaaugaa

SEQ ID NO: 2111110 - RNA, 21 nt, Human
cauaagaaugaauaauaauua

SEQ ID NO: 2111111 - RNA, 13 nt, Human
cauaacugacaaa

SEQ ID NO: 2111112 - RNA, 15 nt, Human
cauaacugacaaauc

SEQ ID NO: 2111113 - RNA, 16 nt, Human
cauaacugacaaauca

SEQ ID NO: 2111114 - RNA, 19 nt, Human
cauaacugacaaaucaagu

SEQ ID NO: 2111115 - RNA, 20 nt, Human
cauaacugacaaaucaaguu

SEQ ID NO: 2111116 - RNA, 21 nt, Human
cauaacugacaaaucaaguuu

SEQ ID NO: 2111117 - RNA, 22 nt, Human
cauaacugacaaaucaaguuuc

SEQ ID NO: 2111118 - RNA, 21 nt, Human
cauaagccuccauuuaguucu

SEQ ID NO: 2111119 - RNA, 23 nt, Human
cauaagccuccauuuaguucuuu

SEQ ID NO: 2111120 - RNA, 14 nt, Human
cauaagauaaaugu

SEQ ID NO: 2111121 - RNA, 18 nt, Human
cauaauaaauaucuguac

SEQ ID NO: 2111122 - RNA, 17 nt, Human
cauaauaagcuaaagag

SEQ ID NO: 2111123 - RNA, 18 nt, Human
cauaacaaauaaccaacc

SEQ ID NO: 2111124 - RNA, 22 nt, Human
cauaaggaauguagcugguuuc

SEQ ID NO: 2111125 - RNA, 22 nt, Human
cauaagcuauagacccgaggaa

SEQ ID NO: 2111126 - RNA, 21 nt, Human
cauaagggagcguagaaucug

SEQ ID NO: 2111127 - RNA, 17 nt, Human
cauacauuuauaauguu

SEQ ID NO: 2111128 - RNA, 21 nt, Human
cauacauuuauaauguuugcu

SEQ ID NO: 2111129 - RNA, 22 nt, Human
cauacauuuauaauguuugcua

SEQ ID NO: 2111130 - RNA, 23 nt, Human
cauacauuuauaauguuugcuau

SEQ ID NO: 2111131 - RNA, 24 nt, Human
cauacauuuauaauguuugcuauu

SEQ ID NO: 2111132 - RNA, 16 nt, Human
cauaaccuagccuuag

SEQ ID NO: 2111133 - RNA, 13 nt, Human
cauaaccacugcu

SEQ ID NO: 2111134 - RNA, 14 nt, Human
cauaaccacugcuu

SEQ ID NO: 2111135 - RNA, 15 nt, Human
cauaaccacugcuuc

SEQ ID NO: 2111136 - RNA, 13 nt, Human
cauaacagaaugc

SEQ ID NO: 2111137 - RNA, 17 nt, Human
cauaacagaaugcacca

SEQ ID NO: 2111138 - RNA, 17 nt, Human
cauaacaggguaaauua

SEQ ID NO: 2111139 - RNA, 19 nt, Human
cauaacaggguaaauuauu

SEQ ID NO: 2111140 - RNA, 22 nt, Human
cauaacaggguaaauuauucag

SEQ ID NO: 2111141 - RNA, 13 nt, Human
cauaacagugcca

SEQ ID NO: 2111142 - RNA, 14 nt, Human
cauaacagugccau

SEQ ID NO: 2111143 - RNA, 16 nt, Human
cauaacagugccauug

SEQ ID NO: 2111144 - RNA, 19 nt, Human
cauaacagugccauugucu

SEQ ID NO: 2111145 - RNA, 22 nt, Human
cauaacagugccauugucuuua

SEQ ID NO: 2111146 - RNA, 14 nt, Human
cauaaaugaggaaa

SEQ ID NO: 2111147 - RNA, 21 nt, Human
cauaaagccuuggauguauau

SEQ ID NO: 2111148 - RNA, 18 nt, Human
cauaaaggauaaacuuuu

SEQ ID NO: 2111149 - RNA, 21 nt, Human
cauaaaggauaaacuuuuaga

SEQ ID NO: 2111150 - RNA, 23 nt, Human
cauaaaggauaaacuuuuagaaa

SEQ ID NO: 2111151 - RNA, 20 nt, Human
cauaaaggugguaugugugu

SEQ ID NO: 2111152 - RNA, 22 nt, Human
cauaaaggugguaugugugugu

SEQ ID NO: 2111153 - RNA, 21 nt, Human
cauaaagguuauuuucuccug

SEQ ID NO: 2111154 - RNA, 22 nt, Human
cauaaagguuauuuucuccuga

SEQ ID NO: 2111155 - RNA, 15 nt, Human
cauaaagucagugcc

SEQ ID NO: 2111156 - RNA, 23 nt, Human
cauaaaggugguaugugugugua

SEQ ID NO: 2111157 - RNA, 22 nt, Human
cauaaauaaauuaaauaaaaua

SEQ ID NO: 2111158 - RNA, 14 nt, Human
cauaaacugugugc

SEQ ID NO: 2111159 - RNA, 15 nt, Human
cauaaacugugugca

SEQ ID NO: 2111160 - RNA, 13 nt, Human
cauaaaauuggau

SEQ ID NO: 2111161 - RNA, 22 nt, Human
cauaaaauuuucuacucuuuuu

SEQ ID NO: 2111162 - RNA, 20 nt, Human
cauaaaauaaaguauauaua

SEQ ID NO: 2111163 - RNA, 19 nt, Human
cauaaaauaaaguauauau

SEQ ID NO: 2111164 - RNA, 21 nt, Human
cauaaaaauuagccaagugug

SEQ ID NO: 2111165 - RNA, 14 nt, Human
cauaaaaaguuaaa

SEQ ID NO: 2111166 - RNA, 18 nt, Human
cauaaaaaguuaaaaaaa

SEQ ID NO: 2111167 - RNA, 22 nt, Human
cauaaaaaguuaaaaaaaauaa

SEQ ID NO: 2111168 - RNA, 15 nt, Human
caguuuuuauugcuu

SEQ ID NO: 2111169 - RNA, 23 nt, Human
caguugguaagcuuccaggaaaa

SEQ ID NO: 2111170 - RNA, 22 nt, Human
caguuuuccuucucaucuguga

SEQ ID NO: 2111171 - RNA, 15 nt, Human
caguugguguguuuu

SEQ ID NO: 2111172 - RNA, 16 nt, Human
caguugguguguuuuu

SEQ ID NO: 2111173 - RNA, 22 nt, Human
caguugucccgauuguaacuca

SEQ ID NO: 2111174 - RNA, 18 nt, Human
caguugucccgauuguaa

SEQ ID NO: 2111175 - RNA, 20 nt, Human
caguugucccgauuguaacu

SEQ ID NO: 2111176 - RNA, 21 nt, Human
caguugucccgauuguaacuc

SEQ ID NO: 2111177 - RNA, 16 nt, Human
caguuggccagagagc

SEQ ID NO: 2111178 - RNA, 16 nt, Human
caguuggguggaugcc

SEQ ID NO: 2111179 - RNA, 17 nt, Human
caguuggccagagagcc

SEQ ID NO: 2111180 - RNA, 18 nt, Human
caguugggaaaauauguc

SEQ ID NO: 2111181 - RNA, 17 nt, Human
caguugcgcguucugaa

SEQ ID NO: 2111182 - RNA, 22 nt, Human
caguugcgcguucugaaauauu

SEQ ID NO: 2111183 - RNA, 19 nt, Human
caguuggguggaugccugg

SEQ ID NO: 2111184 - RNA, 18 nt, Human
caguuggguggaugccug

SEQ ID NO: 2111185 - RNA, 16 nt, Human
caguugcacuuggccu

SEQ ID NO: 2111186 - RNA, 13 nt, Human
caguugcacuugg

SEQ ID NO: 2111187 - RNA, 19 nt, Human
caguugcacuuggccucug

SEQ ID NO: 2111188 - RNA, 20 nt, Human
caguugcacuuggccucugg

SEQ ID NO: 2111189 - RNA, 14 nt, Human
caguugaauuucau

SEQ ID NO: 2111190 - RNA, 20 nt, Human
caguucuuuuguuguaaaga

SEQ ID NO: 2111191 - RNA, 22 nt, Human
cauaccaggccgccccagccuc

SEQ ID NO: 2111192 - RNA, 17 nt, Human
caguguacagucuugua

SEQ ID NO: 2111193 - RNA, 18 nt, Human
caguguacagucuuguau

SEQ ID NO: 2111194 - RNA, 16 nt, Human
caguguacauggaaua

SEQ ID NO: 2111195 - RNA, 12 nt, Human
caguguacaguc

SEQ ID NO: 2111196 - RNA, 15 nt, Human
caguguacagucuug

SEQ ID NO: 2111197 - RNA, 20 nt, Human
caguguacauggaauaacau

SEQ ID NO: 2111198 - RNA, 23 nt, Human
caguguacauggaauaacaugua

SEQ ID NO: 2111199 - RNA, 20 nt, Human
cagugucauuuaugaaaaga

SEQ ID NO: 2111200 - RNA, 14 nt, Human
caguguagccccaa

SEQ ID NO: 2111201 - RNA, 21 nt, Human
caguguagccccaagaaggcu

SEQ ID NO: 2111202 - RNA, 22 nt, Human
caguguagccccaagaaggcug

SEQ ID NO: 2111203 - RNA, 19 nt, Human
caguguagccuugcccgga

SEQ ID NO: 2111204 - RNA, 12 nt, Human
caguguccuccc

SEQ ID NO: 2111205 - RNA, 18 nt, Human
caguguccuccccucaag

SEQ ID NO: 2111206 - RNA, 19 nt, Human
caguguccuccccucaagg

SEQ ID NO: 2111207 - RNA, 20 nt, Human
caguguccuccccucaagga

SEQ ID NO: 2111208 - RNA, 14 nt, Human
cagugugacaagga

SEQ ID NO: 2111209 - RNA, 15 nt, Human
cagugucuuucuuug

SEQ ID NO: 2111210 - RNA, 18 nt, Human
cagugucuuucuuuggug

SEQ ID NO: 2111211 - RNA, 22 nt, Human
cagugucuuucuuuggugccuu

SEQ ID NO: 2111212 - RNA, 14 nt, Human
cagugucucggagg

SEQ ID NO: 2111213 - RNA, 22 nt, Human
cagugucuguaucggagacagu

SEQ ID NO: 2111214 - RNA, 13 nt, Human
cagugucuuccau

SEQ ID NO: 2111215 - RNA, 23 nt, Human
cagugucuguaucggagacagug

SEQ ID NO: 2111216 - RNA, 24 nt, Human
cagugucuguaucggagacaguga

SEQ ID NO: 2111217 - RNA, 14 nt, Human
cagugucuuccaua

SEQ ID NO: 2111218 - RNA, 15 nt, Human
cagugucuuccauaa

SEQ ID NO: 2111219 - RNA, 16 nt, Human
cagugucuuccauaau

SEQ ID NO: 2111220 - RNA, 17 nt, Human
cagugucuuccauaaug

SEQ ID NO: 2111221 - RNA, 18 nt, Human
cagugucuuccauaaugu

SEQ ID NO: 2111222 - RNA, 20 nt, Human
cagugucuuccauaauguau

SEQ ID NO: 2111223 - RNA, 22 nt, Human
cagugucuuccauaauguauaa

SEQ ID NO: 2111224 - RNA, 23 nt, Human
cagugucuuccauaauguauaaa

SEQ ID NO: 2111225 - RNA, 21 nt, Human
cagugugggaaugcggcaaga

SEQ ID NO: 2111226 - RNA, 23 nt, Human
cagugugggaaugcggcaagaag

SEQ ID NO: 2111227 - RNA, 22 nt, Human
caguguguggcuuucagagccu

SEQ ID NO: 2111228 - RNA, 21 nt, Human
caguguguggcuuucagagcc

SEQ ID NO: 2111229 - RNA, 15 nt, Human
cagugugguaguuaa

SEQ ID NO: 2111230 - RNA, 13 nt, Human
cagugugucuccu

SEQ ID NO: 2111231 - RNA, 14 nt, Human
cagugugucuccug

SEQ ID NO: 2111232 - RNA, 15 nt, Human
cagugugucuccugc

SEQ ID NO: 2111233 - RNA, 16 nt, Human
cagugugucuccugca

SEQ ID NO: 2111234 - RNA, 17 nt, Human
cagugugucuccugcau

SEQ ID NO: 2111235 - RNA, 19 nt, Human
cagugugucuccugcaugc

SEQ ID NO: 2111236 - RNA, 18 nt, Human
cagugugaucccaagugc

SEQ ID NO: 2111237 - RNA, 19 nt, Human
cagugugaucccaagugcc

SEQ ID NO: 2111238 - RNA, 22 nt, Human
cagugugaucccaagugccagu

SEQ ID NO: 2111239 - RNA, 18 nt, Human
cagugugcacgaguggga

SEQ ID NO: 2111240 - RNA, 21 nt, Human
cagugugcacgagugggaagg

SEQ ID NO: 2111241 - RNA, 22 nt, Human
cagugugcacgagugggaagga

SEQ ID NO: 2111242 - RNA, 16 nt, Human
caguggaaccagccca

SEQ ID NO: 2111243 - RNA, 23 nt, Human
caguggaauauaaggaaagcaau

SEQ ID NO: 2111244 - RNA, 13 nt, Human
caguggacaccag

SEQ ID NO: 2111245 - RNA, 22 nt, Human
caguggacaccaggagucccug

SEQ ID NO: 2111246 - RNA, 16 nt, Human
caguggcagcugcuuu

SEQ ID NO: 2111247 - RNA, 15 nt, Human
caguggcagcugcuu

SEQ ID NO: 2111248 - RNA, 14 nt, Human
caguggcagcugcu

SEQ ID NO: 2111249 - RNA, 13 nt, Human
caguggcagcugc

SEQ ID NO: 2111250 - RNA, 21 nt, Human
caguggacuuuccacccccuc

SEQ ID NO: 2111251 - RNA, 22 nt, Human
caguggacuuuccacccccucc

SEQ ID NO: 2111252 - RNA, 23 nt, Human
caguggacuuuccacccccuccc

SEQ ID NO: 2111253 - RNA, 17 nt, Human
caguggacuuuccaccc

SEQ ID NO: 2111254 - RNA, 18 nt, Human
caguggacuuuccacccc

SEQ ID NO: 2111255 - RNA, 19 nt, Human
caguggacuuuccaccccc

SEQ ID NO: 2111256 - RNA, 20 nt, Human
caguggacuuuccacccccu

SEQ ID NO: 2111257 - RNA, 14 nt, Human
caguggaggugcug

SEQ ID NO: 2111258 - RNA, 15 nt, Human
caguggaggugcugc

SEQ ID NO: 2111259 - RNA, 12 nt, Human
caguggcagcug

SEQ ID NO: 2111260 - RNA, 11 nt, Human
cagugggaacu

SEQ ID NO: 2111261 - RNA, 22 nt, Human
cagugggaacgugacugcccca

SEQ ID NO: 2111262 - RNA, 14 nt, Human
cagugguuauuuag

SEQ ID NO: 2111263 - RNA, 21 nt, Human
cagugguucuacaaucuauuu

SEQ ID NO: 2111264 - RNA, 22 nt, Human
cagugguucuacaaucuauuua

SEQ ID NO: 2111265 - RNA, 19 nt, Human
cagugggaacgugacugcc

SEQ ID NO: 2111266 - RNA, 20 nt, Human
cagugggaacgugacugccc

SEQ ID NO: 2111267 - RNA, 21 nt, Human
cagugggaacgugacugcccc

SEQ ID NO: 2111268 - RNA, 13 nt, Human
caguggcugucac

SEQ ID NO: 2111269 - RNA, 16 nt, Human
caguggccucaacccu

SEQ ID NO: 2111270 - RNA, 19 nt, Human
caguggccucaacccuccc

SEQ ID NO: 2111271 - RNA, 20 nt, Human
caguggccucaacccucccu

SEQ ID NO: 2111272 - RNA, 21 nt, Human
caguggccucaacccucccuc

SEQ ID NO: 2111273 - RNA, 22 nt, Human
caguggccucaacccucccuca

SEQ ID NO: 2111274 - RNA, 13 nt, Human
caguggccuggcu

SEQ ID NO: 2111275 - RNA, 14 nt, Human
caguggccuggcuc

SEQ ID NO: 2111276 - RNA, 15 nt, Human
caguggccuggcucc

SEQ ID NO: 2111277 - RNA, 18 nt, Human
caguggccuggcuccgcu

SEQ ID NO: 2111278 - RNA, 23 nt, Human
caguggccuggcuccgcugugug

SEQ ID NO: 2111279 - RNA, 13 nt, Human
caguggcucuuuu

SEQ ID NO: 2111280 - RNA, 20 nt, Human
caguggcucacgccuaugau

SEQ ID NO: 2111281 - RNA, 23 nt, Human
caguggccucaacccucccucag

SEQ ID NO: 2111282 - RNA, 15 nt, Human
caguggcauggcucc

SEQ ID NO: 2111283 - RNA, 16 nt, Human
caguggcauggcucca

SEQ ID NO: 2111284 - RNA, 17 nt, Human
caguggcauggcuccag

SEQ ID NO: 2111285 - RNA, 19 nt, Human
caguggcauggcuccaguc

SEQ ID NO: 2111286 - RNA, 16 nt, Human
caguggauugcauuuc

SEQ ID NO: 2111287 - RNA, 14 nt, Human
caguggauuaauua

SEQ ID NO: 2111288 - RNA, 16 nt, Human
caguguuuuaggagca

SEQ ID NO: 2111289 - RNA, 16 nt, Human
caguuaacuuucagaa

SEQ ID NO: 2111290 - RNA, 20 nt, Human
caguuaacuuucagaagaga

SEQ ID NO: 2111291 - RNA, 22 nt, Human
caguuaacuuucagaagagaug

SEQ ID NO: 2111292 - RNA, 18 nt, Human
caguguuucccauaauuu

SEQ ID NO: 2111293 - RNA, 20 nt, Human
caguguuucccauaauuuuc

SEQ ID NO: 2111294 - RNA, 21 nt, Human
caguguuucccauaauuuucu

SEQ ID NO: 2111295 - RNA, 20 nt, Human
caguguuuuaggagcaugag

SEQ ID NO: 2111296 - RNA, 14 nt, Human
caguguuguuugua

SEQ ID NO: 2111297 - RNA, 15 nt, Human
caguguuguuuguaa

SEQ ID NO: 2111298 - RNA, 16 nt, Human
caguguuguuuguaaa

SEQ ID NO: 2111299 - RNA, 17 nt, Human
caguguuguuuguaaau

SEQ ID NO: 2111300 - RNA, 18 nt, Human
caguguuguuuguaaaua

SEQ ID NO: 2111301 - RNA, 19 nt, Human
caguguuguuuguaaauaa

SEQ ID NO: 2111302 - RNA, 20 nt, Human
caguguuguuuguaaauaag

SEQ ID NO: 2111303 - RNA, 21 nt, Human
caguguuguuuguaaauaaga

SEQ ID NO: 2111304 - RNA, 22 nt, Human
caguguuguuuguaaauaagag

SEQ ID NO: 2111305 - RNA, 23 nt, Human
caguguuguuuguaaauaagaga

SEQ ID NO: 2111306 - RNA, 14 nt, Human
caguguuucccaua

SEQ ID NO: 2111307 - RNA, 15 nt, Human
caguguuucccauaa

SEQ ID NO: 2111308 - RNA, 17 nt, Human
caguguuucccauaauu

SEQ ID NO: 2111309 - RNA, 14 nt, Human
caguguuauuuucu

SEQ ID NO: 2111310 - RNA, 17 nt, Human
caguguguuugugauug

SEQ ID NO: 2111311 - RNA, 14 nt, Human
caguguuaaaaaau

SEQ ID NO: 2111312 - RNA, 19 nt, Human
caguuaagcagccgccaca

SEQ ID NO: 2111313 - RNA, 12 nt, Human
caguuaaucuug

SEQ ID NO: 2111314 - RNA, 15 nt, Human
caguuaaucuugcuu

SEQ ID NO: 2111315 - RNA, 14 nt, Human
caguuaagaaaaaa

SEQ ID NO: 2111316 - RNA, 15 nt, Human
caguuaagaaaaaaa

SEQ ID NO: 2111317 - RNA, 16 nt, Human
caguuaagaaaaaaau

SEQ ID NO: 2111318 - RNA, 17 nt, Human
caguuaagaaaaaaaua

SEQ ID NO: 2111319 - RNA, 18 nt, Human
caguuaagaaaaaaauaa

SEQ ID NO: 2111320 - RNA, 19 nt, Human
caguuaagaaaaaaauaau

SEQ ID NO: 2111321 - RNA, 20 nt, Human
caguuaagaaaaaaauaauu

SEQ ID NO: 2111322 - RNA, 21 nt, Human
caguuaagaaaaaaauaauuu

SEQ ID NO: 2111323 - RNA, 22 nt, Human
caguuaagaaaaaaauaauuuu

SEQ ID NO: 2111324 - RNA, 13 nt, Human
caguucccuuggc

SEQ ID NO: 2111325 - RNA, 14 nt, Human
caguuccugcagca

SEQ ID NO: 2111326 - RNA, 16 nt, Human
caguuccugcagcaga

SEQ ID NO: 2111327 - RNA, 19 nt, Human
caguuccugcagcagagcc

SEQ ID NO: 2111328 - RNA, 21 nt, Human
caguuccugcagcagagccug

SEQ ID NO: 2111329 - RNA, 13 nt, Human
caguuccucgccc

SEQ ID NO: 2111330 - RNA, 14 nt, Human
caguuccucgcccu

SEQ ID NO: 2111331 - RNA, 17 nt, Human
caguuccucgcccuggg

SEQ ID NO: 2111332 - RNA, 18 nt, Human
caguuccucgcccugggu

SEQ ID NO: 2111333 - RNA, 14 nt, Human
caguucccuuggcc

SEQ ID NO: 2111334 - RNA, 15 nt, Human
caguucccuuggccu

SEQ ID NO: 2111335 - RNA, 16 nt, Human
caguucccuuggccuc

SEQ ID NO: 2111336 - RNA, 17 nt, Human
caguucccuuggccuca

SEQ ID NO: 2111337 - RNA, 18 nt, Human
caguucccuuggccucag

SEQ ID NO: 2111338 - RNA, 19 nt, Human
caguucccuuggccucaga

SEQ ID NO: 2111339 - RNA, 20 nt, Human
caguucccuuggccucagaa

SEQ ID NO: 2111340 - RNA, 15 nt, Human
caguuccuuucaaug

SEQ ID NO: 2111341 - RNA, 12 nt, Human
caguugaaaaac

SEQ ID NO: 2111342 - RNA, 18 nt, Human
caguugaaaaacagcuga

SEQ ID NO: 2111343 - RNA, 19 nt, Human
caguugaaaaacagcugag

SEQ ID NO: 2111344 - RNA, 20 nt, Human
caguucugggugcucccuac

SEQ ID NO: 2111345 - RNA, 17 nt, Human
caguucugggugcuccc

SEQ ID NO: 2111346 - RNA, 11 nt, Human
caguucugcaa

SEQ ID NO: 2111347 - RNA, 12 nt, Human
caguucugcaaa

SEQ ID NO: 2111348 - RNA, 13 nt, Human
caguucugcaaau

SEQ ID NO: 2111349 - RNA, 17 nt, Human
caguucugcaaauagaa

SEQ ID NO: 2111350 - RNA, 18 nt, Human
caguucugcaaauagaaa

SEQ ID NO: 2111351 - RNA, 20 nt, Human
caguucugcaaauagaaaac

SEQ ID NO: 2111352 - RNA, 14 nt, Human
cauaugcaaacaua

SEQ ID NO: 2111353 - RNA, 14 nt, Human
cauauuuacuucuu

SEQ ID NO: 2111354 - RNA, 20 nt, Human
cauauuuacuucuuauacau

SEQ ID NO: 2111355 - RNA, 16 nt, Human
cauauuuacuucuuau

SEQ ID NO: 2111356 - RNA, 17 nt, Human
cauauuuacuucuuaua

SEQ ID NO: 2111357 - RNA, 12 nt, Human
cauauuucaauu

SEQ ID NO: 2111358 - RNA, 22 nt, Human
cauauuuauagcaauccauguu

SEQ ID NO: 2111359 - RNA, 15 nt, Human
cauauuugagacuag

SEQ ID NO: 2111360 - RNA, 18 nt, Human
caucaagcacagaaggag

SEQ ID NO: 2111361 - RNA, 21 nt, Human
caucaagcacagaaggaggag

SEQ ID NO: 2111362 - RNA, 23 nt, Human
caucaagcacagaaggaggagga

SEQ ID NO: 2111363 - RNA, 16 nt, Human
caucaaaguggcaaaa

SEQ ID NO: 2111364 - RNA, 17 nt, Human
caucaaacucuuaguua

SEQ ID NO: 2111365 - RNA, 21 nt, Human
caucaaguuauugacaaacuc

SEQ ID NO: 2111366 - RNA, 22 nt, Human
caucaaguuauugacaaacucu

SEQ ID NO: 2111367 - RNA, 23 nt, Human
caucaaguuauugacaaacucuc

SEQ ID NO: 2111368 - RNA, 16 nt, Human
caucaauuauagaaag

SEQ ID NO: 2111369 - RNA, 15 nt, Human
caucaauguucauug

SEQ ID NO: 2111370 - RNA, 16 nt, Human
caucaauguucauugu

SEQ ID NO: 2111371 - RNA, 11 nt, Human
caucaauguuc

SEQ ID NO: 2111372 - RNA, 14 nt, Human
caucaauguucauu

SEQ ID NO: 2111373 - RNA, 18 nt, Human
caucaauguucauuguaa

SEQ ID NO: 2111374 - RNA, 11 nt, Human
caucacacaca

SEQ ID NO: 2111375 - RNA, 12 nt, Human
caucacacacac

SEQ ID NO: 2111376 - RNA, 22 nt, Human
caucacaggacacggggcagug

SEQ ID NO: 2111377 - RNA, 13 nt, Human
caucacagggcag

SEQ ID NO: 2111378 - RNA, 15 nt, Human
caucacagggcagag

SEQ ID NO: 2111379 - RNA, 20 nt, Human
caucacagggcagagccggg

SEQ ID NO: 2111380 - RNA, 19 nt, Human
caucacaggguugggccca

SEQ ID NO: 2111381 - RNA, 20 nt, Human
cauauauacacacacaaaga

SEQ ID NO: 2111382 - RNA, 22 nt, Human
cauauauacacacacaaagaga

SEQ ID NO: 2111383 - RNA, 18 nt, Human
cauauauaacuagcuaga

SEQ ID NO: 2111384 - RNA, 17 nt, Human
cauauauaucuaucuua

SEQ ID NO: 2111385 - RNA, 13 nt, Human
cauaucaguugag

SEQ ID NO: 2111386 - RNA, 22 nt, Human
cauauauauguuuuaagaggca

SEQ ID NO: 2111387 - RNA, 23 nt, Human
cauaugauugugcacauacuuga

SEQ ID NO: 2111388 - RNA, 14 nt, Human
cauauccugagcca

SEQ ID NO: 2111389 - RNA, 20 nt, Human
cauaugacucacaugaugca

SEQ ID NO: 2111390 - RNA, 23 nt, Human
cauauccugagccaucggugaaa

SEQ ID NO: 2111391 - RNA, 22 nt, Human
cauaugacucacaugaugcaua

SEQ ID NO: 2111392 - RNA, 15 nt, Human
cauauccugagccau

SEQ ID NO: 2111393 - RNA, 13 nt, Human
cauaugaggaugc

SEQ ID NO: 2111394 - RNA, 20 nt, Human
cauauaaacaucacacacac

SEQ ID NO: 2111395 - RNA, 14 nt, Human
cauauaauauaugu

SEQ ID NO: 2111396 - RNA, 15 nt, Human
cauauaauauauguu

SEQ ID NO: 2111397 - RNA, 16 nt, Human
cauauaauauauguuu

SEQ ID NO: 2111398 - RNA, 17 nt, Human
cauauaauauauguuuu

SEQ ID NO: 2111399 - RNA, 19 nt, Human
cauauaauauauguuuuaa

SEQ ID NO: 2111400 - RNA, 20 nt, Human
cauauaauauauguuuuaaa

SEQ ID NO: 2111401 - RNA, 22 nt, Human
cauauaauauauguuuuaaaua

SEQ ID NO: 2111402 - RNA, 19 nt, Human
cauauaaacaucacacaca

SEQ ID NO: 2111403 - RNA, 19 nt, Human
cauaguggugggcaccuau

SEQ ID NO: 2111404 - RNA, 22 nt, Human
cauaguggcuuaaaacaacacu

SEQ ID NO: 2111405 - RNA, 19 nt, Human
cauaguucccauguuaaau

SEQ ID NO: 2111406 - RNA, 21 nt, Human
cauagaggugagggaagccug

SEQ ID NO: 2111407 - RNA, 17 nt, Human
cauagaggugagggaag

SEQ ID NO: 2111408 - RNA, 22 nt, Human
cauagugaugguuccccuguuc

SEQ ID NO: 2111409 - RNA, 20 nt, Human
cauaguaugguggcuggguu

SEQ ID NO: 2111410 - RNA, 19 nt, Human
cauaguaugguggcugggu

SEQ ID NO: 2111411 - RNA, 18 nt, Human
cauaguaugguggcuggg

SEQ ID NO: 2111412 - RNA, 11 nt, Human
cauacucugcu

SEQ ID NO: 2111413 - RNA, 15 nt, Human
cauacucugucuccc

SEQ ID NO: 2111414 - RNA, 16 nt, Human
cauacucugucucccu

SEQ ID NO: 2111415 - RNA, 15 nt, Human
cauacugagggacca

SEQ ID NO: 2111416 - RNA, 19 nt, Human
cauacugagggaccaacug

SEQ ID NO: 2111417 - RNA, 20 nt, Human
cauacuccuuccaucaaaua

SEQ ID NO: 2111418 - RNA, 20 nt, Human
cauacugagggaccaacugg

SEQ ID NO: 2111419 - RNA, 11 nt, Human
cauacugcugu

SEQ ID NO: 2111420 - RNA, 21 nt, Human
cauagaaggaggagagggaaa

SEQ ID NO: 2111421 - RNA, 15 nt, Human
cauagacuagagaaa

SEQ ID NO: 2111422 - RNA, 16 nt, Human
cauagacuagagaaac

SEQ ID NO: 2111423 - RNA, 17 nt, Human
cauagacuagagaaacc

SEQ ID NO: 2111424 - RNA, 13 nt, Human
caucucagcccac

SEQ ID NO: 2111425 - RNA, 19 nt, Human
caucucacuggaugcaaag

SEQ ID NO: 2111426 - RNA, 14 nt, Human
caucucaggccacc

SEQ ID NO: 2111427 - RNA, 15 nt, Human
caucucaggccaccu

SEQ ID NO: 2111428 - RNA, 18 nt, Human
caucucaggccucccuca

SEQ ID NO: 2111429 - RNA, 17 nt, Human
caucucaggccaccugc

SEQ ID NO: 2111430 - RNA, 20 nt, Human
caucucaggccaccugcccc

SEQ ID NO: 2111431 - RNA, 21 nt, Human
caucucaggccaccugccccc

SEQ ID NO: 2111432 - RNA, 22 nt, Human
caucucaggccaccugcccccu

SEQ ID NO: 2111433 - RNA, 18 nt, Human
caucucagugcuguaaaa

SEQ ID NO: 2111434 - RNA, 17 nt, Human
caucucauuccaacuuc

SEQ ID NO: 2111435 - RNA, 16 nt, Human
caucuauuucugagaa

SEQ ID NO: 2111436 - RNA, 15 nt, Human
caucuauuucugaga

SEQ ID NO: 2111437 - RNA, 14 nt, Human
caucucaaccaucc

SEQ ID NO: 2111438 - RNA, 16 nt, Human
caucucaaccaucccc

SEQ ID NO: 2111439 - RNA, 13 nt, Human
caucuauuucuga

SEQ ID NO: 2111440 - RNA, 14 nt, Human
caucuauuucugag

SEQ ID NO: 2111441 - RNA, 19 nt, Human
caucuaugucccuugcugu

SEQ ID NO: 2111442 - RNA, 16 nt, Human
caucuaccuuuucucu

SEQ ID NO: 2111443 - RNA, 18 nt, Human
caucuaccuuuucucuuc

SEQ ID NO: 2111444 - RNA, 19 nt, Human
caucuaccuuuucucuuca

SEQ ID NO: 2111445 - RNA, 15 nt, Human
caucuacccuccgau

SEQ ID NO: 2111446 - RNA, 14 nt, Human
caucuagcaaaugu

SEQ ID NO: 2111447 - RNA, 18 nt, Human
caucuagcaaauguuaug

SEQ ID NO: 2111448 - RNA, 14 nt, Human
caucuaauaaaaaa

SEQ ID NO: 2111449 - RNA, 16 nt, Human
caucuaccccuggaug

SEQ ID NO: 2111450 - RNA, 19 nt, Human
cauccuccguccagccgcc

SEQ ID NO: 2111451 - RNA, 20 nt, Human
cauccuccguccagccgcca

SEQ ID NO: 2111452 - RNA, 13 nt, Human
cauccucccaagg

SEQ ID NO: 2111453 - RNA, 12 nt, Human
cauccuccccuu

SEQ ID NO: 2111454 - RNA, 13 nt, Human
cauccuccccuuc

SEQ ID NO: 2111455 - RNA, 14 nt, Human
cauccuccccuucc

SEQ ID NO: 2111456 - RNA, 15 nt, Human
cauccuccccuuccc

SEQ ID NO: 2111457 - RNA, 16 nt, Human
cauccuccccuucccu

SEQ ID NO: 2111458 - RNA, 19 nt, Human
cauccuccccuucccugca

SEQ ID NO: 2111459 - RNA, 20 nt, Human
cauccuccccuucccugcaa

SEQ ID NO: 2111460 - RNA, 21 nt, Human
cauccuccccuucccugcaaa

SEQ ID NO: 2111461 - RNA, 16 nt, Human
cauccuccguccagcc

SEQ ID NO: 2111462 - RNA, 20 nt, Human
cauccuaaucauccaaugcu

SEQ ID NO: 2111463 - RNA, 20 nt, Human
caucuugcucugcugacaga

SEQ ID NO: 2111464 - RNA, 15 nt, Human
caucucauccaucaa

SEQ ID NO: 2111465 - RNA, 20 nt, Human
caucuugccuccauggugcc

SEQ ID NO: 2111466 - RNA, 14 nt, Human
caucuugcucugcu

SEQ ID NO: 2111467 - RNA, 13 nt, Human
caucuugcucugc

SEQ ID NO: 2111468 - RNA, 15 nt, Human
caucuugaccaagca

SEQ ID NO: 2111469 - RNA, 16 nt, Human
caucuugaccaagcag

SEQ ID NO: 2111470 - RNA, 17 nt, Human
caucuugaccaagcagg

SEQ ID NO: 2111471 - RNA, 18 nt, Human
caucuugaccaagcagga

SEQ ID NO: 2111472 - RNA, 20 nt, Human
caucuugaccaagcaggaag

SEQ ID NO: 2111473 - RNA, 21 nt, Human
caucuugaccaagcaggaagc

SEQ ID NO: 2111474 - RNA, 22 nt, Human
caucuugaccaagcaggaagcu

SEQ ID NO: 2111475 - RNA, 23 nt, Human
caucuugaccaagcaggaagcuc

SEQ ID NO: 2111476 - RNA, 24 nt, Human
caucuugaccaagcaggaagcuca

SEQ ID NO: 2111477 - RNA, 19 nt, Human
caucuugcccgcucaggcu

SEQ ID NO: 2111478 - RNA, 20 nt, Human
caucuugcccgcucaggcug

SEQ ID NO: 2111479 - RNA, 13 nt, Human
caucuugccucca

SEQ ID NO: 2111480 - RNA, 18 nt, Human
caucuugcccgcucaggc

SEQ ID NO: 2111481 - RNA, 16 nt, Human
caucuucucacucccu

SEQ ID NO: 2111482 - RNA, 17 nt, Human
caucuucucacucccuu

SEQ ID NO: 2111483 - RNA, 22 nt, Human
caucuucccuagaggguuccug

SEQ ID NO: 2111484 - RNA, 14 nt, Human
caucuucuccaucu

SEQ ID NO: 2111485 - RNA, 16 nt, Human
caucuucuccaucugg

SEQ ID NO: 2111486 - RNA, 17 nt, Human
caucuucuccaucuggc

SEQ ID NO: 2111487 - RNA, 23 nt, Human
caucuuccccaacgaaaagcaca

SEQ ID NO: 2111488 - RNA, 15 nt, Human
caucucuugaggcca

SEQ ID NO: 2111489 - RNA, 20 nt, Human
caucucuugaggccaggagu

SEQ ID NO: 2111490 - RNA, 14 nt, Human
caucuccacuccag

SEQ ID NO: 2111491 - RNA, 14 nt, Human
caucuccaucagcu

SEQ ID NO: 2111492 - RNA, 15 nt, Human
caucuccaucagcug

SEQ ID NO: 2111493 - RNA, 16 nt, Human
caucuccaucagcugu

SEQ ID NO: 2111494 - RNA, 18 nt, Human
caucugcaccccccuggg

SEQ ID NO: 2111495 - RNA, 19 nt, Human
caucugcaccccccugggc

SEQ ID NO: 2111496 - RNA, 22 nt, Human
caucuuccaaggguacuaagga

SEQ ID NO: 2111497 - RNA, 21 nt, Human
caucuuccacaggucucagaa

SEQ ID NO: 2111498 - RNA, 22 nt, Human
caucuuccacaggucucagaau

SEQ ID NO: 2111499 - RNA, 20 nt, Human
caucuuauuuucauguauau

SEQ ID NO: 2111500 - RNA, 14 nt, Human
caucuucaaagcuu

SEQ ID NO: 2111501 - RNA, 14 nt, Human
caucuucacuucua

SEQ ID NO: 2111502 - RNA, 21 nt, Human
caucuucacuucuaaaugcau

SEQ ID NO: 2111503 - RNA, 16 nt, Human
caucugcacccucgau

SEQ ID NO: 2111504 - RNA, 20 nt, Human
caucuuaguauuugcauauu

SEQ ID NO: 2111505 - RNA, 14 nt, Human
caucuuagugccug

SEQ ID NO: 2111506 - RNA, 15 nt, Human
cauccagguucagcu

SEQ ID NO: 2111507 - RNA, 22 nt, Human
caucccuacccccuaagagcca

SEQ ID NO: 2111508 - RNA, 23 nt, Human
cauccaaggagaaacagagacag

SEQ ID NO: 2111509 - RNA, 17 nt, Human
cauccaauaggaaugcu

SEQ ID NO: 2111510 - RNA, 21 nt, Human
cauccaauaggaaugcuaaca

SEQ ID NO: 2111511 - RNA, 13 nt, Human
cauccaauccuca

SEQ ID NO: 2111512 - RNA, 14 nt, Human
cauccaauccucac

SEQ ID NO: 2111513 - RNA, 15 nt, Human
cauccaauccucacu

SEQ ID NO: 2111514 - RNA, 16 nt, Human
cauccaauccucacug

SEQ ID NO: 2111515 - RNA, 17 nt, Human
cauccaauccucacugg

SEQ ID NO: 2111516 - RNA, 14 nt, Human
cauccaaugcucaa

SEQ ID NO: 2111517 - RNA, 18 nt, Human
cauccaauccucacuggg

SEQ ID NO: 2111518 - RNA, 19 nt, Human
cauccaauccucacugggu

SEQ ID NO: 2111519 - RNA, 21 nt, Human
cauccaauccucacugggugg

SEQ ID NO: 2111520 - RNA, 23 nt, Human
cauccaaugcucaagaaacaacu

SEQ ID NO: 2111521 - RNA, 14 nt, Human
cauccacucuaccc

SEQ ID NO: 2111522 - RNA, 15 nt, Human
cauccacucuacccu

SEQ ID NO: 2111523 - RNA, 22 nt, Human
caucacaggguugggcccagau

SEQ ID NO: 2111524 - RNA, 21 nt, Human
cauccaaggagaaacagagac

SEQ ID NO: 2111525 - RNA, 22 nt, Human
cauccaaggagaaacagagaca

SEQ ID NO: 2111526 - RNA, 15 nt, Human
cauccaacugagaaa

SEQ ID NO: 2111527 - RNA, 14 nt, Human
cauccaaggagaaa

SEQ ID NO: 2111528 - RNA, 21 nt, Human
cauccaaccccccaccugcca

SEQ ID NO: 2111529 - RNA, 16 nt, Human
cauccaaccccccacc

SEQ ID NO: 2111530 - RNA, 19 nt, Human
cauccaaccccccaccugc

SEQ ID NO: 2111531 - RNA, 15 nt, Human
cauccaaccccccac

SEQ ID NO: 2111532 - RNA, 17 nt, Human
cauccguaguucccuga

SEQ ID NO: 2111533 - RNA, 18 nt, Human
cauccguaguucccugaa

SEQ ID NO: 2111534 - RNA, 21 nt, Human
cauccguaguucccugaaaac

SEQ ID NO: 2111535 - RNA, 17 nt, Human
cauccgugagcagugug

SEQ ID NO: 2111536 - RNA, 20 nt, Human
cauccgugagcagugugucu

SEQ ID NO: 2111537 - RNA, 23 nt, Human
cauccgugagcagugugucuccu

SEQ ID NO: 2111538 - RNA, 16 nt, Human
cauccguaguucccug

SEQ ID NO: 2111539 - RNA, 13 nt, Human
cauugcaauagaa

SEQ ID NO: 2111540 - RNA, 15 nt, Human
cauugcaauagaaau

SEQ ID NO: 2111541 - RNA, 18 nt, Human
cauugagaacugcauaug

SEQ ID NO: 2111542 - RNA, 19 nt, Human
cauugagaacugcauaugu

SEQ ID NO: 2111543 - RNA, 23 nt, Human
cauugagaacugcauauguuucg

SEQ ID NO: 2111544 - RNA, 14 nt, Human
cauugcaauagaaa

SEQ ID NO: 2111545 - RNA, 17 nt, Human
cauugcacuccagccug

SEQ ID NO: 2111546 - RNA, 16 nt, Human
cauugcacuccagccu

SEQ ID NO: 2111547 - RNA, 18 nt, Human
cauugcacuccagccugg

SEQ ID NO: 2111548 - RNA, 16 nt, Human
cauugcagucugcuuc

SEQ ID NO: 2111549 - RNA, 18 nt, Human
cauugcagucugcuucug

SEQ ID NO: 2111550 - RNA, 21 nt, Human
cauuuacuuuguguucaccuu

SEQ ID NO: 2111551 - RNA, 17 nt, Human
cauuuacuuuguguuca

SEQ ID NO: 2111552 - RNA, 16 nt, Human
cauuucugauauagaa

SEQ ID NO: 2111553 - RNA, 21 nt, Human
cauuucugauauagaauugca

SEQ ID NO: 2111554 - RNA, 11 nt, Human
cauuucucucu

SEQ ID NO: 2111555 - RNA, 17 nt, Human
cauuucucucuccaguc

SEQ ID NO: 2111556 - RNA, 13 nt, Human
cauuuccccagac

SEQ ID NO: 2111557 - RNA, 16 nt, Human
cauuuccccagaccug

SEQ ID NO: 2111558 - RNA, 20 nt, Human
cauuuccccagaccugagcu

SEQ ID NO: 2111559 - RNA, 23 nt, Human
cauuucuauuuauuuacugagcu

SEQ ID NO: 2111560 - RNA, 12 nt, Human
cauuucuugggc

SEQ ID NO: 2111561 - RNA, 18 nt, Human
cauugacuaucaaacuga

SEQ ID NO: 2111562 - RNA, 19 nt, Human
cauugacuaucaaacugaa

SEQ ID NO: 2111563 - RNA, 22 nt, Human
cauugacuaucaaacugaagcc

SEQ ID NO: 2111564 - RNA, 15 nt, Human
cauugaccaagaacu

SEQ ID NO: 2111565 - RNA, 16 nt, Human
cauugaccaagaacug

SEQ ID NO: 2111566 - RNA, 17 nt, Human
cauugaccaagaacugc

SEQ ID NO: 2111567 - RNA, 18 nt, Human
cauugaccaagaacugca

SEQ ID NO: 2111568 - RNA, 19 nt, Human
cauugaccaagaacugcau

SEQ ID NO: 2111569 - RNA, 20 nt, Human
cauugaccaagaacugcaug

SEQ ID NO: 2111570 - RNA, 21 nt, Human
cauugaccaagaacugcaugg

SEQ ID NO: 2111571 - RNA, 22 nt, Human
cauugaaagagaaccaguuuca

SEQ ID NO: 2111572 - RNA, 19 nt, Human
cauugaaagagaaccaguu

SEQ ID NO: 2111573 - RNA, 16 nt, Human
cauugaaagagaacca

SEQ ID NO: 2111574 - RNA, 17 nt, Human
cauugaaaauaggagag

SEQ ID NO: 2111575 - RNA, 16 nt, Human
cauugaaaauguaagu

SEQ ID NO: 2111576 - RNA, 18 nt, Human
cauugaaaauguaaguaa

SEQ ID NO: 2111577 - RNA, 22 nt, Human
cauugaaaauguaaguaaaugu

SEQ ID NO: 2111578 - RNA, 15 nt, Human
cauuuuauauuagaa

SEQ ID NO: 2111579 - RNA, 16 nt, Human
cauuuuaacuuuauca

SEQ ID NO: 2111580 - RNA, 18 nt, Human
cauuuuaaaguuaaacau

SEQ ID NO: 2111581 - RNA, 11 nt, Human
cauuuuaacau

SEQ ID NO: 2111582 - RNA, 14 nt, Human
cauuuugaccuacu

SEQ ID NO: 2111583 - RNA, 13 nt, Human
cauuuugaagcua

SEQ ID NO: 2111584 - RNA, 15 nt, Human
cauuuugaagcuaau

SEQ ID NO: 2111585 - RNA, 16 nt, Human
cauuuugaagcuaauu

SEQ ID NO: 2111586 - RNA, 17 nt, Human
cauuuugaagcuaauua

SEQ ID NO: 2111587 - RNA, 22 nt, Human
cauuuugaagcuaauuauuuua

SEQ ID NO: 2111588 - RNA, 12 nt, Human
cauuuugcaaaa

SEQ ID NO: 2111589 - RNA, 13 nt, Human
cauuuugcaaaau

SEQ ID NO: 2111590 - RNA, 14 nt, Human
cauuuugcaaaauu

SEQ ID NO: 2111591 - RNA, 15 nt, Human
cauuuugcaaaauuu

SEQ ID NO: 2111592 - RNA, 17 nt, Human
cauuuugcaaaauuucc

SEQ ID NO: 2111593 - RNA, 15 nt, Human
cauuuugcagcagug

SEQ ID NO: 2111594 - RNA, 16 nt, Human
cauuuugcagcaguga

SEQ ID NO: 2111595 - RNA, 18 nt, Human
cauuuugcagcagugagu

SEQ ID NO: 2111596 - RNA, 20 nt, Human
cauuuugcagcagugagucu

SEQ ID NO: 2111597 - RNA, 22 nt, Human
cauuuugcagcagugagucucu

SEQ ID NO: 2111598 - RNA, 10 nt, Human
cauuuucugg

SEQ ID NO: 2111599 - RNA, 21 nt, Human
cauuuucuggguucugggugg

SEQ ID NO: 2111600 - RNA, 22 nt, Human
cauuuugggguacccacugcuc

SEQ ID NO: 2111601 - RNA, 21 nt, Human
cauuuugggguacccacugcu

SEQ ID NO: 2111602 - RNA, 20 nt, Human
cauuuugggguacccacugc

SEQ ID NO: 2111603 - RNA, 22 nt, Human
cauuuuggaaguuuucaggacu

SEQ ID NO: 2111604 - RNA, 18 nt, Human
cauuuuggaaguuuucag

SEQ ID NO: 2111605 - RNA, 20 nt, Human
cauuuuggaaguuuucagga

SEQ ID NO: 2111606 - RNA, 18 nt, Human
cauuuugcuaaaugugaa

SEQ ID NO: 2111607 - RNA, 21 nt, Human
cauuuugcuaaaugugaauga

SEQ ID NO: 2111608 - RNA, 24 nt, Human
cauuuugcuaaaugugaaugauga

SEQ ID NO: 2111609 - RNA, 18 nt, Human
cauuuuuaguagagacag

SEQ ID NO: 2111610 - RNA, 19 nt, Human
cauuuuuaguagagacagg

SEQ ID NO: 2111611 - RNA, 23 nt, Human
cauuuugggguacccacugcucu

SEQ ID NO: 2111612 - RNA, 15 nt, Human
cauuuugcuucauag

SEQ ID NO: 2111613 - RNA, 14 nt, Human
ccaaaauaaugucu

SEQ ID NO: 2111614 - RNA, 22 nt, Human
ccaaaauaaugucuuguuaaua

SEQ ID NO: 2111615 - RNA, 22 nt, Human
cauuuuuauuacccuucuuucc

SEQ ID NO: 2111616 - RNA, 20 nt, Human
cauuuuuaguagagacaggg

SEQ ID NO: 2111617 - RNA, 12 nt, Human
ccaaagagcugc

SEQ ID NO: 2111618 - RNA, 14 nt, Human
ccaaagagcugccu

SEQ ID NO: 2111619 - RNA, 15 nt, Human
ccaaagagcugccua

SEQ ID NO: 2111620 - RNA, 16 nt, Human
ccaaagagcugccuaa

SEQ ID NO: 2111621 - RNA, 19 nt, Human
ccaaacugccuaagcccuc

SEQ ID NO: 2111622 - RNA, 13 nt, Human
ccaaaccuggaga

SEQ ID NO: 2111623 - RNA, 14 nt, Human
ccaaaccuggagau

SEQ ID NO: 2111624 - RNA, 14 nt, Human
ccaaacugccuaag

SEQ ID NO: 2111625 - RNA, 14 nt, Human
cauuugagcagggc

SEQ ID NO: 2111626 - RNA, 16 nt, Human
cauuugagcagggcuc

SEQ ID NO: 2111627 - RNA, 14 nt, Human
ccaauauuguacag

SEQ ID NO: 2111628 - RNA, 15 nt, Human
ccaauauuguacagu

SEQ ID NO: 2111629 - RNA, 16 nt, Human
ccaauauuguacaguu

SEQ ID NO: 2111630 - RNA, 18 nt, Human
ccaauauuguacaguuuu

SEQ ID NO: 2111631 - RNA, 17 nt, Human
ccaagugugugugcgug

SEQ ID NO: 2111632 - RNA, 20 nt, Human
ccaaguuauaaaucaauguc

SEQ ID NO: 2111633 - RNA, 18 nt, Human
ccaauucuuacaaacaug

SEQ ID NO: 2111634 - RNA, 19 nt, Human
ccaauucuuacaaacaugu

SEQ ID NO: 2111635 - RNA, 22 nt, Human
ccaaguuauaaaucaaugucac

SEQ ID NO: 2111636 - RNA, 20 nt, Human
ccaauuuguaaaaacagcau

SEQ ID NO: 2111637 - RNA, 18 nt, Human
ccacaacccuguuuuaua

SEQ ID NO: 2111638 - RNA, 18 nt, Human
ccacaaaggagagcuagc

SEQ ID NO: 2111639 - RNA, 22 nt, Human
ccacaaaugggaaaaccagacu

SEQ ID NO: 2111640 - RNA, 20 nt, Human
ccaagguggguagaucacga

SEQ ID NO: 2111641 - RNA, 17 nt, Human
ccaaggugggcugagcc

SEQ ID NO: 2111642 - RNA, 18 nt, Human
ccaaggugggcugagccc

SEQ ID NO: 2111643 - RNA, 20 nt, Human
ccaaggugggcugagcccug

SEQ ID NO: 2111644 - RNA, 23 nt, Human
ccaaggugggcugagcccuggca

SEQ ID NO: 2111645 - RNA, 14 nt, Human
ccaaggcuggggga

SEQ ID NO: 2111646 - RNA, 16 nt, Human
ccaaggcucugagcaa

SEQ ID NO: 2111647 - RNA, 20 nt, Human
ccaaguggaccuugagacca

SEQ ID NO: 2111648 - RNA, 16 nt, Human
ccaagugccagucuug

SEQ ID NO: 2111649 - RNA, 22 nt, Human
ccaagugccagucuugugucug

SEQ ID NO: 2111650 - RNA, 13 nt, Human
ccaaguggcuccc

SEQ ID NO: 2111651 - RNA, 14 nt, Human
ccaagugcaggcug

SEQ ID NO: 2111652 - RNA, 19 nt, Human
ccaagugcaggcuggcacc

SEQ ID NO: 2111653 - RNA, 16 nt, Human
ccaagugcaggcuggc

SEQ ID NO: 2111654 - RNA, 16 nt, Human
ccaaguggcucccaca

SEQ ID NO: 2111655 - RNA, 16 nt, Human
ccaagugggggcagag

SEQ ID NO: 2111656 - RNA, 18 nt, Human
ccaagugggggcagaggg

SEQ ID NO: 2111657 - RNA, 15 nt, Human
ccaaguuauaaauca

SEQ ID NO: 2111658 - RNA, 13 nt, Human
ccaagugugugug

SEQ ID NO: 2111659 - RNA, 14 nt, Human
ccaagugugugugc

SEQ ID NO: 2111660 - RNA, 12 nt, Human
ccaagugugugu

SEQ ID NO: 2111661 - RNA, 12 nt, Human
ccaagcagccaa

SEQ ID NO: 2111662 - RNA, 16 nt, Human
ccaagcagccaagcuc

SEQ ID NO: 2111663 - RNA, 18 nt, Human
ccaagcagccaagcuccu

SEQ ID NO: 2111664 - RNA, 12 nt, Human
ccaagcaggaag

SEQ ID NO: 2111665 - RNA, 13 nt, Human
ccaagcaggaagc

SEQ ID NO: 2111666 - RNA, 14 nt, Human
ccaagcaggaagcu

SEQ ID NO: 2111667 - RNA, 17 nt, Human
ccaagcaggaagcucag

SEQ ID NO: 2111668 - RNA, 18 nt, Human
ccaagcaggaagcucaga

SEQ ID NO: 2111669 - RNA, 22 nt, Human
ccaagagcugaggcaauucuaa

SEQ ID NO: 2111670 - RNA, 21 nt, Human
ccaagccguggcuucccgcuc

SEQ ID NO: 2111671 - RNA, 17 nt, Human
ccaagccguggcuuccc

SEQ ID NO: 2111672 - RNA, 16 nt, Human
ccaagccguggcuucc

SEQ ID NO: 2111673 - RNA, 15 nt, Human
ccaagccguggcuuc

SEQ ID NO: 2111674 - RNA, 14 nt, Human
ccaagccguggcuu

SEQ ID NO: 2111675 - RNA, 20 nt, Human
ccaagcaggaagcucagacu

SEQ ID NO: 2111676 - RNA, 23 nt, Human
ccaagccguggcuucccgcucag

SEQ ID NO: 2111677 - RNA, 14 nt, Human
ccaagcuccaucuc

SEQ ID NO: 2111678 - RNA, 15 nt, Human
ccacaaguuaaauaa

SEQ ID NO: 2111679 - RNA, 20 nt, Human
ccacaaguuaaauaaaucau

SEQ ID NO: 2111680 - RNA, 15 nt, Human
ccacaagauucccag

SEQ ID NO: 2111681 - RNA, 16 nt, Human
ccacaagauucccaga

SEQ ID NO: 2111682 - RNA, 17 nt, Human
ccacaagauucccagag

SEQ ID NO: 2111683 - RNA, 24 nt, Human
ccacaagauucccagagacaggaa

SEQ ID NO: 2111684 - RNA, 18 nt, Human
ccacaagauucccagaga

SEQ ID NO: 2111685 - RNA, 19 nt, Human
ccacaagauucccagagac

SEQ ID NO: 2111686 - RNA, 20 nt, Human
ccacaagauucccagagaca

SEQ ID NO: 2111687 - RNA, 21 nt, Human
ccacaagauucccagagacag

SEQ ID NO: 2111688 - RNA, 12 nt, Human
ccaagagaugaa

SEQ ID NO: 2111689 - RNA, 19 nt, Human
ccaagagcagaggcagcga

SEQ ID NO: 2111690 - RNA, 16 nt, Human
ccaagacuccagcccu

SEQ ID NO: 2111691 - RNA, 17 nt, Human
ccaagacuccagcccug

SEQ ID NO: 2111692 - RNA, 12 nt, Human
ccaagacauugu

SEQ ID NO: 2111693 - RNA, 16 nt, Human
ccaagacauugucaau

SEQ ID NO: 2111694 - RNA, 17 nt, Human
ccaagacauugucaaua

SEQ ID NO: 2111695 - RNA, 14 nt, Human
ccaagagaugaaga

SEQ ID NO: 2111696 - RNA, 15 nt, Human
ccaagaccugacuca

SEQ ID NO: 2111697 - RNA, 11 nt, Human
ccaagacauug

SEQ ID NO: 2111698 - RNA, 24 nt, Human
ccaagacagaugccccagagcugu

SEQ ID NO: 2111699 - RNA, 23 nt, Human
ccaagacagaugccccagagcug

SEQ ID NO: 2111700 - RNA, 19 nt, Human
ccaaccuuacuuacagcau

SEQ ID NO: 2111701 - RNA, 12 nt, Human
ccaaccugacca

SEQ ID NO: 2111702 - RNA, 13 nt, Human
ccaaccugaccaa

SEQ ID NO: 2111703 - RNA, 16 nt, Human
ccaaccugaccaacau

SEQ ID NO: 2111704 - RNA, 13 nt, Human
ccaaccuggacaa

SEQ ID NO: 2111705 - RNA, 14 nt, Human
ccaaccuggacaac

SEQ ID NO: 2111706 - RNA, 22 nt, Human
ccaaccugaccaacauggagaa

SEQ ID NO: 2111707 - RNA, 17 nt, Human
ccaacccugccccugcc

SEQ ID NO: 2111708 - RNA, 15 nt, Human
ccaacccuucccuga

SEQ ID NO: 2111709 - RNA, 18 nt, Human
ccaaccuaaccccuuucc

SEQ ID NO: 2111710 - RNA, 14 nt, Human
ccaaccuccugacc

SEQ ID NO: 2111711 - RNA, 11 nt, Human
ccaaccucagc

SEQ ID NO: 2111712 - RNA, 12 nt, Human
ccaaccucagca

SEQ ID NO: 2111713 - RNA, 20 nt, Human
ccaacaucccauugcccugg

SEQ ID NO: 2111714 - RNA, 21 nt, Human
ccaacaucccauugcccuggu

SEQ ID NO: 2111715 - RNA, 15 nt, Human
ccaacauggagaaac

SEQ ID NO: 2111716 - RNA, 22 nt, Human
ccaacauggagaaacccugucu

SEQ ID NO: 2111717 - RNA, 23 nt, Human
ccaacauggagaaacccugucuc

SEQ ID NO: 2111718 - RNA, 14 nt, Human
ccaacccugccccu

SEQ ID NO: 2111719 - RNA, 15 nt, Human
ccaacccugccccug

SEQ ID NO: 2111720 - RNA, 16 nt, Human
ccaacccugccccugc

SEQ ID NO: 2111721 - RNA, 17 nt, Human
ccaacaucccauugccc

SEQ ID NO: 2111722 - RNA, 16 nt, Human
ccaacaucaacaucuu

SEQ ID NO: 2111723 - RNA, 12 nt, Human
ccaacaguuccu

SEQ ID NO: 2111724 - RNA, 12 nt, Human
ccaacaccaggg

SEQ ID NO: 2111725 - RNA, 19 nt, Human
ccaacagucaaaacagaga

SEQ ID NO: 2111726 - RNA, 23 nt, Human
ccaaauuccuuggcaugccuucc

SEQ ID NO: 2111727 - RNA, 15 nt, Human
ccaaauucccuccuc

SEQ ID NO: 2111728 - RNA, 20 nt, Human
ccaaauuccuuggcaugccu

SEQ ID NO: 2111729 - RNA, 13 nt, Human
ccaacaccaggga

SEQ ID NO: 2111730 - RNA, 15 nt, Human
ccaaauucuuucagu

SEQ ID NO: 2111731 - RNA, 22 nt, Human
ccaaauucuuucaguggcuacc

SEQ ID NO: 2111732 - RNA, 20 nt, Human
caugccugccccaaacaaau

SEQ ID NO: 2111733 - RNA, 16 nt, Human
caugccugcuuuagaa

SEQ ID NO: 2111734 - RNA, 17 nt, Human
caugccugcuuuagaau

SEQ ID NO: 2111735 - RNA, 17 nt, Human
caugccuggacaaaccc

SEQ ID NO: 2111736 - RNA, 19 nt, Human
caugccuggacaaacccuu

SEQ ID NO: 2111737 - RNA, 13 nt, Human
caugccuuccagc

SEQ ID NO: 2111738 - RNA, 15 nt, Human
caugccuuccagcac

SEQ ID NO: 2111739 - RNA, 19 nt, Human
caugccuuccagcacccug

SEQ ID NO: 2111740 - RNA, 21 nt, Human
caugccuuccagcacccugca

SEQ ID NO: 2111741 - RNA, 20 nt, Human
caugccuuccagcacccugc

SEQ ID NO: 2111742 - RNA, 13 nt, Human
caugccuuuguaa

SEQ ID NO: 2111743 - RNA, 15 nt, Human
caugccuuuguaagu

SEQ ID NO: 2111744 - RNA, 16 nt, Human
caugccuuuguaaguu

SEQ ID NO: 2111745 - RNA, 16 nt, Human
caugccuguccagccu

SEQ ID NO: 2111746 - RNA, 17 nt, Human
caugccuguccagccug

SEQ ID NO: 2111747 - RNA, 18 nt, Human
caugccuguccagccugg

SEQ ID NO: 2111748 - RNA, 20 nt, Human
caugccuguccagccugggc

SEQ ID NO: 2111749 - RNA, 23 nt, Human
caugccuguccagccugggcagc

SEQ ID NO: 2111750 - RNA, 21 nt, Human
caugccuguccagccugggca

SEQ ID NO: 2111751 - RNA, 23 nt, Human
caugccugugugacaucaguggc

SEQ ID NO: 2111752 - RNA, 13 nt, Human
caugcgcacaagg

SEQ ID NO: 2111753 - RNA, 22 nt, Human
caugcguggguggggagggagg

SEQ ID NO: 2111754 - RNA, 23 nt, Human
caugcguggguggggagggaggu

SEQ ID NO: 2111755 - RNA, 16 nt, Human
cauggaauaacaugua

SEQ ID NO: 2111756 - RNA, 21 nt, Human
cauggaacucauuccugccug

SEQ ID NO: 2111757 - RNA, 17 nt, Human
cauggaacucauuccug

SEQ ID NO: 2111758 - RNA, 19 nt, Human
cauggaacucauuccugcc

SEQ ID NO: 2111759 - RNA, 14 nt, Human
cauggaagggaaga

SEQ ID NO: 2111760 - RNA, 18 nt, Human
cauggacaugaucuucuu

SEQ ID NO: 2111761 - RNA, 15 nt, Human
cauggacagaagaag

SEQ ID NO: 2111762 - RNA, 21 nt, Human
cauggacagaagaaggcagca

SEQ ID NO: 2111763 - RNA, 16 nt, Human
cauggaacucauuccu

SEQ ID NO: 2111764 - RNA, 19 nt, Human
caugcugugauugugccua

SEQ ID NO: 2111765 - RNA, 19 nt, Human
caugcuucaugaaaauccu

SEQ ID NO: 2111766 - RNA, 23 nt, Human
caugcuucaugaaaauccuacca

SEQ ID NO: 2111767 - RNA, 15 nt, Human
caugggccuccugug

SEQ ID NO: 2111768 - RNA, 21 nt, Human
cauggcagaauaaucuuuggg

SEQ ID NO: 2111769 - RNA, 22 nt, Human
cauggcagaauaaucuuugggu

SEQ ID NO: 2111770 - RNA, 17 nt, Human
caugggccuccugugug

SEQ ID NO: 2111771 - RNA, 16 nt, Human
caugggccuccugugu

SEQ ID NO: 2111772 - RNA, 14 nt, Human
caugggccccucug

SEQ ID NO: 2111773 - RNA, 16 nt, Human
caugggccccucugac

SEQ ID NO: 2111774 - RNA, 19 nt, Human
caugggccccucugacucc

SEQ ID NO: 2111775 - RNA, 20 nt, Human
cauggggguauuauccauuc

SEQ ID NO: 2111776 - RNA, 13 nt, Human
caugggggcaggg

SEQ ID NO: 2111777 - RNA, 14 nt, Human
caugggggcagggc

SEQ ID NO: 2111778 - RNA, 19 nt, Human
caugggggcagggcaugac

SEQ ID NO: 2111779 - RNA, 17 nt, Human
caugggggccucagggc

SEQ ID NO: 2111780 - RNA, 21 nt, Human
cauggggugggguagggcuga

SEQ ID NO: 2111781 - RNA, 14 nt, Human
cauggucacagaga

SEQ ID NO: 2111782 - RNA, 19 nt, Human
cauggcaccaaagccacca

SEQ ID NO: 2111783 - RNA, 20 nt, Human
cauggcaccaaagccaccag

SEQ ID NO: 2111784 - RNA, 21 nt, Human
cauggcaccugucgcccagug

SEQ ID NO: 2111785 - RNA, 23 nt, Human
cauggcaccugucgcccagugcc

SEQ ID NO: 2111786 - RNA, 16 nt, Human
cauggaguauauguca

SEQ ID NO: 2111787 - RNA, 21 nt, Human
cauggaguguguauuguuccc

SEQ ID NO: 2111788 - RNA, 18 nt, Human
cauggaguguguauuguu

SEQ ID NO: 2111789 - RNA, 20 nt, Human
cauggaguguguauuguucc

SEQ ID NO: 2111790 - RNA, 22 nt, Human
cauggaguguguauuguuccca

SEQ ID NO: 2111791 - RNA, 14 nt, Human
cauggaguguguau

SEQ ID NO: 2111792 - RNA, 17 nt, Human
cauggaguguguauugu

SEQ ID NO: 2111793 - RNA, 11 nt, Human
cauggagaaac

SEQ ID NO: 2111794 - RNA, 14 nt, Human
cauggagaaacccu

SEQ ID NO: 2111795 - RNA, 15 nt, Human
cauggagaaacccug

SEQ ID NO: 2111796 - RNA, 16 nt, Human
cauggagaaacccugu

SEQ ID NO: 2111797 - RNA, 17 nt, Human
cauggagaaacccuguc

SEQ ID NO: 2111798 - RNA, 20 nt, Human
cauggagaaacccugucucu

SEQ ID NO: 2111799 - RNA, 17 nt, Human
cauggagguuugaagau

SEQ ID NO: 2111800 - RNA, 19 nt, Human
cauggagaacagugauuuu

SEQ ID NO: 2111801 - RNA, 21 nt, Human
caugccgcugcauccgugagc

SEQ ID NO: 2111802 - RNA, 14 nt, Human
caugccgggcgcag

SEQ ID NO: 2111803 - RNA, 19 nt, Human
caugccagcuuaucucagg

SEQ ID NO: 2111804 - RNA, 20 nt, Human
caugccagcuuaucucaggg

SEQ ID NO: 2111805 - RNA, 17 nt, Human
caugcauuugaggucaa

SEQ ID NO: 2111806 - RNA, 14 nt, Human
caugcauuuugcag

SEQ ID NO: 2111807 - RNA, 22 nt, Human
caugccaaccccgcccuaggcc

SEQ ID NO: 2111808 - RNA, 21 nt, Human
caugccaccauggccagccaa

SEQ ID NO: 2111809 - RNA, 19 nt, Human
caugccacuacacuccagc

SEQ ID NO: 2111810 - RNA, 11 nt, Human
caugcauuguu

SEQ ID NO: 2111811 - RNA, 17 nt, Human
caugcauuguugaggug

SEQ ID NO: 2111812 - RNA, 20 nt, Human
caugcauuguugaggugguc

SEQ ID NO: 2111813 - RNA, 22 nt, Human
caugcauuguugagguggucug

SEQ ID NO: 2111814 - RNA, 20 nt, Human
caugcauuuugcagcaguga

SEQ ID NO: 2111815 - RNA, 19 nt, Human
caugcauuuugcagcagug

SEQ ID NO: 2111816 - RNA, 13 nt, Human
caugcccaccugc

SEQ ID NO: 2111817 - RNA, 14 nt, Human
caugcccaccugcc

SEQ ID NO: 2111818 - RNA, 16 nt, Human
caugcccaccugccca

SEQ ID NO: 2111819 - RNA, 17 nt, Human
caugcccaccugcccau

SEQ ID NO: 2111820 - RNA, 21 nt, Human
caugcccaccugcccaucaca

SEQ ID NO: 2111821 - RNA, 14 nt, Human
caugcaucuuacug

SEQ ID NO: 2111822 - RNA, 16 nt, Human
caugcaucuuacugaa

SEQ ID NO: 2111823 - RNA, 17 nt, Human
caugcaucuuacugaag

SEQ ID NO: 2111824 - RNA, 14 nt, Human
caugcaucaaguua

SEQ ID NO: 2111825 - RNA, 15 nt, Human
caugcauacacucuc

SEQ ID NO: 2111826 - RNA, 17 nt, Human
caugcauagucccagcu

SEQ ID NO: 2111827 - RNA, 18 nt, Human
caugcauagucccagcua

SEQ ID NO: 2111828 - RNA, 15 nt, Human
caugucgccucugca

SEQ ID NO: 2111829 - RNA, 14 nt, Human
caugucgccucugc

SEQ ID NO: 2111830 - RNA, 20 nt, Human
caugucgccucugcauucag

SEQ ID NO: 2111831 - RNA, 18 nt, Human
caugucgccucugcauuc

SEQ ID NO: 2111832 - RNA, 18 nt, Human
cauguaauuaaguacuau

SEQ ID NO: 2111833 - RNA, 21 nt, Human
cauguaauuaaguacuaugua

SEQ ID NO: 2111834 - RNA, 17 nt, Human
caugucuuucuccaggg

SEQ ID NO: 2111835 - RNA, 18 nt, Human
caugucuuucuccaggga

SEQ ID NO: 2111836 - RNA, 16 nt, Human
caugguccccaagacc

SEQ ID NO: 2111837 - RNA, 15 nt, Human
caugguccccauggc

SEQ ID NO: 2111838 - RNA, 18 nt, Human
caugguccccauggcaug

SEQ ID NO: 2111839 - RNA, 21 nt, Human
cauggugaggcuuaacaaugu

SEQ ID NO: 2111840 - RNA, 17 nt, Human
caugguccgguguccuu

SEQ ID NO: 2111841 - RNA, 20 nt, Human
caugguccgguguccuuuuc

SEQ ID NO: 2111842 - RNA, 14 nt, Human
cauggugccucugg

SEQ ID NO: 2111843 - RNA, 15 nt, Human
cauggugccucugga

SEQ ID NO: 2111844 - RNA, 16 nt, Human
cauggugccucuggag

SEQ ID NO: 2111845 - RNA, 16 nt, Human
caugguugagaaauga

SEQ ID NO: 2111846 - RNA, 16 nt, Human
cauguaaauuaccagu

SEQ ID NO: 2111847 - RNA, 21 nt, Human
cauguaaugguaucuuaaagu

SEQ ID NO: 2111848 - RNA, 12 nt, Human
cauguaauaaaa

SEQ ID NO: 2111849 - RNA, 21 nt, Human
cauguaauaaaaaguauaugu

SEQ ID NO: 2111850 - RNA, 22 nt, Human
cauguaauaaaaaguauauguu

SEQ ID NO: 2111851 - RNA, 19 nt, Human
caugguuaagguaaaguaa

SEQ ID NO: 2111852 - RNA, 14 nt, Human
caugguugagaaau

SEQ ID NO: 2111853 - RNA, 23 nt, Human
cauggugugaaagucagaugccc

SEQ ID NO: 2111854 - RNA, 22 nt, Human
cauggugugaaagucagaugcc

SEQ ID NO: 2111855 - RNA, 15 nt, Human
caugugcacaugcac

SEQ ID NO: 2111856 - RNA, 17 nt, Human
cauguggaaagugaauu

SEQ ID NO: 2111857 - RNA, 21 nt, Human
cauguggaaaaaaaaaagaug

SEQ ID NO: 2111858 - RNA, 16 nt, Human
cauguggaaagugaau

SEQ ID NO: 2111859 - RNA, 19 nt, Human
caugugcugugaccauuua

SEQ ID NO: 2111860 - RNA, 23 nt, Human
caugugcugugaccauuuauaau

SEQ ID NO: 2111861 - RNA, 21 nt, Human
caugugccagguuuuuggucu

SEQ ID NO: 2111862 - RNA, 13 nt, Human
caugugaagaggg

SEQ ID NO: 2111863 - RNA, 12 nt, Human
caugugggagcu

SEQ ID NO: 2111864 - RNA, 18 nt, Human
cauguggaaagugaauuu

SEQ ID NO: 2111865 - RNA, 20 nt, Human
cauguggaaagugaauuuga

SEQ ID NO: 2111866 - RNA, 21 nt, Human
cauguggaaagugaauuugaa

SEQ ID NO: 2111867 - RNA, 22 nt, Human
cauguggaaagugaauuugaau

SEQ ID NO: 2111868 - RNA, 23 nt, Human
cauguggaaagugaauuugaaug

SEQ ID NO: 2111869 - RNA, 17 nt, Human
cauguggaauauaaaga

SEQ ID NO: 2111870 - RNA, 17 nt, Human
caugugguuaaugccau

SEQ ID NO: 2111871 - RNA, 21 nt, Human
cauguggugggacagggaccc

SEQ ID NO: 2111872 - RNA, 12 nt, Human
caugugguggga

SEQ ID NO: 2111873 - RNA, 22 nt, Human
caugugguuaaugccauggaca

SEQ ID NO: 2111874 - RNA, 17 nt, Human
caugugugcgagugugu

SEQ ID NO: 2111875 - RNA, 19 nt, Human
caugugugcgagugugugc

SEQ ID NO: 2111876 - RNA, 13 nt, Human
caugugugcgugu

SEQ ID NO: 2111877 - RNA, 14 nt, Human
cauguguggacuca

SEQ ID NO: 2111878 - RNA, 14 nt, Human
caugugugcugaac

SEQ ID NO: 2111879 - RNA, 15 nt, Human
caugugugugcaagu

SEQ ID NO: 2111880 - RNA, 15 nt, Human
caugugugugcucag

SEQ ID NO: 2111881 - RNA, 21 nt, Human
caugugugugcaagugugugc

SEQ ID NO: 2111882 - RNA, 16 nt, Human
cauguuugagcucaga

SEQ ID NO: 2111883 - RNA, 18 nt, Human
cauguuugagcucagacc

SEQ ID NO: 2111884 - RNA, 23 nt, Human
cauguuugagcucagacccccac

SEQ ID NO: 2111885 - RNA, 19 nt, Human
cauguuugagcucagaccc

SEQ ID NO: 2111886 - RNA, 20 nt, Human
cauguuugagcucagacccc

SEQ ID NO: 2111887 - RNA, 23 nt, Human
cauguuugauguaucugagcagg

SEQ ID NO: 2111888 - RNA, 18 nt, Human
cauuagaccaagcuuguc

SEQ ID NO: 2111889 - RNA, 15 nt, Human
cauuacggcuccucu

SEQ ID NO: 2111890 - RNA, 16 nt, Human
cauuacggcuccucuc

SEQ ID NO: 2111891 - RNA, 17 nt, Human
cauuagcaguuugcuuu

SEQ ID NO: 2111892 - RNA, 14 nt, Human
cauuauuugcaugu

SEQ ID NO: 2111893 - RNA, 19 nt, Human
cauuauuugcauguuaccu

SEQ ID NO: 2111894 - RNA, 13 nt, Human
cauuauuugcaug

SEQ ID NO: 2111895 - RNA, 13 nt, Human
cauuauuuauuaa

SEQ ID NO: 2111896 - RNA, 17 nt, Human
cauuauuuauuaaauuu

SEQ ID NO: 2111897 - RNA, 18 nt, Human
cauuauuuauuaaauuuu

SEQ ID NO: 2111898 - RNA, 19 nt, Human
cauuaauuauuauugcugu

SEQ ID NO: 2111899 - RNA, 21 nt, Human
cauuaauuauuauugcuguug

SEQ ID NO: 2111900 - RNA, 20 nt, Human
cauuaauuauuauugcuguu

SEQ ID NO: 2111901 - RNA, 20 nt, Human
cauuaccagacgguucacca

SEQ ID NO: 2111902 - RNA, 23 nt, Human
cauuaccagacgguucaccagcc

SEQ ID NO: 2111903 - RNA, 13 nt, Human
cauuaacaguuuu

SEQ ID NO: 2111904 - RNA, 16 nt, Human
cauuaacaguuuucca

SEQ ID NO: 2111905 - RNA, 17 nt, Human
cauuaacaguuuuccau

SEQ ID NO: 2111906 - RNA, 20 nt, Human
cauuaacaguuuuccaugaa

SEQ ID NO: 2111907 - RNA, 16 nt, Human
cauuaauauuugcuga

SEQ ID NO: 2111908 - RNA, 17 nt, Human
cauuaauauuugcugac

SEQ ID NO: 2111909 - RNA, 15 nt, Human
cauguuuuguuuacg

SEQ ID NO: 2111910 - RNA, 13 nt, Human
cauuaaagcaguc

SEQ ID NO: 2111911 - RNA, 22 nt, Human
cauuaaagcagucacuuuuccu

SEQ ID NO: 2111912 - RNA, 18 nt, Human
cauuaaagcauuuacuuu

SEQ ID NO: 2111913 - RNA, 22 nt, Human
cauuaaagcauuuacuuugaau

SEQ ID NO: 2111914 - RNA, 18 nt, Human
cauguuuuucuucucccu

SEQ ID NO: 2111915 - RNA, 23 nt, Human
ccauguuggccaggcuggucuca

SEQ ID NO: 2111916 - RNA, 13 nt, Human
ccagugggaagau

SEQ ID NO: 2111917 - RNA, 17 nt, Human
ccagugccuuaccuccu

SEQ ID NO: 2111918 - RNA, 18 nt, Human
ccagugccuuaccuccug

SEQ ID NO: 2111919 - RNA, 19 nt, Human
ccagugccuuaccuccugc

SEQ ID NO: 2111920 - RNA, 20 nt, Human
ccagugccuuaccuccugcc

SEQ ID NO: 2111921 - RNA, 18 nt, Human
ccaguggaagaagaaaac

SEQ ID NO: 2111922 - RNA, 21 nt, Human
ccagugccuuaccuccugccc

SEQ ID NO: 2111923 - RNA, 22 nt, Human
ccagugccuuaccuccugccca

SEQ ID NO: 2111924 - RNA, 23 nt, Human
ccagugccuuaccuccugcccag

SEQ ID NO: 2111925 - RNA, 12 nt, Human
ccaggccugccu

SEQ ID NO: 2111926 - RNA, 13 nt, Human
ccaggccuccagc

SEQ ID NO: 2111927 - RNA, 14 nt, Human
ccaggccuccagcu

SEQ ID NO: 2111928 - RNA, 15 nt, Human
ccaggccuccagcuc

SEQ ID NO: 2111929 - RNA, 16 nt, Human
ccaggccuccagcuca

SEQ ID NO: 2111930 - RNA, 17 nt, Human
ccaggccuccagcucag

SEQ ID NO: 2111931 - RNA, 19 nt, Human
ccaggccuccagcucagca

SEQ ID NO: 2111932 - RNA, 22 nt, Human
ccaggcgagagacuuguggccu

SEQ ID NO: 2111933 - RNA, 18 nt, Human
ccaggcgaugugcaagug

SEQ ID NO: 2111934 - RNA, 18 nt, Human
ccaggccugggucugugu

SEQ ID NO: 2111935 - RNA, 19 nt, Human
ccaggccugggucuguguc

SEQ ID NO: 2111936 - RNA, 20 nt, Human
ccaggccugggucugugucu

SEQ ID NO: 2111937 - RNA, 16 nt, Human
ccaggccugggucugu

SEQ ID NO: 2111938 - RNA, 17 nt, Human
ccaggccugggucugug

SEQ ID NO: 2111939 - RNA, 16 nt, Human
ccaucaugucuggcua

SEQ ID NO: 2111940 - RNA, 14 nt, Human
ccaucaugucuggc

SEQ ID NO: 2111941 - RNA, 14 nt, Human
ccaucacuggagca

SEQ ID NO: 2111942 - RNA, 18 nt, Human
ccaucacuggagcaccag

SEQ ID NO: 2111943 - RNA, 17 nt, Human
ccaucauuauaaacgug

SEQ ID NO: 2111944 - RNA, 22 nt, Human
ccaucucaggccaccugccccc

SEQ ID NO: 2111945 - RNA, 23 nt, Human
ccaucucaggccaccugcccccu

SEQ ID NO: 2111946 - RNA, 16 nt, Human
ccaucucaggccaccu

SEQ ID NO: 2111947 - RNA, 17 nt, Human
ccaucucaggccaccug

SEQ ID NO: 2111948 - RNA, 18 nt, Human
ccaucucaggccaccugc

SEQ ID NO: 2111949 - RNA, 20 nt, Human
ccaucucaggccaccugccc

SEQ ID NO: 2111950 - RNA, 21 nt, Human
ccaucucaggccaccugcccc

SEQ ID NO: 2111951 - RNA, 16 nt, Human
ccaucgcugucaucuc

SEQ ID NO: 2111952 - RNA, 18 nt, Human
ccauauucuguuggccag

SEQ ID NO: 2111953 - RNA, 15 nt, Human
ccauauucuguuggc

SEQ ID NO: 2111954 - RNA, 18 nt, Human
ccauagccaccccagaaa

SEQ ID NO: 2111955 - RNA, 14 nt, Human
ccaguggugccuug

SEQ ID NO: 2111956 - RNA, 18 nt, Human
ccauagcaagauugcuua

SEQ ID NO: 2111957 - RNA, 21 nt, Human
ccauagcaagauugcuuaaaa

SEQ ID NO: 2111958 - RNA, 19 nt, Human
ccaucacgcggccgagaca

SEQ ID NO: 2111959 - RNA, 16 nt, Human
ccaucacgccugugca

SEQ ID NO: 2111960 - RNA, 13 nt, Human
ccaucaaccucug

SEQ ID NO: 2111961 - RNA, 16 nt, Human
ccaucaaaguggcaaa

SEQ ID NO: 2111962 - RNA, 22 nt, Human
ccauauucagugcuguggccug

SEQ ID NO: 2111963 - RNA, 17 nt, Human
ccacaaauaaaugacaa

SEQ ID NO: 2111964 - RNA, 22 nt, Human
ccagccucucuugguuuccuuc

SEQ ID NO: 2111965 - RNA, 19 nt, Human
ccagccucugagccccugg

SEQ ID NO: 2111966 - RNA, 21 nt, Human
ccagccucugagccccuggga

SEQ ID NO: 2111967 - RNA, 24 nt, Human
ccagccucugagccccugggacug

SEQ ID NO: 2111968 - RNA, 12 nt, Human
ccagccucucuu

SEQ ID NO: 2111969 - RNA, 15 nt, Human
ccagccucucuuccu

SEQ ID NO: 2111970 - RNA, 21 nt, Human
ccagccucucuuccuauccca

SEQ ID NO: 2111971 - RNA, 21 nt, Human
ccagccucucuugguuuccuu

SEQ ID NO: 2111972 - RNA, 11 nt, Human
ccagccugagc

SEQ ID NO: 2111973 - RNA, 12 nt, Human
ccagccugagca

SEQ ID NO: 2111974 - RNA, 11 nt, Human
ccagccuggcc

SEQ ID NO: 2111975 - RNA, 10 nt, Human
ccagccuggc

SEQ ID NO: 2111976 - RNA, 12 nt, Human
ccagccuggcca

SEQ ID NO: 2111977 - RNA, 22 nt, Human
ccagcucucccucuggcccugc

SEQ ID NO: 2111978 - RNA, 23 nt, Human
ccagcucucccucuggcccugcc

SEQ ID NO: 2111979 - RNA, 17 nt, Human
ccagcucucccucuggc

SEQ ID NO: 2111980 - RNA, 18 nt, Human
ccagcucucccucuggcc

SEQ ID NO: 2111981 - RNA, 20 nt, Human
ccagcucucccucuggcccu

SEQ ID NO: 2111982 - RNA, 21 nt, Human
ccagcucucccucuggcccug

SEQ ID NO: 2111983 - RNA, 13 nt, Human
ccagcucucagcc

SEQ ID NO: 2111984 - RNA, 14 nt, Human
ccagcucucagcca

SEQ ID NO: 2111985 - RNA, 15 nt, Human
ccagcucucagccaa

SEQ ID NO: 2111986 - RNA, 14 nt, Human
ccagcucucccucu

SEQ ID NO: 2111987 - RNA, 16 nt, Human
ccagcucucccucugg

SEQ ID NO: 2111988 - RNA, 12 nt, Human
ccagcucucagc

SEQ ID NO: 2111989 - RNA, 21 nt, Human
ccagcugaaauacugaggggu

SEQ ID NO: 2111990 - RNA, 15 nt, Human
ccagcucugcuugcc

SEQ ID NO: 2111991 - RNA, 21 nt, Human
ccagcucugaggacugcacca

SEQ ID NO: 2111992 - RNA, 21 nt, Human
ccagcugugcucuggacaggc

SEQ ID NO: 2111993 - RNA, 20 nt, Human
ccagcugugcucuggacagg

SEQ ID NO: 2111994 - RNA, 18 nt, Human
ccagcugugcucuggaca

SEQ ID NO: 2111995 - RNA, 13 nt, Human
ccagcugucugug

SEQ ID NO: 2111996 - RNA, 22 nt, Human
ccagcugucugugucagccugu

SEQ ID NO: 2111997 - RNA, 17 nt, Human
ccagcuggguuggaaaa

SEQ ID NO: 2111998 - RNA, 16 nt, Human
ccagcuggguuggaaa

SEQ ID NO: 2111999 - RNA, 18 nt, Human
ccagcugggaucugacug

SEQ ID NO: 2112000 - RNA, 23 nt, Human
ccagcugggaucugacugcacgu

SEQ ID NO: 2112001 - RNA, 17 nt, Human
ccagcugcaccugccag

SEQ ID NO: 2112002 - RNA, 18 nt, Human
ccagcugcaccugccagc

SEQ ID NO: 2112003 - RNA, 19 nt, Human
ccagcugcaccugccagcc

SEQ ID NO: 2112004 - RNA, 20 nt, Human
ccagcugcaccugccagccu

SEQ ID NO: 2112005 - RNA, 22 nt, Human
ccagcugcaccugccagccugg

SEQ ID NO: 2112006 - RNA, 23 nt, Human
ccagcugcaccugccagccuggc

SEQ ID NO: 2112007 - RNA, 15 nt, Human
ccaggcccggggcug

SEQ ID NO: 2112008 - RNA, 16 nt, Human
ccaggcccggggcugg

SEQ ID NO: 2112009 - RNA, 20 nt, Human
ccaggcccggggcuggcggc

SEQ ID NO: 2112010 - RNA, 21 nt, Human
ccaggcccggggcuggcggcu

SEQ ID NO: 2112011 - RNA, 19 nt, Human
ccaggccccugccacccug

SEQ ID NO: 2112012 - RNA, 23 nt, Human
ccaggccccugccacccugggga

SEQ ID NO: 2112013 - RNA, 21 nt, Human
ccaggccccugccacccuggg

SEQ ID NO: 2112014 - RNA, 21 nt, Human
ccaggccagagggagugacag

SEQ ID NO: 2112015 - RNA, 14 nt, Human
ccaggccagaggga

SEQ ID NO: 2112016 - RNA, 23 nt, Human
ccagcugugcucuggacaggcau

SEQ ID NO: 2112017 - RNA, 22 nt, Human
ccagcugugcucuggacaggca

SEQ ID NO: 2112018 - RNA, 22 nt, Human
ccagcuguggguacagagaggu

SEQ ID NO: 2112019 - RNA, 13 nt, Human
ccagcugugguuu

SEQ ID NO: 2112020 - RNA, 23 nt, Human
ccagcuguggguacagagagguc

SEQ ID NO: 2112021 - RNA, 14 nt, Human
ccagcugugguuuu

SEQ ID NO: 2112022 - RNA, 15 nt, Human
ccagcugugguuuuc

SEQ ID NO: 2112023 - RNA, 23 nt, Human
ccagcugugguuuucuuuugcca

SEQ ID NO: 2112024 - RNA, 21 nt, Human
ccaggagaaccacuacaugca

SEQ ID NO: 2112025 - RNA, 23 nt, Human
ccaggagaaccacuacaugcagc

SEQ ID NO: 2112026 - RNA, 19 nt, Human
ccaggagaaccacuacaug

SEQ ID NO: 2112027 - RNA, 10 nt, Human
cccagaggca

SEQ ID NO: 2112028 - RNA, 15 nt, Human
cccagaggcacagcc

SEQ ID NO: 2112029 - RNA, 16 nt, Human
cccagaggcacagccg

SEQ ID NO: 2112030 - RNA, 18 nt, Human
cccagaggcacagccggg

SEQ ID NO: 2112031 - RNA, 23 nt, Human
cccagagcuguuuauggccucag

SEQ ID NO: 2112032 - RNA, 21 nt, Human
cccagagcuguuuauggccuc

SEQ ID NO: 2112033 - RNA, 22 nt, Human
cccagagcuguuuauggccuca

SEQ ID NO: 2112034 - RNA, 14 nt, Human
cccagagcugggug

SEQ ID NO: 2112035 - RNA, 18 nt, Human
cccagagcugggugagug

SEQ ID NO: 2112036 - RNA, 13 nt, Human
cccagagcuguuu

SEQ ID NO: 2112037 - RNA, 11 nt, Human
cccagagcugu

SEQ ID NO: 2112038 - RNA, 15 nt, Human
cccagauuucagucu

SEQ ID NO: 2112039 - RNA, 16 nt, Human
cccagauuucagucuu

SEQ ID NO: 2112040 - RNA, 19 nt, Human
cccagauuucagucuuuuc

SEQ ID NO: 2112041 - RNA, 16 nt, Human
cccagcaacuccaacu

SEQ ID NO: 2112042 - RNA, 19 nt, Human
cccagcaacccuccuauca

SEQ ID NO: 2112043 - RNA, 21 nt, Human
cccagcaacccuccuaucacc

SEQ ID NO: 2112044 - RNA, 13 nt, Human
cccagcaacccuc

SEQ ID NO: 2112045 - RNA, 17 nt, Human
cccagcaacccuccuau

SEQ ID NO: 2112046 - RNA, 20 nt, Human
cccagccuccaagcuccauc

SEQ ID NO: 2112047 - RNA, 18 nt, Human
cccagccuccaagcucca

SEQ ID NO: 2112048 - RNA, 21 nt, Human
cccagccucuucuagagccgu

SEQ ID NO: 2112049 - RNA, 12 nt, Human
cccagccucucu

SEQ ID NO: 2112050 - RNA, 21 nt, Human
cccagccucucuuccuauccc

SEQ ID NO: 2112051 - RNA, 13 nt, Human
cccagcucugcuu

SEQ ID NO: 2112052 - RNA, 20 nt, Human
cccagcucugcuugccgaaa

SEQ ID NO: 2112053 - RNA, 13 nt, Human
cccagcucuggcu

SEQ ID NO: 2112054 - RNA, 18 nt, Human
cccagcucugaggacugc

SEQ ID NO: 2112055 - RNA, 22 nt, Human
cccagcucugaggacugcacca

SEQ ID NO: 2112056 - RNA, 14 nt, Human
cccagcgagcccug

SEQ ID NO: 2112057 - RNA, 14 nt, Human
cccagcuacucagg

SEQ ID NO: 2112058 - RNA, 23 nt, Human
cccagcucucccucuggcccugc

SEQ ID NO: 2112059 - RNA, 14 nt, Human
cccagcucagaggg

SEQ ID NO: 2112060 - RNA, 15 nt, Human
cccagcucagagggu

SEQ ID NO: 2112061 - RNA, 15 nt, Human
cccagcuacuuggga

SEQ ID NO: 2112062 - RNA, 15 nt, Human
cccagcuacucagga

SEQ ID NO: 2112063 - RNA, 20 nt, Human
cccagcuacucaggaggcug

SEQ ID NO: 2112064 - RNA, 14 nt, Human
cccaggagccccga

SEQ ID NO: 2112065 - RNA, 13 nt, Human
cccaggagccccg

SEQ ID NO: 2112066 - RNA, 14 nt, Human
cccaggagagccag

SEQ ID NO: 2112067 - RNA, 15 nt, Human
cccaggagagccagc

SEQ ID NO: 2112068 - RNA, 18 nt, Human
cccaggagagccagcccu

SEQ ID NO: 2112069 - RNA, 19 nt, Human
cccaggagagccagcccuc

SEQ ID NO: 2112070 - RNA, 21 nt, Human
cccaggagagccagcccuccc

SEQ ID NO: 2112071 - RNA, 22 nt, Human
cccaggagagccagcccucccu

SEQ ID NO: 2112072 - RNA, 23 nt, Human
cccaggagagccagcccucccug

SEQ ID NO: 2112073 - RNA, 15 nt, Human
cccagagaggaauca

SEQ ID NO: 2112074 - RNA, 23 nt, Human
cccagacuugcugaaucggaauc

SEQ ID NO: 2112075 - RNA, 19 nt, Human
cccagagaggaaucagacu

SEQ ID NO: 2112076 - RNA, 21 nt, Human
cccagagaggaaucagacuuc

SEQ ID NO: 2112077 - RNA, 14 nt, Human
cccagagaugccuc

SEQ ID NO: 2112078 - RNA, 16 nt, Human
cccagagaugccucca

SEQ ID NO: 2112079 - RNA, 17 nt, Human
cccagagaugccuccac

SEQ ID NO: 2112080 - RNA, 18 nt, Human
cccagagaugccuccacc

SEQ ID NO: 2112081 - RNA, 19 nt, Human
cccagagaugccuccaccg

SEQ ID NO: 2112082 - RNA, 20 nt, Human
cccagagaugccuccaccgc

SEQ ID NO: 2112083 - RNA, 20 nt, Human
cccagagaugggacugggag

SEQ ID NO: 2112084 - RNA, 21 nt, Human
cccagagaugccuccaccgcu

SEQ ID NO: 2112085 - RNA, 23 nt, Human
cccagagaugccuccaccgcugc

SEQ ID NO: 2112086 - RNA, 21 nt, Human
cccagagaugggacugggagg

SEQ ID NO: 2112087 - RNA, 21 nt, Human
cccagaccuuuuauccacuua

SEQ ID NO: 2112088 - RNA, 21 nt, Human
cccagaccccucuggccagga

SEQ ID NO: 2112089 - RNA, 18 nt, Human
cccagaaugucagauucc

SEQ ID NO: 2112090 - RNA, 21 nt, Human
cccagaaugucagauuccuuu

SEQ ID NO: 2112091 - RNA, 17 nt, Human
cccagaauucccagcug

SEQ ID NO: 2112092 - RNA, 21 nt, Human
cccagaauucccagcugucug

SEQ ID NO: 2112093 - RNA, 18 nt, Human
cccagaccccucuggcca

SEQ ID NO: 2112094 - RNA, 19 nt, Human
cccagaccccucuggccag

SEQ ID NO: 2112095 - RNA, 20 nt, Human
cccagaccccucuggccagg

SEQ ID NO: 2112096 - RNA, 12 nt, Human
cccagacagcuc

SEQ ID NO: 2112097 - RNA, 13 nt, Human
cccagacagcucc

SEQ ID NO: 2112098 - RNA, 14 nt, Human
cccagacagcuccc

SEQ ID NO: 2112099 - RNA, 16 nt, Human
cccagacagcucccuc

SEQ ID NO: 2112100 - RNA, 20 nt, Human
cccagacagcucccucugcc

SEQ ID NO: 2112101 - RNA, 21 nt, Human
cccagacagcucccucugccu

SEQ ID NO: 2112102 - RNA, 20 nt, Human
cccaccuuggcugcagggag

SEQ ID NO: 2112103 - RNA, 19 nt, Human
cccaccuuggcugcaggga

SEQ ID NO: 2112104 - RNA, 17 nt, Human
cccaccuuggcugcagg

SEQ ID NO: 2112105 - RNA, 16 nt, Human
cccaccuuggcugcag

SEQ ID NO: 2112106 - RNA, 12 nt, Human
cccaccugcuga

SEQ ID NO: 2112107 - RNA, 13 nt, Human
cccaccugcugag

SEQ ID NO: 2112108 - RNA, 19 nt, Human
cccaccugcugagagaccc

SEQ ID NO: 2112109 - RNA, 16 nt, Human
ccauuccuggagcccg

SEQ ID NO: 2112110 - RNA, 24 nt, Human
ccauuccuggagcccgaggcacca

SEQ ID NO: 2112111 - RNA, 21 nt, Human
ccauguuggccaggcuggucu

SEQ ID NO: 2112112 - RNA, 19 nt, Human
ccauguuggccaggcuggu

SEQ ID NO: 2112113 - RNA, 15 nt, Human
ccauguuggccaggc

SEQ ID NO: 2112114 - RNA, 18 nt, Human
ccauguuggccaggcugg

SEQ ID NO: 2112115 - RNA, 13 nt, Human
ccauuccacaucc

SEQ ID NO: 2112116 - RNA, 12 nt, Human
ccauuccucagg

SEQ ID NO: 2112117 - RNA, 13 nt, Human
ccauuccucaggg

SEQ ID NO: 2112118 - RNA, 16 nt, Human
ccauuccucagggaca

SEQ ID NO: 2112119 - RNA, 16 nt, Human
ccauuccccagccucu

SEQ ID NO: 2112120 - RNA, 18 nt, Human
ccauuccccagccucucu

SEQ ID NO: 2112121 - RNA, 19 nt, Human
ccauuccccagccucucuu

SEQ ID NO: 2112122 - RNA, 13 nt, Human
ccaugcuccuggc

SEQ ID NO: 2112123 - RNA, 18 nt, Human
ccaugccuguccagccug

SEQ ID NO: 2112124 - RNA, 19 nt, Human
ccaugccuguccagccugg

SEQ ID NO: 2112125 - RNA, 13 nt, Human
ccaugccugucca

SEQ ID NO: 2112126 - RNA, 14 nt, Human
ccaugccuguccag

SEQ ID NO: 2112127 - RNA, 17 nt, Human
ccaugccuguccagccu

SEQ ID NO: 2112128 - RNA, 13 nt, Human
ccaugaacuggag

SEQ ID NO: 2112129 - RNA, 18 nt, Human
ccaugaacuggaggccag

SEQ ID NO: 2112130 - RNA, 13 nt, Human
ccaugaaacaaag

SEQ ID NO: 2112131 - RNA, 19 nt, Human
ccaugaaaacguuuuauug

SEQ ID NO: 2112132 - RNA, 20 nt, Human
ccaugaaaacguuuuauugu

SEQ ID NO: 2112133 - RNA, 22 nt, Human
ccaugaaaaugcaacaacaugu

SEQ ID NO: 2112134 - RNA, 21 nt, Human
ccaugaaaacguuuuauugug

SEQ ID NO: 2112135 - RNA, 23 nt, Human
ccaugaaaacguuuuauuguguu

SEQ ID NO: 2112136 - RNA, 14 nt, Human
ccaugcugccucca

SEQ ID NO: 2112137 - RNA, 15 nt, Human
ccaugcuugggugua

SEQ ID NO: 2112138 - RNA, 15 nt, Human
ccaugcuccuggccc

SEQ ID NO: 2112139 - RNA, 18 nt, Human
ccaugcuccuggcccacu

SEQ ID NO: 2112140 - RNA, 13 nt, Human
ccaugugccaggu

SEQ ID NO: 2112141 - RNA, 14 nt, Human
ccauguuggccagg

SEQ ID NO: 2112142 - RNA, 13 nt, Human
ccauguuggccag

SEQ ID NO: 2112143 - RNA, 13 nt, Human
ccaugugcccagu

SEQ ID NO: 2112144 - RNA, 15 nt, Human
ccaugugccugcacc

SEQ ID NO: 2112145 - RNA, 17 nt, Human
ccaugugccugcaccag

SEQ ID NO: 2112146 - RNA, 18 nt, Human
ccaugugccugcaccagg

SEQ ID NO: 2112147 - RNA, 19 nt, Human
ccaugugccugcaccagga

SEQ ID NO: 2112148 - RNA, 20 nt, Human
ccaugugccugcaccaggag

SEQ ID NO: 2112149 - RNA, 13 nt, Human
ccauggaggcaca

SEQ ID NO: 2112150 - RNA, 21 nt, Human
ccauggaggcacacagcugca

SEQ ID NO: 2112151 - RNA, 17 nt, Human
ccauggaggcacacagc

SEQ ID NO: 2112152 - RNA, 20 nt, Human
ccauggaggcacacagcugc

SEQ ID NO: 2112153 - RNA, 17 nt, Human
ccauggagacaagaagg

SEQ ID NO: 2112154 - RNA, 20 nt, Human
cccagagcuguuuauggccu

SEQ ID NO: 2112155 - RNA, 18 nt, Human
ccccaacccaaaccugga

SEQ ID NO: 2112156 - RNA, 13 nt, Human
ccccaacccccac

SEQ ID NO: 2112157 - RNA, 11 nt, Human
ccccaaagugg

SEQ ID NO: 2112158 - RNA, 13 nt, Human
ccccaacuccugg

SEQ ID NO: 2112159 - RNA, 16 nt, Human
ccccaacgaaaagcac

SEQ ID NO: 2112160 - RNA, 20 nt, Human
ccccaacgaaaagcacaucc

SEQ ID NO: 2112161 - RNA, 14 nt, Human
ccccaacuccugga

SEQ ID NO: 2112162 - RNA, 15 nt, Human
ccccaacuccuggaa

SEQ ID NO: 2112163 - RNA, 22 nt, Human
ccccacacuuguuccagcucuu

SEQ ID NO: 2112164 - RNA, 13 nt, Human
ccccaacccugcc

SEQ ID NO: 2112165 - RNA, 15 nt, Human
ccccaacccugcccc

SEQ ID NO: 2112166 - RNA, 17 nt, Human
ccccaacccugccccug

SEQ ID NO: 2112167 - RNA, 18 nt, Human
ccccaacccugccccugc

SEQ ID NO: 2112168 - RNA, 23 nt, Human
ccccaacccugccccugccccgu

SEQ ID NO: 2112169 - RNA, 19 nt, Human
cccaugugccugcaccagg

SEQ ID NO: 2112170 - RNA, 22 nt, Human
cccaugugccugcaccaggaga

SEQ ID NO: 2112171 - RNA, 14 nt, Human
cccaugugugagug

SEQ ID NO: 2112172 - RNA, 19 nt, Human
cccaugugugagugugugc

SEQ ID NO: 2112173 - RNA, 20 nt, Human
cccaugugugagugugugca

SEQ ID NO: 2112174 - RNA, 18 nt, Human
cccauuagaccaagcuug

SEQ ID NO: 2112175 - RNA, 12 nt, Human
ccccaaagcccc

SEQ ID NO: 2112176 - RNA, 17 nt, Human
cccaugucuacacagau

SEQ ID NO: 2112177 - RNA, 16 nt, Human
cccaugucucucagaa

SEQ ID NO: 2112178 - RNA, 20 nt, Human
cccaugagccucagcauccu

SEQ ID NO: 2112179 - RNA, 14 nt, Human
cccaugccugucca

SEQ ID NO: 2112180 - RNA, 16 nt, Human
cccaugccuguccagc

SEQ ID NO: 2112181 - RNA, 19 nt, Human
cccaugccuguccagccug

SEQ ID NO: 2112182 - RNA, 16 nt, Human
cccaugagccucagca

SEQ ID NO: 2112183 - RNA, 15 nt, Human
cccaugagccucagc

SEQ ID NO: 2112184 - RNA, 20 nt, Human
cccaugccuguccagccugg

SEQ ID NO: 2112185 - RNA, 15 nt, Human
cccaucuugccucca

SEQ ID NO: 2112186 - RNA, 24 nt, Human
cccaucuugccuccauggugccuc

SEQ ID NO: 2112187 - RNA, 18 nt, Human
cccaugaagacaggacag

SEQ ID NO: 2112188 - RNA, 19 nt, Human
cccaugaagacaggacagu

SEQ ID NO: 2112189 - RNA, 22 nt, Human
cccaugaagacaggacagugcu

SEQ ID NO: 2112190 - RNA, 12 nt, Human
cccaugaagcca

SEQ ID NO: 2112191 - RNA, 16 nt, Human
cccaugaagccacagc

SEQ ID NO: 2112192 - RNA, 19 nt, Human
cccaucgguguccauuuau

SEQ ID NO: 2112193 - RNA, 20 nt, Human
cccaucgguguccauuuaua

SEQ ID NO: 2112194 - RNA, 21 nt, Human
cccaucuaugucccuugcugu

SEQ ID NO: 2112195 - RNA, 19 nt, Human
cccagucuggaaugcagug

SEQ ID NO: 2112196 - RNA, 18 nt, Human
cccagucuggaaugcagu

SEQ ID NO: 2112197 - RNA, 10 nt, Human
cccagucugg

SEQ ID NO: 2112198 - RNA, 21 nt, Human
cccagugcccacaggaucagu

SEQ ID NO: 2112199 - RNA, 15 nt, Human
cccagugccgagaag

SEQ ID NO: 2112200 - RNA, 15 nt, Human
cccagugcccugggg

SEQ ID NO: 2112201 - RNA, 16 nt, Human
cccagugcccuggggc

SEQ ID NO: 2112202 - RNA, 17 nt, Human
cccagugcccuggggcu

SEQ ID NO: 2112203 - RNA, 23 nt, Human
cccagugcccuggggcugaucuc

SEQ ID NO: 2112204 - RNA, 14 nt, Human
cccaguuagcucuc

SEQ ID NO: 2112205 - RNA, 14 nt, Human
cccaguuaaucuug

SEQ ID NO: 2112206 - RNA, 19 nt, Human
cccaguucaggagucccaa

SEQ ID NO: 2112207 - RNA, 22 nt, Human
cccaguucaggagucccaagga

SEQ ID NO: 2112208 - RNA, 17 nt, Human
cccaguguuuuaggagc

SEQ ID NO: 2112209 - RNA, 16 nt, Human
cccaguguuuuaggag

SEQ ID NO: 2112210 - RNA, 16 nt, Human
cccaguguuguuugua

SEQ ID NO: 2112211 - RNA, 17 nt, Human
cccaguguuguuuguaa

SEQ ID NO: 2112212 - RNA, 18 nt, Human
cccaguguuguuuguaaa

SEQ ID NO: 2112213 - RNA, 21 nt, Human
cccaguguuguuuguaaauaa

SEQ ID NO: 2112214 - RNA, 23 nt, Human
cccaggcaggucuugaacuccug

SEQ ID NO: 2112215 - RNA, 19 nt, Human
cccaggguuaauagggccu

SEQ ID NO: 2112216 - RNA, 18 nt, Human
cccaggguucccccagcc

SEQ ID NO: 2112217 - RNA, 13 nt, Human
cccagguuucuau

SEQ ID NO: 2112218 - RNA, 14 nt, Human
cccaguaagccacu

SEQ ID NO: 2112219 - RNA, 12 nt, Human
cccagucccugg

SEQ ID NO: 2112220 - RNA, 13 nt, Human
cccagucccuggg

SEQ ID NO: 2112221 - RNA, 14 nt, Human
cccagucccugggg

SEQ ID NO: 2112222 - RNA, 16 nt, Human
cccagucccuggggga

SEQ ID NO: 2112223 - RNA, 23 nt, Human
cccagucccugggggaagcccug

SEQ ID NO: 2112224 - RNA, 23 nt, Human
ccucccaaagugcugggauuaca

SEQ ID NO: 2112225 - RNA, 17 nt, Human
ccuccccccacugcagg

SEQ ID NO: 2112226 - RNA, 18 nt, Human
ccuccccccacugcaggc

SEQ ID NO: 2112227 - RNA, 14 nt, Human
ccucccccuccuuc

SEQ ID NO: 2112228 - RNA, 15 nt, Human
ccucccccuccuucc

SEQ ID NO: 2112229 - RNA, 16 nt, Human
ccucccccuccuuccc

SEQ ID NO: 2112230 - RNA, 21 nt, Human
ccucccccuccuucccagcug

SEQ ID NO: 2112231 - RNA, 12 nt, Human
ccucccccugcc

SEQ ID NO: 2112232 - RNA, 12 nt, Human
ccucccccuccu

SEQ ID NO: 2112233 - RNA, 20 nt, Human
ccuccccccacugcaggccc

SEQ ID NO: 2112234 - RNA, 23 nt, Human
ccuccccggcucgagcaguccug

SEQ ID NO: 2112235 - RNA, 13 nt, Human
ccuccccuaucca

SEQ ID NO: 2112236 - RNA, 15 nt, Human
ccuccccuauccacc

SEQ ID NO: 2112237 - RNA, 17 nt, Human
ccuccccuauccaccca

SEQ ID NO: 2112238 - RNA, 18 nt, Human
ccuccccuauccacccag

SEQ ID NO: 2112239 - RNA, 22 nt, Human
ccuccccuauccacccagccca

SEQ ID NO: 2112240 - RNA, 14 nt, Human
ccucccccuguccc

SEQ ID NO: 2112241 - RNA, 20 nt, Human
ccucccccugccagugccuu

SEQ ID NO: 2112242 - RNA, 18 nt, Human
ccucccccugccagugcc

SEQ ID NO: 2112243 - RNA, 19 nt, Human
ccucccccugccagugccu

SEQ ID NO: 2112244 - RNA, 14 nt, Human
ccucccccugcccc

SEQ ID NO: 2112245 - RNA, 15 nt, Human
ccucccccugccagu

SEQ ID NO: 2112246 - RNA, 17 nt, Human
ccucccccugccagugc

SEQ ID NO: 2112247 - RNA, 14 nt, Human
ccucccccugccag

SEQ ID NO: 2112248 - RNA, 13 nt, Human
ccucccccugcca

SEQ ID NO: 2112249 - RNA, 13 nt, Human
ccuccccucaagg

SEQ ID NO: 2112250 - RNA, 14 nt, Human
ccuccccucaagga

SEQ ID NO: 2112251 - RNA, 18 nt, Human
ccucccgaauagcuggga

SEQ ID NO: 2112252 - RNA, 14 nt, Human
ccuccccugccauu

SEQ ID NO: 2112253 - RNA, 13 nt, Human
ccuccccugcccu

SEQ ID NO: 2112254 - RNA, 14 nt, Human
ccuccccugcccua

SEQ ID NO: 2112255 - RNA, 14 nt, Human
ccuccccugcccuc

SEQ ID NO: 2112256 - RNA, 15 nt, Human
ccuccccugcccucg

SEQ ID NO: 2112257 - RNA, 15 nt, Human
ccuccccugcccugg

SEQ ID NO: 2112258 - RNA, 20 nt, Human
ccucccgaauagcugggacu

SEQ ID NO: 2112259 - RNA, 19 nt, Human
ccucccgaauagcugggac

SEQ ID NO: 2112260 - RNA, 21 nt, Human
ccucccgaauagcugggacua

SEQ ID NO: 2112261 - RNA, 16 nt, Human
ccuccccugcccuggu

SEQ ID NO: 2112262 - RNA, 18 nt, Human
ccucccgaguagcuggga

SEQ ID NO: 2112263 - RNA, 17 nt, Human
ccucccgaguagcuggg

SEQ ID NO: 2112264 - RNA, 13 nt, Human
ccucccucuaauu

SEQ ID NO: 2112265 - RNA, 13 nt, Human
ccucccucucucu

SEQ ID NO: 2112266 - RNA, 18 nt, Human
ccucccucucucuucugc

SEQ ID NO: 2112267 - RNA, 12 nt, Human
ccucccuccuuc

SEQ ID NO: 2112268 - RNA, 14 nt, Human
ccucccuccuuccu

SEQ ID NO: 2112269 - RNA, 13 nt, Human
ccucccucuuucc

SEQ ID NO: 2112270 - RNA, 20 nt, Human
ccucccucucucuucugcuc

SEQ ID NO: 2112271 - RNA, 22 nt, Human
ccucccucucucuucugcucca

SEQ ID NO: 2112272 - RNA, 14 nt, Human
ccucccucugaccu

SEQ ID NO: 2112273 - RNA, 18 nt, Human
ccucccucugaccugcag

SEQ ID NO: 2112274 - RNA, 19 nt, Human
ccucccucugaccugcagg

SEQ ID NO: 2112275 - RNA, 13 nt, Human
ccuccucaccucu

SEQ ID NO: 2112276 - RNA, 14 nt, Human
ccuccucaccucug

SEQ ID NO: 2112277 - RNA, 15 nt, Human
ccuccucaccucugg

SEQ ID NO: 2112278 - RNA, 16 nt, Human
ccuccucaccucugga

SEQ ID NO: 2112279 - RNA, 21 nt, Human
ccuccucaccucuggacuggc

SEQ ID NO: 2112280 - RNA, 22 nt, Human
ccuccucaccucuggacuggcu

SEQ ID NO: 2112281 - RNA, 14 nt, Human
ccuccucacucccu

SEQ ID NO: 2112282 - RNA, 12 nt, Human
ccuccuccagcc

SEQ ID NO: 2112283 - RNA, 17 nt, Human
ccucaggugagaagcag

SEQ ID NO: 2112284 - RNA, 18 nt, Human
ccucaggugagaagcaga

SEQ ID NO: 2112285 - RNA, 20 nt, Human
ccucaggugagaagcagagg

SEQ ID NO: 2112286 - RNA, 21 nt, Human
ccucaguggacuuuccacccc

SEQ ID NO: 2112287 - RNA, 23 nt, Human
ccucaguggacuuuccacccccu

SEQ ID NO: 2112288 - RNA, 11 nt, Human
ccucaguguca

SEQ ID NO: 2112289 - RNA, 12 nt, Human
ccucagugucau

SEQ ID NO: 2112290 - RNA, 23 nt, Human
ccucagugucauuuaugaaaaga

SEQ ID NO: 2112291 - RNA, 15 nt, Human
ccucaguuucccuau

SEQ ID NO: 2112292 - RNA, 16 nt, Human
ccuccacuccuuccug

SEQ ID NO: 2112293 - RNA, 15 nt, Human
ccucaguucccuugg

SEQ ID NO: 2112294 - RNA, 16 nt, Human
ccucaguucccuuggc

SEQ ID NO: 2112295 - RNA, 17 nt, Human
ccucaguucccuuggcc

SEQ ID NO: 2112296 - RNA, 18 nt, Human
ccucaguucccuuggccu

SEQ ID NO: 2112297 - RNA, 19 nt, Human
ccucaguucccuuggccuc

SEQ ID NO: 2112298 - RNA, 20 nt, Human
ccucaguucccuuggccuca

SEQ ID NO: 2112299 - RNA, 21 nt, Human
ccucaguucccuuggccucag

SEQ ID NO: 2112300 - RNA, 22 nt, Human
ccucaguucccuuggccucaga

SEQ ID NO: 2112301 - RNA, 17 nt, Human
ccuccagaagccucugg

SEQ ID NO: 2112302 - RNA, 13 nt, Human
ccuccagaagccu

SEQ ID NO: 2112303 - RNA, 11 nt, Human
ccuccagcuca

SEQ ID NO: 2112304 - RNA, 13 nt, Human
ccuccagcucagc

SEQ ID NO: 2112305 - RNA, 15 nt, Human
ccuccagcucagcag

SEQ ID NO: 2112306 - RNA, 18 nt, Human
ccuccagcucagcaguga

SEQ ID NO: 2112307 - RNA, 12 nt, Human
ccuccagaagcc

SEQ ID NO: 2112308 - RNA, 13 nt, Human
ccuccacugcccu

SEQ ID NO: 2112309 - RNA, 14 nt, Human
ccuccacugcccuc

SEQ ID NO: 2112310 - RNA, 15 nt, Human
ccuccacugcccucu

SEQ ID NO: 2112311 - RNA, 16 nt, Human
ccuccacugcccucug

SEQ ID NO: 2112312 - RNA, 12 nt, Human
ccuccagcuguu

SEQ ID NO: 2112313 - RNA, 11 nt, Human
ccuccagcugu

SEQ ID NO: 2112314 - RNA, 13 nt, Human
ccuccaggcaaaa

SEQ ID NO: 2112315 - RNA, 16 nt, Human
ccuccaugcugccucc

SEQ ID NO: 2112316 - RNA, 19 nt, Human
ccuccaugcugccuccaga

SEQ ID NO: 2112317 - RNA, 15 nt, Human
ccuccauggugccuc

SEQ ID NO: 2112318 - RNA, 18 nt, Human
ccuccauggugccucugg

SEQ ID NO: 2112319 - RNA, 21 nt, Human
ccuccauggugccucuggagg

SEQ ID NO: 2112320 - RNA, 17 nt, Human
ccucccaaagugcuggg

SEQ ID NO: 2112321 - RNA, 15 nt, Human
ccuccaugugggcua

SEQ ID NO: 2112322 - RNA, 12 nt, Human
ccuccauguggg

SEQ ID NO: 2112323 - RNA, 15 nt, Human
ccuccaucccgacau

SEQ ID NO: 2112324 - RNA, 14 nt, Human
ccuccaucccgaca

SEQ ID NO: 2112325 - RNA, 20 nt, Human
ccucguccucccccugccag

SEQ ID NO: 2112326 - RNA, 21 nt, Human
ccucguccucccccugccagu

SEQ ID NO: 2112327 - RNA, 15 nt, Human
ccucguccucccccu

SEQ ID NO: 2112328 - RNA, 16 nt, Human
ccucguccucccccug

SEQ ID NO: 2112329 - RNA, 17 nt, Human
ccucguccucccccugc

SEQ ID NO: 2112330 - RNA, 19 nt, Human
ccucguccucccccugcca

SEQ ID NO: 2112331 - RNA, 12 nt, Human
ccuccuuuccca

SEQ ID NO: 2112332 - RNA, 20 nt, Human
ccuccuugucuuggcagccu

SEQ ID NO: 2112333 - RNA, 16 nt, Human
ccuccuuuacccucau

SEQ ID NO: 2112334 - RNA, 17 nt, Human
ccuccuuuacccucauc

SEQ ID NO: 2112335 - RNA, 19 nt, Human
ccuccuuuacccucaucug

SEQ ID NO: 2112336 - RNA, 17 nt, Human
ccuccuugccuccugug

SEQ ID NO: 2112337 - RNA, 18 nt, Human
ccuccuugccuccugugu

SEQ ID NO: 2112338 - RNA, 19 nt, Human
ccuccuugccuccugugua

SEQ ID NO: 2112339 - RNA, 20 nt, Human
ccuccuugccuccuguguaa

SEQ ID NO: 2112340 - RNA, 15 nt, Human
ccucuaaugcucacg

SEQ ID NO: 2112341 - RNA, 18 nt, Human
ccucuaaugcucacgcuc

SEQ ID NO: 2112342 - RNA, 22 nt, Human
ccucuaaugcucacgcucccaa

SEQ ID NO: 2112343 - RNA, 21 nt, Human
ccuccucuaacaggggcuggu

SEQ ID NO: 2112344 - RNA, 14 nt, Human
ccuccuugccuccu

SEQ ID NO: 2112345 - RNA, 21 nt, Human
ccuccuccagccgccaugcuc

SEQ ID NO: 2112346 - RNA, 15 nt, Human
ccucuccccagcaag

SEQ ID NO: 2112347 - RNA, 12 nt, Human
ccucucccagga

SEQ ID NO: 2112348 - RNA, 13 nt, Human
ccucucccaggac

SEQ ID NO: 2112349 - RNA, 14 nt, Human
ccucucccaggacc

SEQ ID NO: 2112350 - RNA, 13 nt, Human
ccucgugcuuuaa

SEQ ID NO: 2112351 - RNA, 20 nt, Human
ccucuacuuaaugagauagu

SEQ ID NO: 2112352 - RNA, 14 nt, Human
ccucuaccaagcug

SEQ ID NO: 2112353 - RNA, 20 nt, Human
ccucuccccagcaagugaga

SEQ ID NO: 2112354 - RNA, 22 nt, Human
ccucuccccaagacuugguguc

SEQ ID NO: 2112355 - RNA, 14 nt, Human
ccucuccccaagac

SEQ ID NO: 2112356 - RNA, 10 nt, Human
ccucucccug

SEQ ID NO: 2112357 - RNA, 13 nt, Human
ccucucccuggcc

SEQ ID NO: 2112358 - RNA, 15 nt, Human
ccucucccuggcccu

SEQ ID NO: 2112359 - RNA, 20 nt, Human
ccucugacacacagcucugu

SEQ ID NO: 2112360 - RNA, 19 nt, Human
ccucugacacacagcucug

SEQ ID NO: 2112361 - RNA, 14 nt, Human
ccucugacacacag

SEQ ID NO: 2112362 - RNA, 15 nt, Human
ccucugacacacagc

SEQ ID NO: 2112363 - RNA, 12 nt, Human
ccucuccugccu

SEQ ID NO: 2112364 - RNA, 11 nt, Human
ccucuccugcc

SEQ ID NO: 2112365 - RNA, 13 nt, Human
ccucugacacaca

SEQ ID NO: 2112366 - RNA, 13 nt, Human
ccucucccuguug

SEQ ID NO: 2112367 - RNA, 14 nt, Human
ccucugacucccaa

SEQ ID NO: 2112368 - RNA, 21 nt, Human
ccucugacucccaaagagcug

SEQ ID NO: 2112369 - RNA, 22 nt, Human
ccucugacucccaaagagcugc

SEQ ID NO: 2112370 - RNA, 19 nt, Human
ccucugaccugcaggccaa

SEQ ID NO: 2112371 - RNA, 20 nt, Human
ccucugaccugcaggccaag

SEQ ID NO: 2112372 - RNA, 15 nt, Human
ccucugaccugcagg

SEQ ID NO: 2112373 - RNA, 16 nt, Human
ccucugaccugcaggc

SEQ ID NO: 2112374 - RNA, 17 nt, Human
ccucugaccugcaggcc

SEQ ID NO: 2112375 - RNA, 21 nt, Human
ccucugacacacagcucuguc

SEQ ID NO: 2112376 - RNA, 13 nt, Human
ccucuccugccua

SEQ ID NO: 2112377 - RNA, 20 nt, Human
ccucugaaguuggacagcaa

SEQ ID NO: 2112378 - RNA, 22 nt, Human
ccucugacccuagcucuuuccu

SEQ ID NO: 2112379 - RNA, 13 nt, Human
ccucugccaccuc

SEQ ID NO: 2112380 - RNA, 14 nt, Human
ccucugccaccucc

SEQ ID NO: 2112381 - RNA, 15 nt, Human
ccucugccaccuccc

SEQ ID NO: 2112382 - RNA, 16 nt, Human
ccucugccaccucccc

SEQ ID NO: 2112383 - RNA, 19 nt, Human
ccucugagccccugggacu

SEQ ID NO: 2112384 - RNA, 15 nt, Human
ccucugauaccucaa

SEQ ID NO: 2112385 - RNA, 14 nt, Human
ccucugauaccuca

SEQ ID NO: 2112386 - RNA, 17 nt, Human
ccucuagaaauuuuuca

SEQ ID NO: 2112387 - RNA, 11 nt, Human
cccuucuuuuu

SEQ ID NO: 2112388 - RNA, 19 nt, Human
cccuucuuuuucuucuuuu

SEQ ID NO: 2112389 - RNA, 21 nt, Human
cccuugaaagucaugaacaca

SEQ ID NO: 2112390 - RNA, 22 nt, Human
cccuugaaagucaugaacacau

SEQ ID NO: 2112391 - RNA, 23 nt, Human
cccuugacgucaagucuccuucc

SEQ ID NO: 2112392 - RNA, 13 nt, Human
cccuuggaggcca

SEQ ID NO: 2112393 - RNA, 15 nt, Human
cccuuggaggccagc

SEQ ID NO: 2112394 - RNA, 17 nt, Human
cccuuggaggccagcca

SEQ ID NO: 2112395 - RNA, 18 nt, Human
cccuuggaggccagccag

SEQ ID NO: 2112396 - RNA, 17 nt, Human
cccuuggaggcugucuu

SEQ ID NO: 2112397 - RNA, 12 nt, Human
cccuuggccuca

SEQ ID NO: 2112398 - RNA, 13 nt, Human
cccuuggccucag

SEQ ID NO: 2112399 - RNA, 17 nt, Human
cccuugugcguggguga

SEQ ID NO: 2112400 - RNA, 12 nt, Human
cccuugugugug

SEQ ID NO: 2112401 - RNA, 23 nt, Human
cccuuuagcacguuuaaaguucu

SEQ ID NO: 2112402 - RNA, 14 nt, Human
cccuuggccucaga

SEQ ID NO: 2112403 - RNA, 12 nt, Human
cccuuggccugu

SEQ ID NO: 2112404 - RNA, 15 nt, Human
cccuugucccacuca

SEQ ID NO: 2112405 - RNA, 12 nt, Human
cccuuccccacu

SEQ ID NO: 2112406 - RNA, 21 nt, Human
cccuuccccacugccugccca

SEQ ID NO: 2112407 - RNA, 19 nt, Human
cccuucccuugagcccucu

SEQ ID NO: 2112408 - RNA, 11 nt, Human
cccuucauuug

SEQ ID NO: 2112409 - RNA, 22 nt, Human
cccuguucacucuacuuagcau

SEQ ID NO: 2112410 - RNA, 14 nt, Human
cccuguucacucua

SEQ ID NO: 2112411 - RNA, 23 nt, Human
cccuucacuucugaccacacuuc

SEQ ID NO: 2112412 - RNA, 17 nt, Human
cccuucagugcccacca

SEQ ID NO: 2112413 - RNA, 12 nt, Human
cccuguucauug

SEQ ID NO: 2112414 - RNA, 13 nt, Human
cccuguucauugu

SEQ ID NO: 2112415 - RNA, 13 nt, Human
cccuucagugccc

SEQ ID NO: 2112416 - RNA, 13 nt, Human
cccuguucacucu

SEQ ID NO: 2112417 - RNA, 19 nt, Human
cccugguuauauucucacg

SEQ ID NO: 2112418 - RNA, 18 nt, Human
cccugguuauauucucac

SEQ ID NO: 2112419 - RNA, 11 nt, Human
ccgguguccuu

SEQ ID NO: 2112420 - RNA, 15 nt, Human
ccggugugccugcag

SEQ ID NO: 2112421 - RNA, 16 nt, Human
ccggugugccugcagc

SEQ ID NO: 2112422 - RNA, 17 nt, Human
ccggugugccugcagcc

SEQ ID NO: 2112423 - RNA, 23 nt, Human
ccggucccuugagaccucagcca

SEQ ID NO: 2112424 - RNA, 20 nt, Human
ccggucccuugagaccucag

SEQ ID NO: 2112425 - RNA, 22 nt, Human
ccggucccuugagaccucagcc

SEQ ID NO: 2112426 - RNA, 15 nt, Human
ccgguggaaggccuu

SEQ ID NO: 2112427 - RNA, 23 nt, Human
ccguggagaugggaugcuugccu

SEQ ID NO: 2112428 - RNA, 15 nt, Human
ccguggcacugcaua

SEQ ID NO: 2112429 - RNA, 23 nt, Human
ccguggcaucaccuuaggcaggg

SEQ ID NO: 2112430 - RNA, 15 nt, Human
ccgggaagccacccu

SEQ ID NO: 2112431 - RNA, 17 nt, Human
ccgggaagccacccucc

SEQ ID NO: 2112432 - RNA, 13 nt, Human
ccgggacucacug

SEQ ID NO: 2112433 - RNA, 19 nt, Human
ccgggacucacuggcagcc

SEQ ID NO: 2112434 - RNA, 20 nt, Human
ccgggacucacuggcagccc

SEQ ID NO: 2112435 - RNA, 22 nt, Human
ccgggacucacuggcagcccca

SEQ ID NO: 2112436 - RNA, 23 nt, Human
ccgggacucacuggcagccccag

SEQ ID NO: 2112437 - RNA, 12 nt, Human
ccgggagagggg

SEQ ID NO: 2112438 - RNA, 18 nt, Human
ccggucccuugagaccuc

SEQ ID NO: 2112439 - RNA, 18 nt, Human
ccggggcagcugccagag

SEQ ID NO: 2112440 - RNA, 19 nt, Human
ccggggcagcugccagaga

SEQ ID NO: 2112441 - RNA, 20 nt, Human
ccggggcagcugccagagaa

SEQ ID NO: 2112442 - RNA, 21 nt, Human
ccggaggggccuggcagccgu

SEQ ID NO: 2112443 - RNA, 17 nt, Human
ccggagguagagguugu

SEQ ID NO: 2112444 - RNA, 17 nt, Human
ccggaggggccuggcag

SEQ ID NO: 2112445 - RNA, 18 nt, Human
ccggagauguagcaaaac

SEQ ID NO: 2112446 - RNA, 15 nt, Human
ccggauccugggugg

SEQ ID NO: 2112447 - RNA, 14 nt, Human
ccggagauguagca

SEQ ID NO: 2112448 - RNA, 17 nt, Human
ccggagauguagcaaaa

SEQ ID NO: 2112449 - RNA, 17 nt, Human
ccggagauuggacggcc

SEQ ID NO: 2112450 - RNA, 19 nt, Human
ccggagauuggacggccug

SEQ ID NO: 2112451 - RNA, 20 nt, Human
ccggagauuggacggccuga

SEQ ID NO: 2112452 - RNA, 21 nt, Human
ccggagauuggacggccugau

SEQ ID NO: 2112453 - RNA, 22 nt, Human
ccguuacucuccaaccuggaca

SEQ ID NO: 2112454 - RNA, 13 nt, Human
ccguuacucucca

SEQ ID NO: 2112455 - RNA, 14 nt, Human
ccguuacucuccaa

SEQ ID NO: 2112456 - RNA, 17 nt, Human
ccguuacucuccaaccu

SEQ ID NO: 2112457 - RNA, 16 nt, Human
ccuaaaauucagugga

SEQ ID NO: 2112458 - RNA, 22 nt, Human
ccuacaguugaaaaacagcuga

SEQ ID NO: 2112459 - RNA, 14 nt, Human
ccuacagaugaacu

SEQ ID NO: 2112460 - RNA, 18 nt, Human
ccuaacacagcaugugua

SEQ ID NO: 2112461 - RNA, 21 nt, Human
ccuacagaauacuagccagag

SEQ ID NO: 2112462 - RNA, 17 nt, Human
ccggggccugccuagca

SEQ ID NO: 2112463 - RNA, 13 nt, Human
ccuaccaaccucu

SEQ ID NO: 2112464 - RNA, 14 nt, Human
ccuaccaaccucug

SEQ ID NO: 2112465 - RNA, 15 nt, Human
ccuaccaaccucuga

SEQ ID NO: 2112466 - RNA, 13 nt, Human
ccuacccacccuc

SEQ ID NO: 2112467 - RNA, 18 nt, Human
ccuacccacccuccuuuc

SEQ ID NO: 2112468 - RNA, 21 nt, Human
ccuagaaauuccccacccuga

SEQ ID NO: 2112469 - RNA, 17 nt, Human
ccuacuuccagguucug

SEQ ID NO: 2112470 - RNA, 13 nt, Human
ccuaggugacaga

SEQ ID NO: 2112471 - RNA, 16 nt, Human
ccuagacccuccuccu

SEQ ID NO: 2112472 - RNA, 16 nt, Human
ccucagagccaccccu

SEQ ID NO: 2112473 - RNA, 15 nt, Human
ccucagagccccgca

SEQ ID NO: 2112474 - RNA, 13 nt, Human
ccucagaguccag

SEQ ID NO: 2112475 - RNA, 15 nt, Human
ccucagaguccaggc

SEQ ID NO: 2112476 - RNA, 16 nt, Human
ccucagaguccaggcc

SEQ ID NO: 2112477 - RNA, 17 nt, Human
ccucagaguccaggccc

SEQ ID NO: 2112478 - RNA, 18 nt, Human
ccucagaguccaggcccc

SEQ ID NO: 2112479 - RNA, 16 nt, Human
ccucacuguugaauuu

SEQ ID NO: 2112480 - RNA, 14 nt, Human
ccucacuugaaugu

SEQ ID NO: 2112481 - RNA, 14 nt, Human
ccucagacugcuca

SEQ ID NO: 2112482 - RNA, 15 nt, Human
ccucagacugcucaa

SEQ ID NO: 2112483 - RNA, 19 nt, Human
ccucacugggguccugggg

SEQ ID NO: 2112484 - RNA, 20 nt, Human
ccucacugggguccuggggc

SEQ ID NO: 2112485 - RNA, 23 nt, Human
ccucacugggguccuggggccuc

SEQ ID NO: 2112486 - RNA, 12 nt, Human
ccucacugggug

SEQ ID NO: 2112487 - RNA, 13 nt, Human
ccucacugggugg

SEQ ID NO: 2112488 - RNA, 14 nt, Human
ccucacuggguggg

SEQ ID NO: 2112489 - RNA, 21 nt, Human
ccucacuggguggggugagga

SEQ ID NO: 2112490 - RNA, 20 nt, Human
ccucacucccuucccauaag

SEQ ID NO: 2112491 - RNA, 16 nt, Human
ccucacaucuuucaca

SEQ ID NO: 2112492 - RNA, 15 nt, Human
ccucacaucuuucac

SEQ ID NO: 2112493 - RNA, 20 nt, Human
ccucagaugcacaugagcug

SEQ ID NO: 2112494 - RNA, 19 nt, Human
ccucagaguccaggcccca

SEQ ID NO: 2112495 - RNA, 22 nt, Human
ccucagcaaccuguaagacuga

SEQ ID NO: 2112496 - RNA, 18 nt, Human
ccucagccccucuugccc

SEQ ID NO: 2112497 - RNA, 19 nt, Human
ccucagccccucuugcccc

SEQ ID NO: 2112498 - RNA, 20 nt, Human
ccucagccccucuugccccc

SEQ ID NO: 2112499 - RNA, 23 nt, Human
ccucagccccucuugccccccac

SEQ ID NO: 2112500 - RNA, 13 nt, Human
ccucagccccucu

SEQ ID NO: 2112501 - RNA, 14 nt, Human
ccucagccccucuu

SEQ ID NO: 2112502 - RNA, 16 nt, Human
ccucagccccucuugc

SEQ ID NO: 2112503 - RNA, 16 nt, Human
ccucagccaugaggag

SEQ ID NO: 2112504 - RNA, 21 nt, Human
ccucagccaugaggaguugcu

SEQ ID NO: 2112505 - RNA, 24 nt, Human
ccucagggacagagacaccugcac

SEQ ID NO: 2112506 - RNA, 22 nt, Human
ccucagggacagagacaccugc

SEQ ID NO: 2112507 - RNA, 23 nt, Human
ccucagggacagagacaccugca

SEQ ID NO: 2112508 - RNA, 16 nt, Human
ccucaggcuuccuugg

SEQ ID NO: 2112509 - RNA, 17 nt, Human
ccucaggcuuccuuggc

SEQ ID NO: 2112510 - RNA, 18 nt, Human
ccucaggcugcuggagga

SEQ ID NO: 2112511 - RNA, 11 nt, Human
ccucagggaca

SEQ ID NO: 2112512 - RNA, 20 nt, Human
ccucagggacagagacaccu

SEQ ID NO: 2112513 - RNA, 21 nt, Human
ccucagggacagagacaccug

SEQ ID NO: 2112514 - RNA, 12 nt, Human
ccucaggcugcu

SEQ ID NO: 2112515 - RNA, 14 nt, Human
ccucaggcugcugg

SEQ ID NO: 2112516 - RNA, 15 nt, Human
ccucaggcugcugga

SEQ ID NO: 2112517 - RNA, 16 nt, Human
ccucaggcugcuggag

SEQ ID NO: 2112518 - RNA, 17 nt, Human
ccucaggcugcuggagg

SEQ ID NO: 2112519 - RNA, 15 nt, Human
ccuaggugacagagu

SEQ ID NO: 2112520 - RNA, 18 nt, Human
ccuauccacccagcccau

SEQ ID NO: 2112521 - RNA, 21 nt, Human
ccuauccacccagcccauucu

SEQ ID NO: 2112522 - RNA, 13 nt, Human
ccuaucccauccc

SEQ ID NO: 2112523 - RNA, 14 nt, Human
ccuaucccauccca

SEQ ID NO: 2112524 - RNA, 15 nt, Human
ccuaucccaucccau

SEQ ID NO: 2112525 - RNA, 17 nt, Human
ccuaguggggucucccu

SEQ ID NO: 2112526 - RNA, 18 nt, Human
ccuaguggggucucccuc

SEQ ID NO: 2112527 - RNA, 19 nt, Human
ccuaguggggucucccucu

SEQ ID NO: 2112528 - RNA, 20 nt, Human
ccuaguggggucucccucuc

SEQ ID NO: 2112529 - RNA, 16 nt, Human
ccuauccacccagccc

SEQ ID NO: 2112530 - RNA, 17 nt, Human
ccuauccacccagccca

SEQ ID NO: 2112531 - RNA, 21 nt, Human
ccuaguggggucucccucucc

SEQ ID NO: 2112532 - RNA, 16 nt, Human
ccuauuguaaauacaa

SEQ ID NO: 2112533 - RNA, 16 nt, Human
ccuauuagagaagaga

SEQ ID NO: 2112534 - RNA, 11 nt, Human
ccuauguuugc

SEQ ID NO: 2112535 - RNA, 17 nt, Human
ccuauuagagaagagau

SEQ ID NO: 2112536 - RNA, 22 nt, Human
ccucaggugagaagcagaggaa

SEQ ID NO: 2112537 - RNA, 12 nt, Human
cccuggagccca

SEQ ID NO: 2112538 - RNA, 18 nt, Human
cccuggagccuccacugc

SEQ ID NO: 2112539 - RNA, 15 nt, Human
cccugggauguccac

SEQ ID NO: 2112540 - RNA, 14 nt, Human
cccugggccccacc

SEQ ID NO: 2112541 - RNA, 20 nt, Human
cccuggggcugaucucaggg

SEQ ID NO: 2112542 - RNA, 21 nt, Human
cccuggggcugaucucaggga

SEQ ID NO: 2112543 - RNA, 21 nt, Human
cccuggugcugccacacuuca

SEQ ID NO: 2112544 - RNA, 17 nt, Human
cccuggugcugccacac

SEQ ID NO: 2112545 - RNA, 19 nt, Human
cccugggggaagcccugga

SEQ ID NO: 2112546 - RNA, 20 nt, Human
cccugggggaagcccuggau

SEQ ID NO: 2112547 - RNA, 21 nt, Human
cccuggggcuaggcuggagcc

SEQ ID NO: 2112548 - RNA, 17 nt, Human
cccugggggaagcccug

SEQ ID NO: 2112549 - RNA, 18 nt, Human
cccugggggaagcccugg

SEQ ID NO: 2112550 - RNA, 23 nt, Human
cccugguggacaguccugggaga

SEQ ID NO: 2112551 - RNA, 20 nt, Human
cccugguggacaguccuggg

SEQ ID NO: 2112552 - RNA, 21 nt, Human
cccugguggacaguccuggga

SEQ ID NO: 2112553 - RNA, 17 nt, Human
cccugguggacaguccu

SEQ ID NO: 2112554 - RNA, 18 nt, Human
cccugguggacaguccug

SEQ ID NO: 2112555 - RNA, 19 nt, Human
cccugguggacaguccugg

SEQ ID NO: 2112556 - RNA, 22 nt, Human
cccugguggcagugggagcugc

SEQ ID NO: 2112557 - RNA, 22 nt, Human
cccugcuuugggcugcccuggu

SEQ ID NO: 2112558 - RNA, 23 nt, Human
cccugcuuugggcugcccuggug

SEQ ID NO: 2112559 - RNA, 20 nt, Human
cccugcugguucaggguugg

SEQ ID NO: 2112560 - RNA, 19 nt, Human
cccugcugguucaggguug

SEQ ID NO: 2112561 - RNA, 13 nt, Human
cccugcugguuca

SEQ ID NO: 2112562 - RNA, 14 nt, Human
cccucccuccuucc

SEQ ID NO: 2112563 - RNA, 19 nt, Human
cccugcaaaaugagacccu

SEQ ID NO: 2112564 - RNA, 22 nt, Human
cccugcacuugcagacucuaca

SEQ ID NO: 2112565 - RNA, 20 nt, Human
cccugcagagaugcgguggc

SEQ ID NO: 2112566 - RNA, 18 nt, Human
cccuccgccaggcgagau

SEQ ID NO: 2112567 - RNA, 15 nt, Human
cccucuauuuagcau

SEQ ID NO: 2112568 - RNA, 19 nt, Human
cccucuagaaauuuuucag

SEQ ID NO: 2112569 - RNA, 16 nt, Human
cccugauuucuugcuu

SEQ ID NO: 2112570 - RNA, 21 nt, Human
cccucucaggcaugccugugu

SEQ ID NO: 2112571 - RNA, 16 nt, Human
cccucucaggcaugcc

SEQ ID NO: 2112572 - RNA, 20 nt, Human
cccugaucaagucaccggag

SEQ ID NO: 2112573 - RNA, 15 nt, Human
cccugccacccuggg

SEQ ID NO: 2112574 - RNA, 14 nt, Human
cccugccacccugg

SEQ ID NO: 2112575 - RNA, 12 nt, Human
cccugccacccu

SEQ ID NO: 2112576 - RNA, 18 nt, Human
cccugccacccuggggag

SEQ ID NO: 2112577 - RNA, 17 nt, Human
cccugccacccugggga

SEQ ID NO: 2112578 - RNA, 20 nt, Human
cccugcccacccucuggaga

SEQ ID NO: 2112579 - RNA, 14 nt, Human
cccugccagugccu

SEQ ID NO: 2112580 - RNA, 15 nt, Human
cccugccagugccuu

SEQ ID NO: 2112581 - RNA, 16 nt, Human
cccuuggccugucuca

SEQ ID NO: 2112582 - RNA, 13 nt, Human
ccccagccugcua

SEQ ID NO: 2112583 - RNA, 17 nt, Human
ccccagcucuggcuucc

SEQ ID NO: 2112584 - RNA, 17 nt, Human
ccccaccacuucuuuua

SEQ ID NO: 2112585 - RNA, 23 nt, Human
ccccaaaggaagcuuucucugcu

SEQ ID NO: 2112586 - RNA, 14 nt, Human
ccccaccaccccag

SEQ ID NO: 2112587 - RNA, 12 nt, Human
ccccaccaccua

SEQ ID NO: 2112588 - RNA, 23 nt, Human
ccccaccacgauguggcccuggc

SEQ ID NO: 2112589 - RNA, 23 nt, Human
ccccacacuuguuccagcucuuu

SEQ ID NO: 2112590 - RNA, 17 nt, Human
ccccaggggucccagcc

SEQ ID NO: 2112591 - RNA, 19 nt, Human
ccccaggggucccagccac

SEQ ID NO: 2112592 - RNA, 22 nt, Human
ccccaggggucccagccacccc

SEQ ID NO: 2112593 - RNA, 13 nt, Human
ccccagguggcug

SEQ ID NO: 2112594 - RNA, 20 nt, Human
ccccagguggcugacccagu

SEQ ID NO: 2112595 - RNA, 21 nt, Human
ccccagguggcugacccaguc

SEQ ID NO: 2112596 - RNA, 23 nt, Human
ccccagguggcugacccaguccc

SEQ ID NO: 2112597 - RNA, 22 nt, Human
ccccaggugguuauggagaggg

SEQ ID NO: 2112598 - RNA, 16 nt, Human
ccccagggucuucccu

SEQ ID NO: 2112599 - RNA, 19 nt, Human
ccccagggucuucccuacc

SEQ ID NO: 2112600 - RNA, 23 nt, Human
cccgcucagcccucccugccccu

SEQ ID NO: 2112601 - RNA, 13 nt, Human
cccgcucaggcug

SEQ ID NO: 2112602 - RNA, 20 nt, Human
cccgcucaugggccccucug

SEQ ID NO: 2112603 - RNA, 20 nt, Human
cccgcuuucuugcugguugu

SEQ ID NO: 2112604 - RNA, 14 nt, Human
cccggaacaagccu

SEQ ID NO: 2112605 - RNA, 14 nt, Human
cccgcuuguccagc

SEQ ID NO: 2112606 - RNA, 15 nt, Human
cccgcuuguccagcg

SEQ ID NO: 2112607 - RNA, 18 nt, Human
cccgcuuguccagcgccu

SEQ ID NO: 2112608 - RNA, 15 nt, Human
cccgcucuuuuccua

SEQ ID NO: 2112609 - RNA, 19 nt, Human
cccgcucagcccucccugc

SEQ ID NO: 2112610 - RNA, 15 nt, Human
cccgcgccuccuucc

SEQ ID NO: 2112611 - RNA, 17 nt, Human
cccgccuggcagaacug

SEQ ID NO: 2112612 - RNA, 22 nt, Human
cccgccuggcagaacugagcuc

SEQ ID NO: 2112613 - RNA, 22 nt, Human
cccgcaaugugcccccagacgc

SEQ ID NO: 2112614 - RNA, 13 nt, Human
cccgcacccccac

SEQ ID NO: 2112615 - RNA, 16 nt, Human
cccgcacccccacccu

SEQ ID NO: 2112616 - RNA, 17 nt, Human
cccgcacccccacccuu

SEQ ID NO: 2112617 - RNA, 14 nt, Human
cccgauuguaacuc

SEQ ID NO: 2112618 - RNA, 18 nt, Human
cccgcaaugugcccccag

SEQ ID NO: 2112619 - RNA, 15 nt, Human
cccgaggccuucucu

SEQ ID NO: 2112620 - RNA, 15 nt, Human
cccgaggcccgcaug

SEQ ID NO: 2112621 - RNA, 12 nt, Human
cccgaggcccgc

SEQ ID NO: 2112622 - RNA, 20 nt, Human
cccgaggccuucucugaagg

SEQ ID NO: 2112623 - RNA, 13 nt, Human
cccgaggcccgca

SEQ ID NO: 2112624 - RNA, 23 nt, Human
ccccuggcuuuucacugcuggcu

SEQ ID NO: 2112625 - RNA, 22 nt, Human
ccccuggcuuuucacugcuggc

SEQ ID NO: 2112626 - RNA, 11 nt, Human
ccccugggcuc

SEQ ID NO: 2112627 - RNA, 13 nt, Human
ccccugggcucug

SEQ ID NO: 2112628 - RNA, 15 nt, Human
ccccugggcucugcc

SEQ ID NO: 2112629 - RNA, 21 nt, Human
ccccugggcucugccccagcu

SEQ ID NO: 2112630 - RNA, 23 nt, Human
ccccugggcucugccccagcucu

SEQ ID NO: 2112631 - RNA, 14 nt, Human
ccccuguacuccag

SEQ ID NO: 2112632 - RNA, 13 nt, Human
ccccuucccugca

SEQ ID NO: 2112633 - RNA, 18 nt, Human
ccccuucccugcaaacau

SEQ ID NO: 2112634 - RNA, 14 nt, Human
ccccuucccugcaa

SEQ ID NO: 2112635 - RNA, 12 nt, Human
ccccuucccccu

SEQ ID NO: 2112636 - RNA, 13 nt, Human
ccccuucagugcc

SEQ ID NO: 2112637 - RNA, 14 nt, Human
ccccuucagugccc

SEQ ID NO: 2112638 - RNA, 23 nt, Human
ccccuuccccacugccugcccac

SEQ ID NO: 2112639 - RNA, 18 nt, Human
ccccuucacaccauaacu

SEQ ID NO: 2112640 - RNA, 17 nt, Human
ccccuucacuucugacc

SEQ ID NO: 2112641 - RNA, 19 nt, Human
ccccuucacuucugaccac

SEQ ID NO: 2112642 - RNA, 22 nt, Human
ccccuucacuucugaccacacu

SEQ ID NO: 2112643 - RNA, 23 nt, Human
ccccuucacuucugaccacacuu

SEQ ID NO: 2112644 - RNA, 20 nt, Human
ccccuuagccaguuguauau

SEQ ID NO: 2112645 - RNA, 16 nt, Human
cccuccacagccgcag

SEQ ID NO: 2112646 - RNA, 15 nt, Human
cccuccaucccgaca

SEQ ID NO: 2112647 - RNA, 17 nt, Human
cccuccaugugggcuag

SEQ ID NO: 2112648 - RNA, 13 nt, Human
cccucccccugcc

SEQ ID NO: 2112649 - RNA, 14 nt, Human
cccucccccugccc

SEQ ID NO: 2112650 - RNA, 21 nt, Human
cccuccccuaaugccugcgga

SEQ ID NO: 2112651 - RNA, 14 nt, Human
cccucccuucaacc

SEQ ID NO: 2112652 - RNA, 13 nt, Human
cccucccuguccu

SEQ ID NO: 2112653 - RNA, 13 nt, Human
cccucccuccucu

SEQ ID NO: 2112654 - RNA, 11 nt, Human
cccucccuguc

SEQ ID NO: 2112655 - RNA, 14 nt, Human
cccuccgccauucu

SEQ ID NO: 2112656 - RNA, 16 nt, Human
cccuccgccaggcgag

SEQ ID NO: 2112657 - RNA, 13 nt, Human
cccucccucuuuc

SEQ ID NO: 2112658 - RNA, 19 nt, Human
cccucaguuucccuaucuc

SEQ ID NO: 2112659 - RNA, 20 nt, Human
cccucagucuggcccuuccu

SEQ ID NO: 2112660 - RNA, 22 nt, Human
cccucauuccaccuucccaugc

SEQ ID NO: 2112661 - RNA, 19 nt, Human
cccucauuacggcuccucu

SEQ ID NO: 2112662 - RNA, 15 nt, Human
cccucauucaggaaa

SEQ ID NO: 2112663 - RNA, 16 nt, Human
cccucauucaggaaaa

SEQ ID NO: 2112664 - RNA, 17 nt, Human
cccucauucaggaaaac

SEQ ID NO: 2112665 - RNA, 13 nt, Human
cccucaucugucu

SEQ ID NO: 2112666 - RNA, 14 nt, Human
cccucaucugucug

SEQ ID NO: 2112667 - RNA, 14 nt, Human
cccucaugccaacc

SEQ ID NO: 2112668 - RNA, 18 nt, Human
cccggaggggccuggcag

SEQ ID NO: 2112669 - RNA, 17 nt, Human
cccggaggggccuggca

SEQ ID NO: 2112670 - RNA, 19 nt, Human
cccggagauuggacggccu

SEQ ID NO: 2112671 - RNA, 21 nt, Human
cccggagcuaacacuggcccc

SEQ ID NO: 2112672 - RNA, 16 nt, Human
cccggauucugggagg

SEQ ID NO: 2112673 - RNA, 20 nt, Human
cccggagcuaacacuggccc

SEQ ID NO: 2112674 - RNA, 14 nt, Human
cccggauucuggga

SEQ ID NO: 2112675 - RNA, 16 nt, Human
cccggcaggguccuag

SEQ ID NO: 2112676 - RNA, 13 nt, Human
cccgucuucagcc

SEQ ID NO: 2112677 - RNA, 14 nt, Human
cccgucuucagccu

SEQ ID NO: 2112678 - RNA, 15 nt, Human
cccgucuucagccua

SEQ ID NO: 2112679 - RNA, 16 nt, Human
cccgucuucagccuag

SEQ ID NO: 2112680 - RNA, 17 nt, Human
cccgucuucagccuagc

SEQ ID NO: 2112681 - RNA, 18 nt, Human
cccgucuucagccuagcc

SEQ ID NO: 2112682 - RNA, 16 nt, Human
cccgugcaaaacaugc

SEQ ID NO: 2112683 - RNA, 18 nt, Human
cccgugcaaaacaugcua

SEQ ID NO: 2112684 - RNA, 13 nt, Human
cccgugcagacug

SEQ ID NO: 2112685 - RNA, 21 nt, Human
cccgugaggaugucacucaga

SEQ ID NO: 2112686 - RNA, 15 nt, Human
cccgugcagacugga

SEQ ID NO: 2112687 - RNA, 18 nt, Human
cccgugcagacuggaggg

SEQ ID NO: 2112688 - RNA, 19 nt, Human
cccguuuuaugauuuacuc

SEQ ID NO: 2112689 - RNA, 15 nt, Human
cccuaaaucugagga

SEQ ID NO: 2112690 - RNA, 21 nt, Human
cccuaaggucauuaccacagg

SEQ ID NO: 2112691 - RNA, 17 nt, Human
cccuaaccucuuuucug

SEQ ID NO: 2112692 - RNA, 17 nt, Human
cccuaagccaagggccu

SEQ ID NO: 2112693 - RNA, 19 nt, Human
cccuagaaucagccuaggg

SEQ ID NO: 2112694 - RNA, 19 nt, Human
cccuagaggguuccuguag

SEQ ID NO: 2112695 - RNA, 14 nt, Human
cccuccacaucccu

SEQ ID NO: 2112696 - RNA, 20 nt, Human
cuaagcacgggccauaugaa

SEQ ID NO: 2112697 - RNA, 23 nt, Human
cuaagcacgggccauaugaauaa

SEQ ID NO: 2112698 - RNA, 11 nt, Human
cuaagccaagg

SEQ ID NO: 2112699 - RNA, 14 nt, Human
cuaagccaagggcc

SEQ ID NO: 2112700 - RNA, 18 nt, Human
cuaagccaagggccucuu

SEQ ID NO: 2112701 - RNA, 17 nt, Human
cuaaccacgcuggaccu

SEQ ID NO: 2112702 - RNA, 12 nt, Human
cuaacauuauau

SEQ ID NO: 2112703 - RNA, 15 nt, Human
cuaacauuauauugc

SEQ ID NO: 2112704 - RNA, 16 nt, Human
cuaacauuauauugca

SEQ ID NO: 2112705 - RNA, 17 nt, Human
cuaacauuauauugcaa

SEQ ID NO: 2112706 - RNA, 18 nt, Human
cuaacauuauauugcaau

SEQ ID NO: 2112707 - RNA, 20 nt, Human
cuaacauuauauugcaauga

SEQ ID NO: 2112708 - RNA, 22 nt, Human
cuaacauuauauugcaaugaag

SEQ ID NO: 2112709 - RNA, 20 nt, Human
cuaaccacgucugucuucac

SEQ ID NO: 2112710 - RNA, 21 nt, Human
cuaaccacgucugucuucaca

SEQ ID NO: 2112711 - RNA, 16 nt, Human
cuaacacuggccccua

SEQ ID NO: 2112712 - RNA, 18 nt, Human
cuaaccagagcaagcuuu

SEQ ID NO: 2112713 - RNA, 21 nt, Human
cuaaccagggaagcugucccu

SEQ ID NO: 2112714 - RNA, 19 nt, Human
cuaagcuauucaguaauaa

SEQ ID NO: 2112715 - RNA, 21 nt, Human
cuaagcuauucaguaauaacu

SEQ ID NO: 2112716 - RNA, 15 nt, Human
cuaagcuaacccccu

SEQ ID NO: 2112717 - RNA, 23 nt, Human
cuaagcgcuagaggaagcagcca

SEQ ID NO: 2112718 - RNA, 17 nt, Human
cuaagccuuuccauaag

SEQ ID NO: 2112719 - RNA, 20 nt, Human
cuaaggcacccacaaauaaa

SEQ ID NO: 2112720 - RNA, 20 nt, Human
cuaagauuuauuuuguuaaa

SEQ ID NO: 2112721 - RNA, 15 nt, Human
cuaaggugugcucug

SEQ ID NO: 2112722 - RNA, 19 nt, Human
cuaaggucauuaccacagg

SEQ ID NO: 2112723 - RNA, 18 nt, Human
cuaaggguguaaguaauu

SEQ ID NO: 2112724 - RNA, 16 nt, Human
cuaagccuuuccauaa

SEQ ID NO: 2112725 - RNA, 15 nt, Human
cuacaagagcagccu

SEQ ID NO: 2112726 - RNA, 17 nt, Human
cuacaagagcagccugu

SEQ ID NO: 2112727 - RNA, 18 nt, Human
cuacaagagcagccugug

SEQ ID NO: 2112728 - RNA, 19 nt, Human
cuacaagagcagccugugg

SEQ ID NO: 2112729 - RNA, 20 nt, Human
cuacaagagcagccuguggc

SEQ ID NO: 2112730 - RNA, 18 nt, Human
cuacaaguauucugccuu

SEQ ID NO: 2112731 - RNA, 12 nt, Human
cuacaauauaua

SEQ ID NO: 2112732 - RNA, 23 nt, Human
cuacaagagcagccuguggcauc

SEQ ID NO: 2112733 - RNA, 21 nt, Human
cuacaagagcagccuguggca

SEQ ID NO: 2112734 - RNA, 22 nt, Human
cuacaagagcagccuguggcau

SEQ ID NO: 2112735 - RNA, 17 nt, Human
cuaauguuuaugagcca

SEQ ID NO: 2112736 - RNA, 18 nt, Human
cuaauguuuaugagccag

SEQ ID NO: 2112737 - RNA, 20 nt, Human
cuaauguuuaugagccagac

SEQ ID NO: 2112738 - RNA, 14 nt, Human
cuaauuaacauaua

SEQ ID NO: 2112739 - RNA, 15 nt, Human
cuaauuaacauauaa

SEQ ID NO: 2112740 - RNA, 17 nt, Human
cuaauuaacauauaaua

SEQ ID NO: 2112741 - RNA, 13 nt, Human
cuaauuaauaaag

SEQ ID NO: 2112742 - RNA, 19 nt, Human
cuaaugugccuaguucuuu

SEQ ID NO: 2112743 - RNA, 22 nt, Human
cuaaucuucagggcacugcugc

SEQ ID NO: 2112744 - RNA, 15 nt, Human
cuaaucuucagggca

SEQ ID NO: 2112745 - RNA, 16 nt, Human
cuaaugagaagucaac

SEQ ID NO: 2112746 - RNA, 18 nt, Human
cuaaugaagggaaaggau

SEQ ID NO: 2112747 - RNA, 23 nt, Human
cuaaugaagggaaaggauauuuu

SEQ ID NO: 2112748 - RNA, 22 nt, Human
cuaaugaaugcauaaaauguua

SEQ ID NO: 2112749 - RNA, 19 nt, Human
cuaaugaaugcauaaaaug

SEQ ID NO: 2112750 - RNA, 16 nt, Human
cuaauguacugcauau

SEQ ID NO: 2112751 - RNA, 12 nt, Human
cuaaugauguuu

SEQ ID NO: 2112752 - RNA, 13 nt, Human
cuaaugauguuuu

SEQ ID NO: 2112753 - RNA, 14 nt, Human
cuaauguacugcau

SEQ ID NO: 2112754 - RNA, 19 nt, Human
cuaaugaguuucuuuuaua

SEQ ID NO: 2112755 - RNA, 22 nt, Human
cuaaugaguuucuuuuauaaaa

SEQ ID NO: 2112756 - RNA, 16 nt, Human
cuaaggugugcucuga

SEQ ID NO: 2112757 - RNA, 14 nt, Human
cuaauauuuuaugu

SEQ ID NO: 2112758 - RNA, 16 nt, Human
cuaauccucuuuuucu

SEQ ID NO: 2112759 - RNA, 21 nt, Human
cuaaucccugggcauugcuuu

SEQ ID NO: 2112760 - RNA, 22 nt, Human
cuaaucccugggcauugcuuuc

SEQ ID NO: 2112761 - RNA, 23 nt, Human
cuaaucccugggcauugcuuucc

SEQ ID NO: 2112762 - RNA, 20 nt, Human
cuaaucugcuaugcuugaau

SEQ ID NO: 2112763 - RNA, 22 nt, Human
cuaaucugcuaugcuugaaugc

SEQ ID NO: 2112764 - RNA, 21 nt, Human
cuaaucuauuggguucauuau

SEQ ID NO: 2112765 - RNA, 19 nt, Human
cuaaucuauuggguucauu

SEQ ID NO: 2112766 - RNA, 20 nt, Human
cuaaucuauuggguucauua

SEQ ID NO: 2112767 - RNA, 17 nt, Human
cuaaucuaacaauggaa

SEQ ID NO: 2112768 - RNA, 18 nt, Human
cuaaucuaacaauggaag

SEQ ID NO: 2112769 - RNA, 14 nt, Human
cuaaucuauugggu

SEQ ID NO: 2112770 - RNA, 17 nt, Human
cuaaucuauuggguuca

SEQ ID NO: 2112771 - RNA, 18 nt, Human
cuaaucuauuggguucau

SEQ ID NO: 2112772 - RNA, 22 nt, Human
cuaaucuauuggguucauuauu

SEQ ID NO: 2112773 - RNA, 17 nt, Human
cuaaucagcauucucac

SEQ ID NO: 2112774 - RNA, 19 nt, Human
cuaaucagcauucucacuc

SEQ ID NO: 2112775 - RNA, 18 nt, Human
cuaaucccgauucacccu

SEQ ID NO: 2112776 - RNA, 19 nt, Human
cuaaucccugggcauugcu

SEQ ID NO: 2112777 - RNA, 20 nt, Human
cuaaucccugggcauugcuu

SEQ ID NO: 2112778 - RNA, 15 nt, Human
cuacagaggccaugg

SEQ ID NO: 2112779 - RNA, 22 nt, Human
cuacagaauacuagccagagcu

SEQ ID NO: 2112780 - RNA, 14 nt, Human
cuacagacauuaaa

SEQ ID NO: 2112781 - RNA, 17 nt, Human
cuacagacauuaaauaa

SEQ ID NO: 2112782 - RNA, 19 nt, Human
cuacagacauuaaauaauc

SEQ ID NO: 2112783 - RNA, 16 nt, Human
cuacagacuucuccag

SEQ ID NO: 2112784 - RNA, 21 nt, Human
cuacagacuucuccagaccca

SEQ ID NO: 2112785 - RNA, 12 nt, Human
cuacacucuccu

SEQ ID NO: 2112786 - RNA, 14 nt, Human
cuacacucuccugg

SEQ ID NO: 2112787 - RNA, 15 nt, Human
cuacacucuccuggg

SEQ ID NO: 2112788 - RNA, 16 nt, Human
cuacacucuccugggc

SEQ ID NO: 2112789 - RNA, 17 nt, Human
cuacacucuccugggcc

SEQ ID NO: 2112790 - RNA, 19 nt, Human
cuacacucuccugggcccc

SEQ ID NO: 2112791 - RNA, 21 nt, Human
cuacacucuccugggccccuc

SEQ ID NO: 2112792 - RNA, 23 nt, Human
cuacacucuccugggccccuccc

SEQ ID NO: 2112793 - RNA, 16 nt, Human
cuacaauuuaaagcaa

SEQ ID NO: 2112794 - RNA, 17 nt, Human
cuacacuccagccugag

SEQ ID NO: 2112795 - RNA, 18 nt, Human
cuacacuccagccugagc

SEQ ID NO: 2112796 - RNA, 19 nt, Human
cuacccagcgagcccuggu

SEQ ID NO: 2112797 - RNA, 20 nt, Human
cuacccagcgagcccuggug

SEQ ID NO: 2112798 - RNA, 16 nt, Human
cuacccacuucuaaau

SEQ ID NO: 2112799 - RNA, 22 nt, Human
cuacccacuucuaaauagcaau

SEQ ID NO: 2112800 - RNA, 19 nt, Human
cuacccaggaggcugaggu

SEQ ID NO: 2112801 - RNA, 20 nt, Human
cuacccaggaggcugaggug

SEQ ID NO: 2112802 - RNA, 14 nt, Human
cuaccccuggauga

SEQ ID NO: 2112803 - RNA, 22 nt, Human
cuacccacccuccuuucaccac

SEQ ID NO: 2112804 - RNA, 14 nt, Human
cuacccacuucuaa

SEQ ID NO: 2112805 - RNA, 17 nt, Human
cuacccacccuccuuuc

SEQ ID NO: 2112806 - RNA, 15 nt, Human
cuaccagguguucua

SEQ ID NO: 2112807 - RNA, 18 nt, Human
cuagacucccaagcugga

SEQ ID NO: 2112808 - RNA, 18 nt, Human
cuagagccugcuggaucu

SEQ ID NO: 2112809 - RNA, 22 nt, Human
cuagagcuucaagucugugccu

SEQ ID NO: 2112810 - RNA, 23 nt, Human
cuagagcuucaagucugugccug

SEQ ID NO: 2112811 - RNA, 19 nt, Human
cuagaggaaccaaccccca

SEQ ID NO: 2112812 - RNA, 16 nt, Human
cuagaggaagcagcca

SEQ ID NO: 2112813 - RNA, 14 nt, Human
cuagaggcagggag

SEQ ID NO: 2112814 - RNA, 15 nt, Human
cuagaggcagggagg

SEQ ID NO: 2112815 - RNA, 18 nt, Human
cuagaggcagggagggga

SEQ ID NO: 2112816 - RNA, 17 nt, Human
cuagaggccagccccac

SEQ ID NO: 2112817 - RNA, 14 nt, Human
cuacuuuguccuuu

SEQ ID NO: 2112818 - RNA, 20 nt, Human
cuacuuuguccuuuuuguua

SEQ ID NO: 2112819 - RNA, 22 nt, Human
cuacuuuguccuuuuuguuauu

SEQ ID NO: 2112820 - RNA, 16 nt, Human
cuagaccuccagcugu

SEQ ID NO: 2112821 - RNA, 17 nt, Human
cuagaccuccagcuguu

SEQ ID NO: 2112822 - RNA, 20 nt, Human
cuagacguucauuugugugc

SEQ ID NO: 2112823 - RNA, 17 nt, Human
cuagagugaacuugggc

SEQ ID NO: 2112824 - RNA, 21 nt, Human
cuagagugaacuugggccacu

SEQ ID NO: 2112825 - RNA, 15 nt, Human
cuagaguccucacuc

SEQ ID NO: 2112826 - RNA, 19 nt, Human
cuagaguccucacucccag

SEQ ID NO: 2112827 - RNA, 18 nt, Human
cuagaggccagccccacc

SEQ ID NO: 2112828 - RNA, 19 nt, Human
cuagaggccagccccaccc

SEQ ID NO: 2112829 - RNA, 20 nt, Human
cuagaggccagccccaccca

SEQ ID NO: 2112830 - RNA, 19 nt, Human
cuagaggcagggaggggac

SEQ ID NO: 2112831 - RNA, 21 nt, Human
cuagaggccagccccacccag

SEQ ID NO: 2112832 - RNA, 22 nt, Human
cuagagggauacacugaaguua

SEQ ID NO: 2112833 - RNA, 19 nt, Human
cuagaggguuccuguagac

SEQ ID NO: 2112834 - RNA, 15 nt, Human
cuagaggguuccugu

SEQ ID NO: 2112835 - RNA, 16 nt, Human
cuagaggguuccugua

SEQ ID NO: 2112836 - RNA, 13 nt, Human
cuagauuuaugaa

SEQ ID NO: 2112837 - RNA, 15 nt, Human
cuagcaaaagaagua

SEQ ID NO: 2112838 - RNA, 19 nt, Human
cuagcaaaagaaguaacaa

SEQ ID NO: 2112839 - RNA, 20 nt, Human
cuagauucuacauauucuuu

SEQ ID NO: 2112840 - RNA, 17 nt, Human
cuagcacuuugggaggc

SEQ ID NO: 2112841 - RNA, 15 nt, Human
cuagcacucacaugc

SEQ ID NO: 2112842 - RNA, 16 nt, Human
cuagcacucacaugcu

SEQ ID NO: 2112843 - RNA, 17 nt, Human
cuagcacucacaugcug

SEQ ID NO: 2112844 - RNA, 21 nt, Human
cuagcacucacaugcuggaca

SEQ ID NO: 2112845 - RNA, 21 nt, Human
cuagauuacccccucauuguu

SEQ ID NO: 2112846 - RNA, 13 nt, Human
cuagaugucuuua

SEQ ID NO: 2112847 - RNA, 21 nt, Human
cuagaugagaauucagcugcc

SEQ ID NO: 2112848 - RNA, 22 nt, Human
cuagaugagaauucagcugccc

SEQ ID NO: 2112849 - RNA, 23 nt, Human
cuagaugagcccagcccuguucu

SEQ ID NO: 2112850 - RNA, 18 nt, Human
cuagaucaugaagaaccu

SEQ ID NO: 2112851 - RNA, 13 nt, Human
cuagauccacaca

SEQ ID NO: 2112852 - RNA, 17 nt, Human
cuagauccacacacaga

SEQ ID NO: 2112853 - RNA, 18 nt, Human
cuagauccacacacagag

SEQ ID NO: 2112854 - RNA, 19 nt, Human
cuagauccacacacagagg

SEQ ID NO: 2112855 - RNA, 21 nt, Human
cuagauccacacacagaggaa

SEQ ID NO: 2112856 - RNA, 21 nt, Human
cuacucugugucagguggggc

SEQ ID NO: 2112857 - RNA, 16 nt, Human
cuacucugugucaggu

SEQ ID NO: 2112858 - RNA, 15 nt, Human
cuacucuguuccuuc

SEQ ID NO: 2112859 - RNA, 16 nt, Human
cuacucuguuccuuca

SEQ ID NO: 2112860 - RNA, 19 nt, Human
cuacucuguuccuucacau

SEQ ID NO: 2112861 - RNA, 22 nt, Human
cuacucuguuccuucacauccu

SEQ ID NO: 2112862 - RNA, 14 nt, Human
cuacuguggaaaaa

SEQ ID NO: 2112863 - RNA, 14 nt, Human
cuacugaggugcua

SEQ ID NO: 2112864 - RNA, 17 nt, Human
cuacugacuuucucagc

SEQ ID NO: 2112865 - RNA, 20 nt, Human
cuacuuccugugacuucagc

SEQ ID NO: 2112866 - RNA, 15 nt, Human
cuacuuccugcacug

SEQ ID NO: 2112867 - RNA, 14 nt, Human
cuacuuccugccug

SEQ ID NO: 2112868 - RNA, 15 nt, Human
cuacuuccugccugg

SEQ ID NO: 2112869 - RNA, 20 nt, Human
cuacuuccugccuggucucc

SEQ ID NO: 2112870 - RNA, 20 nt, Human
cuacuguguuccuggcaaua

SEQ ID NO: 2112871 - RNA, 15 nt, Human
cuacuguguuccugg

SEQ ID NO: 2112872 - RNA, 19 nt, Human
cuacuguguuccuggcaau

SEQ ID NO: 2112873 - RNA, 12 nt, Human
cuacuguguucc

SEQ ID NO: 2112874 - RNA, 13 nt, Human
cuacuguguuccu

SEQ ID NO: 2112875 - RNA, 14 nt, Human
cuacuguguuccug

SEQ ID NO: 2112876 - RNA, 21 nt, Human
cuacuguggaaaaauauuuaa

SEQ ID NO: 2112877 - RNA, 22 nt, Human
cuacuguggaaaaauauuuaag

SEQ ID NO: 2112878 - RNA, 15 nt, Human
cuacuguggaaaaau

SEQ ID NO: 2112879 - RNA, 17 nt, Human
cuacuguggaaaaauau

SEQ ID NO: 2112880 - RNA, 18 nt, Human
cuacuguggaaaaauauu

SEQ ID NO: 2112881 - RNA, 20 nt, Human
cuacuguggaaaaauauuua

SEQ ID NO: 2112882 - RNA, 12 nt, Human
cuacuugggagg

SEQ ID NO: 2112883 - RNA, 15 nt, Human
cuacuugagaggcug

SEQ ID NO: 2112884 - RNA, 15 nt, Human
cuaggcaggaccugu

SEQ ID NO: 2112885 - RNA, 16 nt, Human
cuaggcaggaccugug

SEQ ID NO: 2112886 - RNA, 14 nt, Human
cuaggcaucccagg

SEQ ID NO: 2112887 - RNA, 21 nt, Human
cuaggcauuugcugaauacag

SEQ ID NO: 2112888 - RNA, 19 nt, Human
cuaggcaucccaggggacc

SEQ ID NO: 2112889 - RNA, 18 nt, Human
cuaggcaguuagagaugc

SEQ ID NO: 2112890 - RNA, 20 nt, Human
cuaggcaguuagagaugccu

SEQ ID NO: 2112891 - RNA, 22 nt, Human
cuaggcaguuagagaugccucc

SEQ ID NO: 2112892 - RNA, 23 nt, Human
cuaggcaguuagagaugccuccc

SEQ ID NO: 2112893 - RNA, 15 nt, Human
cuaggcaucccaggg

SEQ ID NO: 2112894 - RNA, 18 nt, Human
cuaggcaucccaggggac

SEQ ID NO: 2112895 - RNA, 19 nt, Human
cuaggccacuccuccaaag

SEQ ID NO: 2112896 - RNA, 16 nt, Human
cuaggccacuccucca

SEQ ID NO: 2112897 - RNA, 17 nt, Human
cuaggccacuccuccaa

SEQ ID NO: 2112898 - RNA, 19 nt, Human
cuaggccacaccaucuccu

SEQ ID NO: 2112899 - RNA, 14 nt, Human
cuaggccacuccuc

SEQ ID NO: 2112900 - RNA, 15 nt, Human
cuaggccacuccucc

SEQ ID NO: 2112901 - RNA, 20 nt, Human
cuagucccuuccccucccug

SEQ ID NO: 2112902 - RNA, 21 nt, Human
cuagucccuuccccucccugg

SEQ ID NO: 2112903 - RNA, 12 nt, Human
cuaguccuuguu

SEQ ID NO: 2112904 - RNA, 15 nt, Human
cuaguccuuuacuaa

SEQ ID NO: 2112905 - RNA, 23 nt, Human
cuagucccuuccccucccuggcu

SEQ ID NO: 2112906 - RNA, 22 nt, Human
cuagucccuuccccucccuggc

SEQ ID NO: 2112907 - RNA, 14 nt, Human
cuagugcagcugau

SEQ ID NO: 2112908 - RNA, 15 nt, Human
cuagugcagcugauu

SEQ ID NO: 2112909 - RNA, 19 nt, Human
cuagugcagcugauuuuaa

SEQ ID NO: 2112910 - RNA, 13 nt, Human
cuagucugugugc

SEQ ID NO: 2112911 - RNA, 14 nt, Human
cuagucugugugcu

SEQ ID NO: 2112912 - RNA, 18 nt, Human
cuagucugugugcugugg

SEQ ID NO: 2112913 - RNA, 20 nt, Human
cuagucugugugggacugua

SEQ ID NO: 2112914 - RNA, 23 nt, Human
cuagucugugugggacuguacac

SEQ ID NO: 2112915 - RNA, 23 nt, Human
cuagugcccuccacagccgcagc

SEQ ID NO: 2112916 - RNA, 12 nt, Human
cuagugcugaag

SEQ ID NO: 2112917 - RNA, 13 nt, Human
cuagugcugaagc

SEQ ID NO: 2112918 - RNA, 14 nt, Human
cuagugcugaagcu

SEQ ID NO: 2112919 - RNA, 15 nt, Human
cuagugcugaagcuu

SEQ ID NO: 2112920 - RNA, 20 nt, Human
cuagugcagcugauuuuaac

SEQ ID NO: 2112921 - RNA, 21 nt, Human
cuagugcagcugauuuuaaca

SEQ ID NO: 2112922 - RNA, 22 nt, Human
cuagugcagcugauuuuaacaa

SEQ ID NO: 2112923 - RNA, 23 nt, Human
cuagugcagcugauuuuaacaau

SEQ ID NO: 2112924 - RNA, 18 nt, Human
cuagugcccuccacagcc

SEQ ID NO: 2112925 - RNA, 19 nt, Human
cuagugcccuccacagccg

SEQ ID NO: 2112926 - RNA, 12 nt, Human
cuagugguggcu

SEQ ID NO: 2112927 - RNA, 19 nt, Human
cuagugguggcucugagaa

SEQ ID NO: 2112928 - RNA, 22 nt, Human
cuagugcugaagcuuauuaaug

SEQ ID NO: 2112929 - RNA, 16 nt, Human
cuagugcugaagcuua

SEQ ID NO: 2112930 - RNA, 17 nt, Human
cuagugcugaagcuuau

SEQ ID NO: 2112931 - RNA, 20 nt, Human
cuagugcugaagcuuauuaa

SEQ ID NO: 2112932 - RNA, 21 nt, Human
cuagugcugaagcuuauuaau

SEQ ID NO: 2112933 - RNA, 14 nt, Human
cuaguguugcuugg

SEQ ID NO: 2112934 - RNA, 20 nt, Human
cuaggauguugcucagaagu

SEQ ID NO: 2112935 - RNA, 13 nt, Human
cuaggagcacugu

SEQ ID NO: 2112936 - RNA, 15 nt, Human
cuaggagcugggagg

SEQ ID NO: 2112937 - RNA, 16 nt, Human
cuaggagcugggagga

SEQ ID NO: 2112938 - RNA, 19 nt, Human
cuaggagcugggaggaaaa

SEQ ID NO: 2112939 - RNA, 15 nt, Human
cuaggacucugaggc

SEQ ID NO: 2112940 - RNA, 16 nt, Human
cuaggacucugaggcu

SEQ ID NO: 2112941 - RNA, 12 nt, Human
cuaggacucuga

SEQ ID NO: 2112942 - RNA, 14 nt, Human
cuaggacucugagg

SEQ ID NO: 2112943 - RNA, 22 nt, Human
cuaggacucugaggcucuuucu

SEQ ID NO: 2112944 - RNA, 16 nt, Human
cuaggagaccaaggcg

SEQ ID NO: 2112945 - RNA, 20 nt, Human
cuaggagaccaaggcgggag

SEQ ID NO: 2112946 - RNA, 15 nt, Human
cuaggaauucccagc

SEQ ID NO: 2112947 - RNA, 22 nt, Human
cuaggaccccuccaugugggcu

SEQ ID NO: 2112948 - RNA, 16 nt, Human
cuaggacauguucccu

SEQ ID NO: 2112949 - RNA, 22 nt, Human
cuaggacauguucccuucuccu

SEQ ID NO: 2112950 - RNA, 16 nt, Human
cuagcacuuggagcca

SEQ ID NO: 2112951 - RNA, 17 nt, Human
cuagcagaaaucuagaa

SEQ ID NO: 2112952 - RNA, 19 nt, Human
cuagcagagcaggggcagg

SEQ ID NO: 2112953 - RNA, 23 nt, Human
cuagcagagcaggggcaggguga

SEQ ID NO: 2112954 - RNA, 16 nt, Human
cuauauaguuuauuga

SEQ ID NO: 2112955 - RNA, 22 nt, Human
cuauauaguuuauugacaauaa

SEQ ID NO: 2112956 - RNA, 12 nt, Human
cuauauccaugu

SEQ ID NO: 2112957 - RNA, 13 nt, Human
cuauauccaugua

SEQ ID NO: 2112958 - RNA, 14 nt, Human
cuauauccauguac

SEQ ID NO: 2112959 - RNA, 15 nt, Human
cuauauccauguacu

SEQ ID NO: 2112960 - RNA, 16 nt, Human
cuauauccauguacug

SEQ ID NO: 2112961 - RNA, 20 nt, Human
cuaguucauccaauccucac

SEQ ID NO: 2112962 - RNA, 21 nt, Human
cuaguucauccaauccucacu

SEQ ID NO: 2112963 - RNA, 22 nt, Human
cuaguucauccaauccucacug

SEQ ID NO: 2112964 - RNA, 24 nt, Human
cuaguucauccaauccucacuggg

SEQ ID NO: 2112965 - RNA, 20 nt, Human
cuaguucagacacuuuggaa

SEQ ID NO: 2112966 - RNA, 12 nt, Human
cuaguucaucca

SEQ ID NO: 2112967 - RNA, 18 nt, Human
cuaguucauccaauccuc

SEQ ID NO: 2112968 - RNA, 19 nt, Human
cuaguucauccaauccuca

SEQ ID NO: 2112969 - RNA, 13 nt, Human
cuauaucuguuuu

SEQ ID NO: 2112970 - RNA, 14 nt, Human
cuauaucuguuuua

SEQ ID NO: 2112971 - RNA, 15 nt, Human
cuauaucuguuuuac

SEQ ID NO: 2112972 - RNA, 18 nt, Human
cuauaucuguuuuacugc

SEQ ID NO: 2112973 - RNA, 22 nt, Human
cuauaucuguuuuacugcuuuu

SEQ ID NO: 2112974 - RNA, 23 nt, Human
cuauaucuguuuuacugcuuuua

SEQ ID NO: 2112975 - RNA, 20 nt, Human
cuauauccauguacuguagu

SEQ ID NO: 2112976 - RNA, 18 nt, Human
cuauauccauguacugua

SEQ ID NO: 2112977 - RNA, 19 nt, Human
cuauauccauguacuguag

SEQ ID NO: 2112978 - RNA, 21 nt, Human
cuauauccauguacuguaguu

SEQ ID NO: 2112979 - RNA, 23 nt, Human
cuauauuguuuucaguguacaug

SEQ ID NO: 2112980 - RNA, 22 nt, Human
cuauauuguuuucaguguacau

SEQ ID NO: 2112981 - RNA, 15 nt, Human
cuaucaaaauaaauu

SEQ ID NO: 2112982 - RNA, 13 nt, Human
cuaucaaacugaa

SEQ ID NO: 2112983 - RNA, 16 nt, Human
cuaucaaacugaagcc

SEQ ID NO: 2112984 - RNA, 20 nt, Human
cuaucaaacugaagccagaa

SEQ ID NO: 2112985 - RNA, 21 nt, Human
cuaucaaacugaagccagaaa

SEQ ID NO: 2112986 - RNA, 21 nt, Human
cuaucuuauauaguuuacuau

SEQ ID NO: 2112987 - RNA, 20 nt, Human
cucacauagcuuacaagcca

SEQ ID NO: 2112988 - RNA, 20 nt, Human
cucacaucuuucacacuucc

SEQ ID NO: 2112989 - RNA, 21 nt, Human
cucacaguuccucgcccuggg

SEQ ID NO: 2112990 - RNA, 22 nt, Human
cucacaguuccucgcccugggu

SEQ ID NO: 2112991 - RNA, 23 nt, Human
cucacaguuccucgcccuggguc

SEQ ID NO: 2112992 - RNA, 13 nt, Human
cucacaugcugga

SEQ ID NO: 2112993 - RNA, 15 nt, Human
cucacaugcuggaca

SEQ ID NO: 2112994 - RNA, 21 nt, Human
cucacaugcuggacaggucug

SEQ ID NO: 2112995 - RNA, 22 nt, Human
cucacaugcuggacaggucugg

SEQ ID NO: 2112996 - RNA, 23 nt, Human
cucacaugcuggacaggucuggg

SEQ ID NO: 2112997 - RNA, 19 nt, Human
cucaccagccccagugccc

SEQ ID NO: 2112998 - RNA, 21 nt, Human
cucaccagccccagugcccac

SEQ ID NO: 2112999 - RNA, 20 nt, Human
cucaccagccccagugccca

SEQ ID NO: 2113000 - RNA, 13 nt, Human
cucacaguuccuc

SEQ ID NO: 2113001 - RNA, 16 nt, Human
cucacaguuccucgcc

SEQ ID NO: 2113002 - RNA, 17 nt, Human
cucacaguuccucgccc

SEQ ID NO: 2113003 - RNA, 18 nt, Human
cucacaguuccucgcccu

SEQ ID NO: 2113004 - RNA, 19 nt, Human
cucacaguuccucgcccug

SEQ ID NO: 2113005 - RNA, 20 nt, Human
cucacaguuccucgcccugg

SEQ ID NO: 2113006 - RNA, 22 nt, Human
cucacagugggagccagggcug

SEQ ID NO: 2113007 - RNA, 19 nt, Human
cucacagugggagccaggg

SEQ ID NO: 2113008 - RNA, 17 nt, Human
cucacaguguugcccag

SEQ ID NO: 2113009 - RNA, 21 nt, Human
cucacaguguugcccaggcug

SEQ ID NO: 2113010 - RNA, 19 nt, Human
cucacagucucuuuaaucu

SEQ ID NO: 2113011 - RNA, 18 nt, Human
cucacagugggagccagg

SEQ ID NO: 2113012 - RNA, 20 nt, Human
cucacagucucuuuaaucuu

SEQ ID NO: 2113013 - RNA, 20 nt, Human
cucaagugauucuccugccu

SEQ ID NO: 2113014 - RNA, 19 nt, Human
cucaagugauucuccugcc

SEQ ID NO: 2113015 - RNA, 18 nt, Human
cucaagugauucuccugc

SEQ ID NO: 2113016 - RNA, 20 nt, Human
cucaaggacuugaaagcauc

SEQ ID NO: 2113017 - RNA, 17 nt, Human
cucacuauguugcccag

SEQ ID NO: 2113018 - RNA, 16 nt, Human
cucacuauguugccca

SEQ ID NO: 2113019 - RNA, 18 nt, Human
cucaccccugcccuggga

SEQ ID NO: 2113020 - RNA, 15 nt, Human
cucaccccgucuggg

SEQ ID NO: 2113021 - RNA, 15 nt, Human
cucaccccugcccug

SEQ ID NO: 2113022 - RNA, 16 nt, Human
cucaccccugcccugg

SEQ ID NO: 2113023 - RNA, 17 nt, Human
cucaccccugcccuggg

SEQ ID NO: 2113024 - RNA, 16 nt, Human
cucaccccgucugggg

SEQ ID NO: 2113025 - RNA, 17 nt, Human
cucaagagggcacuggu

SEQ ID NO: 2113026 - RNA, 14 nt, Human
cucaagaggcugag

SEQ ID NO: 2113027 - RNA, 16 nt, Human
cucaagaggcugaggc

SEQ ID NO: 2113028 - RNA, 21 nt, Human
cucaagagggcacugguggcc

SEQ ID NO: 2113029 - RNA, 19 nt, Human
cucaagagggcacuggugg

SEQ ID NO: 2113030 - RNA, 22 nt, Human
cucaagcccugcagucacagcu

SEQ ID NO: 2113031 - RNA, 17 nt, Human
cucaagaggcugaggca

SEQ ID NO: 2113032 - RNA, 16 nt, Human
cucaaggacaaagucu

SEQ ID NO: 2113033 - RNA, 17 nt, Human
cucaaggacaaagucuc

SEQ ID NO: 2113034 - RNA, 18 nt, Human
cucaaggacaaagucucc

SEQ ID NO: 2113035 - RNA, 19 nt, Human
cucaaggacaaagucucca

SEQ ID NO: 2113036 - RNA, 20 nt, Human
cucaaggacaaagucuccag

SEQ ID NO: 2113037 - RNA, 21 nt, Human
cucaaggacaaagucuccagc

SEQ ID NO: 2113038 - RNA, 22 nt, Human
cucaaggacaaagucuccagcc

SEQ ID NO: 2113039 - RNA, 23 nt, Human
cucaaggacaaagucuccagccc

SEQ ID NO: 2113040 - RNA, 10 nt, Human
cucaaggacu

SEQ ID NO: 2113041 - RNA, 15 nt, Human
cucaaggacuugaaa

SEQ ID NO: 2113042 - RNA, 18 nt, Human
cucaaggacuugaaagca

SEQ ID NO: 2113043 - RNA, 19 nt, Human
cucaaggacuugaaagcau

SEQ ID NO: 2113044 - RNA, 21 nt, Human
cucaaccugugaugaggggag

SEQ ID NO: 2113045 - RNA, 15 nt, Human
cucaaccuguaaauu

SEQ ID NO: 2113046 - RNA, 17 nt, Human
cucaaccuguaaauuau

SEQ ID NO: 2113047 - RNA, 18 nt, Human
cucaaccuguaaauuauu

SEQ ID NO: 2113048 - RNA, 19 nt, Human
cucaaccuguaaauuauuu

SEQ ID NO: 2113049 - RNA, 20 nt, Human
cucaaccuguaaauuauuuu

SEQ ID NO: 2113050 - RNA, 21 nt, Human
cucaaccuguaaauuauuuua

SEQ ID NO: 2113051 - RNA, 13 nt, Human
cucaaccugugau

SEQ ID NO: 2113052 - RNA, 22 nt, Human
cuauuuguauauauacauaaca

SEQ ID NO: 2113053 - RNA, 12 nt, Human
cuauuuuauucc

SEQ ID NO: 2113054 - RNA, 14 nt, Human
cuauuuuacugucu

SEQ ID NO: 2113055 - RNA, 15 nt, Human
cuauuuuacugucuu

SEQ ID NO: 2113056 - RNA, 17 nt, Human
cuauuuuacugucuuaa

SEQ ID NO: 2113057 - RNA, 18 nt, Human
cuauuuuacugucuuaau

SEQ ID NO: 2113058 - RNA, 21 nt, Human
cuauuuuacugucuuaauuaa

SEQ ID NO: 2113059 - RNA, 23 nt, Human
cuauuuuacugucuuaauuaagu

SEQ ID NO: 2113060 - RNA, 23 nt, Human
cuauuuguuuucuucuguauguu

SEQ ID NO: 2113061 - RNA, 12 nt, Human
cuauuuucagaa

SEQ ID NO: 2113062 - RNA, 14 nt, Human
cuauuuucagaauc

SEQ ID NO: 2113063 - RNA, 15 nt, Human
cuauuuucagaaucu

SEQ ID NO: 2113064 - RNA, 16 nt, Human
cuauuuucagaaucug

SEQ ID NO: 2113065 - RNA, 18 nt, Human
cuauuuucagaaucugaa

SEQ ID NO: 2113066 - RNA, 22 nt, Human
cuauuuucagaaucugaaugua

SEQ ID NO: 2113067 - RNA, 23 nt, Human
cuauuuucagaaucugaauguaa

SEQ ID NO: 2113068 - RNA, 18 nt, Human
cuauuugcuuauuuaaua

SEQ ID NO: 2113069 - RNA, 19 nt, Human
cuauuugcuuauuuaauaa

SEQ ID NO: 2113070 - RNA, 21 nt, Human
cuaugaccucgcccuccacaa

SEQ ID NO: 2113071 - RNA, 20 nt, Human
cguggaacguuuuuccuguu

SEQ ID NO: 2113072 - RNA, 15 nt, Human
cguggaaagggugcu

SEQ ID NO: 2113073 - RNA, 21 nt, Human
cguggaaagggugcugcuucc

SEQ ID NO: 2113074 - RNA, 17 nt, Human
cguggagagcuggugcc

SEQ ID NO: 2113075 - RNA, 12 nt, Human
cguggagaggga

SEQ ID NO: 2113076 - RNA, 20 nt, Human
cguggagagcuggugcccgg

SEQ ID NO: 2113077 - RNA, 13 nt, Human
cguggagagggau

SEQ ID NO: 2113078 - RNA, 21 nt, Human
cguggagagggaugaggugcu

SEQ ID NO: 2113079 - RNA, 15 nt, Human
cguggagccagggag

SEQ ID NO: 2113080 - RNA, 16 nt, Human
cguggagccagggagc

SEQ ID NO: 2113081 - RNA, 18 nt, Human
cguggaggaaugcucccc

SEQ ID NO: 2113082 - RNA, 22 nt, Human
cguggaggaaugcucccccauc

SEQ ID NO: 2113083 - RNA, 15 nt, Human
cguggaacguuuuuc

SEQ ID NO: 2113084 - RNA, 22 nt, Human
cgugcuuguuugcucaccuggg

SEQ ID NO: 2113085 - RNA, 14 nt, Human
cgugcuaaauuuuc

SEQ ID NO: 2113086 - RNA, 13 nt, Human
cgugccaggcccg

SEQ ID NO: 2113087 - RNA, 19 nt, Human
cgugccaggcccggggcug

SEQ ID NO: 2113088 - RNA, 20 nt, Human
cguggcagauaaucagccuc

SEQ ID NO: 2113089 - RNA, 21 nt, Human
cguggcagauaaucagccucu

SEQ ID NO: 2113090 - RNA, 22 nt, Human
cguggcagauaaucagccucuu

SEQ ID NO: 2113091 - RNA, 13 nt, Human
cguggcaucaccu

SEQ ID NO: 2113092 - RNA, 19 nt, Human
cguggcuucccgcucagcc

SEQ ID NO: 2113093 - RNA, 18 nt, Human
cguggcuucccgcucagc

SEQ ID NO: 2113094 - RNA, 16 nt, Human
cguggcccagagaagc

SEQ ID NO: 2113095 - RNA, 15 nt, Human
cguggcccagagaag

SEQ ID NO: 2113096 - RNA, 17 nt, Human
cgugggcggcagagagg

SEQ ID NO: 2113097 - RNA, 13 nt, Human
cgugggccauggc

SEQ ID NO: 2113098 - RNA, 21 nt, Human
cguggcuucccgcucagcccu

SEQ ID NO: 2113099 - RNA, 20 nt, Human
cguggcuucccgcucagccc

SEQ ID NO: 2113100 - RNA, 14 nt, Human
cguggcuucugaug

SEQ ID NO: 2113101 - RNA, 21 nt, Human
cguggcuucugaugaaucuug

SEQ ID NO: 2113102 - RNA, 18 nt, Human
cguugaagaggaagggca

SEQ ID NO: 2113103 - RNA, 12 nt, Human
cguggggcagca

SEQ ID NO: 2113104 - RNA, 18 nt, Human
cguggggcagcacagaga

SEQ ID NO: 2113105 - RNA, 23 nt, Human
cguccugacggcgcccccagugu

SEQ ID NO: 2113106 - RNA, 13 nt, Human
cguccugccaccu

SEQ ID NO: 2113107 - RNA, 14 nt, Human
cguccugccaccug

SEQ ID NO: 2113108 - RNA, 16 nt, Human
cguccugccaccuggg

SEQ ID NO: 2113109 - RNA, 20 nt, Human
cguccugccaccuggggcag

SEQ ID NO: 2113110 - RNA, 16 nt, Human
cgucucauacucaccu

SEQ ID NO: 2113111 - RNA, 17 nt, Human
cgucucaaccccucaca

SEQ ID NO: 2113112 - RNA, 19 nt, Human
cggugccuggguggggcug

SEQ ID NO: 2113113 - RNA, 20 nt, Human
cggugccuggguggggcugc

SEQ ID NO: 2113114 - RNA, 19 nt, Human
cgugcacacaccagagccc

SEQ ID NO: 2113115 - RNA, 18 nt, Human
cgugcacacaccagagcc

SEQ ID NO: 2113116 - RNA, 17 nt, Human
cgugcacguggagagcu

SEQ ID NO: 2113117 - RNA, 20 nt, Human
cgugcacguggagagcuggu

SEQ ID NO: 2113118 - RNA, 21 nt, Human
cgugcacguggagagcuggug

SEQ ID NO: 2113119 - RNA, 22 nt, Human
cgugcacguggagagcuggugc

SEQ ID NO: 2113120 - RNA, 22 nt, Human
cgugcaguggugcgaucugggu

SEQ ID NO: 2113121 - RNA, 14 nt, Human
cgugcagcauauga

SEQ ID NO: 2113122 - RNA, 16 nt, Human
cgugcagacuggaggg

SEQ ID NO: 2113123 - RNA, 17 nt, Human
cgugcagacuggagggg

SEQ ID NO: 2113124 - RNA, 21 nt, Human
cgugcaguggugcgaucuggg

SEQ ID NO: 2113125 - RNA, 13 nt, Human
cgugcaugugcac

SEQ ID NO: 2113126 - RNA, 22 nt, Human
cgucugacaggcaaugcuggcu

SEQ ID NO: 2113127 - RNA, 16 nt, Human
cgucugacccucucca

SEQ ID NO: 2113128 - RNA, 23 nt, Human
cgucuuagaaguggaccaggaca

SEQ ID NO: 2113129 - RNA, 15 nt, Human
cgucugacccucucc

SEQ ID NO: 2113130 - RNA, 21 nt, Human
cgucuuagcagugauuuuuau

SEQ ID NO: 2113131 - RNA, 13 nt, Human
cgucuucagccua

SEQ ID NO: 2113132 - RNA, 14 nt, Human
cgucuucagccuag

SEQ ID NO: 2113133 - RNA, 21 nt, Human
cgucugacaggcaaugcuggc

SEQ ID NO: 2113134 - RNA, 20 nt, Human
cgucugacaggcaaugcugg

SEQ ID NO: 2113135 - RNA, 19 nt, Human
cgucuucuguauacugugg

SEQ ID NO: 2113136 - RNA, 15 nt, Human
cgucuucagccuagc

SEQ ID NO: 2113137 - RNA, 16 nt, Human
cgugcacacaccagag

SEQ ID NO: 2113138 - RNA, 13 nt, Human
cuaaauauuuccu

SEQ ID NO: 2113139 - RNA, 14 nt, Human
cuaaauauuuccuu

SEQ ID NO: 2113140 - RNA, 22 nt, Human
cuaaauauuuccuuaaacugug

SEQ ID NO: 2113141 - RNA, 15 nt, Human
cuaaauauuuccuua

SEQ ID NO: 2113142 - RNA, 21 nt, Human
cuaaaugcauauccugagcca

SEQ ID NO: 2113143 - RNA, 14 nt, Human
cuaaaugcccugcu

SEQ ID NO: 2113144 - RNA, 13 nt, Human
cuaaaugcccugc

SEQ ID NO: 2113145 - RNA, 22 nt, Human
cuaaaugcauauccugagccau

SEQ ID NO: 2113146 - RNA, 15 nt, Human
cuaacacuggccccu

SEQ ID NO: 2113147 - RNA, 13 nt, Human
cuaacacuggccc

SEQ ID NO: 2113148 - RNA, 14 nt, Human
cuaacacuggcccc

SEQ ID NO: 2113149 - RNA, 17 nt, Human
cuaacacauuaucggga

SEQ ID NO: 2113150 - RNA, 14 nt, Human
cuaacacagcaugu

SEQ ID NO: 2113151 - RNA, 16 nt, Human
cuaacacagcaugugu

SEQ ID NO: 2113152 - RNA, 17 nt, Human
cuaacacagcaugugua

SEQ ID NO: 2113153 - RNA, 19 nt, Human
cuaacacuagucugugugc

SEQ ID NO: 2113154 - RNA, 21 nt, Human
cuaaauguggagaaacuguag

SEQ ID NO: 2113155 - RNA, 17 nt, Human
cuaaauguaagaaucau

SEQ ID NO: 2113156 - RNA, 18 nt, Human
cuaaauguaagaaucauu

SEQ ID NO: 2113157 - RNA, 22 nt, Human
cuaaauguaagaaucauuguaa

SEQ ID NO: 2113158 - RNA, 16 nt, Human
cuaaauguugaaagau

SEQ ID NO: 2113159 - RNA, 18 nt, Human
cuaaauggucgcccagga

SEQ ID NO: 2113160 - RNA, 19 nt, Human
cuaaauggucgcccaggag

SEQ ID NO: 2113161 - RNA, 20 nt, Human
cuaaauggucgcccaggaga

SEQ ID NO: 2113162 - RNA, 21 nt, Human
cuaaauggucgcccaggagac

SEQ ID NO: 2113163 - RNA, 20 nt, Human
cuaaacgagucaauccccuc

SEQ ID NO: 2113164 - RNA, 21 nt, Human
cuaaacgagucaauccccuca

SEQ ID NO: 2113165 - RNA, 22 nt, Human
cuaaaaauauuauaacuuaaaa

SEQ ID NO: 2113166 - RNA, 16 nt, Human
cguuuacauuuuagac

SEQ ID NO: 2113167 - RNA, 13 nt, Human
cuaaaaaugcaac

SEQ ID NO: 2113168 - RNA, 17 nt, Human
cguuggaauuaaaacaa

SEQ ID NO: 2113169 - RNA, 18 nt, Human
cguuggaauuaaaacaau

SEQ ID NO: 2113170 - RNA, 20 nt, Human
cguuggaauuaaaacaaugu

SEQ ID NO: 2113171 - RNA, 18 nt, Human
cguuggacuuuucguuaa

SEQ ID NO: 2113172 - RNA, 23 nt, Human
cguuggacuuuucguuaacauug

SEQ ID NO: 2113173 - RNA, 19 nt, Human
cguuuaaaguguauuauaa

SEQ ID NO: 2113174 - RNA, 23 nt, Human
cguuuaaaguguauuauaacagu

SEQ ID NO: 2113175 - RNA, 13 nt, Human
cguuuaaaguucu

SEQ ID NO: 2113176 - RNA, 15 nt, Human
cguuuaaaguucugu

SEQ ID NO: 2113177 - RNA, 17 nt, Human
cguuuaaaguucugugu

SEQ ID NO: 2113178 - RNA, 19 nt, Human
cguuuaaaguucuguguau

SEQ ID NO: 2113179 - RNA, 16 nt, Human
cgggguggauuggauu

SEQ ID NO: 2113180 - RNA, 11 nt, Human
cggggggaggg

SEQ ID NO: 2113181 - RNA, 13 nt, Human
cggggggaggguu

SEQ ID NO: 2113182 - RNA, 22 nt, Human
cggggggaggguuggggagggg

SEQ ID NO: 2113183 - RNA, 16 nt, Human
cgggggcugaggggca

SEQ ID NO: 2113184 - RNA, 13 nt, Human
cgggggcuggggc

SEQ ID NO: 2113185 - RNA, 14 nt, Human
cgggggcuggggca

SEQ ID NO: 2113186 - RNA, 15 nt, Human
cggggggacagcucc

SEQ ID NO: 2113187 - RNA, 23 nt, Human
cggggacagcuccuucuguccua

SEQ ID NO: 2113188 - RNA, 16 nt, Human
cggggagcccccgccc

SEQ ID NO: 2113189 - RNA, 13 nt, Human
cggggaggccaag

SEQ ID NO: 2113190 - RNA, 14 nt, Human
cggggaggccaagu

SEQ ID NO: 2113191 - RNA, 19 nt, Human
cggggaggccaagugcagg

SEQ ID NO: 2113192 - RNA, 21 nt, Human
cggggaggccaagugcaggcu

SEQ ID NO: 2113193 - RNA, 23 nt, Human
cggggaggccaagugcaggcugg

SEQ ID NO: 2113194 - RNA, 15 nt, Human
cggggccugccuagc

SEQ ID NO: 2113195 - RNA, 16 nt, Human
cggggccugccuagca

SEQ ID NO: 2113196 - RNA, 19 nt, Human
cggggcuccccuucgcgua

SEQ ID NO: 2113197 - RNA, 22 nt, Human
cgggcacucagaagacacugau

SEQ ID NO: 2113198 - RNA, 14 nt, Human
cgggcacucagaag

SEQ ID NO: 2113199 - RNA, 19 nt, Human
cgggcaccuauagucccag

SEQ ID NO: 2113200 - RNA, 21 nt, Human
cgggcaccuauagucccagcu

SEQ ID NO: 2113201 - RNA, 22 nt, Human
cggggacagcuccuucuguccu

SEQ ID NO: 2113202 - RNA, 14 nt, Human
cgggcacaauaaau

SEQ ID NO: 2113203 - RNA, 15 nt, Human
cgggcacaauaaauc

SEQ ID NO: 2113204 - RNA, 14 nt, Human
cgggcacagcugug

SEQ ID NO: 2113205 - RNA, 18 nt, Human
cgggcacagcugugguga

SEQ ID NO: 2113206 - RNA, 16 nt, Human
cgggaugguccugggg

SEQ ID NO: 2113207 - RNA, 18 nt, Human
cgggaugguccuggggcu

SEQ ID NO: 2113208 - RNA, 18 nt, Human
cgggaggucgaggcagga

SEQ ID NO: 2113209 - RNA, 20 nt, Human
cgggaggucgaggcaggagg

SEQ ID NO: 2113210 - RNA, 21 nt, Human
cgggacucacuggcagcccca

SEQ ID NO: 2113211 - RNA, 23 nt, Human
cgggacucacuggcagccccagc

SEQ ID NO: 2113212 - RNA, 14 nt, Human
cgggagcagugucu

SEQ ID NO: 2113213 - RNA, 15 nt, Human
cgggagcagugucuu

SEQ ID NO: 2113214 - RNA, 20 nt, Human
cgggagcagugucuuccaua

SEQ ID NO: 2113215 - RNA, 23 nt, Human
cgggagcagugucuuccauaaug

SEQ ID NO: 2113216 - RNA, 14 nt, Human
cgggagcaucucuu

SEQ ID NO: 2113217 - RNA, 22 nt, Human
cgggagcaucucuugaggccag

SEQ ID NO: 2113218 - RNA, 23 nt, Human
cggguuuggcgggccaaggacug

SEQ ID NO: 2113219 - RNA, 19 nt, Human
cggguuuggcgggccaagg

SEQ ID NO: 2113220 - RNA, 20 nt, Human
cgguccacccaggagccccg

SEQ ID NO: 2113221 - RNA, 16 nt, Human
cgguccacccaggagc

SEQ ID NO: 2113222 - RNA, 15 nt, Human
cgguccacccaggag

SEQ ID NO: 2113223 - RNA, 14 nt, Human
cgguccacccagga

SEQ ID NO: 2113224 - RNA, 15 nt, Human
cgggugcucagggcu

SEQ ID NO: 2113225 - RNA, 18 nt, Human
cggguggaucaccugagg

SEQ ID NO: 2113226 - RNA, 19 nt, Human
cggguggaucaccugaggu

SEQ ID NO: 2113227 - RNA, 18 nt, Human
cgggugcucagggcugac

SEQ ID NO: 2113228 - RNA, 18 nt, Human
cggguggcuagucagaga

SEQ ID NO: 2113229 - RNA, 11 nt, Human
cgguccugucu

SEQ ID NO: 2113230 - RNA, 15 nt, Human
cgguccugucucccc

SEQ ID NO: 2113231 - RNA, 14 nt, Human
cggucaaggccagc

SEQ ID NO: 2113232 - RNA, 18 nt, Human
cgguccccuccgccaggc

SEQ ID NO: 2113233 - RNA, 19 nt, Human
cggucccuugagaccucag

SEQ ID NO: 2113234 - RNA, 21 nt, Human
cggucccuugagaccucagcc

SEQ ID NO: 2113235 - RNA, 22 nt, Human
cggucccuugagaccucagcca

SEQ ID NO: 2113236 - RNA, 23 nt, Human
cggucccuugagaccucagccau

SEQ ID NO: 2113237 - RNA, 23 nt, Human
cggugcauacacccccaccuccu

SEQ ID NO: 2113238 - RNA, 21 nt, Human
cggugagaggggaacagacug

SEQ ID NO: 2113239 - RNA, 20 nt, Human
cggugagaggggaacagacu

SEQ ID NO: 2113240 - RNA, 19 nt, Human
cggccgucuucacucgccc

SEQ ID NO: 2113241 - RNA, 22 nt, Human
cggcugagucaugaucucccug

SEQ ID NO: 2113242 - RNA, 23 nt, Human
cggcugagucaugaucucccugc

SEQ ID NO: 2113243 - RNA, 24 nt, Human
cggccaggccagagggagugacag

SEQ ID NO: 2113244 - RNA, 22 nt, Human
cggccaugaccacuuuccccgu

SEQ ID NO: 2113245 - RNA, 12 nt, Human
cggcccacagcu

SEQ ID NO: 2113246 - RNA, 19 nt, Human
cggccccugcugguucagg

SEQ ID NO: 2113247 - RNA, 18 nt, Human
cggccccugcugguucag

SEQ ID NO: 2113248 - RNA, 13 nt, Human
cggccccugcugg

SEQ ID NO: 2113249 - RNA, 17 nt, Human
cggcccaggauggcuuu

SEQ ID NO: 2113250 - RNA, 19 nt, Human
cggcccacagcucccaccc

SEQ ID NO: 2113251 - RNA, 22 nt, Human
cggcccacagcucccaccccac

SEQ ID NO: 2113252 - RNA, 15 nt, Human
cggcccacagcuccc

SEQ ID NO: 2113253 - RNA, 23 nt, Human
cggcauugguucccuuugcucca

SEQ ID NO: 2113254 - RNA, 14 nt, Human
cggcauuccugcuu

SEQ ID NO: 2113255 - RNA, 21 nt, Human
cggcaggacaacgaggaagcc

SEQ ID NO: 2113256 - RNA, 22 nt, Human
cggcaggacaacgaggaagccc

SEQ ID NO: 2113257 - RNA, 14 nt, Human
cggaauaguuggcu

SEQ ID NO: 2113258 - RNA, 20 nt, Human
cggcacccacaagugccacu

SEQ ID NO: 2113259 - RNA, 15 nt, Human
cggcacccacccagc

SEQ ID NO: 2113260 - RNA, 11 nt, Human
cggcagagagg

SEQ ID NO: 2113261 - RNA, 13 nt, Human
cggcagagaggac

SEQ ID NO: 2113262 - RNA, 15 nt, Human
cggcacuguggccuu

SEQ ID NO: 2113263 - RNA, 13 nt, Human
cggaagagccuug

SEQ ID NO: 2113264 - RNA, 19 nt, Human
cgcuuuugcuggucacugc

SEQ ID NO: 2113265 - RNA, 14 nt, Human
cggaagcagugccu

SEQ ID NO: 2113266 - RNA, 20 nt, Human
cggaagcagugccuuccaua

SEQ ID NO: 2113267 - RNA, 22 nt, Human
cggaagcagugccuuccauaau

SEQ ID NO: 2113268 - RNA, 23 nt, Human
cggaagcagugccuuccauaauu

SEQ ID NO: 2113269 - RNA, 14 nt, Human
cggaagcuccuggu

SEQ ID NO: 2113270 - RNA, 15 nt, Human
cggaagcuccuggua

SEQ ID NO: 2113271 - RNA, 18 nt, Human
cggaaggaccuauguuug

SEQ ID NO: 2113272 - RNA, 19 nt, Human
cggaaggaccuauguuugc

SEQ ID NO: 2113273 - RNA, 18 nt, Human
cggaaggcuggcugggca

SEQ ID NO: 2113274 - RNA, 12 nt, Human
cgcccagucugg

SEQ ID NO: 2113275 - RNA, 21 nt, Human
cgccccucauuuaucccucaa

SEQ ID NO: 2113276 - RNA, 17 nt, Human
cgccccgccccacauuc

SEQ ID NO: 2113277 - RNA, 13 nt, Human
cgccccgccccac

SEQ ID NO: 2113278 - RNA, 14 nt, Human
cgccccgccccaca

SEQ ID NO: 2113279 - RNA, 23 nt, Human
cgccaggggaaaaucagccugcu

SEQ ID NO: 2113280 - RNA, 18 nt, Human
cgccaggaccgccaaaga

SEQ ID NO: 2113281 - RNA, 20 nt, Human
cgccaggaccgccaaagaau

SEQ ID NO: 2113282 - RNA, 14 nt, Human
ccucugccccgucu

SEQ ID NO: 2113283 - RNA, 20 nt, Human
ccucugccaccuccccuauc

SEQ ID NO: 2113284 - RNA, 20 nt, Human
cgcgccacucgcuuccccca

SEQ ID NO: 2113285 - RNA, 22 nt, Human
cgcgccacucgcuucccccaua

SEQ ID NO: 2113286 - RNA, 22 nt, Human
cgcgccacuacacuccagccug

SEQ ID NO: 2113287 - RNA, 23 nt, Human
cgcgccacuacacuccagccuga

SEQ ID NO: 2113288 - RNA, 15 nt, Human
cgcgccacucgcuuc

SEQ ID NO: 2113289 - RNA, 18 nt, Human
cgcgccacucgcuucccc

SEQ ID NO: 2113290 - RNA, 21 nt, Human
cgcuaaucccgauucacccug

SEQ ID NO: 2113291 - RNA, 12 nt, Human
cgcucagcccuc

SEQ ID NO: 2113292 - RNA, 21 nt, Human
cgcucagcccucccugccccu

SEQ ID NO: 2113293 - RNA, 16 nt, Human
cgcucagcccucccug

SEQ ID NO: 2113294 - RNA, 18 nt, Human
cgcucaugggccccucug

SEQ ID NO: 2113295 - RNA, 20 nt, Human
cgcucaugggccccucugac

SEQ ID NO: 2113296 - RNA, 22 nt, Human
cgcucaugggccccucugacuc

SEQ ID NO: 2113297 - RNA, 11 nt, Human
cgcuacccacu

SEQ ID NO: 2113298 - RNA, 17 nt, Human
cgcuuguccagcgccua

SEQ ID NO: 2113299 - RNA, 20 nt, Human
cgcuuguccagcgccuagug

SEQ ID NO: 2113300 - RNA, 16 nt, Human
cgcugucuccagaccc

SEQ ID NO: 2113301 - RNA, 23 nt, Human
cgcugucccuaguaaaaauacaa

SEQ ID NO: 2113302 - RNA, 15 nt, Human
cgcugucuccagacc

SEQ ID NO: 2113303 - RNA, 14 nt, Human
cgcugucuccagac

SEQ ID NO: 2113304 - RNA, 15 nt, Human
cgcugguagagaugg

SEQ ID NO: 2113305 - RNA, 23 nt, Human
cgcugguagagauggaggaggag

SEQ ID NO: 2113306 - RNA, 18 nt, Human
cggaaaaugccaaucucu

SEQ ID NO: 2113307 - RNA, 22 nt, Human
cucccaaagugcugggauuaca

SEQ ID NO: 2113308 - RNA, 18 nt, Human
cucccaaagugcugggau

SEQ ID NO: 2113309 - RNA, 12 nt, Human
cuccauggugcc

SEQ ID NO: 2113310 - RNA, 15 nt, Human
cuccauggugccucu

SEQ ID NO: 2113311 - RNA, 16 nt, Human
cuccauggugccucug

SEQ ID NO: 2113312 - RNA, 17 nt, Human
cuccauggugccucugg

SEQ ID NO: 2113313 - RNA, 18 nt, Human
cuccauggugccucugga

SEQ ID NO: 2113314 - RNA, 17 nt, Human
cucccaagaacagcagg

SEQ ID NO: 2113315 - RNA, 18 nt, Human
cucccaagaacagcaggc

SEQ ID NO: 2113316 - RNA, 23 nt, Human
cucccaagaacagcaggcccacc

SEQ ID NO: 2113317 - RNA, 22 nt, Human
cucccagggccagggcccugca

SEQ ID NO: 2113318 - RNA, 23 nt, Human
cucccagggccagggcccugcag

SEQ ID NO: 2113319 - RNA, 14 nt, Human
cucccagggccaug

SEQ ID NO: 2113320 - RNA, 20 nt, Human
cucccagggccaugaacuuu

SEQ ID NO: 2113321 - RNA, 21 nt, Human
cucccagggccaugaacuuug

SEQ ID NO: 2113322 - RNA, 23 nt, Human
cucccagggccuuaaaagccauc

SEQ ID NO: 2113323 - RNA, 12 nt, Human
cucccagggcua

SEQ ID NO: 2113324 - RNA, 16 nt, Human
cuccauccuaccacaa

SEQ ID NO: 2113325 - RNA, 18 nt, Human
cucacuauguugcccagg

SEQ ID NO: 2113326 - RNA, 17 nt, Human
cucacuauccuacccca

SEQ ID NO: 2113327 - RNA, 14 nt, Human
cuccaucuccacuc

SEQ ID NO: 2113328 - RNA, 16 nt, Human
cuccaucuccacucca

SEQ ID NO: 2113329 - RNA, 16 nt, Human
cuccaucuggcagggu

SEQ ID NO: 2113330 - RNA, 21 nt, Human
cuccaugagacacaucuccuc

SEQ ID NO: 2113331 - RNA, 17 nt, Human
cuccaugaguuuuuucu

SEQ ID NO: 2113332 - RNA, 12 nt, Human
cuccaucuuauu

SEQ ID NO: 2113333 - RNA, 13 nt, Human
cuccaugugggcu

SEQ ID NO: 2113334 - RNA, 17 nt, Human
cucccaaagugcuggga

SEQ ID NO: 2113335 - RNA, 17 nt, Human
cucccaucuuaacucuu

SEQ ID NO: 2113336 - RNA, 18 nt, Human
cucccaucuuaacucuuu

SEQ ID NO: 2113337 - RNA, 20 nt, Human
cucccaucuuaacucuuugc

SEQ ID NO: 2113338 - RNA, 23 nt, Human
cucccaucuuaacucuuugccuu

SEQ ID NO: 2113339 - RNA, 16 nt, Human
cucccaugaccauacu

SEQ ID NO: 2113340 - RNA, 21 nt, Human
cucccaugaccauacugaggg

SEQ ID NO: 2113341 - RNA, 12 nt, Human
cuccccaaaaac

SEQ ID NO: 2113342 - RNA, 21 nt, Human
cuccccacacuaaccuggguu

SEQ ID NO: 2113343 - RNA, 20 nt, Human
cuccccaacccugccccugc

SEQ ID NO: 2113344 - RNA, 17 nt, Human
cuccccaacccugcccc

SEQ ID NO: 2113345 - RNA, 19 nt, Human
cuccccaacccugccccug

SEQ ID NO: 2113346 - RNA, 12 nt, Human
cuccccaacccu

SEQ ID NO: 2113347 - RNA, 14 nt, Human
cuccccaacccugc

SEQ ID NO: 2113348 - RNA, 15 nt, Human
cuccccaacccugcc

SEQ ID NO: 2113349 - RNA, 12 nt, Human
cuccccagcaag

SEQ ID NO: 2113350 - RNA, 15 nt, Human
cuccccugcccugcu

SEQ ID NO: 2113351 - RNA, 16 nt, Human
cuccccugcccugcug

SEQ ID NO: 2113352 - RNA, 14 nt, Human
cuccccugcccugg

SEQ ID NO: 2113353 - RNA, 21 nt, Human
cuccccaggccguggcugccc

SEQ ID NO: 2113354 - RNA, 20 nt, Human
cuccccagcaagugagagcu

SEQ ID NO: 2113355 - RNA, 22 nt, Human
cucccuaccaccuccccagccu

SEQ ID NO: 2113356 - RNA, 17 nt, Human
cucccuaguuccuucau

SEQ ID NO: 2113357 - RNA, 16 nt, Human
cucccuauaaugcugg

SEQ ID NO: 2113358 - RNA, 17 nt, Human
cucccuauaaugcugga

SEQ ID NO: 2113359 - RNA, 20 nt, Human
cucccuauaaugcuggagcg

SEQ ID NO: 2113360 - RNA, 16 nt, Human
cucccgggacucacug

SEQ ID NO: 2113361 - RNA, 19 nt, Human
cucccgggacucacuggca

SEQ ID NO: 2113362 - RNA, 21 nt, Human
cucccgggacucacuggcagc

SEQ ID NO: 2113363 - RNA, 22 nt, Human
cucccgggacucacuggcagcc

SEQ ID NO: 2113364 - RNA, 23 nt, Human
cucccgggacucacuggcagccc

SEQ ID NO: 2113365 - RNA, 20 nt, Human
cucccggcuaugggggcacu

SEQ ID NO: 2113366 - RNA, 14 nt, Human
cucccuaccaccuc

SEQ ID NO: 2113367 - RNA, 15 nt, Human
cucccuaccaccucc

SEQ ID NO: 2113368 - RNA, 11 nt, Human
cucccuaccuc

SEQ ID NO: 2113369 - RNA, 12 nt, Human
cucccuaccuca

SEQ ID NO: 2113370 - RNA, 16 nt, Human
cucccuaccucaaccu

SEQ ID NO: 2113371 - RNA, 17 nt, Human
cucccuaccucaaccug

SEQ ID NO: 2113372 - RNA, 18 nt, Human
cucccuaccucaaccugu

SEQ ID NO: 2113373 - RNA, 20 nt, Human
cucccuaccucaaccuguaa

SEQ ID NO: 2113374 - RNA, 21 nt, Human
cucccuaccucaaccuguaaa

SEQ ID NO: 2113375 - RNA, 22 nt, Human
cucccuaccucaaccuguaaau

SEQ ID NO: 2113376 - RNA, 18 nt, Human
cucccgaguagcugggac

SEQ ID NO: 2113377 - RNA, 19 nt, Human
cucccgaauagcugggacu

SEQ ID NO: 2113378 - RNA, 17 nt, Human
cucccgaguagcuggga

SEQ ID NO: 2113379 - RNA, 16 nt, Human
cucccgaguagcuggg

SEQ ID NO: 2113380 - RNA, 18 nt, Human
cucccgaauagcugggac

SEQ ID NO: 2113381 - RNA, 15 nt, Human
cucccgaguagcugg

SEQ ID NO: 2113382 - RNA, 16 nt, Human
cucccgaauagcuggg

SEQ ID NO: 2113383 - RNA, 17 nt, Human
cucccgaauagcuggga

SEQ ID NO: 2113384 - RNA, 17 nt, Human
cuccucccggugcccaa

SEQ ID NO: 2113385 - RNA, 15 nt, Human
cuccucccggugccc

SEQ ID NO: 2113386 - RNA, 14 nt, Human
cuccucccggugcc

SEQ ID NO: 2113387 - RNA, 22 nt, Human
cuccucuccccagcaagugaga

SEQ ID NO: 2113388 - RNA, 15 nt, Human
cuccucgcaagcugg

SEQ ID NO: 2113389 - RNA, 16 nt, Human
cuccucgcaagcuggg

SEQ ID NO: 2113390 - RNA, 14 nt, Human
cuccucgcaagcug

SEQ ID NO: 2113391 - RNA, 22 nt, Human
cuccuccagccgccaugcuccu

SEQ ID NO: 2113392 - RNA, 15 nt, Human
cuccuccaaaggaag

SEQ ID NO: 2113393 - RNA, 18 nt, Human
cuccuccaaaggaagucu

SEQ ID NO: 2113394 - RNA, 23 nt, Human
cuccuccaaaggaagucuaggag

SEQ ID NO: 2113395 - RNA, 11 nt, Human
cuccuccaggg

SEQ ID NO: 2113396 - RNA, 13 nt, Human
cuccuccagggcc

SEQ ID NO: 2113397 - RNA, 14 nt, Human
cuccuccagggcca

SEQ ID NO: 2113398 - RNA, 19 nt, Human
cuccuccagggccacgugc

SEQ ID NO: 2113399 - RNA, 20 nt, Human
cuccuccagggccacgugcc

SEQ ID NO: 2113400 - RNA, 22 nt, Human
cuccuccagggccacgugccag

SEQ ID NO: 2113401 - RNA, 23 nt, Human
cuccgccaggcgagauggggugg

SEQ ID NO: 2113402 - RNA, 13 nt, Human
cuccgccaggcga

SEQ ID NO: 2113403 - RNA, 23 nt, Human
cuccgccauucucaagcccugca

SEQ ID NO: 2113404 - RNA, 15 nt, Human
cuccucaccccgucu

SEQ ID NO: 2113405 - RNA, 18 nt, Human
cuccucaccccgucuggg

SEQ ID NO: 2113406 - RNA, 22 nt, Human
cuccucaccucuggacuggcua

SEQ ID NO: 2113407 - RNA, 18 nt, Human
cuccucaccucuggacug

SEQ ID NO: 2113408 - RNA, 21 nt, Human
cuccucaccucuggacuggcu

SEQ ID NO: 2113409 - RNA, 13 nt, Human
cuccucaccucug

SEQ ID NO: 2113410 - RNA, 14 nt, Human
cuccucaccucugg

SEQ ID NO: 2113411 - RNA, 15 nt, Human
cuccucaccucugga

SEQ ID NO: 2113412 - RNA, 16 nt, Human
cuccucaccucuggac

SEQ ID NO: 2113413 - RNA, 13 nt, Human
cucccucauucca

SEQ ID NO: 2113414 - RNA, 17 nt, Human
cucccuuucuucccuac

SEQ ID NO: 2113415 - RNA, 22 nt, Human
cuccgaacacccucgaagcgcg

SEQ ID NO: 2113416 - RNA, 15 nt, Human
cuccgaccagacacc

SEQ ID NO: 2113417 - RNA, 14 nt, Human
cucccuuuuuauau

SEQ ID NO: 2113418 - RNA, 14 nt, Human
cucccuuugaaaug

SEQ ID NO: 2113419 - RNA, 21 nt, Human
cucccuuuuuauaucccauuu

SEQ ID NO: 2113420 - RNA, 14 nt, Human
cuccugccucagcc

SEQ ID NO: 2113421 - RNA, 13 nt, Human
cuccugccucagc

SEQ ID NO: 2113422 - RNA, 13 nt, Human
cuccugcccccac

SEQ ID NO: 2113423 - RNA, 15 nt, Human
cuccugcccccacac

SEQ ID NO: 2113424 - RNA, 17 nt, Human
cuccugcccccacaccu

SEQ ID NO: 2113425 - RNA, 20 nt, Human
cuccugcccccacaccuggc

SEQ ID NO: 2113426 - RNA, 22 nt, Human
cuccugcccccacaccuggccc

SEQ ID NO: 2113427 - RNA, 23 nt, Human
cuccugcccccacaccuggcccu

SEQ ID NO: 2113428 - RNA, 12 nt, Human
cuccugcccagg

SEQ ID NO: 2113429 - RNA, 13 nt, Human
cuccugcccagga

SEQ ID NO: 2113430 - RNA, 14 nt, Human
cuccugcccaggag

SEQ ID NO: 2113431 - RNA, 15 nt, Human
cuccugcccaggaga

SEQ ID NO: 2113432 - RNA, 16 nt, Human
cuccugcccaggagag

SEQ ID NO: 2113433 - RNA, 17 nt, Human
cuccugcccaggagagc

SEQ ID NO: 2113434 - RNA, 20 nt, Human
cuccugcccaggagagccag

SEQ ID NO: 2113435 - RNA, 22 nt, Human
cuccugcccaggagagccagcc

SEQ ID NO: 2113436 - RNA, 13 nt, Human
cuccugauauaga

SEQ ID NO: 2113437 - RNA, 15 nt, Human
cuccugauuauuuau

SEQ ID NO: 2113438 - RNA, 14 nt, Human
cuccucuccccucu

SEQ ID NO: 2113439 - RNA, 17 nt, Human
cuccucgcaagcugggu

SEQ ID NO: 2113440 - RNA, 16 nt, Human
cuccugagugauccca

SEQ ID NO: 2113441 - RNA, 15 nt, Human
cuccucuccccucua

SEQ ID NO: 2113442 - RNA, 16 nt, Human
cuccugugcaugggug

SEQ ID NO: 2113443 - RNA, 17 nt, Human
cuccugugcaacuuucc

SEQ ID NO: 2113444 - RNA, 17 nt, Human
cuccugugcauggguga

SEQ ID NO: 2113445 - RNA, 20 nt, Human
cuccugugcaugggugaagg

SEQ ID NO: 2113446 - RNA, 11 nt, Human
cuccuguguaa

SEQ ID NO: 2113447 - RNA, 19 nt, Human
cuccugugugugcgccuac

SEQ ID NO: 2113448 - RNA, 16 nt, Human
cuccugugugugcgcc

SEQ ID NO: 2113449 - RNA, 17 nt, Human
cuccugucugccagcca

SEQ ID NO: 2113450 - RNA, 19 nt, Human
cuccugucugccagccagc

SEQ ID NO: 2113451 - RNA, 22 nt, Human
cuccugucugccagccagcagc

SEQ ID NO: 2113452 - RNA, 23 nt, Human
cuccugucugccagccagcagcc

SEQ ID NO: 2113453 - RNA, 18 nt, Human
cuccugccugugcuguga

SEQ ID NO: 2113454 - RNA, 18 nt, Human
cuccugcuacucuguucc

SEQ ID NO: 2113455 - RNA, 15 nt, Human
cuccugccucagccu

SEQ ID NO: 2113456 - RNA, 14 nt, Human
cuccugccugugcu

SEQ ID NO: 2113457 - RNA, 15 nt, Human
cucuccacugccuuc

SEQ ID NO: 2113458 - RNA, 24 nt, Human
cucuccccagcaagugagagcugg

SEQ ID NO: 2113459 - RNA, 22 nt, Human
cucuccccagcaagugagagcu

SEQ ID NO: 2113460 - RNA, 14 nt, Human
cucuccccagcaag

SEQ ID NO: 2113461 - RNA, 22 nt, Human
cucuccucuugccacugccucu

SEQ ID NO: 2113462 - RNA, 19 nt, Human
cucuccucuugccacugcc

SEQ ID NO: 2113463 - RNA, 12 nt, Human
cucuccugccua

SEQ ID NO: 2113464 - RNA, 17 nt, Human
cucuccucuugccacug

SEQ ID NO: 2113465 - RNA, 16 nt, Human
cucuccucuugccacu

SEQ ID NO: 2113466 - RNA, 15 nt, Human
cucuccucuugccac

SEQ ID NO: 2113467 - RNA, 14 nt, Human
cucuccucuugcca

SEQ ID NO: 2113468 - RNA, 14 nt, Human
cucucuccacccua

SEQ ID NO: 2113469 - RNA, 17 nt, Human
cucucuccagucuucca

SEQ ID NO: 2113470 - RNA, 18 nt, Human
cucucuccagucuuccac

SEQ ID NO: 2113471 - RNA, 20 nt, Human
cucucuccagucuuccaccu

SEQ ID NO: 2113472 - RNA, 12 nt, Human
cucucuccauca

SEQ ID NO: 2113473 - RNA, 14 nt, Human
cucucuccaucaga

SEQ ID NO: 2113474 - RNA, 21 nt, Human
cucucuccaucagaggacacc

SEQ ID NO: 2113475 - RNA, 18 nt, Human
cucucuaugguaaagaua

SEQ ID NO: 2113476 - RNA, 20 nt, Human
cucucuaugguaaagauauu

SEQ ID NO: 2113477 - RNA, 23 nt, Human
cucucuaugguaaagauauuauu

SEQ ID NO: 2113478 - RNA, 20 nt, Human
cucucuauuaccacugaaga

SEQ ID NO: 2113479 - RNA, 22 nt, Human
cucucuacuccuaccucagccu

SEQ ID NO: 2113480 - RNA, 18 nt, Human
cucucuacccagcccauc

SEQ ID NO: 2113481 - RNA, 19 nt, Human
cucucuacccagcccaucu

SEQ ID NO: 2113482 - RNA, 22 nt, Human
cucucuacccagcccaucuugc

SEQ ID NO: 2113483 - RNA, 19 nt, Human
cucucuacuccuaccucag

SEQ ID NO: 2113484 - RNA, 20 nt, Human
cucucuacuccuaccucagc

SEQ ID NO: 2113485 - RNA, 16 nt, Human
cucuccuuucuuucua

SEQ ID NO: 2113486 - RNA, 21 nt, Human
cucuccuguccaaccuaaccc

SEQ ID NO: 2113487 - RNA, 13 nt, Human
cucuccugccuac

SEQ ID NO: 2113488 - RNA, 21 nt, Human
cucuagugcccuccacagccg

SEQ ID NO: 2113489 - RNA, 16 nt, Human
cucuauaauugccacu

SEQ ID NO: 2113490 - RNA, 17 nt, Human
cucuauaauugccacug

SEQ ID NO: 2113491 - RNA, 11 nt, Human
cucucauuccc

SEQ ID NO: 2113492 - RNA, 14 nt, Human
cucucauuccccag

SEQ ID NO: 2113493 - RNA, 15 nt, Human
cucucauuccccagg

SEQ ID NO: 2113494 - RNA, 21 nt, Human
cucucauuccccagguggcug

SEQ ID NO: 2113495 - RNA, 16 nt, Human
cucucauuccccaggu

SEQ ID NO: 2113496 - RNA, 20 nt, Human
cucucauuccccagguggcu

SEQ ID NO: 2113497 - RNA, 13 nt, Human
cucuccaaccugg

SEQ ID NO: 2113498 - RNA, 14 nt, Human
cucuccaaccugga

SEQ ID NO: 2113499 - RNA, 16 nt, Human
cucuccaaccuggaca

SEQ ID NO: 2113500 - RNA, 11 nt, Human
cucuccacugc

SEQ ID NO: 2113501 - RNA, 14 nt, Human
cucuccacugccuu

SEQ ID NO: 2113502 - RNA, 12 nt, Human
cucuccacugcc

SEQ ID NO: 2113503 - RNA, 13 nt, Human
cucuacccuggca

SEQ ID NO: 2113504 - RNA, 22 nt, Human
cucuacccucccacccccuucu

SEQ ID NO: 2113505 - RNA, 20 nt, Human
cucuaccucauaucaguuug

SEQ ID NO: 2113506 - RNA, 14 nt, Human
cucuacccucccac

SEQ ID NO: 2113507 - RNA, 15 nt, Human
cucuacccucccacc

SEQ ID NO: 2113508 - RNA, 16 nt, Human
cucuacccucccaccc

SEQ ID NO: 2113509 - RNA, 17 nt, Human
cucuacccucccacccc

SEQ ID NO: 2113510 - RNA, 18 nt, Human
cucuacccucccaccccc

SEQ ID NO: 2113511 - RNA, 20 nt, Human
cucuaccauccccuguagag

SEQ ID NO: 2113512 - RNA, 12 nt, Human
cucuacccagcc

SEQ ID NO: 2113513 - RNA, 14 nt, Human
cucuacccagccca

SEQ ID NO: 2113514 - RNA, 15 nt, Human
cucuacccagcccau

SEQ ID NO: 2113515 - RNA, 17 nt, Human
cucuacccagcccaucu

SEQ ID NO: 2113516 - RNA, 18 nt, Human
cucuacccagcccaucuu

SEQ ID NO: 2113517 - RNA, 19 nt, Human
cucuacccagcccaucuug

SEQ ID NO: 2113518 - RNA, 20 nt, Human
cucuacccagcccaucuugc

SEQ ID NO: 2113519 - RNA, 20 nt, Human
cucuacuuagcaugucccua

SEQ ID NO: 2113520 - RNA, 15 nt, Human
cucuacuuaaugaga

SEQ ID NO: 2113521 - RNA, 19 nt, Human
cucuacuuagcaugucccu

SEQ ID NO: 2113522 - RNA, 17 nt, Human
cucuacuuagcaugucc

SEQ ID NO: 2113523 - RNA, 16 nt, Human
cucuacuuagcauguc

SEQ ID NO: 2113524 - RNA, 22 nt, Human
cucuacuaaaaauacaaaaauu

SEQ ID NO: 2113525 - RNA, 18 nt, Human
cucuacuaaaaauacaaa

SEQ ID NO: 2113526 - RNA, 19 nt, Human
cucuacuaaaaauacagaa

SEQ ID NO: 2113527 - RNA, 19 nt, Human
cucuacuccuaccucagcc

SEQ ID NO: 2113528 - RNA, 16 nt, Human
cucuacuccuaccuca

SEQ ID NO: 2113529 - RNA, 22 nt, Human
cucuaggugcccuuggaggcca

SEQ ID NO: 2113530 - RNA, 13 nt, Human
cucuagugcccuc

SEQ ID NO: 2113531 - RNA, 14 nt, Human
cucuagugcccucc

SEQ ID NO: 2113532 - RNA, 18 nt, Human
cucuagugcccuccacag

SEQ ID NO: 2113533 - RNA, 18 nt, Human
cucuagggaaggccaccu

SEQ ID NO: 2113534 - RNA, 19 nt, Human
cucuagggaaggccaccug

SEQ ID NO: 2113535 - RNA, 20 nt, Human
cucuagggaaggccaccugc

SEQ ID NO: 2113536 - RNA, 21 nt, Human
cucuagggaaggccaccugca

SEQ ID NO: 2113537 - RNA, 22 nt, Human
cucuagggaaggccaccugcag

SEQ ID NO: 2113538 - RNA, 23 nt, Human
cucuagggaaggccaccugcagg

SEQ ID NO: 2113539 - RNA, 23 nt, Human
cucuagggaaaaaccagcgugug

SEQ ID NO: 2113540 - RNA, 20 nt, Human
cucuagaauuuuaagugcuu

SEQ ID NO: 2113541 - RNA, 23 nt, Human
cucuagaauuuuaagugcuuugu

SEQ ID NO: 2113542 - RNA, 17 nt, Human
cucuagacaacccugca

SEQ ID NO: 2113543 - RNA, 18 nt, Human
cucuagacaacccugcaa

SEQ ID NO: 2113544 - RNA, 23 nt, Human
cucuagacaacccugcaaaggac

SEQ ID NO: 2113545 - RNA, 12 nt, Human
cucuagaaauuu

SEQ ID NO: 2113546 - RNA, 14 nt, Human
cucuagccugggca

SEQ ID NO: 2113547 - RNA, 21 nt, Human
cucuagccggagugacagagu

SEQ ID NO: 2113548 - RNA, 13 nt, Human
cucuagccugggc

SEQ ID NO: 2113549 - RNA, 18 nt, Human
cuccuguguagcugggau

SEQ ID NO: 2113550 - RNA, 20 nt, Human
cuccugugugugcgccuaca

SEQ ID NO: 2113551 - RNA, 12 nt, Human
cucgcuggcccc

SEQ ID NO: 2113552 - RNA, 15 nt, Human
cucgcuggcccccac

SEQ ID NO: 2113553 - RNA, 16 nt, Human
cucgcuggcccccacu

SEQ ID NO: 2113554 - RNA, 17 nt, Human
cucgcuggcccccacug

SEQ ID NO: 2113555 - RNA, 20 nt, Human
cucgcuggcccccacuggcu

SEQ ID NO: 2113556 - RNA, 21 nt, Human
cucgcuggcccccacuggcug

SEQ ID NO: 2113557 - RNA, 22 nt, Human
cucgcuggcccccacuggcugu

SEQ ID NO: 2113558 - RNA, 20 nt, Human
cucggaguaucugggaacug

SEQ ID NO: 2113559 - RNA, 21 nt, Human
cucggaguaucugggaacugu

SEQ ID NO: 2113560 - RNA, 17 nt, Human
cucggagggauuccccu

SEQ ID NO: 2113561 - RNA, 17 nt, Human
cucggaguaucugggaa

SEQ ID NO: 2113562 - RNA, 13 nt, Human
cucgcuucucugu

SEQ ID NO: 2113563 - RNA, 14 nt, Human
cucgcuucucugug

SEQ ID NO: 2113564 - RNA, 19 nt, Human
cucgcuucccccauagcca

SEQ ID NO: 2113565 - RNA, 16 nt, Human
cucgcuucccccauag

SEQ ID NO: 2113566 - RNA, 18 nt, Human
cucgcuucccccauagcc

SEQ ID NO: 2113567 - RNA, 14 nt, Human
cucgcuucccccau

SEQ ID NO: 2113568 - RNA, 13 nt, Human
cucggagccucau

SEQ ID NO: 2113569 - RNA, 16 nt, Human
cucggagccucauccg

SEQ ID NO: 2113570 - RNA, 22 nt, Human
cucggagccucauccgaggcag

SEQ ID NO: 2113571 - RNA, 23 nt, Human
cucggagccucauccgaggcagg

SEQ ID NO: 2113572 - RNA, 16 nt, Human
cucuacagaggccaug

SEQ ID NO: 2113573 - RNA, 14 nt, Human
cucuacagaggcca

SEQ ID NO: 2113574 - RNA, 21 nt, Human
cucuacagcuaaucagcauuc

SEQ ID NO: 2113575 - RNA, 19 nt, Human
cucuacagaggccaugggc

SEQ ID NO: 2113576 - RNA, 14 nt, Human
cucuacacugugaa

SEQ ID NO: 2113577 - RNA, 20 nt, Human
cucuaauucccauuuugcaa

SEQ ID NO: 2113578 - RNA, 18 nt, Human
cucuaauugaauuuucaa

SEQ ID NO: 2113579 - RNA, 13 nt, Human
cucuacagaggcc

SEQ ID NO: 2113580 - RNA, 14 nt, Human
cucuaaccuccuuu

SEQ ID NO: 2113581 - RNA, 15 nt, Human
cucuaaccacacagc

SEQ ID NO: 2113582 - RNA, 20 nt, Human
cucggaucaccgagaguagc

SEQ ID NO: 2113583 - RNA, 12 nt, Human
cucggcuccugg

SEQ ID NO: 2113584 - RNA, 17 nt, Human
cucggcuccuggacuca

SEQ ID NO: 2113585 - RNA, 18 nt, Human
cucggcuccuggacucau

SEQ ID NO: 2113586 - RNA, 12 nt, Human
cucuaauucuaa

SEQ ID NO: 2113587 - RNA, 13 nt, Human
cucuaauucuaac

SEQ ID NO: 2113588 - RNA, 18 nt, Human
cucuaauucuaaccagag

SEQ ID NO: 2113589 - RNA, 22 nt, Human
cucuaauucuaaccagagcaag

SEQ ID NO: 2113590 - RNA, 13 nt, Human
cucuacaaaaagc

SEQ ID NO: 2113591 - RNA, 15 nt, Human
cugaccaauauugua

SEQ ID NO: 2113592 - RNA, 18 nt, Human
cugaccaauauuguacag

SEQ ID NO: 2113593 - RNA, 19 nt, Human
cugaccaacaguuccuuca

SEQ ID NO: 2113594 - RNA, 16 nt, Human
cugaccaacauggaga

SEQ ID NO: 2113595 - RNA, 14 nt, Human
cugaccaagagaga

SEQ ID NO: 2113596 - RNA, 17 nt, Human
cugaccaagagagaaag

SEQ ID NO: 2113597 - RNA, 22 nt, Human
cugacauuguuggccaaagcca

SEQ ID NO: 2113598 - RNA, 15 nt, Human
cugacauuaacaguu

SEQ ID NO: 2113599 - RNA, 18 nt, Human
cugacauuaacaguuuuc

SEQ ID NO: 2113600 - RNA, 20 nt, Human
cugacauuaacaguuuucca

SEQ ID NO: 2113601 - RNA, 19 nt, Human
cugaccaauauuguacagu

SEQ ID NO: 2113602 - RNA, 20 nt, Human
cugaccaauauuguacaguu

SEQ ID NO: 2113603 - RNA, 21 nt, Human
cugaccaauauuguacaguuu

SEQ ID NO: 2113604 - RNA, 12 nt, Human
cugacccacugc

SEQ ID NO: 2113605 - RNA, 12 nt, Human
cugaccacacuu

SEQ ID NO: 2113606 - RNA, 13 nt, Human
cugaccacacuuc

SEQ ID NO: 2113607 - RNA, 16 nt, Human
cugaccacacuuccug

SEQ ID NO: 2113608 - RNA, 17 nt, Human
cugaccacacuuccugu

SEQ ID NO: 2113609 - RNA, 18 nt, Human
cugaccacacuuccuguc

SEQ ID NO: 2113610 - RNA, 19 nt, Human
cugaccacacuuccugucc

SEQ ID NO: 2113611 - RNA, 20 nt, Human
cugaccacacuuccugucca

SEQ ID NO: 2113612 - RNA, 14 nt, Human
cugacccacugcuu

SEQ ID NO: 2113613 - RNA, 13 nt, Human
cugacccacugcu

SEQ ID NO: 2113614 - RNA, 21 nt, Human
cugacccagccccuugagaaa

SEQ ID NO: 2113615 - RNA, 23 nt, Human
cugacuagaagggccaguccugc

SEQ ID NO: 2113616 - RNA, 21 nt, Human
cugacauuaacaguuuuccau

SEQ ID NO: 2113617 - RNA, 22 nt, Human
cugacuagaagggccaguccug

SEQ ID NO: 2113618 - RNA, 21 nt, Human
cugacaggcaaugcuggcugu

SEQ ID NO: 2113619 - RNA, 21 nt, Human
cugacauuguuggccaaagcc

SEQ ID NO: 2113620 - RNA, 14 nt, Human
cugacauuaacagu

SEQ ID NO: 2113621 - RNA, 21 nt, Human
cugacaucuuaguauuugcau

SEQ ID NO: 2113622 - RNA, 19 nt, Human
cugaagauacaugucuuuc

SEQ ID NO: 2113623 - RNA, 21 nt, Human
cugaagauacaugucuuucuc

SEQ ID NO: 2113624 - RNA, 14 nt, Human
cugaagauagaaga

SEQ ID NO: 2113625 - RNA, 15 nt, Human
cugaagauagaagaa

SEQ ID NO: 2113626 - RNA, 16 nt, Human
cugaagauagaagaaa

SEQ ID NO: 2113627 - RNA, 17 nt, Human
cugaagauagaagaaaa

SEQ ID NO: 2113628 - RNA, 21 nt, Human
cugaagauagaagaaaaaaga

SEQ ID NO: 2113629 - RNA, 22 nt, Human
cugaagauagaagaaaaaagaa

SEQ ID NO: 2113630 - RNA, 19 nt, Human
cugaagacucauucuucug

SEQ ID NO: 2113631 - RNA, 20 nt, Human
cugaagaguggguuucacaa

SEQ ID NO: 2113632 - RNA, 13 nt, Human
cugacagaggggg

SEQ ID NO: 2113633 - RNA, 12 nt, Human
cugacagccucc

SEQ ID NO: 2113634 - RNA, 13 nt, Human
cugacagccuccc

SEQ ID NO: 2113635 - RNA, 14 nt, Human
cugacagccuccca

SEQ ID NO: 2113636 - RNA, 17 nt, Human
cugacagccucccaccc

SEQ ID NO: 2113637 - RNA, 20 nt, Human
cugacagccucccaccccca

SEQ ID NO: 2113638 - RNA, 15 nt, Human
cugacuuugcucuuu

SEQ ID NO: 2113639 - RNA, 16 nt, Human
cugacuuugcucuuuc

SEQ ID NO: 2113640 - RNA, 22 nt, Human
cugagaacagaucuccaaagcu

SEQ ID NO: 2113641 - RNA, 23 nt, Human
cugagaacagaucuccaaagcuu

SEQ ID NO: 2113642 - RNA, 14 nt, Human
cugacuuugcucuu

SEQ ID NO: 2113643 - RNA, 17 nt, Human
cugagacaaauggaggc

SEQ ID NO: 2113644 - RNA, 18 nt, Human
cugagaagucaaacauuu

SEQ ID NO: 2113645 - RNA, 15 nt, Human
cugagaauagaagga

SEQ ID NO: 2113646 - RNA, 16 nt, Human
cugagaauagaaggaa

SEQ ID NO: 2113647 - RNA, 17 nt, Human
cugagaauagaaggaaa

SEQ ID NO: 2113648 - RNA, 18 nt, Human
cugagaauagaaggaaac

SEQ ID NO: 2113649 - RNA, 23 nt, Human
cugagaauagaaggaaacuagcu

SEQ ID NO: 2113650 - RNA, 24 nt, Human
cugagaauagaaggaaacuagcuu

SEQ ID NO: 2113651 - RNA, 23 nt, Human
cugagaagguccuuaaugauccg

SEQ ID NO: 2113652 - RNA, 16 nt, Human
cugagaaggggaggac

SEQ ID NO: 2113653 - RNA, 18 nt, Human
cugagaaggggaggaccu

SEQ ID NO: 2113654 - RNA, 21 nt, Human
cugagaaggggaggaccucug

SEQ ID NO: 2113655 - RNA, 22 nt, Human
cugagaaggggaggaccucugg

SEQ ID NO: 2113656 - RNA, 23 nt, Human
cugagaaggggaggaccucuggg

SEQ ID NO: 2113657 - RNA, 17 nt, Human
cugagaagguccuuaau

SEQ ID NO: 2113658 - RNA, 16 nt, Human
cugacuguuuucucuu

SEQ ID NO: 2113659 - RNA, 16 nt, Human
cugacucucugugacc

SEQ ID NO: 2113660 - RNA, 18 nt, Human
cugacucucugugaccug

SEQ ID NO: 2113661 - RNA, 15 nt, Human
cugacucaggcauca

SEQ ID NO: 2113662 - RNA, 21 nt, Human
cugacucuaggugcccuugga

SEQ ID NO: 2113663 - RNA, 13 nt, Human
cugacucucugug

SEQ ID NO: 2113664 - RNA, 14 nt, Human
cugacucucuguga

SEQ ID NO: 2113665 - RNA, 18 nt, Human
cugacucaacauguuacu

SEQ ID NO: 2113666 - RNA, 18 nt, Human
cugacuguuuucucuuga

SEQ ID NO: 2113667 - RNA, 21 nt, Human
cugacuuccccgcauuccagg

SEQ ID NO: 2113668 - RNA, 23 nt, Human
cugacuuccccgcauuccaggcu

SEQ ID NO: 2113669 - RNA, 12 nt, Human
cugagccuucag

SEQ ID NO: 2113670 - RNA, 17 nt, Human
cugagccuucagucuug

SEQ ID NO: 2113671 - RNA, 16 nt, Human
cugagcuccaguggaa

SEQ ID NO: 2113672 - RNA, 18 nt, Human
cugagcuccccaccaccc

SEQ ID NO: 2113673 - RNA, 17 nt, Human
cugagcucgguggaccc

SEQ ID NO: 2113674 - RNA, 18 nt, Human
cugagcucgguggaccca

SEQ ID NO: 2113675 - RNA, 20 nt, Human
cugagcucgguggacccagg

SEQ ID NO: 2113676 - RNA, 20 nt, Human
cugagcuccccaccacccca

SEQ ID NO: 2113677 - RNA, 14 nt, Human
cugagcuccucugg

SEQ ID NO: 2113678 - RNA, 15 nt, Human
cugagcuccucuggg

SEQ ID NO: 2113679 - RNA, 16 nt, Human
cugagcuccucugggc

SEQ ID NO: 2113680 - RNA, 17 nt, Human
cugagcuccucugggca

SEQ ID NO: 2113681 - RNA, 18 nt, Human
cugagcuccucugggcag

SEQ ID NO: 2113682 - RNA, 20 nt, Human
cugagcuccucugggcagga

SEQ ID NO: 2113683 - RNA, 23 nt, Human
cugagcuccucugggcaggaccu

SEQ ID NO: 2113684 - RNA, 14 nt, Human
cugagcccuggcag

SEQ ID NO: 2113685 - RNA, 15 nt, Human
cugagcccuggcagg

SEQ ID NO: 2113686 - RNA, 11 nt, Human
cugagcccugg

SEQ ID NO: 2113687 - RNA, 12 nt, Human
cugagcccuggc

SEQ ID NO: 2113688 - RNA, 13 nt, Human
cugagcccuggca

SEQ ID NO: 2113689 - RNA, 17 nt, Human
cugagccuacagaugaa

SEQ ID NO: 2113690 - RNA, 18 nt, Human
cugagccuacagaugaac

SEQ ID NO: 2113691 - RNA, 20 nt, Human
cugagacaaauggaggccug

SEQ ID NO: 2113692 - RNA, 16 nt, Human
cugagccagugucagg

SEQ ID NO: 2113693 - RNA, 22 nt, Human
cugagccagugucaggaggaag

SEQ ID NO: 2113694 - RNA, 15 nt, Human
cugaggaucagaaag

SEQ ID NO: 2113695 - RNA, 16 nt, Human
cugaggaucagaaagu

SEQ ID NO: 2113696 - RNA, 17 nt, Human
cugaggaucagaaagua

SEQ ID NO: 2113697 - RNA, 18 nt, Human
cugaggaucagaaaguaa

SEQ ID NO: 2113698 - RNA, 19 nt, Human
cugaggaucagaaaguaau

SEQ ID NO: 2113699 - RNA, 16 nt, Human
cugaggcaagagaauu

SEQ ID NO: 2113700 - RNA, 12 nt, Human
cugaggcaagag

SEQ ID NO: 2113701 - RNA, 13 nt, Human
cugaggcacgagc

SEQ ID NO: 2113702 - RNA, 13 nt, Human
cugaggcagacag

SEQ ID NO: 2113703 - RNA, 22 nt, Human
cugaggauuuaagggauggaaa

SEQ ID NO: 2113704 - RNA, 14 nt, Human
cugaggauuucaag

SEQ ID NO: 2113705 - RNA, 17 nt, Human
cugaggauuucaagccu

SEQ ID NO: 2113706 - RNA, 18 nt, Human
cugaggauuucaagccug

SEQ ID NO: 2113707 - RNA, 22 nt, Human
cugagcucgguggacccaggga

SEQ ID NO: 2113708 - RNA, 22 nt, Human
cugaggcagggaaguccccagg

SEQ ID NO: 2113709 - RNA, 14 nt, Human
cugaggcaggagaa

SEQ ID NO: 2113710 - RNA, 15 nt, Human
cugaggcaggagaau

SEQ ID NO: 2113711 - RNA, 16 nt, Human
cugaggcaggagaauc

SEQ ID NO: 2113712 - RNA, 15 nt, Human
cugaggcagaagaau

SEQ ID NO: 2113713 - RNA, 15 nt, Human
cugaggcaggaggau

SEQ ID NO: 2113714 - RNA, 14 nt, Human
cugaggcagggaag

SEQ ID NO: 2113715 - RNA, 16 nt, Human
cugaggcagggaaguc

SEQ ID NO: 2113716 - RNA, 20 nt, Human
cugaggcagggaagucccca

SEQ ID NO: 2113717 - RNA, 21 nt, Human
cugaggcagggaaguccccag

SEQ ID NO: 2113718 - RNA, 18 nt, Human
cugaggcagacagcagcu

SEQ ID NO: 2113719 - RNA, 22 nt, Human
cugaggcagacagcagcucagg

SEQ ID NO: 2113720 - RNA, 14 nt, Human
cugaggcagacagc

SEQ ID NO: 2113721 - RNA, 15 nt, Human
cugaggcagacagca

SEQ ID NO: 2113722 - RNA, 16 nt, Human
cugaggcagacagcag

SEQ ID NO: 2113723 - RNA, 17 nt, Human
cugaggcagacagcagc

SEQ ID NO: 2113724 - RNA, 19 nt, Human
cucuuggguucaagugauu

SEQ ID NO: 2113725 - RNA, 21 nt, Human
cucuuggguucaagcgauucu

SEQ ID NO: 2113726 - RNA, 19 nt, Human
cucuuggguucaagcgauu

SEQ ID NO: 2113727 - RNA, 20 nt, Human
cucuucuuccagguagcuga

SEQ ID NO: 2113728 - RNA, 15 nt, Human
cucuucuucuucaga

SEQ ID NO: 2113729 - RNA, 17 nt, Human
cucuucuucuucagaag

SEQ ID NO: 2113730 - RNA, 18 nt, Human
cucuucuucuucagaaga

SEQ ID NO: 2113731 - RNA, 12 nt, Human
cucuuccuaucc

SEQ ID NO: 2113732 - RNA, 15 nt, Human
cucuuccuaucccau

SEQ ID NO: 2113733 - RNA, 16 nt, Human
cucuuccuaucccauc

SEQ ID NO: 2113734 - RNA, 17 nt, Human
cucuuccuaucccaucc

SEQ ID NO: 2113735 - RNA, 18 nt, Human
cucuuccuaucccauccc

SEQ ID NO: 2113736 - RNA, 19 nt, Human
cucuuccuaucccauccca

SEQ ID NO: 2113737 - RNA, 19 nt, Human
cucuucuuaacuuaaauuu

SEQ ID NO: 2113738 - RNA, 19 nt, Human
cucuuccggagauguagca

SEQ ID NO: 2113739 - RNA, 22 nt, Human
cucuuccggagauguagcaaaa

SEQ ID NO: 2113740 - RNA, 23 nt, Human
cucuuccggagauguagcaaaac

SEQ ID NO: 2113741 - RNA, 13 nt, Human
cucuuucccuccc

SEQ ID NO: 2113742 - RNA, 17 nt, Human
cucuuucccucccuucc

SEQ ID NO: 2113743 - RNA, 21 nt, Human
cucuuuaagaguuaguuucuu

SEQ ID NO: 2113744 - RNA, 16 nt, Human
cucuuuaaucuucagu

SEQ ID NO: 2113745 - RNA, 23 nt, Human
cucuuuaaugucacaggcagguc

SEQ ID NO: 2113746 - RNA, 22 nt, Human
cucuuuaaugucacaggcaggu

SEQ ID NO: 2113747 - RNA, 21 nt, Human
cucuuuaaugucacaggcagg

SEQ ID NO: 2113748 - RNA, 20 nt, Human
cucuuuaaugucacaggcag

SEQ ID NO: 2113749 - RNA, 16 nt, Human
cucuuguuuucaguuu

SEQ ID NO: 2113750 - RNA, 16 nt, Human
cucuuuaacucaggac

SEQ ID NO: 2113751 - RNA, 18 nt, Human
cucuuuaacucaggacuc

SEQ ID NO: 2113752 - RNA, 21 nt, Human
cucuuuaacucaggacuccag

SEQ ID NO: 2113753 - RNA, 22 nt, Human
cucuuuaacucaggacuccagc

SEQ ID NO: 2113754 - RNA, 23 nt, Human
cucuuuaacucaggacuccagcc

SEQ ID NO: 2113755 - RNA, 18 nt, Human
cucuuuaaugucacaggc

SEQ ID NO: 2113756 - RNA, 17 nt, Human
cugaacggggagaaaag

SEQ ID NO: 2113757 - RNA, 14 nt, Human
cugaacagccaaau

SEQ ID NO: 2113758 - RNA, 17 nt, Human
cugaacaucacagcuua

SEQ ID NO: 2113759 - RNA, 23 nt, Human
cugaagacaccguucauucaggc

SEQ ID NO: 2113760 - RNA, 17 nt, Human
cugaacucgcuucucug

SEQ ID NO: 2113761 - RNA, 20 nt, Human
cugaacucgcuucucuguga

SEQ ID NO: 2113762 - RNA, 19 nt, Human
cugaacugauggguuucuc

SEQ ID NO: 2113763 - RNA, 20 nt, Human
cugaacacuuuuguuguaaa

SEQ ID NO: 2113764 - RNA, 16 nt, Human
cugaacacuuauugcu

SEQ ID NO: 2113765 - RNA, 20 nt, Human
cugaacacuuauugcuuuga

SEQ ID NO: 2113766 - RNA, 22 nt, Human
cugaacacuuauugcuuugaaa

SEQ ID NO: 2113767 - RNA, 19 nt, Human
cugaacacuuuuguuguaa

SEQ ID NO: 2113768 - RNA, 17 nt, Human
cugaaaugccuuacuuu

SEQ ID NO: 2113769 - RNA, 18 nt, Human
cugaaaugccuuacuuug

SEQ ID NO: 2113770 - RNA, 21 nt, Human
cugaaaugccuuacuuuguau

SEQ ID NO: 2113771 - RNA, 23 nt, Human
cugaaaugccuuacuuuguauga

SEQ ID NO: 2113772 - RNA, 19 nt, Human
cugaaaucucagaauuccu

SEQ ID NO: 2113773 - RNA, 15 nt, Human
cugaaagcccugagc

SEQ ID NO: 2113774 - RNA, 14 nt, Human
cugaaagccagcug

SEQ ID NO: 2113775 - RNA, 21 nt, Human
cugaaagccacguuccuuacu

SEQ ID NO: 2113776 - RNA, 15 nt, Human
cucuuugagauagaa

SEQ ID NO: 2113777 - RNA, 23 nt, Human
cucuuugagauagaagaacugca

SEQ ID NO: 2113778 - RNA, 13 nt, Human
cucuuugaaacaa

SEQ ID NO: 2113779 - RNA, 22 nt, Human
cucuuugaaauagucuguguga

SEQ ID NO: 2113780 - RNA, 23 nt, Human
cucuuugacaauuccuagauaaa

SEQ ID NO: 2113781 - RNA, 22 nt, Human
cucuuuccuguuguuguuaaug

SEQ ID NO: 2113782 - RNA, 19 nt, Human
cugaaauauacacacagca

SEQ ID NO: 2113783 - RNA, 18 nt, Human
cugaaauauacacacagc

SEQ ID NO: 2113784 - RNA, 23 nt, Human
cugaaagcccugagcuuucugcu

SEQ ID NO: 2113785 - RNA, 23 nt, Human
cugaaagccagcugccgaccaga

SEQ ID NO: 2113786 - RNA, 16 nt, Human
cugaaagcccugagcu

SEQ ID NO: 2113787 - RNA, 17 nt, Human
cugaaagcccugagcuu

SEQ ID NO: 2113788 - RNA, 18 nt, Human
cugaaagcccugagcuuu

SEQ ID NO: 2113789 - RNA, 19 nt, Human
cugaaagcccugagcuuuc

SEQ ID NO: 2113790 - RNA, 13 nt, Human
cucuggcuggcua

SEQ ID NO: 2113791 - RNA, 23 nt, Human
cucuggcuggcuaacuggaagca

SEQ ID NO: 2113792 - RNA, 19 nt, Human
cucugggaaauaagagaga

SEQ ID NO: 2113793 - RNA, 22 nt, Human
cucugucugaguaagaaacaga

SEQ ID NO: 2113794 - RNA, 19 nt, Human
cucugucucaaaaauaaau

SEQ ID NO: 2113795 - RNA, 14 nt, Human
cucugucuguccgu

SEQ ID NO: 2113796 - RNA, 23 nt, Human
cucugucuucuuugcccacaaug

SEQ ID NO: 2113797 - RNA, 14 nt, Human
cucugugacugaug

SEQ ID NO: 2113798 - RNA, 20 nt, Human
cucugugcacuuauuuauga

SEQ ID NO: 2113799 - RNA, 13 nt, Human
cucuuagaaaaac

SEQ ID NO: 2113800 - RNA, 15 nt, Human
cucuuagaaaaacca

SEQ ID NO: 2113801 - RNA, 19 nt, Human
cucuuacccuucugugccc

SEQ ID NO: 2113802 - RNA, 20 nt, Human
cucuuacccuucugugccca

SEQ ID NO: 2113803 - RNA, 22 nt, Human
cucuuacccuucugugcccagc

SEQ ID NO: 2113804 - RNA, 23 nt, Human
cucuuacccuucugugcccagcu

SEQ ID NO: 2113805 - RNA, 15 nt, Human
cucugugucaggugg

SEQ ID NO: 2113806 - RNA, 14 nt, Human
cucuguucaguaac

SEQ ID NO: 2113807 - RNA, 21 nt, Human
cucuguucaguaacagggccu

SEQ ID NO: 2113808 - RNA, 19 nt, Human
cucugugucagguggggca

SEQ ID NO: 2113809 - RNA, 22 nt, Human
cucuggacaggcauguucucug

SEQ ID NO: 2113810 - RNA, 16 nt, Human
cucuggacaggcaugu

SEQ ID NO: 2113811 - RNA, 24 nt, Human
cucugcuuugacugagcagacugg

SEQ ID NO: 2113812 - RNA, 13 nt, Human
cucuggaggccuc

SEQ ID NO: 2113813 - RNA, 15 nt, Human
cucuggaggccucug

SEQ ID NO: 2113814 - RNA, 16 nt, Human
cucuggaggccucugg

SEQ ID NO: 2113815 - RNA, 17 nt, Human
cucuggaggccucuggg

SEQ ID NO: 2113816 - RNA, 20 nt, Human
cucuggaggccucugggccu

SEQ ID NO: 2113817 - RNA, 22 nt, Human
cucuggaggccucugggccucc

SEQ ID NO: 2113818 - RNA, 20 nt, Human
cucuggcuagaggccagccc

SEQ ID NO: 2113819 - RNA, 21 nt, Human
cucuggcuagaggccagcccc

SEQ ID NO: 2113820 - RNA, 22 nt, Human
cucuggcuagaggccagcccca

SEQ ID NO: 2113821 - RNA, 15 nt, Human
cucuggcucacagac

SEQ ID NO: 2113822 - RNA, 18 nt, Human
cucuggcucacagacugg

SEQ ID NO: 2113823 - RNA, 22 nt, Human
cucuggcucacagacuggagac

SEQ ID NO: 2113824 - RNA, 11 nt, Human
cucuggccucu

SEQ ID NO: 2113825 - RNA, 15 nt, Human
cucuggccucuguca

SEQ ID NO: 2113826 - RNA, 19 nt, Human
cucuggcuagaggccagcc

SEQ ID NO: 2113827 - RNA, 18 nt, Human
cucuggcccugccuucuu

SEQ ID NO: 2113828 - RNA, 15 nt, Human
cucuggcccugccuu

SEQ ID NO: 2113829 - RNA, 15 nt, Human
cucuggacaggcaug

SEQ ID NO: 2113830 - RNA, 19 nt, Human
cucugcuuugacugagcag

SEQ ID NO: 2113831 - RNA, 13 nt, Human
cucugcuugccga

SEQ ID NO: 2113832 - RNA, 18 nt, Human
cucugcuugccgaaacug

SEQ ID NO: 2113833 - RNA, 20 nt, Human
cucugcuugccgaaacugga

SEQ ID NO: 2113834 - RNA, 21 nt, Human
cucugcuugccgaaacuggaa

SEQ ID NO: 2113835 - RNA, 22 nt, Human
cucugcuugccgaaacuggaag

SEQ ID NO: 2113836 - RNA, 23 nt, Human
cucugcuugccgaaacuggaagu

SEQ ID NO: 2113837 - RNA, 16 nt, Human
cucugcuggucuucaa

SEQ ID NO: 2113838 - RNA, 17 nt, Human
cucugcuggucuucaau

SEQ ID NO: 2113839 - RNA, 18 nt, Human
cucugcuggucuucaauu

SEQ ID NO: 2113840 - RNA, 23 nt, Human
cucugcuguacauauuugagacu

SEQ ID NO: 2113841 - RNA, 13 nt, Human
cucugcuucagcu

SEQ ID NO: 2113842 - RNA, 15 nt, Human
cucugcuucagcuug

SEQ ID NO: 2113843 - RNA, 18 nt, Human
cucugccugaaccuucca

SEQ ID NO: 2113844 - RNA, 14 nt, Human
cucugccugcauuc

SEQ ID NO: 2113845 - RNA, 16 nt, Human
cucugccugcauucug

SEQ ID NO: 2113846 - RNA, 22 nt, Human
cucugccugcauucugccgugu

SEQ ID NO: 2113847 - RNA, 22 nt, Human
cucugccugaagucacacagug

SEQ ID NO: 2113848 - RNA, 21 nt, Human
cucugccugaagucacacagu

SEQ ID NO: 2113849 - RNA, 21 nt, Human
cucucucuucugcuccacccu

SEQ ID NO: 2113850 - RNA, 14 nt, Human
cucucuccuccugc

SEQ ID NO: 2113851 - RNA, 17 nt, Human
cucucuccuccugccca

SEQ ID NO: 2113852 - RNA, 15 nt, Human
cucucuccuguacuu

SEQ ID NO: 2113853 - RNA, 13 nt, Human
cucucuccucccu

SEQ ID NO: 2113854 - RNA, 20 nt, Human
cucucuccuguacuuuuucc

SEQ ID NO: 2113855 - RNA, 20 nt, Human
cucucuccuccugcccaccu

SEQ ID NO: 2113856 - RNA, 14 nt, Human
cucucuccugucca

SEQ ID NO: 2113857 - RNA, 19 nt, Human
cucucuccuguccaaccua

SEQ ID NO: 2113858 - RNA, 15 nt, Human
cucucuccuguccaa

SEQ ID NO: 2113859 - RNA, 13 nt, Human
cucucucuguugu

SEQ ID NO: 2113860 - RNA, 12 nt, Human
cucucucuucug

SEQ ID NO: 2113861 - RNA, 18 nt, Human
cucucucuucugcuccac

SEQ ID NO: 2113862 - RNA, 20 nt, Human
cuguaugucucgugguagga

SEQ ID NO: 2113863 - RNA, 20 nt, Human
cuguaugucaacuuuaugca

SEQ ID NO: 2113864 - RNA, 19 nt, Human
cuguaucccaugagccuca

SEQ ID NO: 2113865 - RNA, 18 nt, Human
cuguaucccaugagccuc

SEQ ID NO: 2113866 - RNA, 17 nt, Human
cuguauuacauaaauaa

SEQ ID NO: 2113867 - RNA, 18 nt, Human
cuguauuugaaucagccu

SEQ ID NO: 2113868 - RNA, 18 nt, Human
cuguauuuaugugugagg

SEQ ID NO: 2113869 - RNA, 23 nt, Human
cuguauuuaugugugaggagcug

SEQ ID NO: 2113870 - RNA, 15 nt, Human
cuguauauacaauaa

SEQ ID NO: 2113871 - RNA, 18 nt, Human
cuguauauacaauaacau

SEQ ID NO: 2113872 - RNA, 19 nt, Human
cuguauauacaauaacaua

SEQ ID NO: 2113873 - RNA, 23 nt, Human
cuguauauacaauaacauaauuu

SEQ ID NO: 2113874 - RNA, 15 nt, Human
cuguaucccaugagc

SEQ ID NO: 2113875 - RNA, 14 nt, Human
cuguaucccaugag

SEQ ID NO: 2113876 - RNA, 15 nt, Human
cuguauaguacuggc

SEQ ID NO: 2113877 - RNA, 16 nt, Human
cuguccaaccuaaccc

SEQ ID NO: 2113878 - RNA, 20 nt, Human
cuguccaaccuaaccccuuu

SEQ ID NO: 2113879 - RNA, 23 nt, Human
cuguccaaccuaaccccuuuccu

SEQ ID NO: 2113880 - RNA, 19 nt, Human
cuguccaaaggaggcuggc

SEQ ID NO: 2113881 - RNA, 20 nt, Human
cuguccaaaggaggcuggca

SEQ ID NO: 2113882 - RNA, 21 nt, Human
cuguccaaaggaggcuggcag

SEQ ID NO: 2113883 - RNA, 22 nt, Human
cuguccaaaggaggcuggcagg

SEQ ID NO: 2113884 - RNA, 20 nt, Human
cuguccaaacugccuaagcc

SEQ ID NO: 2113885 - RNA, 15 nt, Human
cuguccaaacugccu

SEQ ID NO: 2113886 - RNA, 17 nt, Human
cuguccaaaggaggcug

SEQ ID NO: 2113887 - RNA, 18 nt, Human
cuguccaaaggaggcugg

SEQ ID NO: 2113888 - RNA, 19 nt, Human
cuguccaggcacugcugcc

SEQ ID NO: 2113889 - RNA, 18 nt, Human
cuguccaggcacugcugc

SEQ ID NO: 2113890 - RNA, 22 nt, Human
cuguccaggcacugcugcccag

SEQ ID NO: 2113891 - RNA, 21 nt, Human
cuguccaggcacugcugccca

SEQ ID NO: 2113892 - RNA, 20 nt, Human
cuguccaggcacugcugccc

SEQ ID NO: 2113893 - RNA, 17 nt, Human
cuguccaggcacugcug

SEQ ID NO: 2113894 - RNA, 13 nt, Human
cugucccaccuca

SEQ ID NO: 2113895 - RNA, 22 nt, Human
cugucccagugccgagaaggaa

SEQ ID NO: 2113896 - RNA, 17 nt, Human
cugucucaguuucacuu

SEQ ID NO: 2113897 - RNA, 20 nt, Human
cugucucauccccagggguc

SEQ ID NO: 2113898 - RNA, 20 nt, Human
cugucuccucucucuguaau

SEQ ID NO: 2113899 - RNA, 12 nt, Human
cugucuccagac

SEQ ID NO: 2113900 - RNA, 13 nt, Human
cugucucaucccc

SEQ ID NO: 2113901 - RNA, 14 nt, Human
cugucucaucccca

SEQ ID NO: 2113902 - RNA, 15 nt, Human
cugucucauccccag

SEQ ID NO: 2113903 - RNA, 16 nt, Human
cugucucauccccagg

SEQ ID NO: 2113904 - RNA, 17 nt, Human
cugucucauccccaggg

SEQ ID NO: 2113905 - RNA, 19 nt, Human
cugucucauccccaggggu

SEQ ID NO: 2113906 - RNA, 21 nt, Human
cugucucauccccaggggucc

SEQ ID NO: 2113907 - RNA, 21 nt, Human
cugucucaagagggcacuggu

SEQ ID NO: 2113908 - RNA, 20 nt, Human
cugucucaagagggcacugg

SEQ ID NO: 2113909 - RNA, 19 nt, Human
cugucucaagagggcacug

SEQ ID NO: 2113910 - RNA, 18 nt, Human
cugucucaagagggcacu

SEQ ID NO: 2113911 - RNA, 21 nt, Human
cuguccuacucugugucaggu

SEQ ID NO: 2113912 - RNA, 15 nt, Human
cuguccuaggccaca

SEQ ID NO: 2113913 - RNA, 22 nt, Human
cugucucaaaaaaagaaaaaga

SEQ ID NO: 2113914 - RNA, 20 nt, Human
cuguccuacucugugucagg

SEQ ID NO: 2113915 - RNA, 18 nt, Human
cuguccuacucuguguca

SEQ ID NO: 2113916 - RNA, 17 nt, Human
cuguccuacucuguguc

SEQ ID NO: 2113917 - RNA, 16 nt, Human
cuguccuacucugugu

SEQ ID NO: 2113918 - RNA, 21 nt, Human
cugucccuucucuuaauuuaa

SEQ ID NO: 2113919 - RNA, 19 nt, Human
cugucccuucccccauaag

SEQ ID NO: 2113920 - RNA, 16 nt, Human
cugucccuucucuuaa

SEQ ID NO: 2113921 - RNA, 21 nt, Human
cugucccuaguaaaaauacaa

SEQ ID NO: 2113922 - RNA, 19 nt, Human
cugucccuaguaaaaauac

SEQ ID NO: 2113923 - RNA, 17 nt, Human
cugucccuaggucagcu

SEQ ID NO: 2113924 - RNA, 22 nt, Human
cugucccccugagaucagaguc

SEQ ID NO: 2113925 - RNA, 23 nt, Human
cugucccccugagaucagagucc

SEQ ID NO: 2113926 - RNA, 12 nt, Human
cugucccucacu

SEQ ID NO: 2113927 - RNA, 13 nt, Human
cugucccucacug

SEQ ID NO: 2113928 - RNA, 22 nt, Human
cuggucacugccauggaggcac

SEQ ID NO: 2113929 - RNA, 14 nt, Human
cuggucacugccau

SEQ ID NO: 2113930 - RNA, 19 nt, Human
cugguaguuaguagcaugu

SEQ ID NO: 2113931 - RNA, 21 nt, Human
cugguaguuaguagcauguug

SEQ ID NO: 2113932 - RNA, 23 nt, Human
cuggucacaggacucugccuccu

SEQ ID NO: 2113933 - RNA, 22 nt, Human
cuggucacaggacucugccucc

SEQ ID NO: 2113934 - RNA, 21 nt, Human
cuggucacaggacucugccuc

SEQ ID NO: 2113935 - RNA, 20 nt, Human
cuggucacaggacucugccu

SEQ ID NO: 2113936 - RNA, 19 nt, Human
cuggucacaggacucugcc

SEQ ID NO: 2113937 - RNA, 20 nt, Human
cugguaggaauagcauguca

SEQ ID NO: 2113938 - RNA, 22 nt, Human
cugguaggaauagcaugucacu

SEQ ID NO: 2113939 - RNA, 23 nt, Human
cugguaggaauagcaugucacua

SEQ ID NO: 2113940 - RNA, 14 nt, Human
cugguagauagaaa

SEQ ID NO: 2113941 - RNA, 15 nt, Human
cugguagauagaaau

SEQ ID NO: 2113942 - RNA, 23 nt, Human
cugguagauagaaauaaauagcu

SEQ ID NO: 2113943 - RNA, 20 nt, Human
cugguagacacaggauagau

SEQ ID NO: 2113944 - RNA, 21 nt, Human
cugguagacacaggauagaua

SEQ ID NO: 2113945 - RNA, 14 nt, Human
cugguagagaugga

SEQ ID NO: 2113946 - RNA, 21 nt, Human
cugguccagggaagcuggccg

SEQ ID NO: 2113947 - RNA, 22 nt, Human
cugguccagggaagcuggccga

SEQ ID NO: 2113948 - RNA, 15 nt, Human
cugguccagggaagc

SEQ ID NO: 2113949 - RNA, 17 nt, Human
cugguccagggaagcug

SEQ ID NO: 2113950 - RNA, 13 nt, Human
cuggucccacuca

SEQ ID NO: 2113951 - RNA, 16 nt, Human
cugguccaugauggag

SEQ ID NO: 2113952 - RNA, 17 nt, Human
cugguccaugauggagu

SEQ ID NO: 2113953 - RNA, 19 nt, Human
cugguccaugauggaguca

SEQ ID NO: 2113954 - RNA, 14 nt, Human
cuggucccacucag

SEQ ID NO: 2113955 - RNA, 23 nt, Human
cuggucucaaacucuugaccuca

SEQ ID NO: 2113956 - RNA, 14 nt, Human
cuggguacuugugg

SEQ ID NO: 2113957 - RNA, 16 nt, Human
cuggguacuuguggac

SEQ ID NO: 2113958 - RNA, 18 nt, Human
cuggguacuuguggacac

SEQ ID NO: 2113959 - RNA, 19 nt, Human
cuggguacuuguggacaca

SEQ ID NO: 2113960 - RNA, 15 nt, Human
cuggguuggagggug

SEQ ID NO: 2113961 - RNA, 18 nt, Human
cuggguuucucuguauag

SEQ ID NO: 2113962 - RNA, 22 nt, Human
cugggucucgcuuuguugccca

SEQ ID NO: 2113963 - RNA, 15 nt, Human
cugggucugugucuc

SEQ ID NO: 2113964 - RNA, 16 nt, Human
cugggucugugucucu

SEQ ID NO: 2113965 - RNA, 17 nt, Human
cugggucugugucucuu

SEQ ID NO: 2113966 - RNA, 20 nt, Human
cuguacagauugcugcuucu

SEQ ID NO: 2113967 - RNA, 22 nt, Human
cuguacagauugcugcuucugc

SEQ ID NO: 2113968 - RNA, 22 nt, Human
cuguaauaaacucauuucuagc

SEQ ID NO: 2113969 - RNA, 12 nt, Human
cugguggcagcu

SEQ ID NO: 2113970 - RNA, 21 nt, Human
cuggucucaaacuccugggcu

SEQ ID NO: 2113971 - RNA, 22 nt, Human
cuggucuccucuuuguuuuguu

SEQ ID NO: 2113972 - RNA, 17 nt, Human
cuggucuccugccccca

SEQ ID NO: 2113973 - RNA, 18 nt, Human
cuggucuccugcccccac

SEQ ID NO: 2113974 - RNA, 20 nt, Human
cuggucuccugcccccacac

SEQ ID NO: 2113975 - RNA, 22 nt, Human
cuggucuccugcccccacaccu

SEQ ID NO: 2113976 - RNA, 22 nt, Human
cugguuagguuaggacuugccc

SEQ ID NO: 2113977 - RNA, 20 nt, Human
cugguucaggguuggccccu

SEQ ID NO: 2113978 - RNA, 17 nt, Human
cuguaagcucuuugaaa

SEQ ID NO: 2113979 - RNA, 20 nt, Human
cuguaagcucuuugaaacaa

SEQ ID NO: 2113980 - RNA, 15 nt, Human
cuggcauggcaccug

SEQ ID NO: 2113981 - RNA, 17 nt, Human
cuggcauggcaccuguc

SEQ ID NO: 2113982 - RNA, 19 nt, Human
cuggcauggcaccugucgc

SEQ ID NO: 2113983 - RNA, 14 nt, Human
cuggcaucuuugcu

SEQ ID NO: 2113984 - RNA, 22 nt, Human
cuggcaucuuugcuauggggac

SEQ ID NO: 2113985 - RNA, 23 nt, Human
cuggcaucuuugcuauggggaca

SEQ ID NO: 2113986 - RNA, 17 nt, Human
cuggcaucugacacaaa

SEQ ID NO: 2113987 - RNA, 18 nt, Human
cuggcaucugacacaaaa

SEQ ID NO: 2113988 - RNA, 19 nt, Human
cuggcaucugacacaaaaa

SEQ ID NO: 2113989 - RNA, 22 nt, Human
cuggcacuauaauguaagcucu

SEQ ID NO: 2113990 - RNA, 20 nt, Human
cuggcaauaguguguucuga

SEQ ID NO: 2113991 - RNA, 17 nt, Human
cuggcaccgccuucucu

SEQ ID NO: 2113992 - RNA, 21 nt, Human
cuggcacgguggcucaggccu

SEQ ID NO: 2113993 - RNA, 15 nt, Human
cuggcacuauaaugu

SEQ ID NO: 2113994 - RNA, 16 nt, Human
cuggcacuauaaugua

SEQ ID NO: 2113995 - RNA, 16 nt, Human
cuggcacagggcagug

SEQ ID NO: 2113996 - RNA, 15 nt, Human
cuggcacagggcagu

SEQ ID NO: 2113997 - RNA, 15 nt, Human
cuggcaauagugugu

SEQ ID NO: 2113998 - RNA, 19 nt, Human
cuggcaauaguguguucug

SEQ ID NO: 2113999 - RNA, 18 nt, Human
cuggcacccggccccugc

SEQ ID NO: 2114000 - RNA, 17 nt, Human
cuggcacccggccccug

SEQ ID NO: 2114001 - RNA, 16 nt, Human
cuggcacccggccccu

SEQ ID NO: 2114002 - RNA, 23 nt, Human
cuggaaucaagaugucagacugg

SEQ ID NO: 2114003 - RNA, 14 nt, Human
cuggcaagaaugug

SEQ ID NO: 2114004 - RNA, 23 nt, Human
cuggccucaagugauucuccugc

SEQ ID NO: 2114005 - RNA, 19 nt, Human
cuggccccaugucucucag

SEQ ID NO: 2114006 - RNA, 21 nt, Human
cuggccccaugucucucagaa

SEQ ID NO: 2114007 - RNA, 13 nt, Human
cuggcccccacug

SEQ ID NO: 2114008 - RNA, 14 nt, Human
cuggcccccacugg

SEQ ID NO: 2114009 - RNA, 15 nt, Human
cuggcccccacuggc

SEQ ID NO: 2114010 - RNA, 19 nt, Human
cuggcccccacuggcugug

SEQ ID NO: 2114011 - RNA, 21 nt, Human
cuggcccccacuggcuguggg

SEQ ID NO: 2114012 - RNA, 22 nt, Human
cuggcccccacuggcugugggc

SEQ ID NO: 2114013 - RNA, 23 nt, Human
cuggcccccacuggcugugggcu

SEQ ID NO: 2114014 - RNA, 15 nt, Human
cuggcccccagcugu

SEQ ID NO: 2114015 - RNA, 16 nt, Human
cuggccccaugucucu

SEQ ID NO: 2114016 - RNA, 21 nt, Human
cuggccucagacucauacaga

SEQ ID NO: 2114017 - RNA, 12 nt, Human
cuggccucagac

SEQ ID NO: 2114018 - RNA, 13 nt, Human
cuggccaggcaga

SEQ ID NO: 2114019 - RNA, 14 nt, Human
cuggccaggcagau

SEQ ID NO: 2114020 - RNA, 21 nt, Human
cuggccaggcagaucugugcc

SEQ ID NO: 2114021 - RNA, 22 nt, Human
cuggccaggcagaucugugccc

SEQ ID NO: 2114022 - RNA, 12 nt, Human
cuggccaggagc

SEQ ID NO: 2114023 - RNA, 13 nt, Human
cuggccaggagcu

SEQ ID NO: 2114024 - RNA, 15 nt, Human
cuggccaggagcucu

SEQ ID NO: 2114025 - RNA, 17 nt, Human
cuggccaggagcucuuc

SEQ ID NO: 2114026 - RNA, 20 nt, Human
cuggccaggagcucuucagg

SEQ ID NO: 2114027 - RNA, 22 nt, Human
cuggccaggagcucuucaggcc

SEQ ID NO: 2114028 - RNA, 12 nt, Human
cuggccaggaug

SEQ ID NO: 2114029 - RNA, 23 nt, Human
cuggccaggauggaggggugguc

SEQ ID NO: 2114030 - RNA, 11 nt, Human
cuggccaggca

SEQ ID NO: 2114031 - RNA, 15 nt, Human
cuggccugcugggcu

SEQ ID NO: 2114032 - RNA, 19 nt, Human
cuggccugcugggcucucc

SEQ ID NO: 2114033 - RNA, 20 nt, Human
cuggccugcugggcucucca

SEQ ID NO: 2114034 - RNA, 12 nt, Human
cuggccugagga

SEQ ID NO: 2114035 - RNA, 13 nt, Human
cuggccugaggag

SEQ ID NO: 2114036 - RNA, 16 nt, Human
cuggccugaggagcag

SEQ ID NO: 2114037 - RNA, 21 nt, Human
cuggccugaggagcagcaguu

SEQ ID NO: 2114038 - RNA, 21 nt, Human
cugggaggaagcagguugagg

SEQ ID NO: 2114039 - RNA, 19 nt, Human
cugggaggucaaggcugca

SEQ ID NO: 2114040 - RNA, 21 nt, Human
cugggaggucaaggcugcagu

SEQ ID NO: 2114041 - RNA, 15 nt, Human
cugggaggcagaggu

SEQ ID NO: 2114042 - RNA, 23 nt, Human
cugggaggcagagguugcaguga

SEQ ID NO: 2114043 - RNA, 22 nt, Human
cugggcccagaggcacagccgg

SEQ ID NO: 2114044 - RNA, 24 nt, Human
cugggccccaaacgggcugcccug

SEQ ID NO: 2114045 - RNA, 13 nt, Human
cugggccccacca

SEQ ID NO: 2114046 - RNA, 14 nt, Human
cugggccccaccac

SEQ ID NO: 2114047 - RNA, 16 nt, Human
cugggccccaccaccu

SEQ ID NO: 2114048 - RNA, 18 nt, Human
cugggccccaccaccuag

SEQ ID NO: 2114049 - RNA, 17 nt, Human
cugggauuacaggugug

SEQ ID NO: 2114050 - RNA, 17 nt, Human
cugggauccuaagggcu

SEQ ID NO: 2114051 - RNA, 20 nt, Human
cugggauuacaggugugaac

SEQ ID NO: 2114052 - RNA, 13 nt, Human
cugggauccuaag

SEQ ID NO: 2114053 - RNA, 16 nt, Human
cugggaucugacugca

SEQ ID NO: 2114054 - RNA, 17 nt, Human
cugggaucugacugcac

SEQ ID NO: 2114055 - RNA, 19 nt, Human
cuggcugucaguaugacau

SEQ ID NO: 2114056 - RNA, 12 nt, Human
cuggcugugggc

SEQ ID NO: 2114057 - RNA, 13 nt, Human
cuggcugugggcu

SEQ ID NO: 2114058 - RNA, 14 nt, Human
cuggcugugggcuc

SEQ ID NO: 2114059 - RNA, 15 nt, Human
cuggcugugggcucc

SEQ ID NO: 2114060 - RNA, 16 nt, Human
cuggcugugggcuccc

SEQ ID NO: 2114061 - RNA, 17 nt, Human
cuggcugugggcucccu

SEQ ID NO: 2114062 - RNA, 18 nt, Human
cuggcugugggcucccuu

SEQ ID NO: 2114063 - RNA, 19 nt, Human
cuggcugugggcucccuuc

SEQ ID NO: 2114064 - RNA, 21 nt, Human
cuggcugugggcucccuuccu

SEQ ID NO: 2114065 - RNA, 22 nt, Human
cuggcugugggcucccuuccuc

SEQ ID NO: 2114066 - RNA, 17 nt, Human
cuggcuguuggcugggg

SEQ ID NO: 2114067 - RNA, 16 nt, Human
cuggcuguuggcuggg

SEQ ID NO: 2114068 - RNA, 18 nt, Human
cuggcugguaagggccaa

SEQ ID NO: 2114069 - RNA, 19 nt, Human
cuggcugguaagggccaag

SEQ ID NO: 2114070 - RNA, 15 nt, Human
cuggcuggcugcagu

SEQ ID NO: 2114071 - RNA, 17 nt, Human
cuggcuggcugcaguga

SEQ ID NO: 2114072 - RNA, 20 nt, Human
cuggcgacaguuuuccuucu

SEQ ID NO: 2114073 - RNA, 19 nt, Human
cuggcgacaguuuuccuuc

SEQ ID NO: 2114074 - RNA, 13 nt, Human
cuggccuuacacc

SEQ ID NO: 2114075 - RNA, 14 nt, Human
cuggccuuacaccu

SEQ ID NO: 2114076 - RNA, 12 nt, Human
cuggccuguucu

SEQ ID NO: 2114077 - RNA, 18 nt, Human
cuggcuguuggcuggggg

SEQ ID NO: 2114078 - RNA, 20 nt, Human
cuggcuuguaacuccaccaa

SEQ ID NO: 2114079 - RNA, 23 nt, Human
cuggcuugggacuaaaugcccug

SEQ ID NO: 2114080 - RNA, 17 nt, Human
cuggcuuguaacuccac

SEQ ID NO: 2114081 - RNA, 19 nt, Human
cuggcuuguaacuccacca

SEQ ID NO: 2114082 - RNA, 14 nt, Human
cuggcuuugcccaa

SEQ ID NO: 2114083 - RNA, 15 nt, Human
cuggcuuugcccaac

SEQ ID NO: 2114084 - RNA, 16 nt, Human
cuggcuuugcccaacc

SEQ ID NO: 2114085 - RNA, 17 nt, Human
cuggcuuugcccaaccu

SEQ ID NO: 2114086 - RNA, 19 nt, Human
cuggcuuugcccaaccuca

SEQ ID NO: 2114087 - RNA, 21 nt, Human
cuggcuuugcccaaccucagc

SEQ ID NO: 2114088 - RNA, 22 nt, Human
cuggcuuugcccaaccucagca

SEQ ID NO: 2114089 - RNA, 23 nt, Human
cuggcuuuucacugcuggcugcc

SEQ ID NO: 2114090 - RNA, 14 nt, Human
cuggcuuuguccca

SEQ ID NO: 2114091 - RNA, 15 nt, Human
cuggcuuugucccac

SEQ ID NO: 2114092 - RNA, 19 nt, Human
cuggcuuugucccacagcu

SEQ ID NO: 2114093 - RNA, 20 nt, Human
cuggcuuugucccacagcuu

SEQ ID NO: 2114094 - RNA, 21 nt, Human
cuggcuuugucccacagcuug

SEQ ID NO: 2114095 - RNA, 20 nt, Human
cugggaaagggauuuucagc

SEQ ID NO: 2114096 - RNA, 12 nt, Human
cugggagaaccu

SEQ ID NO: 2114097 - RNA, 14 nt, Human
cugggagaaccuca

SEQ ID NO: 2114098 - RNA, 15 nt, Human
cugggagaaccucag

SEQ ID NO: 2114099 - RNA, 16 nt, Human
cugggagaaccucagg

SEQ ID NO: 2114100 - RNA, 17 nt, Human
cugggagaggcagagug

SEQ ID NO: 2114101 - RNA, 23 nt, Human
cugggagaggcagagugccccac

SEQ ID NO: 2114102 - RNA, 24 nt, Human
cugggagaggcagagugccccacc

SEQ ID NO: 2114103 - RNA, 17 nt, Human
cugggagaaccucaggc

SEQ ID NO: 2114104 - RNA, 18 nt, Human
cugggagaaccucaggcu

SEQ ID NO: 2114105 - RNA, 21 nt, Human
cugccugcaguacuuuaccuc

SEQ ID NO: 2114106 - RNA, 20 nt, Human
cugccugcaguacuuuaccu

SEQ ID NO: 2114107 - RNA, 15 nt, Human
cugccugcaccccug

SEQ ID NO: 2114108 - RNA, 19 nt, Human
cugccugaagucacacagu

SEQ ID NO: 2114109 - RNA, 12 nt, Human
cugccugcccac

SEQ ID NO: 2114110 - RNA, 16 nt, Human
cugccugaagucacac

SEQ ID NO: 2114111 - RNA, 18 nt, Human
cugccugaagucacacag

SEQ ID NO: 2114112 - RNA, 18 nt, Human
cugcccugcccuagcucc

SEQ ID NO: 2114113 - RNA, 16 nt, Human
cugcgcccuuccccag

SEQ ID NO: 2114114 - RNA, 13 nt, Human
cugcgcccuuccc

SEQ ID NO: 2114115 - RNA, 14 nt, Human
cugcgcccuucccc

SEQ ID NO: 2114116 - RNA, 23 nt, Human
cugcgguccacccaggagccccg

SEQ ID NO: 2114117 - RNA, 19 nt, Human
cugccuggaagagcagccc

SEQ ID NO: 2114118 - RNA, 15 nt, Human
cugcucuccgaccag

SEQ ID NO: 2114119 - RNA, 17 nt, Human
cugcucuaagcacacgg

SEQ ID NO: 2114120 - RNA, 20 nt, Human
cugcuccucuccccagcaag

SEQ ID NO: 2114121 - RNA, 19 nt, Human
cugcuccucuccccagcaa

SEQ ID NO: 2114122 - RNA, 23 nt, Human
cugcucccccacccccuccccag

SEQ ID NO: 2114123 - RNA, 21 nt, Human
cugcucccccacccccucccc

SEQ ID NO: 2114124 - RNA, 22 nt, Human
cugcucccccacccccucccca

SEQ ID NO: 2114125 - RNA, 23 nt, Human
cugcuccucuccccagcaaguga

SEQ ID NO: 2114126 - RNA, 12 nt, Human
cugcucccccac

SEQ ID NO: 2114127 - RNA, 13 nt, Human
cugcucccccacc

SEQ ID NO: 2114128 - RNA, 14 nt, Human
cugcucccccaccc

SEQ ID NO: 2114129 - RNA, 17 nt, Human
cugcucccccacccccu

SEQ ID NO: 2114130 - RNA, 11 nt, Human
cugcucugccc

SEQ ID NO: 2114131 - RNA, 12 nt, Human
cugcucugccca

SEQ ID NO: 2114132 - RNA, 13 nt, Human
cugcucugcccag

SEQ ID NO: 2114133 - RNA, 14 nt, Human
cugcucugcccaga

SEQ ID NO: 2114134 - RNA, 15 nt, Human
cugcucugcccagag

SEQ ID NO: 2114135 - RNA, 17 nt, Human
cugcucugcccagagcu

SEQ ID NO: 2114136 - RNA, 18 nt, Human
cugcucugcccagagcug

SEQ ID NO: 2114137 - RNA, 21 nt, Human
cugcucugcccagagcugggu

SEQ ID NO: 2114138 - RNA, 23 nt, Human
cugcucugcccagagcuggguga

SEQ ID NO: 2114139 - RNA, 21 nt, Human
cugcucuuaugccauuuguuu

SEQ ID NO: 2114140 - RNA, 12 nt, Human
cugcucugguua

SEQ ID NO: 2114141 - RNA, 14 nt, Human
cugcugccucccca

SEQ ID NO: 2114142 - RNA, 21 nt, Human
cugcugccgccucccagccug

SEQ ID NO: 2114143 - RNA, 15 nt, Human
cugcugccuccccaa

SEQ ID NO: 2114144 - RNA, 19 nt, Human
cugcugccuccccaacccu

SEQ ID NO: 2114145 - RNA, 14 nt, Human
cugcugcugcugug

SEQ ID NO: 2114146 - RNA, 15 nt, Human
cugcugcugcugcug

SEQ ID NO: 2114147 - RNA, 19 nt, Human
cugcugggacuggccaggu

SEQ ID NO: 2114148 - RNA, 12 nt, Human
cugcuggcugcc

SEQ ID NO: 2114149 - RNA, 14 nt, Human
cugcuggcuugcag

SEQ ID NO: 2114150 - RNA, 16 nt, Human
cugcuggcuugcagug

SEQ ID NO: 2114151 - RNA, 17 nt, Human
cugcugggacuggccag

SEQ ID NO: 2114152 - RNA, 15 nt, Human
cugcuggcugccuua

SEQ ID NO: 2114153 - RNA, 14 nt, Human
cugcuggcugccuu

SEQ ID NO: 2114154 - RNA, 13 nt, Human
cugcuggcugccu

SEQ ID NO: 2114155 - RNA, 14 nt, Human
cugcugggcucucc

SEQ ID NO: 2114156 - RNA, 15 nt, Human
cugcugggcucucca

SEQ ID NO: 2114157 - RNA, 19 nt, Human
cugcuggguuuuccuccgg

SEQ ID NO: 2114158 - RNA, 13 nt, Human
cugcuugaggcaa

SEQ ID NO: 2114159 - RNA, 20 nt, Human
cugcuugaggcaacucaucu

SEQ ID NO: 2114160 - RNA, 21 nt, Human
cugcuugaggcaacucaucuu

SEQ ID NO: 2114161 - RNA, 13 nt, Human
cugcuucugcacc

SEQ ID NO: 2114162 - RNA, 14 nt, Human
cugcuucugcaccu

SEQ ID NO: 2114163 - RNA, 20 nt, Human
cugcuucugcaccuuaucuu

SEQ ID NO: 2114164 - RNA, 16 nt, Human
cugcuucuuaacccca

SEQ ID NO: 2114165 - RNA, 18 nt, Human
cugcuucuaccaacugga

SEQ ID NO: 2114166 - RNA, 19 nt, Human
cugcuucuaccaacuggaa

SEQ ID NO: 2114167 - RNA, 20 nt, Human
cugcuucuaccaacuggaag

SEQ ID NO: 2114168 - RNA, 21 nt, Human
cugcuucuaccaacuggaagc

SEQ ID NO: 2114169 - RNA, 15 nt, Human
cugcugucagucugc

SEQ ID NO: 2114170 - RNA, 16 nt, Human
cugcugucagucugcu

SEQ ID NO: 2114171 - RNA, 14 nt, Human
cugcuggucuucaa

SEQ ID NO: 2114172 - RNA, 17 nt, Human
cugcuggucuucaauua

SEQ ID NO: 2114173 - RNA, 23 nt, Human
cugcuuuaaaaaaaauccuucua

SEQ ID NO: 2114174 - RNA, 21 nt, Human
cugcuuuaauugugaauugau

SEQ ID NO: 2114175 - RNA, 23 nt, Human
cugcuuuagaauguuuuccuucu

SEQ ID NO: 2114176 - RNA, 20 nt, Human
cugcuuugacugagcagacu

SEQ ID NO: 2114177 - RNA, 21 nt, Human
cugcuuugacugagcagacug

SEQ ID NO: 2114178 - RNA, 17 nt, Human
cugcuuugggcugcccu

SEQ ID NO: 2114179 - RNA, 15 nt, Human
cugcuuuuggucugu

SEQ ID NO: 2114180 - RNA, 13 nt, Human
cugcuuuggaaau

SEQ ID NO: 2114181 - RNA, 23 nt, Human
cugcuuugacugagcagacuggu

SEQ ID NO: 2114182 - RNA, 16 nt, Human
cugcuuugggcugccc

SEQ ID NO: 2114183 - RNA, 22 nt, Human
cugcuuugacugagcagacugg

SEQ ID NO: 2114184 - RNA, 17 nt, Human
cugcuuuuggucugugu

SEQ ID NO: 2114185 - RNA, 19 nt, Human
cugcuuuugucuaugggac

SEQ ID NO: 2114186 - RNA, 16 nt, Human
cuggaagcccucucug

SEQ ID NO: 2114187 - RNA, 12 nt, Human
cuggaagcugug

SEQ ID NO: 2114188 - RNA, 16 nt, Human
cuggaagcuguguccu

SEQ ID NO: 2114189 - RNA, 22 nt, Human
cuggaagcuguguccuugcacc

SEQ ID NO: 2114190 - RNA, 17 nt, Human
cuggaaggggcccgugg

SEQ ID NO: 2114191 - RNA, 19 nt, Human
cuggaaggggcccguggga

SEQ ID NO: 2114192 - RNA, 18 nt, Human
cugcuugguccuugauuu

SEQ ID NO: 2114193 - RNA, 17 nt, Human
cugcuugucccugccca

SEQ ID NO: 2114194 - RNA, 21 nt, Human
cugcuugucccugcccagaau

SEQ ID NO: 2114195 - RNA, 22 nt, Human
cugcuugaggcaacucaucuua

SEQ ID NO: 2114196 - RNA, 20 nt, Human
cugcuugcuugcuuuuuaau

SEQ ID NO: 2114197 - RNA, 18 nt, Human
cugcuugccgaaacugga

SEQ ID NO: 2114198 - RNA, 19 nt, Human
cugcuugccgaaacuggaa

SEQ ID NO: 2114199 - RNA, 20 nt, Human
cugcuugccgaaacuggaag

SEQ ID NO: 2114200 - RNA, 21 nt, Human
cugcuugccgaaacuggaagu

SEQ ID NO: 2114201 - RNA, 23 nt, Human
cugcuugccgaaacuggaaguua

SEQ ID NO: 2114202 - RNA, 20 nt, Human
cugcuuggaccucgugcuuu

SEQ ID NO: 2114203 - RNA, 22 nt, Human
cugcuuggaccucgugcuuuaa

SEQ ID NO: 2114204 - RNA, 11 nt, Human
cugccaccucc

SEQ ID NO: 2114205 - RNA, 15 nt, Human
cugcagugagcugug

SEQ ID NO: 2114206 - RNA, 21 nt, Human
cugccacccuggggagaaagu

SEQ ID NO: 2114207 - RNA, 14 nt, Human
cugccacccugggg

SEQ ID NO: 2114208 - RNA, 12 nt, Human
cugccacccugg

SEQ ID NO: 2114209 - RNA, 13 nt, Human
cugccaccucccc

SEQ ID NO: 2114210 - RNA, 12 nt, Human
cugccaccuccc

SEQ ID NO: 2114211 - RNA, 14 nt, Human
cugccaccuccccu

SEQ ID NO: 2114212 - RNA, 22 nt, Human
cugccaccuccccuauccaccc

SEQ ID NO: 2114213 - RNA, 22 nt, Human
cugccagacggcacccacccag

SEQ ID NO: 2114214 - RNA, 11 nt, Human
cugccagagaa

SEQ ID NO: 2114215 - RNA, 15 nt, Human
cugcauaugaaagga

SEQ ID NO: 2114216 - RNA, 16 nt, Human
cugcauaccaaccugg

SEQ ID NO: 2114217 - RNA, 14 nt, Human
cugcauagaaggag

SEQ ID NO: 2114218 - RNA, 16 nt, Human
cugcauagaaggagga

SEQ ID NO: 2114219 - RNA, 20 nt, Human
cugcauagaaggaggagagg

SEQ ID NO: 2114220 - RNA, 15 nt, Human
cugcauaccaaccug

SEQ ID NO: 2114221 - RNA, 14 nt, Human
cugcauacaaucug

SEQ ID NO: 2114222 - RNA, 21 nt, Human
cugcauaguauuccauugugu

SEQ ID NO: 2114223 - RNA, 20 nt, Human
cugccagagaagcaucggag

SEQ ID NO: 2114224 - RNA, 13 nt, Human
cugccagagaagc

SEQ ID NO: 2114225 - RNA, 22 nt, Human
cugccauggcgugucccucucg

SEQ ID NO: 2114226 - RNA, 21 nt, Human
cugccauggaggcacacagcu

SEQ ID NO: 2114227 - RNA, 23 nt, Human
cugccauggaggcacacagcugc

SEQ ID NO: 2114228 - RNA, 14 nt, Human
cugccauggcgugu

SEQ ID NO: 2114229 - RNA, 21 nt, Human
cugccauggcgugucccucuc

SEQ ID NO: 2114230 - RNA, 21 nt, Human
cugccauccagguucagcuug

SEQ ID NO: 2114231 - RNA, 15 nt, Human
cugccauccucccaa

SEQ ID NO: 2114232 - RNA, 20 nt, Human
cugcccaggccccugccacc

SEQ ID NO: 2114233 - RNA, 19 nt, Human
cugcccaggccccugccac

SEQ ID NO: 2114234 - RNA, 18 nt, Human
cugcccaggccccugcca

SEQ ID NO: 2114235 - RNA, 16 nt, Human
cugcccaggccccugc

SEQ ID NO: 2114236 - RNA, 17 nt, Human
cugcccaggccugccug

SEQ ID NO: 2114237 - RNA, 12 nt, Human
cugcccacccgu

SEQ ID NO: 2114238 - RNA, 14 nt, Human
cugccccaacuccu

SEQ ID NO: 2114239 - RNA, 21 nt, Human
cugccccaacuccuggaagcu

SEQ ID NO: 2114240 - RNA, 16 nt, Human
cugccccaacuccugg

SEQ ID NO: 2114241 - RNA, 17 nt, Human
cugccccaacuccugga

SEQ ID NO: 2114242 - RNA, 18 nt, Human
cugccccaacuccuggaa

SEQ ID NO: 2114243 - RNA, 20 nt, Human
cugccccaacuccuggaagc

SEQ ID NO: 2114244 - RNA, 15 nt, Human
cugcccaggccccug

SEQ ID NO: 2114245 - RNA, 14 nt, Human
cugcccaggccccu

SEQ ID NO: 2114246 - RNA, 15 nt, Human
cugccauuucugaga

SEQ ID NO: 2114247 - RNA, 17 nt, Human
cugcccacauuggaccc

SEQ ID NO: 2114248 - RNA, 23 nt, Human
cugcccggggcagcugccagaga

SEQ ID NO: 2114249 - RNA, 13 nt, Human
cugcccggggcag

SEQ ID NO: 2114250 - RNA, 15 nt, Human
cugcccggggcagcu

SEQ ID NO: 2114251 - RNA, 16 nt, Human
cugcccggggcagcug

SEQ ID NO: 2114252 - RNA, 19 nt, Human
cugcccggggcagcugcca

SEQ ID NO: 2114253 - RNA, 20 nt, Human
cugcccggggcagcugccag

SEQ ID NO: 2114254 - RNA, 21 nt, Human
cugcccggggcagcugccaga

SEQ ID NO: 2114255 - RNA, 22 nt, Human
cugcccggggcagcugccagag

SEQ ID NO: 2114256 - RNA, 15 nt, Human
cugcccgucuucagc

SEQ ID NO: 2114257 - RNA, 16 nt, Human
cugcccgucuucagcc

SEQ ID NO: 2114258 - RNA, 17 nt, Human
cugcccgucuucagccu

SEQ ID NO: 2114259 - RNA, 18 nt, Human
cugcccgucuucagccua

SEQ ID NO: 2114260 - RNA, 21 nt, Human
cugcccgucuucagccuagcc

SEQ ID NO: 2114261 - RNA, 16 nt, Human
cugcccuacucacucu

SEQ ID NO: 2114262 - RNA, 15 nt, Human
cugcccuagagcaca

SEQ ID NO: 2114263 - RNA, 13 nt, Human
cugccccagcucu

SEQ ID NO: 2114264 - RNA, 15 nt, Human
cugccccagcucugg

SEQ ID NO: 2114265 - RNA, 13 nt, Human
cugcccgagcugg

SEQ ID NO: 2114266 - RNA, 18 nt, Human
cugccccuucuacacucu

SEQ ID NO: 2114267 - RNA, 19 nt, Human
cugccccuucuacacucuc

SEQ ID NO: 2114268 - RNA, 20 nt, Human
cugccccuucuacacucucc

SEQ ID NO: 2114269 - RNA, 21 nt, Human
cugccccuucuacacucuccu

SEQ ID NO: 2114270 - RNA, 22 nt, Human
cugccccuucuacacucuccug

SEQ ID NO: 2114271 - RNA, 23 nt, Human
cugccccuucuacacucuccugg

SEQ ID NO: 2114272 - RNA, 24 nt, Human
cugccccuucuacacucuccuggg

SEQ ID NO: 2114273 - RNA, 14 nt, Human
cugccccagcucug

SEQ ID NO: 2114274 - RNA, 16 nt, Human
cugccccuggcucuga

SEQ ID NO: 2114275 - RNA, 13 nt, Human
cugcccggcaggg

SEQ ID NO: 2114276 - RNA, 20 nt, Human
cugcccggcaggguccuaga

SEQ ID NO: 2114277 - RNA, 21 nt, Human
cugcccgagcuggugcauuac

SEQ ID NO: 2114278 - RNA, 14 nt, Human
cugcccgagcuggu

SEQ ID NO: 2114279 - RNA, 15 nt, Human
cugcccgagcuggug

SEQ ID NO: 2114280 - RNA, 16 nt, Human
cugcccgagcuggugc

SEQ ID NO: 2114281 - RNA, 17 nt, Human
cugcccgagcuggugca

SEQ ID NO: 2114282 - RNA, 19 nt, Human
cugcaguuugagacaggag

SEQ ID NO: 2114283 - RNA, 21 nt, Human
cugcaguuugagacaggagac

SEQ ID NO: 2114284 - RNA, 22 nt, Human
cugcagucaucuugaccaagca

SEQ ID NO: 2114285 - RNA, 14 nt, Human
cugcagucacagcu

SEQ ID NO: 2114286 - RNA, 13 nt, Human
cugcagucacagc

SEQ ID NO: 2114287 - RNA, 21 nt, Human
cugcagucagucaugauggca

SEQ ID NO: 2114288 - RNA, 23 nt, Human
cugcagaggggaaaccaguguag

SEQ ID NO: 2114289 - RNA, 13 nt, Human
cugcagcagagcc

SEQ ID NO: 2114290 - RNA, 14 nt, Human
cugcagcagagccu

SEQ ID NO: 2114291 - RNA, 15 nt, Human
cugcagcagagccug

SEQ ID NO: 2114292 - RNA, 11 nt, Human
cugcagcauga

SEQ ID NO: 2114293 - RNA, 17 nt, Human
cugcagcaugaccugug

SEQ ID NO: 2114294 - RNA, 22 nt, Human
cugcagcaugaccugugaccag

SEQ ID NO: 2114295 - RNA, 19 nt, Human
cugcagcaugaccugugac

SEQ ID NO: 2114296 - RNA, 12 nt, Human
cugcagccagcc

SEQ ID NO: 2114297 - RNA, 14 nt, Human
cugcagccagccca

SEQ ID NO: 2114298 - RNA, 15 nt, Human
cugcagccagcccag

SEQ ID NO: 2114299 - RNA, 16 nt, Human
cugcagccagcccagc

SEQ ID NO: 2114300 - RNA, 17 nt, Human
cugcagccagcccagcc

SEQ ID NO: 2114301 - RNA, 18 nt, Human
cugcagccagcccagccc

SEQ ID NO: 2114302 - RNA, 22 nt, Human
cugcagccagcccagcccagcu

SEQ ID NO: 2114303 - RNA, 23 nt, Human
cugcagccagcccagcccagcug

SEQ ID NO: 2114304 - RNA, 15 nt, Human
cugcaccgggccaca

SEQ ID NO: 2114305 - RNA, 14 nt, Human
cugcaccgggccac

SEQ ID NO: 2114306 - RNA, 20 nt, Human
cugcaccgggccacagagaa

SEQ ID NO: 2114307 - RNA, 18 nt, Human
cugcaccgggccacagag

SEQ ID NO: 2114308 - RNA, 20 nt, Human
cugcacuccagccuggguga

SEQ ID NO: 2114309 - RNA, 21 nt, Human
cugcagaggggaaaccagugu

SEQ ID NO: 2114310 - RNA, 21 nt, Human
cugcacuggaguccagucucu

SEQ ID NO: 2114311 - RNA, 19 nt, Human
cuugcacguauuuuaauag

SEQ ID NO: 2114312 - RNA, 19 nt, Human
cuugcacgcccauguguga

SEQ ID NO: 2114313 - RNA, 13 nt, Human
cuugcaccugcau

SEQ ID NO: 2114314 - RNA, 14 nt, Human
cuugcaccugcauc

SEQ ID NO: 2114315 - RNA, 12 nt, Human
cuugcaccugca

SEQ ID NO: 2114316 - RNA, 22 nt, Human
cuugcaagaaucagugcaaaga

SEQ ID NO: 2114317 - RNA, 18 nt, Human
cuugcaagaaucagugca

SEQ ID NO: 2114318 - RNA, 14 nt, Human
cuugcaauggcagc

SEQ ID NO: 2114319 - RNA, 14 nt, Human
cuugcaacacacag

SEQ ID NO: 2114320 - RNA, 15 nt, Human
cuugcaacacacaga

SEQ ID NO: 2114321 - RNA, 17 nt, Human
cuugcaacacacagaca

SEQ ID NO: 2114322 - RNA, 19 nt, Human
cuugcaacacacagacaca

SEQ ID NO: 2114323 - RNA, 14 nt, Human
cuugcaagaaucag

SEQ ID NO: 2114324 - RNA, 16 nt, Human
cuugagugcucaguag

SEQ ID NO: 2114325 - RNA, 21 nt, Human
cuugcauaauaagcuaaagag

SEQ ID NO: 2114326 - RNA, 22 nt, Human
cuugcauaauaagcuaaagagg

SEQ ID NO: 2114327 - RNA, 20 nt, Human
cuugcauaauaagcuaaaga

SEQ ID NO: 2114328 - RNA, 22 nt, Human
cuugcaguucagcaccacccua

SEQ ID NO: 2114329 - RNA, 20 nt, Human
cuugcaguggaagauacuug

SEQ ID NO: 2114330 - RNA, 18 nt, Human
cuugcaguucagcaccac

SEQ ID NO: 2114331 - RNA, 18 nt, Human
cuugcagacucuacagag

SEQ ID NO: 2114332 - RNA, 16 nt, Human
cuugagcauguuacug

SEQ ID NO: 2114333 - RNA, 22 nt, Human
cuugagcauguuacugacagag

SEQ ID NO: 2114334 - RNA, 20 nt, Human
cuugagaguagaugguuuga

SEQ ID NO: 2114335 - RNA, 15 nt, Human
cuugagaugucuucu

SEQ ID NO: 2114336 - RNA, 14 nt, Human
cuugagagggugga

SEQ ID NO: 2114337 - RNA, 13 nt, Human
cuugagcucagga

SEQ ID NO: 2114338 - RNA, 12 nt, Human
cuugagcccagg

SEQ ID NO: 2114339 - RNA, 18 nt, Human
cuugaggucuuuugacau

SEQ ID NO: 2114340 - RNA, 22 nt, Human
cuugaggucuuuugacaugugg

SEQ ID NO: 2114341 - RNA, 23 nt, Human
cuugaggucuuuugacaugugga

SEQ ID NO: 2114342 - RNA, 14 nt, Human
cuugaggucuuuug

SEQ ID NO: 2114343 - RNA, 17 nt, Human
cuugaggucuuuugaca

SEQ ID NO: 2114344 - RNA, 14 nt, Human
cuugaggaguguga

SEQ ID NO: 2114345 - RNA, 22 nt, Human
cuugaggagugugagaaucaaa

SEQ ID NO: 2114346 - RNA, 18 nt, Human
cuugagggcaagagccac

SEQ ID NO: 2114347 - RNA, 16 nt, Human
cuugagggagcuuagc

SEQ ID NO: 2114348 - RNA, 14 nt, Human
cuugaggccaggag

SEQ ID NO: 2114349 - RNA, 18 nt, Human
cuugaacuccuggccuca

SEQ ID NO: 2114350 - RNA, 17 nt, Human
cuugaacuccuggccuc

SEQ ID NO: 2114351 - RNA, 15 nt, Human
cuugaacuccuggcc

SEQ ID NO: 2114352 - RNA, 14 nt, Human
cuugaacuccuggc

SEQ ID NO: 2114353 - RNA, 20 nt, Human
cuugaacuggguacuugugg

SEQ ID NO: 2114354 - RNA, 18 nt, Human
cuugaacuggguacuugu

SEQ ID NO: 2114355 - RNA, 23 nt, Human
cuugaccagcagaucccagcuca

SEQ ID NO: 2114356 - RNA, 16 nt, Human
cuugaacuggguacuu

SEQ ID NO: 2114357 - RNA, 19 nt, Human
cuugaacuccuggccucaa

SEQ ID NO: 2114358 - RNA, 12 nt, Human
cuucuuuccauu

SEQ ID NO: 2114359 - RNA, 20 nt, Human
cugucugacaaccucuuggu

SEQ ID NO: 2114360 - RNA, 21 nt, Human
cugucucuuaaaaaaauaaaa

SEQ ID NO: 2114361 - RNA, 23 nt, Human
cuucuuuuuauuuucuuuuguaa

SEQ ID NO: 2114362 - RNA, 22 nt, Human
cuugaaaugaaaguauaacuga

SEQ ID NO: 2114363 - RNA, 23 nt, Human
cuucuuuuaagaugugucuucaa

SEQ ID NO: 2114364 - RNA, 13 nt, Human
cuucuuuuacuca

SEQ ID NO: 2114365 - RNA, 15 nt, Human
cuucuuuuuauuuuc

SEQ ID NO: 2114366 - RNA, 20 nt, Human
cuucuuuuuauuuucuuuug

SEQ ID NO: 2114367 - RNA, 22 nt, Human
cuuguauuaaguuguuaauaaa

SEQ ID NO: 2114368 - RNA, 23 nt, Human
cuuguauuaaguuguuaauaaaa

SEQ ID NO: 2114369 - RNA, 13 nt, Human
cuuguauuaaguu

SEQ ID NO: 2114370 - RNA, 17 nt, Human
cuuguauuaaguuguua

SEQ ID NO: 2114371 - RNA, 18 nt, Human
cuuguauccucugguucu

SEQ ID NO: 2114372 - RNA, 17 nt, Human
cuuguauuaaagacaga

SEQ ID NO: 2114373 - RNA, 14 nt, Human
cuuguaacuccacc

SEQ ID NO: 2114374 - RNA, 17 nt, Human
cuuguaacaagaaaaca

SEQ ID NO: 2114375 - RNA, 21 nt, Human
cuuguaugaaagauggcugug

SEQ ID NO: 2114376 - RNA, 19 nt, Human
cuuguaagagcuauacagu

SEQ ID NO: 2114377 - RNA, 20 nt, Human
cuuguaagagcuauacaguu

SEQ ID NO: 2114378 - RNA, 12 nt, Human
cuuguaagauuu

SEQ ID NO: 2114379 - RNA, 15 nt, Human
cuuguaagauuuuga

SEQ ID NO: 2114380 - RNA, 16 nt, Human
cuuguaagauuuugaa

SEQ ID NO: 2114381 - RNA, 18 nt, Human
cuuguaagauuuugaaaa

SEQ ID NO: 2114382 - RNA, 15 nt, Human
cuuguaacuccacca

SEQ ID NO: 2114383 - RNA, 17 nt, Human
cuuguaacuccaccaac

SEQ ID NO: 2114384 - RNA, 21 nt, Human
cuuguaacuccaccaacccau

SEQ ID NO: 2114385 - RNA, 13 nt, Human
cuugucagagcug

SEQ ID NO: 2114386 - RNA, 21 nt, Human
cuugucagagcugggaggggu

SEQ ID NO: 2114387 - RNA, 14 nt, Human
cuugucagagcugg

SEQ ID NO: 2114388 - RNA, 15 nt, Human
cuugucagagcuggg

SEQ ID NO: 2114389 - RNA, 18 nt, Human
cuuguggacacagcucuu

SEQ ID NO: 2114390 - RNA, 17 nt, Human
cuuguggacacagcucu

SEQ ID NO: 2114391 - RNA, 12 nt, Human
cuuguauuuaaa

SEQ ID NO: 2114392 - RNA, 18 nt, Human
cuuguauuuaaauauuaa

SEQ ID NO: 2114393 - RNA, 20 nt, Human
cuuguauuuaaauauuaaau

SEQ ID NO: 2114394 - RNA, 18 nt, Human
cuuguaaaaauuaaaagu

SEQ ID NO: 2114395 - RNA, 13 nt, Human
cuuggggccaucg

SEQ ID NO: 2114396 - RNA, 18 nt, Human
cuuguaaagacuguagaa

SEQ ID NO: 2114397 - RNA, 21 nt, Human
cuuguaaauagcucagguguc

SEQ ID NO: 2114398 - RNA, 14 nt, Human
cuuggggcaggcag

SEQ ID NO: 2114399 - RNA, 15 nt, Human
cuuggggcaggcagu

SEQ ID NO: 2114400 - RNA, 17 nt, Human
cuuggcuguagaaggag

SEQ ID NO: 2114401 - RNA, 22 nt, Human
cuuggcuguagaaggagacaga

SEQ ID NO: 2114402 - RNA, 20 nt, Human
cuuggcuucaggggaguccc

SEQ ID NO: 2114403 - RNA, 24 nt, Human
cuuggcucacugcaacuucugccu

SEQ ID NO: 2114404 - RNA, 21 nt, Human
cuuggcucaauccucuaagcu

SEQ ID NO: 2114405 - RNA, 23 nt, Human
cuuggcucaaguccucuuuucug

SEQ ID NO: 2114406 - RNA, 14 nt, Human
cuuggcguggagcc

SEQ ID NO: 2114407 - RNA, 17 nt, Human
cuuggcguggagccagg

SEQ ID NO: 2114408 - RNA, 18 nt, Human
cuuggcguggagccaggg

SEQ ID NO: 2114409 - RNA, 21 nt, Human
cuuggcguggagccagggagc

SEQ ID NO: 2114410 - RNA, 13 nt, Human
cuuggcugcaggg

SEQ ID NO: 2114411 - RNA, 12 nt, Human
cuuggcugcagg

SEQ ID NO: 2114412 - RNA, 18 nt, Human
cuuggaccucgugcuuua

SEQ ID NO: 2114413 - RNA, 22 nt, Human
cuuggaccucgugcuuuaagug

SEQ ID NO: 2114414 - RNA, 21 nt, Human
cuuggagccccagugccaagc

SEQ ID NO: 2114415 - RNA, 15 nt, Human
cuuggauguauaugu

SEQ ID NO: 2114416 - RNA, 23 nt, Human
cuuggauaaugcuguugccucau

SEQ ID NO: 2114417 - RNA, 18 nt, Human
cuuggauaaugcuguugc

SEQ ID NO: 2114418 - RNA, 22 nt, Human
cuuggauaaugcuguugccuca

SEQ ID NO: 2114419 - RNA, 14 nt, Human
cuugcugcuauuuu

SEQ ID NO: 2114420 - RNA, 19 nt, Human
cuugcugcuauuuuacugu

SEQ ID NO: 2114421 - RNA, 18 nt, Human
cuugcauugaauauauua

SEQ ID NO: 2114422 - RNA, 13 nt, Human
cuugcuugcuuuu

SEQ ID NO: 2114423 - RNA, 14 nt, Human
cuugcuguccuagg

SEQ ID NO: 2114424 - RNA, 21 nt, Human
cuugcuuucuuuguuuggcug

SEQ ID NO: 2114425 - RNA, 15 nt, Human
cuugcuguccuaggc

SEQ ID NO: 2114426 - RNA, 15 nt, Human
cuuugaaauuguuua

SEQ ID NO: 2114427 - RNA, 21 nt, Human
cuuugaaauagucugugugaa

SEQ ID NO: 2114428 - RNA, 19 nt, Human
cuuugaaauagucugugug

SEQ ID NO: 2114429 - RNA, 16 nt, Human
cuuugaaaugaauaua

SEQ ID NO: 2114430 - RNA, 17 nt, Human
cuuucuuucuaacucca

SEQ ID NO: 2114431 - RNA, 13 nt, Human
cuuucuuuggugc

SEQ ID NO: 2114432 - RNA, 15 nt, Human
cuuucuuuggugccu

SEQ ID NO: 2114433 - RNA, 18 nt, Human
cuuucuuuggugccuuuc

SEQ ID NO: 2114434 - RNA, 20 nt, Human
cuuucuuuggugccuuuccu

SEQ ID NO: 2114435 - RNA, 21 nt, Human
cuuucuuuggugccuuuccug

SEQ ID NO: 2114436 - RNA, 23 nt, Human
cuuucuuuggugccuuuccuguu

SEQ ID NO: 2114437 - RNA, 18 nt, Human
cuuucuuuguuuggcugg

SEQ ID NO: 2114438 - RNA, 21 nt, Human
cuuucuuuucgccguggcugc

SEQ ID NO: 2114439 - RNA, 16 nt, Human
cuuucuguugccacaa

SEQ ID NO: 2114440 - RNA, 15 nt, Human
cuuugcagacaggca

SEQ ID NO: 2114441 - RNA, 14 nt, Human
cuuugcagacaggc

SEQ ID NO: 2114442 - RNA, 16 nt, Human
cuuugaaugcggccca

SEQ ID NO: 2114443 - RNA, 14 nt, Human
cuuugcccacaaug

SEQ ID NO: 2114444 - RNA, 15 nt, Human
cuuugcccaaccuca

SEQ ID NO: 2114445 - RNA, 17 nt, Human
cuuugcccaaccucagc

SEQ ID NO: 2114446 - RNA, 18 nt, Human
cuuugcccaaccucagca

SEQ ID NO: 2114447 - RNA, 21 nt, Human
cuuugcccaaccucagcaacc

SEQ ID NO: 2114448 - RNA, 15 nt, Human
cuuugcagaaacaga

SEQ ID NO: 2114449 - RNA, 23 nt, Human
cuuugcagaaacagauuugguga

SEQ ID NO: 2114450 - RNA, 18 nt, Human
cuuugccagaaagcauaa

SEQ ID NO: 2114451 - RNA, 23 nt, Human
cuuugccccaccuuuauuaaaau

SEQ ID NO: 2114452 - RNA, 16 nt, Human
cuuucaauaacgaagu

SEQ ID NO: 2114453 - RNA, 16 nt, Human
cuuucauccccaccuu

SEQ ID NO: 2114454 - RNA, 17 nt, Human
cuuucauccccaccuug

SEQ ID NO: 2114455 - RNA, 20 nt, Human
cuuucauuaaagcauuuacu

SEQ ID NO: 2114456 - RNA, 14 nt, Human
cuuucaaauuucac

SEQ ID NO: 2114457 - RNA, 15 nt, Human
cuuucaaauuucaca

SEQ ID NO: 2114458 - RNA, 15 nt, Human
cuuucaaagaaggaa

SEQ ID NO: 2114459 - RNA, 18 nt, Human
cuuucaaagaaggaauuc

SEQ ID NO: 2114460 - RNA, 21 nt, Human
cuuucaaagaaggaauucuag

SEQ ID NO: 2114461 - RNA, 21 nt, Human
cuuucaaauugagagaaugga

SEQ ID NO: 2114462 - RNA, 21 nt, Human
cuuguggacacagcucuucuc

SEQ ID NO: 2114463 - RNA, 13 nt, Human
cuugugucugcgu

SEQ ID NO: 2114464 - RNA, 18 nt, Human
cuuuauuuuuuaaguauu

SEQ ID NO: 2114465 - RNA, 21 nt, Human
cuuuauuuuuuaaguauuuau

SEQ ID NO: 2114466 - RNA, 22 nt, Human
cuuuauuuuuuaaguauuuaua

SEQ ID NO: 2114467 - RNA, 23 nt, Human
cuuuauuuuuuaaguauuuauau

SEQ ID NO: 2114468 - RNA, 19 nt, Human
cuugugugugggcugugag

SEQ ID NO: 2114469 - RNA, 21 nt, Human
cuugugugugggcugugagug

SEQ ID NO: 2114470 - RNA, 20 nt, Human
cuugugugugggcugugagu

SEQ ID NO: 2114471 - RNA, 13 nt, Human
cuuuauuuucugg

SEQ ID NO: 2114472 - RNA, 18 nt, Human
cuuuauuuucugguagau

SEQ ID NO: 2114473 - RNA, 15 nt, Human
cuuucauugccagug

SEQ ID NO: 2114474 - RNA, 18 nt, Human
cuuucauugccagugucu

SEQ ID NO: 2114475 - RNA, 16 nt, Human
cuuuccaaaugcccag

SEQ ID NO: 2114476 - RNA, 23 nt, Human
cuuuccacccccucccuggccug

SEQ ID NO: 2114477 - RNA, 17 nt, Human
cuuuccccauacucugu

SEQ ID NO: 2114478 - RNA, 18 nt, Human
cuuuccccauacucuguc

SEQ ID NO: 2114479 - RNA, 22 nt, Human
cuuuccacccccucccuggccu

SEQ ID NO: 2114480 - RNA, 19 nt, Human
cuuucccccaccagcuaag

SEQ ID NO: 2114481 - RNA, 17 nt, Human
cuuuccguggcacugca

SEQ ID NO: 2114482 - RNA, 19 nt, Human
cuuuccguggcacugcaua

SEQ ID NO: 2114483 - RNA, 12 nt, Human
cuuuucacugcu

SEQ ID NO: 2114484 - RNA, 21 nt, Human
cuuuuccuacuuuuccuuccc

SEQ ID NO: 2114485 - RNA, 22 nt, Human
cuuuuccuacuuuuccuucccu

SEQ ID NO: 2114486 - RNA, 16 nt, Human
cuuuucacugcuggcu

SEQ ID NO: 2114487 - RNA, 14 nt, Human
cuuuucccuucuuu

SEQ ID NO: 2114488 - RNA, 13 nt, Human
cuuuuccuucccu

SEQ ID NO: 2114489 - RNA, 20 nt, Human
cuuuuccuucccucaaagcu

SEQ ID NO: 2114490 - RNA, 13 nt, Human
cuuuuccuugggg

SEQ ID NO: 2114491 - RNA, 17 nt, Human
cuuuuccuuggggcagg

SEQ ID NO: 2114492 - RNA, 21 nt, Human
cuuuuccuuggggcaggcagu

SEQ ID NO: 2114493 - RNA, 20 nt, Human
cuuuucgcaggauucuuccu

SEQ ID NO: 2114494 - RNA, 21 nt, Human
cuuuucgcaggauucuuccuc

SEQ ID NO: 2114495 - RNA, 12 nt, Human
cuuuuaaauccu

SEQ ID NO: 2114496 - RNA, 14 nt, Human
cuuuuaaauccugu

SEQ ID NO: 2114497 - RNA, 17 nt, Human
cuuuuaaauccuguuga

SEQ ID NO: 2114498 - RNA, 18 nt, Human
cuuuuaaauccuguugaa

SEQ ID NO: 2114499 - RNA, 19 nt, Human
cuuuuaaauccuguugaaa

SEQ ID NO: 2114500 - RNA, 20 nt, Human
cuuuuaaauccuguugaaaa

SEQ ID NO: 2114501 - RNA, 23 nt, Human
cuuuuaaaggggcagaaaaacuc

SEQ ID NO: 2114502 - RNA, 22 nt, Human
cuuuuaaaggggcagaaaaacu

SEQ ID NO: 2114503 - RNA, 16 nt, Human
cuuuuaauacagggua

SEQ ID NO: 2114504 - RNA, 19 nt, Human
cuuuuaagaugugucuuca

SEQ ID NO: 2114505 - RNA, 20 nt, Human
cuuuuaagaugugucuucaa

SEQ ID NO: 2114506 - RNA, 18 nt, Human
cuuuuaaaacacuuccau

SEQ ID NO: 2114507 - RNA, 23 nt, Human
cuuuguuuuuuuuuccuguccuu

SEQ ID NO: 2114508 - RNA, 16 nt, Human
cuuuguuuuuuuuucc

SEQ ID NO: 2114509 - RNA, 21 nt, Human
cuuuguuuuuuuuuccugucc

SEQ ID NO: 2114510 - RNA, 19 nt, Human
cuuuguuuuguuuuaagga

SEQ ID NO: 2114511 - RNA, 16 nt, Human
cuuuguuuuuaaauga

SEQ ID NO: 2114512 - RNA, 18 nt, Human
cuuuguuuuuaugaagaa

SEQ ID NO: 2114513 - RNA, 16 nt, Human
cuuuggacgcacacag

SEQ ID NO: 2114514 - RNA, 17 nt, Human
cuuuggacgcacacagc

SEQ ID NO: 2114515 - RNA, 18 nt, Human
cuuuggacgcacacagcu

SEQ ID NO: 2114516 - RNA, 19 nt, Human
cuuuggacgcacacagcuu

SEQ ID NO: 2114517 - RNA, 15 nt, Human
cuuuggacucucccc

SEQ ID NO: 2114518 - RNA, 21 nt, Human
cuuuggacucuccccucuuau

SEQ ID NO: 2114519 - RNA, 13 nt, Human
cuuuucuacagca

SEQ ID NO: 2114520 - RNA, 14 nt, Human
cuuuucuacagcaa

SEQ ID NO: 2114521 - RNA, 15 nt, Human
cuuuucuacagcaaa

SEQ ID NO: 2114522 - RNA, 17 nt, Human
cuuuucuacagcaaauu

SEQ ID NO: 2114523 - RNA, 11 nt, Human
cuuuucguuaa

SEQ ID NO: 2114524 - RNA, 15 nt, Human
cuuuucguuaacauu

SEQ ID NO: 2114525 - RNA, 16 nt, Human
cuuuucguuaacauug

SEQ ID NO: 2114526 - RNA, 20 nt, Human
cuuuucguuaacauugacca

SEQ ID NO: 2114527 - RNA, 20 nt, Human
cuuuuccuuggggcaggcag

SEQ ID NO: 2114528 - RNA, 16 nt, Human
cuuuucgccguggcug

SEQ ID NO: 2114529 - RNA, 18 nt, Human
cuuuuccuguuuuuguua

SEQ ID NO: 2114530 - RNA, 23 nt, Human
cuuuucuuugaaggaugacuaca

SEQ ID NO: 2114531 - RNA, 16 nt, Human
cuuuugauauuaaauu

SEQ ID NO: 2114532 - RNA, 13 nt, Human
cuuuugauauuaa

SEQ ID NO: 2114533 - RNA, 17 nt, Human
cuuuuuaagcuuauuua

SEQ ID NO: 2114534 - RNA, 19 nt, Human
cuuuuuaagcuuauuuaau

SEQ ID NO: 2114535 - RNA, 20 nt, Human
cuuuuuaauaaaaaggcacc

SEQ ID NO: 2114536 - RNA, 14 nt, Human
cuuuuuaauaaaaa

SEQ ID NO: 2114537 - RNA, 15 nt, Human
cuuuuuaauaaaaag

SEQ ID NO: 2114538 - RNA, 22 nt, Human
cuuuuuaauauugauaugcuua

SEQ ID NO: 2114539 - RNA, 15 nt, Human
cuuuuuacuccccuu

SEQ ID NO: 2114540 - RNA, 19 nt, Human
cuuuuuacuccccuugagc

SEQ ID NO: 2114541 - RNA, 21 nt, Human
cuuuuuuauggcgauucccau

SEQ ID NO: 2114542 - RNA, 18 nt, Human
cuuuuuuaugugccgugu

SEQ ID NO: 2114543 - RNA, 23 nt, Human
cuuuuuuaugugccguguuauug

SEQ ID NO: 2114544 - RNA, 18 nt, Human
cuuuuuuauuuuuuauac

SEQ ID NO: 2114545 - RNA, 11 nt, Human
gaaaaagaaaa

SEQ ID NO: 2114546 - RNA, 16 nt, Human
gaaaaagaaaaaauau

SEQ ID NO: 2114547 - RNA, 22 nt, Human
cuuuuuccagacacuuuuuuga

SEQ ID NO: 2114548 - RNA, 16 nt, Human
cuuuuucccaauaaau

SEQ ID NO: 2114549 - RNA, 17 nt, Human
cuuuuucccaauaaauu

SEQ ID NO: 2114550 - RNA, 20 nt, Human
gaaauuuccacucaggucug

SEQ ID NO: 2114551 - RNA, 19 nt, Human
gaaauuuccacucaggucu

SEQ ID NO: 2114552 - RNA, 13 nt, Human
gaaauucccugga

SEQ ID NO: 2114553 - RNA, 15 nt, Human
gaaauucccuggacc

SEQ ID NO: 2114554 - RNA, 18 nt, Human
gaaauucccuggaccaga

SEQ ID NO: 2114555 - RNA, 22 nt, Human
gaaauucccuggaccagaugcu

SEQ ID NO: 2114556 - RNA, 23 nt, Human
gaaauucccuggaccagaugcug

SEQ ID NO: 2114557 - RNA, 19 nt, Human
gaaauuacuacaaaauuug

SEQ ID NO: 2114558 - RNA, 13 nt, Human
gaaauuagccggg

SEQ ID NO: 2114559 - RNA, 16 nt, Human
gaaauuagcuguguga

SEQ ID NO: 2114560 - RNA, 19 nt, Human
gaaauuagcugugugaaau

SEQ ID NO: 2114561 - RNA, 13 nt, Human
gaaauuagggccc

SEQ ID NO: 2114562 - RNA, 19 nt, Human
gaacagacuggaagcacag

SEQ ID NO: 2114563 - RNA, 20 nt, Human
gaacagacuggaagcacagc

SEQ ID NO: 2114564 - RNA, 11 nt, Human
gaaauuugaau

SEQ ID NO: 2114565 - RNA, 16 nt, Human
gaacauguacacuggu

SEQ ID NO: 2114566 - RNA, 14 nt, Human
gaacaguuuguaca

SEQ ID NO: 2114567 - RNA, 16 nt, Human
gaacaguuaagcagcc

SEQ ID NO: 2114568 - RNA, 20 nt, Human
gaacaguuaagcagccgcca

SEQ ID NO: 2114569 - RNA, 21 nt, Human
gaacaguuaagcagccgccac

SEQ ID NO: 2114570 - RNA, 14 nt, Human
gaacaucccugcca

SEQ ID NO: 2114571 - RNA, 15 nt, Human
gaacaucccugccag

SEQ ID NO: 2114572 - RNA, 23 nt, Human
gaacaugaaaacagaaaacgguu

SEQ ID NO: 2114573 - RNA, 22 nt, Human
gaacagacuggaagcacagcuu

SEQ ID NO: 2114574 - RNA, 15 nt, Human
gaacagacuggccug

SEQ ID NO: 2114575 - RNA, 14 nt, Human
gaacaguaacugcc

SEQ ID NO: 2114576 - RNA, 15 nt, Human
gaacaggaaaagaaa

SEQ ID NO: 2114577 - RNA, 16 nt, Human
gaacaguguuucccau

SEQ ID NO: 2114578 - RNA, 17 nt, Human
gaacaguguuucccaua

SEQ ID NO: 2114579 - RNA, 18 nt, Human
gaacaguguuucccauaa

SEQ ID NO: 2114580 - RNA, 21 nt, Human
gaacaguguuucccauaauuu

SEQ ID NO: 2114581 - RNA, 20 nt, Human
gaaauaucugaaaauguaug

SEQ ID NO: 2114582 - RNA, 14 nt, Human
gaaauaucauuuau

SEQ ID NO: 2114583 - RNA, 13 nt, Human
gaaauaucauuua

SEQ ID NO: 2114584 - RNA, 18 nt, Human
gaaauaucugaaaaugua

SEQ ID NO: 2114585 - RNA, 19 nt, Human
gaaauaucugaaaauguau

SEQ ID NO: 2114586 - RNA, 22 nt, Human
gaaauaucaguuacucagcccu

SEQ ID NO: 2114587 - RNA, 12 nt, Human
gaaaugaauaua

SEQ ID NO: 2114588 - RNA, 14 nt, Human
gaaaugaauuucuc

SEQ ID NO: 2114589 - RNA, 14 nt, Human
gaaaugaccaauau

SEQ ID NO: 2114590 - RNA, 19 nt, Human
gaaaugacuaaaaaacaaa

SEQ ID NO: 2114591 - RNA, 20 nt, Human
gaaauaucaguuacucagcc

SEQ ID NO: 2114592 - RNA, 21 nt, Human
gaaauaucaguuacucagccc

SEQ ID NO: 2114593 - RNA, 12 nt, Human
gaaauaucauuu

SEQ ID NO: 2114594 - RNA, 23 nt, Human
gaaauaucaguuacucagcccug

SEQ ID NO: 2114595 - RNA, 23 nt, Human
gaaauauauauguguguguaugu

SEQ ID NO: 2114596 - RNA, 14 nt, Human
gaaauauauaugug

SEQ ID NO: 2114597 - RNA, 17 nt, Human
gaaauauauaugugugu

SEQ ID NO: 2114598 - RNA, 12 nt, Human
gaaaugcacaau

SEQ ID NO: 2114599 - RNA, 13 nt, Human
gaaaugcacaaug

SEQ ID NO: 2114600 - RNA, 16 nt, Human
gaaaugcacaaugucu

SEQ ID NO: 2114601 - RNA, 17 nt, Human
gaaaugcacaaugucuu

SEQ ID NO: 2114602 - RNA, 23 nt, Human
gaaaugcauccauuccucaggga

SEQ ID NO: 2114603 - RNA, 17 nt, Human
gaaaugccuaagaagau

SEQ ID NO: 2114604 - RNA, 18 nt, Human
gaaaugccuaagaagaug

SEQ ID NO: 2114605 - RNA, 23 nt, Human
gaaaugccuaagaagaugacuuc

SEQ ID NO: 2114606 - RNA, 16 nt, Human
gaaaugccuuacuuug

SEQ ID NO: 2114607 - RNA, 17 nt, Human
gaaaugccuuacuuugu

SEQ ID NO: 2114608 - RNA, 20 nt, Human
gaaaugccuuacuuuguaug

SEQ ID NO: 2114609 - RNA, 21 nt, Human
gaaaugccuuacuuuguauga

SEQ ID NO: 2114610 - RNA, 22 nt, Human
gaaaugccuuacuuuguaugau

SEQ ID NO: 2114611 - RNA, 23 nt, Human
gaaaugccuuacuuuguaugaua

SEQ ID NO: 2114612 - RNA, 18 nt, Human
gaaaugaggucagagccu

SEQ ID NO: 2114613 - RNA, 15 nt, Human
gaaaugucuggagaa

SEQ ID NO: 2114614 - RNA, 17 nt, Human
gaaaugucuggagaaua

SEQ ID NO: 2114615 - RNA, 18 nt, Human
gaaaugucuggagaauaa

SEQ ID NO: 2114616 - RNA, 18 nt, Human
gaaauuacuacaaaauuu

SEQ ID NO: 2114617 - RNA, 21 nt, Human
gaaaguggccaugccacccug

SEQ ID NO: 2114618 - RNA, 20 nt, Human
gaaagucuugugacuagugc

SEQ ID NO: 2114619 - RNA, 21 nt, Human
gaaagucuugugacuagugcu

SEQ ID NO: 2114620 - RNA, 19 nt, Human
gaaagucuugugacuagug

SEQ ID NO: 2114621 - RNA, 22 nt, Human
gaaagucuugugacuagugcug

SEQ ID NO: 2114622 - RNA, 13 nt, Human
gaaagugaauuug

SEQ ID NO: 2114623 - RNA, 19 nt, Human
gaaagugaagcaaaucaga

SEQ ID NO: 2114624 - RNA, 16 nt, Human
gaaagugaauaaaaau

SEQ ID NO: 2114625 - RNA, 17 nt, Human
gaaagugaauaaaaauu

SEQ ID NO: 2114626 - RNA, 16 nt, Human
gaaagugaauuugaau

SEQ ID NO: 2114627 - RNA, 17 nt, Human
gaaagugaauuugaaug

SEQ ID NO: 2114628 - RNA, 19 nt, Human
gaaagugaauuugaaugaa

SEQ ID NO: 2114629 - RNA, 23 nt, Human
gaaagugaauuugaaugaaaaau

SEQ ID NO: 2114630 - RNA, 20 nt, Human
gaaaguuuccccaccaguga

SEQ ID NO: 2114631 - RNA, 14 nt, Human
gaaauaaaaccuuu

SEQ ID NO: 2114632 - RNA, 14 nt, Human
gaaauaaaaaaguc

SEQ ID NO: 2114633 - RNA, 15 nt, Human
gaaauaaaaaagucu

SEQ ID NO: 2114634 - RNA, 16 nt, Human
gaaauaaaaaagucuc

SEQ ID NO: 2114635 - RNA, 17 nt, Human
gaaauaaaaaagucucu

SEQ ID NO: 2114636 - RNA, 18 nt, Human
gaaauaaaaaagucucua

SEQ ID NO: 2114637 - RNA, 19 nt, Human
gaaauaaaaaagucucuau

SEQ ID NO: 2114638 - RNA, 20 nt, Human
gaaauaaaaaagucucuauu

SEQ ID NO: 2114639 - RNA, 22 nt, Human
gaaauaaaaaagucucuauuua

SEQ ID NO: 2114640 - RNA, 23 nt, Human
gaaaguuuccccaccagugaaug

SEQ ID NO: 2114641 - RNA, 22 nt, Human
gaaaguuuucagaaccucuucc

SEQ ID NO: 2114642 - RNA, 15 nt, Human
gaaauaaaaccuuuc

SEQ ID NO: 2114643 - RNA, 16 nt, Human
gaaauaaaaccuuuca

SEQ ID NO: 2114644 - RNA, 17 nt, Human
gaaauaaaaccuuucaa

SEQ ID NO: 2114645 - RNA, 18 nt, Human
gaaauaaaaccuuucaaa

SEQ ID NO: 2114646 - RNA, 17 nt, Human
gaaaguuacaaauugcu

SEQ ID NO: 2114647 - RNA, 11 nt, Human
gaaaguuuccc

SEQ ID NO: 2114648 - RNA, 14 nt, Human
gaaaguguuuccuu

SEQ ID NO: 2114649 - RNA, 17 nt, Human
gaaaguuccuuauguau

SEQ ID NO: 2114650 - RNA, 23 nt, Human
gaaagcacuccucccugauguac

SEQ ID NO: 2114651 - RNA, 21 nt, Human
gaaagcauguggcauguucau

SEQ ID NO: 2114652 - RNA, 22 nt, Human
gaaagcauguggcauguucauc

SEQ ID NO: 2114653 - RNA, 14 nt, Human
gaaagccagucuua

SEQ ID NO: 2114654 - RNA, 15 nt, Human
gaaagccagucuuaa

SEQ ID NO: 2114655 - RNA, 19 nt, Human
gaaagccagucuuaacauu

SEQ ID NO: 2114656 - RNA, 14 nt, Human
gaaaggauucaugu

SEQ ID NO: 2114657 - RNA, 22 nt, Human
gaaaguacuucuccacccugcu

SEQ ID NO: 2114658 - RNA, 22 nt, Human
gaaaggauguaaacagugccug

SEQ ID NO: 2114659 - RNA, 16 nt, Human
gaaaggcauucucuga

SEQ ID NO: 2114660 - RNA, 17 nt, Human
gaaagucagaugcccag

SEQ ID NO: 2114661 - RNA, 20 nt, Human
gaaagucagaugcccagagg

SEQ ID NO: 2114662 - RNA, 17 nt, Human
gaaagucaugaacacau

SEQ ID NO: 2114663 - RNA, 19 nt, Human
gaaagucaugaacacauca

SEQ ID NO: 2114664 - RNA, 11 nt, Human
gaaaggagacu

SEQ ID NO: 2114665 - RNA, 13 nt, Human
gaaaggagacuag

SEQ ID NO: 2114666 - RNA, 15 nt, Human
gaaaggaguagaaaa

SEQ ID NO: 2114667 - RNA, 16 nt, Human
gaaaggaguagaaaaa

SEQ ID NO: 2114668 - RNA, 14 nt, Human
gaaaggauauuuaa

SEQ ID NO: 2114669 - RNA, 16 nt, Human
gaaaggauauuuaaga

SEQ ID NO: 2114670 - RNA, 17 nt, Human
gaaaggauauuuaagaa

SEQ ID NO: 2114671 - RNA, 20 nt, Human
gaaaggauauuuaagaaaau

SEQ ID NO: 2114672 - RNA, 21 nt, Human
gaaaggauauuuaagaaaaua

SEQ ID NO: 2114673 - RNA, 22 nt, Human
gaaaggauauuuaagaaaauac

SEQ ID NO: 2114674 - RNA, 20 nt, Human
gaaaggauguaaacagugcc

SEQ ID NO: 2114675 - RNA, 17 nt, Human
gaaacucaccauguaaa

SEQ ID NO: 2114676 - RNA, 20 nt, Human
gaaacucaccauguaaaaga

SEQ ID NO: 2114677 - RNA, 21 nt, Human
gaaacucacccccaaggggca

SEQ ID NO: 2114678 - RNA, 18 nt, Human
gaaacucaccugcuggcc

SEQ ID NO: 2114679 - RNA, 23 nt, Human
gaaacucaccugcuggccccuca

SEQ ID NO: 2114680 - RNA, 22 nt, Human
gaaacucagagucggaacggag

SEQ ID NO: 2114681 - RNA, 19 nt, Human
gaaacucaccugcuggccc

SEQ ID NO: 2114682 - RNA, 20 nt, Human
gaaacucaccugcuggcccc

SEQ ID NO: 2114683 - RNA, 21 nt, Human
gaaacucaccugcuggccccu

SEQ ID NO: 2114684 - RNA, 22 nt, Human
gaaacucaccugcuggccccuc

SEQ ID NO: 2114685 - RNA, 16 nt, Human
gaaacugacacaugcu

SEQ ID NO: 2114686 - RNA, 16 nt, Human
gaaaaaugagccuggc

SEQ ID NO: 2114687 - RNA, 20 nt, Human
gaaaaaugcccuuaaaucau

SEQ ID NO: 2114688 - RNA, 22 nt, Human
gaaaaagcaguaacugacaacu

SEQ ID NO: 2114689 - RNA, 22 nt, Human
gaaaaauggauccccagugaaa

SEQ ID NO: 2114690 - RNA, 14 nt, Human
gaaagacugagcuc

SEQ ID NO: 2114691 - RNA, 16 nt, Human
gaaagagauacagagg

SEQ ID NO: 2114692 - RNA, 23 nt, Human
gaaagagauaccaagaugccauc

SEQ ID NO: 2114693 - RNA, 19 nt, Human
gaaagagagagaauucuuu

SEQ ID NO: 2114694 - RNA, 16 nt, Human
gaaagagagcacugac

SEQ ID NO: 2114695 - RNA, 17 nt, Human
gaaagaguuaagaaugu

SEQ ID NO: 2114696 - RNA, 18 nt, Human
gaaagaguuaagaauguc

SEQ ID NO: 2114697 - RNA, 22 nt, Human
gaaagauggcugugccucugcc

SEQ ID NO: 2114698 - RNA, 16 nt, Human
gaaagaucaaaagguu

SEQ ID NO: 2114699 - RNA, 23 nt, Human
gaaagauggcugugccucugccu

SEQ ID NO: 2114700 - RNA, 12 nt, Human
gaaagauuugua

SEQ ID NO: 2114701 - RNA, 14 nt, Human
gaaagcaauaaaug

SEQ ID NO: 2114702 - RNA, 21 nt, Human
gaaagaugcucagguacagag

SEQ ID NO: 2114703 - RNA, 23 nt, Human
gaaagaugcucagguacagagaa

SEQ ID NO: 2114704 - RNA, 13 nt, Human
gaagaaaugaaau

SEQ ID NO: 2114705 - RNA, 14 nt, Human
gaagaaaugaaauu

SEQ ID NO: 2114706 - RNA, 15 nt, Human
gaagaaaugaaauuu

SEQ ID NO: 2114707 - RNA, 16 nt, Human
gaagaaaugaaauuuu

SEQ ID NO: 2114708 - RNA, 23 nt, Human
gaagaaaugaaauuuuaccaagu

SEQ ID NO: 2114709 - RNA, 13 nt, Human
gaagaacauagaa

SEQ ID NO: 2114710 - RNA, 16 nt, Human
gaagaacauccaagga

SEQ ID NO: 2114711 - RNA, 17 nt, Human
gaagaacauccaaggag

SEQ ID NO: 2114712 - RNA, 20 nt, Human
gaagaacauccaaggagaaa

SEQ ID NO: 2114713 - RNA, 14 nt, Human
gaagaagcucucuc

SEQ ID NO: 2114714 - RNA, 12 nt, Human
gaagaaggaaau

SEQ ID NO: 2114715 - RNA, 21 nt, Human
gaagaaggaaaugaauuucuc

SEQ ID NO: 2114716 - RNA, 17 nt, Human
gaacuuggggaacaagg

SEQ ID NO: 2114717 - RNA, 17 nt, Human
gaacuugggccacugug

SEQ ID NO: 2114718 - RNA, 24 nt, Human
gaacuuuccacauucagagcuuac

SEQ ID NO: 2114719 - RNA, 18 nt, Human
gaaccacaucuugcucug

SEQ ID NO: 2114720 - RNA, 20 nt, Human
gaaccacaucuugcucugcu

SEQ ID NO: 2114721 - RNA, 23 nt, Human
gaaccaaguggaccuugagacca

SEQ ID NO: 2114722 - RNA, 24 nt, Human
gaaccaaguggaccuugagaccac

SEQ ID NO: 2114723 - RNA, 16 nt, Human
gaacuccuaaaucaag

SEQ ID NO: 2114724 - RNA, 13 nt, Human
gaaccaauauuug

SEQ ID NO: 2114725 - RNA, 17 nt, Human
gaacugugccuuugagu

SEQ ID NO: 2114726 - RNA, 15 nt, Human
gaacuccuaaaucaa

SEQ ID NO: 2114727 - RNA, 15 nt, Human
gaacuuaaauaaaug

SEQ ID NO: 2114728 - RNA, 18 nt, Human
gaacuuaaauaaauguca

SEQ ID NO: 2114729 - RNA, 18 nt, Human
gaagaucguuaguaucua

SEQ ID NO: 2114730 - RNA, 19 nt, Human
gaagaucacuuugcucuga

SEQ ID NO: 2114731 - RNA, 17 nt, Human
gaagaguggguuucaca

SEQ ID NO: 2114732 - RNA, 18 nt, Human
gaagaguggguuucacaa

SEQ ID NO: 2114733 - RNA, 14 nt, Human
gaagagugagaggg

SEQ ID NO: 2114734 - RNA, 16 nt, Human
gaagagugagagggca

SEQ ID NO: 2114735 - RNA, 16 nt, Human
gaagagucuggaggga

SEQ ID NO: 2114736 - RNA, 14 nt, Human
gaagauaucuugaa

SEQ ID NO: 2114737 - RNA, 20 nt, Human
gaagauaggcucugcacaga

SEQ ID NO: 2114738 - RNA, 15 nt, Human
gaagaugacuuccca

SEQ ID NO: 2114739 - RNA, 18 nt, Human
gaagaauacaaacauauu

SEQ ID NO: 2114740 - RNA, 19 nt, Human
gaagaauacaaacauauuu

SEQ ID NO: 2114741 - RNA, 12 nt, Human
gaagagccuugc

SEQ ID NO: 2114742 - RNA, 17 nt, Human
gaagaggaacugggccu

SEQ ID NO: 2114743 - RNA, 17 nt, Human
gaagagcuauuauauaa

SEQ ID NO: 2114744 - RNA, 19 nt, Human
gaaggaaagaaagaaggaa

SEQ ID NO: 2114745 - RNA, 22 nt, Human
gaagcuuauuaaugcuaagggc

SEQ ID NO: 2114746 - RNA, 15 nt, Human
gaaggaaagaugcuc

SEQ ID NO: 2114747 - RNA, 17 nt, Human
gaaggaaauaaaaaagu

SEQ ID NO: 2114748 - RNA, 23 nt, Human
gaaggaaauaaaaaagucucuau

SEQ ID NO: 2114749 - RNA, 15 nt, Human
gaaggaaaugaauuu

SEQ ID NO: 2114750 - RNA, 20 nt, Human
gaaggaaaugaauuucucua

SEQ ID NO: 2114751 - RNA, 13 nt, Human
gaaggaagacuuu

SEQ ID NO: 2114752 - RNA, 23 nt, Human
gaaggaaggagacucaccucugc

SEQ ID NO: 2114753 - RNA, 16 nt, Human
gaaggaagugaagagg

SEQ ID NO: 2114754 - RNA, 22 nt, Human
gaaggacccggaggggccuggc

SEQ ID NO: 2114755 - RNA, 16 nt, Human
gaaggacaaggcuaga

SEQ ID NO: 2114756 - RNA, 12 nt, Human
gaaggaggagag

SEQ ID NO: 2114757 - RNA, 15 nt, Human
gaaggaggaggagga

SEQ ID NO: 2114758 - RNA, 21 nt, Human
gaaggacauugcggacagcca

SEQ ID NO: 2114759 - RNA, 20 nt, Human
gaaggacauugcggacagcc

SEQ ID NO: 2114760 - RNA, 22 nt, Human
gaaggaauaaauugcuccuuga

SEQ ID NO: 2114761 - RNA, 16 nt, Human
gaaggaaugucuuugg

SEQ ID NO: 2114762 - RNA, 15 nt, Human
gaaggaauugacuuc

SEQ ID NO: 2114763 - RNA, 19 nt, Human
gaaggacauugcggacagc

SEQ ID NO: 2114764 - RNA, 23 nt, Human
gaagcuguguccuugcaccugca

SEQ ID NO: 2114765 - RNA, 24 nt, Human
gaagcuguguccuugcaccugcau

SEQ ID NO: 2114766 - RNA, 14 nt, Human
gaagcuuauuaaug

SEQ ID NO: 2114767 - RNA, 15 nt, Human
gaagcuuauuaaugc

SEQ ID NO: 2114768 - RNA, 16 nt, Human
gaagcuuauuaaugcu

SEQ ID NO: 2114769 - RNA, 17 nt, Human
gaagcuuauuaaugcua

SEQ ID NO: 2114770 - RNA, 19 nt, Human
gaagcuuauuaaugcuaag

SEQ ID NO: 2114771 - RNA, 20 nt, Human
gaagcuuauuaaugcuaagg

SEQ ID NO: 2114772 - RNA, 21 nt, Human
gaagcuuauuaaugcuaaggg

SEQ ID NO: 2114773 - RNA, 23 nt, Human
gaagcuuauuaaugcuaagggca

SEQ ID NO: 2114774 - RNA, 14 nt, Human
gaagccgcugcugg

SEQ ID NO: 2114775 - RNA, 16 nt, Human
gaagccgccaggaccg

SEQ ID NO: 2114776 - RNA, 23 nt, Human
gaagccgccaggaccgccaaaga

SEQ ID NO: 2114777 - RNA, 12 nt, Human
gaagccugaggc

SEQ ID NO: 2114778 - RNA, 13 nt, Human
gaagccugaggcu

SEQ ID NO: 2114779 - RNA, 15 nt, Human
gaagccugcaggagu

SEQ ID NO: 2114780 - RNA, 21 nt, Human
gaagauuugcccauuuacacu

SEQ ID NO: 2114781 - RNA, 18 nt, Human
gaaggaggaggaggaggu

SEQ ID NO: 2114782 - RNA, 14 nt, Human
gaaggaggcuggcu

SEQ ID NO: 2114783 - RNA, 19 nt, Human
gaaggaggguuagggaggg

SEQ ID NO: 2114784 - RNA, 16 nt, Human
gaaggaugagcauuua

SEQ ID NO: 2114785 - RNA, 14 nt, Human
gaaggaugcugucu

SEQ ID NO: 2114786 - RNA, 22 nt, Human
gaaggaucuguuuuuaaaaauc

SEQ ID NO: 2114787 - RNA, 14 nt, Human
gaaggaugagcauu

SEQ ID NO: 2114788 - RNA, 15 nt, Human
gaaggauguacauuu

SEQ ID NO: 2114789 - RNA, 16 nt, Human
gaaggauguacauuuc

SEQ ID NO: 2114790 - RNA, 17 nt, Human
gaaggauguacauuucc

SEQ ID NO: 2114791 - RNA, 20 nt, Human
gaaggauguacauuuccaaa

SEQ ID NO: 2114792 - RNA, 12 nt, Human
gaaggggcugga

SEQ ID NO: 2114793 - RNA, 19 nt, Human
gaaggggcuggacuggcug

SEQ ID NO: 2114794 - RNA, 20 nt, Human
gaaggggcuggacuggcugu

SEQ ID NO: 2114795 - RNA, 23 nt, Human
gaaggggcccugguccuuccagg

SEQ ID NO: 2114796 - RNA, 14 nt, Human
gaaggccacagcaa

SEQ ID NO: 2114797 - RNA, 18 nt, Human
gaaggcaugccuggacaa

SEQ ID NO: 2114798 - RNA, 12 nt, Human
gaaggcaaaaaa

SEQ ID NO: 2114799 - RNA, 13 nt, Human
gaaggucuugauu

SEQ ID NO: 2114800 - RNA, 15 nt, Human
gaaggucuugauuug

SEQ ID NO: 2114801 - RNA, 17 nt, Human
gaaggucuugauuuguu

SEQ ID NO: 2114802 - RNA, 23 nt, Human
gaaggucuugauuuguuuuagaa

SEQ ID NO: 2114803 - RNA, 22 nt, Human
gaagggggccaugaggccucag

SEQ ID NO: 2114804 - RNA, 17 nt, Human
gaaggucaccugagccc

SEQ ID NO: 2114805 - RNA, 19 nt, Human
gaagggggcaucuggccuu

SEQ ID NO: 2114806 - RNA, 14 nt, Human
gaagggggccauga

SEQ ID NO: 2114807 - RNA, 20 nt, Human
gaagggggccaugaggccuc

SEQ ID NO: 2114808 - RNA, 13 nt, Human
gaagucacacagu

SEQ ID NO: 2114809 - RNA, 17 nt, Human
gaaguaacuugucuuaa

SEQ ID NO: 2114810 - RNA, 20 nt, Human
gaaguaacuugucuuaaaua

SEQ ID NO: 2114811 - RNA, 15 nt, Human
gaagucaaacauuuc

SEQ ID NO: 2114812 - RNA, 15 nt, Human
gaagucacugcacag

SEQ ID NO: 2114813 - RNA, 18 nt, Human
gaagucacucaauuguuu

SEQ ID NO: 2114814 - RNA, 20 nt, Human
gaagucacucaauuguuuuu

SEQ ID NO: 2114815 - RNA, 18 nt, Human
gaagucuuagauguauau

SEQ ID NO: 2114816 - RNA, 17 nt, Human
gaaguccccaggcccca

SEQ ID NO: 2114817 - RNA, 16 nt, Human
gaaguccccaggcccc

SEQ ID NO: 2114818 - RNA, 23 nt, Human
gaaguccccaggccccaggaagc

SEQ ID NO: 2114819 - RNA, 14 nt, Human
gagccgugaugccu

SEQ ID NO: 2114820 - RNA, 20 nt, Human
gagccgagaucgcgccacug

SEQ ID NO: 2114821 - RNA, 21 nt, Human
gagccgcaucuucuccaucug

SEQ ID NO: 2114822 - RNA, 22 nt, Human
gagccgcaucuucuccaucugg

SEQ ID NO: 2114823 - RNA, 22 nt, Human
gagccgagaucacgccacugca

SEQ ID NO: 2114824 - RNA, 21 nt, Human
gagccgagaucacgccacugc

SEQ ID NO: 2114825 - RNA, 20 nt, Human
gagccgagaucacgccacug

SEQ ID NO: 2114826 - RNA, 19 nt, Human
gagccgagaucacgccacu

SEQ ID NO: 2114827 - RNA, 15 nt, Human
gagccucagcauccu

SEQ ID NO: 2114828 - RNA, 14 nt, Human
gagccucagcaucc

SEQ ID NO: 2114829 - RNA, 17 nt, Human
gagccucagcauccugg

SEQ ID NO: 2114830 - RNA, 13 nt, Human
gagccucagcauc

SEQ ID NO: 2114831 - RNA, 12 nt, Human
gagccugcaguu

SEQ ID NO: 2114832 - RNA, 18 nt, Human
gagccuccuuucuggcuu

SEQ ID NO: 2114833 - RNA, 18 nt, Human
gagccugaaauagugguu

SEQ ID NO: 2114834 - RNA, 17 nt, Human
gagccucauccgaggca

SEQ ID NO: 2114835 - RNA, 18 nt, Human
gagccucauccgaggcag

SEQ ID NO: 2114836 - RNA, 19 nt, Human
gagccucauccgaggcagg

SEQ ID NO: 2114837 - RNA, 20 nt, Human
gagccucauccgaggcaggg

SEQ ID NO: 2114838 - RNA, 18 nt, Human
gagagugcaacaguagca

SEQ ID NO: 2114839 - RNA, 21 nt, Human
gagauaccaagaugccaucug

SEQ ID NO: 2114840 - RNA, 17 nt, Human
gagauaccaagaugcca

SEQ ID NO: 2114841 - RNA, 15 nt, Human
gagauaauaugagaa

SEQ ID NO: 2114842 - RNA, 13 nt, Human
gagcagaggcagc

SEQ ID NO: 2114843 - RNA, 20 nt, Human
gagccacugcaccgggccac

SEQ ID NO: 2114844 - RNA, 13 nt, Human
gagccacugcacc

SEQ ID NO: 2114845 - RNA, 16 nt, Human
gagcagccuguggcau

SEQ ID NO: 2114846 - RNA, 18 nt, Human
gagcagccuguggcaucu

SEQ ID NO: 2114847 - RNA, 11 nt, Human
gagcagccugu

SEQ ID NO: 2114848 - RNA, 13 nt, Human
gagcagccugugg

SEQ ID NO: 2114849 - RNA, 14 nt, Human
gagcagccuguggc

SEQ ID NO: 2114850 - RNA, 15 nt, Human
gagcagccuguggca

SEQ ID NO: 2114851 - RNA, 19 nt, Human
gagccacugcaccgggcca

SEQ ID NO: 2114852 - RNA, 18 nt, Human
gagccacugcaccgggcc

SEQ ID NO: 2114853 - RNA, 17 nt, Human
gagcccaccuuggcuca

SEQ ID NO: 2114854 - RNA, 15 nt, Human
gagcccaccuuggcu

SEQ ID NO: 2114855 - RNA, 13 nt, Human
gagcccaccuugg

SEQ ID NO: 2114856 - RNA, 12 nt, Human
gagccaggccug

SEQ ID NO: 2114857 - RNA, 21 nt, Human
gagccaggccugggucugugu

SEQ ID NO: 2114858 - RNA, 22 nt, Human
gagccaggccugggucuguguc

SEQ ID NO: 2114859 - RNA, 19 nt, Human
gagccagcccucccugucc

SEQ ID NO: 2114860 - RNA, 20 nt, Human
gagccagcccucccuguccu

SEQ ID NO: 2114861 - RNA, 21 nt, Human
gagccagcccucccuguccuc

SEQ ID NO: 2114862 - RNA, 15 nt, Human
gagcuagcagcaggg

SEQ ID NO: 2114863 - RNA, 17 nt, Human
gagcuagcagcagggag

SEQ ID NO: 2114864 - RNA, 14 nt, Human
gagcuagcgcugcc

SEQ ID NO: 2114865 - RNA, 18 nt, Human
gagcuagcgcugccgcac

SEQ ID NO: 2114866 - RNA, 19 nt, Human
gagcuagcgcugccgcacc

SEQ ID NO: 2114867 - RNA, 23 nt, Human
gagcuagcgcugccgcaccccag

SEQ ID NO: 2114868 - RNA, 15 nt, Human
gagccugcaguuauu

SEQ ID NO: 2114869 - RNA, 14 nt, Human
gagcuauacaguuu

SEQ ID NO: 2114870 - RNA, 19 nt, Human
gagcuauacaguuuuccua

SEQ ID NO: 2114871 - RNA, 20 nt, Human
gagcuauacaguuuuccuaa

SEQ ID NO: 2114872 - RNA, 23 nt, Human
gagcuauauuuaaguauucaaga

SEQ ID NO: 2114873 - RNA, 13 nt, Human
gagcuccagaccc

SEQ ID NO: 2114874 - RNA, 15 nt, Human
gagcuccagaccccc

SEQ ID NO: 2114875 - RNA, 17 nt, Human
gagcuccagacccccag

SEQ ID NO: 2114876 - RNA, 19 nt, Human
gagcuccagacccccagca

SEQ ID NO: 2114877 - RNA, 22 nt, Human
gagcuccagacccccagcaacc

SEQ ID NO: 2114878 - RNA, 15 nt, Human
gagcucagaccccca

SEQ ID NO: 2114879 - RNA, 14 nt, Human
gagcucagaccccc

SEQ ID NO: 2114880 - RNA, 18 nt, Human
gagcucagacccccacuc

SEQ ID NO: 2114881 - RNA, 20 nt, Human
gagcucagacccccacucuc

SEQ ID NO: 2114882 - RNA, 21 nt, Human
gagcucagacccccacucuca

SEQ ID NO: 2114883 - RNA, 20 nt, Human
gagcuccagacccccagcaa

SEQ ID NO: 2114884 - RNA, 14 nt, Human
gagcuccaguggaa

SEQ ID NO: 2114885 - RNA, 15 nt, Human
gagcucgguggaccc

SEQ ID NO: 2114886 - RNA, 15 nt, Human
gagcugaguggggga

SEQ ID NO: 2114887 - RNA, 17 nt, Human
gagcugaggcaauucua

SEQ ID NO: 2114888 - RNA, 13 nt, Human
gagcugacaaaau

SEQ ID NO: 2114889 - RNA, 16 nt, Human
gagcugacaaaauuuu

SEQ ID NO: 2114890 - RNA, 17 nt, Human
gagcugacaaaauuuug

SEQ ID NO: 2114891 - RNA, 15 nt, Human
gagcugagaauagaa

SEQ ID NO: 2114892 - RNA, 19 nt, Human
gagcugagaauagaaggaa

SEQ ID NO: 2114893 - RNA, 20 nt, Human
gagcugagaauagaaggaaa

SEQ ID NO: 2114894 - RNA, 10 nt, Human
gagcugagau

SEQ ID NO: 2114895 - RNA, 20 nt, Human
gagcugagaucgcgccacug

SEQ ID NO: 2114896 - RNA, 13 nt, Human
gagcugagaucgu

SEQ ID NO: 2114897 - RNA, 16 nt, Human
gagcugagcagggaga

SEQ ID NO: 2114898 - RNA, 13 nt, Human
gagcugagaugga

SEQ ID NO: 2114899 - RNA, 13 nt, Human
gagcugagcaggg

SEQ ID NO: 2114900 - RNA, 13 nt, Human
gaggaaaggccag

SEQ ID NO: 2114901 - RNA, 14 nt, Human
gaggaaaggccagc

SEQ ID NO: 2114902 - RNA, 19 nt, Human
gaggaaaggccagcuggca

SEQ ID NO: 2114903 - RNA, 23 nt, Human
gaggaaacucaccugcuggcccc

SEQ ID NO: 2114904 - RNA, 14 nt, Human
gaggaaacucagag

SEQ ID NO: 2114905 - RNA, 23 nt, Human
gaggaaaggccagcuggcagcag

SEQ ID NO: 2114906 - RNA, 14 nt, Human
gaggaaccagagcc

SEQ ID NO: 2114907 - RNA, 15 nt, Human
gaggaaccagagcca

SEQ ID NO: 2114908 - RNA, 18 nt, Human
gaggaaccagagccaugg

SEQ ID NO: 2114909 - RNA, 22 nt, Human
gaggaaccagagccauggacuc

SEQ ID NO: 2114910 - RNA, 15 nt, Human
gaggaaccgaaaggc

SEQ ID NO: 2114911 - RNA, 14 nt, Human
gaggaacugggccu

SEQ ID NO: 2114912 - RNA, 17 nt, Human
gaggaagagaaaaaaua

SEQ ID NO: 2114913 - RNA, 13 nt, Human
gaggaagagcagg

SEQ ID NO: 2114914 - RNA, 17 nt, Human
gaggaagagcaggcaca

SEQ ID NO: 2114915 - RNA, 19 nt, Human
gaggaagagcaggcacaug

SEQ ID NO: 2114916 - RNA, 19 nt, Human
gaggaagagugcaaaacau

SEQ ID NO: 2114917 - RNA, 14 nt, Human
gaggaaacucaccu

SEQ ID NO: 2114918 - RNA, 17 nt, Human
gaggaaacucaccugcu

SEQ ID NO: 2114919 - RNA, 20 nt, Human
gaggaaacucaccugcuggc

SEQ ID NO: 2114920 - RNA, 22 nt, Human
gaggaaacucaccugcuggccc

SEQ ID NO: 2114921 - RNA, 23 nt, Human
gaggaaaaccaagccguggcuuc

SEQ ID NO: 2114922 - RNA, 21 nt, Human
gaggaaaaccaagccguggcu

SEQ ID NO: 2114923 - RNA, 20 nt, Human
gaggaaaaccaagccguggc

SEQ ID NO: 2114924 - RNA, 14 nt, Human
gagcuuuggacaca

SEQ ID NO: 2114925 - RNA, 21 nt, Human
gagcuuuggacacacacagcu

SEQ ID NO: 2114926 - RNA, 18 nt, Human
gagcuuuggacgcacaca

SEQ ID NO: 2114927 - RNA, 20 nt, Human
gagcuuugaaaauucagugg

SEQ ID NO: 2114928 - RNA, 21 nt, Human
gagcuuucuguccuuuuggca

SEQ ID NO: 2114929 - RNA, 23 nt, Human
gagcuuucuguccuuuuggcacu

SEQ ID NO: 2114930 - RNA, 22 nt, Human
gagcuuucugcuaucaaagagg

SEQ ID NO: 2114931 - RNA, 20 nt, Human
gagcuugggggaugacuaga

SEQ ID NO: 2114932 - RNA, 22 nt, Human
gagcuuuauguaauaaugugaa

SEQ ID NO: 2114933 - RNA, 15 nt, Human
gagcuuucaaagaag

SEQ ID NO: 2114934 - RNA, 18 nt, Human
gagcuuucaaagaaggaa

SEQ ID NO: 2114935 - RNA, 17 nt, Human
gagcugccuaagaggca

SEQ ID NO: 2114936 - RNA, 19 nt, Human
gagcugccuaagaggcaau

SEQ ID NO: 2114937 - RNA, 16 nt, Human
gagcuuuacaaaaaga

SEQ ID NO: 2114938 - RNA, 19 nt, Human
gagcuuuacaaaaagacac

SEQ ID NO: 2114939 - RNA, 14 nt, Human
gagcuuggccagaa

SEQ ID NO: 2114940 - RNA, 15 nt, Human
gagcuuggccagaag

SEQ ID NO: 2114941 - RNA, 18 nt, Human
gagaauugcuugaaccca

SEQ ID NO: 2114942 - RNA, 18 nt, Human
gagaauucuuacauguuu

SEQ ID NO: 2114943 - RNA, 22 nt, Human
gagaauucuuacauguuuucuu

SEQ ID NO: 2114944 - RNA, 15 nt, Human
gagaauuuuaaauua

SEQ ID NO: 2114945 - RNA, 16 nt, Human
gagaauuuuaaauuau

SEQ ID NO: 2114946 - RNA, 15 nt, Human
gagaauuguaucauu

SEQ ID NO: 2114947 - RNA, 21 nt, Human
gagaauuguaucauuugaaca

SEQ ID NO: 2114948 - RNA, 11 nt, Human
gagacaaaaau

SEQ ID NO: 2114949 - RNA, 15 nt, Human
gagacaaaaauuauc

SEQ ID NO: 2114950 - RNA, 20 nt, Human
gagacaaaaauuaucuauuu

SEQ ID NO: 2114951 - RNA, 16 nt, Human
gagacaaauggaggcc

SEQ ID NO: 2114952 - RNA, 16 nt, Human
gagacaaugcagaugc

SEQ ID NO: 2114953 - RNA, 17 nt, Human
gagacaaugcagaugcc

SEQ ID NO: 2114954 - RNA, 18 nt, Human
gagacaaugcagaugcca

SEQ ID NO: 2114955 - RNA, 21 nt, Human
gagacaaugcagaugccagag

SEQ ID NO: 2114956 - RNA, 23 nt, Human
gagacaaugcagaugccagagca

SEQ ID NO: 2114957 - RNA, 14 nt, Human
gagacagagcuggu

SEQ ID NO: 2114958 - RNA, 20 nt, Human
gagacagacagagaaggcag

SEQ ID NO: 2114959 - RNA, 19 nt, Human
gagacagaguuuucacucu

SEQ ID NO: 2114960 - RNA, 22 nt, Human
gagacagagaggacgugggcgg

SEQ ID NO: 2114961 - RNA, 20 nt, Human
gagacaccugcaccuccccc

SEQ ID NO: 2114962 - RNA, 21 nt, Human
gagacaccugcaccucccccc

SEQ ID NO: 2114963 - RNA, 20 nt, Human
gagacacuaacgacuucagg

SEQ ID NO: 2114964 - RNA, 17 nt, Human
gagacacagggcaucca

SEQ ID NO: 2114965 - RNA, 12 nt, Human
gagacaccucag

SEQ ID NO: 2114966 - RNA, 13 nt, Human
gagacaccucaga

SEQ ID NO: 2114967 - RNA, 16 nt, Human
gagacaccucagagcc

SEQ ID NO: 2114968 - RNA, 19 nt, Human
gagacaccucagagccccg

SEQ ID NO: 2114969 - RNA, 21 nt, Human
gagacaccucagagccccgca

SEQ ID NO: 2114970 - RNA, 13 nt, Human
gagacaccugcac

SEQ ID NO: 2114971 - RNA, 15 nt, Human
gagacaccugcaccu

SEQ ID NO: 2114972 - RNA, 17 nt, Human
gagacaccugcaccucc

SEQ ID NO: 2114973 - RNA, 18 nt, Human
gagacaccugcaccuccc

SEQ ID NO: 2114974 - RNA, 19 nt, Human
gagacaccugcaccucccc

SEQ ID NO: 2114975 - RNA, 13 nt, Human
gagaaugaggguc

SEQ ID NO: 2114976 - RNA, 17 nt, Human
gagaaugagggccaaga

SEQ ID NO: 2114977 - RNA, 18 nt, Human
gagaauucagcugccccc

SEQ ID NO: 2114978 - RNA, 16 nt, Human
gagaauucuuacaugu

SEQ ID NO: 2114979 - RNA, 23 nt, Human
gagaagcaagaaagaaacccgac

SEQ ID NO: 2114980 - RNA, 15 nt, Human
gagaagaauauuguu

SEQ ID NO: 2114981 - RNA, 19 nt, Human
gagaagaauauuguuccua

SEQ ID NO: 2114982 - RNA, 12 nt, Human
gagaaaauugaa

SEQ ID NO: 2114983 - RNA, 13 nt, Human
gagaaaauugaau

SEQ ID NO: 2114984 - RNA, 14 nt, Human
gagaaaauugaauu

SEQ ID NO: 2114985 - RNA, 15 nt, Human
gagaaaauugaauuu

SEQ ID NO: 2114986 - RNA, 18 nt, Human
gagaaaauugaauuuaac

SEQ ID NO: 2114987 - RNA, 19 nt, Human
gagaaaauugaauuuaaca

SEQ ID NO: 2114988 - RNA, 13 nt, Human
gagaaacagagac

SEQ ID NO: 2114989 - RNA, 14 nt, Human
gagaaacagagaca

SEQ ID NO: 2114990 - RNA, 18 nt, Human
gacuuguuuuaugcucag

SEQ ID NO: 2114991 - RNA, 16 nt, Human
gacuuggaagcuccgc

SEQ ID NO: 2114992 - RNA, 15 nt, Human
gacuuggaagcuccg

SEQ ID NO: 2114993 - RNA, 14 nt, Human
gacuuggaagcucc

SEQ ID NO: 2114994 - RNA, 23 nt, Human
gagaaaguacuucuccacccugc

SEQ ID NO: 2114995 - RNA, 18 nt, Human
gagaaagaaguaggcaug

SEQ ID NO: 2114996 - RNA, 18 nt, Human
gagaaagugugagcaaac

SEQ ID NO: 2114997 - RNA, 17 nt, Human
gagaacauguugguauu

SEQ ID NO: 2114998 - RNA, 20 nt, Human
gagaacagaucuccaaagcu

SEQ ID NO: 2114999 - RNA, 21 nt, Human
gagaacagaucuccaaagcuu

SEQ ID NO: 2115000 - RNA, 19 nt, Human
gagaaccacuacaugcagc

SEQ ID NO: 2115001 - RNA, 23 nt, Human
gagaaaccuuauuguaccucucu

SEQ ID NO: 2115002 - RNA, 21 nt, Human
gagaaaccuuauuguaccucu

SEQ ID NO: 2115003 - RNA, 12 nt, Human
gagaaacccugu

SEQ ID NO: 2115004 - RNA, 22 nt, Human
gagaaaccguccucuuuuucca

SEQ ID NO: 2115005 - RNA, 19 nt, Human
gagaaacagagacaggccc

SEQ ID NO: 2115006 - RNA, 21 nt, Human
gagagggcaugcgcacaaggc

SEQ ID NO: 2115007 - RNA, 13 nt, Human
gagagccuggugc

SEQ ID NO: 2115008 - RNA, 17 nt, Human
gagagccuggugcugcu

SEQ ID NO: 2115009 - RNA, 11 nt, Human
gagagccuggu

SEQ ID NO: 2115010 - RNA, 19 nt, Human
gagagccuggugcugcugc

SEQ ID NO: 2115011 - RNA, 18 nt, Human
gagaggggaacagacugg

SEQ ID NO: 2115012 - RNA, 13 nt, Human
gagaggggaacag

SEQ ID NO: 2115013 - RNA, 17 nt, Human
gagagguugucuguggc

SEQ ID NO: 2115014 - RNA, 14 nt, Human
gagagucugucuca

SEQ ID NO: 2115015 - RNA, 19 nt, Human
gagagguuauaggucacuc

SEQ ID NO: 2115016 - RNA, 15 nt, Human
gagagucuugcagug

SEQ ID NO: 2115017 - RNA, 17 nt, Human
gagagucuugcagugau

SEQ ID NO: 2115018 - RNA, 18 nt, Human
gagaggucaagcccagga

SEQ ID NO: 2115019 - RNA, 19 nt, Human
gagaggucaagcccaggag

SEQ ID NO: 2115020 - RNA, 24 nt, Human
gagaggucaagcccaggaggacug

SEQ ID NO: 2115021 - RNA, 17 nt, Human
gagaggucuuuuuuaaa

SEQ ID NO: 2115022 - RNA, 11 nt, Human
gagagcccagc

SEQ ID NO: 2115023 - RNA, 13 nt, Human
gagagcccagcca

SEQ ID NO: 2115024 - RNA, 23 nt, Human
gagagccugcucccccacccccu

SEQ ID NO: 2115025 - RNA, 13 nt, Human
gagagccugcugc

SEQ ID NO: 2115026 - RNA, 14 nt, Human
gagagccugcugca

SEQ ID NO: 2115027 - RNA, 11 nt, Human
gagagccagcc

SEQ ID NO: 2115028 - RNA, 12 nt, Human
gagagccagccc

SEQ ID NO: 2115029 - RNA, 13 nt, Human
gagagccagcccu

SEQ ID NO: 2115030 - RNA, 14 nt, Human
gagagccagcccuc

SEQ ID NO: 2115031 - RNA, 20 nt, Human
gagagccagcccucccuguc

SEQ ID NO: 2115032 - RNA, 10 nt, Human
gagagcccag

SEQ ID NO: 2115033 - RNA, 12 nt, Human
gagagaggggaa

SEQ ID NO: 2115034 - RNA, 19 nt, Human
gagacuuuuugguggaugu

SEQ ID NO: 2115035 - RNA, 21 nt, Human
gagacuuuuugguggauguaa

SEQ ID NO: 2115036 - RNA, 12 nt, Human
gagagaagggga

SEQ ID NO: 2115037 - RNA, 15 nt, Human
gagagaaggggagga

SEQ ID NO: 2115038 - RNA, 17 nt, Human
gagagaaggggaggagg

SEQ ID NO: 2115039 - RNA, 16 nt, Human
gagagaaggggaggag

SEQ ID NO: 2115040 - RNA, 13 nt, Human
gagagaagugccc

SEQ ID NO: 2115041 - RNA, 21 nt, Human
gagagaagugccccugcugcc

SEQ ID NO: 2115042 - RNA, 18 nt, Human
gagagaagugccccugcu

SEQ ID NO: 2115043 - RNA, 13 nt, Human
gagagacaagaag

SEQ ID NO: 2115044 - RNA, 17 nt, Human
gagagacaagaagcaaa

SEQ ID NO: 2115045 - RNA, 13 nt, Human
gagacuuguauga

SEQ ID NO: 2115046 - RNA, 17 nt, Human
gagacuguuuugaauuu

SEQ ID NO: 2115047 - RNA, 23 nt, Human
gagacugucucaagagggcacug

SEQ ID NO: 2115048 - RNA, 22 nt, Human
gagacugcgggaugguccuggg

SEQ ID NO: 2115049 - RNA, 23 nt, Human
gagacugcgggaugguccugggg

SEQ ID NO: 2115050 - RNA, 22 nt, Human
gagacugucucaagagggcacu

SEQ ID NO: 2115051 - RNA, 14 nt, Human
gagacucugucuca

SEQ ID NO: 2115052 - RNA, 19 nt, Human
gagacugcgggaugguccu

SEQ ID NO: 2115053 - RNA, 12 nt, Human
gagacucugugg

SEQ ID NO: 2115054 - RNA, 23 nt, Human
gagacucuguggggccuugguuc

SEQ ID NO: 2115055 - RNA, 14 nt, Human
gagaccagccuggc

SEQ ID NO: 2115056 - RNA, 18 nt, Human
gagaccaaggcgggagca

SEQ ID NO: 2115057 - RNA, 16 nt, Human
gagaccagccugggca

SEQ ID NO: 2115058 - RNA, 19 nt, Human
gagaccagccugggcagca

SEQ ID NO: 2115059 - RNA, 13 nt, Human
gagaccagccugg

SEQ ID NO: 2115060 - RNA, 16 nt, Human
gagaccaaccugacca

SEQ ID NO: 2115061 - RNA, 17 nt, Human
gagaccaaccugaccaa

SEQ ID NO: 2115062 - RNA, 22 nt, Human
gagaccaagacucugaaaucuc

SEQ ID NO: 2115063 - RNA, 23 nt, Human
gagaccaagacucugaaaucuca

SEQ ID NO: 2115064 - RNA, 19 nt, Human
gagacauaaccacugcuuc

SEQ ID NO: 2115065 - RNA, 14 nt, Human
gagaccaaccugac

SEQ ID NO: 2115066 - RNA, 15 nt, Human
gagaccaaccugacc

SEQ ID NO: 2115067 - RNA, 18 nt, Human
gagacauuccaaaacgaa

SEQ ID NO: 2115068 - RNA, 18 nt, Human
gacacaggcccggcucca

SEQ ID NO: 2115069 - RNA, 13 nt, Human
gacacaaaaaaag

SEQ ID NO: 2115070 - RNA, 17 nt, Human
gacaccuacugaguggc

SEQ ID NO: 2115071 - RNA, 20 nt, Human
gacaccugcaccucccccca

SEQ ID NO: 2115072 - RNA, 22 nt, Human
gacaccugcaccuccccccacu

SEQ ID NO: 2115073 - RNA, 13 nt, Human
gacaccugcaccu

SEQ ID NO: 2115074 - RNA, 15 nt, Human
gacaccugcaccucc

SEQ ID NO: 2115075 - RNA, 16 nt, Human
gacaccugcaccuccc

SEQ ID NO: 2115076 - RNA, 17 nt, Human
gacaccugcaccucccc

SEQ ID NO: 2115077 - RNA, 19 nt, Human
gacaccugcaccucccccc

SEQ ID NO: 2115078 - RNA, 11 nt, Human
gacaccucaga

SEQ ID NO: 2115079 - RNA, 13 nt, Human
gacaccucagagc

SEQ ID NO: 2115080 - RNA, 18 nt, Human
gacacuaaccacgcugga

SEQ ID NO: 2115081 - RNA, 17 nt, Human
gacacuaaccacgcugg

SEQ ID NO: 2115082 - RNA, 16 nt, Human
gacacuaaccacgcug

SEQ ID NO: 2115083 - RNA, 15 nt, Human
gacacuaaccacgcu

SEQ ID NO: 2115084 - RNA, 14 nt, Human
gacacguccacccc

SEQ ID NO: 2115085 - RNA, 15 nt, Human
gacacggggcagugg

SEQ ID NO: 2115086 - RNA, 17 nt, Human
gacaccuugacagggca

SEQ ID NO: 2115087 - RNA, 15 nt, Human
gacaccuugacaggg

SEQ ID NO: 2115088 - RNA, 20 nt, Human
gacaccuugacagggcacac

SEQ ID NO: 2115089 - RNA, 18 nt, Human
gacaccuugacagggcac

SEQ ID NO: 2115090 - RNA, 16 nt, Human
gacaccuguacuggag

SEQ ID NO: 2115091 - RNA, 17 nt, Human
gacaccuguacuggaga

SEQ ID NO: 2115092 - RNA, 18 nt, Human
gacaccuguacuggagag

SEQ ID NO: 2115093 - RNA, 20 nt, Human
gacaccuguacuggagagca

SEQ ID NO: 2115094 - RNA, 12 nt, Human
gacaagccccag

SEQ ID NO: 2115095 - RNA, 15 nt, Human
gacaagccccaggca

SEQ ID NO: 2115096 - RNA, 22 nt, Human
gacaaggauugcuacuguccua

SEQ ID NO: 2115097 - RNA, 24 nt, Human
gacaagacuucgggaaggugucug

SEQ ID NO: 2115098 - RNA, 14 nt, Human
gacaauagaacauu

SEQ ID NO: 2115099 - RNA, 13 nt, Human
gacaauaauuuca

SEQ ID NO: 2115100 - RNA, 19 nt, Human
gacaauaauuucagguuuu

SEQ ID NO: 2115101 - RNA, 17 nt, Human
gacaaucaacucuaaua

SEQ ID NO: 2115102 - RNA, 20 nt, Human
gacaaucaugaaauaugcau

SEQ ID NO: 2115103 - RNA, 19 nt, Human
gacaaucaugaaauaugca

SEQ ID NO: 2115104 - RNA, 21 nt, Human
gacaaucaugaaauaugcauc

SEQ ID NO: 2115105 - RNA, 23 nt, Human
gacaagguagcccuggccagagg

SEQ ID NO: 2115106 - RNA, 14 nt, Human
gacaagguagcccu

SEQ ID NO: 2115107 - RNA, 21 nt, Human
gacaagguagcccuggccaga

SEQ ID NO: 2115108 - RNA, 23 nt, Human
gacaaggccccagagacucagag

SEQ ID NO: 2115109 - RNA, 16 nt, Human
gacaaggccccagaga

SEQ ID NO: 2115110 - RNA, 17 nt, Human
gacaaggccccagagac

SEQ ID NO: 2115111 - RNA, 16 nt, Human
gacaagccccaggcag

SEQ ID NO: 2115112 - RNA, 17 nt, Human
gacaagccccaggcagg

SEQ ID NO: 2115113 - RNA, 13 nt, Human
gacaaggccccag

SEQ ID NO: 2115114 - RNA, 14 nt, Human
gacaaggccccaga

SEQ ID NO: 2115115 - RNA, 22 nt, Human
gacaagguucuucccuuuuaca

SEQ ID NO: 2115116 - RNA, 19 nt, Human
gacaagugacuguaucugu

SEQ ID NO: 2115117 - RNA, 20 nt, Human
gacaagugacuguaucugug

SEQ ID NO: 2115118 - RNA, 17 nt, Human
gacacaggcccggcucc

SEQ ID NO: 2115119 - RNA, 15 nt, Human
gacacaggcccggcu

SEQ ID NO: 2115120 - RNA, 13 nt, Human
gacacacagcucu

SEQ ID NO: 2115121 - RNA, 13 nt, Human
gacacacacagcu

SEQ ID NO: 2115122 - RNA, 14 nt, Human
gacacacacagcuu

SEQ ID NO: 2115123 - RNA, 12 nt, Human
gacacacacaca

SEQ ID NO: 2115124 - RNA, 20 nt, Human
gacaaugaugaugauaauga

SEQ ID NO: 2115125 - RNA, 22 nt, Human
gacagcuucucauccugcaggc

SEQ ID NO: 2115126 - RNA, 21 nt, Human
gacagcuucucauccugcagg

SEQ ID NO: 2115127 - RNA, 15 nt, Human
gacagcugugcugua

SEQ ID NO: 2115128 - RNA, 18 nt, Human
gacaggagaccuggcacu

SEQ ID NO: 2115129 - RNA, 21 nt, Human
gacaggagaccuggcacugga

SEQ ID NO: 2115130 - RNA, 11 nt, Human
gacaggagaaa

SEQ ID NO: 2115131 - RNA, 12 nt, Human
gacaggagaaau

SEQ ID NO: 2115132 - RNA, 24 nt, Human
gacaggagaaaugcauccauuccu

SEQ ID NO: 2115133 - RNA, 15 nt, Human
gacaggaccugacua

SEQ ID NO: 2115134 - RNA, 20 nt, Human
gacaggacgggcuugggcuu

SEQ ID NO: 2115135 - RNA, 22 nt, Human
gacagcugucccugucaccaag

SEQ ID NO: 2115136 - RNA, 18 nt, Human
gacagcugucccugucac

SEQ ID NO: 2115137 - RNA, 19 nt, Human
gacagcugucccugucacc

SEQ ID NO: 2115138 - RNA, 14 nt, Human
gacagcugucccug

SEQ ID NO: 2115139 - RNA, 15 nt, Human
gacagcugucccugu

SEQ ID NO: 2115140 - RNA, 16 nt, Human
gacagcugucccuguc

SEQ ID NO: 2115141 - RNA, 17 nt, Human
gacagcugucccuguca

SEQ ID NO: 2115142 - RNA, 19 nt, Human
gacaggcauguucucugag

SEQ ID NO: 2115143 - RNA, 18 nt, Human
gacaggcauguucucuga

SEQ ID NO: 2115144 - RNA, 17 nt, Human
gacaggcaaugcuggcu

SEQ ID NO: 2115145 - RNA, 24 nt, Human
gacaggcaaugcuggcuguuggcu

SEQ ID NO: 2115146 - RNA, 16 nt, Human
gacaggcaaugcuggc

SEQ ID NO: 2115147 - RNA, 14 nt, Human
gacaggcaaugcug

SEQ ID NO: 2115148 - RNA, 23 nt, Human
gacagaucucugcuuuggaaauc

SEQ ID NO: 2115149 - RNA, 21 nt, Human
gacagaucucugcuuuggaaa

SEQ ID NO: 2115150 - RNA, 19 nt, Human
gacagaucucugcuuugga

SEQ ID NO: 2115151 - RNA, 20 nt, Human
gacagaucauagauuucuga

SEQ ID NO: 2115152 - RNA, 21 nt, Human
gacagaucauagauuucugau

SEQ ID NO: 2115153 - RNA, 23 nt, Human
gacagaucauagauuucugauuu

SEQ ID NO: 2115154 - RNA, 16 nt, Human
gacagacacaggcccg

SEQ ID NO: 2115155 - RNA, 15 nt, Human
gacagacacaggccc

SEQ ID NO: 2115156 - RNA, 21 nt, Human
gacacuaaccacgcuggaccu

SEQ ID NO: 2115157 - RNA, 20 nt, Human
gacacuaaccacgcuggacc

SEQ ID NO: 2115158 - RNA, 15 nt, Human
gacacguccacccca

SEQ ID NO: 2115159 - RNA, 14 nt, Human
gacagacacaggcc

SEQ ID NO: 2115160 - RNA, 13 nt, Human
gacagccacggcc

SEQ ID NO: 2115161 - RNA, 14 nt, Human
gacagaugccccag

SEQ ID NO: 2115162 - RNA, 18 nt, Human
gacagaugccccagagcu

SEQ ID NO: 2115163 - RNA, 19 nt, Human
gacagaugccccagagcug

SEQ ID NO: 2115164 - RNA, 13 nt, Human
gacagcauggugc

SEQ ID NO: 2115165 - RNA, 18 nt, Human
gacagcauggugcaugcc

SEQ ID NO: 2115166 - RNA, 21 nt, Human
gacagcauggugcaugccgcu

SEQ ID NO: 2115167 - RNA, 22 nt, Human
gacagcauggugcaugccgcug

SEQ ID NO: 2115168 - RNA, 21 nt, Human
gacaggcccaagagaugaaga

SEQ ID NO: 2115169 - RNA, 16 nt, Human
gacaggcccaagagau

SEQ ID NO: 2115170 - RNA, 14 nt, Human
gacaggcagaaaga

SEQ ID NO: 2115171 - RNA, 15 nt, Human
gacaggcagaaagag

SEQ ID NO: 2115172 - RNA, 18 nt, Human
gacaggcccaagagauga

SEQ ID NO: 2115173 - RNA, 22 nt, Human
gacaggcccaagagaugaagag

SEQ ID NO: 2115174 - RNA, 16 nt, Human
gacauaauuucacuga

SEQ ID NO: 2115175 - RNA, 13 nt, Human
gacauauucauuu

SEQ ID NO: 2115176 - RNA, 20 nt, Human
gacauauucauuuggaaaua

SEQ ID NO: 2115177 - RNA, 21 nt, Human
gacaucuguuucuaaauguuu

SEQ ID NO: 2115178 - RNA, 16 nt, Human
gacaucuuaguauuug

SEQ ID NO: 2115179 - RNA, 19 nt, Human
gacaucuuaguauuugcau

SEQ ID NO: 2115180 - RNA, 20 nt, Human
gacaucuucaaagcuugaag

SEQ ID NO: 2115181 - RNA, 21 nt, Human
gacaucuucaaagcuugaaga

SEQ ID NO: 2115182 - RNA, 22 nt, Human
gaccaaauuccuuggcaugccu

SEQ ID NO: 2115183 - RNA, 17 nt, Human
gaccaacaagggcagug

SEQ ID NO: 2115184 - RNA, 18 nt, Human
gaccaacaagggcagugg

SEQ ID NO: 2115185 - RNA, 16 nt, Human
gaccaacauggagaaa

SEQ ID NO: 2115186 - RNA, 23 nt, Human
gaccaaauuccuuggcaugccuu

SEQ ID NO: 2115187 - RNA, 17 nt, Human
gaccaacauggagaaac

SEQ ID NO: 2115188 - RNA, 17 nt, Human
gaccaaaaugacaauga

SEQ ID NO: 2115189 - RNA, 21 nt, Human
gaccaaaaugacaaugaugau

SEQ ID NO: 2115190 - RNA, 14 nt, Human
gaccaaaaaaauaa

SEQ ID NO: 2115191 - RNA, 17 nt, Human
gaccaaaaaaauaaggu

SEQ ID NO: 2115192 - RNA, 15 nt, Human
gacauggggaggaag

SEQ ID NO: 2115193 - RNA, 16 nt, Human
gacauggggaggaagg

SEQ ID NO: 2115194 - RNA, 12 nt, Human
gacaugaauaug

SEQ ID NO: 2115195 - RNA, 14 nt, Human
gacaugaauaugau

SEQ ID NO: 2115196 - RNA, 16 nt, Human
gacaugaaugcacacu

SEQ ID NO: 2115197 - RNA, 16 nt, Human
gacauggacccggagc

SEQ ID NO: 2115198 - RNA, 17 nt, Human
gacauggacccggagcu

SEQ ID NO: 2115199 - RNA, 12 nt, Human
gaccccucaccu

SEQ ID NO: 2115200 - RNA, 13 nt, Human
gaccccuccaugu

SEQ ID NO: 2115201 - RNA, 23 nt, Human
gacccugucucaaaaaaagaaaa

SEQ ID NO: 2115202 - RNA, 15 nt, Human
gacccagucccuggg

SEQ ID NO: 2115203 - RNA, 16 nt, Human
gacccaggcugccuga

SEQ ID NO: 2115204 - RNA, 18 nt, Human
gacccaggcugccugagc

SEQ ID NO: 2115205 - RNA, 14 nt, Human
gacccagucccugg

SEQ ID NO: 2115206 - RNA, 19 nt, Human
gaccccagcggcugaguca

SEQ ID NO: 2115207 - RNA, 12 nt, Human
gacccacugcuu

SEQ ID NO: 2115208 - RNA, 22 nt, Human
gacccaccugguggccucugcc

SEQ ID NO: 2115209 - RNA, 11 nt, Human
gacccacugcu

SEQ ID NO: 2115210 - RNA, 18 nt, Human
gaccaagagagaaagaag

SEQ ID NO: 2115211 - RNA, 21 nt, Human
gacauggcuugccacagcucu

SEQ ID NO: 2115212 - RNA, 19 nt, Human
gaccaacugggcccaagac

SEQ ID NO: 2115213 - RNA, 12 nt, Human
gaccaagaacug

SEQ ID NO: 2115214 - RNA, 13 nt, Human
gaccaagaacugc

SEQ ID NO: 2115215 - RNA, 15 nt, Human
gaccaagaacugcau

SEQ ID NO: 2115216 - RNA, 14 nt, Human
gaccaagagagaaa

SEQ ID NO: 2115217 - RNA, 12 nt, Human
gaccaagcagga

SEQ ID NO: 2115218 - RNA, 15 nt, Human
gaccaagagagaaag

SEQ ID NO: 2115219 - RNA, 16 nt, Human
gaccaagagagaaaga

SEQ ID NO: 2115220 - RNA, 14 nt, Human
gaccaagcaggaag

SEQ ID NO: 2115221 - RNA, 21 nt, Human
gaccaacauggagaaacccug

SEQ ID NO: 2115222 - RNA, 22 nt, Human
gaccaacauggagaaacccugu

SEQ ID NO: 2115223 - RNA, 13 nt, Human
gaccaaccugacc

SEQ ID NO: 2115224 - RNA, 14 nt, Human
gaccaaccugacca

SEQ ID NO: 2115225 - RNA, 13 nt, Human
gaccaacugggcc

SEQ ID NO: 2115226 - RNA, 14 nt, Human
gaccaacugggccc

SEQ ID NO: 2115227 - RNA, 13 nt, Human
gaccugcaggcca

SEQ ID NO: 2115228 - RNA, 21 nt, Human
gaccugccccgcccagcugca

SEQ ID NO: 2115229 - RNA, 20 nt, Human
gaccugcaggccaagagcag

SEQ ID NO: 2115230 - RNA, 15 nt, Human
gaccgguacagaaag

SEQ ID NO: 2115231 - RNA, 13 nt, Human
gaccccucaccuu

SEQ ID NO: 2115232 - RNA, 14 nt, Human
gaccccucaccuug

SEQ ID NO: 2115233 - RNA, 12 nt, Human
gacccugucucu

SEQ ID NO: 2115234 - RNA, 22 nt, Human
gaccccucaccuugcaacacac

SEQ ID NO: 2115235 - RNA, 21 nt, Human
gaccggaggcaaaaggcagug

SEQ ID NO: 2115236 - RNA, 19 nt, Human
gacccuucccuugagcccu

SEQ ID NO: 2115237 - RNA, 16 nt, Human
gaccucacugugaccu

SEQ ID NO: 2115238 - RNA, 17 nt, Human
gaccucagaguccaggc

SEQ ID NO: 2115239 - RNA, 18 nt, Human
gaccucagaguccaggcc

SEQ ID NO: 2115240 - RNA, 19 nt, Human
gaccucagaguccaggccc

SEQ ID NO: 2115241 - RNA, 10 nt, Human
gaccucagcc

SEQ ID NO: 2115242 - RNA, 21 nt, Human
gaccucagaguccaggcccca

SEQ ID NO: 2115243 - RNA, 11 nt, Human
gaccucagcca

SEQ ID NO: 2115244 - RNA, 11 nt, Human
gaccucagccu

SEQ ID NO: 2115245 - RNA, 12 nt, Human
gaccucagccug

SEQ ID NO: 2115246 - RNA, 13 nt, Human
gaccucagccugu

SEQ ID NO: 2115247 - RNA, 14 nt, Human
gaccucagccugug

SEQ ID NO: 2115248 - RNA, 16 nt, Human
gaccucagccugugcu

SEQ ID NO: 2115249 - RNA, 19 nt, Human
gaccucagccugugcugcc

SEQ ID NO: 2115250 - RNA, 13 nt, Human
gaccucagccuuc

SEQ ID NO: 2115251 - RNA, 14 nt, Human
gaccucagccuucc

SEQ ID NO: 2115252 - RNA, 20 nt, Human
gaccucagccuuccccuugc

SEQ ID NO: 2115253 - RNA, 14 nt, Human
gacccacagccucu

SEQ ID NO: 2115254 - RNA, 17 nt, Human
gaccuaacauucgaucu

SEQ ID NO: 2115255 - RNA, 21 nt, Human
gaccucaccaagcugcugugg

SEQ ID NO: 2115256 - RNA, 14 nt, Human
gacgaggcugggcc

SEQ ID NO: 2115257 - RNA, 21 nt, Human
gacggagucccaccuuggcug

SEQ ID NO: 2115258 - RNA, 23 nt, Human
gacggagucccaccuuggcugca

SEQ ID NO: 2115259 - RNA, 22 nt, Human
gacgcaugcccucaaucccagc

SEQ ID NO: 2115260 - RNA, 18 nt, Human
gacggagucccaccuugg

SEQ ID NO: 2115261 - RNA, 14 nt, Human
gacggagucccacc

SEQ ID NO: 2115262 - RNA, 13 nt, Human
gacgcacacagcu

SEQ ID NO: 2115263 - RNA, 14 nt, Human
gacgcacacagcuu

SEQ ID NO: 2115264 - RNA, 23 nt, Human
gacgauacuccaaccauauggau

SEQ ID NO: 2115265 - RNA, 21 nt, Human
gaccuaaccuaagcaaaacca

SEQ ID NO: 2115266 - RNA, 19 nt, Human
gacgguucaccagccucuc

SEQ ID NO: 2115267 - RNA, 17 nt, Human
gacgguucaccagccuc

SEQ ID NO: 2115268 - RNA, 18 nt, Human
gacgguucaccagccucu

SEQ ID NO: 2115269 - RNA, 21 nt, Human
gacggugggcauuugugaggc

SEQ ID NO: 2115270 - RNA, 15 nt, Human
gacgguucaccagcc

SEQ ID NO: 2115271 - RNA, 18 nt, Human
gacgucaagucuccuucc

SEQ ID NO: 2115272 - RNA, 12 nt, Human
gacgucccucca

SEQ ID NO: 2115273 - RNA, 22 nt, Human
gacgucccuccacguucacccc

SEQ ID NO: 2115274 - RNA, 23 nt, Human
gacguaugcuuauuuuaaaauuu

SEQ ID NO: 2115275 - RNA, 14 nt, Human
gacgucaagucucc

SEQ ID NO: 2115276 - RNA, 20 nt, Human
gacguaggaacgguaaauuu

SEQ ID NO: 2115277 - RNA, 23 nt, Human
gaccuugaacuggguacuugugg

SEQ ID NO: 2115278 - RNA, 19 nt, Human
gaccugcugagggaccagc

SEQ ID NO: 2115279 - RNA, 20 nt, Human
gaccugcugagggaccagcc

SEQ ID NO: 2115280 - RNA, 21 nt, Human
gaccugcugagggaccagcca

SEQ ID NO: 2115281 - RNA, 21 nt, Human
gaccuuugucaucuuucuucu

SEQ ID NO: 2115282 - RNA, 15 nt, Human
gacuccagaucugca

SEQ ID NO: 2115283 - RNA, 16 nt, Human
gacuccagaucugcac

SEQ ID NO: 2115284 - RNA, 18 nt, Human
gacuccagaucugcaccg

SEQ ID NO: 2115285 - RNA, 15 nt, Human
gacucagguugucug

SEQ ID NO: 2115286 - RNA, 21 nt, Human
gacucagguuguaguaaagaa

SEQ ID NO: 2115287 - RNA, 23 nt, Human
gacucagguuguaguaaagaaau

SEQ ID NO: 2115288 - RNA, 12 nt, Human
gacucaguguuc

SEQ ID NO: 2115289 - RNA, 15 nt, Human
gacucaguuugucag

SEQ ID NO: 2115290 - RNA, 20 nt, Human
gacucccuccucaccucugg

SEQ ID NO: 2115291 - RNA, 23 nt, Human
gacucccuccucaccucuggacu

SEQ ID NO: 2115292 - RNA, 24 nt, Human
gacucccuccucaccucuggacug

SEQ ID NO: 2115293 - RNA, 12 nt, Human
gacucccuccuc

SEQ ID NO: 2115294 - RNA, 13 nt, Human
gacucccuccuca

SEQ ID NO: 2115295 - RNA, 14 nt, Human
gacucccuccucac

SEQ ID NO: 2115296 - RNA, 16 nt, Human
gacucccuccucaccu

SEQ ID NO: 2115297 - RNA, 19 nt, Human
gacucccuccucaccucug

SEQ ID NO: 2115298 - RNA, 23 nt, Human
gacuccaugagaagccgugggug

SEQ ID NO: 2115299 - RNA, 16 nt, Human
gacucccaaagagcug

SEQ ID NO: 2115300 - RNA, 17 nt, Human
gacucccaaagagcugc

SEQ ID NO: 2115301 - RNA, 18 nt, Human
gacucccaaagagcugcc

SEQ ID NO: 2115302 - RNA, 19 nt, Human
gacucccaaagagcugccu

SEQ ID NO: 2115303 - RNA, 18 nt, Human
gacuacuugggagcaccg

SEQ ID NO: 2115304 - RNA, 20 nt, Human
gacuagaaaauuuaaaacau

SEQ ID NO: 2115305 - RNA, 18 nt, Human
gacuagaaagugaauaaa

SEQ ID NO: 2115306 - RNA, 20 nt, Human
gacuacuugggagcaccgcc

SEQ ID NO: 2115307 - RNA, 15 nt, Human
gacuagaagggccag

SEQ ID NO: 2115308 - RNA, 12 nt, Human
gacuacaggcac

SEQ ID NO: 2115309 - RNA, 17 nt, Human
gacuacucccccaggug

SEQ ID NO: 2115310 - RNA, 20 nt, Human
gacguucauuugugugcuca

SEQ ID NO: 2115311 - RNA, 23 nt, Human
gacuagaagggccaguccugccu

SEQ ID NO: 2115312 - RNA, 19 nt, Human
gacuagaccuccagcuguu

SEQ ID NO: 2115313 - RNA, 16 nt, Human
gacuagacguucauuu

SEQ ID NO: 2115314 - RNA, 15 nt, Human
gacucaggaugccca

SEQ ID NO: 2115315 - RNA, 16 nt, Human
gacucaggaugcccag

SEQ ID NO: 2115316 - RNA, 17 nt, Human
gacucaggaugcccagg

SEQ ID NO: 2115317 - RNA, 18 nt, Human
gacucaggaugcccaggg

SEQ ID NO: 2115318 - RNA, 19 nt, Human
gacucaggaugcccagggc

SEQ ID NO: 2115319 - RNA, 23 nt, Human
gacucaggaugcccagggccacu

SEQ ID NO: 2115320 - RNA, 14 nt, Human
gacucagggcccca

SEQ ID NO: 2115321 - RNA, 15 nt, Human
gacucagggccccag

SEQ ID NO: 2115322 - RNA, 17 nt, Human
gacucagggccccagca

SEQ ID NO: 2115323 - RNA, 18 nt, Human
gacucagggccccagcac

SEQ ID NO: 2115324 - RNA, 20 nt, Human
gacucagggccccagcacua

SEQ ID NO: 2115325 - RNA, 14 nt, Human
gcacguauuuuaau

SEQ ID NO: 2115326 - RNA, 15 nt, Human
gcacguauuuuaaua

SEQ ID NO: 2115327 - RNA, 15 nt, Human
gcacguggagagcug

SEQ ID NO: 2115328 - RNA, 16 nt, Human
gcacguggagagcugg

SEQ ID NO: 2115329 - RNA, 18 nt, Human
gcacguggagagcuggug

SEQ ID NO: 2115330 - RNA, 16 nt, Human
gcacguaguaggguca

SEQ ID NO: 2115331 - RNA, 20 nt, Human
gcacguaguagggucaggcc

SEQ ID NO: 2115332 - RNA, 21 nt, Human
gcacguaguagggucaggcca

SEQ ID NO: 2115333 - RNA, 20 nt, Human
gcacguggagagcuggugcc

SEQ ID NO: 2115334 - RNA, 17 nt, Human
gcacguggcuucugaug

SEQ ID NO: 2115335 - RNA, 23 nt, Human
gcacguggcuucugaugaaucuu

SEQ ID NO: 2115336 - RNA, 23 nt, Human
gcacgugggucuucagggggcca

SEQ ID NO: 2115337 - RNA, 24 nt, Human
gcacugguggcccgacagccuggc

SEQ ID NO: 2115338 - RNA, 23 nt, Human
gcacugguggcccgacagccugg

SEQ ID NO: 2115339 - RNA, 22 nt, Human
gcacugguggcccgacagccug

SEQ ID NO: 2115340 - RNA, 12 nt, Human
gcacugcugccc

SEQ ID NO: 2115341 - RNA, 19 nt, Human
gcagacaggcaagcaccuc

SEQ ID NO: 2115342 - RNA, 23 nt, Human
gcagacaggcaagcaccuccugc

SEQ ID NO: 2115343 - RNA, 14 nt, Human
gcagaauaguauuu

SEQ ID NO: 2115344 - RNA, 18 nt, Human
gcagaauaaucuuugggu

SEQ ID NO: 2115345 - RNA, 21 nt, Human
gcacuuaaauaucaaucauuu

SEQ ID NO: 2115346 - RNA, 22 nt, Human
gcacuuaaauaucaaucauuuu

SEQ ID NO: 2115347 - RNA, 20 nt, Human
gcaaugaguguguuggcuug

SEQ ID NO: 2115348 - RNA, 22 nt, Human
gcacuuacagauaggccuucuu

SEQ ID NO: 2115349 - RNA, 22 nt, Human
gcacccaccaucaugucuggcu

SEQ ID NO: 2115350 - RNA, 14 nt, Human
gcaccauugcugcu

SEQ ID NO: 2115351 - RNA, 22 nt, Human
gcaccauugcugcuccuuagcu

SEQ ID NO: 2115352 - RNA, 19 nt, Human
gcacccggccccugcuggu

SEQ ID NO: 2115353 - RNA, 22 nt, Human
gcacccacccagcacccagcaa

SEQ ID NO: 2115354 - RNA, 22 nt, Human
gcacccacaaauaaaugacaag

SEQ ID NO: 2115355 - RNA, 19 nt, Human
gcacccacaagugccacug

SEQ ID NO: 2115356 - RNA, 19 nt, Human
gcacccacccagcacccag

SEQ ID NO: 2115357 - RNA, 17 nt, Human
gcaccagccggggaaga

SEQ ID NO: 2115358 - RNA, 16 nt, Human
gcaccagcagccugga

SEQ ID NO: 2115359 - RNA, 15 nt, Human
gcaccauucaggaac

SEQ ID NO: 2115360 - RNA, 16 nt, Human
gcaccauucaggaacc

SEQ ID NO: 2115361 - RNA, 22 nt, Human
gcaccauucaggaaccuggacc

SEQ ID NO: 2115362 - RNA, 23 nt, Human
gcaccauucaggaaccuggacca

SEQ ID NO: 2115363 - RNA, 14 nt, Human
gcaauggcagccuu

SEQ ID NO: 2115364 - RNA, 20 nt, Human
gcaccacugcacuccagccu

SEQ ID NO: 2115365 - RNA, 13 nt, Human
gcaauggcagccu

SEQ ID NO: 2115366 - RNA, 12 nt, Human
gcaauggcagcc

SEQ ID NO: 2115367 - RNA, 15 nt, Human
gcaccagcagccugg

SEQ ID NO: 2115368 - RNA, 23 nt, Human
gcaccacugcacuccagccuggg

SEQ ID NO: 2115369 - RNA, 21 nt, Human
gcaccacugcacuccagccug

SEQ ID NO: 2115370 - RNA, 22 nt, Human
gcaccacugcacuccagccugg

SEQ ID NO: 2115371 - RNA, 15 nt, Human
gcacgaacccaccug

SEQ ID NO: 2115372 - RNA, 16 nt, Human
gcacgaacccaccugc

SEQ ID NO: 2115373 - RNA, 17 nt, Human
gcacgaacccaccugcu

SEQ ID NO: 2115374 - RNA, 19 nt, Human
gcacgaacccaccugcuga

SEQ ID NO: 2115375 - RNA, 23 nt, Human
gcacgaacccaccugcugagaga

SEQ ID NO: 2115376 - RNA, 20 nt, Human
gcacgagugggaaggacuug

SEQ ID NO: 2115377 - RNA, 15 nt, Human
gcacccucaggcagg

SEQ ID NO: 2115378 - RNA, 19 nt, Human
gcagacaugugcacuugaa

SEQ ID NO: 2115379 - RNA, 20 nt, Human
gcagauucauuuuucuuucu

SEQ ID NO: 2115380 - RNA, 17 nt, Human
gcagauugaaaaggaca

SEQ ID NO: 2115381 - RNA, 19 nt, Human
gcagauucauuuuucuuuc

SEQ ID NO: 2115382 - RNA, 16 nt, Human
gcagauuuuacaaaag

SEQ ID NO: 2115383 - RNA, 17 nt, Human
gcagauuuuacaaaaga

SEQ ID NO: 2115384 - RNA, 20 nt, Human
gcagauuuuacaaaagaugu

SEQ ID NO: 2115385 - RNA, 21 nt, Human
gcagauuuuacaaaagaugua

SEQ ID NO: 2115386 - RNA, 14 nt, Human
gcagauuggagaaa

SEQ ID NO: 2115387 - RNA, 19 nt, Human
gcagauuggagaaacccuu

SEQ ID NO: 2115388 - RNA, 20 nt, Human
gcagauuuagugaaagcuag

SEQ ID NO: 2115389 - RNA, 23 nt, Human
gcagauuuagugaaagcuagaga

SEQ ID NO: 2115390 - RNA, 22 nt, Human
gcagauacaggaaaagcugcug

SEQ ID NO: 2115391 - RNA, 16 nt, Human
gcagauaaucagccuc

SEQ ID NO: 2115392 - RNA, 17 nt, Human
gcagauaaucagccucu

SEQ ID NO: 2115393 - RNA, 18 nt, Human
gcagauaaucagccucuu

SEQ ID NO: 2115394 - RNA, 19 nt, Human
gcagauaaucagccucuua

SEQ ID NO: 2115395 - RNA, 24 nt, Human
gcagccccauucugccugcccagg

SEQ ID NO: 2115396 - RNA, 21 nt, Human
gcagccccauucugccugccc

SEQ ID NO: 2115397 - RNA, 19 nt, Human
gcagccccauucugccugc

SEQ ID NO: 2115398 - RNA, 18 nt, Human
gcagccccauucugccug

SEQ ID NO: 2115399 - RNA, 17 nt, Human
gcagccccauucugccu

SEQ ID NO: 2115400 - RNA, 15 nt, Human
gcagcccguguggcc

SEQ ID NO: 2115401 - RNA, 23 nt, Human
gcagccccgcgccuccuuccuug

SEQ ID NO: 2115402 - RNA, 17 nt, Human
gcagcccguguggcccc

SEQ ID NO: 2115403 - RNA, 18 nt, Human
gcagcccguguggccccu

SEQ ID NO: 2115404 - RNA, 19 nt, Human
gcagcccguguggccccuu

SEQ ID NO: 2115405 - RNA, 20 nt, Human
gcagcccguguggccccuuc

SEQ ID NO: 2115406 - RNA, 21 nt, Human
gcagcccguguggccccuuca

SEQ ID NO: 2115407 - RNA, 14 nt, Human
gcagcacagagagg

SEQ ID NO: 2115408 - RNA, 23 nt, Human
gcaggaggaucacuugaguccag

SEQ ID NO: 2115409 - RNA, 18 nt, Human
gcaggacaacgaggaagc

SEQ ID NO: 2115410 - RNA, 19 nt, Human
gcaggacaacgaggaagcc

SEQ ID NO: 2115411 - RNA, 14 nt, Human
gcaggaggauugcu

SEQ ID NO: 2115412 - RNA, 20 nt, Human
gcaggaaggcugagaggaga

SEQ ID NO: 2115413 - RNA, 17 nt, Human
gcaggaauguguggcag

SEQ ID NO: 2115414 - RNA, 18 nt, Human
gcaggaauugguggcaga

SEQ ID NO: 2115415 - RNA, 19 nt, Human
gcaggaauugguggcagau

SEQ ID NO: 2115416 - RNA, 17 nt, Human
gcaggacaacgaggaag

SEQ ID NO: 2115417 - RNA, 20 nt, Human
gcaggaggaucacuugaguc

SEQ ID NO: 2115418 - RNA, 16 nt, Human
gcaggaaggagagccu

SEQ ID NO: 2115419 - RNA, 17 nt, Human
gcaggaaggagagccug

SEQ ID NO: 2115420 - RNA, 23 nt, Human
gcaggaaggagagccugcugcau

SEQ ID NO: 2115421 - RNA, 23 nt, Human
gcaggaggauugcuugagcccag

SEQ ID NO: 2115422 - RNA, 11 nt, Human
gcaggagggag

SEQ ID NO: 2115423 - RNA, 15 nt, Human
gcaggcacauggagg

SEQ ID NO: 2115424 - RNA, 15 nt, Human
gcagccuuggcaaac

SEQ ID NO: 2115425 - RNA, 18 nt, Human
gcagccuuugccuccccg

SEQ ID NO: 2115426 - RNA, 17 nt, Human
gcagccuuugccucccc

SEQ ID NO: 2115427 - RNA, 14 nt, Human
gcagcuaguuuucu

SEQ ID NO: 2115428 - RNA, 14 nt, Human
gcagcucaaaggca

SEQ ID NO: 2115429 - RNA, 17 nt, Human
gcagcucaaaggcacag

SEQ ID NO: 2115430 - RNA, 21 nt, Human
gcagcuugcguuagaaugagg

SEQ ID NO: 2115431 - RNA, 15 nt, Human
gcagcuugcugcacc

SEQ ID NO: 2115432 - RNA, 15 nt, Human
gcagcucaaaggcac

SEQ ID NO: 2115433 - RNA, 13 nt, Human
gcagcccugcuuu

SEQ ID NO: 2115434 - RNA, 13 nt, Human
gcagcccuccuca

SEQ ID NO: 2115435 - RNA, 15 nt, Human
gcagcccuccucacc

SEQ ID NO: 2115436 - RNA, 18 nt, Human
gcagcccuccucaccccg

SEQ ID NO: 2115437 - RNA, 14 nt, Human
gcagccuguggcau

SEQ ID NO: 2115438 - RNA, 16 nt, Human
gcagccuguggcaucu

SEQ ID NO: 2115439 - RNA, 22 nt, Human
gcagccuguggcaucuuugccu

SEQ ID NO: 2115440 - RNA, 20 nt, Human
gcaggggcaaacaccugcug

SEQ ID NO: 2115441 - RNA, 21 nt, Human
gcaggucacugaaacuucaag

SEQ ID NO: 2115442 - RNA, 15 nt, Human
gcaggugacagugag

SEQ ID NO: 2115443 - RNA, 16 nt, Human
gcaggugacagugagg

SEQ ID NO: 2115444 - RNA, 17 nt, Human
gcaggugaccuucuggg

SEQ ID NO: 2115445 - RNA, 20 nt, Human
gcaggucuugaacuccuggc

SEQ ID NO: 2115446 - RNA, 19 nt, Human
gcaggucuugaacuccugg

SEQ ID NO: 2115447 - RNA, 22 nt, Human
gcagguccaggguuugaguuca

SEQ ID NO: 2115448 - RNA, 14 nt, Human
gcagguaccacuga

SEQ ID NO: 2115449 - RNA, 15 nt, Human
gcagggugggaugga

SEQ ID NO: 2115450 - RNA, 19 nt, Human
gcaggugaccuucugggaa

SEQ ID NO: 2115451 - RNA, 14 nt, Human
gcagugauuaaggu

SEQ ID NO: 2115452 - RNA, 22 nt, Human
gcagugauuaaggucucucuuu

SEQ ID NO: 2115453 - RNA, 13 nt, Human
gcagugauuuuua

SEQ ID NO: 2115454 - RNA, 14 nt, Human
gcagugauuuuuau

SEQ ID NO: 2115455 - RNA, 16 nt, Human
gcagugcagcaaccag

SEQ ID NO: 2115456 - RNA, 21 nt, Human
gcagugcagcaaccagagcac

SEQ ID NO: 2115457 - RNA, 22 nt, Human
gcagugcagcaaccagagcacu

SEQ ID NO: 2115458 - RNA, 23 nt, Human
gcagugcagcaaccagagcacug

SEQ ID NO: 2115459 - RNA, 16 nt, Human
gcaguggaggugcugc

SEQ ID NO: 2115460 - RNA, 14 nt, Human
gcaguggagaggga

SEQ ID NO: 2115461 - RNA, 15 nt, Human
gcaguggagagggac

SEQ ID NO: 2115462 - RNA, 15 nt, Human
gcaguggacaccagg

SEQ ID NO: 2115463 - RNA, 15 nt, Human
gcagugccuuccaua

SEQ ID NO: 2115464 - RNA, 21 nt, Human
gcagggcucagcggggacagc

SEQ ID NO: 2115465 - RNA, 19 nt, Human
gcagggcucagcggggaca

SEQ ID NO: 2115466 - RNA, 22 nt, Human
gcagggcaucuccugugcaugg

SEQ ID NO: 2115467 - RNA, 14 nt, Human
gcagggcaucuccu

SEQ ID NO: 2115468 - RNA, 15 nt, Human
gcagggcaucuccug

SEQ ID NO: 2115469 - RNA, 19 nt, Human
gcagggcaucuccugugca

SEQ ID NO: 2115470 - RNA, 21 nt, Human
gcagggcaucuccugugcaug

SEQ ID NO: 2115471 - RNA, 18 nt, Human
gcagggucucacucuguc

SEQ ID NO: 2115472 - RNA, 17 nt, Human
gcagggucucacucugu

SEQ ID NO: 2115473 - RNA, 22 nt, Human
gcagggcucagcggggacagcu

SEQ ID NO: 2115474 - RNA, 14 nt, Human
gcagggcucagcgg

SEQ ID NO: 2115475 - RNA, 16 nt, Human
gcauauccugagccau

SEQ ID NO: 2115476 - RNA, 15 nt, Human
gcauauccugagcca

SEQ ID NO: 2115477 - RNA, 20 nt, Human
gcauaguauuccauugugug

SEQ ID NO: 2115478 - RNA, 21 nt, Human
gcauaguauuccauuguguga

SEQ ID NO: 2115479 - RNA, 22 nt, Human
gcauaguauuccauugugugag

SEQ ID NO: 2115480 - RNA, 23 nt, Human
gcauaguauuccauugugugagu

SEQ ID NO: 2115481 - RNA, 18 nt, Human
gcauaguucccauguuaa

SEQ ID NO: 2115482 - RNA, 12 nt, Human
gcauagaaggag

SEQ ID NO: 2115483 - RNA, 14 nt, Human
gcauagaaggagga

SEQ ID NO: 2115484 - RNA, 23 nt, Human
gcauagaaggaggagagggaaaa

SEQ ID NO: 2115485 - RNA, 23 nt, Human
gcauauuuauagcaauccauguu

SEQ ID NO: 2115486 - RNA, 14 nt, Human
gcaucaccucaggc

SEQ ID NO: 2115487 - RNA, 15 nt, Human
gcaucaccucaggcc

SEQ ID NO: 2115488 - RNA, 17 nt, Human
gcaucaccucaggccag

SEQ ID NO: 2115489 - RNA, 11 nt, Human
gcaguucugca

SEQ ID NO: 2115490 - RNA, 15 nt, Human
gcaguucugcaaaua

SEQ ID NO: 2115491 - RNA, 18 nt, Human
gcaguucugcaaauagaa

SEQ ID NO: 2115492 - RNA, 19 nt, Human
gcaguucugcaaauagaaa

SEQ ID NO: 2115493 - RNA, 19 nt, Human
gcaguucugggugcucccu

SEQ ID NO: 2115494 - RNA, 20 nt, Human
gcagugucuuccauaaugua

SEQ ID NO: 2115495 - RNA, 17 nt, Human
gcaguuauuaacacuaa

SEQ ID NO: 2115496 - RNA, 15 nt, Human
gcagugggagcugcc

SEQ ID NO: 2115497 - RNA, 14 nt, Human
gcagugggagcugc

SEQ ID NO: 2115498 - RNA, 12 nt, Human
gcagugggagcu

SEQ ID NO: 2115499 - RNA, 13 nt, Human
gcagugggagcug

SEQ ID NO: 2115500 - RNA, 11 nt, Human
gcagugucuuc

SEQ ID NO: 2115501 - RNA, 14 nt, Human
gcagugucuuccau

SEQ ID NO: 2115502 - RNA, 15 nt, Human
gcagugucuuccaua

SEQ ID NO: 2115503 - RNA, 16 nt, Human
gcagugucuuccauaa

SEQ ID NO: 2115504 - RNA, 13 nt, Human
gcaucuuugccuu

SEQ ID NO: 2115505 - RNA, 15 nt, Human
gcaucuuugccuugg

SEQ ID NO: 2115506 - RNA, 18 nt, Human
gcaucuuugccuugggcu

SEQ ID NO: 2115507 - RNA, 16 nt, Human
gcaucuuacugaaggu

SEQ ID NO: 2115508 - RNA, 23 nt, Human
gcaucuuacugaagguaaaauug

SEQ ID NO: 2115509 - RNA, 17 nt, Human
gcaucuucucacucccu

SEQ ID NO: 2115510 - RNA, 19 nt, Human
gcaucuucucacucccuuc

SEQ ID NO: 2115511 - RNA, 13 nt, Human
gcaucuucuccau

SEQ ID NO: 2115512 - RNA, 14 nt, Human
gcaucuucuccauc

SEQ ID NO: 2115513 - RNA, 22 nt, Human
gcaucuuugccuugggcugcuc

SEQ ID NO: 2115514 - RNA, 23 nt, Human
gcaucuuugccuugggcugcucc

SEQ ID NO: 2115515 - RNA, 13 nt, Human
gcaugaagguuuc

SEQ ID NO: 2115516 - RNA, 20 nt, Human
gcaucaccuuaggcagggaa

SEQ ID NO: 2115517 - RNA, 10 nt, Human
gcaucagaaa

SEQ ID NO: 2115518 - RNA, 18 nt, Human
gcaucaccuuaggcaggg

SEQ ID NO: 2115519 - RNA, 22 nt, Human
gcaucaccuuaggcagggaagu

SEQ ID NO: 2115520 - RNA, 11 nt, Human
gcaucagaaau

SEQ ID NO: 2115521 - RNA, 12 nt, Human
gcaucagaaaug

SEQ ID NO: 2115522 - RNA, 13 nt, Human
gcaucagaaaugu

SEQ ID NO: 2115523 - RNA, 16 nt, Human
gcaucucuugaggcca

SEQ ID NO: 2115524 - RNA, 17 nt, Human
gcaucucuugaggccag

SEQ ID NO: 2115525 - RNA, 18 nt, Human
gcaucucuugaggccagg

SEQ ID NO: 2115526 - RNA, 20 nt, Human
gcaucucuugaggccaggag

SEQ ID NO: 2115527 - RNA, 21 nt, Human
gcaucucuugaggccaggagu

SEQ ID NO: 2115528 - RNA, 15 nt, Human
gcaucuuacugaagg

SEQ ID NO: 2115529 - RNA, 12 nt, Human
gcaucugcaccc

SEQ ID NO: 2115530 - RNA, 12 nt, Human
gcaucugccccu

SEQ ID NO: 2115531 - RNA, 14 nt, Human
gcaucugacacaaa

SEQ ID NO: 2115532 - RNA, 16 nt, Human
gcaucugacacaaaaa

SEQ ID NO: 2115533 - RNA, 17 nt, Human
gcaucugacacaaaaaa

SEQ ID NO: 2115534 - RNA, 19 nt, Human
gcaucugacacaaaaaaag

SEQ ID NO: 2115535 - RNA, 20 nt, Human
gcaugauguuaaccagaaua

SEQ ID NO: 2115536 - RNA, 19 nt, Human
gcaugagggaucacagggc

SEQ ID NO: 2115537 - RNA, 20 nt, Human
gcaugagggaucacagggcc

SEQ ID NO: 2115538 - RNA, 21 nt, Human
gcaugagggaucacagggccc

SEQ ID NO: 2115539 - RNA, 17 nt, Human
gcaugaccugugaccag

SEQ ID NO: 2115540 - RNA, 22 nt, Human
gcaugaccugugaccagcacug

SEQ ID NO: 2115541 - RNA, 15 nt, Human
gcaugcuggggcaag

SEQ ID NO: 2115542 - RNA, 22 nt, Human
gcaugcucucugcagccagccc

SEQ ID NO: 2115543 - RNA, 23 nt, Human
gcaugcucucugcagccagccca

SEQ ID NO: 2115544 - RNA, 13 nt, Human
gcaugcugcuuua

SEQ ID NO: 2115545 - RNA, 14 nt, Human
gcaugcugcuuuaa

SEQ ID NO: 2115546 - RNA, 13 nt, Human
gcaugcuggggca

SEQ ID NO: 2115547 - RNA, 15 nt, Human
gcaugcggcccagga

SEQ ID NO: 2115548 - RNA, 13 nt, Human
gcaugcucucugc

SEQ ID NO: 2115549 - RNA, 14 nt, Human
gcaugcucucugca

SEQ ID NO: 2115550 - RNA, 15 nt, Human
gcaugcucucugcag

SEQ ID NO: 2115551 - RNA, 17 nt, Human
gcaugcucucugcagcc

SEQ ID NO: 2115552 - RNA, 18 nt, Human
gcaugcucucugcagcca

SEQ ID NO: 2115553 - RNA, 21 nt, Human
gcaugcucucugcagccagcc

SEQ ID NO: 2115554 - RNA, 22 nt, Human
gcauguucucugaggacacuaa

SEQ ID NO: 2115555 - RNA, 21 nt, Human
gcauguucucugaggacacua

SEQ ID NO: 2115556 - RNA, 15 nt, Human
gcauguucucugagg

SEQ ID NO: 2115557 - RNA, 20 nt, Human
gcauggcaaggacugcaggg

SEQ ID NO: 2115558 - RNA, 16 nt, Human
gcaugcuggggcaagu

SEQ ID NO: 2115559 - RNA, 14 nt, Human
gcauggcaccuguc

SEQ ID NO: 2115560 - RNA, 21 nt, Human
gcauggcaccugucgcccagu

SEQ ID NO: 2115561 - RNA, 22 nt, Human
gcauggcaccugucgcccagug

SEQ ID NO: 2115562 - RNA, 14 nt, Human
gcauggcagcaggc

SEQ ID NO: 2115563 - RNA, 17 nt, Human
gcauggaguguguauug

SEQ ID NO: 2115564 - RNA, 18 nt, Human
gcauggaguguguauugu

SEQ ID NO: 2115565 - RNA, 19 nt, Human
gcauggaguguguauuguu

SEQ ID NO: 2115566 - RNA, 20 nt, Human
gcauggaguguguauuguuc

SEQ ID NO: 2115567 - RNA, 22 nt, Human
gcauggaguguguauuguuccc

SEQ ID NO: 2115568 - RNA, 23 nt, Human
gcauggaguguguauuguuccca

SEQ ID NO: 2115569 - RNA, 24 nt, Human
gcauggaguguguauuguucccag

SEQ ID NO: 2115570 - RNA, 15 nt, Human
gcauuuuuuaaaaca

SEQ ID NO: 2115571 - RNA, 16 nt, Human
gcauuuuuuaaaacaa

SEQ ID NO: 2115572 - RNA, 18 nt, Human
gcauuuuugugaaaugaa

SEQ ID NO: 2115573 - RNA, 21 nt, Human
gcauuuuugugaaaugaaaac

SEQ ID NO: 2115574 - RNA, 17 nt, Human
gcauuuuuuaaaacaag

SEQ ID NO: 2115575 - RNA, 18 nt, Human
gcauuuuuuaaaacaaga

SEQ ID NO: 2115576 - RNA, 22 nt, Human
gccaaacccaugaggcaauguc

SEQ ID NO: 2115577 - RNA, 15 nt, Human
gccaaacccugucug

SEQ ID NO: 2115578 - RNA, 20 nt, Human
gccaaagcuaggguggcccu

SEQ ID NO: 2115579 - RNA, 16 nt, Human
gccaaagcuagggugg

SEQ ID NO: 2115580 - RNA, 22 nt, Human
gccaaagcuaggccuggccaga

SEQ ID NO: 2115581 - RNA, 16 nt, Human
gccaaagcuaggccug

SEQ ID NO: 2115582 - RNA, 20 nt, Human
gccaaagccaaagcuaggcc

SEQ ID NO: 2115583 - RNA, 13 nt, Human
gccaaagccaaag

SEQ ID NO: 2115584 - RNA, 16 nt, Human
gccaaagccuccucca

SEQ ID NO: 2115585 - RNA, 19 nt, Human
gccaaagccuccuccagcc

SEQ ID NO: 2115586 - RNA, 15 nt, Human
gcauuauugcauuau

SEQ ID NO: 2115587 - RNA, 14 nt, Human
gcauuauugcauua

SEQ ID NO: 2115588 - RNA, 19 nt, Human
gcauuauauaccauuuauc

SEQ ID NO: 2115589 - RNA, 15 nt, Human
gcauuauauaccauu

SEQ ID NO: 2115590 - RNA, 19 nt, Human
gcauucuugucacaauaaa

SEQ ID NO: 2115591 - RNA, 21 nt, Human
gcauucuugucacaauaaaug

SEQ ID NO: 2115592 - RNA, 22 nt, Human
gcauucuugucacaauaaaugu

SEQ ID NO: 2115593 - RNA, 22 nt, Human
gcauucuuagccuguggcagua

SEQ ID NO: 2115594 - RNA, 20 nt, Human
gcauucugccgugugcccuc

SEQ ID NO: 2115595 - RNA, 22 nt, Human
gcauucugccgugugcccucgg

SEQ ID NO: 2115596 - RNA, 22 nt, Human
gcauucaauuuauucaagaaaa

SEQ ID NO: 2115597 - RNA, 12 nt, Human
gcauucacccag

SEQ ID NO: 2115598 - RNA, 15 nt, Human
gcauucacccagaca

SEQ ID NO: 2115599 - RNA, 19 nt, Human
gcauucacccagacagcuc

SEQ ID NO: 2115600 - RNA, 20 nt, Human
gcauucacccagacagcucc

SEQ ID NO: 2115601 - RNA, 13 nt, Human
gcauuugcugaau

SEQ ID NO: 2115602 - RNA, 14 nt, Human
gcauuugcugaaua

SEQ ID NO: 2115603 - RNA, 13 nt, Human
gcauuugugaggc

SEQ ID NO: 2115604 - RNA, 13 nt, Human
gcauuugugauca

SEQ ID NO: 2115605 - RNA, 17 nt, Human
gcauuugcugaauacag

SEQ ID NO: 2115606 - RNA, 16 nt, Human
gauaaauaacuuuuuu

SEQ ID NO: 2115607 - RNA, 21 nt, Human
gauaaauaacuuuuuuuuaag

SEQ ID NO: 2115608 - RNA, 18 nt, Human
gauaaauaaucggcccac

SEQ ID NO: 2115609 - RNA, 16 nt, Human
gauaagaguuggcugg

SEQ ID NO: 2115610 - RNA, 13 nt, Human
gauaaagauuucu

SEQ ID NO: 2115611 - RNA, 16 nt, Human
gauaaagauuucuuga

SEQ ID NO: 2115612 - RNA, 19 nt, Human
gaggaagcccuaagacguc

SEQ ID NO: 2115613 - RNA, 20 nt, Human
gaggaagcgugaaggccgag

SEQ ID NO: 2115614 - RNA, 19 nt, Human
gaggaagcuccaguccugc

SEQ ID NO: 2115615 - RNA, 21 nt, Human
gaggaagcuccaguccugcuc

SEQ ID NO: 2115616 - RNA, 22 nt, Human
gauaaagaugcaaggaccagga

SEQ ID NO: 2115617 - RNA, 19 nt, Human
gauacaccgggccuggaga

SEQ ID NO: 2115618 - RNA, 19 nt, Human
gauacaggaaaagcugcug

SEQ ID NO: 2115619 - RNA, 20 nt, Human
gauacacugaaguuaacaga

SEQ ID NO: 2115620 - RNA, 22 nt, Human
gauacacugaaguuaacagaga

SEQ ID NO: 2115621 - RNA, 14 nt, Human
gauagaugcccugc

SEQ ID NO: 2115622 - RNA, 18 nt, Human
gauacaggaaaagcugcu

SEQ ID NO: 2115623 - RNA, 19 nt, Human
gauagcacugagcaaagca

SEQ ID NO: 2115624 - RNA, 16 nt, Human
gauaguauugugcaua

SEQ ID NO: 2115625 - RNA, 18 nt, Human
gauaguagcauacauuua

SEQ ID NO: 2115626 - RNA, 16 nt, Human
gauagucaccuuuuaa

SEQ ID NO: 2115627 - RNA, 14 nt, Human
gaucaauaaaaugu

SEQ ID NO: 2115628 - RNA, 18 nt, Human
gaucaauaaaaugugauu

SEQ ID NO: 2115629 - RNA, 21 nt, Human
gaucaauaaaaugugauuuuu

SEQ ID NO: 2115630 - RNA, 19 nt, Human
gaucaauaaaaugugauuu

SEQ ID NO: 2115631 - RNA, 18 nt, Human
gaucacgccacugcacua

SEQ ID NO: 2115632 - RNA, 16 nt, Human
gaucacgccacugcac

SEQ ID NO: 2115633 - RNA, 22 nt, Human
gaucagucugauucccaagcuc

SEQ ID NO: 2115634 - RNA, 13 nt, Human
gaucaggugggga

SEQ ID NO: 2115635 - RNA, 14 nt, Human
gaucagguggggag

SEQ ID NO: 2115636 - RNA, 12 nt, Human
gaucagccuggg

SEQ ID NO: 2115637 - RNA, 15 nt, Human
gaucagccugggcaa

SEQ ID NO: 2115638 - RNA, 18 nt, Human
gaucagccagugaccaac

SEQ ID NO: 2115639 - RNA, 12 nt, Human
gaucacggcuca

SEQ ID NO: 2115640 - RNA, 15 nt, Human
gaucaauuaaaugua

SEQ ID NO: 2115641 - RNA, 16 nt, Human
gaucaauuaaauguag

SEQ ID NO: 2115642 - RNA, 23 nt, Human
gaucacgccacugcacuccagcc

SEQ ID NO: 2115643 - RNA, 24 nt, Human
gaucacgccacugcacuccagccu

SEQ ID NO: 2115644 - RNA, 10 nt, Human
gaucaugaga

SEQ ID NO: 2115645 - RNA, 12 nt, Human
gaucaugcauug

SEQ ID NO: 2115646 - RNA, 13 nt, Human
gaucaugcauugu

SEQ ID NO: 2115647 - RNA, 14 nt, Human
gaucaugcauuguu

SEQ ID NO: 2115648 - RNA, 15 nt, Human
gaucaugcauuguug

SEQ ID NO: 2115649 - RNA, 14 nt, Human
gaucauggcucacu

SEQ ID NO: 2115650 - RNA, 16 nt, Human
gaucauggcucacugc

SEQ ID NO: 2115651 - RNA, 20 nt, Human
gaucauggcucacugcagcc

SEQ ID NO: 2115652 - RNA, 21 nt, Human
gaucauggcucacugcagccu

SEQ ID NO: 2115653 - RNA, 21 nt, Human
gaucauccacugugccaugug

SEQ ID NO: 2115654 - RNA, 16 nt, Human
gaucauccacugugcc

SEQ ID NO: 2115655 - RNA, 19 nt, Human
gaucauccacugugccaug

SEQ ID NO: 2115656 - RNA, 17 nt, Human
gaucauccacugugcca

SEQ ID NO: 2115657 - RNA, 20 nt, Human
gaucaguauaauuuuuuaaa

SEQ ID NO: 2115658 - RNA, 23 nt, Human
gaucaguccuuugaucaguauaa

SEQ ID NO: 2115659 - RNA, 17 nt, Human
gaucagaugacuagaaa

SEQ ID NO: 2115660 - RNA, 18 nt, Human
gaucauuuuccccccacu

SEQ ID NO: 2115661 - RNA, 19 nt, Human
gaucauuuuccccccacuc

SEQ ID NO: 2115662 - RNA, 23 nt, Human
gaucauuuuccccccacucuccc

SEQ ID NO: 2115663 - RNA, 14 nt, Human
gaucauuuuccccc

SEQ ID NO: 2115664 - RNA, 15 nt, Human
gaucauuuucccccc

SEQ ID NO: 2115665 - RNA, 14 nt, Human
gauccccagcuguu

SEQ ID NO: 2115666 - RNA, 21 nt, Human
gaucccgccucuucuucuuca

SEQ ID NO: 2115667 - RNA, 18 nt, Human
gaucgugcuaaauuuuca

SEQ ID NO: 2115668 - RNA, 23 nt, Human
gaucgugccguuacucuccaacc

SEQ ID NO: 2115669 - RNA, 23 nt, Human
gaucgcgccacuacacuccagcc

SEQ ID NO: 2115670 - RNA, 22 nt, Human
gaucggaggcuugucagagcug

SEQ ID NO: 2115671 - RNA, 17 nt, Human
gaucgcgccacugcacu

SEQ ID NO: 2115672 - RNA, 15 nt, Human
gaucgugcuaaauuu

SEQ ID NO: 2115673 - RNA, 14 nt, Human
gaucucagggaagc

SEQ ID NO: 2115674 - RNA, 18 nt, Human
gaucucagggaagcccag

SEQ ID NO: 2115675 - RNA, 19 nt, Human
gaucucagggaagcccagc

SEQ ID NO: 2115676 - RNA, 20 nt, Human
gaucucagggaagcccagcu

SEQ ID NO: 2115677 - RNA, 21 nt, Human
gaucucagggaagcccagcuc

SEQ ID NO: 2115678 - RNA, 17 nt, Human
gaucuuugcagacaggc

SEQ ID NO: 2115679 - RNA, 18 nt, Human
gaucuuugcagacaggca

SEQ ID NO: 2115680 - RNA, 20 nt, Human
gaucuguuguguacguggag

SEQ ID NO: 2115681 - RNA, 16 nt, Human
gaucugugcccagaga

SEQ ID NO: 2115682 - RNA, 13 nt, Human
gaucugugcccca

SEQ ID NO: 2115683 - RNA, 19 nt, Human
gaucugugcccagagaugg

SEQ ID NO: 2115684 - RNA, 14 nt, Human
gaucugugccccau

SEQ ID NO: 2115685 - RNA, 18 nt, Human
gaucugugccccaugccu

SEQ ID NO: 2115686 - RNA, 20 nt, Human
gaugaagaaaagugggccag

SEQ ID NO: 2115687 - RNA, 14 nt, Human
gaugaagagugaga

SEQ ID NO: 2115688 - RNA, 19 nt, Human
gaugaacucuuucuggccu

SEQ ID NO: 2115689 - RNA, 19 nt, Human
gaugaagcaaacacauuaa

SEQ ID NO: 2115690 - RNA, 16 nt, Human
gaugaagcaaacacau

SEQ ID NO: 2115691 - RNA, 15 nt, Human
gaugaagcaaacaca

SEQ ID NO: 2115692 - RNA, 21 nt, Human
gaugaagagugagagggcaug

SEQ ID NO: 2115693 - RNA, 13 nt, Human
gaugcaccagccc

SEQ ID NO: 2115694 - RNA, 16 nt, Human
gaugcacaucccugga

SEQ ID NO: 2115695 - RNA, 15 nt, Human
gaugcacaucccugg

SEQ ID NO: 2115696 - RNA, 17 nt, Human
gaugaaguuaucuggcu

SEQ ID NO: 2115697 - RNA, 19 nt, Human
gaugaaguuaucuggcuuc

SEQ ID NO: 2115698 - RNA, 16 nt, Human
gaugcagcauuaugau

SEQ ID NO: 2115699 - RNA, 17 nt, Human
gaugccacacagagugg

SEQ ID NO: 2115700 - RNA, 19 nt, Human
gaugccugguggcagcugc

SEQ ID NO: 2115701 - RNA, 18 nt, Human
gaugccugguggcagcug

SEQ ID NO: 2115702 - RNA, 20 nt, Human
gaugccugguggcagcugcg

SEQ ID NO: 2115703 - RNA, 14 nt, Human
gauggauucucaga

SEQ ID NO: 2115704 - RNA, 22 nt, Human
gauggauuuccagccaaagccu

SEQ ID NO: 2115705 - RNA, 14 nt, Human
gauggauuugccug

SEQ ID NO: 2115706 - RNA, 19 nt, Human
gauggauuugccugugcca

SEQ ID NO: 2115707 - RNA, 16 nt, Human
gauggauucucagaua

SEQ ID NO: 2115708 - RNA, 18 nt, Human
gauggauucucagauauu

SEQ ID NO: 2115709 - RNA, 19 nt, Human
gauggauucucagauauuu

SEQ ID NO: 2115710 - RNA, 22 nt, Human
gauggauucucagauauuuaua

SEQ ID NO: 2115711 - RNA, 14 nt, Human
gauggcgcuaggca

SEQ ID NO: 2115712 - RNA, 20 nt, Human
gauggcugugccucugccug

SEQ ID NO: 2115713 - RNA, 19 nt, Human
gauggcugugccucugccu

SEQ ID NO: 2115714 - RNA, 18 nt, Human
gauggcugugccucugcc

SEQ ID NO: 2115715 - RNA, 17 nt, Human
gauggcugugccucugc

SEQ ID NO: 2115716 - RNA, 13 nt, Human
gauggcugugccu

SEQ ID NO: 2115717 - RNA, 21 nt, Human
gauggcuaaaaccaucauagu

SEQ ID NO: 2115718 - RNA, 20 nt, Human
gauuugucuuuggugaacau

SEQ ID NO: 2115719 - RNA, 22 nt, Human
gauuugucuuuggugaacauug

SEQ ID NO: 2115720 - RNA, 19 nt, Human
gauuuguacuacaguucuu

SEQ ID NO: 2115721 - RNA, 21 nt, Human
gauuuguacuacaguucuuuu

SEQ ID NO: 2115722 - RNA, 21 nt, Human
gauuuguccuuggggacaucu

SEQ ID NO: 2115723 - RNA, 13 nt, Human
gauuuuccugugg

SEQ ID NO: 2115724 - RNA, 19 nt, Human
gauuuucagcccucagaau

SEQ ID NO: 2115725 - RNA, 15 nt, Human
gauuuucagcccuca

SEQ ID NO: 2115726 - RNA, 11 nt, Human
gauuuucagcc

SEQ ID NO: 2115727 - RNA, 13 nt, Human
gauuuuuauccaa

SEQ ID NO: 2115728 - RNA, 14 nt, Human
gauuuuuauccaau

SEQ ID NO: 2115729 - RNA, 20 nt, Human
gauuuuuauccaaucuuguu

SEQ ID NO: 2115730 - RNA, 23 nt, Human
gauuuucuacaaguauucugccu

SEQ ID NO: 2115731 - RNA, 15 nt, Human
gauuucccuucuucu

SEQ ID NO: 2115732 - RNA, 22 nt, Human
gauuucccuucuucugucaucu

SEQ ID NO: 2115733 - RNA, 11 nt, Human
gauuucuccca

SEQ ID NO: 2115734 - RNA, 20 nt, Human
gauuucucccagcucuagac

SEQ ID NO: 2115735 - RNA, 17 nt, Human
gauuuggugaauuugaa

SEQ ID NO: 2115736 - RNA, 18 nt, Human
gauuuggugaauuugaau

SEQ ID NO: 2115737 - RNA, 22 nt, Human
gauuuggagcacucugaguuua

SEQ ID NO: 2115738 - RNA, 18 nt, Human
gauuugcuaucaaaauaa

SEQ ID NO: 2115739 - RNA, 21 nt, Human
gauuugcuaucaaaauaaauu

SEQ ID NO: 2115740 - RNA, 17 nt, Human
gauuugcccauuuacac

SEQ ID NO: 2115741 - RNA, 19 nt, Human
gauuugcccauuuacacuu

SEQ ID NO: 2115742 - RNA, 15 nt, Human
gauuugccugugcca

SEQ ID NO: 2115743 - RNA, 11 nt, Human
gauuucugauu

SEQ ID NO: 2115744 - RNA, 12 nt, Human
gauuucugauuu

SEQ ID NO: 2115745 - RNA, 21 nt, Human
gauugcaacaggcugggcuuc

SEQ ID NO: 2115746 - RNA, 16 nt, Human
gauugcaccacugcac

SEQ ID NO: 2115747 - RNA, 23 nt, Human
gauugcaccacugcacuccagcc

SEQ ID NO: 2115748 - RNA, 20 nt, Human
gauugcaacaggcugggcuu

SEQ ID NO: 2115749 - RNA, 20 nt, Human
gauucccaagcucugcuccu

SEQ ID NO: 2115750 - RNA, 19 nt, Human
gauucccaagcucugcucc

SEQ ID NO: 2115751 - RNA, 21 nt, Human
gauucccaagcucugcuccuc

SEQ ID NO: 2115752 - RNA, 21 nt, Human
gauucgagcuauauuuaagua

SEQ ID NO: 2115753 - RNA, 18 nt, Human
gauucgcccaaagccaga

SEQ ID NO: 2115754 - RNA, 13 nt, Human
gauuccuuucccu

SEQ ID NO: 2115755 - RNA, 20 nt, Human
gauuccuuucccuuuagcac

SEQ ID NO: 2115756 - RNA, 10 nt, Human
gauuccuuuu

SEQ ID NO: 2115757 - RNA, 15 nt, Human
gauuccuuuucuugu

SEQ ID NO: 2115758 - RNA, 16 nt, Human
gauuccuuuucuuguu

SEQ ID NO: 2115759 - RNA, 20 nt, Human
gauggggagaucggggccag

SEQ ID NO: 2115760 - RNA, 21 nt, Human
gauggggagaucggggccaga

SEQ ID NO: 2115761 - RNA, 13 nt, Human
gauggggccacag

SEQ ID NO: 2115762 - RNA, 14 nt, Human
gauggggccacagc

SEQ ID NO: 2115763 - RNA, 15 nt, Human
gauggggccacagcc

SEQ ID NO: 2115764 - RNA, 15 nt, Human
gaugggggaugcuuc

SEQ ID NO: 2115765 - RNA, 21 nt, Human
gaugggggagucugaagcaga

SEQ ID NO: 2115766 - RNA, 23 nt, Human
gauggggucucacaguguugccc

SEQ ID NO: 2115767 - RNA, 13 nt, Human
gauucagcucugc

SEQ ID NO: 2115768 - RNA, 15 nt, Human
gauucagcucugcaa

SEQ ID NO: 2115769 - RNA, 22 nt, Human
gauucaucuacccugcugaccu

SEQ ID NO: 2115770 - RNA, 22 nt, Human
gauuccagagaguggcuccucc

SEQ ID NO: 2115771 - RNA, 20 nt, Human
gauuccagagaguggcuccu

SEQ ID NO: 2115772 - RNA, 19 nt, Human
gauuccagagaguggcucc

SEQ ID NO: 2115773 - RNA, 18 nt, Human
gauucccaagcucugcuc

SEQ ID NO: 2115774 - RNA, 14 nt, Human
gauuccaucuccuu

SEQ ID NO: 2115775 - RNA, 15 nt, Human
gauuccaucuccuug

SEQ ID NO: 2115776 - RNA, 19 nt, Human
gauuccaucuccuugucuu

SEQ ID NO: 2115777 - RNA, 17 nt, Human
gauucauauuuacuucu

SEQ ID NO: 2115778 - RNA, 18 nt, Human
gauucauauuuacuucuu

SEQ ID NO: 2115779 - RNA, 19 nt, Human
gauucauauuuacuucuua

SEQ ID NO: 2115780 - RNA, 15 nt, Human
gauuuuugucuugug

SEQ ID NO: 2115781 - RNA, 10 nt, Human
gcaaaauuuc

SEQ ID NO: 2115782 - RNA, 13 nt, Human
gcaaacaccugcu

SEQ ID NO: 2115783 - RNA, 15 nt, Human
gcaaacaccugcuga

SEQ ID NO: 2115784 - RNA, 16 nt, Human
gcaaaauuuuauagcu

SEQ ID NO: 2115785 - RNA, 17 nt, Human
gcaaacacacaaaggua

SEQ ID NO: 2115786 - RNA, 12 nt, Human
gcaaagcauuga

SEQ ID NO: 2115787 - RNA, 20 nt, Human
gcaaaggggucccauagagg

SEQ ID NO: 2115788 - RNA, 23 nt, Human
gcaaaggggucccauagagguga

SEQ ID NO: 2115789 - RNA, 12 nt, Human
gcaaaucaaugc

SEQ ID NO: 2115790 - RNA, 13 nt, Human
gcaaaucagaaac

SEQ ID NO: 2115791 - RNA, 15 nt, Human
gcaaaucagaaacuu

SEQ ID NO: 2115792 - RNA, 20 nt, Human
gcaaaucagaaacuugugaa

SEQ ID NO: 2115793 - RNA, 22 nt, Human
gcaaaucagaaacuugugaagu

SEQ ID NO: 2115794 - RNA, 17 nt, Human
gcaagaauugaagcagg

SEQ ID NO: 2115795 - RNA, 14 nt, Human
gcaagaaggaauug

SEQ ID NO: 2115796 - RNA, 17 nt, Human
gcaagaaagaaacccga

SEQ ID NO: 2115797 - RNA, 17 nt, Human
gcaacacucuauauuua

SEQ ID NO: 2115798 - RNA, 19 nt, Human
gcaacagacaagugacugu

SEQ ID NO: 2115799 - RNA, 19 nt, Human
gcaacagagugagacccug

SEQ ID NO: 2115800 - RNA, 13 nt, Human
gcaacagacaagu

SEQ ID NO: 2115801 - RNA, 14 nt, Human
gcaacagagugaga

SEQ ID NO: 2115802 - RNA, 13 nt, Human
gcaacagaaaaaa

SEQ ID NO: 2115803 - RNA, 15 nt, Human
gcaagaauuugaucg

SEQ ID NO: 2115804 - RNA, 16 nt, Human
gcaagacccugucucu

SEQ ID NO: 2115805 - RNA, 19 nt, Human
gcaagagaauugcuugaac

SEQ ID NO: 2115806 - RNA, 17 nt, Human
gcaagagagauguuuug

SEQ ID NO: 2115807 - RNA, 14 nt, Human
gcaagagagauguu

SEQ ID NO: 2115808 - RNA, 13 nt, Human
gcaagagccuugg

SEQ ID NO: 2115809 - RNA, 22 nt, Human
gcaagagccuugguguccaccu

SEQ ID NO: 2115810 - RNA, 23 nt, Human
gcaagagccuugguguccaccug

SEQ ID NO: 2115811 - RNA, 19 nt, Human
gcaagccuguaaucccagc

SEQ ID NO: 2115812 - RNA, 20 nt, Human
gcaagccuguaaucccagcu

SEQ ID NO: 2115813 - RNA, 20 nt, Human
gcaagcauuuauguuuauuu

SEQ ID NO: 2115814 - RNA, 15 nt, Human
gcaaggggaaaaucu

SEQ ID NO: 2115815 - RNA, 16 nt, Human
gcaaggggaaaaucuc

SEQ ID NO: 2115816 - RNA, 14 nt, Human
gcaaggggcucugc

SEQ ID NO: 2115817 - RNA, 14 nt, Human
gcaaggggugccug

SEQ ID NO: 2115818 - RNA, 16 nt, Human
gcaaggggugccuggg

SEQ ID NO: 2115819 - RNA, 18 nt, Human
gcaaggggugccugggaa

SEQ ID NO: 2115820 - RNA, 19 nt, Human
gcaaggggugccugggaac

SEQ ID NO: 2115821 - RNA, 20 nt, Human
gcaaggccgcuguucaccca

SEQ ID NO: 2115822 - RNA, 21 nt, Human
gcaaggccgcuguucacccac

SEQ ID NO: 2115823 - RNA, 23 nt, Human
gcaaugcuggcuguuggcugggg

SEQ ID NO: 2115824 - RNA, 22 nt, Human
gcaaugcuggcuguuggcuggg

SEQ ID NO: 2115825 - RNA, 14 nt, Human
gcaaugcuggcugu

SEQ ID NO: 2115826 - RNA, 13 nt, Human
gcaaugcuggcug

SEQ ID NO: 2115827 - RNA, 13 nt, Human
gcaauccauguua

SEQ ID NO: 2115828 - RNA, 20 nt, Human
gcaauccauguuaguuuuua

SEQ ID NO: 2115829 - RNA, 21 nt, Human
gcaauccauguuaguuuuuac

SEQ ID NO: 2115830 - RNA, 22 nt, Human
gcaauccauguuaguuuuuacu

SEQ ID NO: 2115831 - RNA, 16 nt, Human
gcaaugauuacucuuu

SEQ ID NO: 2115832 - RNA, 14 nt, Human
gcaaugauuacucu

SEQ ID NO: 2115833 - RNA, 15 nt, Human
gcaaucaaaucugcu

SEQ ID NO: 2115834 - RNA, 17 nt, Human
gcaauauuuaaggagau

SEQ ID NO: 2115835 - RNA, 22 nt, Human
gcaauauuuaaggagauguaag

SEQ ID NO: 2115836 - RNA, 20 nt, Human
gcaaucagauuuuccugugg

SEQ ID NO: 2115837 - RNA, 17 nt, Human
gcaaucaaaucugcuuu

SEQ ID NO: 2115838 - RNA, 15 nt, Human
gcccaggcuggagug

SEQ ID NO: 2115839 - RNA, 15 nt, Human
gcccaggccuccagc

SEQ ID NO: 2115840 - RNA, 16 nt, Human
gcccaggccuccagcu

SEQ ID NO: 2115841 - RNA, 17 nt, Human
gcccaggccuccagcuc

SEQ ID NO: 2115842 - RNA, 18 nt, Human
gcccaggccuccagcuca

SEQ ID NO: 2115843 - RNA, 21 nt, Human
gcccaggccuccagcucagca

SEQ ID NO: 2115844 - RNA, 23 nt, Human
gcccaggccccugccacccuggg

SEQ ID NO: 2115845 - RNA, 19 nt, Human
gcccagagaugccuccacc

SEQ ID NO: 2115846 - RNA, 20 nt, Human
gcccagagaugccuccaccg

SEQ ID NO: 2115847 - RNA, 22 nt, Human
gcccagagaugccuccaccgcu

SEQ ID NO: 2115848 - RNA, 21 nt, Human
gcccagagaugggacugggag

SEQ ID NO: 2115849 - RNA, 22 nt, Human
gcccagagaugggacugggagg

SEQ ID NO: 2115850 - RNA, 16 nt, Human
gcccagagaugccucc

SEQ ID NO: 2115851 - RNA, 17 nt, Human
gcccagagaugccucca

SEQ ID NO: 2115852 - RNA, 18 nt, Human
gcccagagaugccuccac

SEQ ID NO: 2115853 - RNA, 15 nt, Human
gcccagagagggugg

SEQ ID NO: 2115854 - RNA, 21 nt, Human
gcccagagaggguggugaccu

SEQ ID NO: 2115855 - RNA, 12 nt, Human
gcccaggcuggc

SEQ ID NO: 2115856 - RNA, 18 nt, Human
gcccagggagaggccaug

SEQ ID NO: 2115857 - RNA, 19 nt, Human
gcccagggagaggccauga

SEQ ID NO: 2115858 - RNA, 16 nt, Human
gcccagggagcggaaa

SEQ ID NO: 2115859 - RNA, 17 nt, Human
gcccagggagcggaaag

SEQ ID NO: 2115860 - RNA, 20 nt, Human
gcccagggagcggaaagcag

SEQ ID NO: 2115861 - RNA, 13 nt, Human
gcccagggccacu

SEQ ID NO: 2115862 - RNA, 15 nt, Human
gcccagggccacucu

SEQ ID NO: 2115863 - RNA, 18 nt, Human
gcccagggccacucugcc

SEQ ID NO: 2115864 - RNA, 17 nt, Human
gcccagggauuuguccu

SEQ ID NO: 2115865 - RNA, 21 nt, Human
gcccagggagcggaaagcagc

SEQ ID NO: 2115866 - RNA, 23 nt, Human
gcccagggagcggaaagcagcuc

SEQ ID NO: 2115867 - RNA, 19 nt, Human
gcccagggccacucugccu

SEQ ID NO: 2115868 - RNA, 20 nt, Human
gcccagggccacucugccuc

SEQ ID NO: 2115869 - RNA, 22 nt, Human
gcccagggccacucugccucug

SEQ ID NO: 2115870 - RNA, 21 nt, Human
gccccaccuuuauuaaaaucu

SEQ ID NO: 2115871 - RNA, 23 nt, Human
gccccaccuuuauuaaaaucuua

SEQ ID NO: 2115872 - RNA, 15 nt, Human
gccccaccuuuauua

SEQ ID NO: 2115873 - RNA, 20 nt, Human
gccccaccuuuauuaaaauc

SEQ ID NO: 2115874 - RNA, 12 nt, Human
gccccaccugcc

SEQ ID NO: 2115875 - RNA, 14 nt, Human
gccccaccugccac

SEQ ID NO: 2115876 - RNA, 15 nt, Human
gccccaccugccacu

SEQ ID NO: 2115877 - RNA, 17 nt, Human
gccccaccugccacuag

SEQ ID NO: 2115878 - RNA, 20 nt, Human
gccccaccugccacuaggcu

SEQ ID NO: 2115879 - RNA, 23 nt, Human
gccccaccugccacuaggcuggg

SEQ ID NO: 2115880 - RNA, 15 nt, Human
gccccagaaggcagg

SEQ ID NO: 2115881 - RNA, 12 nt, Human
gccccacugccc

SEQ ID NO: 2115882 - RNA, 18 nt, Human
gccccacugcccuucuca

SEQ ID NO: 2115883 - RNA, 13 nt, Human
gccccacugggga

SEQ ID NO: 2115884 - RNA, 14 nt, Human
gccccacuggggaa

SEQ ID NO: 2115885 - RNA, 15 nt, Human
gccccacuggggaaa

SEQ ID NO: 2115886 - RNA, 18 nt, Human
gccccagaaggcagggaa

SEQ ID NO: 2115887 - RNA, 11 nt, Human
gccccagagac

SEQ ID NO: 2115888 - RNA, 15 nt, Human
gccccagagacucag

SEQ ID NO: 2115889 - RNA, 17 nt, Human
gccccagagacucagag

SEQ ID NO: 2115890 - RNA, 12 nt, Human
gccccagagcug

SEQ ID NO: 2115891 - RNA, 13 nt, Human
gccccagagcugu

SEQ ID NO: 2115892 - RNA, 14 nt, Human
gccccagagcuguu

SEQ ID NO: 2115893 - RNA, 22 nt, Human
gccccagagcuguuuauggccu

SEQ ID NO: 2115894 - RNA, 23 nt, Human
gccccagagcuguuuauggccuc

SEQ ID NO: 2115895 - RNA, 16 nt, Human
gcccaggguuccccca

SEQ ID NO: 2115896 - RNA, 17 nt, Human
gcccaucaauuauagaa

SEQ ID NO: 2115897 - RNA, 13 nt, Human
gcccaucacaggg

SEQ ID NO: 2115898 - RNA, 17 nt, Human
gcccaucacaggguugg

SEQ ID NO: 2115899 - RNA, 21 nt, Human
gcccaucacaggguugggccc

SEQ ID NO: 2115900 - RNA, 22 nt, Human
gcccaucacaggguugggccca

SEQ ID NO: 2115901 - RNA, 23 nt, Human
gcccccugguggacaguccuggg

SEQ ID NO: 2115902 - RNA, 21 nt, Human
gcccccugguggacaguccug

SEQ ID NO: 2115903 - RNA, 22 nt, Human
gcccccugguggacaguccugg

SEQ ID NO: 2115904 - RNA, 16 nt, Human
gcccccacaccuggcc

SEQ ID NO: 2115905 - RNA, 17 nt, Human
gcccccacaccuggccc

SEQ ID NO: 2115906 - RNA, 18 nt, Human
gcccccacaccuggcccu

SEQ ID NO: 2115907 - RNA, 19 nt, Human
gcccccacaccuggcccug

SEQ ID NO: 2115908 - RNA, 23 nt, Human
gcccccacaccuggcccuggggc

SEQ ID NO: 2115909 - RNA, 23 nt, Human
gcccccacagaaagacugagcuc

SEQ ID NO: 2115910 - RNA, 14 nt, Human
gcccccaagccugc

SEQ ID NO: 2115911 - RNA, 21 nt, Human
gcccccaccacuaggacucug

SEQ ID NO: 2115912 - RNA, 18 nt, Human
gccccaugucucucagaa

SEQ ID NO: 2115913 - RNA, 15 nt, Human
gccccaugucucuca

SEQ ID NO: 2115914 - RNA, 16 nt, Human
gccccaugucucucag

SEQ ID NO: 2115915 - RNA, 14 nt, Human
gccccauucugccu

SEQ ID NO: 2115916 - RNA, 15 nt, Human
gccccauucugccug

SEQ ID NO: 2115917 - RNA, 12 nt, Human
gccccagugccc

SEQ ID NO: 2115918 - RNA, 23 nt, Human
gccccagggucuucccuaccuca

SEQ ID NO: 2115919 - RNA, 16 nt, Human
gccccagggcuacccu

SEQ ID NO: 2115920 - RNA, 18 nt, Human
gccccagggcuacccucc

SEQ ID NO: 2115921 - RNA, 16 nt, Human
gccccagggucuuccc

SEQ ID NO: 2115922 - RNA, 17 nt, Human
gccccagggucuucccu

SEQ ID NO: 2115923 - RNA, 20 nt, Human
gccccagggucuucccuacc

SEQ ID NO: 2115924 - RNA, 21 nt, Human
gccccagggucuucccuaccu

SEQ ID NO: 2115925 - RNA, 18 nt, Human
gccccagcaccaccaggu

SEQ ID NO: 2115926 - RNA, 19 nt, Human
gccccagcaccaccagguc

SEQ ID NO: 2115927 - RNA, 19 nt, Human
gccccagcacuaacguaaa

SEQ ID NO: 2115928 - RNA, 11 nt, Human
gccccaccugc

SEQ ID NO: 2115929 - RNA, 12 nt, Human
gccccagcacua

SEQ ID NO: 2115930 - RNA, 17 nt, Human
gccccagcacuaaagca

SEQ ID NO: 2115931 - RNA, 19 nt, Human
gccccagcacuaaagcagu

SEQ ID NO: 2115932 - RNA, 23 nt, Human
gccccagcacuaaagcaguggac

SEQ ID NO: 2115933 - RNA, 21 nt, Human
gccccauaauuuuuuuuuucc

SEQ ID NO: 2115934 - RNA, 17 nt, Human
gccccaucagcuccagc

SEQ ID NO: 2115935 - RNA, 16 nt, Human
gccccaucagcuccag

SEQ ID NO: 2115936 - RNA, 15 nt, Human
gccccaucagcucca

SEQ ID NO: 2115937 - RNA, 14 nt, Human
gccccagugcccac

SEQ ID NO: 2115938 - RNA, 13 nt, Human
gccccagugccca

SEQ ID NO: 2115939 - RNA, 14 nt, Human
gccccagugccaag

SEQ ID NO: 2115940 - RNA, 15 nt, Human
gcccgcacccccacc

SEQ ID NO: 2115941 - RNA, 16 nt, Human
gcccgcacccccaccc

SEQ ID NO: 2115942 - RNA, 17 nt, Human
gcccgcacccccacccu

SEQ ID NO: 2115943 - RNA, 21 nt, Human
gcccgcacccccacccuuugg

SEQ ID NO: 2115944 - RNA, 14 nt, Human
gcccgcaugcagca

SEQ ID NO: 2115945 - RNA, 16 nt, Human
gcccgcaugcagcagc

SEQ ID NO: 2115946 - RNA, 17 nt, Human
gcccgcaugcagcagcu

SEQ ID NO: 2115947 - RNA, 19 nt, Human
gcccgcacccccacccuuu

SEQ ID NO: 2115948 - RNA, 17 nt, Human
gcccucauuacggcucc

SEQ ID NO: 2115949 - RNA, 18 nt, Human
gcccucauuacggcuccu

SEQ ID NO: 2115950 - RNA, 20 nt, Human
gcccucauuacggcuccucu

SEQ ID NO: 2115951 - RNA, 21 nt, Human
gcccucauuacggcuccucuc

SEQ ID NO: 2115952 - RNA, 13 nt, Human
gcccuccacugcc

SEQ ID NO: 2115953 - RNA, 15 nt, Human
gcccuccacugcccu

SEQ ID NO: 2115954 - RNA, 16 nt, Human
gcccuccacugcccuc

SEQ ID NO: 2115955 - RNA, 18 nt, Human
gcccuccacugcccucug

SEQ ID NO: 2115956 - RNA, 23 nt, Human
gcccuccacugcccucuguucag

SEQ ID NO: 2115957 - RNA, 16 nt, Human
gcccuccaucccgaca

SEQ ID NO: 2115958 - RNA, 22 nt, Human
gcccuccaucccgacauggacc

SEQ ID NO: 2115959 - RNA, 14 nt, Human
gcccuccacagccg

SEQ ID NO: 2115960 - RNA, 20 nt, Human
gcccuccacagccgcagccu

SEQ ID NO: 2115961 - RNA, 17 nt, Human
gcccuccacaucccuga

SEQ ID NO: 2115962 - RNA, 23 nt, Human
gcccuccacagccgcagccuccc

SEQ ID NO: 2115963 - RNA, 21 nt, Human
gcccucccugccccucccuuc

SEQ ID NO: 2115964 - RNA, 14 nt, Human
gcccucccuguccu

SEQ ID NO: 2115965 - RNA, 16 nt, Human
gcccucccuguccucc

SEQ ID NO: 2115966 - RNA, 18 nt, Human
gcccucccuguccuccuc

SEQ ID NO: 2115967 - RNA, 21 nt, Human
gcccucccuguccuccucgga

SEQ ID NO: 2115968 - RNA, 23 nt, Human
gcccuccgccauucucaagcccu

SEQ ID NO: 2115969 - RNA, 14 nt, Human
gcccugagcuuucu

SEQ ID NO: 2115970 - RNA, 15 nt, Human
gcccugagcucggug

SEQ ID NO: 2115971 - RNA, 16 nt, Human
gcccugagcucggugg

SEQ ID NO: 2115972 - RNA, 13 nt, Human
gcccugagcucgg

SEQ ID NO: 2115973 - RNA, 13 nt, Human
gcccucuucuuac

SEQ ID NO: 2115974 - RNA, 14 nt, Human
gcccucuucuuacu

SEQ ID NO: 2115975 - RNA, 22 nt, Human
gcccugagcucgguggacccag

SEQ ID NO: 2115976 - RNA, 13 nt, Human
gcccugcagaggg

SEQ ID NO: 2115977 - RNA, 18 nt, Human
gccccgaggccuucucug

SEQ ID NO: 2115978 - RNA, 15 nt, Human
gccccgaggccuucu

SEQ ID NO: 2115979 - RNA, 15 nt, Human
gcccccuucucccac

SEQ ID NO: 2115980 - RNA, 16 nt, Human
gcccccuucucccaca

SEQ ID NO: 2115981 - RNA, 17 nt, Human
gcccccuucucccacac

SEQ ID NO: 2115982 - RNA, 18 nt, Human
gcccccuucucccacacu

SEQ ID NO: 2115983 - RNA, 19 nt, Human
gcccccuucucccacacug

SEQ ID NO: 2115984 - RNA, 20 nt, Human
gcccccuucucccacacugc

SEQ ID NO: 2115985 - RNA, 22 nt, Human
gcccccuucucccacacugcua

SEQ ID NO: 2115986 - RNA, 22 nt, Human
gccccucccccaacccccaccc

SEQ ID NO: 2115987 - RNA, 23 nt, Human
gccccucccccaacccccacccc

SEQ ID NO: 2115988 - RNA, 16 nt, Human
gccccucccaccacag

SEQ ID NO: 2115989 - RNA, 14 nt, Human
gccccucccuaccu

SEQ ID NO: 2115990 - RNA, 15 nt, Human
gccccucccuaccuc

SEQ ID NO: 2115991 - RNA, 16 nt, Human
gccccucccuaccuca

SEQ ID NO: 2115992 - RNA, 17 nt, Human
gccccucccuaccucaa

SEQ ID NO: 2115993 - RNA, 18 nt, Human
gccccucccuaccucaac

SEQ ID NO: 2115994 - RNA, 21 nt, Human
gccccucccuaccucaaccug

SEQ ID NO: 2115995 - RNA, 14 nt, Human
gccccucaccuggg

SEQ ID NO: 2115996 - RNA, 20 nt, Human
gccccucaccugggcaccug

SEQ ID NO: 2115997 - RNA, 17 nt, Human
gccccucaccugggcac

SEQ ID NO: 2115998 - RNA, 12 nt, Human
gccccucccacc

SEQ ID NO: 2115999 - RNA, 13 nt, Human
gccccucccacca

SEQ ID NO: 2116000 - RNA, 14 nt, Human
gccccucccaccac

SEQ ID NO: 2116001 - RNA, 15 nt, Human
gccccucccaccaca

SEQ ID NO: 2116002 - RNA, 12 nt, Human
gccccuccccca

SEQ ID NO: 2116003 - RNA, 15 nt, Human
gccccucccccaacc

SEQ ID NO: 2116004 - RNA, 21 nt, Human
gccccucccccaacccccacc

SEQ ID NO: 2116005 - RNA, 15 nt, Human
gcccgaggcaccagu

SEQ ID NO: 2116006 - RNA, 16 nt, Human
gcccgagguggcugcc

SEQ ID NO: 2116007 - RNA, 17 nt, Human
gcccgagguggcugccu

SEQ ID NO: 2116008 - RNA, 18 nt, Human
gcccgagguggcugccug

SEQ ID NO: 2116009 - RNA, 19 nt, Human
gcccgagguggcugccugg

SEQ ID NO: 2116010 - RNA, 22 nt, Human
gcccgagguggcugccuggagc

SEQ ID NO: 2116011 - RNA, 22 nt, Human
gcccgagcuggugcauuacaga

SEQ ID NO: 2116012 - RNA, 15 nt, Human
gcccgacagccuggc

SEQ ID NO: 2116013 - RNA, 14 nt, Human
gcccgacagccugg

SEQ ID NO: 2116014 - RNA, 12 nt, Human
gcccgacagccu

SEQ ID NO: 2116015 - RNA, 20 nt, Human
gccccuugcucuccccugcc

SEQ ID NO: 2116016 - RNA, 16 nt, Human
gccccuuuuuacuccc

SEQ ID NO: 2116017 - RNA, 18 nt, Human
gccccuuuuuacuccccu

SEQ ID NO: 2116018 - RNA, 19 nt, Human
gccccuuuuuacuccccuu

SEQ ID NO: 2116019 - RNA, 20 nt, Human
gccccuuuuuacuccccuug

SEQ ID NO: 2116020 - RNA, 21 nt, Human
gccccuuuuuacuccccuuga

SEQ ID NO: 2116021 - RNA, 22 nt, Human
gccccuguuaccuaauuagagc

SEQ ID NO: 2116022 - RNA, 22 nt, Human
gccccugagacaaauggaggcc

SEQ ID NO: 2116023 - RNA, 19 nt, Human
gccccucuugccccccacc

SEQ ID NO: 2116024 - RNA, 21 nt, Human
gccccucuugccccccacccc

SEQ ID NO: 2116025 - RNA, 13 nt, Human
gccccucuugccc

SEQ ID NO: 2116026 - RNA, 16 nt, Human
gccccucuugcccccc

SEQ ID NO: 2116027 - RNA, 18 nt, Human
gccccucuugccccccac

SEQ ID NO: 2116028 - RNA, 13 nt, Human
gccagcuggagaa

SEQ ID NO: 2116029 - RNA, 14 nt, Human
gccaggacaggccc

SEQ ID NO: 2116030 - RNA, 15 nt, Human
gccaggacaggcccg

SEQ ID NO: 2116031 - RNA, 17 nt, Human
gccaggaccgccaaaga

SEQ ID NO: 2116032 - RNA, 16 nt, Human
gccaggcgagaugggg

SEQ ID NO: 2116033 - RNA, 17 nt, Human
gccaggcucaggccaug

SEQ ID NO: 2116034 - RNA, 18 nt, Human
gccaggcucaggccaugg

SEQ ID NO: 2116035 - RNA, 20 nt, Human
gccaggcuccuuccugucuu

SEQ ID NO: 2116036 - RNA, 21 nt, Human
gccaggcuccuuccugucuuc

SEQ ID NO: 2116037 - RNA, 14 nt, Human
gccaggcuccuucc

SEQ ID NO: 2116038 - RNA, 15 nt, Human
gccaggcuccuuccu

SEQ ID NO: 2116039 - RNA, 18 nt, Human
gccaggcuccuuccuguc

SEQ ID NO: 2116040 - RNA, 19 nt, Human
gccaggcuccuuccugucu

SEQ ID NO: 2116041 - RNA, 20 nt, Human
gccagcugccgaccagagcc

SEQ ID NO: 2116042 - RNA, 20 nt, Human
gccagcugcagcugggcugu

SEQ ID NO: 2116043 - RNA, 15 nt, Human
gccagcugccgacca

SEQ ID NO: 2116044 - RNA, 14 nt, Human
gccagcugcaucua

SEQ ID NO: 2116045 - RNA, 18 nt, Human
gccagcugcaucuacuca

SEQ ID NO: 2116046 - RNA, 19 nt, Human
gccagcugcaucuacucag

SEQ ID NO: 2116047 - RNA, 22 nt, Human
gccagcugcaucuacucaggcc

SEQ ID NO: 2116048 - RNA, 12 nt, Human
gccagccuggcu

SEQ ID NO: 2116049 - RNA, 16 nt, Human
gccagccuggcuucug

SEQ ID NO: 2116050 - RNA, 17 nt, Human
gccagccuggcuucugg

SEQ ID NO: 2116051 - RNA, 18 nt, Human
gccagccuggcuucugga

SEQ ID NO: 2116052 - RNA, 19 nt, Human
gccagccuggcuucuggag

SEQ ID NO: 2116053 - RNA, 11 nt, Human
gccagccuggc

SEQ ID NO: 2116054 - RNA, 14 nt, Human
gccagcugcagcug

SEQ ID NO: 2116055 - RNA, 19 nt, Human
gccagcugcagcugggcug

SEQ ID NO: 2116056 - RNA, 20 nt, Human
gccagccuggcuucuggagc

SEQ ID NO: 2116057 - RNA, 21 nt, Human
gccagccuggcuucuggagcc

SEQ ID NO: 2116058 - RNA, 22 nt, Human
gccagccuggcuucuggagccc

SEQ ID NO: 2116059 - RNA, 17 nt, Human
gccagagggagugacag

SEQ ID NO: 2116060 - RNA, 14 nt, Human
gccagaugcaccag

SEQ ID NO: 2116061 - RNA, 22 nt, Human
gccagaugcacaucccuggaag

SEQ ID NO: 2116062 - RNA, 21 nt, Human
gccagaugcacaucccuggaa

SEQ ID NO: 2116063 - RNA, 20 nt, Human
gccagaggcagaacccuggu

SEQ ID NO: 2116064 - RNA, 23 nt, Human
gccagaggcagaacccuggugag

SEQ ID NO: 2116065 - RNA, 13 nt, Human
gccagaucuguua

SEQ ID NO: 2116066 - RNA, 21 nt, Human
gccagagagccuggugcugcu

SEQ ID NO: 2116067 - RNA, 15 nt, Human
gccagaugcaccagc

SEQ ID NO: 2116068 - RNA, 15 nt, Human
gccagauugccaucc

SEQ ID NO: 2116069 - RNA, 22 nt, Human
gccacugcaccgggccacagag

SEQ ID NO: 2116070 - RNA, 19 nt, Human
gccacugcaccgggccaca

SEQ ID NO: 2116071 - RNA, 22 nt, Human
gccacuccagaccccuggcuuu

SEQ ID NO: 2116072 - RNA, 21 nt, Human
gccacugcaccgggccacaga

SEQ ID NO: 2116073 - RNA, 20 nt, Human
gccacugcaccgggccacag

SEQ ID NO: 2116074 - RNA, 17 nt, Human
gccaacagaagcuucca

SEQ ID NO: 2116075 - RNA, 14 nt, Human
gccaacaccaggga

SEQ ID NO: 2116076 - RNA, 14 nt, Human
gccaaauuuuggcc

SEQ ID NO: 2116077 - RNA, 20 nt, Human
gccacuccagaccccuggcu

SEQ ID NO: 2116078 - RNA, 21 nt, Human
gccacuccagaccccuggcuu

SEQ ID NO: 2116079 - RNA, 19 nt, Human
gccaacagaagcuuccauu

SEQ ID NO: 2116080 - RNA, 20 nt, Human
gccaaggccagaguggccug

SEQ ID NO: 2116081 - RNA, 21 nt, Human
gccaaggccagaguggccugg

SEQ ID NO: 2116082 - RNA, 21 nt, Human
gccaucauguaaauuaccagu

SEQ ID NO: 2116083 - RNA, 12 nt, Human
gccaucuguggg

SEQ ID NO: 2116084 - RNA, 13 nt, Human
gccaucugugggc

SEQ ID NO: 2116085 - RNA, 15 nt, Human
gccaucugugggcac

SEQ ID NO: 2116086 - RNA, 17 nt, Human
gccaucugugggcacgc

SEQ ID NO: 2116087 - RNA, 18 nt, Human
gccaucuguguccugguu

SEQ ID NO: 2116088 - RNA, 14 nt, Human
gccauccagguuca

SEQ ID NO: 2116089 - RNA, 14 nt, Human
gccaugcuccuggc

SEQ ID NO: 2116090 - RNA, 13 nt, Human
gccaugaacuuug

SEQ ID NO: 2116091 - RNA, 20 nt, Human
gccaugauucgcccaaagcc

SEQ ID NO: 2116092 - RNA, 20 nt, Human
gccaugaggaguugcuguuu

SEQ ID NO: 2116093 - RNA, 19 nt, Human
gccaugacaacuucuaauu

SEQ ID NO: 2116094 - RNA, 23 nt, Human
gccaugacaacuucuaauugcca

SEQ ID NO: 2116095 - RNA, 15 nt, Human
gccaugaacuggagg

SEQ ID NO: 2116096 - RNA, 16 nt, Human
gccaugaacuggaggc

SEQ ID NO: 2116097 - RNA, 20 nt, Human
gccaugaacuggaggccagg

SEQ ID NO: 2116098 - RNA, 20 nt, Human
gccaugaggccucaguggac

SEQ ID NO: 2116099 - RNA, 16 nt, Human
gccaugaggccucagu

SEQ ID NO: 2116100 - RNA, 19 nt, Human
gccaugaggccucagugga

SEQ ID NO: 2116101 - RNA, 14 nt, Human
gccaguccugccug

SEQ ID NO: 2116102 - RNA, 16 nt, Human
gccaguccugccuggc

SEQ ID NO: 2116103 - RNA, 17 nt, Human
gccaguccugccuggcc

SEQ ID NO: 2116104 - RNA, 15 nt, Human
gccaggcuggucuca

SEQ ID NO: 2116105 - RNA, 13 nt, Human
gccaggcuggucu

SEQ ID NO: 2116106 - RNA, 24 nt, Human
gcccaaccugcucuccucuugcca

SEQ ID NO: 2116107 - RNA, 22 nt, Human
gcccaagaauagaugcugacug

SEQ ID NO: 2116108 - RNA, 21 nt, Human
gcccaagaauagaugcugacu

SEQ ID NO: 2116109 - RNA, 19 nt, Human
gcccaagacagaugcccca

SEQ ID NO: 2116110 - RNA, 20 nt, Human
gcccaagacagaugccccag

SEQ ID NO: 2116111 - RNA, 21 nt, Human
gcccaagacagaugccccaga

SEQ ID NO: 2116112 - RNA, 23 nt, Human
gcccaagacagaugccccagagc

SEQ ID NO: 2116113 - RNA, 16 nt, Human
gccaugggccuccugu

SEQ ID NO: 2116114 - RNA, 15 nt, Human
gccaugggccuccug

SEQ ID NO: 2116115 - RNA, 24 nt, Human
gccaugcuccuggcccacugcauc

SEQ ID NO: 2116116 - RNA, 22 nt, Human
gcccacauguguccaucccagc

SEQ ID NO: 2116117 - RNA, 23 nt, Human
gcccacauguguccaucccagcg

SEQ ID NO: 2116118 - RNA, 17 nt, Human
gcccaccaacaucccau

SEQ ID NO: 2116119 - RNA, 16 nt, Human
gcccacauuggaccca

SEQ ID NO: 2116120 - RNA, 21 nt, Human
gcccaccaacaucccauugcc

SEQ ID NO: 2116121 - RNA, 20 nt, Human
gcccacauagugaugguucc

SEQ ID NO: 2116122 - RNA, 18 nt, Human
gcccacagguguccccag

SEQ ID NO: 2116123 - RNA, 22 nt, Human
gcccacagguguccccagccca

SEQ ID NO: 2116124 - RNA, 23 nt, Human
gcccacagguguccccagcccac

SEQ ID NO: 2116125 - RNA, 12 nt, Human
gcccacagucug

SEQ ID NO: 2116126 - RNA, 19 nt, Human
gcccacagucugacuuccc

SEQ ID NO: 2116127 - RNA, 13 nt, Human
gcccaagcccuga

SEQ ID NO: 2116128 - RNA, 17 nt, Human
gcccaccuuggcucaag

SEQ ID NO: 2116129 - RNA, 16 nt, Human
gcccaccuuggcucaa

SEQ ID NO: 2116130 - RNA, 15 nt, Human
gcccaccuuggcuca

SEQ ID NO: 2116131 - RNA, 13 nt, Human
gcccaccuuggcu

SEQ ID NO: 2116132 - RNA, 14 nt, Human
gcccacuucugcca

SEQ ID NO: 2116133 - RNA, 22 nt, Human
gcccaccugucaaacaaagcca

SEQ ID NO: 2116134 - RNA, 23 nt, Human
gcccacuuguauccucugguucu

SEQ ID NO: 2116135 - RNA, 18 nt, Human
gcccagaauucccagcug

SEQ ID NO: 2116136 - RNA, 21 nt, Human
gcccagaauucccagcugucu

SEQ ID NO: 2116137 - RNA, 23 nt, Human
gcccagaauucccagcugucugu

SEQ ID NO: 2116138 - RNA, 14 nt, Human
gcccaccccccuca

SEQ ID NO: 2116139 - RNA, 13 nt, Human
gcccaccccccuc

SEQ ID NO: 2116140 - RNA, 14 nt, Human
gccugaccuccccc

SEQ ID NO: 2116141 - RNA, 15 nt, Human
gccugaccucccccu

SEQ ID NO: 2116142 - RNA, 19 nt, Human
gccugaccucccccuccuu

SEQ ID NO: 2116143 - RNA, 20 nt, Human
gccugaccucccccuccuuc

SEQ ID NO: 2116144 - RNA, 22 nt, Human
gccugaccucccccuccuuccc

SEQ ID NO: 2116145 - RNA, 18 nt, Human
gccucugccucugacaca

SEQ ID NO: 2116146 - RNA, 13 nt, Human
gccucugccucug

SEQ ID NO: 2116147 - RNA, 12 nt, Human
gccucugccucu

SEQ ID NO: 2116148 - RNA, 15 nt, Human
gccucugcauucagg

SEQ ID NO: 2116149 - RNA, 15 nt, Human
gccucugccccgucu

SEQ ID NO: 2116150 - RNA, 16 nt, Human
gccucugccccgucuc

SEQ ID NO: 2116151 - RNA, 23 nt, Human
gccugagggcgaggggagggugg

SEQ ID NO: 2116152 - RNA, 21 nt, Human
gccucugacacacagcucugu

SEQ ID NO: 2116153 - RNA, 20 nt, Human
gccucugacacacagcucug

SEQ ID NO: 2116154 - RNA, 19 nt, Human
gccucugacacacagcucu

SEQ ID NO: 2116155 - RNA, 18 nt, Human
gccucugacacacagcuc

SEQ ID NO: 2116156 - RNA, 17 nt, Human
gccucugacacacagcu

SEQ ID NO: 2116157 - RNA, 12 nt, Human
gccucucauccc

SEQ ID NO: 2116158 - RNA, 17 nt, Human
gccucucaucccccauu

SEQ ID NO: 2116159 - RNA, 16 nt, Human
gccuccguauuucaga

SEQ ID NO: 2116160 - RNA, 19 nt, Human
gccucccgaguagcuggga

SEQ ID NO: 2116161 - RNA, 18 nt, Human
gccucccgaguagcuggg

SEQ ID NO: 2116162 - RNA, 20 nt, Human
gccucccgaguagcugggac

SEQ ID NO: 2116163 - RNA, 21 nt, Human
gccucccuguugaagcucugg

SEQ ID NO: 2116164 - RNA, 13 nt, Human
gccucccugucca

SEQ ID NO: 2116165 - RNA, 14 nt, Human
gccucccuguccac

SEQ ID NO: 2116166 - RNA, 20 nt, Human
gccucccuguugaagcucug

SEQ ID NO: 2116167 - RNA, 10 nt, Human
gccucccagc

SEQ ID NO: 2116168 - RNA, 13 nt, Human
gccucccagccug

SEQ ID NO: 2116169 - RNA, 14 nt, Human
gccucccagccugg

SEQ ID NO: 2116170 - RNA, 19 nt, Human
gccucccaaagugcuggga

SEQ ID NO: 2116171 - RNA, 18 nt, Human
gccucccaaagugcuggg

SEQ ID NO: 2116172 - RNA, 16 nt, Human
gccucagcauccuggc

SEQ ID NO: 2116173 - RNA, 15 nt, Human
gccucagcauccugg

SEQ ID NO: 2116174 - RNA, 16 nt, Human
gccucagacucauaca

SEQ ID NO: 2116175 - RNA, 18 nt, Human
gccgucagccaaauguaa

SEQ ID NO: 2116176 - RNA, 19 nt, Human
gccgugccuucagcucuac

SEQ ID NO: 2116177 - RNA, 17 nt, Human
gccgugccuucagcucu

SEQ ID NO: 2116178 - RNA, 15 nt, Human
gccgugccuucagcu

SEQ ID NO: 2116179 - RNA, 14 nt, Human
gccgugccuucagc

SEQ ID NO: 2116180 - RNA, 19 nt, Human
gccguggcuucccgcucag

SEQ ID NO: 2116181 - RNA, 15 nt, Human
gccguggcuucccgc

SEQ ID NO: 2116182 - RNA, 22 nt, Human
gccguggcuucccgcucagccc

SEQ ID NO: 2116183 - RNA, 21 nt, Human
gccguggcuucccgcucagcc

SEQ ID NO: 2116184 - RNA, 14 nt, Human
gccgugcccugccc

SEQ ID NO: 2116185 - RNA, 20 nt, Human
gccguguaaccauggaccca

SEQ ID NO: 2116186 - RNA, 23 nt, Human
gccguggugauuuagcaggaagc

SEQ ID NO: 2116187 - RNA, 13 nt, Human
gccucaaggacuu

SEQ ID NO: 2116188 - RNA, 16 nt, Human
gccucacagaagaaua

SEQ ID NO: 2116189 - RNA, 22 nt, Human
gccuaugugcaugcagcaucua

SEQ ID NO: 2116190 - RNA, 19 nt, Human
gccucaaccuccugggcua

SEQ ID NO: 2116191 - RNA, 18 nt, Human
gccucaaccuccugggcu

SEQ ID NO: 2116192 - RNA, 18 nt, Human
gccuaugaucccagcacu

SEQ ID NO: 2116193 - RNA, 15 nt, Human
gccuaugaucccagc

SEQ ID NO: 2116194 - RNA, 18 nt, Human
gccguugaagaggaaggg

SEQ ID NO: 2116195 - RNA, 14 nt, Human
gccguuacucucca

SEQ ID NO: 2116196 - RNA, 15 nt, Human
gccguuacucuccaa

SEQ ID NO: 2116197 - RNA, 18 nt, Human
gccguuacucuccaaccu

SEQ ID NO: 2116198 - RNA, 20 nt, Human
gccguuacucuccaaccugg

SEQ ID NO: 2116199 - RNA, 22 nt, Human
gccgugugugugcguccugucg

SEQ ID NO: 2116200 - RNA, 13 nt, Human
gccgcaccccaga

SEQ ID NO: 2116201 - RNA, 23 nt, Human
gccgcaccccagagugugggaag

SEQ ID NO: 2116202 - RNA, 15 nt, Human
gccgcaccccagagu

SEQ ID NO: 2116203 - RNA, 16 nt, Human
gccgcaccccagagug

SEQ ID NO: 2116204 - RNA, 21 nt, Human
gccgagaucacgccacugcac

SEQ ID NO: 2116205 - RNA, 20 nt, Human
gccgagaucacgccacugca

SEQ ID NO: 2116206 - RNA, 22 nt, Human
gccgagaucacgccacugcacu

SEQ ID NO: 2116207 - RNA, 22 nt, Human
gccgaccgaggcuggagcuggc

SEQ ID NO: 2116208 - RNA, 11 nt, Human
gccgaccucag

SEQ ID NO: 2116209 - RNA, 12 nt, Human
gccggucauuuu

SEQ ID NO: 2116210 - RNA, 21 nt, Human
gccgggcgcgguggcucacgc

SEQ ID NO: 2116211 - RNA, 19 nt, Human
gccgggcgugguggcgggc

SEQ ID NO: 2116212 - RNA, 20 nt, Human
gccgggaacagacaacagaa

SEQ ID NO: 2116213 - RNA, 22 nt, Human
gccgggaacagacaacagaagu

SEQ ID NO: 2116214 - RNA, 14 nt, Human
gccgaccagagccc

SEQ ID NO: 2116215 - RNA, 17 nt, Human
gccgaccagagccccac

SEQ ID NO: 2116216 - RNA, 12 nt, Human
gccgaaacugga

SEQ ID NO: 2116217 - RNA, 13 nt, Human
gccgaaacuggaa

SEQ ID NO: 2116218 - RNA, 19 nt, Human
gccgaagaaggguccuucc

SEQ ID NO: 2116219 - RNA, 22 nt, Human
gccgaagaaggguccuucccuc

SEQ ID NO: 2116220 - RNA, 21 nt, Human
gcccuugucccacucaagcca

SEQ ID NO: 2116221 - RNA, 24 nt, Human
gcccuugucccacucaagccaagc

SEQ ID NO: 2116222 - RNA, 12 nt, Human
gcccuuguccca

SEQ ID NO: 2116223 - RNA, 16 nt, Human
gcccuuggaggccagc

SEQ ID NO: 2116224 - RNA, 18 nt, Human
gcccugcuuugggcugcc

SEQ ID NO: 2116225 - RNA, 16 nt, Human
gcccugcuuugggcug

SEQ ID NO: 2116226 - RNA, 19 nt, Human
gcgacagagcgagagucug

SEQ ID NO: 2116227 - RNA, 15 nt, Human
gcgaaccaauauuug

SEQ ID NO: 2116228 - RNA, 23 nt, Human
gcgacagagcgagagucugucuc

SEQ ID NO: 2116229 - RNA, 15 nt, Human
gcgccuacaggagug

SEQ ID NO: 2116230 - RNA, 21 nt, Human
gcgaacggaacguuggacuuu

SEQ ID NO: 2116231 - RNA, 20 nt, Human
gcgcgcccucccuuggcgug

SEQ ID NO: 2116232 - RNA, 14 nt, Human
gcgcgccacucgcu

SEQ ID NO: 2116233 - RNA, 13 nt, Human
gcgcuacccacuu

SEQ ID NO: 2116234 - RNA, 16 nt, Human
gcgcuacccacuucua

SEQ ID NO: 2116235 - RNA, 13 nt, Human
gcggacagccacg

SEQ ID NO: 2116236 - RNA, 11 nt, Human
gcggacagcca

SEQ ID NO: 2116237 - RNA, 19 nt, Human
gcgucucauacucaccuca

SEQ ID NO: 2116238 - RNA, 18 nt, Human
gcguagagggugcugccc

SEQ ID NO: 2116239 - RNA, 14 nt, Human
gcgguuuggggagc

SEQ ID NO: 2116240 - RNA, 19 nt, Human
gcggguggaucaccugagg

SEQ ID NO: 2116241 - RNA, 20 nt, Human
gcgggcaccuauagucccag

SEQ ID NO: 2116242 - RNA, 15 nt, Human
gcgggcacaauaaau

SEQ ID NO: 2116243 - RNA, 16 nt, Human
gcgggaugguccuggg

SEQ ID NO: 2116244 - RNA, 17 nt, Human
gcgggaugguccugggg

SEQ ID NO: 2116245 - RNA, 15 nt, Human
gcggacagccacggc

SEQ ID NO: 2116246 - RNA, 11 nt, Human
gcggggggagg

SEQ ID NO: 2116247 - RNA, 13 nt, Human
gcgggccaaggac

SEQ ID NO: 2116248 - RNA, 15 nt, Human
gcgggccaaggacug

SEQ ID NO: 2116249 - RNA, 17 nt, Human
gcgggccaaggacugcc

SEQ ID NO: 2116250 - RNA, 20 nt, Human
gcgggccaaggacugccgac

SEQ ID NO: 2116251 - RNA, 19 nt, Human
gcgggcgaaucacgagguc

SEQ ID NO: 2116252 - RNA, 18 nt, Human
gcgucugucuucaagggc

SEQ ID NO: 2116253 - RNA, 18 nt, Human
gcgucucccaucuuaacu

SEQ ID NO: 2116254 - RNA, 23 nt, Human
gcgucucccaucuuaacucuuug

SEQ ID NO: 2116255 - RNA, 18 nt, Human
gcuaagagcuagcgcugc

SEQ ID NO: 2116256 - RNA, 16 nt, Human
gcuacacagaucacag

SEQ ID NO: 2116257 - RNA, 20 nt, Human
gcuaagagcuagcgcugccg

SEQ ID NO: 2116258 - RNA, 19 nt, Human
gcuacaggaagcaccccau

SEQ ID NO: 2116259 - RNA, 20 nt, Human
gcuacaggaagcaccccaug

SEQ ID NO: 2116260 - RNA, 21 nt, Human
gcuacaggaagcaccccaugc

SEQ ID NO: 2116261 - RNA, 21 nt, Human
gcuagaagugggccaggacag

SEQ ID NO: 2116262 - RNA, 20 nt, Human
gcuagaagugggccaggaca

SEQ ID NO: 2116263 - RNA, 16 nt, Human
gcuauagcuacaggaa

SEQ ID NO: 2116264 - RNA, 18 nt, Human
gcuauagcuacaggaagc

SEQ ID NO: 2116265 - RNA, 19 nt, Human
gcuauagacccgaggaaac

SEQ ID NO: 2116266 - RNA, 23 nt, Human
gcuauagacccgaggaaacucag

SEQ ID NO: 2116267 - RNA, 23 nt, Human
gcuacagggcgagacucugucuc

SEQ ID NO: 2116268 - RNA, 22 nt, Human
gcuacaggaagcaccccaugcc

SEQ ID NO: 2116269 - RNA, 23 nt, Human
gcuacaggaagcaccccaugcca

SEQ ID NO: 2116270 - RNA, 23 nt, Human
gcuaccugaacacuuauugcuuu

SEQ ID NO: 2116271 - RNA, 18 nt, Human
gcuaccugaucccacucc

SEQ ID NO: 2116272 - RNA, 19 nt, Human
gcuaccugaucccacuccu

SEQ ID NO: 2116273 - RNA, 15 nt, Human
gcuaccuuauuguac

SEQ ID NO: 2116274 - RNA, 17 nt, Human
gcuaccuuauuguacgu

SEQ ID NO: 2116275 - RNA, 14 nt, Human
gccugguggcagcu

SEQ ID NO: 2116276 - RNA, 13 nt, Human
gccuggugcugcu

SEQ ID NO: 2116277 - RNA, 18 nt, Human
gccugguggcagcugcgg

SEQ ID NO: 2116278 - RNA, 21 nt, Human
gccugguggcagcugcggucc

SEQ ID NO: 2116279 - RNA, 19 nt, Human
gccugguggcagcugcggu

SEQ ID NO: 2116280 - RNA, 12 nt, Human
gccuggucuccu

SEQ ID NO: 2116281 - RNA, 16 nt, Human
gccuggucuccugccc

SEQ ID NO: 2116282 - RNA, 19 nt, Human
gccuggucuccugccccca

SEQ ID NO: 2116283 - RNA, 13 nt, Human
gccuggugcagug

SEQ ID NO: 2116284 - RNA, 13 nt, Human
gccugguggcagc

SEQ ID NO: 2116285 - RNA, 18 nt, Human
gccuuagaagucacacag

SEQ ID NO: 2116286 - RNA, 17 nt, Human
gccuuagaagucacaca

SEQ ID NO: 2116287 - RNA, 19 nt, Human
gccuuagaagucacacagu

SEQ ID NO: 2116288 - RNA, 17 nt, Human
gccuuagaaccuuucuu

SEQ ID NO: 2116289 - RNA, 13 nt, Human
gccuggugggccu

SEQ ID NO: 2116290 - RNA, 15 nt, Human
gccuggugggccucc

SEQ ID NO: 2116291 - RNA, 12 nt, Human
gccuuaaaacuu

SEQ ID NO: 2116292 - RNA, 13 nt, Human
gccuuaaaacuuu

SEQ ID NO: 2116293 - RNA, 22 nt, Human
gccuucgauacaccgggccugg

SEQ ID NO: 2116294 - RNA, 18 nt, Human
gccuucgauacaccgggc

SEQ ID NO: 2116295 - RNA, 23 nt, Human
gccuucgauacaccgggccugga

SEQ ID NO: 2116296 - RNA, 18 nt, Human
gccuuccagcacccugca

SEQ ID NO: 2116297 - RNA, 23 nt, Human
gccuuccacgcugucuccagacc

SEQ ID NO: 2116298 - RNA, 19 nt, Human
gccuuccacgcugucucca

SEQ ID NO: 2116299 - RNA, 22 nt, Human
gccuuccacgcugucuccagac

SEQ ID NO: 2116300 - RNA, 23 nt, Human
gccuuugccaccaacuggcccuc

SEQ ID NO: 2116301 - RNA, 15 nt, Human
gccuuugccuccccg

SEQ ID NO: 2116302 - RNA, 22 nt, Human
gccuuugaguuuccucaggcug

SEQ ID NO: 2116303 - RNA, 17 nt, Human
gccuuugaucagguggg

SEQ ID NO: 2116304 - RNA, 15 nt, Human
gccuuugcagaaaca

SEQ ID NO: 2116305 - RNA, 16 nt, Human
gccuuugcagaaacag

SEQ ID NO: 2116306 - RNA, 21 nt, Human
gccuuggauaaugcuguugcc

SEQ ID NO: 2116307 - RNA, 19 nt, Human
gccuuggauaaugcuguug

SEQ ID NO: 2116308 - RNA, 23 nt, Human
gccuuggauaaugcuguugccuc

SEQ ID NO: 2116309 - RNA, 23 nt, Human
gcgaaaggauguaaacagugccu

SEQ ID NO: 2116310 - RNA, 13 nt, Human
gccuuuggcuuca

SEQ ID NO: 2116311 - RNA, 13 nt, Human
uuuugucuugugu

SEQ ID NO: 2116312 - RNA, 16 nt, Human
uuuugucauauaagau

SEQ ID NO: 2116313 - RNA, 22 nt, Human
uuuugugaaaugaaaacaugua

SEQ ID NO: 2116314 - RNA, 23 nt, Human
uuuuuaaaaaucauaaacugugu

SEQ ID NO: 2116315 - RNA, 14 nt, Human
uuuuuaaaaagcaa

SEQ ID NO: 2116316 - RNA, 12 nt, Human
uuuuuaaagaaa

SEQ ID NO: 2116317 - RNA, 20 nt, Human
uuuuuaaagaaaaguuuugu

SEQ ID NO: 2116318 - RNA, 17 nt, Human
uuuuuaaagacagaguc

SEQ ID NO: 2116319 - RNA, 16 nt, Human
uuuuuaaauaaaagca

SEQ ID NO: 2116320 - RNA, 18 nt, Human
uuuuguauaguaaaguga

SEQ ID NO: 2116321 - RNA, 16 nt, Human
uuuuguauaguaaagu

SEQ ID NO: 2116322 - RNA, 17 nt, Human
uuuuguauaguaaagug

SEQ ID NO: 2116323 - RNA, 14 nt, Human
uuuuguagguacuu

SEQ ID NO: 2116324 - RNA, 15 nt, Human
uuuuguagguacuuu

SEQ ID NO: 2116325 - RNA, 16 nt, Human
uuuuguagguacuuuu

SEQ ID NO: 2116326 - RNA, 19 nt, Human
uuuuguagguacuuuugga

SEQ ID NO: 2116327 - RNA, 19 nt, Human
uuuuguagagccagggucu

SEQ ID NO: 2116328 - RNA, 14 nt, Human
uuuuguaauuuucu

SEQ ID NO: 2116329 - RNA, 17 nt, Human
uuuuguaauuuucuuga

SEQ ID NO: 2116330 - RNA, 21 nt, Human
uuuuguaaagaugccggguuu

SEQ ID NO: 2116331 - RNA, 15 nt, Human
uuuuguaaagaugcc

SEQ ID NO: 2116332 - RNA, 16 nt, Human
uuuuguaaaggugaaa

SEQ ID NO: 2116333 - RNA, 14 nt, Human
uuuugguuaaguug

SEQ ID NO: 2116334 - RNA, 22 nt, Human
uuuugguuaaguuggcuucugu

SEQ ID NO: 2116335 - RNA, 14 nt, Human
uuuugguggaugua

SEQ ID NO: 2116336 - RNA, 17 nt, Human
uuuugguggauguaaau

SEQ ID NO: 2116337 - RNA, 18 nt, Human
uuuugguggauguaaaua

SEQ ID NO: 2116338 - RNA, 12 nt, Human
uuuuccugugga

SEQ ID NO: 2116339 - RNA, 13 nt, Human
uuuuaauuauugu

SEQ ID NO: 2116340 - RNA, 14 nt, Human
uuuuaauuauuguu

SEQ ID NO: 2116341 - RNA, 13 nt, Human
uuuucuacaguua

SEQ ID NO: 2116342 - RNA, 14 nt, Human
uuuucuuugaaauu

SEQ ID NO: 2116343 - RNA, 16 nt, Human
uuuucuacaaguauuc

SEQ ID NO: 2116344 - RNA, 15 nt, Human
uuuucuacagcaaau

SEQ ID NO: 2116345 - RNA, 16 nt, Human
uuuucuacagcaaauu

SEQ ID NO: 2116346 - RNA, 17 nt, Human
uuuucuacagcaaauuu

SEQ ID NO: 2116347 - RNA, 21 nt, Human
uuuucuacagcaaauuuauaa

SEQ ID NO: 2116348 - RNA, 15 nt, Human
uuuuggucuguguga

SEQ ID NO: 2116349 - RNA, 19 nt, Human
uuuuggcccccgagcuggg

SEQ ID NO: 2116350 - RNA, 12 nt, Human
uuuugggauguc

SEQ ID NO: 2116351 - RNA, 14 nt, Human
uuuugggaugucuu

SEQ ID NO: 2116352 - RNA, 18 nt, Human
uuuugaaugcuuccugac

SEQ ID NO: 2116353 - RNA, 16 nt, Human
uuuugaauccaugcuu

SEQ ID NO: 2116354 - RNA, 22 nt, Human
uuuugaaugcuuccugacaauc

SEQ ID NO: 2116355 - RNA, 17 nt, Human
uuuuggccaaaguguua

SEQ ID NO: 2116356 - RNA, 15 nt, Human
uuuuggccaaagugu

SEQ ID NO: 2116357 - RNA, 16 nt, Human
uuuuggccaaaguguu

SEQ ID NO: 2116358 - RNA, 19 nt, Human
uuuuggcacugagauauuu

SEQ ID NO: 2116359 - RNA, 19 nt, Human
uuuuggauugacaguaacu

SEQ ID NO: 2116360 - RNA, 20 nt, Human
uuuuggauugacaguaacuu

SEQ ID NO: 2116361 - RNA, 12 nt, Human
uuuuuuguuuca

SEQ ID NO: 2116362 - RNA, 14 nt, Human
uuuuugaaauaaua

SEQ ID NO: 2116363 - RNA, 13 nt, Human
uuuuugaaaacau

SEQ ID NO: 2116364 - RNA, 13 nt, Human
uuuuucuuuauaa

SEQ ID NO: 2116365 - RNA, 16 nt, Human
uuuuucuuuauaaacu

SEQ ID NO: 2116366 - RNA, 17 nt, Human
uuuuucuuuauaaacuu

SEQ ID NO: 2116367 - RNA, 13 nt, Human
uuuuuuguuucau

SEQ ID NO: 2116368 - RNA, 14 nt, Human
uuuuuccuguccuu

SEQ ID NO: 2116369 - RNA, 14 nt, Human
uuuuuaagucuuuu

SEQ ID NO: 2116370 - RNA, 14 nt, Human
uuuuuaaauauauu

SEQ ID NO: 2116371 - RNA, 18 nt, Human
uuuuuaaaguuacuuugu

SEQ ID NO: 2116372 - RNA, 18 nt, Human
uuuuuaagcuguuuccau

SEQ ID NO: 2116373 - RNA, 20 nt, Human
uuuuuaaaugauguugaaua

SEQ ID NO: 2116374 - RNA, 16 nt, Human
uuuuuaaguauuuaua

SEQ ID NO: 2116375 - RNA, 11 nt, Human
uuuuuccuuuu

SEQ ID NO: 2116376 - RNA, 17 nt, Human
uuuuuccuuguauuuaa

SEQ ID NO: 2116377 - RNA, 16 nt, Human
uuuuucguuuguuugu

SEQ ID NO: 2116378 - RNA, 17 nt, Human
uuuuucguuuguuuguu

SEQ ID NO: 2116379 - RNA, 11 nt, Human
uuuuucucuaa

SEQ ID NO: 2116380 - RNA, 23 nt, Human
uuuggugaacauugcaauagaaa

SEQ ID NO: 2116381 - RNA, 22 nt, Human
uuuggugaacauugcaauagaa

SEQ ID NO: 2116382 - RNA, 15 nt, Human
uuuggucucuugcuu

SEQ ID NO: 2116383 - RNA, 15 nt, Human
uuuggauagcauguc

SEQ ID NO: 2116384 - RNA, 20 nt, Human
uuuggauauaggucagugag

SEQ ID NO: 2116385 - RNA, 18 nt, Human
uuuggagcacucugaguu

SEQ ID NO: 2116386 - RNA, 21 nt, Human
uuuggaauuuugugcccccau

SEQ ID NO: 2116387 - RNA, 12 nt, Human
uuuggugccuuu

SEQ ID NO: 2116388 - RNA, 15 nt, Human
uuuggugccuuuccu

SEQ ID NO: 2116389 - RNA, 18 nt, Human
uuuggugccuuuccuguu

SEQ ID NO: 2116390 - RNA, 15 nt, Human
uuugguggagauaaa

SEQ ID NO: 2116391 - RNA, 16 nt, Human
uuugguggauguaaau

SEQ ID NO: 2116392 - RNA, 17 nt, Human
uuugguggauguaaaua

SEQ ID NO: 2116393 - RNA, 13 nt, Human
uuugguuucuagc

SEQ ID NO: 2116394 - RNA, 21 nt, Human
uuuguaaaaacagcauugcuu

SEQ ID NO: 2116395 - RNA, 15 nt, Human
uuugcauauguauga

SEQ ID NO: 2116396 - RNA, 13 nt, Human
uuugaaugaaaaa

SEQ ID NO: 2116397 - RNA, 14 nt, Human
uuugaaugaaaaau

SEQ ID NO: 2116398 - RNA, 24 nt, Human
uuugaaugaaaaauuuaagcauug

SEQ ID NO: 2116399 - RNA, 15 nt, Human
uuugaaugaaaaauu

SEQ ID NO: 2116400 - RNA, 21 nt, Human
uuugaaugaaaaauuuaagca

SEQ ID NO: 2116401 - RNA, 22 nt, Human
uuugaaugaaaaauuuaagcau

SEQ ID NO: 2116402 - RNA, 23 nt, Human
uuugaaugaaaaauuuaagcauu

SEQ ID NO: 2116403 - RNA, 16 nt, Human
uuugaaugcuuccuga

SEQ ID NO: 2116404 - RNA, 14 nt, Human
uuuggaauuuugug

SEQ ID NO: 2116405 - RNA, 16 nt, Human
uuuggaaucuagaaga

SEQ ID NO: 2116406 - RNA, 17 nt, Human
uuuggaaucuagaagaa

SEQ ID NO: 2116407 - RNA, 18 nt, Human
uuuggaaucuagaagaaa

SEQ ID NO: 2116408 - RNA, 20 nt, Human
uuuggaaucuagaagaaaug

SEQ ID NO: 2116409 - RNA, 21 nt, Human
uuuggaaucuagaagaaauga

SEQ ID NO: 2116410 - RNA, 23 nt, Human
uuuggaaucuagaagaaaugaaa

SEQ ID NO: 2116411 - RNA, 22 nt, Human
uuuggaaucuucucuuugacaa

SEQ ID NO: 2116412 - RNA, 22 nt, Human
uuugcuuuuccuuuguuuuuau

SEQ ID NO: 2116413 - RNA, 15 nt, Human
uuuuaaagaaaaguu

SEQ ID NO: 2116414 - RNA, 14 nt, Human
uuuuaaagaaaagu

SEQ ID NO: 2116415 - RNA, 16 nt, Human
uuuuaaaaguuauuaa

SEQ ID NO: 2116416 - RNA, 17 nt, Human
uuuuaaagaaugcucuu

SEQ ID NO: 2116417 - RNA, 12 nt, Human
uuuguauauugu

SEQ ID NO: 2116418 - RNA, 19 nt, Human
uuuguauauauacauaaca

SEQ ID NO: 2116419 - RNA, 14 nt, Human
uuuguaucuugaug

SEQ ID NO: 2116420 - RNA, 17 nt, Human
uuuguauaguaaaguga

SEQ ID NO: 2116421 - RNA, 22 nt, Human
uuuguaaaaacagcauugcuuu

SEQ ID NO: 2116422 - RNA, 12 nt, Human
uuuguaugauau

SEQ ID NO: 2116423 - RNA, 13 nt, Human
uuuguaugauauu

SEQ ID NO: 2116424 - RNA, 21 nt, Human
uuuuaaauuauaacuuaaaau

SEQ ID NO: 2116425 - RNA, 17 nt, Human
uuuuaaauuuucuucag

SEQ ID NO: 2116426 - RNA, 18 nt, Human
uuuuaaauuuucuucagu

SEQ ID NO: 2116427 - RNA, 19 nt, Human
uuuuaaauuuucuucaguu

SEQ ID NO: 2116428 - RNA, 20 nt, Human
uuuuaaauuuucuucaguug

SEQ ID NO: 2116429 - RNA, 16 nt, Human
uuuuaaauuauaagga

SEQ ID NO: 2116430 - RNA, 19 nt, Human
uuuuaaauuauaaggacug

SEQ ID NO: 2116431 - RNA, 21 nt, Human
uuuuaaauuauaaggacugca

SEQ ID NO: 2116432 - RNA, 23 nt, Human
uuuuaaauuauaaggacugcaug

SEQ ID NO: 2116433 - RNA, 19 nt, Human
uuuuaaauggguagagaaa

SEQ ID NO: 2116434 - RNA, 18 nt, Human
uuuuaaauccuguugaaa

SEQ ID NO: 2116435 - RNA, 19 nt, Human
uuuuaaauccuguugaaaa

SEQ ID NO: 2116436 - RNA, 13 nt, Human
uuuuaaauauauu

SEQ ID NO: 2116437 - RNA, 19 nt, Human
uuuuaacaauaacuacugu

SEQ ID NO: 2116438 - RNA, 12 nt, Human
uuuuaauacagg

SEQ ID NO: 2116439 - RNA, 21 nt, Human
uuuuaauagaauauaauuauc

SEQ ID NO: 2116440 - RNA, 13 nt, Human
uuuuaauauguaa

SEQ ID NO: 2116441 - RNA, 13 nt, Human
uuuuaauuaaaua

SEQ ID NO: 2116442 - RNA, 22 nt, Human
uuugaagaugccgcauuuggau

SEQ ID NO: 2116443 - RNA, 17 nt, Human
uuugaauccaugcuugg

SEQ ID NO: 2116444 - RNA, 14 nt, Human
uuugaacucuucaa

SEQ ID NO: 2116445 - RNA, 22 nt, Human
uuucuugacucuuguuuucagu

SEQ ID NO: 2116446 - RNA, 23 nt, Human
uuucuugccaaugaggucugaaa

SEQ ID NO: 2116447 - RNA, 16 nt, Human
uuucuugcagaucaaa

SEQ ID NO: 2116448 - RNA, 13 nt, Human
uuucuuccucugc

SEQ ID NO: 2116449 - RNA, 11 nt, Human
uuucuuccucu

SEQ ID NO: 2116450 - RNA, 18 nt, Human
uuucuucaugcaaugaca

SEQ ID NO: 2116451 - RNA, 19 nt, Human
uuucuucaugcaaugacau

SEQ ID NO: 2116452 - RNA, 22 nt, Human
uuucuucaugcaaugacaucuu

SEQ ID NO: 2116453 - RNA, 14 nt, Human
uuucuucccaucac

SEQ ID NO: 2116454 - RNA, 18 nt, Human
uuucuucaacaucaaugu

SEQ ID NO: 2116455 - RNA, 21 nt, Human
uuucuucaacaucaauguuca

SEQ ID NO: 2116456 - RNA, 16 nt, Human
uuucuucaugcaauga

SEQ ID NO: 2116457 - RNA, 13 nt, Human
uuucuucucccuc

SEQ ID NO: 2116458 - RNA, 12 nt, Human
uuucuucuauuu

SEQ ID NO: 2116459 - RNA, 16 nt, Human
uuucuuccucugcuga

SEQ ID NO: 2116460 - RNA, 14 nt, Human
uuucuuccucugcu

SEQ ID NO: 2116461 - RNA, 12 nt, Human
uuucuucucccu

SEQ ID NO: 2116462 - RNA, 18 nt, Human
uuucuuauuuaacuuaac

SEQ ID NO: 2116463 - RNA, 17 nt, Human
uuucuuaaaaaguuaua

SEQ ID NO: 2116464 - RNA, 16 nt, Human
uuucuuaaacaaaugu

SEQ ID NO: 2116465 - RNA, 15 nt, Human
uuucuguugaaguuu

SEQ ID NO: 2116466 - RNA, 14 nt, Human
uuucuguugccaca

SEQ ID NO: 2116467 - RNA, 14 nt, Human
uuaccaaguuauau

SEQ ID NO: 2116468 - RNA, 16 nt, Human
uuaccaaguuauauaa

SEQ ID NO: 2116469 - RNA, 17 nt, Human
uuaccaaguuauauaaa

SEQ ID NO: 2116470 - RNA, 16 nt, Human
uuuccuccccagcagg

SEQ ID NO: 2116471 - RNA, 18 nt, Human
uuuccucauuuuuauaau

SEQ ID NO: 2116472 - RNA, 19 nt, Human
uuuccucauuccugaaaga

SEQ ID NO: 2116473 - RNA, 12 nt, Human
uuuccuccccag

SEQ ID NO: 2116474 - RNA, 14 nt, Human
uuuccuccccagca

SEQ ID NO: 2116475 - RNA, 21 nt, Human
uuuccucaggcugcuggagga

SEQ ID NO: 2116476 - RNA, 20 nt, Human
uuucuagaacaucccugcca

SEQ ID NO: 2116477 - RNA, 22 nt, Human
uuucuagaacaucccugccagc

SEQ ID NO: 2116478 - RNA, 21 nt, Human
uuucuagaauuuaucacacuu

SEQ ID NO: 2116479 - RNA, 16 nt, Human
uuucuagacuugugcu

SEQ ID NO: 2116480 - RNA, 18 nt, Human
uuucuagagccugcugga

SEQ ID NO: 2116481 - RNA, 17 nt, Human
uuucucuguauaguacu

SEQ ID NO: 2116482 - RNA, 14 nt, Human
uuucucugcuucag

SEQ ID NO: 2116483 - RNA, 18 nt, Human
uuucucugcuucagcuug

SEQ ID NO: 2116484 - RNA, 21 nt, Human
uuucucugcuucagcuugcuu

SEQ ID NO: 2116485 - RNA, 23 nt, Human
guauagaaaugcugguuuuucag

SEQ ID NO: 2116486 - RNA, 15 nt, Human
guauagaaaugcugg

SEQ ID NO: 2116487 - RNA, 22 nt, Human
guauagaaaugcugguuuuuca

SEQ ID NO: 2116488 - RNA, 14 nt, Human
guauagaaaugcug

SEQ ID NO: 2116489 - RNA, 19 nt, Human
guauaguacuggcauggua

SEQ ID NO: 2116490 - RNA, 12 nt, Human
guauauaauuuu

SEQ ID NO: 2116491 - RNA, 21 nt, Human
guauauaauuuuuuuauguuu

SEQ ID NO: 2116492 - RNA, 14 nt, Human
guauauauacauaa

SEQ ID NO: 2116493 - RNA, 16 nt, Human
guauauauacauaaca

SEQ ID NO: 2116494 - RNA, 17 nt, Human
guauauauacauaacag

SEQ ID NO: 2116495 - RNA, 14 nt, Human
guauauauagaauc

SEQ ID NO: 2116496 - RNA, 13 nt, Human
guaucuagugcag

SEQ ID NO: 2116497 - RNA, 15 nt, Human
guaucuagugcagcu

SEQ ID NO: 2116498 - RNA, 16 nt, Human
guaucuagugcagcug

SEQ ID NO: 2116499 - RNA, 17 nt, Human
guaucuagugcagcuga

SEQ ID NO: 2116500 - RNA, 14 nt, Human
guaucggagacagu

SEQ ID NO: 2116501 - RNA, 15 nt, Human
guaucggagacagug

SEQ ID NO: 2116502 - RNA, 11 nt, Human
guaucgggggc

SEQ ID NO: 2116503 - RNA, 17 nt, Human
guaucgggggcuggggc

SEQ ID NO: 2116504 - RNA, 20 nt, Human
guaucgggggcuggggcagg

SEQ ID NO: 2116505 - RNA, 17 nt, Human
guaucggagacagugau

SEQ ID NO: 2116506 - RNA, 18 nt, Human
guaucuagugcagcugau

SEQ ID NO: 2116507 - RNA, 15 nt, Human
guaucuccucgcaag

SEQ ID NO: 2116508 - RNA, 16 nt, Human
guauauguugggugca

SEQ ID NO: 2116509 - RNA, 21 nt, Human
guauaugucucaggucccugc

SEQ ID NO: 2116510 - RNA, 15 nt, Human
guauaugucucaggu

SEQ ID NO: 2116511 - RNA, 13 nt, Human
guauaugucucag

SEQ ID NO: 2116512 - RNA, 16 nt, Human
guauccugcccagugu

SEQ ID NO: 2116513 - RNA, 17 nt, Human
guauccugcccaguguu

SEQ ID NO: 2116514 - RNA, 18 nt, Human
guauccugcccaguguug

SEQ ID NO: 2116515 - RNA, 14 nt, Human
guauauuaaaaaug

SEQ ID NO: 2116516 - RNA, 15 nt, Human
guauauuaaaaaugg

SEQ ID NO: 2116517 - RNA, 16 nt, Human
guauauuaaaaauggu

SEQ ID NO: 2116518 - RNA, 18 nt, Human
guauauuaaaaaugguaa

SEQ ID NO: 2116519 - RNA, 21 nt, Human
guauauuaaaaaugguaaaau

SEQ ID NO: 2116520 - RNA, 22 nt, Human
guauauuaaaaaugguaaaauu

SEQ ID NO: 2116521 - RNA, 16 nt, Human
guauauguaugugugu

SEQ ID NO: 2116522 - RNA, 17 nt, Human
guauauguaugugugua

SEQ ID NO: 2116523 - RNA, 14 nt, Human
guauaucugggcug

SEQ ID NO: 2116524 - RNA, 21 nt, Human
guauaucugggcuggccaguu

SEQ ID NO: 2116525 - RNA, 22 nt, Human
guauaugucaagccauaauugu

SEQ ID NO: 2116526 - RNA, 21 nt, Human
guauguuugcacacuugugug

SEQ ID NO: 2116527 - RNA, 14 nt, Human
guauguuuuagcau

SEQ ID NO: 2116528 - RNA, 16 nt, Human
guauguuuuagcaugu

SEQ ID NO: 2116529 - RNA, 21 nt, Human
guauguugugaagauguuugc

SEQ ID NO: 2116530 - RNA, 14 nt, Human
guauguuugcacac

SEQ ID NO: 2116531 - RNA, 14 nt, Human
guauguuuacacug

SEQ ID NO: 2116532 - RNA, 17 nt, Human
guauguuuacacuguca

SEQ ID NO: 2116533 - RNA, 13 nt, Human
guauuaaagacag

SEQ ID NO: 2116534 - RNA, 14 nt, Human
guauuaaagggggg

SEQ ID NO: 2116535 - RNA, 19 nt, Human
guauuaaaggggggagggg

SEQ ID NO: 2116536 - RNA, 22 nt, Human
guauguuuuuuauuaugcugua

SEQ ID NO: 2116537 - RNA, 23 nt, Human
guauguuuuuguguauuuguuaa

SEQ ID NO: 2116538 - RNA, 19 nt, Human
guauguuuuuguguauuug

SEQ ID NO: 2116539 - RNA, 20 nt, Human
guaugaucacggcucacugc

SEQ ID NO: 2116540 - RNA, 16 nt, Human
guauguguguguaugc

SEQ ID NO: 2116541 - RNA, 18 nt, Human
guauguguguguaugcua

SEQ ID NO: 2116542 - RNA, 15 nt, Human
guauguguguguaug

SEQ ID NO: 2116543 - RNA, 14 nt, Human
guauguguguaugg

SEQ ID NO: 2116544 - RNA, 21 nt, Human
guaugaucacggcucacugca

SEQ ID NO: 2116545 - RNA, 19 nt, Human
guaugaauaaagacaccua

SEQ ID NO: 2116546 - RNA, 18 nt, Human
guaugaauaaagacaccu

SEQ ID NO: 2116547 - RNA, 14 nt, Human
guaugacuaaagag

SEQ ID NO: 2116548 - RNA, 18 nt, Human
guaugacuaaagagagaa

SEQ ID NO: 2116549 - RNA, 20 nt, Human
guaugacuaaagagagaaug

SEQ ID NO: 2116550 - RNA, 23 nt, Human
guaucuuguuuuuccacuacugc

SEQ ID NO: 2116551 - RNA, 22 nt, Human
guaucuuugggucuuugauaaa

SEQ ID NO: 2116552 - RNA, 23 nt, Human
guaugaaagauggcugugccucu

SEQ ID NO: 2116553 - RNA, 22 nt, Human
guaugaaagauggcugugccuc

SEQ ID NO: 2116554 - RNA, 12 nt, Human
guaucugagcag

SEQ ID NO: 2116555 - RNA, 14 nt, Human
guaucugggaacug

SEQ ID NO: 2116556 - RNA, 15 nt, Human
guaggggugugugug

SEQ ID NO: 2116557 - RNA, 17 nt, Human
guaggguaaggugccuu

SEQ ID NO: 2116558 - RNA, 21 nt, Human
guagggucaggccacggcagc

SEQ ID NO: 2116559 - RNA, 22 nt, Human
guagggucaggccacggcagcc

SEQ ID NO: 2116560 - RNA, 16 nt, Human
guaggguuauaauaau

SEQ ID NO: 2116561 - RNA, 13 nt, Human
guagguacuuuug

SEQ ID NO: 2116562 - RNA, 12 nt, Human
guaggguuucua

SEQ ID NO: 2116563 - RNA, 23 nt, Human
guagguaucauuuucugcauuua

SEQ ID NO: 2116564 - RNA, 16 nt, Human
guaguauaaagaaaag

SEQ ID NO: 2116565 - RNA, 18 nt, Human
guaguagggucaggccac

SEQ ID NO: 2116566 - RNA, 21 nt, Human
guaguacuccugcaaaauuuu

SEQ ID NO: 2116567 - RNA, 19 nt, Human
guaguacuccuuaagaaca

SEQ ID NO: 2116568 - RNA, 20 nt, Human
guaguacuccuuaagaacac

SEQ ID NO: 2116569 - RNA, 22 nt, Human
guaguacuccugcaaaauuuua

SEQ ID NO: 2116570 - RNA, 22 nt, Human
guauaauuuuuuaaaguuacuu

SEQ ID NO: 2116571 - RNA, 21 nt, Human
guauacaguggauuaauuaaa

SEQ ID NO: 2116572 - RNA, 18 nt, Human
guauacaagauaagcuuc

SEQ ID NO: 2116573 - RNA, 17 nt, Human
guagucaagauuguguu

SEQ ID NO: 2116574 - RNA, 15 nt, Human
guaggugauuugaag

SEQ ID NO: 2116575 - RNA, 12 nt, Human
guagucccagcu

SEQ ID NO: 2116576 - RNA, 13 nt, Human
guagucccagcua

SEQ ID NO: 2116577 - RNA, 14 nt, Human
guagugagaagaau

SEQ ID NO: 2116578 - RNA, 15 nt, Human
guagugagaagaaua

SEQ ID NO: 2116579 - RNA, 14 nt, Human
guagucuaaccaaa

SEQ ID NO: 2116580 - RNA, 15 nt, Human
guagucuaaccaaau

SEQ ID NO: 2116581 - RNA, 16 nt, Human
guagucuaaccaaaug

SEQ ID NO: 2116582 - RNA, 18 nt, Human
guagucuaaccaaaugca

SEQ ID NO: 2116583 - RNA, 19 nt, Human
guagucuaaccaaaugcau

SEQ ID NO: 2116584 - RNA, 15 nt, Human
guagagugugccuga

SEQ ID NO: 2116585 - RNA, 14 nt, Human
guagauagaaauaa

SEQ ID NO: 2116586 - RNA, 12 nt, Human
guagauagaaau

SEQ ID NO: 2116587 - RNA, 13 nt, Human
guagauagaaaua

SEQ ID NO: 2116588 - RNA, 21 nt, Human
guagaugugcauuuuugugaa

SEQ ID NO: 2116589 - RNA, 15 nt, Human
guagauuuguuuugu

SEQ ID NO: 2116590 - RNA, 16 nt, Human
guagauuuguuuugug

SEQ ID NO: 2116591 - RNA, 21 nt, Human
guagauuuuaaaaguuauuaa

SEQ ID NO: 2116592 - RNA, 14 nt, Human
guagauugcuucug

SEQ ID NO: 2116593 - RNA, 16 nt, Human
guagauugcuucugua

SEQ ID NO: 2116594 - RNA, 15 nt, Human
guagcaguagaugca

SEQ ID NO: 2116595 - RNA, 17 nt, Human
guagcagguaccacuga

SEQ ID NO: 2116596 - RNA, 16 nt, Human
guagggcgggaggaug

SEQ ID NO: 2116597 - RNA, 17 nt, Human
guaggcuuuacuuagcu

SEQ ID NO: 2116598 - RNA, 21 nt, Human
guagcaaucagauuuuccugu

SEQ ID NO: 2116599 - RNA, 22 nt, Human
guagggcgggaggauguucugg

SEQ ID NO: 2116600 - RNA, 21 nt, Human
guagggcgggaggauguucug

SEQ ID NO: 2116601 - RNA, 12 nt, Human
guagggcugacu

SEQ ID NO: 2116602 - RNA, 21 nt, Human
guagggcugccaccaagguga

SEQ ID NO: 2116603 - RNA, 23 nt, Human
guagggcgggaggauguucuggg

SEQ ID NO: 2116604 - RNA, 14 nt, Human
guagccccaagaag

SEQ ID NO: 2116605 - RNA, 21 nt, Human
guagccccaagaaggcugggg

SEQ ID NO: 2116606 - RNA, 23 nt, Human
guagccccaagaaggcuggggcu

SEQ ID NO: 2116607 - RNA, 21 nt, Human
guagcauguugagccaggccu

SEQ ID NO: 2116608 - RNA, 15 nt, Human
guagcauuacagugg

SEQ ID NO: 2116609 - RNA, 18 nt, Human
guagcagguaccacugau

SEQ ID NO: 2116610 - RNA, 13 nt, Human
guagcauacauuu

SEQ ID NO: 2116611 - RNA, 12 nt, Human
guagcaugagag

SEQ ID NO: 2116612 - RNA, 18 nt, Human
guagccaaggugggcuga

SEQ ID NO: 2116613 - RNA, 19 nt, Human
guagccaaggugggcugag

SEQ ID NO: 2116614 - RNA, 16 nt, Human
guccacaguggaacca

SEQ ID NO: 2116615 - RNA, 16 nt, Human
gucauugcuuuacugg

SEQ ID NO: 2116616 - RNA, 19 nt, Human
guccacaguggaaccagcc

SEQ ID NO: 2116617 - RNA, 21 nt, Human
guccacaguggaaccagccca

SEQ ID NO: 2116618 - RNA, 21 nt, Human
gucauuaugagaggcaaugau

SEQ ID NO: 2116619 - RNA, 16 nt, Human
gucagcuugcugcccu

SEQ ID NO: 2116620 - RNA, 20 nt, Human
gucagcuugcugcccuaggc

SEQ ID NO: 2116621 - RNA, 16 nt, Human
gucagcuuugccuucc

SEQ ID NO: 2116622 - RNA, 17 nt, Human
gucagcuuugccuucca

SEQ ID NO: 2116623 - RNA, 23 nt, Human
gucagcuuugccuuccacgcugu

SEQ ID NO: 2116624 - RNA, 14 nt, Human
gucauuaaaauaaa

SEQ ID NO: 2116625 - RNA, 18 nt, Human
gucagcuuugccuuccac

SEQ ID NO: 2116626 - RNA, 22 nt, Human
gucauuaaaauaaauaaaugca

SEQ ID NO: 2116627 - RNA, 17 nt, Human
gucagcuacuaaugaug

SEQ ID NO: 2116628 - RNA, 23 nt, Human
guccagagagagaagugccccug

SEQ ID NO: 2116629 - RNA, 20 nt, Human
guccacugucacuguuucuc

SEQ ID NO: 2116630 - RNA, 12 nt, Human
guccacugucac

SEQ ID NO: 2116631 - RNA, 20 nt, Human
guccagagagagaagugccc

SEQ ID NO: 2116632 - RNA, 22 nt, Human
guccagagagagaagugccccu

SEQ ID NO: 2116633 - RNA, 22 nt, Human
guccaccugagcugccauccag

SEQ ID NO: 2116634 - RNA, 13 nt, Human
guccacccaggag

SEQ ID NO: 2116635 - RNA, 17 nt, Human
guccaccaauagaauga

SEQ ID NO: 2116636 - RNA, 12 nt, Human
guccacccagga

SEQ ID NO: 2116637 - RNA, 21 nt, Human
guccaccuggccccaugucuc

SEQ ID NO: 2116638 - RNA, 23 nt, Human
guccacccaggagccccgaggcc

SEQ ID NO: 2116639 - RNA, 17 nt, Human
guccaggucgggcucag

SEQ ID NO: 2116640 - RNA, 18 nt, Human
guccaggucgggcucagc

SEQ ID NO: 2116641 - RNA, 19 nt, Human
guccaggucgggcucagcu

SEQ ID NO: 2116642 - RNA, 22 nt, Human
guccaggucgggcucagcucug

SEQ ID NO: 2116643 - RNA, 23 nt, Human
guccaggucgggcucagcucugg

SEQ ID NO: 2116644 - RNA, 16 nt, Human
guccagucucuucugc

SEQ ID NO: 2116645 - RNA, 21 nt, Human
gucccaccuuggcugcaggga

SEQ ID NO: 2116646 - RNA, 11 nt, Human
guccaggggau

SEQ ID NO: 2116647 - RNA, 20 nt, Human
guccagggcccugagcucgg

SEQ ID NO: 2116648 - RNA, 11 nt, Human
guccagccugg

SEQ ID NO: 2116649 - RNA, 13 nt, Human
guccagccugggc

SEQ ID NO: 2116650 - RNA, 20 nt, Human
guccagccgccauugccacc

SEQ ID NO: 2116651 - RNA, 22 nt, Human
guccagccgccauugccaccag

SEQ ID NO: 2116652 - RNA, 12 nt, Human
gucccaggcaga

SEQ ID NO: 2116653 - RNA, 23 nt, Human
gucccaccuuggcugcagggagu

SEQ ID NO: 2116654 - RNA, 20 nt, Human
gucccaccuuggcugcaggg

SEQ ID NO: 2116655 - RNA, 21 nt, Human
gucccugcacuugcagacucu

SEQ ID NO: 2116656 - RNA, 19 nt, Human
gucccugcacuugcagacu

SEQ ID NO: 2116657 - RNA, 16 nt, Human
gucccugcacuugcag

SEQ ID NO: 2116658 - RNA, 20 nt, Human
gucccugacucucugugacc

SEQ ID NO: 2116659 - RNA, 17 nt, Human
gucccugacucucugug

SEQ ID NO: 2116660 - RNA, 18 nt, Human
gucccugacucucuguga

SEQ ID NO: 2116661 - RNA, 16 nt, Human
gucccucucaggcaug

SEQ ID NO: 2116662 - RNA, 13 nt, Human
gucccucucucug

SEQ ID NO: 2116663 - RNA, 14 nt, Human
gucccucucucugg

SEQ ID NO: 2116664 - RNA, 21 nt, Human
gucccucucggaaggcuggcu

SEQ ID NO: 2116665 - RNA, 13 nt, Human
gucccucucaggc

SEQ ID NO: 2116666 - RNA, 14 nt, Human
gucccucucaggca

SEQ ID NO: 2116667 - RNA, 23 nt, Human
gucccuaccgagucucuucucca

SEQ ID NO: 2116668 - RNA, 22 nt, Human
gucccuaccgagucucuucucc

SEQ ID NO: 2116669 - RNA, 21 nt, Human
gucccuaccgagucucuucuc

SEQ ID NO: 2116670 - RNA, 16 nt, Human
gucccuacaccccucc

SEQ ID NO: 2116671 - RNA, 21 nt, Human
gucccuacaccccuccccugc

SEQ ID NO: 2116672 - RNA, 15 nt, Human
gucccuaugcauauc

SEQ ID NO: 2116673 - RNA, 19 nt, Human
gucccuccacguucacccc

SEQ ID NO: 2116674 - RNA, 20 nt, Human
gucccuccacguucaccccu

SEQ ID NO: 2116675 - RNA, 21 nt, Human
gucccuccacguucaccccuc

SEQ ID NO: 2116676 - RNA, 22 nt, Human
guauuaaguuguuaauaaaagu

SEQ ID NO: 2116677 - RNA, 14 nt, Human
guauuaauauucau

SEQ ID NO: 2116678 - RNA, 21 nt, Human
guauuuuaguaagagauuccu

SEQ ID NO: 2116679 - RNA, 15 nt, Human
guauuuuaguauauu

SEQ ID NO: 2116680 - RNA, 18 nt, Human
guauuuuauaaaauuaaa

SEQ ID NO: 2116681 - RNA, 21 nt, Human
guauuuuauaaaauuaaagaa

SEQ ID NO: 2116682 - RNA, 22 nt, Human
guauuuuauaaaauuaaagaaa

SEQ ID NO: 2116683 - RNA, 13 nt, Human
guauuuuauguau

SEQ ID NO: 2116684 - RNA, 15 nt, Human
guauuuuauguaugu

SEQ ID NO: 2116685 - RNA, 23 nt, Human
guauuuuauguauguuuacacug

SEQ ID NO: 2116686 - RNA, 10 nt, Human
guauuuuauu

SEQ ID NO: 2116687 - RNA, 19 nt, Human
gucaauccugugggugaag

SEQ ID NO: 2116688 - RNA, 17 nt, Human
gucaauccccucauuca

SEQ ID NO: 2116689 - RNA, 22 nt, Human
gucaauccccucauucaggaaa

SEQ ID NO: 2116690 - RNA, 15 nt, Human
gucaauccugugggu

SEQ ID NO: 2116691 - RNA, 16 nt, Human
gucaauccugugggug

SEQ ID NO: 2116692 - RNA, 16 nt, Human
gucaauccccucauuc

SEQ ID NO: 2116693 - RNA, 21 nt, Human
gucaauacaguacaggcagca

SEQ ID NO: 2116694 - RNA, 23 nt, Human
gucaccaggaauguuaaagucag

SEQ ID NO: 2116695 - RNA, 18 nt, Human
gucaccaggaauguuaaa

SEQ ID NO: 2116696 - RNA, 15 nt, Human
gucaccaucucaggc

SEQ ID NO: 2116697 - RNA, 22 nt, Human
gucaccaccuucccagcucucc

SEQ ID NO: 2116698 - RNA, 19 nt, Human
gucaccaccuucccagcuc

SEQ ID NO: 2116699 - RNA, 20 nt, Human
gucaccaccuucccagcucu

SEQ ID NO: 2116700 - RNA, 13 nt, Human
gucaccaccucuc

SEQ ID NO: 2116701 - RNA, 11 nt, Human
gucaccaccuu

SEQ ID NO: 2116702 - RNA, 14 nt, Human
gucaccaccuuccc

SEQ ID NO: 2116703 - RNA, 15 nt, Human
gucaccaccuuccca

SEQ ID NO: 2116704 - RNA, 16 nt, Human
gucaccaccuucccag

SEQ ID NO: 2116705 - RNA, 17 nt, Human
gucaccaccuucccagc

SEQ ID NO: 2116706 - RNA, 13 nt, Human
gucaauaaacagc

SEQ ID NO: 2116707 - RNA, 20 nt, Human
gucaauaaacagcuucaugc

SEQ ID NO: 2116708 - RNA, 19 nt, Human
gucaauacaguacaggcag

SEQ ID NO: 2116709 - RNA, 20 nt, Human
gucaauacaguacaggcagc

SEQ ID NO: 2116710 - RNA, 21 nt, Human
gucaagucucugcuggcccag

SEQ ID NO: 2116711 - RNA, 15 nt, Human
gucaagugaaaaagg

SEQ ID NO: 2116712 - RNA, 19 nt, Human
guauuuuguuuuugucuua

SEQ ID NO: 2116713 - RNA, 15 nt, Human
gucaaggugcuguug

SEQ ID NO: 2116714 - RNA, 14 nt, Human
gucaaguaagaaga

SEQ ID NO: 2116715 - RNA, 15 nt, Human
gucaaguaagaagac

SEQ ID NO: 2116716 - RNA, 13 nt, Human
gucaagucaacca

SEQ ID NO: 2116717 - RNA, 14 nt, Human
gucaagucucugcu

SEQ ID NO: 2116718 - RNA, 17 nt, Human
gucaagucucugcuggc

SEQ ID NO: 2116719 - RNA, 18 nt, Human
gucagaugggaagacaug

SEQ ID NO: 2116720 - RNA, 12 nt, Human
gucagauuccuu

SEQ ID NO: 2116721 - RNA, 13 nt, Human
gucagauuccuuu

SEQ ID NO: 2116722 - RNA, 14 nt, Human
gucagauuccuuuc

SEQ ID NO: 2116723 - RNA, 16 nt, Human
gucagauuccuuuccc

SEQ ID NO: 2116724 - RNA, 19 nt, Human
gucagcuacuaaugauguu

SEQ ID NO: 2116725 - RNA, 18 nt, Human
gucagaguaagcugcuuu

SEQ ID NO: 2116726 - RNA, 19 nt, Human
gucagaguaagcugcuuuu

SEQ ID NO: 2116727 - RNA, 14 nt, Human
gucagagccugcag

SEQ ID NO: 2116728 - RNA, 22 nt, Human
gucagacuggcuggcugcagug

SEQ ID NO: 2116729 - RNA, 16 nt, Human
gucagacuuuaaagaa

SEQ ID NO: 2116730 - RNA, 15 nt, Human
gucagacuuuaaaga

SEQ ID NO: 2116731 - RNA, 12 nt, Human
gucagagagaau

SEQ ID NO: 2116732 - RNA, 17 nt, Human
gucagagaggagucaga

SEQ ID NO: 2116733 - RNA, 14 nt, Human
gucagacugcuggg

SEQ ID NO: 2116734 - RNA, 15 nt, Human
gucagacugcuggga

SEQ ID NO: 2116735 - RNA, 16 nt, Human
gucagacugcugggac

SEQ ID NO: 2116736 - RNA, 20 nt, Human
gucagacugcugggacuggc

SEQ ID NO: 2116737 - RNA, 22 nt, Human
gucagacugcugggacuggcca

SEQ ID NO: 2116738 - RNA, 24 nt, Human
gucagacugcugggacuggccagg

SEQ ID NO: 2116739 - RNA, 14 nt, Human
gucagacuggcugg

SEQ ID NO: 2116740 - RNA, 18 nt, Human
gucagacuggcuggcugc

SEQ ID NO: 2116741 - RNA, 16 nt, Human
gucagagccugcaguu

SEQ ID NO: 2116742 - RNA, 15 nt, Human
gucagagccugcagu

SEQ ID NO: 2116743 - RNA, 19 nt, Human
gucagagaggagucagaga

SEQ ID NO: 2116744 - RNA, 21 nt, Human
gucagagaggagucagagaga

SEQ ID NO: 2116745 - RNA, 14 nt, Human
gucagagcugggag

SEQ ID NO: 2116746 - RNA, 12 nt, Human
gucagagcuggg

SEQ ID NO: 2116747 - RNA, 13 nt, Human
gucagagcuggga

SEQ ID NO: 2116748 - RNA, 12 nt, Human
gucacuccuggg

SEQ ID NO: 2116749 - RNA, 13 nt, Human
gucacuccugggg

SEQ ID NO: 2116750 - RNA, 21 nt, Human
gucacuccuggggccucuugg

SEQ ID NO: 2116751 - RNA, 22 nt, Human
gucacuaaagcaggccuuuuga

SEQ ID NO: 2116752 - RNA, 15 nt, Human
gucacccggccccca

SEQ ID NO: 2116753 - RNA, 23 nt, Human
gucacucaacaaaagugcuuugg

SEQ ID NO: 2116754 - RNA, 23 nt, Human
gucacucagauggaaccgcagga

SEQ ID NO: 2116755 - RNA, 23 nt, Human
gucacuacgugacuguggcacac

SEQ ID NO: 2116756 - RNA, 14 nt, Human
gucacuacucacag

SEQ ID NO: 2116757 - RNA, 17 nt, Human
gucacuacucacagucu

SEQ ID NO: 2116758 - RNA, 22 nt, Human
gucacuacucacagucucuuua

SEQ ID NO: 2116759 - RNA, 19 nt, Human
gucucgugguaggacugua

SEQ ID NO: 2116760 - RNA, 12 nt, Human
gucucaggagca

SEQ ID NO: 2116761 - RNA, 16 nt, Human
gucucaggagcauggg

SEQ ID NO: 2116762 - RNA, 13 nt, Human
gucucagccuccc

SEQ ID NO: 2116763 - RNA, 15 nt, Human
gucucaggaccuagg

SEQ ID NO: 2116764 - RNA, 22 nt, Human
gucucacucugucgcccagucu

SEQ ID NO: 2116765 - RNA, 19 nt, Human
gucucacucugucgcccag

SEQ ID NO: 2116766 - RNA, 18 nt, Human
gucucacucugucgccca

SEQ ID NO: 2116767 - RNA, 16 nt, Human
gucucacucugucgcc

SEQ ID NO: 2116768 - RNA, 15 nt, Human
gucucacucugucgc

SEQ ID NO: 2116769 - RNA, 13 nt, Human
gucucuugaggga

SEQ ID NO: 2116770 - RNA, 12 nt, Human
gucucuugcuug

SEQ ID NO: 2116771 - RNA, 23 nt, Human
gucucuugagggagcuuagccaa

SEQ ID NO: 2116772 - RNA, 18 nt, Human
gucucuucuccacuggau

SEQ ID NO: 2116773 - RNA, 20 nt, Human
gucucugcuggcccagccaa

SEQ ID NO: 2116774 - RNA, 11 nt, Human
gucucucuuug

SEQ ID NO: 2116775 - RNA, 16 nt, Human
gucucucuuuggacuc

SEQ ID NO: 2116776 - RNA, 20 nt, Human
gucucucuuuggacucuccc

SEQ ID NO: 2116777 - RNA, 21 nt, Human
gucucucuuuggacucucccc

SEQ ID NO: 2116778 - RNA, 13 nt, Human
gucucugcuggcc

SEQ ID NO: 2116779 - RNA, 15 nt, Human
gucucugcuggccca

SEQ ID NO: 2116780 - RNA, 16 nt, Human
gucucugcuggcccag

SEQ ID NO: 2116781 - RNA, 17 nt, Human
gucucugcuggcccagc

SEQ ID NO: 2116782 - RNA, 11 nt, Human
gucucugccau

SEQ ID NO: 2116783 - RNA, 21 nt, Human
gucucugccaugaacuggagg

SEQ ID NO: 2116784 - RNA, 22 nt, Human
gucucugccaugaacuggaggc

SEQ ID NO: 2116785 - RNA, 12 nt, Human
gucucugcugaa

SEQ ID NO: 2116786 - RNA, 20 nt, Human
gucguagccaaggugggcug

SEQ ID NO: 2116787 - RNA, 17 nt, Human
gucggggggacagcucc

SEQ ID NO: 2116788 - RNA, 23 nt, Human
gucguggcagauaaucagccucu

SEQ ID NO: 2116789 - RNA, 15 nt, Human
gucguggcagauaau

SEQ ID NO: 2116790 - RNA, 22 nt, Human
gucguggcagauaaucagccuc

SEQ ID NO: 2116791 - RNA, 18 nt, Human
gucuaacuuuugugugaa

SEQ ID NO: 2116792 - RNA, 16 nt, Human
gucuaaccaaaugcau

SEQ ID NO: 2116793 - RNA, 17 nt, Human
gucuaaccaaaugcauc

SEQ ID NO: 2116794 - RNA, 13 nt, Human
gucuaaauauuuc

SEQ ID NO: 2116795 - RNA, 16 nt, Human
gucuaaauauuuccuu

SEQ ID NO: 2116796 - RNA, 23 nt, Human
gucuaaauauuuccuuaaacugu

SEQ ID NO: 2116797 - RNA, 19 nt, Human
gucucacuauguugcccag

SEQ ID NO: 2116798 - RNA, 11 nt, Human
gucucacucug

SEQ ID NO: 2116799 - RNA, 18 nt, Human
gucucacuauguugccca

SEQ ID NO: 2116800 - RNA, 14 nt, Human
gucccugcccccuc

SEQ ID NO: 2116801 - RNA, 17 nt, Human
gucccugcccccucccc

SEQ ID NO: 2116802 - RNA, 12 nt, Human
gucggagcccug

SEQ ID NO: 2116803 - RNA, 16 nt, Human
gucggagcccugucuc

SEQ ID NO: 2116804 - RNA, 18 nt, Human
gucgggaguucgagacca

SEQ ID NO: 2116805 - RNA, 12 nt, Human
gucgggcucagc

SEQ ID NO: 2116806 - RNA, 21 nt, Human
gucgggcucagcucuggcuca

SEQ ID NO: 2116807 - RNA, 14 nt, Human
gucgggggcugagg

SEQ ID NO: 2116808 - RNA, 18 nt, Human
gucgggggcugaggggca

SEQ ID NO: 2116809 - RNA, 16 nt, Human
gucuuuuuucacuaca

SEQ ID NO: 2116810 - RNA, 15 nt, Human
gucuugguacuugcu

SEQ ID NO: 2116811 - RNA, 21 nt, Human
gucuugguacuugcugcuauu

SEQ ID NO: 2116812 - RNA, 12 nt, Human
gucuuguaagag

SEQ ID NO: 2116813 - RNA, 21 nt, Human
gucuuguaagagcuauacagu

SEQ ID NO: 2116814 - RNA, 21 nt, Human
gucuugcaauggcagccuugg

SEQ ID NO: 2116815 - RNA, 20 nt, Human
gucuugcaauggcagccuug

SEQ ID NO: 2116816 - RNA, 23 nt, Human
gucuugcaauggcagccuuggca

SEQ ID NO: 2116817 - RNA, 17 nt, Human
gucuugauuuguuuuag

SEQ ID NO: 2116818 - RNA, 18 nt, Human
gucuugauuuguuuuaga

SEQ ID NO: 2116819 - RNA, 19 nt, Human
gucuugcagugauuaaggu

SEQ ID NO: 2116820 - RNA, 21 nt, Human
gucuugcagugauuaaggucu

SEQ ID NO: 2116821 - RNA, 22 nt, Human
gucuugcuauggggagaaaaga

SEQ ID NO: 2116822 - RNA, 12 nt, Human
gucuugcugugg

SEQ ID NO: 2116823 - RNA, 16 nt, Human
gucuucuuacaugcau

SEQ ID NO: 2116824 - RNA, 17 nt, Human
gucuucuuugcccacaa

SEQ ID NO: 2116825 - RNA, 17 nt, Human
gucuugaacuccuggcc

SEQ ID NO: 2116826 - RNA, 16 nt, Human
gucuugaacuccuggc

SEQ ID NO: 2116827 - RNA, 21 nt, Human
gucuuaaaaaguggaaaaaua

SEQ ID NO: 2116828 - RNA, 15 nt, Human
gucuucucaggcucu

SEQ ID NO: 2116829 - RNA, 18 nt, Human
gucuucucaggcucugcc

SEQ ID NO: 2116830 - RNA, 19 nt, Human
gucuucucaggcucugccc

SEQ ID NO: 2116831 - RNA, 22 nt, Human
gucuucucaggcucugcccugc

SEQ ID NO: 2116832 - RNA, 16 nt, Human
gucuucucauagcauu

SEQ ID NO: 2116833 - RNA, 17 nt, Human
gucuucucauagcauua

SEQ ID NO: 2116834 - RNA, 19 nt, Human
gucuucucauagcauuaac

SEQ ID NO: 2116835 - RNA, 20 nt, Human
gucuucucauagcauuaacu

SEQ ID NO: 2116836 - RNA, 23 nt, Human
gucuucucauagcauuaacuaau

SEQ ID NO: 2116837 - RNA, 19 nt, Human
gucuugcaauggcagccuu

SEQ ID NO: 2116838 - RNA, 18 nt, Human
gucuugcaauggcagccu

SEQ ID NO: 2116839 - RNA, 17 nt, Human
gucuugcaauggcagcc

SEQ ID NO: 2116840 - RNA, 16 nt, Human
gucuugcaauggcagc

SEQ ID NO: 2116841 - RNA, 20 nt, Human
gucuugaacuccuggccuca

SEQ ID NO: 2116842 - RNA, 18 nt, Human
gucuugaacuccuggccu

SEQ ID NO: 2116843 - RNA, 21 nt, Human
gucuugaacuccuggccucaa

SEQ ID NO: 2116844 - RNA, 20 nt, Human
gucuucuuugcccacaaugc

SEQ ID NO: 2116845 - RNA, 17 nt, Human
gucugugugcaagugug

SEQ ID NO: 2116846 - RNA, 15 nt, Human
gucugugugcugugg

SEQ ID NO: 2116847 - RNA, 17 nt, Human
gucugugugcugugguu

SEQ ID NO: 2116848 - RNA, 16 nt, Human
gucugugugggacugu

SEQ ID NO: 2116849 - RNA, 18 nt, Human
gucugugugggacuguac

SEQ ID NO: 2116850 - RNA, 20 nt, Human
gucugugugggacuguacac

SEQ ID NO: 2116851 - RNA, 16 nt, Human
gucuguuaacuuaaua

SEQ ID NO: 2116852 - RNA, 22 nt, Human
gucuguguugcgugucgugggu

SEQ ID NO: 2116853 - RNA, 21 nt, Human
gucugugaauuggaccauccu

SEQ ID NO: 2116854 - RNA, 13 nt, Human
gucugugccugga

SEQ ID NO: 2116855 - RNA, 16 nt, Human
gucugugccuggagcu

SEQ ID NO: 2116856 - RNA, 17 nt, Human
gucugugccuggagcuc

SEQ ID NO: 2116857 - RNA, 16 nt, Human
gucugucuucacagcu

SEQ ID NO: 2116858 - RNA, 22 nt, Human
gucugucuucacagcucugugu

SEQ ID NO: 2116859 - RNA, 17 nt, Human
gucugagccaaagagaa

SEQ ID NO: 2116860 - RNA, 17 nt, Human
gucugccagccagcagc

SEQ ID NO: 2116861 - RNA, 18 nt, Human
gucugccagccagcagcc

SEQ ID NO: 2116862 - RNA, 21 nt, Human
gugaaugaugauccuaggcau

SEQ ID NO: 2116863 - RNA, 22 nt, Human
gugaaugaaagucuugugacua

SEQ ID NO: 2116864 - RNA, 21 nt, Human
gugaauuaucccuuuucuuga

SEQ ID NO: 2116865 - RNA, 20 nt, Human
gugacaaggauugcuacugu

SEQ ID NO: 2116866 - RNA, 14 nt, Human
gugaauuugaauga

SEQ ID NO: 2116867 - RNA, 16 nt, Human
gugaauuugaaugaaa

SEQ ID NO: 2116868 - RNA, 18 nt, Human
gugaauuugaaugaaaaa

SEQ ID NO: 2116869 - RNA, 13 nt, Human
gugaauuugaauc

SEQ ID NO: 2116870 - RNA, 14 nt, Human
gugaauuugaaucu

SEQ ID NO: 2116871 - RNA, 15 nt, Human
gugaauuugaaucuc

SEQ ID NO: 2116872 - RNA, 13 nt, Human
gugaauuugaaug

SEQ ID NO: 2116873 - RNA, 19 nt, Human
gugaauugugaccaaguua

SEQ ID NO: 2116874 - RNA, 13 nt, Human
gugaauugauaau

SEQ ID NO: 2116875 - RNA, 14 nt, Human
gugaauugauaaua

SEQ ID NO: 2116876 - RNA, 16 nt, Human
gugaauugauaauaaa

SEQ ID NO: 2116877 - RNA, 17 nt, Human
gugaauugauaauaaac

SEQ ID NO: 2116878 - RNA, 20 nt, Human
gucuuuuuuuuuuuugucua

SEQ ID NO: 2116879 - RNA, 14 nt, Human
gucuuuuuuucugu

SEQ ID NO: 2116880 - RNA, 19 nt, Human
gucuuuuuuucuguuaauu

SEQ ID NO: 2116881 - RNA, 23 nt, Human
gugaaucugcauuuucuggguuc

SEQ ID NO: 2116882 - RNA, 15 nt, Human
gugaaucuaaaagcu

SEQ ID NO: 2116883 - RNA, 20 nt, Human
gugaaaaaagcuuuuaugag

SEQ ID NO: 2116884 - RNA, 19 nt, Human
gugaacaagugaacacauu

SEQ ID NO: 2116885 - RNA, 15 nt, Human
gugaccucugccuga

SEQ ID NO: 2116886 - RNA, 15 nt, Human
gugaccuucugggaa

SEQ ID NO: 2116887 - RNA, 14 nt, Human
gugaccucugccug

SEQ ID NO: 2116888 - RNA, 13 nt, Human
gugaccucugccu

SEQ ID NO: 2116889 - RNA, 15 nt, Human
gugacagaggcagcc

SEQ ID NO: 2116890 - RNA, 12 nt, Human
gugaccucugcc

SEQ ID NO: 2116891 - RNA, 14 nt, Human
gugacagaggcagc

SEQ ID NO: 2116892 - RNA, 13 nt, Human
gugacagaggcag

SEQ ID NO: 2116893 - RNA, 12 nt, Human
gugacagaggca

SEQ ID NO: 2116894 - RNA, 22 nt, Human
gugacacuucagagagcuggua

SEQ ID NO: 2116895 - RNA, 23 nt, Human
gugacaccagccuuucucccagg

SEQ ID NO: 2116896 - RNA, 18 nt, Human
gugacacuucagagagcu

SEQ ID NO: 2116897 - RNA, 20 nt, Human
gugacacuucagagagcugg

SEQ ID NO: 2116898 - RNA, 21 nt, Human
gugacacuucagagagcuggu

SEQ ID NO: 2116899 - RNA, 16 nt, Human
gugacaauuuuguaca

SEQ ID NO: 2116900 - RNA, 18 nt, Human
gugacaaggccccagaga

SEQ ID NO: 2116901 - RNA, 19 nt, Human
gugacaaggccccagagac

SEQ ID NO: 2116902 - RNA, 23 nt, Human
gugacaagcuccuggucuugaga

SEQ ID NO: 2116903 - RNA, 13 nt, Human
gugacaaggcccc

SEQ ID NO: 2116904 - RNA, 14 nt, Human
gugacaaggcccca

SEQ ID NO: 2116905 - RNA, 17 nt, Human
gugacaaggccccagag

SEQ ID NO: 2116906 - RNA, 22 nt, Human
gugauccacccaccucagccuc

SEQ ID NO: 2116907 - RNA, 16 nt, Human
gugaucaauaaaaugu

SEQ ID NO: 2116908 - RNA, 17 nt, Human
gugaucaauaaaaugug

SEQ ID NO: 2116909 - RNA, 19 nt, Human
gugaucaauaaaaugugau

SEQ ID NO: 2116910 - RNA, 18 nt, Human
gugaucaauaaaauguga

SEQ ID NO: 2116911 - RNA, 17 nt, Human
gugaucaauuaaaugua

SEQ ID NO: 2116912 - RNA, 20 nt, Human
gugauacccauagcuuccau

SEQ ID NO: 2116913 - RNA, 21 nt, Human
gugaggauaacacaaguaaaa

SEQ ID NO: 2116914 - RNA, 20 nt, Human
gugauacaacuucaagugca

SEQ ID NO: 2116915 - RNA, 20 nt, Human
gugaguguguguuugugcug

SEQ ID NO: 2116916 - RNA, 16 nt, Human
gugaguguggcucccc

SEQ ID NO: 2116917 - RNA, 22 nt, Human
gugaguguguccaagugugugu

SEQ ID NO: 2116918 - RNA, 23 nt, Human
gugaguguguccaagugugugug

SEQ ID NO: 2116919 - RNA, 13 nt, Human
gugagugugugca

SEQ ID NO: 2116920 - RNA, 15 nt, Human
gugagugugugcaag

SEQ ID NO: 2116921 - RNA, 21 nt, Human
gugacuagugcugaagcuuau

SEQ ID NO: 2116922 - RNA, 11 nt, Human
gugacuagugc

SEQ ID NO: 2116923 - RNA, 13 nt, Human
gugacuagugcug

SEQ ID NO: 2116924 - RNA, 14 nt, Human
gugacuagugcuga

SEQ ID NO: 2116925 - RNA, 15 nt, Human
gugacuagugcugaa

SEQ ID NO: 2116926 - RNA, 17 nt, Human
gugacuagugcugaagc

SEQ ID NO: 2116927 - RNA, 18 nt, Human
gugacuagugcugaagcu

SEQ ID NO: 2116928 - RNA, 22 nt, Human
gugacuagugcugaagcuuauu

SEQ ID NO: 2116929 - RNA, 20 nt, Human
gugagccacugcaccgggcc

SEQ ID NO: 2116930 - RNA, 15 nt, Human
gugagccacugcacc

SEQ ID NO: 2116931 - RNA, 15 nt, Human
gugacucacccaagc

SEQ ID NO: 2116932 - RNA, 18 nt, Human
gugacucauccucuugaa

SEQ ID NO: 2116933 - RNA, 19 nt, Human
gugagccgagaucacgcca

SEQ ID NO: 2116934 - RNA, 12 nt, Human
gugagccgcauc

SEQ ID NO: 2116935 - RNA, 18 nt, Human
gugagccgcaucuucucc

SEQ ID NO: 2116936 - RNA, 21 nt, Human
gugagccgcaucuucuccauc

SEQ ID NO: 2116937 - RNA, 18 nt, Human
gugaggagcugcuggcuu

SEQ ID NO: 2116938 - RNA, 17 nt, Human
gugaggagcugcuggcu

SEQ ID NO: 2116939 - RNA, 15 nt, Human
gugaggagcugcugg

SEQ ID NO: 2116940 - RNA, 15 nt, Human
gugaguguggcuccc

SEQ ID NO: 2116941 - RNA, 16 nt, Human
gugaguguaaguguga

SEQ ID NO: 2116942 - RNA, 18 nt, Human
gugaggaugucacucaga

SEQ ID NO: 2116943 - RNA, 22 nt, Human
gugaggaugucacucagaugga

SEQ ID NO: 2116944 - RNA, 21 nt, Human
gugaggauggccucugcuaag

SEQ ID NO: 2116945 - RNA, 17 nt, Human
gugaggaugggaaggag

SEQ ID NO: 2116946 - RNA, 19 nt, Human
gugaggaugggaaggaggg

SEQ ID NO: 2116947 - RNA, 20 nt, Human
gugccccugcugccucccca

SEQ ID NO: 2116948 - RNA, 15 nt, Human
gugccuucagcucua

SEQ ID NO: 2116949 - RNA, 20 nt, Human
gugcccuccacagccgcagc

SEQ ID NO: 2116950 - RNA, 14 nt, Human
gugcccuccacugc

SEQ ID NO: 2116951 - RNA, 15 nt, Human
gugcccuccacugcc

SEQ ID NO: 2116952 - RNA, 18 nt, Human
gugcccuccacugcccuc

SEQ ID NO: 2116953 - RNA, 20 nt, Human
gugcccuccacugcccucug

SEQ ID NO: 2116954 - RNA, 12 nt, Human
gugccuuccaua

SEQ ID NO: 2116955 - RNA, 15 nt, Human
gugccuuccauaauu

SEQ ID NO: 2116956 - RNA, 17 nt, Human
gugccuuccauaauuau

SEQ ID NO: 2116957 - RNA, 22 nt, Human
gugccuuccauaauuaugacag

SEQ ID NO: 2116958 - RNA, 21 nt, Human
gugcgaucuggguucacugca

SEQ ID NO: 2116959 - RNA, 19 nt, Human
gugccuucuuauucucacu

SEQ ID NO: 2116960 - RNA, 23 nt, Human
gugccuucuuauucucacuccac

SEQ ID NO: 2116961 - RNA, 16 nt, Human
gugccaugugccaggu

SEQ ID NO: 2116962 - RNA, 14 nt, Human
gugccaugugccag

SEQ ID NO: 2116963 - RNA, 19 nt, Human
gugccaggcccggggcugg

SEQ ID NO: 2116964 - RNA, 20 nt, Human
gugccaggcccggggcuggc

SEQ ID NO: 2116965 - RNA, 12 nt, Human
gugccaggcccg

SEQ ID NO: 2116966 - RNA, 13 nt, Human
gugccaggcccgg

SEQ ID NO: 2116967 - RNA, 17 nt, Human
gugccaggcccggggcu

SEQ ID NO: 2116968 - RNA, 20 nt, Human
gugcccaagaauagaugcug

SEQ ID NO: 2116969 - RNA, 13 nt, Human
gugccauugucuu

SEQ ID NO: 2116970 - RNA, 14 nt, Human
gugccauugucuuu

SEQ ID NO: 2116971 - RNA, 15 nt, Human
gugccauugucuuua

SEQ ID NO: 2116972 - RNA, 13 nt, Human
gugccccccuugc

SEQ ID NO: 2116973 - RNA, 20 nt, Human
gugccccccuugccagacau

SEQ ID NO: 2116974 - RNA, 13 nt, Human
gugccccugcugc

SEQ ID NO: 2116975 - RNA, 19 nt, Human
gugccccugcugccucccc

SEQ ID NO: 2116976 - RNA, 22 nt, Human
gugcuaaauggucgcccaggag

SEQ ID NO: 2116977 - RNA, 13 nt, Human
gugcuaaauuuuc

SEQ ID NO: 2116978 - RNA, 23 nt, Human
gugcuaaccacgucugucuucac

SEQ ID NO: 2116979 - RNA, 13 nt, Human
gugcgugugucca

SEQ ID NO: 2116980 - RNA, 13 nt, Human
gugcgugugugca

SEQ ID NO: 2116981 - RNA, 14 nt, Human
gugcgugggugaag

SEQ ID NO: 2116982 - RNA, 12 nt, Human
gugcguggguga

SEQ ID NO: 2116983 - RNA, 21 nt, Human
gugcgugaaacacaccaggcu

SEQ ID NO: 2116984 - RNA, 16 nt, Human
gugcuaaauuuucagu

SEQ ID NO: 2116985 - RNA, 14 nt, Human
gugcgccuacagga

SEQ ID NO: 2116986 - RNA, 14 nt, Human
gugcgagugugugc

SEQ ID NO: 2116987 - RNA, 23 nt, Human
gugcgagugugugcaugugugug

SEQ ID NO: 2116988 - RNA, 23 nt, Human
gugcgaucauggcucacugcagc

SEQ ID NO: 2116989 - RNA, 22 nt, Human
gugcgcugacaaccaccgcucc

SEQ ID NO: 2116990 - RNA, 17 nt, Human
gugcgggcacaauaaau

SEQ ID NO: 2116991 - RNA, 14 nt, Human
gugcgugaaacaca

SEQ ID NO: 2116992 - RNA, 15 nt, Human
gugcgugaaacacac

SEQ ID NO: 2116993 - RNA, 13 nt, Human
gugcguccugucg

SEQ ID NO: 2116994 - RNA, 14 nt, Human
gugcggccuuuggc

SEQ ID NO: 2116995 - RNA, 16 nt, Human
gugcagcaaccagagc

SEQ ID NO: 2116996 - RNA, 18 nt, Human
gugcagcaaccagagcac

SEQ ID NO: 2116997 - RNA, 16 nt, Human
gugcagagugcccaga

SEQ ID NO: 2116998 - RNA, 18 nt, Human
gugcagagugcccagaac

SEQ ID NO: 2116999 - RNA, 15 nt, Human
gugcagcauaugagg

SEQ ID NO: 2117000 - RNA, 17 nt, Human
gugcagcauaugaggau

SEQ ID NO: 2117001 - RNA, 20 nt, Human
gugcagcccguguggccccu

SEQ ID NO: 2117002 - RNA, 21 nt, Human
gugcagcccguguggccccuu

SEQ ID NO: 2117003 - RNA, 19 nt, Human
gugcagcccguguggcccc

SEQ ID NO: 2117004 - RNA, 12 nt, Human
gugcagcugauu

SEQ ID NO: 2117005 - RNA, 13 nt, Human
gugcagcugauuu

SEQ ID NO: 2117006 - RNA, 14 nt, Human
gugcagcugauuuu

SEQ ID NO: 2117007 - RNA, 16 nt, Human
gugcagcugauuuuaa

SEQ ID NO: 2117008 - RNA, 18 nt, Human
gugcagcugauuuuaaca

SEQ ID NO: 2117009 - RNA, 23 nt, Human
gugcagcugauuuuaacaauaac

SEQ ID NO: 2117010 - RNA, 23 nt, Human
gugcaguggugcgaucuggguuc

SEQ ID NO: 2117011 - RNA, 20 nt, Human
gugcaguggugcgaucuggg

SEQ ID NO: 2117012 - RNA, 13 nt, Human
gugcaucucagcc

SEQ ID NO: 2117013 - RNA, 15 nt, Human
gugcaggcuggcacc

SEQ ID NO: 2117014 - RNA, 14 nt, Human
gugcagacuggagg

SEQ ID NO: 2117015 - RNA, 23 nt, Human
gugcagacuggaggggacgcugg

SEQ ID NO: 2117016 - RNA, 15 nt, Human
gugcagacuggaggg

SEQ ID NO: 2117017 - RNA, 15 nt, Human
gugauuuuuuuuuag

SEQ ID NO: 2117018 - RNA, 19 nt, Human
gugcaaaacaugcuaccug

SEQ ID NO: 2117019 - RNA, 14 nt, Human
gugcaaaaauuuuu

SEQ ID NO: 2117020 - RNA, 18 nt, Human
gugcaaaaauuuuuggau

SEQ ID NO: 2117021 - RNA, 19 nt, Human
gugcaaaaauuuuuggauu

SEQ ID NO: 2117022 - RNA, 15 nt, Human
gugauuugaaggucu

SEQ ID NO: 2117023 - RNA, 12 nt, Human
gugauuuucauu

SEQ ID NO: 2117024 - RNA, 24 nt, Human
gugauccacccaccucagccuccc

SEQ ID NO: 2117025 - RNA, 23 nt, Human
gugauccacccaccucagccucc

SEQ ID NO: 2117026 - RNA, 19 nt, Human
gugucuaggcaggaccugu

SEQ ID NO: 2117027 - RNA, 15 nt, Human
gugucguagccaagg

SEQ ID NO: 2117028 - RNA, 19 nt, Human
guguccuugcaccugcauc

SEQ ID NO: 2117029 - RNA, 16 nt, Human
guguccuuucccucca

SEQ ID NO: 2117030 - RNA, 17 nt, Human
guguccuuucccuccac

SEQ ID NO: 2117031 - RNA, 14 nt, Human
gugucuaaaaacac

SEQ ID NO: 2117032 - RNA, 17 nt, Human
gugucuaaaaacaccaa

SEQ ID NO: 2117033 - RNA, 22 nt, Human
gugucucaguccaccugagcug

SEQ ID NO: 2117034 - RNA, 14 nt, Human
gugucuccugcaug

SEQ ID NO: 2117035 - RNA, 15 nt, Human
gugucuccugcaugc

SEQ ID NO: 2117036 - RNA, 16 nt, Human
gugucuccugcaugca

SEQ ID NO: 2117037 - RNA, 23 nt, Human
gugucuccugcaugcagaaaggg

SEQ ID NO: 2117038 - RNA, 17 nt, Human
guguccuugcaccugca

SEQ ID NO: 2117039 - RNA, 18 nt, Human
guguccuugcaccugcau

SEQ ID NO: 2117040 - RNA, 18 nt, Human
guguccuccccucaagga

SEQ ID NO: 2117041 - RNA, 16 nt, Human
gugucccucucucugg

SEQ ID NO: 2117042 - RNA, 18 nt, Human
gugucccucucucuggaa

SEQ ID NO: 2117043 - RNA, 14 nt, Human
guguccuaggagua

SEQ ID NO: 2117044 - RNA, 23 nt, Human
gugucccugcacuugcagacucu

SEQ ID NO: 2117045 - RNA, 14 nt, Human
guguccggucccug

SEQ ID NO: 2117046 - RNA, 22 nt, Human
gugucucuuuucucuuucuccu

SEQ ID NO: 2117047 - RNA, 22 nt, Human
gugucuggacauucagaacacc

SEQ ID NO: 2117048 - RNA, 21 nt, Human
gugucucggagggauuccccu

SEQ ID NO: 2117049 - RNA, 18 nt, Human
gugucucuuuucucuuuc

SEQ ID NO: 2117050 - RNA, 19 nt, Human
gugucucuuuucucuuucu

SEQ ID NO: 2117051 - RNA, 16 nt, Human
gugucugagagauuca

SEQ ID NO: 2117052 - RNA, 14 nt, Human
gugugagugugugc

SEQ ID NO: 2117053 - RNA, 11 nt, Human
gugugagugug

SEQ ID NO: 2117054 - RNA, 20 nt, Human
gugugagucaccaagcccag

SEQ ID NO: 2117055 - RNA, 17 nt, Human
gugugaucccaagugcc

SEQ ID NO: 2117056 - RNA, 19 nt, Human
gugugaucccaagugccag

SEQ ID NO: 2117057 - RNA, 12 nt, Human
gugugcaugugu

SEQ ID NO: 2117058 - RNA, 18 nt, Human
gugugcaugugugugcuc

SEQ ID NO: 2117059 - RNA, 20 nt, Human
gugugcaugugugugcucag

SEQ ID NO: 2117060 - RNA, 16 nt, Human
gugugcaagugugugc

SEQ ID NO: 2117061 - RNA, 16 nt, Human
gugugcaaguauguga

SEQ ID NO: 2117062 - RNA, 16 nt, Human
gugugcaacagacaag

SEQ ID NO: 2117063 - RNA, 15 nt, Human
gugugcaacagacaa

SEQ ID NO: 2117064 - RNA, 22 nt, Human
gugugcacacacaccacacaua

SEQ ID NO: 2117065 - RNA, 22 nt, Human
gugugcucugaucauccacugu

SEQ ID NO: 2117066 - RNA, 15 nt, Human
gugugcucugaucau

SEQ ID NO: 2117067 - RNA, 12 nt, Human
gugugcucugau

SEQ ID NO: 2117068 - RNA, 13 nt, Human
gugugccugcagc

SEQ ID NO: 2117069 - RNA, 14 nt, Human
gugugccugcagcc

SEQ ID NO: 2117070 - RNA, 15 nt, Human
gugugccugcagccc

SEQ ID NO: 2117071 - RNA, 16 nt, Human
gugugccugcagcccc

SEQ ID NO: 2117072 - RNA, 16 nt, Human
gugugcguccugucgg

SEQ ID NO: 2117073 - RNA, 18 nt, Human
gugugccugcagccccgc

SEQ ID NO: 2117074 - RNA, 14 nt, Human
gugugcguccuguc

SEQ ID NO: 2117075 - RNA, 15 nt, Human
guguguuucugaucu

SEQ ID NO: 2117076 - RNA, 14 nt, Human
guguguuugugauu

SEQ ID NO: 2117077 - RNA, 21 nt, Human
guguggagaagcggcuggcag

SEQ ID NO: 2117078 - RNA, 16 nt, Human
guguggacugugaugc

SEQ ID NO: 2117079 - RNA, 18 nt, Human
guguggacucaaguccuu

SEQ ID NO: 2117080 - RNA, 15 nt, Human
guguggacugugaug

SEQ ID NO: 2117081 - RNA, 13 nt, Human
guguggagaagcg

SEQ ID NO: 2117082 - RNA, 15 nt, Human
gugugcacgaguggg

SEQ ID NO: 2117083 - RNA, 15 nt, Human
guguggcuccccucu

SEQ ID NO: 2117084 - RNA, 15 nt, Human
guguggccccuucac

SEQ ID NO: 2117085 - RNA, 19 nt, Human
guguggcucacguguguga

SEQ ID NO: 2117086 - RNA, 14 nt, Human
gugugggcuguguc

SEQ ID NO: 2117087 - RNA, 15 nt, Human
gugugggacuguaca

SEQ ID NO: 2117088 - RNA, 17 nt, Human
gugugggacuguacaca

SEQ ID NO: 2117089 - RNA, 13 nt, Human
gugugggaaggga

SEQ ID NO: 2117090 - RNA, 16 nt, Human
gugugggaagggagag

SEQ ID NO: 2117091 - RNA, 19 nt, Human
guguggcuuucagagccuc

SEQ ID NO: 2117092 - RNA, 19 nt, Human
guuaaacuuacuuaguguu

SEQ ID NO: 2117093 - RNA, 15 nt, Human
guuaaaauuccaucc

SEQ ID NO: 2117094 - RNA, 20 nt, Human
guuaaagucagugggaacgu

SEQ ID NO: 2117095 - RNA, 20 nt, Human
guuaaauagaguauaugcac

SEQ ID NO: 2117096 - RNA, 19 nt, Human
guuaaauagaguauaugca

SEQ ID NO: 2117097 - RNA, 21 nt, Human
guuaaauagaguauaugcacu

SEQ ID NO: 2117098 - RNA, 12 nt, Human
guuaaauauuua

SEQ ID NO: 2117099 - RNA, 22 nt, Human
guguuuuuuuuucguuuguuug

SEQ ID NO: 2117100 - RNA, 14 nt, Human
guuaaaaaaaauaa

SEQ ID NO: 2117101 - RNA, 16 nt, Human
guuaaaaaaaauaaua

SEQ ID NO: 2117102 - RNA, 18 nt, Human
guuaaaaaaaauaauaaa

SEQ ID NO: 2117103 - RNA, 19 nt, Human
guuaaaaaaaauaauaaau

SEQ ID NO: 2117104 - RNA, 12 nt, Human
guuaaaacuguc

SEQ ID NO: 2117105 - RNA, 14 nt, Human
guuaaacauugaag

SEQ ID NO: 2117106 - RNA, 21 nt, Human
guuaaaauaacuaguguugcu

SEQ ID NO: 2117107 - RNA, 16 nt, Human
guuacacauuuuucag

SEQ ID NO: 2117108 - RNA, 13 nt, Human
guuaacuuugggu

SEQ ID NO: 2117109 - RNA, 12 nt, Human
guuaagaaaaaa

SEQ ID NO: 2117110 - RNA, 16 nt, Human
guuaagaaaaaaauaa

SEQ ID NO: 2117111 - RNA, 18 nt, Human
guuaagaaaaaaauaauu

SEQ ID NO: 2117112 - RNA, 15 nt, Human
guuacacuaaaaggu

SEQ ID NO: 2117113 - RNA, 16 nt, Human
guuacacuaaaaggug

SEQ ID NO: 2117114 - RNA, 17 nt, Human
guuacacauuuuucaga

SEQ ID NO: 2117115 - RNA, 14 nt, Human
guuacacuguuaga

SEQ ID NO: 2117116 - RNA, 19 nt, Human
guuacacuguuagaacacu

SEQ ID NO: 2117117 - RNA, 20 nt, Human
guuacacuguuagaacacua

SEQ ID NO: 2117118 - RNA, 22 nt, Human
guuacacuguuagaacacuauu

SEQ ID NO: 2117119 - RNA, 13 nt, Human
guuaaauauuuac

SEQ ID NO: 2117120 - RNA, 15 nt, Human
guuaaauauuuacau

SEQ ID NO: 2117121 - RNA, 16 nt, Human
guuaaauauuuacaua

SEQ ID NO: 2117122 - RNA, 22 nt, Human
guuaaauauuuacauaugaaau

SEQ ID NO: 2117123 - RNA, 23 nt, Human
guuaacagagacagauaacucuc

SEQ ID NO: 2117124 - RNA, 15 nt, Human
guuaacauugaccaa

SEQ ID NO: 2117125 - RNA, 18 nt, Human
guuaacauugaccaagaa

SEQ ID NO: 2117126 - RNA, 21 nt, Human
guuaacauugaccaagaacug

SEQ ID NO: 2117127 - RNA, 23 nt, Human
guuaacauugaccaagaacugca

SEQ ID NO: 2117128 - RNA, 21 nt, Human
guuaacuauuuuauuuucuaa

SEQ ID NO: 2117129 - RNA, 12 nt, Human
guuaaccuaccu

SEQ ID NO: 2117130 - RNA, 17 nt, Human
guuaaccucagugucau

SEQ ID NO: 2117131 - RNA, 20 nt, Human
guuaaccagaauaaaguucu

SEQ ID NO: 2117132 - RNA, 16 nt, Human
guuaacuauguacaau

SEQ ID NO: 2117133 - RNA, 18 nt, Human
guuaacuauguacaauau

SEQ ID NO: 2117134 - RNA, 19 nt, Human
guuaacuauguacaauauu

SEQ ID NO: 2117135 - RNA, 20 nt, Human
guuaacuauguacaauauuu

SEQ ID NO: 2117136 - RNA, 23 nt, Human
guuaacuauguacaauauuuuaa

SEQ ID NO: 2117137 - RNA, 19 nt, Human
guguguuuuugggaugucu

SEQ ID NO: 2117138 - RNA, 21 nt, Human
guguguuuuugggaugucuua

SEQ ID NO: 2117139 - RNA, 14 nt, Human
guguguuuguguga

SEQ ID NO: 2117140 - RNA, 17 nt, Human
guguguuuucauaauaa

SEQ ID NO: 2117141 - RNA, 18 nt, Human
guguguuuucauaauaaa

SEQ ID NO: 2117142 - RNA, 21 nt, Human
guguuauuuauugcuacuucc

SEQ ID NO: 2117143 - RNA, 15 nt, Human
guguuuucauaauaa

SEQ ID NO: 2117144 - RNA, 16 nt, Human
guguuuucauaauaaa

SEQ ID NO: 2117145 - RNA, 16 nt, Human
guguucugauuagaaa

SEQ ID NO: 2117146 - RNA, 12 nt, Human
guguuuucagag

SEQ ID NO: 2117147 - RNA, 13 nt, Human
guguuuucauaau

SEQ ID NO: 2117148 - RNA, 14 nt, Human
guguuuucauaaua

SEQ ID NO: 2117149 - RNA, 15 nt, Human
guguuuuuaacucaa

SEQ ID NO: 2117150 - RNA, 13 nt, Human
guguuuuguuuug

SEQ ID NO: 2117151 - RNA, 22 nt, Human
guguuuuguuuugauuuaauaa

SEQ ID NO: 2117152 - RNA, 15 nt, Human
guguuuuugaaauau

SEQ ID NO: 2117153 - RNA, 15 nt, Human
guguuuuugggaugu

SEQ ID NO: 2117154 - RNA, 18 nt, Human
guguuuuugggaugucuu

SEQ ID NO: 2117155 - RNA, 19 nt, Human
guguuuuugggaugucuua

SEQ ID NO: 2117156 - RNA, 11 nt, Human
guguucguucu

SEQ ID NO: 2117157 - RNA, 15 nt, Human
guguucguucuuguu

SEQ ID NO: 2117158 - RNA, 21 nt, Human
guguucguucuuguucuguuu

SEQ ID NO: 2117159 - RNA, 10 nt, Human
guguuccugg

SEQ ID NO: 2117160 - RNA, 15 nt, Human
guguuccuggcaaua

SEQ ID NO: 2117161 - RNA, 18 nt, Human
guguuccuggcaauagug

SEQ ID NO: 2117162 - RNA, 15 nt, Human
guguuccaacaacca

SEQ ID NO: 2117163 - RNA, 17 nt, Human
guguuauuuaaaugagu

SEQ ID NO: 2117164 - RNA, 13 nt, Human
guguacagucuug

SEQ ID NO: 2117165 - RNA, 16 nt, Human
guguacagucuuguau

SEQ ID NO: 2117166 - RNA, 22 nt, Human
guguacagucuuguauuaaguu

SEQ ID NO: 2117167 - RNA, 12 nt, Human
guguaagagaau

SEQ ID NO: 2117168 - RNA, 12 nt, Human
guguacagugug

SEQ ID NO: 2117169 - RNA, 17 nt, Human
guguacauggaauaaca

SEQ ID NO: 2117170 - RNA, 18 nt, Human
guguacagaauucugcua

SEQ ID NO: 2117171 - RNA, 23 nt, Human
guguaaucauuucuugggcccuc

SEQ ID NO: 2117172 - RNA, 22 nt, Human
guguacauggaauaacauguaa

SEQ ID NO: 2117173 - RNA, 16 nt, Human
guguacguggagaggg

SEQ ID NO: 2117174 - RNA, 20 nt, Human
guguacguggagagggauga

SEQ ID NO: 2117175 - RNA, 13 nt, Human
guguacucuggcc

SEQ ID NO: 2117176 - RNA, 15 nt, Human
guguacucuggccuc

SEQ ID NO: 2117177 - RNA, 16 nt, Human
guguacucuggccucu

SEQ ID NO: 2117178 - RNA, 17 nt, Human
guguacucuggccucug

SEQ ID NO: 2117179 - RNA, 18 nt, Human
guguacucuggccucugu

SEQ ID NO: 2117180 - RNA, 19 nt, Human
guguacucuggccucuguc

SEQ ID NO: 2117181 - RNA, 14 nt, Human
guguacuguaaaga

SEQ ID NO: 2117182 - RNA, 16 nt, Human
guguagccuugcccgg

SEQ ID NO: 2117183 - RNA, 15 nt, Human
guguagccccaagaa

SEQ ID NO: 2117184 - RNA, 20 nt, Human
guguagccccaagaaggcug

SEQ ID NO: 2117185 - RNA, 17 nt, Human
guguagccuugcccgga

SEQ ID NO: 2117186 - RNA, 14 nt, Human
guguagccaagguc

SEQ ID NO: 2117187 - RNA, 17 nt, Human
guguagauuuguuuugu

SEQ ID NO: 2117188 - RNA, 22 nt, Human
guguagacgaagggggcaucug

SEQ ID NO: 2117189 - RNA, 17 nt, Human
guguauauguaugugug

SEQ ID NO: 2117190 - RNA, 14 nt, Human
guguauauguaugu

SEQ ID NO: 2117191 - RNA, 15 nt, Human
guguaugacuaaaga

SEQ ID NO: 2117192 - RNA, 16 nt, Human
guguaugacuaaagag

SEQ ID NO: 2117193 - RNA, 15 nt, Human
guguaggcuuuacuu

SEQ ID NO: 2117194 - RNA, 16 nt, Human
guguaggcuuuacuua

SEQ ID NO: 2117195 - RNA, 20 nt, Human
guguaggcuuuacuuagcuu

SEQ ID NO: 2117196 - RNA, 18 nt, Human
gugucccugcacuugcag

SEQ ID NO: 2117197 - RNA, 16 nt, Human
gugucccugcacuugc

SEQ ID NO: 2117198 - RNA, 13 nt, Human
gugucccugcacu

SEQ ID NO: 2117199 - RNA, 12 nt, Human
guguccccagcc

SEQ ID NO: 2117200 - RNA, 15 nt, Human
guguccccagcccac

SEQ ID NO: 2117201 - RNA, 22 nt, Human
guguccccagcccacuggauca

SEQ ID NO: 2117202 - RNA, 17 nt, Human
guguauguacauauaua

SEQ ID NO: 2117203 - RNA, 16 nt, Human
guguaugggugugugu

SEQ ID NO: 2117204 - RNA, 22 nt, Human
guguauggguguguguuugugu

SEQ ID NO: 2117205 - RNA, 16 nt, Human
guguaugugcgugugu

SEQ ID NO: 2117206 - RNA, 19 nt, Human
guguaugcuacuacaaaaa

SEQ ID NO: 2117207 - RNA, 14 nt, Human
gugguauagaaaug

SEQ ID NO: 2117208 - RNA, 19 nt, Human
gugguaugaucacggcuca

SEQ ID NO: 2117209 - RNA, 12 nt, Human
gugguaugugug

SEQ ID NO: 2117210 - RNA, 15 nt, Human
gugguaugugugugu

SEQ ID NO: 2117211 - RNA, 17 nt, Human
gugguagagugugccug

SEQ ID NO: 2117212 - RNA, 17 nt, Human
gugguaagagaauguua

SEQ ID NO: 2117213 - RNA, 18 nt, Human
gugguaagagaauguuau

SEQ ID NO: 2117214 - RNA, 19 nt, Human
gugguaagagaauguuaua

SEQ ID NO: 2117215 - RNA, 16 nt, Human
guggucauuaagcauu

SEQ ID NO: 2117216 - RNA, 12 nt, Human
gugguccugacu

SEQ ID NO: 2117217 - RNA, 13 nt, Human
guggucugaaugu

SEQ ID NO: 2117218 - RNA, 14 nt, Human
guggucugaauguu

SEQ ID NO: 2117219 - RNA, 17 nt, Human
guggucugaauguucug

SEQ ID NO: 2117220 - RNA, 18 nt, Human
guggucugaauguucuga

SEQ ID NO: 2117221 - RNA, 17 nt, Human
guggugaccucugccug

SEQ ID NO: 2117222 - RNA, 14 nt, Human
guggugaccucugc

SEQ ID NO: 2117223 - RNA, 16 nt, Human
guggucuuucuggaga

SEQ ID NO: 2117224 - RNA, 17 nt, Human
guggucuuucuggagag

SEQ ID NO: 2117225 - RNA, 20 nt, Human
guggucugaauguucugaca

SEQ ID NO: 2117226 - RNA, 23 nt, Human
guggucugaauguucugacauua

SEQ ID NO: 2117227 - RNA, 21 nt, Human
guggucugagccaaagagaau

SEQ ID NO: 2117228 - RNA, 14 nt, Human
guggucugcaggca

SEQ ID NO: 2117229 - RNA, 24 nt, Human
guggucugaauguucugacauuaa

SEQ ID NO: 2117230 - RNA, 15 nt, Human
guggucugcaggcag

SEQ ID NO: 2117231 - RNA, 16 nt, Human
guggucugcaggcagg

SEQ ID NO: 2117232 - RNA, 19 nt, Human
guggugaucaauuaaaugu

SEQ ID NO: 2117233 - RNA, 13 nt, Human
guggugagaucau

SEQ ID NO: 2117234 - RNA, 19 nt, Human
guggugcgaucuggguuca

SEQ ID NO: 2117235 - RNA, 21 nt, Human
guguaaguauucuuauuuaau

SEQ ID NO: 2117236 - RNA, 13 nt, Human
guguaauaaagug

SEQ ID NO: 2117237 - RNA, 14 nt, Human
guguaauaaagugu

SEQ ID NO: 2117238 - RNA, 15 nt, Human
guguaauaaaguguu

SEQ ID NO: 2117239 - RNA, 18 nt, Human
guguaauaaaguguuuuc

SEQ ID NO: 2117240 - RNA, 20 nt, Human
guguaauaaaguguuuucag

SEQ ID NO: 2117241 - RNA, 21 nt, Human
guguaauaaaguguuuucaga

SEQ ID NO: 2117242 - RNA, 22 nt, Human
guguaauaaaguguuuucagag

SEQ ID NO: 2117243 - RNA, 22 nt, Human
guguaagugugaguaagagcug

SEQ ID NO: 2117244 - RNA, 19 nt, Human
guguaaucauuucuugggc

SEQ ID NO: 2117245 - RNA, 21 nt, Human
guguaaucauuucuugggccc

SEQ ID NO: 2117246 - RNA, 12 nt, Human
gugggcuaagca

SEQ ID NO: 2117247 - RNA, 15 nt, Human
gugggcuaguugggc

SEQ ID NO: 2117248 - RNA, 13 nt, Human
gugggcucccuuc

SEQ ID NO: 2117249 - RNA, 13 nt, Human
gugggcugagccc

SEQ ID NO: 2117250 - RNA, 14 nt, Human
gugggcugagcccu

SEQ ID NO: 2117251 - RNA, 15 nt, Human
gugggcugagcccug

SEQ ID NO: 2117252 - RNA, 16 nt, Human
gugggcugagcccugg

SEQ ID NO: 2117253 - RNA, 13 nt, Human
gugggcggcagag

SEQ ID NO: 2117254 - RNA, 16 nt, Human
gugggcggcagagagg

SEQ ID NO: 2117255 - RNA, 19 nt, Human
gugggccagccccucccac

SEQ ID NO: 2117256 - RNA, 14 nt, Human
gugggccaggacag

SEQ ID NO: 2117257 - RNA, 18 nt, Human
gugggccaggacaggccc

SEQ ID NO: 2117258 - RNA, 20 nt, Human
gugggcaggugggagcuuga

SEQ ID NO: 2117259 - RNA, 20 nt, Human
gugggcauugauggggaagg

SEQ ID NO: 2117260 - RNA, 12 nt, Human
gugggccagccc

SEQ ID NO: 2117261 - RNA, 13 nt, Human
gugggccagcccc

SEQ ID NO: 2117262 - RNA, 15 nt, Human
gugggccagccccuc

SEQ ID NO: 2117263 - RNA, 17 nt, Human
gugggccagccccuccc

SEQ ID NO: 2117264 - RNA, 15 nt, Human
gugggccuccucugu

SEQ ID NO: 2117265 - RNA, 20 nt, Human
gugggccuccucuguccagg

SEQ ID NO: 2117266 - RNA, 23 nt, Human
gugggccuccucuguccagggcc

SEQ ID NO: 2117267 - RNA, 19 nt, Human
gugggccucaaggacuuga

SEQ ID NO: 2117268 - RNA, 17 nt, Human
gugggccagugugggaa

SEQ ID NO: 2117269 - RNA, 15 nt, Human
gugggccauggcaau

SEQ ID NO: 2117270 - RNA, 16 nt, Human
guggguuuucuuccca

SEQ ID NO: 2117271 - RNA, 17 nt, Human
guggggcagcuugaggg

SEQ ID NO: 2117272 - RNA, 13 nt, Human
guggggcagcuug

SEQ ID NO: 2117273 - RNA, 12 nt, Human
guggggcagcac

SEQ ID NO: 2117274 - RNA, 14 nt, Human
guggggcagcacag

SEQ ID NO: 2117275 - RNA, 19 nt, Human
guggggcagcacagagagg

SEQ ID NO: 2117276 - RNA, 23 nt, Human
guggggcagcacagagagggggc

SEQ ID NO: 2117277 - RNA, 22 nt, Human
gugggcuggugacccagucaga

SEQ ID NO: 2117278 - RNA, 14 nt, Human
gugggcugugagug

SEQ ID NO: 2117279 - RNA, 13 nt, Human
gugggcugugagu

SEQ ID NO: 2117280 - RNA, 18 nt, Human
gugggcugagcccuggca

SEQ ID NO: 2117281 - RNA, 22 nt, Human
guggggacguccugccaccugg

SEQ ID NO: 2117282 - RNA, 16 nt, Human
guggggauuucuccca

SEQ ID NO: 2117283 - RNA, 17 nt, Human
guggggauuucucccag

SEQ ID NO: 2117284 - RNA, 18 nt, Human
guggggagacaccucaga

SEQ ID NO: 2117285 - RNA, 19 nt, Human
guggggagacaccucagag

SEQ ID NO: 2117286 - RNA, 20 nt, Human
guggggagacaccucagagc

SEQ ID NO: 2117287 - RNA, 22 nt, Human
guggggagacaccucagagccc

SEQ ID NO: 2117288 - RNA, 22 nt, Human
guggcuuaaaacaacacucaca

SEQ ID NO: 2117289 - RNA, 20 nt, Human
guggcuuacuacauguggga

SEQ ID NO: 2117290 - RNA, 21 nt, Human
guggcuggguccaggggaugg

SEQ ID NO: 2117291 - RNA, 14 nt, Human
guggcugucagcag

SEQ ID NO: 2117292 - RNA, 15 nt, Human
guggcugucagcagg

SEQ ID NO: 2117293 - RNA, 19 nt, Human
guggcugucagcaggaagc

SEQ ID NO: 2117294 - RNA, 18 nt, Human
guggcuggguuuacacgc

SEQ ID NO: 2117295 - RNA, 17 nt, Human
guggcugggggcaggag

SEQ ID NO: 2117296 - RNA, 22 nt, Human
guggcugggggcaggagggccc

SEQ ID NO: 2117297 - RNA, 20 nt, Human
guggcuucccgcucagcccu

SEQ ID NO: 2117298 - RNA, 19 nt, Human
guggcuucccgcucagccc

SEQ ID NO: 2117299 - RNA, 18 nt, Human
guggcuucccgcucagcc

SEQ ID NO: 2117300 - RNA, 17 nt, Human
gugggcaaacaggcagu

SEQ ID NO: 2117301 - RNA, 21 nt, Human
gugggcacgcugugggcaggu

SEQ ID NO: 2117302 - RNA, 17 nt, Human
gugggcaccaagagcca

SEQ ID NO: 2117303 - RNA, 20 nt, Human
gugggcacgcugugggcagg

SEQ ID NO: 2117304 - RNA, 23 nt, Human
gugggcacgcugugggcaggugg

SEQ ID NO: 2117305 - RNA, 19 nt, Human
guggcuggguuggagggug

SEQ ID NO: 2117306 - RNA, 11 nt, Human
guggcuggggg

SEQ ID NO: 2117307 - RNA, 16 nt, Human
guggcugggggcagga

SEQ ID NO: 2117308 - RNA, 20 nt, Human
guggcuccucccggugccca

SEQ ID NO: 2117309 - RNA, 13 nt, Human
guggcuccucccg

SEQ ID NO: 2117310 - RNA, 22 nt, Human
guggcuccccucuauuuagcau

SEQ ID NO: 2117311 - RNA, 23 nt, Human
guggcuccccucuauuuagcaug

SEQ ID NO: 2117312 - RNA, 20 nt, Human
guggcucacgugugugacuc

SEQ ID NO: 2117313 - RNA, 12 nt, Human
guggcuccccuc

SEQ ID NO: 2117314 - RNA, 14 nt, Human
guggcuccccucua

SEQ ID NO: 2117315 - RNA, 15 nt, Human
guggcugccuggagc

SEQ ID NO: 2117316 - RNA, 16 nt, Human
guggcugccuggagcc

SEQ ID NO: 2117317 - RNA, 18 nt, Human
guggcugcggcacccuug

SEQ ID NO: 2117318 - RNA, 17 nt, Human
guggcugcuagcacuug

SEQ ID NO: 2117319 - RNA, 19 nt, Human
guggcugcuagcacuugga

SEQ ID NO: 2117320 - RNA, 14 nt, Human
guggcucacgccug

SEQ ID NO: 2117321 - RNA, 17 nt, Human
guggcuagucagagaga

SEQ ID NO: 2117322 - RNA, 19 nt, Human
guggcuagucagagagagu

SEQ ID NO: 2117323 - RNA, 16 nt, Human
gugcuaauuaauaaag

SEQ ID NO: 2117324 - RNA, 16 nt, Human
guggcuaaugguguaa

SEQ ID NO: 2117325 - RNA, 23 nt, Human
guucuaaagauggaaaaaccacc

SEQ ID NO: 2117326 - RNA, 17 nt, Human
guucuaaagauggaaaa

SEQ ID NO: 2117327 - RNA, 20 nt, Human
guucuaaagauggaaaaacc

SEQ ID NO: 2117328 - RNA, 14 nt, Human
guucuaaagaugga

SEQ ID NO: 2117329 - RNA, 23 nt, Human
guucguucuuguucuguuuuguu

SEQ ID NO: 2117330 - RNA, 23 nt, Human
guuccuugaucuguauauacaau

SEQ ID NO: 2117331 - RNA, 19 nt, Human
guucgagaccaaccugacc

SEQ ID NO: 2117332 - RNA, 17 nt, Human
guucguggaaagggugc

SEQ ID NO: 2117333 - RNA, 16 nt, Human
guucgagaccagccug

SEQ ID NO: 2117334 - RNA, 17 nt, Human
guucgagaccagccugg

SEQ ID NO: 2117335 - RNA, 18 nt, Human
guucgagaccagccuggc

SEQ ID NO: 2117336 - RNA, 19 nt, Human
guucgagaccagccuggcc

SEQ ID NO: 2117337 - RNA, 20 nt, Human
guucgagaccagccuggcca

SEQ ID NO: 2117338 - RNA, 19 nt, Human
guuccuggggugcccucca

SEQ ID NO: 2117339 - RNA, 20 nt, Human
guucugauuagaaaugacca

SEQ ID NO: 2117340 - RNA, 14 nt, Human
guucugcaaauaga

SEQ ID NO: 2117341 - RNA, 15 nt, Human
guucugcaaauagaa

SEQ ID NO: 2117342 - RNA, 18 nt, Human
guucugcaaauagaaaac

SEQ ID NO: 2117343 - RNA, 19 nt, Human
guucugcaaauagaaaaca

SEQ ID NO: 2117344 - RNA, 21 nt, Human
guucugcaaauagaaaacagg

SEQ ID NO: 2117345 - RNA, 13 nt, Human
guucugauuagaa

SEQ ID NO: 2117346 - RNA, 14 nt, Human
guucugauuagaaa

SEQ ID NO: 2117347 - RNA, 16 nt, Human
guucugauuagaaaug

SEQ ID NO: 2117348 - RNA, 18 nt, Human
guucugauuagaaaugac

SEQ ID NO: 2117349 - RNA, 22 nt, Human
guucugagauuauuuuaaucua

SEQ ID NO: 2117350 - RNA, 14 nt, Human
guucugaguguuuu

SEQ ID NO: 2117351 - RNA, 21 nt, Human
guucugacauuaacaguuuuc

SEQ ID NO: 2117352 - RNA, 23 nt, Human
guucugacauuaacaguuuucca

SEQ ID NO: 2117353 - RNA, 15 nt, Human
guucugacauuaaca

SEQ ID NO: 2117354 - RNA, 16 nt, Human
guucugacauuaacag

SEQ ID NO: 2117355 - RNA, 17 nt, Human
guucugacauuaacagu

SEQ ID NO: 2117356 - RNA, 13 nt, Human
guucugaaauauu

SEQ ID NO: 2117357 - RNA, 21 nt, Human
guucugaaauauuuuaccacu

SEQ ID NO: 2117358 - RNA, 15 nt, Human
guucuacaaucuauu

SEQ ID NO: 2117359 - RNA, 23 nt, Human
guucugggacacaguucaauucu

SEQ ID NO: 2117360 - RNA, 16 nt, Human
guucugggacacaguu

SEQ ID NO: 2117361 - RNA, 15 nt, Human
guucugggacacagu

SEQ ID NO: 2117362 - RNA, 14 nt, Human
guucugggacacag

SEQ ID NO: 2117363 - RNA, 12 nt, Human
guucugggacac

SEQ ID NO: 2117364 - RNA, 11 nt, Human
guucugggaca

SEQ ID NO: 2117365 - RNA, 15 nt, Human
guucuggcccucacc

SEQ ID NO: 2117366 - RNA, 21 nt, Human
guucuggcccucaccccugcc

SEQ ID NO: 2117367 - RNA, 23 nt, Human
guucuggcccucaccccugcccu

SEQ ID NO: 2117368 - RNA, 15 nt, Human
guucuuucuuccucu

SEQ ID NO: 2117369 - RNA, 14 nt, Human
guucuuucuuccuc

SEQ ID NO: 2117370 - RNA, 19 nt, Human
guucuuucuuccucugcug

SEQ ID NO: 2117371 - RNA, 18 nt, Human
guucuuucuuccucugcu

SEQ ID NO: 2117372 - RNA, 17 nt, Human
guucuuucuuccucugc

SEQ ID NO: 2117373 - RNA, 16 nt, Human
guucuuucuuccucug

SEQ ID NO: 2117374 - RNA, 13 nt, Human
guucuuuuaaagg

SEQ ID NO: 2117375 - RNA, 17 nt, Human
guugaaaaacagcugag

SEQ ID NO: 2117376 - RNA, 16 nt, Human
guucuuuuguuguaaa

SEQ ID NO: 2117377 - RNA, 14 nt, Human
guugaaaagccaug

SEQ ID NO: 2117378 - RNA, 15 nt, Human
guugaaaagccaugu

SEQ ID NO: 2117379 - RNA, 22 nt, Human
guugaaaagccauguuuaagau

SEQ ID NO: 2117380 - RNA, 23 nt, Human
guugaaaagccauguuuaagauu

SEQ ID NO: 2117381 - RNA, 23 nt, Human
guugauuucagcaccuacagugu

SEQ ID NO: 2117382 - RNA, 15 nt, Human
guugcaaggccgcug

SEQ ID NO: 2117383 - RNA, 16 nt, Human
guugcaaggccgcugu

SEQ ID NO: 2117384 - RNA, 17 nt, Human
guugcaaggccgcuguu

SEQ ID NO: 2117385 - RNA, 23 nt, Human
guugcaaggccgcuguucaccca

SEQ ID NO: 2117386 - RNA, 17 nt, Human
guugcaaguacugcugu

SEQ ID NO: 2117387 - RNA, 15 nt, Human
guugcaggaccucag

SEQ ID NO: 2117388 - RNA, 19 nt, Human
guugcacuuggccucugga

SEQ ID NO: 2117389 - RNA, 15 nt, Human
guugcagugagcuga

SEQ ID NO: 2117390 - RNA, 16 nt, Human
guugcagugagcugag

SEQ ID NO: 2117391 - RNA, 15 nt, Human
guugcaguggagagg

SEQ ID NO: 2117392 - RNA, 14 nt, Human
guugcaucagaaau

SEQ ID NO: 2117393 - RNA, 16 nt, Human
guugcaucagaaaugu

SEQ ID NO: 2117394 - RNA, 13 nt, Human
guugcagugagcu

SEQ ID NO: 2117395 - RNA, 17 nt, Human
guugccaaacagccaca

SEQ ID NO: 2117396 - RNA, 18 nt, Human
guugccaaacagccacac

SEQ ID NO: 2117397 - RNA, 17 nt, Human
guugccaagaacugaaa

SEQ ID NO: 2117398 - RNA, 21 nt, Human
guugccaagaacugaaaacau

SEQ ID NO: 2117399 - RNA, 22 nt, Human
guugccaagaacugaaaacaua

SEQ ID NO: 2117400 - RNA, 15 nt, Human
guugaagaggaaggg

SEQ ID NO: 2117401 - RNA, 15 nt, Human
guugaaagaguccua

SEQ ID NO: 2117402 - RNA, 14 nt, Human
guugaagcucuggu

SEQ ID NO: 2117403 - RNA, 22 nt, Human
guugaagcuaagauuuagagau

SEQ ID NO: 2117404 - RNA, 13 nt, Human
guugaagcucugg

SEQ ID NO: 2117405 - RNA, 16 nt, Human
guugaauggccugccu

SEQ ID NO: 2117406 - RNA, 13 nt, Human
guugaauauuugu

SEQ ID NO: 2117407 - RNA, 14 nt, Human
guuggauuuuuguc

SEQ ID NO: 2117408 - RNA, 14 nt, Human
guuggcaaaaaggc

SEQ ID NO: 2117409 - RNA, 20 nt, Human
guuggauuuuugucuugugu

SEQ ID NO: 2117410 - RNA, 18 nt, Human
guuggcaaaaaggcagga

SEQ ID NO: 2117411 - RNA, 23 nt, Human
guuggccaaagccaaagcuaggc

SEQ ID NO: 2117412 - RNA, 14 nt, Human
guuggccaguguga

SEQ ID NO: 2117413 - RNA, 19 nt, Human
guuggccaggcuggucuca

SEQ ID NO: 2117414 - RNA, 17 nt, Human
guuggccaggcuggucu

SEQ ID NO: 2117415 - RNA, 14 nt, Human
guuggccaggcugg

SEQ ID NO: 2117416 - RNA, 15 nt, Human
guuggccaggcuggu

SEQ ID NO: 2117417 - RNA, 13 nt, Human
guuggccaggcug

SEQ ID NO: 2117418 - RNA, 16 nt, Human
guuggaauuaaaacaa

SEQ ID NO: 2117419 - RNA, 17 nt, Human
guuggaauuaaaacaau

SEQ ID NO: 2117420 - RNA, 19 nt, Human
guuggacagcaaaaccauu

SEQ ID NO: 2117421 - RNA, 23 nt, Human
guuggacagcaaaaccauugcuu

SEQ ID NO: 2117422 - RNA, 17 nt, Human
guuggacuuuucguuaa

SEQ ID NO: 2117423 - RNA, 21 nt, Human
guuggacuuuucguuaacauu

SEQ ID NO: 2117424 - RNA, 23 nt, Human
guuggacuuuucguuaacauuga

SEQ ID NO: 2117425 - RNA, 18 nt, Human
guuggagccacucuguuc

SEQ ID NO: 2117426 - RNA, 19 nt, Human
guuggagccacucuguucc

SEQ ID NO: 2117427 - RNA, 14 nt, Human
guugcccaggcagg

SEQ ID NO: 2117428 - RNA, 12 nt, Human
guugcccaggca

SEQ ID NO: 2117429 - RNA, 17 nt, Human
guugccagagauggagg

SEQ ID NO: 2117430 - RNA, 11 nt, Human
guugccagaga

SEQ ID NO: 2117431 - RNA, 15 nt, Human
guugccagagaugga

SEQ ID NO: 2117432 - RNA, 14 nt, Human
guuauguguguaua

SEQ ID NO: 2117433 - RNA, 20 nt, Human
guuauguguaugugccauuu

SEQ ID NO: 2117434 - RNA, 19 nt, Human
guuauguguguauauguau

SEQ ID NO: 2117435 - RNA, 21 nt, Human
guuauuagggugguauuuagu

SEQ ID NO: 2117436 - RNA, 13 nt, Human
guuauuacauccu

SEQ ID NO: 2117437 - RNA, 15 nt, Human
guuauuacauccuug

SEQ ID NO: 2117438 - RNA, 21 nt, Human
guuauuacauccuuguggcac

SEQ ID NO: 2117439 - RNA, 19 nt, Human
guucaagcgauucuucugc

SEQ ID NO: 2117440 - RNA, 22 nt, Human
guuaugugaaugaucucucuga

SEQ ID NO: 2117441 - RNA, 18 nt, Human
guuauguguaugugccau

SEQ ID NO: 2117442 - RNA, 19 nt, Human
guuauguguaugugccauu

SEQ ID NO: 2117443 - RNA, 23 nt, Human
guuauggaaacuguugccagaga

SEQ ID NO: 2117444 - RNA, 20 nt, Human
guucaagcgauucuucugcu

SEQ ID NO: 2117445 - RNA, 18 nt, Human
guucaaggaaucauuguu

SEQ ID NO: 2117446 - RNA, 14 nt, Human
guucaaggaccaac

SEQ ID NO: 2117447 - RNA, 23 nt, Human
guucaaggaccaacaagggcagu

SEQ ID NO: 2117448 - RNA, 16 nt, Human
guucaauucucauuug

SEQ ID NO: 2117449 - RNA, 23 nt, Human
guucaauucucauuugucacaca

SEQ ID NO: 2117450 - RNA, 20 nt, Human
guuauauuuuacuacugugg

SEQ ID NO: 2117451 - RNA, 13 nt, Human
guuauauaaagag

SEQ ID NO: 2117452 - RNA, 14 nt, Human
guuauauaaagaga

SEQ ID NO: 2117453 - RNA, 16 nt, Human
guuauauaaagagaaa

SEQ ID NO: 2117454 - RNA, 19 nt, Human
guuauauaaagagaaaauu

SEQ ID NO: 2117455 - RNA, 20 nt, Human
guuauauaaagagaaaauug

SEQ ID NO: 2117456 - RNA, 22 nt, Human
guuauauaaagagaaaauugaa

SEQ ID NO: 2117457 - RNA, 23 nt, Human
guuauauaaagagaaaauugaau

SEQ ID NO: 2117458 - RNA, 13 nt, Human
guuauagugaauu

SEQ ID NO: 2117459 - RNA, 15 nt, Human
guuauagugaauuau

SEQ ID NO: 2117460 - RNA, 17 nt, Human
guuauaggucacuccug

SEQ ID NO: 2117461 - RNA, 22 nt, Human
guuauagagggucuaagauuca

SEQ ID NO: 2117462 - RNA, 15 nt, Human
guuaugauaaaaaau

SEQ ID NO: 2117463 - RNA, 16 nt, Human
guuaugauaaaaaauu

SEQ ID NO: 2117464 - RNA, 18 nt, Human
guuaugauaaaaaauuuu

SEQ ID NO: 2117465 - RNA, 22 nt, Human
guuaugauaaaaaauuuuguaa

SEQ ID NO: 2117466 - RNA, 21 nt, Human
guuaucccuuccuuuuagccu

SEQ ID NO: 2117467 - RNA, 15 nt, Human
guuacuauccuggcu

SEQ ID NO: 2117468 - RNA, 16 nt, Human
guuacuauccuggcuu

SEQ ID NO: 2117469 - RNA, 12 nt, Human
guuacucagccc

SEQ ID NO: 2117470 - RNA, 13 nt, Human
guuacucagcccu

SEQ ID NO: 2117471 - RNA, 14 nt, Human
guuacucagcccug

SEQ ID NO: 2117472 - RNA, 15 nt, Human
guuacucagcccugg

SEQ ID NO: 2117473 - RNA, 14 nt, Human
guuacucuccaacc

SEQ ID NO: 2117474 - RNA, 16 nt, Human
guuacucagcccuggg

SEQ ID NO: 2117475 - RNA, 17 nt, Human
guuacucagcccugggc

SEQ ID NO: 2117476 - RNA, 18 nt, Human
guuacucagcccugggcc

SEQ ID NO: 2117477 - RNA, 17 nt, Human
guuacucuccaaccugg

SEQ ID NO: 2117478 - RNA, 18 nt, Human
guuacucuccaaccugga

SEQ ID NO: 2117479 - RNA, 22 nt, Human
guuacucuccaaccuggacaac

SEQ ID NO: 2117480 - RNA, 11 nt, Human
guuacucugaa

SEQ ID NO: 2117481 - RNA, 14 nt, Human
guuacucugaaggg

SEQ ID NO: 2117482 - RNA, 13 nt, Human
guuacuauaugcc

SEQ ID NO: 2117483 - RNA, 23 nt, Human
guuacuaauuggccucuuuaaga

SEQ ID NO: 2117484 - RNA, 23 nt, Human
guuaccuuucuaggucaaggccu

SEQ ID NO: 2117485 - RNA, 23 nt, Human
guuacgcacacguacuuaaauga

SEQ ID NO: 2117486 - RNA, 17 nt, Human
guuauaaaucaauguca

SEQ ID NO: 2117487 - RNA, 18 nt, Human
guuauaaaucaaugucac

SEQ ID NO: 2117488 - RNA, 15 nt, Human
guuauacaugacacu

SEQ ID NO: 2117489 - RNA, 17 nt, Human
guuauacaugacacuga

SEQ ID NO: 2117490 - RNA, 18 nt, Human
guuauacaugacacugaa

SEQ ID NO: 2117491 - RNA, 19 nt, Human
guuauacaugacacugaaa

SEQ ID NO: 2117492 - RNA, 20 nt, Human
guuauacaugacacugaaau

SEQ ID NO: 2117493 - RNA, 23 nt, Human
guuauacaugacacugaaaugcc

SEQ ID NO: 2117494 - RNA, 19 nt, Human
guuauacugucgguuuuuu

SEQ ID NO: 2117495 - RNA, 14 nt, Human
guuaguuuuuacuu

SEQ ID NO: 2117496 - RNA, 16 nt, Human
guuaguuucuuuggga

SEQ ID NO: 2117497 - RNA, 10 nt, Human
guuaccuaau

SEQ ID NO: 2117498 - RNA, 19 nt, Human
guuaccuaauuagagcaga

SEQ ID NO: 2117499 - RNA, 15 nt, Human
guuaccuccuauaaa

SEQ ID NO: 2117500 - RNA, 17 nt, Human
guuaccuccuauaaacu

SEQ ID NO: 2117501 - RNA, 23 nt, Human
guuaccauuuugggguacccacu

SEQ ID NO: 2117502 - RNA, 22 nt, Human
guuacauugcuggucuuguaag

SEQ ID NO: 2117503 - RNA, 23 nt, Human
guuacauugcuggucuuguaaga

SEQ ID NO: 2117504 - RNA, 22 nt, Human
guuacaggcaccgagaauguug

SEQ ID NO: 2117505 - RNA, 18 nt, Human
guuacauaagauaaaugu

SEQ ID NO: 2117506 - RNA, 19 nt, Human
guuacauaagauaaaugug

SEQ ID NO: 2117507 - RNA, 16 nt, Human
guucacccacagggcu

SEQ ID NO: 2117508 - RNA, 11 nt, Human
guucaccagcc

SEQ ID NO: 2117509 - RNA, 12 nt, Human
guucaccccucc

SEQ ID NO: 2117510 - RNA, 14 nt, Human
guucaccccuccac

SEQ ID NO: 2117511 - RNA, 16 nt, Human
guucaccccuccaccc

SEQ ID NO: 2117512 - RNA, 12 nt, Human
guucaccagccu

SEQ ID NO: 2117513 - RNA, 22 nt, Human
guucaccuauuucaaaaauuug

SEQ ID NO: 2117514 - RNA, 15 nt, Human
guucacuaaagcagu

SEQ ID NO: 2117515 - RNA, 24 nt, Human
guucacucuacuuagcaugucccu

SEQ ID NO: 2117516 - RNA, 22 nt, Human
guucaccuugaagaaccucuca

SEQ ID NO: 2117517 - RNA, 19 nt, Human
guucacugcaaccuccgcc

SEQ ID NO: 2117518 - RNA, 16 nt, Human
guucagagacucaggg

SEQ ID NO: 2117519 - RNA, 17 nt, Human
guucagagacucagggc

SEQ ID NO: 2117520 - RNA, 22 nt, Human
guucagagacucagggccccag

SEQ ID NO: 2117521 - RNA, 22 nt, Human
guucauccaauccucacugggu

SEQ ID NO: 2117522 - RNA, 20 nt, Human
guucauccaauccucacugg

SEQ ID NO: 2117523 - RNA, 21 nt, Human
guucauccaauccucacuggg

SEQ ID NO: 2117524 - RNA, 12 nt, Human
guucaucagugu

SEQ ID NO: 2117525 - RNA, 13 nt, Human
guucaucaguguu

SEQ ID NO: 2117526 - RNA, 14 nt, Human
guucaucaguguua

SEQ ID NO: 2117527 - RNA, 16 nt, Human
guucaucaguguuaaa

SEQ ID NO: 2117528 - RNA, 21 nt, Human
guucaucaguguuaaaaaauu

SEQ ID NO: 2117529 - RNA, 16 nt, Human
guucagccccuccucu

SEQ ID NO: 2117530 - RNA, 15 nt, Human
guucauccaauccuc

SEQ ID NO: 2117531 - RNA, 18 nt, Human
guucauccaauccucacu

SEQ ID NO: 2117532 - RNA, 19 nt, Human
guucauccaauccucacug

SEQ ID NO: 2117533 - RNA, 17 nt, Human
guucaucauccuaagcu

SEQ ID NO: 2117534 - RNA, 14 nt, Human
guucagccccuccu

SEQ ID NO: 2117535 - RNA, 15 nt, Human
guucagccccuccuc

SEQ ID NO: 2117536 - RNA, 16 nt, Human
guucagcauucuuagc

SEQ ID NO: 2117537 - RNA, 22 nt, Human
guucagcauucuuagccugugg

SEQ ID NO: 2117538 - RNA, 16 nt, Human
guucagcaccacccua

SEQ ID NO: 2117539 - RNA, 17 nt, Human
guucagcaccacccuag

SEQ ID NO: 2117540 - RNA, 17 nt, Human
guucaucguauaacaca

SEQ ID NO: 2117541 - RNA, 16 nt, Human
guucaugccaccaugg

SEQ ID NO: 2117542 - RNA, 13 nt, Human
guuccucgcccug

SEQ ID NO: 2117543 - RNA, 15 nt, Human
guuccucgcccuggg

SEQ ID NO: 2117544 - RNA, 16 nt, Human
guuccucgcccugggu

SEQ ID NO: 2117545 - RNA, 16 nt, Human
guuccugaugacccag

SEQ ID NO: 2117546 - RNA, 19 nt, Human
guuccugaugacccaggcu

SEQ ID NO: 2117547 - RNA, 20 nt, Human
guuccugaugacccaggcug

SEQ ID NO: 2117548 - RNA, 22 nt, Human
guuccugaugacccaggcugcc

SEQ ID NO: 2117549 - RNA, 15 nt, Human
guuccuggcucagcc

SEQ ID NO: 2117550 - RNA, 16 nt, Human
guuccuggcucagccu

SEQ ID NO: 2117551 - RNA, 14 nt, Human
guuccuuacugcag

SEQ ID NO: 2117552 - RNA, 15 nt, Human
guuccuuacugcaga

SEQ ID NO: 2117553 - RNA, 21 nt, Human
guuccuggcaauaguguguuc

SEQ ID NO: 2117554 - RNA, 13 nt, Human
guuccuggcaaua

SEQ ID NO: 2117555 - RNA, 12 nt, Human
guuccuggcaau

SEQ ID NO: 2117556 - RNA, 12 nt, Human
guuccugcagca

SEQ ID NO: 2117557 - RNA, 17 nt, Human
guuccugcagcagagcc

SEQ ID NO: 2117558 - RNA, 18 nt, Human
guuccugcagcagagccu

SEQ ID NO: 2117559 - RNA, 16 nt, Human
guuccugcuagaaaug

SEQ ID NO: 2117560 - RNA, 17 nt, Human
guuccugcuagaaaugg

SEQ ID NO: 2117561 - RNA, 12 nt, Human
guuccagcucuu

SEQ ID NO: 2117562 - RNA, 14 nt, Human
guuccagcucuuug

SEQ ID NO: 2117563 - RNA, 16 nt, Human
guuccagcucuuugaa

SEQ ID NO: 2117564 - RNA, 22 nt, Human
guuccucauuagcauuuugcua

SEQ ID NO: 2117565 - RNA, 14 nt, Human
guuccuaaguucuu

SEQ ID NO: 2117566 - RNA, 15 nt, Human
guuccaauccuggcu

SEQ ID NO: 2117567 - RNA, 16 nt, Human
guuccaauccuggcuc

SEQ ID NO: 2117568 - RNA, 21 nt, Human
guuccaagacauugucaauaa

SEQ ID NO: 2117569 - RNA, 15 nt, Human
guuccaagacauugu

SEQ ID NO: 2117570 - RNA, 16 nt, Human
guuccaagacauuguc

SEQ ID NO: 2117571 - RNA, 17 nt, Human
guuccaagacauuguca

SEQ ID NO: 2117572 - RNA, 19 nt, Human
guuccaagacauugucaau

SEQ ID NO: 2117573 - RNA, 18 nt, Human
guucauuuguuauucuua

SEQ ID NO: 2117574 - RNA, 20 nt, Human
guucauuucaaauacaucuu

SEQ ID NO: 2117575 - RNA, 16 nt, Human
guucauuugugugcuc

SEQ ID NO: 2117576 - RNA, 17 nt, Human
guucauuugugugcuca

SEQ ID NO: 2117577 - RNA, 18 nt, Human
guucauuugugugcucau

SEQ ID NO: 2117578 - RNA, 13 nt, Human
guuccaagacauu

SEQ ID NO: 2117579 - RNA, 14 nt, Human
guuccaagacauug

SEQ ID NO: 2117580 - RNA, 22 nt, Human
guucauuauuggaauuaaccug

SEQ ID NO: 2117581 - RNA, 15 nt, Human
guucauuauuggaau

SEQ ID NO: 2117582 - RNA, 16 nt, Human
guucauuaaagcauga

SEQ ID NO: 2117583 - RNA, 20 nt, Human
guucauuaaagcaugaaugg

SEQ ID NO: 2117584 - RNA, 14 nt, Human
guucauuguaaugu

SEQ ID NO: 2117585 - RNA, 18 nt, Human
guucauuguaauguuacu

SEQ ID NO: 2117586 - RNA, 19 nt, Human
guucauuguaauguuacug

SEQ ID NO: 2117587 - RNA, 20 nt, Human
guucauuguaauguuacuga

SEQ ID NO: 2117588 - RNA, 21 nt, Human
guucauuguaauguuacugau

SEQ ID NO: 2117589 - RNA, 22 nt, Human
guucauuguaauguuacugauc

SEQ ID NO: 2117590 - RNA, 23 nt, Human
guucauuguaauguuacugauca

SEQ ID NO: 2117591 - RNA, 23 nt, Human
guuccaauccuggcucuguggcu

SEQ ID NO: 2117592 - RNA, 16 nt, Human
guuucuuuaguuuuug

SEQ ID NO: 2117593 - RNA, 13 nt, Human
guuucuuccaaag

SEQ ID NO: 2117594 - RNA, 23 nt, Human
guuucuucauccggcagccugga

SEQ ID NO: 2117595 - RNA, 11 nt, Human
guuucuuccaa

SEQ ID NO: 2117596 - RNA, 14 nt, Human
guuuccucaggcug

SEQ ID NO: 2117597 - RNA, 16 nt, Human
guuuccucaggcugcu

SEQ ID NO: 2117598 - RNA, 17 nt, Human
guuuccccaccagugaa

SEQ ID NO: 2117599 - RNA, 15 nt, Human
guuuccuaaaaguuc

SEQ ID NO: 2117600 - RNA, 16 nt, Human
guuuccuaaaaguuca

SEQ ID NO: 2117601 - RNA, 15 nt, Human
guuuccccaccagug

SEQ ID NO: 2117602 - RNA, 20 nt, Human
guuuccccaccagugaauga

SEQ ID NO: 2117603 - RNA, 20 nt, Human
guuucccauaauuuucuuca

SEQ ID NO: 2117604 - RNA, 21 nt, Human
guuucccauaauuuucuucau

SEQ ID NO: 2117605 - RNA, 18 nt, Human
guuuccucaggcugcugg

SEQ ID NO: 2117606 - RNA, 19 nt, Human
guuuccucaggcugcugga

SEQ ID NO: 2117607 - RNA, 22 nt, Human
guuuccucaggcugcuggagga

SEQ ID NO: 2117608 - RNA, 20 nt, Human
guuuccucauuccugaaaga

SEQ ID NO: 2117609 - RNA, 13 nt, Human
guuugaaaauauu

SEQ ID NO: 2117610 - RNA, 21 nt, Human
guuugaaaauauuaucuuugu

SEQ ID NO: 2117611 - RNA, 23 nt, Human
guuucuuuuauaaaaaaaaugaa

SEQ ID NO: 2117612 - RNA, 17 nt, Human
guuugagaucagccugg

SEQ ID NO: 2117613 - RNA, 18 nt, Human
guuugagaucagccuggg

SEQ ID NO: 2117614 - RNA, 13 nt, Human
guuuguauauugu

SEQ ID NO: 2117615 - RNA, 16 nt, Human
guuuguggccucagaa

SEQ ID NO: 2117616 - RNA, 20 nt, Human
guuuguguucuguuuguuaa

SEQ ID NO: 2117617 - RNA, 22 nt, Human
guuuguguucuguuuguuaaaa

SEQ ID NO: 2117618 - RNA, 13 nt, Human
guuuguggcuggg

SEQ ID NO: 2117619 - RNA, 20 nt, Human
guuuguggcugggggcagga

SEQ ID NO: 2117620 - RNA, 22 nt, Human
guuuguggcugggggcaggagg

SEQ ID NO: 2117621 - RNA, 22 nt, Human
guuuggguauccugcccagugu

SEQ ID NO: 2117622 - RNA, 16 nt, Human
guuuggguauauucau

SEQ ID NO: 2117623 - RNA, 24 nt, Human
guuuucaggaguggguugauuuca

SEQ ID NO: 2117624 - RNA, 21 nt, Human
guuuucagaaccucuucccca

SEQ ID NO: 2117625 - RNA, 14 nt, Human
guuuucagacucag

SEQ ID NO: 2117626 - RNA, 19 nt, Human
guuuucagaaccucuuccc

SEQ ID NO: 2117627 - RNA, 20 nt, Human
guuuucagaaccucuucccc

SEQ ID NO: 2117628 - RNA, 12 nt, Human
guuuucacucuu

SEQ ID NO: 2117629 - RNA, 11 nt, Human
guuuucacucu

SEQ ID NO: 2117630 - RNA, 17 nt, Human
guuuucaaaauaaaaau

SEQ ID NO: 2117631 - RNA, 14 nt, Human
guuuguuuguauuu

SEQ ID NO: 2117632 - RNA, 13 nt, Human
guuuguuaaaacu

SEQ ID NO: 2117633 - RNA, 14 nt, Human
guuuguuaaaacug

SEQ ID NO: 2117634 - RNA, 15 nt, Human
guuuguuaaaacugg

SEQ ID NO: 2117635 - RNA, 17 nt, Human
guuuguuaaaacuggca

SEQ ID NO: 2117636 - RNA, 17 nt, Human
guuuguuuuguuuuuua

SEQ ID NO: 2117637 - RNA, 11 nt, Human
guuuguuuguu

SEQ ID NO: 2117638 - RNA, 12 nt, Human
guuuguuuguuu

SEQ ID NO: 2117639 - RNA, 15 nt, Human
guuuguuuguuuugu

SEQ ID NO: 2117640 - RNA, 16 nt, Human
guuuguuuguuuuguu

SEQ ID NO: 2117641 - RNA, 12 nt, Human
guuuuguaaauu

SEQ ID NO: 2117642 - RNA, 14 nt, Human
guuuuguaaauuuc

SEQ ID NO: 2117643 - RNA, 13 nt, Human
guuuuguaagaaa

SEQ ID NO: 2117644 - RNA, 14 nt, Human
guuuugguuaaguu

SEQ ID NO: 2117645 - RNA, 20 nt, Human
guuuugguuaaguuggcuuc

SEQ ID NO: 2117646 - RNA, 15 nt, Human
guuuuguucuuuaaa

SEQ ID NO: 2117647 - RNA, 15 nt, Human
guuuuguguuuuuuu

SEQ ID NO: 2117648 - RNA, 21 nt, Human
guuuucccugaccucccucua

SEQ ID NO: 2117649 - RNA, 16 nt, Human
guuuuccuaaaugcag

SEQ ID NO: 2117650 - RNA, 17 nt, Human
guuuuccuaaaugcagu

SEQ ID NO: 2117651 - RNA, 16 nt, Human
guuuuccuaaauguau

SEQ ID NO: 2117652 - RNA, 24 nt, Human
guuuuccuaaauguauaccuguaa

SEQ ID NO: 2117653 - RNA, 22 nt, Human
guuuuccuauaauauaauaaau

SEQ ID NO: 2117654 - RNA, 20 nt, Human
guuuuccagguuuaagcugu

SEQ ID NO: 2117655 - RNA, 13 nt, Human
guuuuccaugaaa

SEQ ID NO: 2117656 - RNA, 17 nt, Human
guuuucagacucagacu

SEQ ID NO: 2117657 - RNA, 14 nt, Human
guuuuccaugaaaa

SEQ ID NO: 2117658 - RNA, 15 nt, Human
guuuuccaugaaaac

SEQ ID NO: 2117659 - RNA, 17 nt, Human
guuuuccaugaaaacgu

SEQ ID NO: 2117660 - RNA, 18 nt, Human
guuuuccaugaaaacguu

SEQ ID NO: 2117661 - RNA, 15 nt, Human
guuguuaauaaaagu

SEQ ID NO: 2117662 - RNA, 16 nt, Human
guuguuaaugaaaaug

SEQ ID NO: 2117663 - RNA, 17 nt, Human
guuguuaaugaaaaugu

SEQ ID NO: 2117664 - RNA, 18 nt, Human
guuguuaaugaaaauguc

SEQ ID NO: 2117665 - RNA, 19 nt, Human
guuguuaaugaaaauguca

SEQ ID NO: 2117666 - RNA, 19 nt, Human
guuguggaaagccucugcu

SEQ ID NO: 2117667 - RNA, 21 nt, Human
guuguggagagugcaacagua

SEQ ID NO: 2117668 - RNA, 16 nt, Human
guuguguacucuggcc

SEQ ID NO: 2117669 - RNA, 20 nt, Human
guuguguacucuggccucug

SEQ ID NO: 2117670 - RNA, 14 nt, Human
guuguguaagagaa

SEQ ID NO: 2117671 - RNA, 15 nt, Human
guuguguaagagaau

SEQ ID NO: 2117672 - RNA, 17 nt, Human
guuguguaagagaaugu

SEQ ID NO: 2117673 - RNA, 21 nt, Human
guuguguaagagaauguugaa

SEQ ID NO: 2117674 - RNA, 16 nt, Human
guuguguacguggaga

SEQ ID NO: 2117675 - RNA, 14 nt, Human
guugugguuaaucu

SEQ ID NO: 2117676 - RNA, 19 nt, Human
guugucugaagucacugca

SEQ ID NO: 2117677 - RNA, 22 nt, Human
guugucugaagucacugcacag

SEQ ID NO: 2117678 - RNA, 15 nt, Human
guugugaagauguuu

SEQ ID NO: 2117679 - RNA, 17 nt, Human
guugugaagauguuugc

SEQ ID NO: 2117680 - RNA, 12 nt, Human
guuggcuggggg

SEQ ID NO: 2117681 - RNA, 13 nt, Human
guuggcugggccc

SEQ ID NO: 2117682 - RNA, 14 nt, Human
guuggcugggccca

SEQ ID NO: 2117683 - RNA, 16 nt, Human
guuggcugggcccaga

SEQ ID NO: 2117684 - RNA, 20 nt, Human
guuggcugacuuccacaccu

SEQ ID NO: 2117685 - RNA, 14 nt, Human
guuggccccugccc

SEQ ID NO: 2117686 - RNA, 13 nt, Human
guuggccccugcc

SEQ ID NO: 2117687 - RNA, 13 nt, Human
guuggccugcacu

SEQ ID NO: 2117688 - RNA, 20 nt, Human
guuggccccugcccggcugc

SEQ ID NO: 2117689 - RNA, 19 nt, Human
guuggcugggggccucagu

SEQ ID NO: 2117690 - RNA, 17 nt, Human
guugucaagucucugcu

SEQ ID NO: 2117691 - RNA, 22 nt, Human
guugucaagucucugcuggccc

SEQ ID NO: 2117692 - RNA, 17 nt, Human
guuggcugggcccagaa

SEQ ID NO: 2117693 - RNA, 18 nt, Human
guugucagcaucuucuca

SEQ ID NO: 2117694 - RNA, 12 nt, Human
guugucagcuga

SEQ ID NO: 2117695 - RNA, 14 nt, Human
guugucauugcuuu

SEQ ID NO: 2117696 - RNA, 15 nt, Human
guugucauugcuuua

SEQ ID NO: 2117697 - RNA, 13 nt, Human
guuguuugaaaau

SEQ ID NO: 2117698 - RNA, 23 nt, Human
guuguuugaaaauauuaucuuug

SEQ ID NO: 2117699 - RNA, 13 nt, Human
guuuaccauuugu

SEQ ID NO: 2117700 - RNA, 16 nt, Human
guuuaccauuuguaau

SEQ ID NO: 2117701 - RNA, 17 nt, Human
guuuaccauuuguaaua

SEQ ID NO: 2117702 - RNA, 18 nt, Human
guuuaccauuuguaauaa

SEQ ID NO: 2117703 - RNA, 20 nt, Human
guuuaccauuuguaauaaag

SEQ ID NO: 2117704 - RNA, 21 nt, Human
guuuaccauuuguaauaaagu

SEQ ID NO: 2117705 - RNA, 16 nt, Human
guuuaccugugaaaua

SEQ ID NO: 2117706 - RNA, 13 nt, Human
guuuacuauuuua

SEQ ID NO: 2117707 - RNA, 13 nt, Human
guuguucuuuucc

SEQ ID NO: 2117708 - RNA, 23 nt, Human
guuguucuuuucccccaaagugg

SEQ ID NO: 2117709 - RNA, 24 nt, Human
guuguuguuaaugaaaaugucaga

SEQ ID NO: 2117710 - RNA, 12 nt, Human
guuguuucuucc

SEQ ID NO: 2117711 - RNA, 13 nt, Human
guuguuucuucca

SEQ ID NO: 2117712 - RNA, 16 nt, Human
guuguuauggaaacug

SEQ ID NO: 2117713 - RNA, 13 nt, Human
guuuaguguaaaa

SEQ ID NO: 2117714 - RNA, 15 nt, Human
guuuaguguaaaaau

SEQ ID NO: 2117715 - RNA, 16 nt, Human
guuuaguguaaaaaug

SEQ ID NO: 2117716 - RNA, 17 nt, Human
guuuaguguaaaaauga

SEQ ID NO: 2117717 - RNA, 20 nt, Human
guuuaguguaaaaaugagaa

SEQ ID NO: 2117718 - RNA, 15 nt, Human
guuuauacaguacag

SEQ ID NO: 2117719 - RNA, 18 nt, Human
guuuauacaguuuuaaag

SEQ ID NO: 2117720 - RNA, 19 nt, Human
guuuauacaguuuuaaaga

SEQ ID NO: 2117721 - RNA, 20 nt, Human
guuuauacaguuuuaaagaa

SEQ ID NO: 2117722 - RNA, 14 nt, Human
guuuauauuuucaa

SEQ ID NO: 2117723 - RNA, 17 nt, Human
guuucauaggagacaca

SEQ ID NO: 2117724 - RNA, 16 nt, Human
guuucaguaauaaaac

SEQ ID NO: 2117725 - RNA, 17 nt, Human
guuucaguaauaaaaca

SEQ ID NO: 2117726 - RNA, 18 nt, Human
guuucaguaauaaaacau

SEQ ID NO: 2117727 - RNA, 22 nt, Human
guuucaguaauaaaacaucuuu

SEQ ID NO: 2117728 - RNA, 15 nt, Human
guuucccauaauuuu

SEQ ID NO: 2117729 - RNA, 17 nt, Human
guuuuuaauaaagacag

SEQ ID NO: 2117730 - RNA, 21 nt, Human
guuuuuaaggguuuguggaaa

SEQ ID NO: 2117731 - RNA, 18 nt, Human
guuuuuaauauaaagccu

SEQ ID NO: 2117732 - RNA, 15 nt, Human
guuuuguuucugaaa

SEQ ID NO: 2117733 - RNA, 19 nt, Human
guuuuuaagcuguuuccau

SEQ ID NO: 2117734 - RNA, 15 nt, Human
guuuuuaagcuguuu

SEQ ID NO: 2117735 - RNA, 14 nt, Human
guuuuuaagcuguu

SEQ ID NO: 2117736 - RNA, 13 nt, Human
guuuuuaagcugu

SEQ ID NO: 2117737 - RNA, 16 nt, Human
uaaaaacagcauugcu

SEQ ID NO: 2117738 - RNA, 20 nt, Human
uaaaacaagaaaguuucccc

SEQ ID NO: 2117739 - RNA, 18 nt, Human
uaaaacaagaaaguuucc

SEQ ID NO: 2117740 - RNA, 19 nt, Human
uaaaacaagaaaguuuccc

SEQ ID NO: 2117741 - RNA, 14 nt, Human
uaaaacaauauugu

SEQ ID NO: 2117742 - RNA, 18 nt, Human
uaaaacaauauuguuucu

SEQ ID NO: 2117743 - RNA, 19 nt, Human
uaaaacacuuccauaaucu

SEQ ID NO: 2117744 - RNA, 16 nt, Human
uaaaacaaugucaagg

SEQ ID NO: 2117745 - RNA, 11 nt, Human
uaaaacacuug

SEQ ID NO: 2117746 - RNA, 15 nt, Human
guuuuguguuguuug

SEQ ID NO: 2117747 - RNA, 21 nt, Human
uaaaaauguucuauuuuaauu

SEQ ID NO: 2117748 - RNA, 19 nt, Human
uaaaaauuaaggcaacuga

SEQ ID NO: 2117749 - RNA, 23 nt, Human
uaaaaauuguuucaaaauaaaaa

SEQ ID NO: 2117750 - RNA, 12 nt, Human
uaaaacaaaaaa

SEQ ID NO: 2117751 - RNA, 13 nt, Human
uaaaacaaaaaac

SEQ ID NO: 2117752 - RNA, 15 nt, Human
uaaaacaaaaaacaa

SEQ ID NO: 2117753 - RNA, 17 nt, Human
uaaaacaaaaaacaaua

SEQ ID NO: 2117754 - RNA, 21 nt, Human
uaaaacaaaaaacaauauuua

SEQ ID NO: 2117755 - RNA, 22 nt, Human
uaaaacaaaaaacaauauuuau

SEQ ID NO: 2117756 - RNA, 15 nt, Human
uaaaacaacacucac

SEQ ID NO: 2117757 - RNA, 17 nt, Human
uaaaacaagaaaguuuc

SEQ ID NO: 2117758 - RNA, 23 nt, Human
uaaaagauaacaagaucuuucag

SEQ ID NO: 2117759 - RNA, 12 nt, Human
uaaaacaucuuu

SEQ ID NO: 2117760 - RNA, 21 nt, Human
uaaaagauacauuuguauguu

SEQ ID NO: 2117761 - RNA, 17 nt, Human
uaaaacauuuucacaca

SEQ ID NO: 2117762 - RNA, 15 nt, Human
uaaaacauuuucaca

SEQ ID NO: 2117763 - RNA, 18 nt, Human
uaaaacauuuucacacaa

SEQ ID NO: 2117764 - RNA, 21 nt, Human
uaaaagguaugcaaucaaauc

SEQ ID NO: 2117765 - RNA, 12 nt, Human
uaaaaggagcca

SEQ ID NO: 2117766 - RNA, 11 nt, Human
uaaaagcagca

SEQ ID NO: 2117767 - RNA, 20 nt, Human
uaaaagcagcaucugcuaau

SEQ ID NO: 2117768 - RNA, 21 nt, Human
uaaaagcagcaucugcuaaua

SEQ ID NO: 2117769 - RNA, 21 nt, Human
uaaaaggaaaucucaccccau

SEQ ID NO: 2117770 - RNA, 19 nt, Human
uaaaaggugaccaaugaug

SEQ ID NO: 2117771 - RNA, 12 nt, Human
uaaaaggugacc

SEQ ID NO: 2117772 - RNA, 16 nt, Human
uaaagaaaaguuuugu

SEQ ID NO: 2117773 - RNA, 22 nt, Human
uaaagaaaaguuuuguaaauuu

SEQ ID NO: 2117774 - RNA, 12 nt, Human
uaaagaaaacug

SEQ ID NO: 2117775 - RNA, 12 nt, Human
uaaagaaaauaa

SEQ ID NO: 2117776 - RNA, 13 nt, Human
uaaagaaaauaaa

SEQ ID NO: 2117777 - RNA, 14 nt, Human
uaaagaaaauaaaa

SEQ ID NO: 2117778 - RNA, 16 nt, Human
uaaagaaaauaaaauu

SEQ ID NO: 2117779 - RNA, 11 nt, Human
uaaagccaagg

SEQ ID NO: 2117780 - RNA, 20 nt, Human
uaaagcagagggacuuugua

SEQ ID NO: 2117781 - RNA, 18 nt, Human
uaaagcaggccuuuugau

SEQ ID NO: 2117782 - RNA, 19 nt, Human
uaaagcaggccuuuugaua

SEQ ID NO: 2117783 - RNA, 20 nt, Human
uaaagcaggccuuuugauau

SEQ ID NO: 2117784 - RNA, 14 nt, Human
uaaagcugaaaacu

SEQ ID NO: 2117785 - RNA, 16 nt, Human
uaaagcugccuguagu

SEQ ID NO: 2117786 - RNA, 17 nt, Human
uaaagcugccuguaguu

SEQ ID NO: 2117787 - RNA, 23 nt, Human
uaaagcugccuguaguuaggaaa

SEQ ID NO: 2117788 - RNA, 18 nt, Human
uaaagcugccuguaguua

SEQ ID NO: 2117789 - RNA, 21 nt, Human
uaaagcugccuguaguuagga

SEQ ID NO: 2117790 - RNA, 20 nt, Human
uaaaggccucuuccuugcug

SEQ ID NO: 2117791 - RNA, 13 nt, Human
uaaaguuacauug

SEQ ID NO: 2117792 - RNA, 15 nt, Human
uaaaguuacauugcu

SEQ ID NO: 2117793 - RNA, 16 nt, Human
uaaaguuacuuuguca

SEQ ID NO: 2117794 - RNA, 13 nt, Human
uaaaguguuuuca

SEQ ID NO: 2117795 - RNA, 14 nt, Human
uaaaguguuuucag

SEQ ID NO: 2117796 - RNA, 15 nt, Human
uaaaguguuuucaga

SEQ ID NO: 2117797 - RNA, 16 nt, Human
uaaaguguuuucagag

SEQ ID NO: 2117798 - RNA, 18 nt, Human
uaaaguuaaacauuuuua

SEQ ID NO: 2117799 - RNA, 17 nt, Human
uaaaguguguuucuaug

SEQ ID NO: 2117800 - RNA, 16 nt, Human
uaaacaucacacacac

SEQ ID NO: 2117801 - RNA, 15 nt, Human
uaaacaucacacaca

SEQ ID NO: 2117802 - RNA, 17 nt, Human
uaaacauccuucaagaa

SEQ ID NO: 2117803 - RNA, 15 nt, Human
uaaaaucauguacau

SEQ ID NO: 2117804 - RNA, 18 nt, Human
uaaaaucauguacauuuc

SEQ ID NO: 2117805 - RNA, 19 nt, Human
uaaaaucauguacauuucu

SEQ ID NO: 2117806 - RNA, 13 nt, Human
uaaaaucuuaaac

SEQ ID NO: 2117807 - RNA, 19 nt, Human
uaaaaucuuggcacagaaa

SEQ ID NO: 2117808 - RNA, 16 nt, Human
uaaaaucuugaaaaug

SEQ ID NO: 2117809 - RNA, 20 nt, Human
uaaaaucuuggcacagaaac

SEQ ID NO: 2117810 - RNA, 22 nt, Human
uaaacuugguuuuuaaaaaacu

SEQ ID NO: 2117811 - RNA, 22 nt, Human
uaaacuguguggacugugaugc

SEQ ID NO: 2117812 - RNA, 13 nt, Human
uaaacuguguuua

SEQ ID NO: 2117813 - RNA, 22 nt, Human
uaaacuuagugcggacaaguuu

SEQ ID NO: 2117814 - RNA, 13 nt, Human
uaaacauuaguuc

SEQ ID NO: 2117815 - RNA, 18 nt, Human
uaaacauuaguucuauuu

SEQ ID NO: 2117816 - RNA, 23 nt, Human
uaaacauuaguucuauuucuauc

SEQ ID NO: 2117817 - RNA, 19 nt, Human
uaaacuguacuagucugug

SEQ ID NO: 2117818 - RNA, 20 nt, Human
uaaacuguacuagucugugu

SEQ ID NO: 2117819 - RNA, 17 nt, Human
uaaacuguccucuuuca

SEQ ID NO: 2117820 - RNA, 18 nt, Human
uaaacuguccucuuucag

SEQ ID NO: 2117821 - RNA, 19 nt, Human
uaaacuguccucuuucaga

SEQ ID NO: 2117822 - RNA, 23 nt, Human
uaaacuguccucuuucagaaaac

SEQ ID NO: 2117823 - RNA, 13 nt, Human
uaaacugugugca

SEQ ID NO: 2117824 - RNA, 20 nt, Human
uaaacuguguggacugugau

SEQ ID NO: 2117825 - RNA, 12 nt, Human
uaaacuguguuu

SEQ ID NO: 2117826 - RNA, 18 nt, Human
uaaacauugaaguaauga

SEQ ID NO: 2117827 - RNA, 15 nt, Human
uaaauguagaaagug

SEQ ID NO: 2117828 - RNA, 16 nt, Human
uaaauguagguaugaa

SEQ ID NO: 2117829 - RNA, 16 nt, Human
uaaauguaagaaucau

SEQ ID NO: 2117830 - RNA, 17 nt, Human
uaaauguaaagacaaaa

SEQ ID NO: 2117831 - RNA, 22 nt, Human
uaaaugucucuuuaaugucaca

SEQ ID NO: 2117832 - RNA, 20 nt, Human
uaaaugucuaguuguaacac

SEQ ID NO: 2117833 - RNA, 17 nt, Human
uaaauguaccugaugua

SEQ ID NO: 2117834 - RNA, 13 nt, Human
uaaauguauaccu

SEQ ID NO: 2117835 - RNA, 19 nt, Human
uaaauguaucuuauucaca

SEQ ID NO: 2117836 - RNA, 16 nt, Human
uaaauggguagagaaa

SEQ ID NO: 2117837 - RNA, 15 nt, Human
uaaaggcuaccuuau

SEQ ID NO: 2117838 - RNA, 22 nt, Human
uaaaugggacuggagucccugu

SEQ ID NO: 2117839 - RNA, 17 nt, Human
uaaauggucgcccagga

SEQ ID NO: 2117840 - RNA, 17 nt, Human
uaaaguucugaguguuu

SEQ ID NO: 2117841 - RNA, 17 nt, Human
uaaaugcuuuaugcaaa

SEQ ID NO: 2117842 - RNA, 12 nt, Human
uaaaugcccugc

SEQ ID NO: 2117843 - RNA, 13 nt, Human
uaaaugcccugcu

SEQ ID NO: 2117844 - RNA, 17 nt, Human
uaacacuagucugugug

SEQ ID NO: 2117845 - RNA, 18 nt, Human
uaacacuagucugugugc

SEQ ID NO: 2117846 - RNA, 23 nt, Human
uaacacuagucugugugcugugg

SEQ ID NO: 2117847 - RNA, 16 nt, Human
uaacacuauaaagguu

SEQ ID NO: 2117848 - RNA, 13 nt, Human
uaacacuggcccc

SEQ ID NO: 2117849 - RNA, 15 nt, Human
uaacacuggccccua

SEQ ID NO: 2117850 - RNA, 18 nt, Human
uaacaccaugauuaacca

SEQ ID NO: 2117851 - RNA, 17 nt, Human
uaacacauuugauucug

SEQ ID NO: 2117852 - RNA, 22 nt, Human
uaacacauuaucgggagcagug

SEQ ID NO: 2117853 - RNA, 15 nt, Human
uaaauucuuuuuuaa

SEQ ID NO: 2117854 - RNA, 18 nt, Human
uaaauucuuuuuuaaauu

SEQ ID NO: 2117855 - RNA, 19 nt, Human
uaaauucuuuuuuaaauuu

SEQ ID NO: 2117856 - RNA, 20 nt, Human
uaaauucuuuuuuaaauuuu

SEQ ID NO: 2117857 - RNA, 22 nt, Human
uaaauucuuuuuuaaauuuucu

SEQ ID NO: 2117858 - RNA, 13 nt, Human
uaaauugaaauau

SEQ ID NO: 2117859 - RNA, 20 nt, Human
uaaauugaaauauaaugcaa

SEQ ID NO: 2117860 - RNA, 15 nt, Human
uaaauuuauuucaaa

SEQ ID NO: 2117861 - RNA, 17 nt, Human
uaaauuuauuucaaaaa

SEQ ID NO: 2117862 - RNA, 14 nt, Human
uaaaugucccuaau

SEQ ID NO: 2117863 - RNA, 11 nt, Human
uaaauuauuuu

SEQ ID NO: 2117864 - RNA, 20 nt, Human
uaaauucaaccacuguaaaa

SEQ ID NO: 2117865 - RNA, 16 nt, Human
uaaauuauuuuaaauu

SEQ ID NO: 2117866 - RNA, 23 nt, Human
uaaauucaaccacuguaaaauga

SEQ ID NO: 2117867 - RNA, 17 nt, Human
uaaauucacaauagaaa

SEQ ID NO: 2117868 - RNA, 18 nt, Human
uaaauucagauauauuuu

SEQ ID NO: 2117869 - RNA, 20 nt, Human
uaaauucagauauauuuuuc

SEQ ID NO: 2117870 - RNA, 23 nt, Human
uaaauucagauauauuuuucaca

SEQ ID NO: 2117871 - RNA, 16 nt, Human
uaaauuccacuggacu

SEQ ID NO: 2117872 - RNA, 13 nt, Human
uaaauuccacugg

SEQ ID NO: 2117873 - RNA, 14 nt, Human
uaaauuccacugga

SEQ ID NO: 2117874 - RNA, 17 nt, Human
uaacugacccucccuuc

SEQ ID NO: 2117875 - RNA, 12 nt, Human
uaacugacaaau

SEQ ID NO: 2117876 - RNA, 14 nt, Human
uaacugacaaauca

SEQ ID NO: 2117877 - RNA, 15 nt, Human
uaacugacaaaucaa

SEQ ID NO: 2117878 - RNA, 16 nt, Human
uaacugacaaaucaag

SEQ ID NO: 2117879 - RNA, 17 nt, Human
uaacugacaaaucaagu

SEQ ID NO: 2117880 - RNA, 18 nt, Human
uaacugacaaaucaaguu

SEQ ID NO: 2117881 - RNA, 19 nt, Human
uaacugacaaaucaaguuu

SEQ ID NO: 2117882 - RNA, 20 nt, Human
uaacugacaaaucaaguuuc

SEQ ID NO: 2117883 - RNA, 13 nt, Human
uaacugacaacuu

SEQ ID NO: 2117884 - RNA, 21 nt, Human
uaacucuuugccuuugccacc

SEQ ID NO: 2117885 - RNA, 12 nt, Human
uaacucuuugga

SEQ ID NO: 2117886 - RNA, 13 nt, Human
uaacucuuuggau

SEQ ID NO: 2117887 - RNA, 14 nt, Human
uaacugaaggagaa

SEQ ID NO: 2117888 - RNA, 15 nt, Human
uaacugaaggagaag

SEQ ID NO: 2117889 - RNA, 16 nt, Human
uaacugaaggagaagg

SEQ ID NO: 2117890 - RNA, 14 nt, Human
uaacucugauguaa

SEQ ID NO: 2117891 - RNA, 15 nt, Human
uaacucugauguaaa

SEQ ID NO: 2117892 - RNA, 16 nt, Human
uaacucugauguaaau

SEQ ID NO: 2117893 - RNA, 17 nt, Human
uaacucugauguaaaug

SEQ ID NO: 2117894 - RNA, 19 nt, Human
uaacucugauguaaaugaa

SEQ ID NO: 2117895 - RNA, 22 nt, Human
uaacucuaauucccauuuugca

SEQ ID NO: 2117896 - RNA, 14 nt, Human
uaaccccauucuuu

SEQ ID NO: 2117897 - RNA, 15 nt, Human
uaaccccauucuuug

SEQ ID NO: 2117898 - RNA, 16 nt, Human
uaaccccauucuuugc

SEQ ID NO: 2117899 - RNA, 17 nt, Human
uaaccccauucuuugcu

SEQ ID NO: 2117900 - RNA, 16 nt, Human
uaacuauguugauaaa

SEQ ID NO: 2117901 - RNA, 12 nt, Human
uaaccccuuucc

SEQ ID NO: 2117902 - RNA, 13 nt, Human
uaaccccuuuccu

SEQ ID NO: 2117903 - RNA, 16 nt, Human
uaaccccuuuccugcg

SEQ ID NO: 2117904 - RNA, 19 nt, Human
uaacuauuuuauuuucuaa

SEQ ID NO: 2117905 - RNA, 14 nt, Human
uaacucaauauuuu

SEQ ID NO: 2117906 - RNA, 22 nt, Human
uaacucaauauuuuccaugaaa

SEQ ID NO: 2117907 - RNA, 15 nt, Human
uaacacuguuaagag

SEQ ID NO: 2117908 - RNA, 16 nt, Human
uaacauucgaucucau

SEQ ID NO: 2117909 - RNA, 23 nt, Human
uaacauucgaucucauucaguau

SEQ ID NO: 2117910 - RNA, 15 nt, Human
uaacauugaccaaga

SEQ ID NO: 2117911 - RNA, 16 nt, Human
uaacauugaccaagaa

SEQ ID NO: 2117912 - RNA, 18 nt, Human
uaacauugaccaagaacu

SEQ ID NO: 2117913 - RNA, 19 nt, Human
uaacauugaccaagaacug

SEQ ID NO: 2117914 - RNA, 20 nt, Human
uaacauugaccaagaacugc

SEQ ID NO: 2117915 - RNA, 21 nt, Human
uaacauugaccaagaacugca

SEQ ID NO: 2117916 - RNA, 22 nt, Human
uaacauugaccaagaacugcau

SEQ ID NO: 2117917 - RNA, 23 nt, Human
uaacauugaccaagaacugcaug

SEQ ID NO: 2117918 - RNA, 20 nt, Human
uaacauugggaaaucuuaua

SEQ ID NO: 2117919 - RNA, 22 nt, Human
uaacauucuguaaaaugucugu

SEQ ID NO: 2117920 - RNA, 18 nt, Human
uaacauuucuaacucuga

SEQ ID NO: 2117921 - RNA, 22 nt, Human
uaacauuucuaacucugaugua

SEQ ID NO: 2117922 - RNA, 23 nt, Human
uaacauuucuaacucugauguaa

SEQ ID NO: 2117923 - RNA, 18 nt, Human
uaacauuugagucccuuc

SEQ ID NO: 2117924 - RNA, 15 nt, Human
uaaccacggaaaaga

SEQ ID NO: 2117925 - RNA, 19 nt, Human
uaaccacgucugucuucac

SEQ ID NO: 2117926 - RNA, 13 nt, Human
uaaccacugcuuc

SEQ ID NO: 2117927 - RNA, 19 nt, Human
uaaccacuuaaaaaauguc

SEQ ID NO: 2117928 - RNA, 12 nt, Human
uaaccacugcuu

SEQ ID NO: 2117929 - RNA, 20 nt, Human
uaaccacuuaaaaaaugucc

SEQ ID NO: 2117930 - RNA, 20 nt, Human
uaaccacgucugucuucaca

SEQ ID NO: 2117931 - RNA, 16 nt, Human
uaaccacuucagcuga

SEQ ID NO: 2117932 - RNA, 13 nt, Human
uaaccagagcaag

SEQ ID NO: 2117933 - RNA, 21 nt, Human
uaaccagagcaagcuuuuuua

SEQ ID NO: 2117934 - RNA, 21 nt, Human
uaaccagucugaaguuucauu

SEQ ID NO: 2117935 - RNA, 23 nt, Human
uaaccagucugaaguuucauuua

SEQ ID NO: 2117936 - RNA, 15 nt, Human
uaaccccaaaaugaa

SEQ ID NO: 2117937 - RNA, 19 nt, Human
uaaccccaaaaugaagauu

SEQ ID NO: 2117938 - RNA, 13 nt, Human
uaaccccagcucc

SEQ ID NO: 2117939 - RNA, 19 nt, Human
uaaccccagcucccuagga

SEQ ID NO: 2117940 - RNA, 18 nt, Human
uaacuggagccccaucag

SEQ ID NO: 2117941 - RNA, 11 nt, Human
uaacuguguau

SEQ ID NO: 2117942 - RNA, 13 nt, Human
uaacuguguaugu

SEQ ID NO: 2117943 - RNA, 14 nt, Human
uaacuguguaugua

SEQ ID NO: 2117944 - RNA, 15 nt, Human
uaacuguguauguac

SEQ ID NO: 2117945 - RNA, 18 nt, Human
uaacuguguauguacaua

SEQ ID NO: 2117946 - RNA, 19 nt, Human
uaacuguguauguacauau

SEQ ID NO: 2117947 - RNA, 20 nt, Human
uaacuguguauguacauaua

SEQ ID NO: 2117948 - RNA, 22 nt, Human
uaacuguguauguacauauaua

SEQ ID NO: 2117949 - RNA, 15 nt, Human
uaacugugucauuug

SEQ ID NO: 2117950 - RNA, 22 nt, Human
uaacuggaagcauguaggagaa

SEQ ID NO: 2117951 - RNA, 16 nt, Human
uaagaaaacaucacug

SEQ ID NO: 2117952 - RNA, 20 nt, Human
uaagaaaaaauaacacacau

SEQ ID NO: 2117953 - RNA, 15 nt, Human
uaagaaaaaaauaau

SEQ ID NO: 2117954 - RNA, 22 nt, Human
uaagaaaaaaauaauuuuauga

SEQ ID NO: 2117955 - RNA, 16 nt, Human
uaacuuuugugugaaa

SEQ ID NO: 2117956 - RNA, 15 nt, Human
uaagagcuuuacaaa

SEQ ID NO: 2117957 - RNA, 19 nt, Human
uaagagcuuuacaaaaaga

SEQ ID NO: 2117958 - RNA, 20 nt, Human
uaagagcuuuacaaaaagac

SEQ ID NO: 2117959 - RNA, 15 nt, Human
uaagaggaugaagug

SEQ ID NO: 2117960 - RNA, 19 nt, Human
uaagaaaccaaucaagaua

SEQ ID NO: 2117961 - RNA, 21 nt, Human
uaagaaaccaaucaagauaaa

SEQ ID NO: 2117962 - RNA, 23 nt, Human
uaagaaacacacugaggcaggga

SEQ ID NO: 2117963 - RNA, 14 nt, Human
uaagaaaauacaau

SEQ ID NO: 2117964 - RNA, 17 nt, Human
uaagaaaauacaauaaa

SEQ ID NO: 2117965 - RNA, 18 nt, Human
uaagaaaauacaauaaac

SEQ ID NO: 2117966 - RNA, 19 nt, Human
uaagaaaauacaauaaacu

SEQ ID NO: 2117967 - RNA, 21 nt, Human
uaagaaaagauacgacuuuau

SEQ ID NO: 2117968 - RNA, 20 nt, Human
uaagaaacacacugaggcag

SEQ ID NO: 2117969 - RNA, 21 nt, Human
uaagaaacacacugaggcagg

SEQ ID NO: 2117970 - RNA, 11 nt, Human
uaauguuuccu

SEQ ID NO: 2117971 - RNA, 13 nt, Human
uaauguuugcuau

SEQ ID NO: 2117972 - RNA, 16 nt, Human
uaauguuuuuaaauau

SEQ ID NO: 2117973 - RNA, 12 nt, Human
uaauguuugcua

SEQ ID NO: 2117974 - RNA, 14 nt, Human
uaauuaaaaaauuu

SEQ ID NO: 2117975 - RNA, 17 nt, Human
uaauuaaguaaacuaau

SEQ ID NO: 2117976 - RNA, 21 nt, Human
uaauuaaguaaacuaaugagu

SEQ ID NO: 2117977 - RNA, 14 nt, Human
uaauuaaguacuau

SEQ ID NO: 2117978 - RNA, 17 nt, Human
uaauuaaguacuaugua

SEQ ID NO: 2117979 - RNA, 20 nt, Human
uaauuaaguacuauguauca

SEQ ID NO: 2117980 - RNA, 13 nt, Human
uaauuagcugugc

SEQ ID NO: 2117981 - RNA, 22 nt, Human
uaauuagagcagaugaccccuc

SEQ ID NO: 2117982 - RNA, 21 nt, Human
uaauguuggguagaaagagau

SEQ ID NO: 2117983 - RNA, 23 nt, Human
uaauguuacugaucaugcauugu

SEQ ID NO: 2117984 - RNA, 15 nt, Human
uaauguuacugauca

SEQ ID NO: 2117985 - RNA, 21 nt, Human
uaauguuacugaucaugcauu

SEQ ID NO: 2117986 - RNA, 15 nt, Human
uaauggggcggugag

SEQ ID NO: 2117987 - RNA, 20 nt, Human
uaauggaaaaugauuuuacu

SEQ ID NO: 2117988 - RNA, 16 nt, Human
uaaugcuguugccuca

SEQ ID NO: 2117989 - RNA, 13 nt, Human
uaaugcuggagcg

SEQ ID NO: 2117990 - RNA, 14 nt, Human
uaaugcuguugccu

SEQ ID NO: 2117991 - RNA, 17 nt, Human
uaaugcuguugccucau

SEQ ID NO: 2117992 - RNA, 14 nt, Human
uaaugcuaaaugua

SEQ ID NO: 2117993 - RNA, 21 nt, Human
uaaugcuaaauguaagaauca

SEQ ID NO: 2117994 - RNA, 22 nt, Human
uaaugcuaaauguaagaaucau

SEQ ID NO: 2117995 - RNA, 16 nt, Human
uaauaugcugccaaau

SEQ ID NO: 2117996 - RNA, 10 nt, Human
uaauaugcau

SEQ ID NO: 2117997 - RNA, 18 nt, Human
uaauaugcugccaaauuu

SEQ ID NO: 2117998 - RNA, 12 nt, Human
uaauaugagaau

SEQ ID NO: 2117999 - RNA, 15 nt, Human
uaauaauguuuaaua

SEQ ID NO: 2118000 - RNA, 13 nt, Human
uaauaaugugaau

SEQ ID NO: 2118001 - RNA, 15 nt, Human
uaauaucaauagaag

SEQ ID NO: 2118002 - RNA, 15 nt, Human
uaaucugcuaugcuu

SEQ ID NO: 2118003 - RNA, 18 nt, Human
uaaucugcuaugcuugaa

SEQ ID NO: 2118004 - RNA, 22 nt, Human
uaaucuggacuccucuguccag

SEQ ID NO: 2118005 - RNA, 21 nt, Human
uaaucuggacuccucugucca

SEQ ID NO: 2118006 - RNA, 20 nt, Human
uaaucuggacuccucugucc

SEQ ID NO: 2118007 - RNA, 19 nt, Human
uaaucuggacuccucuguc

SEQ ID NO: 2118008 - RNA, 17 nt, Human
uaauccuagcugugugc

SEQ ID NO: 2118009 - RNA, 17 nt, Human
uaaucuaauucuaagga

SEQ ID NO: 2118010 - RNA, 22 nt, Human
uaaucuacuccuuguaaagacu

SEQ ID NO: 2118011 - RNA, 15 nt, Human
uaaucuggacuccuc

SEQ ID NO: 2118012 - RNA, 16 nt, Human
uaaucuauuggguuca

SEQ ID NO: 2118013 - RNA, 18 nt, Human
uaaucuauuggguucauu

SEQ ID NO: 2118014 - RNA, 18 nt, Human
uaaucuggacuccucugu

SEQ ID NO: 2118015 - RNA, 17 nt, Human
uaaucuggacuccucug

SEQ ID NO: 2118016 - RNA, 20 nt, Human
uaauauuaaggaagacaaug

SEQ ID NO: 2118017 - RNA, 22 nt, Human
uaaucccugggcauugcuuucc

SEQ ID NO: 2118018 - RNA, 19 nt, Human
uaaucccugggcauugcuu

SEQ ID NO: 2118019 - RNA, 20 nt, Human
uaaucccugggcauugcuuu

SEQ ID NO: 2118020 - RNA, 17 nt, Human
uaaucccgauucacccu

SEQ ID NO: 2118021 - RNA, 14 nt, Human
uaaucccugggcau

SEQ ID NO: 2118022 - RNA, 15 nt, Human
uaagccaugggagac

SEQ ID NO: 2118023 - RNA, 15 nt, Human
uaagaggcagggucu

SEQ ID NO: 2118024 - RNA, 12 nt, Human
uaagaggcaggg

SEQ ID NO: 2118025 - RNA, 21 nt, Human
uaagcuaaagaggcugaaaga

SEQ ID NO: 2118026 - RNA, 16 nt, Human
uaagcuaacccccuuc

SEQ ID NO: 2118027 - RNA, 22 nt, Human
uaagcgcuagaggaagcagcca

SEQ ID NO: 2118028 - RNA, 22 nt, Human
uaagcuaacccccuucuacuga

SEQ ID NO: 2118029 - RNA, 14 nt, Human
uaagcccuugaaga

SEQ ID NO: 2118030 - RNA, 13 nt, Human
uaagcuaugugaa

SEQ ID NO: 2118031 - RNA, 15 nt, Human
uaaggauugugauau

SEQ ID NO: 2118032 - RNA, 14 nt, Human
uaagcuauucagua

SEQ ID NO: 2118033 - RNA, 19 nt, Human
uaaggcaacugaacaaaaa

SEQ ID NO: 2118034 - RNA, 20 nt, Human
uaaggcaacugaacaaaaaa

SEQ ID NO: 2118035 - RNA, 17 nt, Human
uaagggaaaagggaaca

SEQ ID NO: 2118036 - RNA, 14 nt, Human
uaaggcuucaauuu

SEQ ID NO: 2118037 - RNA, 23 nt, Human
uaaggcuucaauuuauugcacaa

SEQ ID NO: 2118038 - RNA, 20 nt, Human
uaaggcugaggaaaggccag

SEQ ID NO: 2118039 - RNA, 13 nt, Human
uaaggcugaggaa

SEQ ID NO: 2118040 - RNA, 13 nt, Human
uaaggugccuucu

SEQ ID NO: 2118041 - RNA, 15 nt, Human
uaaggugugcucuga

SEQ ID NO: 2118042 - RNA, 20 nt, Human
uaaggguuaguuuacaauca

SEQ ID NO: 2118043 - RNA, 13 nt, Human
uaaggguuuuaga

SEQ ID NO: 2118044 - RNA, 18 nt, Human
uaaggucauuaccacagg

SEQ ID NO: 2118045 - RNA, 22 nt, Human
uaagggcuggucucugcugaag

SEQ ID NO: 2118046 - RNA, 18 nt, Human
uaauaagcuaaagaggcu

SEQ ID NO: 2118047 - RNA, 19 nt, Human
uaagugugaguaagagcug

SEQ ID NO: 2118048 - RNA, 15 nt, Human
uaauaaauauuuaug

SEQ ID NO: 2118049 - RNA, 16 nt, Human
uaauaaauauuuaugu

SEQ ID NO: 2118050 - RNA, 14 nt, Human
uaauaaaguauaua

SEQ ID NO: 2118051 - RNA, 13 nt, Human
uaauaaaguauuc

SEQ ID NO: 2118052 - RNA, 15 nt, Human
uaauaaaguauucca

SEQ ID NO: 2118053 - RNA, 18 nt, Human
uaauaaaguauuccaccu

SEQ ID NO: 2118054 - RNA, 22 nt, Human
uaauaaaguauuccaccuuaaa

SEQ ID NO: 2118055 - RNA, 10 nt, Human
uaauaaagug

SEQ ID NO: 2118056 - RNA, 16 nt, Human
uaauaaaguguuuuca

SEQ ID NO: 2118057 - RNA, 18 nt, Human
uaauaaaguguuuucaga

SEQ ID NO: 2118058 - RNA, 19 nt, Human
uaauaaaguguuuucagag

SEQ ID NO: 2118059 - RNA, 20 nt, Human
uaauaaaguguuuucagagc

SEQ ID NO: 2118060 - RNA, 15 nt, Human
uaaguguacuaauua

SEQ ID NO: 2118061 - RNA, 11 nt, Human
uaagucucugu

SEQ ID NO: 2118062 - RNA, 12 nt, Human
uaagucucugug

SEQ ID NO: 2118063 - RNA, 23 nt, Human
uaagcuaggauguugcucagaag

SEQ ID NO: 2118064 - RNA, 18 nt, Human
uaagucuaaauauuuccu

SEQ ID NO: 2118065 - RNA, 20 nt, Human
uaaguccuugcaagaaucag

SEQ ID NO: 2118066 - RNA, 23 nt, Human
uaaguccuacuuuacauaugcuu

SEQ ID NO: 2118067 - RNA, 15 nt, Human
uaagucccugccccc

SEQ ID NO: 2118068 - RNA, 17 nt, Human
uaagucccugcccccuc

SEQ ID NO: 2118069 - RNA, 18 nt, Human
uaagucccugcccccucc

SEQ ID NO: 2118070 - RNA, 22 nt, Human
uaagucccugcccccuccccuu

SEQ ID NO: 2118071 - RNA, 23 nt, Human
uaagucccugcccccuccccuuc

SEQ ID NO: 2118072 - RNA, 16 nt, Human
uaagugaaaaggucau

SEQ ID NO: 2118073 - RNA, 15 nt, Human
uaagugagagagaca

SEQ ID NO: 2118074 - RNA, 24 nt, Human
uaagugagagagacaagaagcaaa

SEQ ID NO: 2118075 - RNA, 15 nt, Human
uaagugccuacauua

SEQ ID NO: 2118076 - RNA, 11 nt, Human
uauagaaaugc

SEQ ID NO: 2118077 - RNA, 13 nt, Human
uauagaaguuuag

SEQ ID NO: 2118078 - RNA, 22 nt, Human
uauagaauaaugugggaagaaa

SEQ ID NO: 2118079 - RNA, 15 nt, Human
uauagaauauuuauu

SEQ ID NO: 2118080 - RNA, 21 nt, Human
uauagaauauuuauuaccucu

SEQ ID NO: 2118081 - RNA, 21 nt, Human
uauagaauugcaauuuuaaca

SEQ ID NO: 2118082 - RNA, 17 nt, Human
uauagaauuuuuaaugu

SEQ ID NO: 2118083 - RNA, 18 nt, Human
uauagaauuuuuaauguu

SEQ ID NO: 2118084 - RNA, 16 nt, Human
uauagacaaauaauaa

SEQ ID NO: 2118085 - RNA, 11 nt, Human
uauagacucua

SEQ ID NO: 2118086 - RNA, 16 nt, Human
uauagacccgaggaaa

SEQ ID NO: 2118087 - RNA, 17 nt, Human
uauacuuuuuucuuauu

SEQ ID NO: 2118088 - RNA, 21 nt, Human
uauacuuuuuucuuauuuaac

SEQ ID NO: 2118089 - RNA, 19 nt, Human
uauacuuuuuucuuauuua

SEQ ID NO: 2118090 - RNA, 23 nt, Human
uauaaacuuagugcggacaaguu

SEQ ID NO: 2118091 - RNA, 16 nt, Human
uauaaagguugacaau

SEQ ID NO: 2118092 - RNA, 20 nt, Human
uauaucugggcuggccaguu

SEQ ID NO: 2118093 - RNA, 12 nt, Human
uauauaaagaga

SEQ ID NO: 2118094 - RNA, 14 nt, Human
uauauaaagagaaa

SEQ ID NO: 2118095 - RNA, 15 nt, Human
uauauaaagagaaaa

SEQ ID NO: 2118096 - RNA, 16 nt, Human
uauauaaagagaaaau

SEQ ID NO: 2118097 - RNA, 18 nt, Human
uauauaaagagaaaauug

SEQ ID NO: 2118098 - RNA, 19 nt, Human
uauauaaagagaaaauuga

SEQ ID NO: 2118099 - RNA, 20 nt, Human
uauauaaagagaaaauugaa

SEQ ID NO: 2118100 - RNA, 23 nt, Human
uauauaaagagaaaauugaauuu

SEQ ID NO: 2118101 - RNA, 16 nt, Human
uauaguaccuuugcuc

SEQ ID NO: 2118102 - RNA, 20 nt, Human
uauaguaccuuugcucuugc

SEQ ID NO: 2118103 - RNA, 20 nt, Human
uauagucccagcuacucaga

SEQ ID NO: 2118104 - RNA, 23 nt, Human
uaucaguuugcuagcagaaaucu

SEQ ID NO: 2118105 - RNA, 20 nt, Human
uaucaggugcugccauccag

SEQ ID NO: 2118106 - RNA, 16 nt, Human
uaucaaacugaagcca

SEQ ID NO: 2118107 - RNA, 13 nt, Human
uaucaaacugaag

SEQ ID NO: 2118108 - RNA, 19 nt, Human
uaucaggugcugccaucca

SEQ ID NO: 2118109 - RNA, 18 nt, Human
uaucaaaauaaauugaaa

SEQ ID NO: 2118110 - RNA, 21 nt, Human
uaucaaaauaaauugaaauau

SEQ ID NO: 2118111 - RNA, 15 nt, Human
uaucaaacagcucag

SEQ ID NO: 2118112 - RNA, 18 nt, Human
uaucaaacagcucaggcu

SEQ ID NO: 2118113 - RNA, 15 nt, Human
uaucaugcaaaugcu

SEQ ID NO: 2118114 - RNA, 16 nt, Human
uaucaugcaaaugcug

SEQ ID NO: 2118115 - RNA, 17 nt, Human
uaucaugcaaaugcugu

SEQ ID NO: 2118116 - RNA, 21 nt, Human
uaucauauauauacauacaug

SEQ ID NO: 2118117 - RNA, 18 nt, Human
uaucaugccccuguacuc

SEQ ID NO: 2118118 - RNA, 14 nt, Human
uaucauggaaauau

SEQ ID NO: 2118119 - RNA, 18 nt, Human
uaucauggaaauauuaug

SEQ ID NO: 2118120 - RNA, 23 nt, Human
uaucauggaaauauuaugcaaau

SEQ ID NO: 2118121 - RNA, 18 nt, Human
uauauuuuuaauaaaagu

SEQ ID NO: 2118122 - RNA, 18 nt, Human
uauauuuucaauucaaaa

SEQ ID NO: 2118123 - RNA, 21 nt, Human
uauauuuucaauucaaaaaug

SEQ ID NO: 2118124 - RNA, 22 nt, Human
uauauuuucaauucaaaaaugu

SEQ ID NO: 2118125 - RNA, 17 nt, Human
uauaucuguuuuacugc

SEQ ID NO: 2118126 - RNA, 13 nt, Human
uauaugaacauag

SEQ ID NO: 2118127 - RNA, 15 nt, Human
uauaugaacauagac

SEQ ID NO: 2118128 - RNA, 14 nt, Human
uaguagcauguuga

SEQ ID NO: 2118129 - RNA, 12 nt, Human
uaguagauuuua

SEQ ID NO: 2118130 - RNA, 16 nt, Human
uaggugggccagcccc

SEQ ID NO: 2118131 - RNA, 19 nt, Human
uaggugggccagccccucc

SEQ ID NO: 2118132 - RNA, 20 nt, Human
uaggugggccagccccuccc

SEQ ID NO: 2118133 - RNA, 21 nt, Human
uaggugggccagccccuccca

SEQ ID NO: 2118134 - RNA, 23 nt, Human
uaggugggccagccccucccacc

SEQ ID NO: 2118135 - RNA, 18 nt, Human
uagguuaacuauguacaa

SEQ ID NO: 2118136 - RNA, 19 nt, Human
uagguuaacuauguacaau

SEQ ID NO: 2118137 - RNA, 23 nt, Human
uagguuaacuauguacaauauuu

SEQ ID NO: 2118138 - RNA, 17 nt, Human
uagguguucaggccagu

SEQ ID NO: 2118139 - RNA, 16 nt, Human
uaggugucauuuccau

SEQ ID NO: 2118140 - RNA, 13 nt, Human
uagguguggggga

SEQ ID NO: 2118141 - RNA, 17 nt, Human
uaggugugggggaagca

SEQ ID NO: 2118142 - RNA, 16 nt, Human
uaggugacagagugag

SEQ ID NO: 2118143 - RNA, 11 nt, Human
uaggugacaga

SEQ ID NO: 2118144 - RNA, 11 nt, Human
uagggaaaaac

SEQ ID NO: 2118145 - RNA, 14 nt, Human
uaggcuuuacuuag

SEQ ID NO: 2118146 - RNA, 16 nt, Human
uagguggaucaccuga

SEQ ID NO: 2118147 - RNA, 22 nt, Human
uagcugguuuccucauuccuga

SEQ ID NO: 2118148 - RNA, 18 nt, Human
uagcugguuccugcuaga

SEQ ID NO: 2118149 - RNA, 23 nt, Human
uagcugguuccugcuagaaaugg

SEQ ID NO: 2118150 - RNA, 16 nt, Human
uaggcuggagcccagg

SEQ ID NO: 2118151 - RNA, 19 nt, Human
uaggcuggagcccagggag

SEQ ID NO: 2118152 - RNA, 16 nt, Human
uaggcugggcccagag

SEQ ID NO: 2118153 - RNA, 17 nt, Human
uaggcugggcccagagg

SEQ ID NO: 2118154 - RNA, 18 nt, Human
uaggcugggcccagaggc

SEQ ID NO: 2118155 - RNA, 11 nt, Human
uaggcugggug

SEQ ID NO: 2118156 - RNA, 12 nt, Human
uaggcugggugc

SEQ ID NO: 2118157 - RNA, 17 nt, Human
uaggcugggugcccaca

SEQ ID NO: 2118158 - RNA, 18 nt, Human
uaggcugggugcccacag

SEQ ID NO: 2118159 - RNA, 16 nt, Human
uaguggccagaccaga

SEQ ID NO: 2118160 - RNA, 17 nt, Human
uaguggccagaccagag

SEQ ID NO: 2118161 - RNA, 19 nt, Human
uaguggccagaccagagcu

SEQ ID NO: 2118162 - RNA, 16 nt, Human
uaguauuuauuuaaug

SEQ ID NO: 2118163 - RNA, 20 nt, Human
uaguggcuuaaaacaacacu

SEQ ID NO: 2118164 - RNA, 16 nt, Human
uaguaugguggcuggg

SEQ ID NO: 2118165 - RNA, 18 nt, Human
uaguggggucucccucuc

SEQ ID NO: 2118166 - RNA, 20 nt, Human
uaguggggucucccucuccu

SEQ ID NO: 2118167 - RNA, 21 nt, Human
uaguggggucucccucuccug

SEQ ID NO: 2118168 - RNA, 22 nt, Human
uaguggggucucccucuccugc

SEQ ID NO: 2118169 - RNA, 23 nt, Human
uaguggggucucccucuccugcc

SEQ ID NO: 2118170 - RNA, 14 nt, Human
uauaaacaucacac

SEQ ID NO: 2118171 - RNA, 18 nt, Human
uauaaacaucacacacac

SEQ ID NO: 2118172 - RNA, 17 nt, Human
uauaaacaucacacaca

SEQ ID NO: 2118173 - RNA, 14 nt, Human
uaguuucuuuggga

SEQ ID NO: 2118174 - RNA, 14 nt, Human
uauaaacacuauau

SEQ ID NO: 2118175 - RNA, 13 nt, Human
uagacuagagaaa

SEQ ID NO: 2118176 - RNA, 14 nt, Human
uagacuagagaaac

SEQ ID NO: 2118177 - RNA, 16 nt, Human
uagaccuccagcuguu

SEQ ID NO: 2118178 - RNA, 23 nt, Human
uagaccauuuaucugggauuaug

SEQ ID NO: 2118179 - RNA, 14 nt, Human
uagaccccuggcug

SEQ ID NO: 2118180 - RNA, 15 nt, Human
uagaccccuggcugg

SEQ ID NO: 2118181 - RNA, 14 nt, Human
uagaguccucacuc

SEQ ID NO: 2118182 - RNA, 20 nt, Human
uagaguccucacucccaguc

SEQ ID NO: 2118183 - RNA, 16 nt, Human
uagaggugagggaagc

SEQ ID NO: 2118184 - RNA, 13 nt, Human
uagaguccucacu

SEQ ID NO: 2118185 - RNA, 12 nt, Human
uagagugggagc

SEQ ID NO: 2118186 - RNA, 13 nt, Human
uagagaaggaccc

SEQ ID NO: 2118187 - RNA, 22 nt, Human
uagagaaggacccggaggggcc

SEQ ID NO: 2118188 - RNA, 11 nt, Human
uagagacaggg

SEQ ID NO: 2118189 - RNA, 16 nt, Human
uagaaguggaccagga

SEQ ID NO: 2118190 - RNA, 18 nt, Human
uagaaguggaccaggaca

SEQ ID NO: 2118191 - RNA, 19 nt, Human
uagaaguggaccaggacag

SEQ ID NO: 2118192 - RNA, 20 nt, Human
uagaaguggaccaggacagg

SEQ ID NO: 2118193 - RNA, 16 nt, Human
uagaagugggccagga

SEQ ID NO: 2118194 - RNA, 20 nt, Human
uagaagugggccaggacagg

SEQ ID NO: 2118195 - RNA, 14 nt, Human
uacuuguggacaca

SEQ ID NO: 2118196 - RNA, 22 nt, Human
uacuuguucaaaauauguucuu

SEQ ID NO: 2118197 - RNA, 15 nt, Human
uacuuguuucagagu

SEQ ID NO: 2118198 - RNA, 14 nt, Human
uacuuguuucagag

SEQ ID NO: 2118199 - RNA, 13 nt, Human
uacuuguucaaaa

SEQ ID NO: 2118200 - RNA, 20 nt, Human
uagaauauuuauuaccucug

SEQ ID NO: 2118201 - RNA, 21 nt, Human
uagaaucagccuaggggucag

SEQ ID NO: 2118202 - RNA, 19 nt, Human
uagaauauuuauuaccucu

SEQ ID NO: 2118203 - RNA, 15 nt, Human
uagaauauuuauuac

SEQ ID NO: 2118204 - RNA, 12 nt, Human
uagaauauuuau

SEQ ID NO: 2118205 - RNA, 15 nt, Human
uagaauauaauuauc

SEQ ID NO: 2118206 - RNA, 18 nt, Human
uagaauauaauuaucgga

SEQ ID NO: 2118207 - RNA, 21 nt, Human
uagaauaaugugggaagaaac

SEQ ID NO: 2118208 - RNA, 22 nt, Human
uagaauaaugugggaagaaaca

SEQ ID NO: 2118209 - RNA, 23 nt, Human
uagaauaaugugggaagaaacaa

SEQ ID NO: 2118210 - RNA, 19 nt, Human
uagaagugggccaggacag

SEQ ID NO: 2118211 - RNA, 14 nt, Human
uagaauguuuuccu

SEQ ID NO: 2118212 - RNA, 13 nt, Human
uagaaucugugua

SEQ ID NO: 2118213 - RNA, 19 nt, Human
uagcugggacuacaggcac

SEQ ID NO: 2118214 - RNA, 17 nt, Human
uagcugggacuacaggc

SEQ ID NO: 2118215 - RNA, 15 nt, Human
uagcugggacuacag

SEQ ID NO: 2118216 - RNA, 14 nt, Human
uagcugccaagccc

SEQ ID NO: 2118217 - RNA, 16 nt, Human
uagcugccaagcccca

SEQ ID NO: 2118218 - RNA, 20 nt, Human
uagcugccaagccccauccu

SEQ ID NO: 2118219 - RNA, 21 nt, Human
uagcugccaagccccauccug

SEQ ID NO: 2118220 - RNA, 12 nt, Human
uagcugccaagu

SEQ ID NO: 2118221 - RNA, 12 nt, Human
uagcugggacua

SEQ ID NO: 2118222 - RNA, 12 nt, Human
uagcucaguuua

SEQ ID NO: 2118223 - RNA, 23 nt, Human
uagcugacccagccccuugagaa

SEQ ID NO: 2118224 - RNA, 21 nt, Human
uagcugacccagccccuugag

SEQ ID NO: 2118225 - RNA, 11 nt, Human
uagcugcagaa

SEQ ID NO: 2118226 - RNA, 12 nt, Human
uagcugcagaac

SEQ ID NO: 2118227 - RNA, 11 nt, Human
uagcugagugu

SEQ ID NO: 2118228 - RNA, 21 nt, Human
uagcucaggugucccugcacu

SEQ ID NO: 2118229 - RNA, 20 nt, Human
uagcucaggugucccugcac

SEQ ID NO: 2118230 - RNA, 11 nt, Human
uagcucaguuu

SEQ ID NO: 2118231 - RNA, 18 nt, Human
uagccugugccucuggga

SEQ ID NO: 2118232 - RNA, 20 nt, Human
uagccugugccucugggacu

SEQ ID NO: 2118233 - RNA, 14 nt, Human
uagccuggcuuggg

SEQ ID NO: 2118234 - RNA, 19 nt, Human
uagccggagugacagagua

SEQ ID NO: 2118235 - RNA, 16 nt, Human
uagccuaggugacaga

SEQ ID NO: 2118236 - RNA, 19 nt, Human
uagccgagagccugcuccc

SEQ ID NO: 2118237 - RNA, 19 nt, Human
uagccgggcaugguggcgc

SEQ ID NO: 2118238 - RNA, 17 nt, Human
uagccgagagccugcuc

SEQ ID NO: 2118239 - RNA, 18 nt, Human
uagccgagagccugcucc

SEQ ID NO: 2118240 - RNA, 16 nt, Human
uagccgaccucagccu

SEQ ID NO: 2118241 - RNA, 17 nt, Human
uagccgaccucagccuu

SEQ ID NO: 2118242 - RNA, 14 nt, Human
uagccgagagccug

SEQ ID NO: 2118243 - RNA, 15 nt, Human
uagccgagagccugc

SEQ ID NO: 2118244 - RNA, 19 nt, Human
uagcccccaggcugcugga

SEQ ID NO: 2118245 - RNA, 18 nt, Human
uagcccccaggcugcugg

SEQ ID NO: 2118246 - RNA, 21 nt, Human
uagcaugacaagccccaggca

SEQ ID NO: 2118247 - RNA, 22 nt, Human
uagcaugacaagccccaggcag

SEQ ID NO: 2118248 - RNA, 14 nt, Human
uagcaugcacaaag

SEQ ID NO: 2118249 - RNA, 17 nt, Human
uagcaugcacaaagugu

SEQ ID NO: 2118250 - RNA, 18 nt, Human
uagcaugcacaaagugua

SEQ ID NO: 2118251 - RNA, 19 nt, Human
uagcaugcacaaaguguau

SEQ ID NO: 2118252 - RNA, 16 nt, Human
uagcaugaagacagag

SEQ ID NO: 2118253 - RNA, 16 nt, Human
uagcaugacaagcccc

SEQ ID NO: 2118254 - RNA, 17 nt, Human
uagcaugacaagcccca

SEQ ID NO: 2118255 - RNA, 18 nt, Human
uagcaugacaagccccag

SEQ ID NO: 2118256 - RNA, 20 nt, Human
uagcaugacaagccccaggc

SEQ ID NO: 2118257 - RNA, 11 nt, Human
uagauagaaau

SEQ ID NO: 2118258 - RNA, 12 nt, Human
uagauagaaaua

SEQ ID NO: 2118259 - RNA, 21 nt, Human
uagauagaaauaaauagcuau

SEQ ID NO: 2118260 - RNA, 23 nt, Human
uagauagaaauaaauagcuauau

SEQ ID NO: 2118261 - RNA, 21 nt, Human
uagauuacccccucauuguuu

SEQ ID NO: 2118262 - RNA, 13 nt, Human
uagauuucugauu

SEQ ID NO: 2118263 - RNA, 14 nt, Human
uagauuucugauuu

SEQ ID NO: 2118264 - RNA, 17 nt, Human
uagauuucugauuuuau

SEQ ID NO: 2118265 - RNA, 18 nt, Human
uagauuucugauuuuaug

SEQ ID NO: 2118266 - RNA, 16 nt, Human
uagauuuuaaucaaau

SEQ ID NO: 2118267 - RNA, 13 nt, Human
uagauuuguuuug

SEQ ID NO: 2118268 - RNA, 14 nt, Human
uagauuuguuuugu

SEQ ID NO: 2118269 - RNA, 15 nt, Human
uagauuuguuuugug

SEQ ID NO: 2118270 - RNA, 19 nt, Human
uagauuuguuuuguguugu

SEQ ID NO: 2118271 - RNA, 18 nt, Human
uagauuauauugagacaa

SEQ ID NO: 2118272 - RNA, 21 nt, Human
uagauuauauugagacaaaaa

SEQ ID NO: 2118273 - RNA, 22 nt, Human
uagauuauauugagacaaaaau

SEQ ID NO: 2118274 - RNA, 20 nt, Human
uagauuagaucuuuuaagcc

SEQ ID NO: 2118275 - RNA, 12 nt, Human
uagauucaccug

SEQ ID NO: 2118276 - RNA, 13 nt, Human
uagauucaccugu

SEQ ID NO: 2118277 - RNA, 15 nt, Human
uagauucaccuguaa

SEQ ID NO: 2118278 - RNA, 16 nt, Human
uagauucaccuguaaa

SEQ ID NO: 2118279 - RNA, 17 nt, Human
uagauucaccuguaaaa

SEQ ID NO: 2118280 - RNA, 20 nt, Human
uagauucaccuguaaaacuu

SEQ ID NO: 2118281 - RNA, 21 nt, Human
uagauucaccuguaaaacuuu

SEQ ID NO: 2118282 - RNA, 22 nt, Human
uagauucaccuguaaaacuuua

SEQ ID NO: 2118283 - RNA, 14 nt, Human
uagcagcuaucucu

SEQ ID NO: 2118284 - RNA, 11 nt, Human
uagcagggaaa

SEQ ID NO: 2118285 - RNA, 17 nt, Human
uagauuuuaaucaaauu

SEQ ID NO: 2118286 - RNA, 18 nt, Human
uagauuuuaaucaaauuu

SEQ ID NO: 2118287 - RNA, 22 nt, Human
uagcaggacugaauugucccca

SEQ ID NO: 2118288 - RNA, 17 nt, Human
uaccucugauaccucaa

SEQ ID NO: 2118289 - RNA, 15 nt, Human
uaccucugauaccuc

SEQ ID NO: 2118290 - RNA, 14 nt, Human
uaccucugauaccu

SEQ ID NO: 2118291 - RNA, 23 nt, Human
uaccucucuuauagaauauuuau

SEQ ID NO: 2118292 - RNA, 21 nt, Human
uaccucucuuauagaauauuu

SEQ ID NO: 2118293 - RNA, 17 nt, Human
uaccucucuuauagaau

SEQ ID NO: 2118294 - RNA, 18 nt, Human
uaccucggugccuuccuc

SEQ ID NO: 2118295 - RNA, 11 nt, Human
uaccuccugcc

SEQ ID NO: 2118296 - RNA, 13 nt, Human
uaccuccugccca

SEQ ID NO: 2118297 - RNA, 15 nt, Human
uaccuccugcccagg

SEQ ID NO: 2118298 - RNA, 16 nt, Human
uaccuccugcccagga

SEQ ID NO: 2118299 - RNA, 11 nt, Human
uaccuccuccu

SEQ ID NO: 2118300 - RNA, 14 nt, Human
uaccuuuucucuuc

SEQ ID NO: 2118301 - RNA, 15 nt, Human
uaccuuuucucuuca

SEQ ID NO: 2118302 - RNA, 15 nt, Human
uaccuucagauccua

SEQ ID NO: 2118303 - RNA, 17 nt, Human
uaccuucagauccuacc

SEQ ID NO: 2118304 - RNA, 18 nt, Human
uaccuucagauccuaccc

SEQ ID NO: 2118305 - RNA, 14 nt, Human
uaccuucaaagcug

SEQ ID NO: 2118306 - RNA, 15 nt, Human
uaccuucaaagcuga

SEQ ID NO: 2118307 - RNA, 13 nt, Human
uaccuucaauaaa

SEQ ID NO: 2118308 - RNA, 14 nt, Human
uaccuucaauaaag

SEQ ID NO: 2118309 - RNA, 16 nt, Human
uaccuucaauaaagua

SEQ ID NO: 2118310 - RNA, 17 nt, Human
uaccuucaauaaaguau

SEQ ID NO: 2118311 - RNA, 20 nt, Human
uaccuucaauaaaguaucua

SEQ ID NO: 2118312 - RNA, 14 nt, Human
uacuaaggaaucuu

SEQ ID NO: 2118313 - RNA, 15 nt, Human
uacuaagaaaagaua

SEQ ID NO: 2118314 - RNA, 15 nt, Human
uaccuacauacaauu

SEQ ID NO: 2118315 - RNA, 17 nt, Human
uaccuaauuagagcaga

SEQ ID NO: 2118316 - RNA, 20 nt, Human
uaccuaauuagagcagauga

SEQ ID NO: 2118317 - RNA, 15 nt, Human
uaccuaauuagagca

SEQ ID NO: 2118318 - RNA, 13 nt, Human
uaccuagauuuac

SEQ ID NO: 2118319 - RNA, 20 nt, Human
uaccuaccacagugucugua

SEQ ID NO: 2118320 - RNA, 16 nt, Human
uaccuaccacaguguc

SEQ ID NO: 2118321 - RNA, 17 nt, Human
uaccuaccacagugucu

SEQ ID NO: 2118322 - RNA, 18 nt, Human
uaccuaccacagugucug

SEQ ID NO: 2118323 - RNA, 22 nt, Human
uaccucaacccccauuucuauu

SEQ ID NO: 2118324 - RNA, 17 nt, Human
uaccucaaccuauggua

SEQ ID NO: 2118325 - RNA, 16 nt, Human
uaccucaaccuguaaa

SEQ ID NO: 2118326 - RNA, 17 nt, Human
uaccucaaccuguaaau

SEQ ID NO: 2118327 - RNA, 19 nt, Human
uaccucaaccuguaaauua

SEQ ID NO: 2118328 - RNA, 22 nt, Human
uaccucaaccuguaaauuauuu

SEQ ID NO: 2118329 - RNA, 16 nt, Human
uaccuagauuuacagc

SEQ ID NO: 2118330 - RNA, 11 nt, Human
uaccucagccu

SEQ ID NO: 2118331 - RNA, 15 nt, Human
uaccucacugggguc

SEQ ID NO: 2118332 - RNA, 16 nt, Human
uaccucagccuagacc

SEQ ID NO: 2118333 - RNA, 12 nt, Human
uaccucagccua

SEQ ID NO: 2118334 - RNA, 14 nt, Human
uaccucagccuaga

SEQ ID NO: 2118335 - RNA, 13 nt, Human
uaccucccaccuu

SEQ ID NO: 2118336 - RNA, 16 nt, Human
uaccucccaccuuugg

SEQ ID NO: 2118337 - RNA, 14 nt, Human
uaccucaggcagga

SEQ ID NO: 2118338 - RNA, 15 nt, Human
uaccucaggcaggaa

SEQ ID NO: 2118339 - RNA, 21 nt, Human
uaccgagucucuucuccacug

SEQ ID NO: 2118340 - RNA, 18 nt, Human
uaccgagucucuucucca

SEQ ID NO: 2118341 - RNA, 17 nt, Human
uaccgagucucuucucc

SEQ ID NO: 2118342 - RNA, 13 nt, Human
uacccagcccauc

SEQ ID NO: 2118343 - RNA, 14 nt, Human
uacccagcccaucu

SEQ ID NO: 2118344 - RNA, 15 nt, Human
uacccagcccaucuu

SEQ ID NO: 2118345 - RNA, 16 nt, Human
uacccagcccaucuug

SEQ ID NO: 2118346 - RNA, 22 nt, Human
uacccagcccaucuugccucca

SEQ ID NO: 2118347 - RNA, 22 nt, Human
uaccgagucucuucuccacugg

SEQ ID NO: 2118348 - RNA, 19 nt, Human
uaccuaaaaggaaaucuca

SEQ ID NO: 2118349 - RNA, 22 nt, Human
uaccuaaaaggaaaucucaccc

SEQ ID NO: 2118350 - RNA, 23 nt, Human
uaccuaaaaggaaaucucacccc

SEQ ID NO: 2118351 - RNA, 21 nt, Human
uacccacuucuaaauagcaau

SEQ ID NO: 2118352 - RNA, 18 nt, Human
uacccagaaugucagauu

SEQ ID NO: 2118353 - RNA, 22 nt, Human
uacccagaaugucagauuccuu

SEQ ID NO: 2118354 - RNA, 15 nt, Human
uacccacugcucugg

SEQ ID NO: 2118355 - RNA, 16 nt, Human
uacauggccaguguga

SEQ ID NO: 2118356 - RNA, 13 nt, Human
uacucuaauucua

SEQ ID NO: 2118357 - RNA, 14 nt, Human
uacucuaauucuaa

SEQ ID NO: 2118358 - RNA, 15 nt, Human
uacucuaauucuaac

SEQ ID NO: 2118359 - RNA, 16 nt, Human
uacucuaauucuaacc

SEQ ID NO: 2118360 - RNA, 21 nt, Human
uacucuaauucuaaccagagc

SEQ ID NO: 2118361 - RNA, 16 nt, Human
uacucuacccucuuag

SEQ ID NO: 2118362 - RNA, 22 nt, Human
uacugcagccuuugccuccccg

SEQ ID NO: 2118363 - RNA, 11 nt, Human
uacugccaaag

SEQ ID NO: 2118364 - RNA, 17 nt, Human
uacugcagccuccagag

SEQ ID NO: 2118365 - RNA, 20 nt, Human
uacugcagccuuugccuccc

SEQ ID NO: 2118366 - RNA, 12 nt, Human
uacugcagccuc

SEQ ID NO: 2118367 - RNA, 22 nt, Human
uacugcccaggccugccuguuc

SEQ ID NO: 2118368 - RNA, 21 nt, Human
uacugcccaggccugccuguu

SEQ ID NO: 2118369 - RNA, 20 nt, Human
uacugcccaggccugccugu

SEQ ID NO: 2118370 - RNA, 19 nt, Human
uacugcccaggccugccug

SEQ ID NO: 2118371 - RNA, 21 nt, Human
uacugccucuacaguuaauag

SEQ ID NO: 2118372 - RNA, 22 nt, Human
uacugcccggggcagcugccag

SEQ ID NO: 2118373 - RNA, 19 nt, Human
uacugcccggggcagcugc

SEQ ID NO: 2118374 - RNA, 10 nt, Human
uacuccccuu

SEQ ID NO: 2118375 - RNA, 22 nt, Human
uacucccucaaagcacacguca

SEQ ID NO: 2118376 - RNA, 15 nt, Human
uacuccccuugagcu

SEQ ID NO: 2118377 - RNA, 16 nt, Human
uacuccccuugagcug

SEQ ID NO: 2118378 - RNA, 12 nt, Human
uacuccucccag

SEQ ID NO: 2118379 - RNA, 14 nt, Human
uacuccuaccucag

SEQ ID NO: 2118380 - RNA, 15 nt, Human
uacuccuaccucagc

SEQ ID NO: 2118381 - RNA, 16 nt, Human
uacuccuaccucagcc

SEQ ID NO: 2118382 - RNA, 17 nt, Human
uacuccuaccucagccu

SEQ ID NO: 2118383 - RNA, 14 nt, Human
uacucauucaggga

SEQ ID NO: 2118384 - RNA, 18 nt, Human
uacuacaguucuuuuguu

SEQ ID NO: 2118385 - RNA, 21 nt, Human
uacuacaguuguuuuuugaaa

SEQ ID NO: 2118386 - RNA, 23 nt, Human
uacuacaguuguuuuuugaaaac

SEQ ID NO: 2118387 - RNA, 15 nt, Human
uacuaauuaacauau

SEQ ID NO: 2118388 - RNA, 19 nt, Human
uacuaauuaacauauaaua

SEQ ID NO: 2118389 - RNA, 23 nt, Human
uacuaauuaacauauaauauaug

SEQ ID NO: 2118390 - RNA, 16 nt, Human
uacuacaaaaaaguug

SEQ ID NO: 2118391 - RNA, 16 nt, Human
uacuaaugauguuuuc

SEQ ID NO: 2118392 - RNA, 13 nt, Human
uacuaaugauguu

SEQ ID NO: 2118393 - RNA, 14 nt, Human
uacuaaugauguuu

SEQ ID NO: 2118394 - RNA, 15 nt, Human
uacuaaugauguuuu

SEQ ID NO: 2118395 - RNA, 13 nt, Human
uacuuguggacac

SEQ ID NO: 2118396 - RNA, 15 nt, Human
uacugcuuuuaacuu

SEQ ID NO: 2118397 - RNA, 17 nt, Human
uacuuaaaugaaagcau

SEQ ID NO: 2118398 - RNA, 18 nt, Human
uacuuaaaugaaagcaug

SEQ ID NO: 2118399 - RNA, 13 nt, Human
uacuuaauaaauu

SEQ ID NO: 2118400 - RNA, 22 nt, Human
uacugcuucuaccaacuggaag

SEQ ID NO: 2118401 - RNA, 23 nt, Human
uacugcuucuaccaacuggaagc

SEQ ID NO: 2118402 - RNA, 16 nt, Human
uacuguccuacccacc

SEQ ID NO: 2118403 - RNA, 16 nt, Human
uacuguggaaaaauau

SEQ ID NO: 2118404 - RNA, 19 nt, Human
uacuguggaaaaauauuua

SEQ ID NO: 2118405 - RNA, 20 nt, Human
uacuguggaaaaauauuuaa

SEQ ID NO: 2118406 - RNA, 12 nt, Human
uacugucuuaau

SEQ ID NO: 2118407 - RNA, 13 nt, Human
uacugucuuaauu

SEQ ID NO: 2118408 - RNA, 14 nt, Human
uacugucuuaauua

SEQ ID NO: 2118409 - RNA, 15 nt, Human
uacugucuuaauuaa

SEQ ID NO: 2118410 - RNA, 19 nt, Human
uacugucuuaauuaaguaa

SEQ ID NO: 2118411 - RNA, 20 nt, Human
uacugucuuaauuaaguaaa

SEQ ID NO: 2118412 - RNA, 21 nt, Human
uacugucuucaguaagccgug

SEQ ID NO: 2118413 - RNA, 11 nt, Human
uacugucaaua

SEQ ID NO: 2118414 - RNA, 13 nt, Human
uacugucaauaaa

SEQ ID NO: 2118415 - RNA, 14 nt, Human
uacugucaauaaac

SEQ ID NO: 2118416 - RNA, 15 nt, Human
uacugucaauaaaca

SEQ ID NO: 2118417 - RNA, 16 nt, Human
uacugucaauaaacag

SEQ ID NO: 2118418 - RNA, 22 nt, Human
uacuguguuccuggcaauagug

SEQ ID NO: 2118419 - RNA, 12 nt, Human
uacuguguuccu

SEQ ID NO: 2118420 - RNA, 13 nt, Human
uacuguguuccug

SEQ ID NO: 2118421 - RNA, 14 nt, Human
uacuguguuccugg

SEQ ID NO: 2118422 - RNA, 16 nt, Human
uacuguguuccuggca

SEQ ID NO: 2118423 - RNA, 19 nt, Human
uacuguguuccuggcaaua

SEQ ID NO: 2118424 - RNA, 17 nt, Human
uacacugaauauuuaua

SEQ ID NO: 2118425 - RNA, 18 nt, Human
uacacugaauauuuauau

SEQ ID NO: 2118426 - RNA, 20 nt, Human
uacacugaaguuaacagaga

SEQ ID NO: 2118427 - RNA, 12 nt, Human
uacacucuuaua

SEQ ID NO: 2118428 - RNA, 13 nt, Human
uacacucuuauag

SEQ ID NO: 2118429 - RNA, 21 nt, Human
uacacucucaaagcaaauaau

SEQ ID NO: 2118430 - RNA, 13 nt, Human
uacacucuccugg

SEQ ID NO: 2118431 - RNA, 14 nt, Human
uacacucuccuggg

SEQ ID NO: 2118432 - RNA, 15 nt, Human
uacacucuccugggc

SEQ ID NO: 2118433 - RNA, 17 nt, Human
uacacucuccugggccc

SEQ ID NO: 2118434 - RNA, 18 nt, Human
uacacucuccugggcccc

SEQ ID NO: 2118435 - RNA, 22 nt, Human
uacacucuccugggccccuccc

SEQ ID NO: 2118436 - RNA, 18 nt, Human
uacacauucaauaagcau

SEQ ID NO: 2118437 - RNA, 17 nt, Human
uacacacguuuguuucu

SEQ ID NO: 2118438 - RNA, 14 nt, Human
uacacaucuuccac

SEQ ID NO: 2118439 - RNA, 11 nt, Human
uacacaguugc

SEQ ID NO: 2118440 - RNA, 23 nt, Human
uacacauagcauguaaugguauc

SEQ ID NO: 2118441 - RNA, 16 nt, Human
uacacacacaaagaga

SEQ ID NO: 2118442 - RNA, 17 nt, Human
uacacacacaaagagag

SEQ ID NO: 2118443 - RNA, 19 nt, Human
uacacacacaaagagaguu

SEQ ID NO: 2118444 - RNA, 11 nt, Human
uacacacacac

SEQ ID NO: 2118445 - RNA, 21 nt, Human
uacaauuguaaaacugaggca

SEQ ID NO: 2118446 - RNA, 17 nt, Human
uacaauuguaaaacuga

SEQ ID NO: 2118447 - RNA, 14 nt, Human
uacaauugaacuua

SEQ ID NO: 2118448 - RNA, 20 nt, Human
uacaauugaacuuaaauaaa

SEQ ID NO: 2118449 - RNA, 17 nt, Human
uacaagaaaaaaugaau

SEQ ID NO: 2118450 - RNA, 14 nt, Human
uacaacuucaagug

SEQ ID NO: 2118451 - RNA, 18 nt, Human
uacaacuuaaauaauaaa

SEQ ID NO: 2118452 - RNA, 19 nt, Human
uacaaauugcuugaaagaa

SEQ ID NO: 2118453 - RNA, 16 nt, Human
uacaaauugcuugaaa

SEQ ID NO: 2118454 - RNA, 16 nt, Human
uacaaauuuguuauuu

SEQ ID NO: 2118455 - RNA, 21 nt, Human
uaauucuaaggaauaugagcu

SEQ ID NO: 2118456 - RNA, 16 nt, Human
uaauuagguuaacuau

SEQ ID NO: 2118457 - RNA, 17 nt, Human
uaauuagguuaacuaug

SEQ ID NO: 2118458 - RNA, 22 nt, Human
uaauuagguuaacuauguacaa

SEQ ID NO: 2118459 - RNA, 13 nt, Human
uaauucuaaccag

SEQ ID NO: 2118460 - RNA, 16 nt, Human
uaauucuaaccagagc

SEQ ID NO: 2118461 - RNA, 17 nt, Human
uaauucuaaccagagca

SEQ ID NO: 2118462 - RNA, 19 nt, Human
uaauucuaaccagagcaag

SEQ ID NO: 2118463 - RNA, 22 nt, Human
uaauucuaaccagagcaagcuu

SEQ ID NO: 2118464 - RNA, 23 nt, Human
uaauucuaaccagagcaagcuuu

SEQ ID NO: 2118465 - RNA, 13 nt, Human
uaauucuaaggaa

SEQ ID NO: 2118466 - RNA, 18 nt, Human
uaauuagggguugcuaag

SEQ ID NO: 2118467 - RNA, 17 nt, Human
uaauuagggguugcuaa

SEQ ID NO: 2118468 - RNA, 13 nt, Human
uaauuagguuaac

SEQ ID NO: 2118469 - RNA, 13 nt, Human
uaauuuuuaaagu

SEQ ID NO: 2118470 - RNA, 16 nt, Human
uaauuuuuacagaauu

SEQ ID NO: 2118471 - RNA, 17 nt, Human
uaauuuuuacagaauug

SEQ ID NO: 2118472 - RNA, 12 nt, Human
uacaaacauauu

SEQ ID NO: 2118473 - RNA, 15 nt, Human
uacaaacauauuugu

SEQ ID NO: 2118474 - RNA, 22 nt, Human
uaauuuuuacagaauugcuugu

SEQ ID NO: 2118475 - RNA, 13 nt, Human
uacaaaggaaaaa

SEQ ID NO: 2118476 - RNA, 14 nt, Human
uacaaaggaaaaag

SEQ ID NO: 2118477 - RNA, 18 nt, Human
uacaaaggcuuauuaauu

SEQ ID NO: 2118478 - RNA, 17 nt, Human
uacaaacaugugguuaa

SEQ ID NO: 2118479 - RNA, 11 nt, Human
uacaaacugca

SEQ ID NO: 2118480 - RNA, 12 nt, Human
uacaaacugcaa

SEQ ID NO: 2118481 - RNA, 13 nt, Human
uacaaacugcaau

SEQ ID NO: 2118482 - RNA, 14 nt, Human
uacaaacugcaaua

SEQ ID NO: 2118483 - RNA, 17 nt, Human
uacaaacugcaauagag

SEQ ID NO: 2118484 - RNA, 22 nt, Human
uacaaacugcaauagagacugu

SEQ ID NO: 2118485 - RNA, 14 nt, Human
uacaaaguagaagu

SEQ ID NO: 2118486 - RNA, 18 nt, Human
uacaaaguagaagucuua

SEQ ID NO: 2118487 - RNA, 23 nt, Human
uacaaauacucuuaggaagagaa

SEQ ID NO: 2118488 - RNA, 19 nt, Human
uacaaauacucuuaggaag

SEQ ID NO: 2118489 - RNA, 17 nt, Human
uacaaauacucuuagga

SEQ ID NO: 2118490 - RNA, 12 nt, Human
uacaaauacucu

SEQ ID NO: 2118491 - RNA, 17 nt, Human
uacaaaguguauuuuau

SEQ ID NO: 2118492 - RNA, 20 nt, Human
uacaaaguguauuuuauaaa

SEQ ID NO: 2118493 - RNA, 23 nt, Human
uacaaaguguauuuuauaaaauu

SEQ ID NO: 2118494 - RNA, 15 nt, Human
uacaggagugagcac

SEQ ID NO: 2118495 - RNA, 20 nt, Human
uacaguuguuuuuugaaaac

SEQ ID NO: 2118496 - RNA, 20 nt, Human
uacaguugaaaaacagcuga

SEQ ID NO: 2118497 - RNA, 21 nt, Human
uacaguugggaaaauaugucc

SEQ ID NO: 2118498 - RNA, 17 nt, Human
uacaguugaaaaacagc

SEQ ID NO: 2118499 - RNA, 19 nt, Human
uacaguugaaaaacagcug

SEQ ID NO: 2118500 - RNA, 18 nt, Human
uacagcuaaucagcauuc

SEQ ID NO: 2118501 - RNA, 16 nt, Human
uacagcuaaucagcau

SEQ ID NO: 2118502 - RNA, 16 nt, Human
uacacuuacacuuuau

SEQ ID NO: 2118503 - RNA, 16 nt, Human
uacacuguuagaacac

SEQ ID NO: 2118504 - RNA, 17 nt, Human
uacacuguuagaacacu

SEQ ID NO: 2118505 - RNA, 18 nt, Human
uacacuguuagaacacua

SEQ ID NO: 2118506 - RNA, 19 nt, Human
uacacuguuagaacacuau

SEQ ID NO: 2118507 - RNA, 20 nt, Human
uacacuguuagaacacuauu

SEQ ID NO: 2118508 - RNA, 21 nt, Human
uacacuguuagaacacuauuu

SEQ ID NO: 2118509 - RNA, 23 nt, Human
uacacuguuagaacacuauuuuc

SEQ ID NO: 2118510 - RNA, 13 nt, Human
uacagcugccugc

SEQ ID NO: 2118511 - RNA, 14 nt, Human
uacagcugccugca

SEQ ID NO: 2118512 - RNA, 18 nt, Human
uacaggaagguagaaaua

SEQ ID NO: 2118513 - RNA, 13 nt, Human
uacauaaaggugg

SEQ ID NO: 2118514 - RNA, 19 nt, Human
uacauaacaggguaaauua

SEQ ID NO: 2118515 - RNA, 23 nt, Human
uacauaacaggguaaauuauuca

SEQ ID NO: 2118516 - RNA, 21 nt, Human
uacauaaaggugguaugugug

SEQ ID NO: 2118517 - RNA, 14 nt, Human
uacaguuuuaaaga

SEQ ID NO: 2118518 - RNA, 16 nt, Human
uacaguuuuaaagaau

SEQ ID NO: 2118519 - RNA, 14 nt, Human
uacaguuuuccuaa

SEQ ID NO: 2118520 - RNA, 15 nt, Human
uacaguuuuccuaaa

SEQ ID NO: 2118521 - RNA, 19 nt, Human
uacaguuuuccuaaaugua

SEQ ID NO: 2118522 - RNA, 22 nt, Human
uacaguuuuccuaaauguauac

SEQ ID NO: 2118523 - RNA, 20 nt, Human
uacaucuuucacauuggcua

SEQ ID NO: 2118524 - RNA, 16 nt, Human
uacauaagauaaaugu

SEQ ID NO: 2118525 - RNA, 17 nt, Human
uacauaagauaaaugug

SEQ ID NO: 2118526 - RNA, 22 nt, Human
uacaugcagcccaugcccaccu

SEQ ID NO: 2118527 - RNA, 14 nt, Human
uacaugcagcccau

SEQ ID NO: 2118528 - RNA, 17 nt, Human
uacaugcagcccaugcc

SEQ ID NO: 2118529 - RNA, 21 nt, Human
uacaugcauacacucucaaag

SEQ ID NO: 2118530 - RNA, 20 nt, Human
uacaugcauacacucucaaa

SEQ ID NO: 2118531 - RNA, 14 nt, Human
uacaugcauacacu

SEQ ID NO: 2118532 - RNA, 14 nt, Human
uacaugcauuugag

SEQ ID NO: 2118533 - RNA, 14 nt, Human
uacauggaauaaca

SEQ ID NO: 2118534 - RNA, 18 nt, Human
uacauggaauaacaugua

SEQ ID NO: 2118535 - RNA, 19 nt, Human
uacauggaauaacauguaa

SEQ ID NO: 2118536 - RNA, 22 nt, Human
uacauggaauaacauguaauua

SEQ ID NO: 2118537 - RNA, 23 nt, Human
ugaaucacguaaagcuagaaaug

SEQ ID NO: 2118538 - RNA, 16 nt, Human
ugaaucagacccuacc

SEQ ID NO: 2118539 - RNA, 18 nt, Human
ugaaucagacccuacccc

SEQ ID NO: 2118540 - RNA, 21 nt, Human
ugaaucagacccuaccccacc

SEQ ID NO: 2118541 - RNA, 22 nt, Human
ugaaucagacccuaccccacca

SEQ ID NO: 2118542 - RNA, 19 nt, Human
ugaaucaugguuuuucuua

SEQ ID NO: 2118543 - RNA, 15 nt, Human
ugaauccuaagggcu

SEQ ID NO: 2118544 - RNA, 22 nt, Human
ugaauccuaagggcuggucucu

SEQ ID NO: 2118545 - RNA, 17 nt, Human
ugaaucacguaaagcua

SEQ ID NO: 2118546 - RNA, 19 nt, Human
ugaaggcuuucagggccuc

SEQ ID NO: 2118547 - RNA, 15 nt, Human
ugaaguuucauuuau

SEQ ID NO: 2118548 - RNA, 21 nt, Human
ugaaguuucauuuaugauaca

SEQ ID NO: 2118549 - RNA, 17 nt, Human
ugaaguuuacaaucaaa

SEQ ID NO: 2118550 - RNA, 14 nt, Human
ugaaguuuauacag

SEQ ID NO: 2118551 - RNA, 16 nt, Human
ugaaguuuauacagua

SEQ ID NO: 2118552 - RNA, 19 nt, Human
ugaaguuuauacaguacag

SEQ ID NO: 2118553 - RNA, 20 nt, Human
ugaaguuuauacaguacagu

SEQ ID NO: 2118554 - RNA, 14 nt, Human
ugaaugcauaaaau

SEQ ID NO: 2118555 - RNA, 23 nt, Human
ugaaugaugauccuaggcauuug

SEQ ID NO: 2118556 - RNA, 19 nt, Human
ugaaugauuuccaaagaga

SEQ ID NO: 2118557 - RNA, 19 nt, Human
ugaaugcacacuagccucu

SEQ ID NO: 2118558 - RNA, 16 nt, Human
ugaaucuuggugucua

SEQ ID NO: 2118559 - RNA, 22 nt, Human
ugaaucugcauuuucuggguuc

SEQ ID NO: 2118560 - RNA, 14 nt, Human
ugaaucucaauuug

SEQ ID NO: 2118561 - RNA, 15 nt, Human
ugaaucucaauuuga

SEQ ID NO: 2118562 - RNA, 12 nt, Human
ugaaucuauugg

SEQ ID NO: 2118563 - RNA, 18 nt, Human
ugaacuucagcuagagcu

SEQ ID NO: 2118564 - RNA, 20 nt, Human
ugaagacucauucuucugua

SEQ ID NO: 2118565 - RNA, 19 nt, Human
ugaagacucauucuucugu

SEQ ID NO: 2118566 - RNA, 17 nt, Human
ugaacuuaaauaaaugu

SEQ ID NO: 2118567 - RNA, 22 nt, Human
ugaacuuaaauaaaugucauua

SEQ ID NO: 2118568 - RNA, 23 nt, Human
ugaacuggguacuuguggacaca

SEQ ID NO: 2118569 - RNA, 21 nt, Human
ugaaacaggagagaaagggga

SEQ ID NO: 2118570 - RNA, 20 nt, Human
ugaaacaggagagaaagggg

SEQ ID NO: 2118571 - RNA, 19 nt, Human
ugaaggccgagaagcaaga

SEQ ID NO: 2118572 - RNA, 13 nt, Human
ugaaggaaagauu

SEQ ID NO: 2118573 - RNA, 16 nt, Human
ugaaggaaagauuugu

SEQ ID NO: 2118574 - RNA, 21 nt, Human
ugaaggaaauaaaaaagucuc

SEQ ID NO: 2118575 - RNA, 23 nt, Human
ugaaggaaauaaaaaagucucua

SEQ ID NO: 2118576 - RNA, 16 nt, Human
ugaagagugagagggc

SEQ ID NO: 2118577 - RNA, 17 nt, Human
ugaagagugagagggca

SEQ ID NO: 2118578 - RNA, 18 nt, Human
ugaagagugagagggcau

SEQ ID NO: 2118579 - RNA, 19 nt, Human
ugaagaguggguuucacaa

SEQ ID NO: 2118580 - RNA, 16 nt, Human
ugaagagauccuucug

SEQ ID NO: 2118581 - RNA, 23 nt, Human
ugaagagaccaagacucugaaau

SEQ ID NO: 2118582 - RNA, 20 nt, Human
ugacaagucauuuuaacuuu

SEQ ID NO: 2118583 - RNA, 14 nt, Human
ugacaagucauuuu

SEQ ID NO: 2118584 - RNA, 17 nt, Human
ugacaaggccccagaga

SEQ ID NO: 2118585 - RNA, 18 nt, Human
ugacaaggccccagagac

SEQ ID NO: 2118586 - RNA, 22 nt, Human
ugacaaggccccagagacucag

SEQ ID NO: 2118587 - RNA, 23 nt, Human
ugacaaggauugcuacuguccua

SEQ ID NO: 2118588 - RNA, 13 nt, Human
ugacaaggcccca

SEQ ID NO: 2118589 - RNA, 14 nt, Human
ugacaaggccccag

SEQ ID NO: 2118590 - RNA, 15 nt, Human
ugacaaggccccaga

SEQ ID NO: 2118591 - RNA, 16 nt, Human
ugacaaggccccagag

SEQ ID NO: 2118592 - RNA, 23 nt, Human
ugacaaccaccgcuccccagccc

SEQ ID NO: 2118593 - RNA, 20 nt, Human
ugacaaccaccgcuccccag

SEQ ID NO: 2118594 - RNA, 21 nt, Human
ugacaaccaccgcuccccagc

SEQ ID NO: 2118595 - RNA, 13 nt, Human
ugacagacacagg

SEQ ID NO: 2118596 - RNA, 16 nt, Human
ugacagacacaggccc

SEQ ID NO: 2118597 - RNA, 14 nt, Human
ugacagacacaggc

SEQ ID NO: 2118598 - RNA, 15 nt, Human
ugacacacagcucug

SEQ ID NO: 2118599 - RNA, 14 nt, Human
ugacacacagcucu

SEQ ID NO: 2118600 - RNA, 15 nt, Human
ugaauuguccccagu

SEQ ID NO: 2118601 - RNA, 20 nt, Human
ugaauuaaugacagagccag

SEQ ID NO: 2118602 - RNA, 21 nt, Human
ugaauuaaugacagagccagu

SEQ ID NO: 2118603 - RNA, 11 nt, Human
ugaauuaaauu

SEQ ID NO: 2118604 - RNA, 15 nt, Human
ugaauuaaauuuaau

SEQ ID NO: 2118605 - RNA, 16 nt, Human
ugaauuaaauuaggaa

SEQ ID NO: 2118606 - RNA, 14 nt, Human
ugaaucuugcguuu

SEQ ID NO: 2118607 - RNA, 17 nt, Human
ugaauugugaccaaguu

SEQ ID NO: 2118608 - RNA, 23 nt, Human
ugacaaauguguaucggaugcuu

SEQ ID NO: 2118609 - RNA, 14 nt, Human
ugacaaaucaaguu

SEQ ID NO: 2118610 - RNA, 15 nt, Human
ugacaaaucaaguuu

SEQ ID NO: 2118611 - RNA, 19 nt, Human
ugacaaaucaaguuuccaa

SEQ ID NO: 2118612 - RNA, 20 nt, Human
ugacaaaucaaguuuccaag

SEQ ID NO: 2118613 - RNA, 19 nt, Human
ugacaaccaccgcucccca

SEQ ID NO: 2118614 - RNA, 16 nt, Human
ugacaaccaccgcucc

SEQ ID NO: 2118615 - RNA, 17 nt, Human
ugacauccaagcuuccu

SEQ ID NO: 2118616 - RNA, 17 nt, Human
ugacaucaguggcaugg

SEQ ID NO: 2118617 - RNA, 14 nt, Human
ugacaucagcauca

SEQ ID NO: 2118618 - RNA, 23 nt, Human
ugacaucaguggcauggcuccag

SEQ ID NO: 2118619 - RNA, 13 nt, Human
ugacauccaagcu

SEQ ID NO: 2118620 - RNA, 12 nt, Human
ugacaucucuuu

SEQ ID NO: 2118621 - RNA, 13 nt, Human
ugacaucucuuug

SEQ ID NO: 2118622 - RNA, 14 nt, Human
ugacaucucuuuga

SEQ ID NO: 2118623 - RNA, 15 nt, Human
ugacauauuuuugcu

SEQ ID NO: 2118624 - RNA, 18 nt, Human
ugacagacacaggcccgg

SEQ ID NO: 2118625 - RNA, 17 nt, Human
ugacagacacaggcccg

SEQ ID NO: 2118626 - RNA, 18 nt, Human
ugacagagcaagacucug

SEQ ID NO: 2118627 - RNA, 22 nt, Human
ugacagagcaagugagacccug

SEQ ID NO: 2118628 - RNA, 12 nt, Human
ugacagagccag

SEQ ID NO: 2118629 - RNA, 21 nt, Human
ugacagagcaagacucugucu

SEQ ID NO: 2118630 - RNA, 14 nt, Human
ugacauguggaaag

SEQ ID NO: 2118631 - RNA, 17 nt, Human
ugacauguggaaaguga

SEQ ID NO: 2118632 - RNA, 21 nt, Human
ugacauguggaaagugaauuu

SEQ ID NO: 2118633 - RNA, 22 nt, Human
ugacauguggaaagugaauuug

SEQ ID NO: 2118634 - RNA, 19 nt, Human
ugacaugcgggcugggcag

SEQ ID NO: 2118635 - RNA, 20 nt, Human
ugacaugcgggcugggcagc

SEQ ID NO: 2118636 - RNA, 21 nt, Human
ugacaugcgggcugggcagcu

SEQ ID NO: 2118637 - RNA, 22 nt, Human
ugacaugcgggcugggcagcug

SEQ ID NO: 2118638 - RNA, 16 nt, Human
ugacaucuucaaagcu

SEQ ID NO: 2118639 - RNA, 14 nt, Human
ugacaugaucgcuu

SEQ ID NO: 2118640 - RNA, 15 nt, Human
ugacaugaucgcuuu

SEQ ID NO: 2118641 - RNA, 17 nt, Human
ugacaucuuaguauuug

SEQ ID NO: 2118642 - RNA, 17 nt, Human
ugacaugcgggcugggc

SEQ ID NO: 2118643 - RNA, 18 nt, Human
ugacaugcgggcugggca

SEQ ID NO: 2118644 - RNA, 22 nt, Human
ugaccagccuccaugcugccuc

SEQ ID NO: 2118645 - RNA, 19 nt, Human
ugaccauccacucuacccu

SEQ ID NO: 2118646 - RNA, 22 nt, Human
ugaccauccacucuacccuccc

SEQ ID NO: 2118647 - RNA, 23 nt, Human
ugaccauccacucuacccuccca

SEQ ID NO: 2118648 - RNA, 21 nt, Human
ugaccagccuccaugcugccu

SEQ ID NO: 2118649 - RNA, 22 nt, Human
ugaccagcagaucccagcucac

SEQ ID NO: 2118650 - RNA, 15 nt, Human
ugacaugugucaagc

SEQ ID NO: 2118651 - RNA, 18 nt, Human
ugaccagcacugucucag

SEQ ID NO: 2118652 - RNA, 17 nt, Human
ugaccagcagaucccag

SEQ ID NO: 2118653 - RNA, 18 nt, Human
ugaccagcagaucccagc

SEQ ID NO: 2118654 - RNA, 20 nt, Human
ugaccagcagaucccagcuc

SEQ ID NO: 2118655 - RNA, 21 nt, Human
ugaccagcagaucccagcuca

SEQ ID NO: 2118656 - RNA, 19 nt, Human
ugacucuuggcacagcaug

SEQ ID NO: 2118657 - RNA, 14 nt, Human
ugacucuuggcaca

SEQ ID NO: 2118658 - RNA, 20 nt, Human
ugacucuuguuuucaguuuc

SEQ ID NO: 2118659 - RNA, 15 nt, Human
ugacugccccaacuc

SEQ ID NO: 2118660 - RNA, 16 nt, Human
ugacugccccaacucc

SEQ ID NO: 2118661 - RNA, 17 nt, Human
ugacugccccaacuccu

SEQ ID NO: 2118662 - RNA, 19 nt, Human
ugacugccccaacuccugg

SEQ ID NO: 2118663 - RNA, 20 nt, Human
ugacugccccaacuccugga

SEQ ID NO: 2118664 - RNA, 15 nt, Human
ugacugcugauucuc

SEQ ID NO: 2118665 - RNA, 14 nt, Human
ugacuggaauuuuu

SEQ ID NO: 2118666 - RNA, 19 nt, Human
ugacuggaauuuuuauuau

SEQ ID NO: 2118667 - RNA, 23 nt, Human
ugacuggaauuuuuauuaugcau

SEQ ID NO: 2118668 - RNA, 15 nt, Human
ugacuggcacagucu

SEQ ID NO: 2118669 - RNA, 13 nt, Human
ugacuuucucagc

SEQ ID NO: 2118670 - RNA, 16 nt, Human
ugacuuugcucuuucu

SEQ ID NO: 2118671 - RNA, 21 nt, Human
ugacuggguuucucuguauag

SEQ ID NO: 2118672 - RNA, 13 nt, Human
ugacuuucaggua

SEQ ID NO: 2118673 - RNA, 15 nt, Human
ugacuaaaaaacaaa

SEQ ID NO: 2118674 - RNA, 22 nt, Human
ugacuaaaaaacaaagaagaca

SEQ ID NO: 2118675 - RNA, 14 nt, Human
ugacuaaaaauauu

SEQ ID NO: 2118676 - RNA, 22 nt, Human
ugacuaaaaauauuauaacuua

SEQ ID NO: 2118677 - RNA, 16 nt, Human
ugacuaaagagagaau

SEQ ID NO: 2118678 - RNA, 17 nt, Human
ugacuaaagagagaaug

SEQ ID NO: 2118679 - RNA, 20 nt, Human
ugacuacagacauuaaauaa

SEQ ID NO: 2118680 - RNA, 16 nt, Human
ugagaccucagccaug

SEQ ID NO: 2118681 - RNA, 18 nt, Human
ugagacauuccaaaacga

SEQ ID NO: 2118682 - RNA, 14 nt, Human
ugagaccaaccugg

SEQ ID NO: 2118683 - RNA, 17 nt, Human
ugagaccucagccauga

SEQ ID NO: 2118684 - RNA, 19 nt, Human
ugagaccucagccaugagg

SEQ ID NO: 2118685 - RNA, 14 nt, Human
ugagaggggaacag

SEQ ID NO: 2118686 - RNA, 18 nt, Human
ugagaggggaacagacug

SEQ ID NO: 2118687 - RNA, 17 nt, Human
ugagagggcaugcgcac

SEQ ID NO: 2118688 - RNA, 22 nt, Human
ugagagggcaugcgcacaaggc

SEQ ID NO: 2118689 - RNA, 23 nt, Human
ugagcagacuggugagcagacug

SEQ ID NO: 2118690 - RNA, 22 nt, Human
ugagcagggagauccugguugg

SEQ ID NO: 2118691 - RNA, 15 nt, Human
ugagauagaagaacu

SEQ ID NO: 2118692 - RNA, 16 nt, Human
ugagauagaagaacug

SEQ ID NO: 2118693 - RNA, 19 nt, Human
ugagauagaagaacugcaa

SEQ ID NO: 2118694 - RNA, 21 nt, Human
ugagauagaagaacugcaaag

SEQ ID NO: 2118695 - RNA, 23 nt, Human
ugagauaguagcauacauuuaua

SEQ ID NO: 2118696 - RNA, 19 nt, Human
ugagauaguagcauacauu

SEQ ID NO: 2118697 - RNA, 14 nt, Human
ugagauagaagaug

SEQ ID NO: 2118698 - RNA, 16 nt, Human
ugagauagaagauguu

SEQ ID NO: 2118699 - RNA, 18 nt, Human
ugagauagaagauguuug

SEQ ID NO: 2118700 - RNA, 19 nt, Human
ugagauagaagauguuugc

SEQ ID NO: 2118701 - RNA, 22 nt, Human
ugacuuuucuguccgagcuuug

SEQ ID NO: 2118702 - RNA, 20 nt, Human
ugacuuuuaaggcuaaaacu

SEQ ID NO: 2118703 - RNA, 21 nt, Human
ugagaaaacgaaacugcucua

SEQ ID NO: 2118704 - RNA, 21 nt, Human
ugagaaaacguuuuguuugaa

SEQ ID NO: 2118705 - RNA, 15 nt, Human
ugagaaauaaaguuu

SEQ ID NO: 2118706 - RNA, 23 nt, Human
ugagaaaccuuauuguaccucuc

SEQ ID NO: 2118707 - RNA, 17 nt, Human
ugagcugagaucgugcc

SEQ ID NO: 2118708 - RNA, 14 nt, Human
ugagcugagcaggg

SEQ ID NO: 2118709 - RNA, 19 nt, Human
ugagcugagaucgugccgu

SEQ ID NO: 2118710 - RNA, 13 nt, Human
ugagcugagcagg

SEQ ID NO: 2118711 - RNA, 20 nt, Human
ugagcucagacccccacucu

SEQ ID NO: 2118712 - RNA, 22 nt, Human
ugagcucagacccccacucuca

SEQ ID NO: 2118713 - RNA, 15 nt, Human
ugagcucauguagca

SEQ ID NO: 2118714 - RNA, 12 nt, Human
ugagcuccagac

SEQ ID NO: 2118715 - RNA, 16 nt, Human
ugagcuccagaccccc

SEQ ID NO: 2118716 - RNA, 17 nt, Human
ugagcuccagaccccca

SEQ ID NO: 2118717 - RNA, 13 nt, Human
ugagcuccagacc

SEQ ID NO: 2118718 - RNA, 14 nt, Human
ugagcuccagaccc

SEQ ID NO: 2118719 - RNA, 15 nt, Human
ugagcuccagacccc

SEQ ID NO: 2118720 - RNA, 16 nt, Human
ugagcucagaccccca

SEQ ID NO: 2118721 - RNA, 17 nt, Human
ugagcucagacccccac

SEQ ID NO: 2118722 - RNA, 18 nt, Human
ugagcucagacccccacu

SEQ ID NO: 2118723 - RNA, 19 nt, Human
ugagcucagacccccacuc

SEQ ID NO: 2118724 - RNA, 11 nt, Human
ugagcucagga

SEQ ID NO: 2118725 - RNA, 19 nt, Human
ugagcucaggaguuugaga

SEQ ID NO: 2118726 - RNA, 22 nt, Human
ugagccgagaucacgccacugc

SEQ ID NO: 2118727 - RNA, 23 nt, Human
ugagcagggcucagcggggacag

SEQ ID NO: 2118728 - RNA, 22 nt, Human
ugagcagggcucagcggggaca

SEQ ID NO: 2118729 - RNA, 20 nt, Human
ugagcagggcucagcgggga

SEQ ID NO: 2118730 - RNA, 17 nt, Human
ugagccgcaucuucucc

SEQ ID NO: 2118731 - RNA, 20 nt, Human
ugagccgcaucuucuccauc

SEQ ID NO: 2118732 - RNA, 21 nt, Human
ugagccgcaucuucuccaucu

SEQ ID NO: 2118733 - RNA, 23 nt, Human
ugagccgcaucuucuccaucugg

SEQ ID NO: 2118734 - RNA, 23 nt, Human
ugagccgagaucacgccacugca

SEQ ID NO: 2118735 - RNA, 13 nt, Human
ugaggauuucaag

SEQ ID NO: 2118736 - RNA, 14 nt, Human
ugaggcaagagaau

SEQ ID NO: 2118737 - RNA, 20 nt, Human
ugaggcaauaaaaaucauag

SEQ ID NO: 2118738 - RNA, 20 nt, Human
ugaggcaaccacaggcagca

SEQ ID NO: 2118739 - RNA, 16 nt, Human
ugaggauuucaagccu

SEQ ID NO: 2118740 - RNA, 16 nt, Human
ugaggagugugagaau

SEQ ID NO: 2118741 - RNA, 14 nt, Human
ugaggaguuuccua

SEQ ID NO: 2118742 - RNA, 19 nt, Human
ugaggaguuuccuaaaagu

SEQ ID NO: 2118743 - RNA, 21 nt, Human
ugaggaguuuccuaaaaguuc

SEQ ID NO: 2118744 - RNA, 15 nt, Human
ugaggaucagaaagu

SEQ ID NO: 2118745 - RNA, 16 nt, Human
ugaggaucagaaagua

SEQ ID NO: 2118746 - RNA, 17 nt, Human
ugaggaucagaaaguaa

SEQ ID NO: 2118747 - RNA, 17 nt, Human
ugaggaugucacucaga

SEQ ID NO: 2118748 - RNA, 16 nt, Human
ugaggaugggaaggag

SEQ ID NO: 2118749 - RNA, 20 nt, Human
ugaggaugggaaggagggag

SEQ ID NO: 2118750 - RNA, 18 nt, Human
ugaggaugcagagucagc

SEQ ID NO: 2118751 - RNA, 12 nt, Human
ugaggaugggaa

SEQ ID NO: 2118752 - RNA, 23 nt, Human
ugagcuuaagaauuuugagcagg

SEQ ID NO: 2118753 - RNA, 11 nt, Human
ugagcuguuuu

SEQ ID NO: 2118754 - RNA, 15 nt, Human
ugagcuguguucuug

SEQ ID NO: 2118755 - RNA, 16 nt, Human
ugagcugagcagggag

SEQ ID NO: 2118756 - RNA, 15 nt, Human
ugagcugccauccag

SEQ ID NO: 2118757 - RNA, 20 nt, Human
ugagcugccuguaacuugag

SEQ ID NO: 2118758 - RNA, 15 nt, Human
ugagcuuggccagaa

SEQ ID NO: 2118759 - RNA, 16 nt, Human
ugagcuuggccagaag

SEQ ID NO: 2118760 - RNA, 20 nt, Human
ugagcuuggcagcugaacua

SEQ ID NO: 2118761 - RNA, 13 nt, Human
ugagcuuggccag

SEQ ID NO: 2118762 - RNA, 14 nt, Human
ugagcuuggccaga

SEQ ID NO: 2118763 - RNA, 16 nt, Human
ugagcuucucugugaa

SEQ ID NO: 2118764 - RNA, 19 nt, Human
ugagcuuggcagcugaacu

SEQ ID NO: 2118765 - RNA, 15 nt, Human
ugagcuucucuguga

SEQ ID NO: 2118766 - RNA, 16 nt, Human
ugagcuuagugaaauu

SEQ ID NO: 2118767 - RNA, 15 nt, Human
ugagcuuaucaugcu

SEQ ID NO: 2118768 - RNA, 22 nt, Human
ugagguggucugaauguucuga

SEQ ID NO: 2118769 - RNA, 21 nt, Human
ugagguggucugaauguucug

SEQ ID NO: 2118770 - RNA, 21 nt, Human
ugagguggguuuucuucccau

SEQ ID NO: 2118771 - RNA, 13 nt, Human
ugagguggucuga

SEQ ID NO: 2118772 - RNA, 14 nt, Human
ugagguggucugaa

SEQ ID NO: 2118773 - RNA, 17 nt, Human
ugagguggucugaaugu

SEQ ID NO: 2118774 - RNA, 18 nt, Human
ugagguggucugaauguu

SEQ ID NO: 2118775 - RNA, 19 nt, Human
ugagguggucugaauguuc

SEQ ID NO: 2118776 - RNA, 20 nt, Human
ugagguggucugaauguucu

SEQ ID NO: 2118777 - RNA, 20 nt, Human
ugaggugggcagaucacgag

SEQ ID NO: 2118778 - RNA, 20 nt, Human
ugaggugcagagugcccaga

SEQ ID NO: 2118779 - RNA, 21 nt, Human
ugaggugcagagugcccagaa

SEQ ID NO: 2118780 - RNA, 19 nt, Human
ugaggucagagccugcagu

SEQ ID NO: 2118781 - RNA, 18 nt, Human
ugaggucagagccugcag

SEQ ID NO: 2118782 - RNA, 18 nt, Human
ugaggcugagacugcggg

SEQ ID NO: 2118783 - RNA, 19 nt, Human
ugaggcucuuucugggcca

SEQ ID NO: 2118784 - RNA, 13 nt, Human
ugaggcugagacu

SEQ ID NO: 2118785 - RNA, 17 nt, Human
ugaggugcagagugccc

SEQ ID NO: 2118786 - RNA, 17 nt, Human
ugaggugaaagggagcu

SEQ ID NO: 2118787 - RNA, 18 nt, Human
ugaggugaaagggagcua

SEQ ID NO: 2118788 - RNA, 13 nt, Human
ugaggucccaggc

SEQ ID NO: 2118789 - RNA, 21 nt, Human
ugaggucuuuugacaugugga

SEQ ID NO: 2118790 - RNA, 22 nt, Human
ugaggucuuuugacauguggaa

SEQ ID NO: 2118791 - RNA, 23 nt, Human
ugaggucuuuugacauguggaaa

SEQ ID NO: 2118792 - RNA, 15 nt, Human
ugaggugaaagggag

SEQ ID NO: 2118793 - RNA, 16 nt, Human
ugaggugaaagggagc

SEQ ID NO: 2118794 - RNA, 16 nt, Human
ugaggucaggaguucc

SEQ ID NO: 2118795 - RNA, 18 nt, Human
ugaggucauagcagugcu

SEQ ID NO: 2118796 - RNA, 23 nt, Human
ugaggcggguggaucaccugagg

SEQ ID NO: 2118797 - RNA, 16 nt, Human
ugaggcucuuucuggg

SEQ ID NO: 2118798 - RNA, 17 nt, Human
ugaggcucuuucugggc

SEQ ID NO: 2118799 - RNA, 18 nt, Human
ugaggcucuuucugggcc

SEQ ID NO: 2118800 - RNA, 18 nt, Human
ugaggcagaagaauugaa

SEQ ID NO: 2118801 - RNA, 24 nt, Human
ugaggcagacagcagcucaggcac

SEQ ID NO: 2118802 - RNA, 12 nt, Human
ugaggcaggaga

SEQ ID NO: 2118803 - RNA, 13 nt, Human
ugaggcaggagaa

SEQ ID NO: 2118804 - RNA, 15 nt, Human
ugaggcaggagaauc

SEQ ID NO: 2118805 - RNA, 13 nt, Human
ugaggcagggaag

SEQ ID NO: 2118806 - RNA, 14 nt, Human
ugaggcagggaagu

SEQ ID NO: 2118807 - RNA, 22 nt, Human
ugaggcagggaaguccccaggc

SEQ ID NO: 2118808 - RNA, 15 nt, Human
ugaggcaggggcgga

SEQ ID NO: 2118809 - RNA, 13 nt, Human
ugaggcagaagaa

SEQ ID NO: 2118810 - RNA, 20 nt, Human
ugaggcacaugucagcaagu

SEQ ID NO: 2118811 - RNA, 17 nt, Human
ugaggcacaugucagca

SEQ ID NO: 2118812 - RNA, 16 nt, Human
ugaggcaaugucagga

SEQ ID NO: 2118813 - RNA, 17 nt, Human
ugaggcaaugucaggaa

SEQ ID NO: 2118814 - RNA, 20 nt, Human
ugaggcaaugucaggaacag

SEQ ID NO: 2118815 - RNA, 21 nt, Human
ugaggcaaugucaggaacaga

SEQ ID NO: 2118816 - RNA, 12 nt, Human
ugaggcagacag

SEQ ID NO: 2118817 - RNA, 13 nt, Human
ugaggcagacagc

SEQ ID NO: 2118818 - RNA, 14 nt, Human
ugaggcagacagca

SEQ ID NO: 2118819 - RNA, 15 nt, Human
ugaggcagacagcag

SEQ ID NO: 2118820 - RNA, 16 nt, Human
ugaggcagacagcagc

SEQ ID NO: 2118821 - RNA, 17 nt, Human
ugaggcagacagcagcu

SEQ ID NO: 2118822 - RNA, 20 nt, Human
ugaggcagacagcagcucag

SEQ ID NO: 2118823 - RNA, 23 nt, Human
ugaggcagacagcagcucaggca

SEQ ID NO: 2118824 - RNA, 20 nt, Human
ucugccucacauagcuuaca

SEQ ID NO: 2118825 - RNA, 21 nt, Human
ucugccucaaugugaaucaga

SEQ ID NO: 2118826 - RNA, 15 nt, Human
ucugccuccucuuca

SEQ ID NO: 2118827 - RNA, 18 nt, Human
ucugccucugacacacag

SEQ ID NO: 2118828 - RNA, 15 nt, Human
ucugccucugacaca

SEQ ID NO: 2118829 - RNA, 20 nt, Human
ucugccugaagucacacagu

SEQ ID NO: 2118830 - RNA, 19 nt, Human
ucugccugaagucacacag

SEQ ID NO: 2118831 - RNA, 22 nt, Human
ucugccucugacacacagcucu

SEQ ID NO: 2118832 - RNA, 21 nt, Human
ucugccucugacacacagcuc

SEQ ID NO: 2118833 - RNA, 14 nt, Human
ucugccucugccug

SEQ ID NO: 2118834 - RNA, 16 nt, Human
ucugccucugccugca

SEQ ID NO: 2118835 - RNA, 23 nt, Human
ucugccucugacacacagcucug

SEQ ID NO: 2118836 - RNA, 18 nt, Human
ucugccauauucuguugg

SEQ ID NO: 2118837 - RNA, 23 nt, Human
ucugccauauucuguuggccagu

SEQ ID NO: 2118838 - RNA, 22 nt, Human
ucugccauauucuguuggccag

SEQ ID NO: 2118839 - RNA, 16 nt, Human
ucugccuauugcagcu

SEQ ID NO: 2118840 - RNA, 16 nt, Human
ucugccucaaugugaa

SEQ ID NO: 2118841 - RNA, 18 nt, Human
ucugcccacauuggaccc

SEQ ID NO: 2118842 - RNA, 21 nt, Human
ucugaggaauccagacccggc

SEQ ID NO: 2118843 - RNA, 18 nt, Human
ucugaggaauccagaccc

SEQ ID NO: 2118844 - RNA, 22 nt, Human
ucugaggaauccagacccggcu

SEQ ID NO: 2118845 - RNA, 14 nt, Human
ucugcaaauagaaa

SEQ ID NO: 2118846 - RNA, 16 nt, Human
ucugcaaauagaaaac

SEQ ID NO: 2118847 - RNA, 13 nt, Human
ucugauuucagga

SEQ ID NO: 2118848 - RNA, 20 nt, Human
ucugauuugucccuaugcau

SEQ ID NO: 2118849 - RNA, 17 nt, Human
ucugauuuuauguaaaa

SEQ ID NO: 2118850 - RNA, 21 nt, Human
ucugauuuuauguaaaauuuu

SEQ ID NO: 2118851 - RNA, 22 nt, Human
ucugauuuuauguaaaauuuug

SEQ ID NO: 2118852 - RNA, 22 nt, Human
ucugcaccgccggccagcuggg

SEQ ID NO: 2118853 - RNA, 23 nt, Human
ucugcaccgccggccagcuggga

SEQ ID NO: 2118854 - RNA, 14 nt, Human
ucugcaccuuaucu

SEQ ID NO: 2118855 - RNA, 15 nt, Human
ucugcaccuuaucuu

SEQ ID NO: 2118856 - RNA, 16 nt, Human
ucugcaccuuaucuua

SEQ ID NO: 2118857 - RNA, 20 nt, Human
ucugcaagcacaucugcauu

SEQ ID NO: 2118858 - RNA, 14 nt, Human
ucucauccccaggg

SEQ ID NO: 2118859 - RNA, 22 nt, Human
ucucauccccaggggucccagc

SEQ ID NO: 2118860 - RNA, 15 nt, Human
ucucauccccagggg

SEQ ID NO: 2118861 - RNA, 18 nt, Human
ucugagaggacuuuucuu

SEQ ID NO: 2118862 - RNA, 24 nt, Human
ucugagaucaaaacgguuuuacug

SEQ ID NO: 2118863 - RNA, 15 nt, Human
ucugagccccuggga

SEQ ID NO: 2118864 - RNA, 16 nt, Human
ucugagccccugggac

SEQ ID NO: 2118865 - RNA, 19 nt, Human
ucuggaauuuaaggcccaa

SEQ ID NO: 2118866 - RNA, 18 nt, Human
ucugcugcccuccauccc

SEQ ID NO: 2118867 - RNA, 15 nt, Human
ucuggagaagcagug

SEQ ID NO: 2118868 - RNA, 22 nt, Human
ucuggagaagcagugagccgca

SEQ ID NO: 2118869 - RNA, 16 nt, Human
ucuggagaagcaguga

SEQ ID NO: 2118870 - RNA, 11 nt, Human
ucuggagaagc

SEQ ID NO: 2118871 - RNA, 20 nt, Human
ucuggacugaagccugcagg

SEQ ID NO: 2118872 - RNA, 14 nt, Human
ucuggacuggcuag

SEQ ID NO: 2118873 - RNA, 15 nt, Human
ucuggacuggcuaga

SEQ ID NO: 2118874 - RNA, 13 nt, Human
ucuggacugaagc

SEQ ID NO: 2118875 - RNA, 17 nt, Human
ucuggacugaagccugc

SEQ ID NO: 2118876 - RNA, 19 nt, Human
ucuggacugaagccugcag

SEQ ID NO: 2118877 - RNA, 19 nt, Human
ucuggacugccccagaaaa

SEQ ID NO: 2118878 - RNA, 21 nt, Human
ucuggacugaagccugcagga

SEQ ID NO: 2118879 - RNA, 22 nt, Human
ucuggacuccucuguccaggca

SEQ ID NO: 2118880 - RNA, 18 nt, Human
ucuggacuccucugucca

SEQ ID NO: 2118881 - RNA, 16 nt, Human
ucuggacuccucuguc

SEQ ID NO: 2118882 - RNA, 15 nt, Human
ucuggacuccucugu

SEQ ID NO: 2118883 - RNA, 20 nt, Human
ucugccugcccaggccccug

SEQ ID NO: 2118884 - RNA, 18 nt, Human
ucugccugcccaggcccc

SEQ ID NO: 2118885 - RNA, 17 nt, Human
ucugccugcccaggccc

SEQ ID NO: 2118886 - RNA, 14 nt, Human
ucugcucggccguc

SEQ ID NO: 2118887 - RNA, 15 nt, Human
ucugcucggccgucu

SEQ ID NO: 2118888 - RNA, 18 nt, Human
ucugcucggccgucuuca

SEQ ID NO: 2118889 - RNA, 19 nt, Human
ucugccaugaacuggaggc

SEQ ID NO: 2118890 - RNA, 13 nt, Human
ucugcugaaggaa

SEQ ID NO: 2118891 - RNA, 13 nt, Human
ucugcugcccucc

SEQ ID NO: 2118892 - RNA, 14 nt, Human
ucugcugcccucca

SEQ ID NO: 2118893 - RNA, 15 nt, Human
ucugcugcccuccau

SEQ ID NO: 2118894 - RNA, 17 nt, Human
ucugucgcccagucugg

SEQ ID NO: 2118895 - RNA, 12 nt, Human
ucuguccuggga

SEQ ID NO: 2118896 - RNA, 15 nt, Human
ucugucucauaugau

SEQ ID NO: 2118897 - RNA, 22 nt, Human
ucugucucccuauaaugcugga

SEQ ID NO: 2118898 - RNA, 20 nt, Human
ucuguguauuuaauuguaaa

SEQ ID NO: 2118899 - RNA, 22 nt, Human
ucuguguauuuaauuguaaacu

SEQ ID NO: 2118900 - RNA, 15 nt, Human
ucugugucagccugu

SEQ ID NO: 2118901 - RNA, 14 nt, Human
ucugucuaccaucu

SEQ ID NO: 2118902 - RNA, 16 nt, Human
ucugucuaccaucucc

SEQ ID NO: 2118903 - RNA, 18 nt, Human
ucugucuaccaucucccu

SEQ ID NO: 2118904 - RNA, 21 nt, Human
ucugucucaaaaaauaaaaau

SEQ ID NO: 2118905 - RNA, 15 nt, Human
ucuggucucucuauu

SEQ ID NO: 2118906 - RNA, 16 nt, Human
ucuggugacaccagcc

SEQ ID NO: 2118907 - RNA, 17 nt, Human
ucuggugacaccagccu

SEQ ID NO: 2118908 - RNA, 18 nt, Human
ucuggugacaccagccuu

SEQ ID NO: 2118909 - RNA, 20 nt, Human
ucuguaacgccugcuugucc

SEQ ID NO: 2118910 - RNA, 20 nt, Human
ucuggagagguuauagguca

SEQ ID NO: 2118911 - RNA, 22 nt, Human
ucuggagagguuauaggucacu

SEQ ID NO: 2118912 - RNA, 13 nt, Human
ucuggagccaccu

SEQ ID NO: 2118913 - RNA, 15 nt, Human
ucuggagccaccugu

SEQ ID NO: 2118914 - RNA, 19 nt, Human
ucuggagccaccuguccca

SEQ ID NO: 2118915 - RNA, 20 nt, Human
ucuggagccaccugucccac

SEQ ID NO: 2118916 - RNA, 23 nt, Human
ucuggagccaccugucccaccuc

SEQ ID NO: 2118917 - RNA, 21 nt, Human
ucuggcuggcuaacuggaagc

SEQ ID NO: 2118918 - RNA, 19 nt, Human
ucuggcuucaaauauuaug

SEQ ID NO: 2118919 - RNA, 23 nt, Human
ucuggcuuccagaaaaccccagc

SEQ ID NO: 2118920 - RNA, 23 nt, Human
ucuugcucugcugacagacacag

SEQ ID NO: 2118921 - RNA, 15 nt, Human
ucuugcucugcugac

SEQ ID NO: 2118922 - RNA, 13 nt, Human
ucuuguccuagcu

SEQ ID NO: 2118923 - RNA, 23 nt, Human
ucuugcauggcaaggacugcagg

SEQ ID NO: 2118924 - RNA, 17 nt, Human
ucuugccacugccucuu

SEQ ID NO: 2118925 - RNA, 16 nt, Human
ucuugccacugccucu

SEQ ID NO: 2118926 - RNA, 16 nt, Human
ucuugccaucuauagg

SEQ ID NO: 2118927 - RNA, 14 nt, Human
ucuugcucugcuga

SEQ ID NO: 2118928 - RNA, 17 nt, Human
ucuugcccgcucaggcu

SEQ ID NO: 2118929 - RNA, 12 nt, Human
ucuugcccccca

SEQ ID NO: 2118930 - RNA, 21 nt, Human
ucuugccccccaccccagccu

SEQ ID NO: 2118931 - RNA, 13 nt, Human
ucuucgaggugga

SEQ ID NO: 2118932 - RNA, 19 nt, Human
ucuucggggaacuccugga

SEQ ID NO: 2118933 - RNA, 23 nt, Human
ucuugaaaugaaaguauaacuga

SEQ ID NO: 2118934 - RNA, 14 nt, Human
ucuugaaagcugug

SEQ ID NO: 2118935 - RNA, 12 nt, Human
ucuugaaaugaa

SEQ ID NO: 2118936 - RNA, 13 nt, Human
ucuugaaaugaaa

SEQ ID NO: 2118937 - RNA, 20 nt, Human
ucuuagguuggcaaaaaggc

SEQ ID NO: 2118938 - RNA, 23 nt, Human
ucuuagguuggcaaaaaggcagg

SEQ ID NO: 2118939 - RNA, 15 nt, Human
ucuuagccuguggca

SEQ ID NO: 2118940 - RNA, 17 nt, Human
ucuuagccuguggcagu

SEQ ID NO: 2118941 - RNA, 22 nt, Human
ucuuagccuguggcaguaaaga

SEQ ID NO: 2118942 - RNA, 20 nt, Human
ucugugucagguggggcagc

SEQ ID NO: 2118943 - RNA, 17 nt, Human
ucugugucagguggggc

SEQ ID NO: 2118944 - RNA, 22 nt, Human
ucugugugcaagugugugcaca

SEQ ID NO: 2118945 - RNA, 15 nt, Human
ucuuagauguauaua

SEQ ID NO: 2118946 - RNA, 18 nt, Human
ucuuagcagugauuuuua

SEQ ID NO: 2118947 - RNA, 14 nt, Human
ucuuagauguauau

SEQ ID NO: 2118948 - RNA, 14 nt, Human
ucugugugcugugg

SEQ ID NO: 2118949 - RNA, 19 nt, Human
ucugugugggacuguacac

SEQ ID NO: 2118950 - RNA, 20 nt, Human
ucugugugggacuguacaca

SEQ ID NO: 2118951 - RNA, 21 nt, Human
ucugugugggacuguacacac

SEQ ID NO: 2118952 - RNA, 12 nt, Human
ucuucaguuuua

SEQ ID NO: 2118953 - RNA, 18 nt, Human
ucuucaguuuuaucuuua

SEQ ID NO: 2118954 - RNA, 19 nt, Human
ucuucaguuuuaucuuuaa

SEQ ID NO: 2118955 - RNA, 14 nt, Human
ucuuccaaagcaca

SEQ ID NO: 2118956 - RNA, 18 nt, Human
ucuucaguugguguguuu

SEQ ID NO: 2118957 - RNA, 20 nt, Human
ucuucaguugguguguuuuu

SEQ ID NO: 2118958 - RNA, 22 nt, Human
ucuuauccaacaucaacaucuu

SEQ ID NO: 2118959 - RNA, 18 nt, Human
ucuuagugccugagagua

SEQ ID NO: 2118960 - RNA, 14 nt, Human
ucuuaguagauuuu

SEQ ID NO: 2118961 - RNA, 14 nt, Human
ucuuagugccugag

SEQ ID NO: 2118962 - RNA, 13 nt, Human
ucuuucccucccu

SEQ ID NO: 2118963 - RNA, 23 nt, Human
ucuuucccucccuuccucuuucc

SEQ ID NO: 2118964 - RNA, 12 nt, Human
ucuuucccuccc

SEQ ID NO: 2118965 - RNA, 15 nt, Human
ucuuuccauuucucu

SEQ ID NO: 2118966 - RNA, 16 nt, Human
ucuuuccauuucucuc

SEQ ID NO: 2118967 - RNA, 24 nt, Human
ucuuuccauuucucucuccagucu

SEQ ID NO: 2118968 - RNA, 23 nt, Human
ucuugugacuagugcugaagcuu

SEQ ID NO: 2118969 - RNA, 22 nt, Human
ucuugugacuagugcugaagcu

SEQ ID NO: 2118970 - RNA, 14 nt, Human
ucuuugccuugggc

SEQ ID NO: 2118971 - RNA, 20 nt, Human
ucuuugccuugggcugcucc

SEQ ID NO: 2118972 - RNA, 21 nt, Human
ucuuugccuugggcugcuccu

SEQ ID NO: 2118973 - RNA, 15 nt, Human
ucuuugcuugaacac

SEQ ID NO: 2118974 - RNA, 16 nt, Human
ucuuugcuugaacaca

SEQ ID NO: 2118975 - RNA, 17 nt, Human
ucuuugcuugaacacag

SEQ ID NO: 2118976 - RNA, 19 nt, Human
ucuuugcuugaacacagua

SEQ ID NO: 2118977 - RNA, 21 nt, Human
ucuuugcuugaacacaguauu

SEQ ID NO: 2118978 - RNA, 13 nt, Human
ucuuugcagacag

SEQ ID NO: 2118979 - RNA, 23 nt, Human
ucuuugaccucaaccugugauga

SEQ ID NO: 2118980 - RNA, 17 nt, Human
ucuuugagauagaagaa

SEQ ID NO: 2118981 - RNA, 18 nt, Human
ucuuugagauagaagaac

SEQ ID NO: 2118982 - RNA, 22 nt, Human
ucuuugagauagaagaacugca

SEQ ID NO: 2118983 - RNA, 22 nt, Human
ucuuugacaauuccuagauaaa

SEQ ID NO: 2118984 - RNA, 17 nt, Human
ucuuugcagacaggcaa

SEQ ID NO: 2118985 - RNA, 14 nt, Human
ucuuugcagacagg

SEQ ID NO: 2118986 - RNA, 15 nt, Human
ucuuuuuaauaaaaa

SEQ ID NO: 2118987 - RNA, 14 nt, Human
ucuuuuuaagcuua

SEQ ID NO: 2118988 - RNA, 21 nt, Human
ucuuuuuaagcuuauuuaauu

SEQ ID NO: 2118989 - RNA, 16 nt, Human
ucuuuuccuacuuuuc

SEQ ID NO: 2118990 - RNA, 18 nt, Human
ucuuuucccccaaagugg

SEQ ID NO: 2118991 - RNA, 22 nt, Human
ucuuuuccuguuuuuguuaacu

SEQ ID NO: 2118992 - RNA, 22 nt, Human
ucuuuucgccguggcugcggca

SEQ ID NO: 2118993 - RNA, 12 nt, Human
ucuuuucuacag

SEQ ID NO: 2118994 - RNA, 16 nt, Human
ucuuuucuacagcaaa

SEQ ID NO: 2118995 - RNA, 19 nt, Human
ucuuuucuacagcaaauuu

SEQ ID NO: 2118996 - RNA, 18 nt, Human
ugaaaacagaaaacgguu

SEQ ID NO: 2118997 - RNA, 14 nt, Human
ugaaaacauaaaaa

SEQ ID NO: 2118998 - RNA, 19 nt, Human
ugaaaacaugguagaauug

SEQ ID NO: 2118999 - RNA, 23 nt, Human
ugaaaacaugguagaauuggaga

SEQ ID NO: 2119000 - RNA, 14 nt, Human
ugaaaacauguaau

SEQ ID NO: 2119001 - RNA, 23 nt, Human
ugaaaacccagagaggaaucaga

SEQ ID NO: 2119002 - RNA, 14 nt, Human
ugaaaacccagaga

SEQ ID NO: 2119003 - RNA, 15 nt, Human
ugaaaacccagagag

SEQ ID NO: 2119004 - RNA, 19 nt, Human
ugaaaagaaaaaugagccu

SEQ ID NO: 2119005 - RNA, 16 nt, Human
ugaaaacccagagagg

SEQ ID NO: 2119006 - RNA, 16 nt, Human
ugaaaacguuuuauug

SEQ ID NO: 2119007 - RNA, 17 nt, Human
ugaaaacguuuuauugu

SEQ ID NO: 2119008 - RNA, 18 nt, Human
ugaaaacguuuuauugug

SEQ ID NO: 2119009 - RNA, 15 nt, Human
ugaaaagaaaaauga

SEQ ID NO: 2119010 - RNA, 20 nt, Human
ugaaaauuaggauuucauga

SEQ ID NO: 2119011 - RNA, 13 nt, Human
ugaaaaccucaca

SEQ ID NO: 2119012 - RNA, 20 nt, Human
ugaaaagaaaaaugagccug

SEQ ID NO: 2119013 - RNA, 22 nt, Human
ugaaaagaaaaaugagccuggc

SEQ ID NO: 2119014 - RNA, 18 nt, Human
ugaaaauuccagaaagga

SEQ ID NO: 2119015 - RNA, 20 nt, Human
ugaaaauuccagaaaggaua

SEQ ID NO: 2119016 - RNA, 14 nt, Human
ugaaaauucagugg

SEQ ID NO: 2119017 - RNA, 20 nt, Human
ucagcaccuacaguguacag

SEQ ID NO: 2119018 - RNA, 14 nt, Human
ucagcacccccuuc

SEQ ID NO: 2119019 - RNA, 17 nt, Human
ucagcacccccuucucu

SEQ ID NO: 2119020 - RNA, 23 nt, Human
ucagcacccccuucucugcccau

SEQ ID NO: 2119021 - RNA, 21 nt, Human
ucagcaccuacaguguacagu

SEQ ID NO: 2119022 - RNA, 22 nt, Human
ucagcaccuacaguguacaguc

SEQ ID NO: 2119023 - RNA, 18 nt, Human
ucagcauccuggcacccg

SEQ ID NO: 2119024 - RNA, 17 nt, Human
ucagcauccuggcaccc

SEQ ID NO: 2119025 - RNA, 16 nt, Human
ucagcauccuggcacc

SEQ ID NO: 2119026 - RNA, 15 nt, Human
ucagcauccuggcac

SEQ ID NO: 2119027 - RNA, 21 nt, Human
ucagcaguuguuauuacaucc

SEQ ID NO: 2119028 - RNA, 23 nt, Human
ucagccuagccgaccucagccuu

SEQ ID NO: 2119029 - RNA, 18 nt, Human
ucagccuaggggucaggg

SEQ ID NO: 2119030 - RNA, 13 nt, Human
ucagccucccaaa

SEQ ID NO: 2119031 - RNA, 12 nt, Human
ucagccucccaa

SEQ ID NO: 2119032 - RNA, 14 nt, Human
uaucauuccaaagg

SEQ ID NO: 2119033 - RNA, 12 nt, Human
uaucauucagca

SEQ ID NO: 2119034 - RNA, 14 nt, Human
uaucauucagcaac

SEQ ID NO: 2119035 - RNA, 13 nt, Human
uaucauucagcaa

SEQ ID NO: 2119036 - RNA, 13 nt, Human
ucagauauuuaua

SEQ ID NO: 2119037 - RNA, 21 nt, Human
ucagauauuuauauuuuuauu

SEQ ID NO: 2119038 - RNA, 15 nt, Human
ucagcaccacccuag

SEQ ID NO: 2119039 - RNA, 23 nt, Human
ucagcaccacccuagucccuucc

SEQ ID NO: 2119040 - RNA, 12 nt, Human
ucagcaccaccc

SEQ ID NO: 2119041 - RNA, 13 nt, Human
ucagcaccacccu

SEQ ID NO: 2119042 - RNA, 14 nt, Human
ucagcaccacccua

SEQ ID NO: 2119043 - RNA, 12 nt, Human
ucagauccuacc

SEQ ID NO: 2119044 - RNA, 14 nt, Human
ucagauccuacccc

SEQ ID NO: 2119045 - RNA, 21 nt, Human
ucagaucauuucaaaacucau

SEQ ID NO: 2119046 - RNA, 21 nt, Human
ucagauauuuuuucagaaaua

SEQ ID NO: 2119047 - RNA, 22 nt, Human
ucagauauuuuuucagaaauau

SEQ ID NO: 2119048 - RNA, 23 nt, Human
ucagauauuuuuucagaaauaug

SEQ ID NO: 2119049 - RNA, 13 nt, Human
ucagaucagugcu

SEQ ID NO: 2119050 - RNA, 18 nt, Human
ucagcauccucaguuccu

SEQ ID NO: 2119051 - RNA, 24 nt, Human
ucagcugccucacuuccuacaaga

SEQ ID NO: 2119052 - RNA, 12 nt, Human
ucagcugcuucu

SEQ ID NO: 2119053 - RNA, 15 nt, Human
ucagcugcuacuacu

SEQ ID NO: 2119054 - RNA, 16 nt, Human
ucagcugcccccgcuc

SEQ ID NO: 2119055 - RNA, 21 nt, Human
ucagcugcccccgcucauggg

SEQ ID NO: 2119056 - RNA, 12 nt, Human
ucagcugccuca

SEQ ID NO: 2119057 - RNA, 14 nt, Human
ucagcugccucacu

SEQ ID NO: 2119058 - RNA, 15 nt, Human
ucagcugccucacuu

SEQ ID NO: 2119059 - RNA, 21 nt, Human
ucagcuggcacugucucugcu

SEQ ID NO: 2119060 - RNA, 20 nt, Human
ucagcuguaagaagagacug

SEQ ID NO: 2119061 - RNA, 17 nt, Human
ucaggacccucgcuggc

SEQ ID NO: 2119062 - RNA, 18 nt, Human
ucaggacccucgcuggcc

SEQ ID NO: 2119063 - RNA, 19 nt, Human
ucaggacccucgcuggccc

SEQ ID NO: 2119064 - RNA, 20 nt, Human
ucaggacccucgcuggcccc

SEQ ID NO: 2119065 - RNA, 21 nt, Human
ucaggacccucgcuggccccc

SEQ ID NO: 2119066 - RNA, 22 nt, Human
ucaggacccucgcuggccccca

SEQ ID NO: 2119067 - RNA, 19 nt, Human
ucaggacgagaaugagggu

SEQ ID NO: 2119068 - RNA, 13 nt, Human
ucaggaggcaggg

SEQ ID NO: 2119069 - RNA, 12 nt, Human
ucaggaggcuga

SEQ ID NO: 2119070 - RNA, 13 nt, Human
ucaggaggcugag

SEQ ID NO: 2119071 - RNA, 18 nt, Human
ucaggaggcugaggcaga

SEQ ID NO: 2119072 - RNA, 20 nt, Human
ucaggaggcugaggcagaag

SEQ ID NO: 2119073 - RNA, 22 nt, Human
ucaggaggcugaggcagaagaa

SEQ ID NO: 2119074 - RNA, 15 nt, Human
ucaggaggcugaggg

SEQ ID NO: 2119075 - RNA, 18 nt, Human
ucaggaggcugaggggag

SEQ ID NO: 2119076 - RNA, 13 nt, Human
ucaggaggcugga

SEQ ID NO: 2119077 - RNA, 14 nt, Human
ucaggaggcuggag

SEQ ID NO: 2119078 - RNA, 21 nt, Human
ucaggaggcuggaggaagggg

SEQ ID NO: 2119079 - RNA, 16 nt, Human
ucaggaggaaggcuua

SEQ ID NO: 2119080 - RNA, 23 nt, Human
ucaggaggaaggcuuacacccac

SEQ ID NO: 2119081 - RNA, 20 nt, Human
ucaggagaggggcagaacag

SEQ ID NO: 2119082 - RNA, 15 nt, Human
ucaggagaggggcag

SEQ ID NO: 2119083 - RNA, 17 nt, Human
ucaggagaggggcagaa

SEQ ID NO: 2119084 - RNA, 18 nt, Human
ucaggagaggggcagaac

SEQ ID NO: 2119085 - RNA, 12 nt, Human
ucaggacuccag

SEQ ID NO: 2119086 - RNA, 13 nt, Human
ucaggacuccagc

SEQ ID NO: 2119087 - RNA, 14 nt, Human
ucaggacuccagcc

SEQ ID NO: 2119088 - RNA, 18 nt, Human
ucaggacuccagcccauu

SEQ ID NO: 2119089 - RNA, 14 nt, Human
ucaggacuccucuc

SEQ ID NO: 2119090 - RNA, 15 nt, Human
ucaggacuuggucug

SEQ ID NO: 2119091 - RNA, 22 nt, Human
ucagcuccagcucaccagcccc

SEQ ID NO: 2119092 - RNA, 21 nt, Human
ucagcuccagcucaccagccc

SEQ ID NO: 2119093 - RNA, 18 nt, Human
ucagcuccagcucaccag

SEQ ID NO: 2119094 - RNA, 20 nt, Human
ucagccucccgaauagcugg

SEQ ID NO: 2119095 - RNA, 12 nt, Human
ucagccucccga

SEQ ID NO: 2119096 - RNA, 22 nt, Human
ucagccucccaaagugcuggga

SEQ ID NO: 2119097 - RNA, 22 nt, Human
ucagccucuuaaagcugccugu

SEQ ID NO: 2119098 - RNA, 12 nt, Human
ucagccucuuaa

SEQ ID NO: 2119099 - RNA, 21 nt, Human
ucagccucuuaaagcugccug

SEQ ID NO: 2119100 - RNA, 16 nt, Human
ucagccugcuccagcu

SEQ ID NO: 2119101 - RNA, 20 nt, Human
ucagccugaggcugagacug

SEQ ID NO: 2119102 - RNA, 13 nt, Human
ucagccugaggcu

SEQ ID NO: 2119103 - RNA, 18 nt, Human
ucagccugaggcugagac

SEQ ID NO: 2119104 - RNA, 16 nt, Human
ucaugaaaauccuacc

SEQ ID NO: 2119105 - RNA, 22 nt, Human
ucaugaaaauccuaccaaccuc

SEQ ID NO: 2119106 - RNA, 15 nt, Human
ucauccaauccucac

SEQ ID NO: 2119107 - RNA, 18 nt, Human
ucauccaauccucacugg

SEQ ID NO: 2119108 - RNA, 19 nt, Human
ucauccaauccucacuggg

SEQ ID NO: 2119109 - RNA, 20 nt, Human
ucauccaauccucacugggu

SEQ ID NO: 2119110 - RNA, 22 nt, Human
ucauccaauccucacugggugg

SEQ ID NO: 2119111 - RNA, 12 nt, Human
ucaucaguguua

SEQ ID NO: 2119112 - RNA, 16 nt, Human
ucaucaguguuaaaaa

SEQ ID NO: 2119113 - RNA, 19 nt, Human
ucaucaguguuaaaaaauu

SEQ ID NO: 2119114 - RNA, 13 nt, Human
ucaucauaaaaua

SEQ ID NO: 2119115 - RNA, 14 nt, Human
ucaucauaaaauaa

SEQ ID NO: 2119116 - RNA, 15 nt, Human
ucaucauaaaauaaa

SEQ ID NO: 2119117 - RNA, 19 nt, Human
ucaucauaaaauaaaguau

SEQ ID NO: 2119118 - RNA, 17 nt, Human
ucaucaacccuaaaaag

SEQ ID NO: 2119119 - RNA, 20 nt, Human
ucaguuccugcagcagagcc

SEQ ID NO: 2119120 - RNA, 20 nt, Human
ucaguuccugcccuuggccu

SEQ ID NO: 2119121 - RNA, 17 nt, Human
ucagucccaucagagag

SEQ ID NO: 2119122 - RNA, 18 nt, Human
ucaguccccgugaaggag

SEQ ID NO: 2119123 - RNA, 15 nt, Human
ucaguccauagcaga

SEQ ID NO: 2119124 - RNA, 17 nt, Human
ucagguggggcagcuug

SEQ ID NO: 2119125 - RNA, 21 nt, Human
ucagguggggcagcuugaggg

SEQ ID NO: 2119126 - RNA, 16 nt, Human
ucagguggggcagcuu

SEQ ID NO: 2119127 - RNA, 15 nt, Human
ucagguggggcagcu

SEQ ID NO: 2119128 - RNA, 20 nt, Human
ucaggugcugccauccaggu

SEQ ID NO: 2119129 - RNA, 18 nt, Human
ucaggugcugccauccag

SEQ ID NO: 2119130 - RNA, 14 nt, Human
ucagguggggcagc

SEQ ID NO: 2119131 - RNA, 19 nt, Human
ucaggagucccaaggaaag

SEQ ID NO: 2119132 - RNA, 20 nt, Human
ucaggagucccaaggaaagc

SEQ ID NO: 2119133 - RNA, 19 nt, Human
ucagucugauucccaagcu

SEQ ID NO: 2119134 - RNA, 17 nt, Human
ucagucugauucccaag

SEQ ID NO: 2119135 - RNA, 23 nt, Human
ucagucugauuaaagguggugcc

SEQ ID NO: 2119136 - RNA, 14 nt, Human
ucaguuaagaaaaa

SEQ ID NO: 2119137 - RNA, 15 nt, Human
ucaguuaagaaaaaa

SEQ ID NO: 2119138 - RNA, 16 nt, Human
ucaguuaagaaaaaaa

SEQ ID NO: 2119139 - RNA, 19 nt, Human
ucaguuaagaaaaaaauaa

SEQ ID NO: 2119140 - RNA, 20 nt, Human
ucaguguucccuuuccuacu

SEQ ID NO: 2119141 - RNA, 13 nt, Human
ucaguguuaaaaa

SEQ ID NO: 2119142 - RNA, 15 nt, Human
ucaguguuaaaaaau

SEQ ID NO: 2119143 - RNA, 16 nt, Human
ucaguguuaaaaaauu

SEQ ID NO: 2119144 - RNA, 23 nt, Human
ucaguguuaaaaaauuuuugaaa

SEQ ID NO: 2119145 - RNA, 14 nt, Human
ucaguuacucagcc

SEQ ID NO: 2119146 - RNA, 16 nt, Human
ucaguucccuuggccu

SEQ ID NO: 2119147 - RNA, 17 nt, Human
ucaguucccuuggccuc

SEQ ID NO: 2119148 - RNA, 18 nt, Human
ucaguucccuuggccuca

SEQ ID NO: 2119149 - RNA, 19 nt, Human
ucaguucccuuggccucag

SEQ ID NO: 2119150 - RNA, 20 nt, Human
ucaguucccuuggccucaga

SEQ ID NO: 2119151 - RNA, 22 nt, Human
ucaguucccuuggccucagaau

SEQ ID NO: 2119152 - RNA, 21 nt, Human
uccacccugcucuccgaccag

SEQ ID NO: 2119153 - RNA, 12 nt, Human
uccacccuggaa

SEQ ID NO: 2119154 - RNA, 14 nt, Human
uccacccugcucuc

SEQ ID NO: 2119155 - RNA, 13 nt, Human
uccacccugcucu

SEQ ID NO: 2119156 - RNA, 22 nt, Human
uccacugugccaugugccaggu

SEQ ID NO: 2119157 - RNA, 15 nt, Human
uccacuguuuauuca

SEQ ID NO: 2119158 - RNA, 22 nt, Human
uccacuguuuauucaacaacua

SEQ ID NO: 2119159 - RNA, 23 nt, Human
uccacuuagaaauugcauuuccu

SEQ ID NO: 2119160 - RNA, 21 nt, Human
uccacuuagaaauugcauuuc

SEQ ID NO: 2119161 - RNA, 19 nt, Human
uccagagaguggcuccucc

SEQ ID NO: 2119162 - RNA, 22 nt, Human
uccagagaguggcuccucccgg

SEQ ID NO: 2119163 - RNA, 18 nt, Human
uccacuuucagugaaagc

SEQ ID NO: 2119164 - RNA, 19 nt, Human
uccagcuggguuggaaaac

SEQ ID NO: 2119165 - RNA, 16 nt, Human
uccaggaaaaaggaca

SEQ ID NO: 2119166 - RNA, 17 nt, Human
uccaggaaaaaggacag

SEQ ID NO: 2119167 - RNA, 23 nt, Human
uccaggaaaaaggacaggcagaa

SEQ ID NO: 2119168 - RNA, 17 nt, Human
uccaggaaggggcugga

SEQ ID NO: 2119169 - RNA, 22 nt, Human
uccaggaaugccuccucccugg

SEQ ID NO: 2119170 - RNA, 13 nt, Human
uccagggcccuga

SEQ ID NO: 2119171 - RNA, 22 nt, Human
uccagggccacgugccaggccc

SEQ ID NO: 2119172 - RNA, 23 nt, Human
uccagggccacgugccaggcccg

SEQ ID NO: 2119173 - RNA, 14 nt, Human
uccagggccagaug

SEQ ID NO: 2119174 - RNA, 22 nt, Human
uccagauuuuuuacagcugccu

SEQ ID NO: 2119175 - RNA, 21 nt, Human
uccagaugccuucuccagaca

SEQ ID NO: 2119176 - RNA, 17 nt, Human
uccaagcaaauguuaca

SEQ ID NO: 2119177 - RNA, 18 nt, Human
uccaagcaaauguuacau

SEQ ID NO: 2119178 - RNA, 19 nt, Human
uccaagcaaauguuacaua

SEQ ID NO: 2119179 - RNA, 23 nt, Human
uccaagcgaggucaacagagaag

SEQ ID NO: 2119180 - RNA, 21 nt, Human
uccaagcgaggucaacagaga

SEQ ID NO: 2119181 - RNA, 22 nt, Human
uccaagcgaggucaacagagaa

SEQ ID NO: 2119182 - RNA, 16 nt, Human
uccacaagauucccag

SEQ ID NO: 2119183 - RNA, 17 nt, Human
uccacaagauucccaga

SEQ ID NO: 2119184 - RNA, 18 nt, Human
uccacaagauucccagag

SEQ ID NO: 2119185 - RNA, 18 nt, Human
uccacacccucucccagg

SEQ ID NO: 2119186 - RNA, 19 nt, Human
uccacacccucucccagga

SEQ ID NO: 2119187 - RNA, 20 nt, Human
uccacacccucucccaggac

SEQ ID NO: 2119188 - RNA, 21 nt, Human
uccacacccucucccaggacc

SEQ ID NO: 2119189 - RNA, 19 nt, Human
uccacaagauucccagaga

SEQ ID NO: 2119190 - RNA, 20 nt, Human
uccacaagauucccagagac

SEQ ID NO: 2119191 - RNA, 21 nt, Human
uccacaagauucccagagaca

SEQ ID NO: 2119192 - RNA, 23 nt, Human
uccacaagauucccagagacagg

SEQ ID NO: 2119193 - RNA, 23 nt, Human
uccacacucaccucuaaaacagu

SEQ ID NO: 2119194 - RNA, 14 nt, Human
uccacagccgcagc

SEQ ID NO: 2119195 - RNA, 16 nt, Human
uccacagccgcagccu

SEQ ID NO: 2119196 - RNA, 17 nt, Human
uccacagccgcagccuc

SEQ ID NO: 2119197 - RNA, 23 nt, Human
uccacagcuuccccucucuccuc

SEQ ID NO: 2119198 - RNA, 14 nt, Human
uccacagcuaccuc

SEQ ID NO: 2119199 - RNA, 18 nt, Human
uccacagccgcagccucc

SEQ ID NO: 2119200 - RNA, 12 nt, Human
uccaagagcuga

SEQ ID NO: 2119201 - RNA, 14 nt, Human
ucauguacauuucu

SEQ ID NO: 2119202 - RNA, 21 nt, Human
ucauggcuaagcuuaaaaaaa

SEQ ID NO: 2119203 - RNA, 23 nt, Human
ucauggcuaagcuuaaaaaaaac

SEQ ID NO: 2119204 - RNA, 15 nt, Human
ucauggcucacugca

SEQ ID NO: 2119205 - RNA, 16 nt, Human
ucauggcucacugcag

SEQ ID NO: 2119206 - RNA, 18 nt, Human
ucauggcucacugcagcc

SEQ ID NO: 2119207 - RNA, 19 nt, Human
ucauggcucacugcagccu

SEQ ID NO: 2119208 - RNA, 12 nt, Human
ucauguacauuu

SEQ ID NO: 2119209 - RNA, 19 nt, Human
ucauguagcaaucagauuu

SEQ ID NO: 2119210 - RNA, 16 nt, Human
uccaugucgccucugc

SEQ ID NO: 2119211 - RNA, 14 nt, Human
uccaugauggaaua

SEQ ID NO: 2119212 - RNA, 12 nt, Human
uccaugauggag

SEQ ID NO: 2119213 - RNA, 15 nt, Human
uccaugauggaguca

SEQ ID NO: 2119214 - RNA, 21 nt, Human
uccaugcacccucauacacag

SEQ ID NO: 2119215 - RNA, 18 nt, Human
uccaugucgccucugcau

SEQ ID NO: 2119216 - RNA, 17 nt, Human
uccaugucgccucugca

SEQ ID NO: 2119217 - RNA, 19 nt, Human
uccaugucgccucugcauu

SEQ ID NO: 2119218 - RNA, 14 nt, Human
uccaugugcccagu

SEQ ID NO: 2119219 - RNA, 19 nt, Human
ucccaacacaaggugggca

SEQ ID NO: 2119220 - RNA, 21 nt, Human
ucccaacacaaggugggcagg

SEQ ID NO: 2119221 - RNA, 14 nt, Human
ucccaacuuguaaa

SEQ ID NO: 2119222 - RNA, 17 nt, Human
ucccaagaacagcaggc

SEQ ID NO: 2119223 - RNA, 18 nt, Human
ucccaagaacagcaggcc

SEQ ID NO: 2119224 - RNA, 19 nt, Human
ucccaagaacagcaggccc

SEQ ID NO: 2119225 - RNA, 21 nt, Human
ucccaagaacagcaggcccac

SEQ ID NO: 2119226 - RNA, 22 nt, Human
ucccaagaacagcaggcccacc

SEQ ID NO: 2119227 - RNA, 23 nt, Human
ucccaagaacagcaggcccaccu

SEQ ID NO: 2119228 - RNA, 14 nt, Human
ucccaacugcaagu

SEQ ID NO: 2119229 - RNA, 17 nt, Human
ucccaacuccuauaauu

SEQ ID NO: 2119230 - RNA, 18 nt, Human
ucccaacacuucagacug

SEQ ID NO: 2119231 - RNA, 19 nt, Human
uccaugaguuugcccuggu

SEQ ID NO: 2119232 - RNA, 23 nt, Human
uccaugaguuuuuucucuugggc

SEQ ID NO: 2119233 - RNA, 14 nt, Human
uccauaucuaacca

SEQ ID NO: 2119234 - RNA, 17 nt, Human
uccauaucuaaccagug

SEQ ID NO: 2119235 - RNA, 19 nt, Human
uccauaucuaaccagugau

SEQ ID NO: 2119236 - RNA, 20 nt, Human
uccauauauuagcauuuagu

SEQ ID NO: 2119237 - RNA, 17 nt, Human
uccauauauuagcauuu

SEQ ID NO: 2119238 - RNA, 18 nt, Human
uccauauauuagcauuua

SEQ ID NO: 2119239 - RNA, 16 nt, Human
uccauaguauauuaaa

SEQ ID NO: 2119240 - RNA, 17 nt, Human
uccauaguauauuaaaa

SEQ ID NO: 2119241 - RNA, 20 nt, Human
uccauaguauauuaaaaaug

SEQ ID NO: 2119242 - RNA, 21 nt, Human
uccauaguauauuaaaaaugg

SEQ ID NO: 2119243 - RNA, 22 nt, Human
uccauaguauauuaaaaauggu

SEQ ID NO: 2119244 - RNA, 22 nt, Human
uccauagccuaaucccugggca

SEQ ID NO: 2119245 - RNA, 21 nt, Human
uccauagccuaaucccugggc

SEQ ID NO: 2119246 - RNA, 23 nt, Human
uccauaaucuggacuccucuguc

SEQ ID NO: 2119247 - RNA, 17 nt, Human
uccaggggaugggaggu

SEQ ID NO: 2119248 - RNA, 20 nt, Human
uccagggcccugagcucggu

SEQ ID NO: 2119249 - RNA, 16 nt, Human
uccagggcccugagcu

SEQ ID NO: 2119250 - RNA, 17 nt, Human
uccagggcccugagcuc

SEQ ID NO: 2119251 - RNA, 18 nt, Human
uccauaauuccauaugcu

SEQ ID NO: 2119252 - RNA, 12 nt, Human
uccauaauuaug

SEQ ID NO: 2119253 - RNA, 17 nt, Human
uccauaauuaugacagu

SEQ ID NO: 2119254 - RNA, 19 nt, Human
uccauaauuaugacaguua

SEQ ID NO: 2119255 - RNA, 21 nt, Human
uccauaauuaugacaguuaua

SEQ ID NO: 2119256 - RNA, 20 nt, Human
uccauaauguauaaagaaca

SEQ ID NO: 2119257 - RNA, 12 nt, Human
uccauaauguau

SEQ ID NO: 2119258 - RNA, 14 nt, Human
ucccacucagucca

SEQ ID NO: 2119259 - RNA, 22 nt, Human
ucccacucacaacagcugccug

SEQ ID NO: 2119260 - RNA, 17 nt, Human
ucccacucacaacagcu

SEQ ID NO: 2119261 - RNA, 17 nt, Human
ucccacucaagccaagc

SEQ ID NO: 2119262 - RNA, 20 nt, Human
ucccacggaaaaugccaauc

SEQ ID NO: 2119263 - RNA, 23 nt, Human
ucccacggaaaaugccaaucucu

SEQ ID NO: 2119264 - RNA, 21 nt, Human
ucccaccuuggcugcagggag

SEQ ID NO: 2119265 - RNA, 19 nt, Human
ucccaccuuggcugcaggg

SEQ ID NO: 2119266 - RNA, 18 nt, Human
ucccaccucagccucccg

SEQ ID NO: 2119267 - RNA, 22 nt, Human
ucccaagagaaggggaagcacu

SEQ ID NO: 2119268 - RNA, 16 nt, Human
ucccaccucagccucc

SEQ ID NO: 2119269 - RNA, 16 nt, Human
ucccaugagccucagc

SEQ ID NO: 2119270 - RNA, 15 nt, Human
ucccaugagccucag

SEQ ID NO: 2119271 - RNA, 12 nt, Human
ucccaggggacc

SEQ ID NO: 2119272 - RNA, 17 nt, Human
ucccaggggaccacacc

SEQ ID NO: 2119273 - RNA, 19 nt, Human
ucccagggcuacucacuca

SEQ ID NO: 2119274 - RNA, 21 nt, Human
ucccagggcuacucacucaag

SEQ ID NO: 2119275 - RNA, 22 nt, Human
ucccagggcuacucacucaagu

SEQ ID NO: 2119276 - RNA, 23 nt, Human
ucccagggccagggcccugcaga

SEQ ID NO: 2119277 - RNA, 21 nt, Human
ucccagggccagggcccugca

SEQ ID NO: 2119278 - RNA, 22 nt, Human
ucccagggccagggcccugcag

SEQ ID NO: 2119279 - RNA, 16 nt, Human
ucccagggccagggcc

SEQ ID NO: 2119280 - RNA, 17 nt, Human
ucccagggccagggccc

SEQ ID NO: 2119281 - RNA, 20 nt, Human
ucccagggccagggcccugc

SEQ ID NO: 2119282 - RNA, 17 nt, Human
ucccacuuggaggccuu

SEQ ID NO: 2119283 - RNA, 15 nt, Human
ucccacuugccccug

SEQ ID NO: 2119284 - RNA, 14 nt, Human
ucccacuccuagga

SEQ ID NO: 2119285 - RNA, 18 nt, Human
ucccacucaagccaagca

SEQ ID NO: 2119286 - RNA, 23 nt, Human
ucuaggugcccuuggaggccagc

SEQ ID NO: 2119287 - RNA, 17 nt, Human
ucuagguggaguugaaa

SEQ ID NO: 2119288 - RNA, 19 nt, Human
ucuagguggaguugaaaga

SEQ ID NO: 2119289 - RNA, 12 nt, Human
ucuagggaaaaa

SEQ ID NO: 2119290 - RNA, 20 nt, Human
ucuagguaggggcccacuuc

SEQ ID NO: 2119291 - RNA, 17 nt, Human
ucuagguagugcccuau

SEQ ID NO: 2119292 - RNA, 16 nt, Human
ucuaggucaaggccug

SEQ ID NO: 2119293 - RNA, 20 nt, Human
ucuaggucaaggccuguccc

SEQ ID NO: 2119294 - RNA, 18 nt, Human
ucuaggucaguacccacc

SEQ ID NO: 2119295 - RNA, 20 nt, Human
ucuaggucaguacccaccug

SEQ ID NO: 2119296 - RNA, 21 nt, Human
ucuaggucaguacccaccuga

SEQ ID NO: 2119297 - RNA, 18 nt, Human
ucuaggcaucccagggga

SEQ ID NO: 2119298 - RNA, 18 nt, Human
ucuacucuagggaaaaac

SEQ ID NO: 2119299 - RNA, 22 nt, Human
ucuacuccuaccucagccuaga

SEQ ID NO: 2119300 - RNA, 19 nt, Human
ucuacuccuuguaaagacu

SEQ ID NO: 2119301 - RNA, 18 nt, Human
ucuacucauauauaucua

SEQ ID NO: 2119302 - RNA, 17 nt, Human
ucuacuccuaccucagc

SEQ ID NO: 2119303 - RNA, 19 nt, Human
ucuacuccuaccucagccu

SEQ ID NO: 2119304 - RNA, 14 nt, Human
ucuacucauauaua

SEQ ID NO: 2119305 - RNA, 16 nt, Human
ucuaauuuuuaagcaa

SEQ ID NO: 2119306 - RNA, 20 nt, Human
ucuacuaaaaauacaaaaau

SEQ ID NO: 2119307 - RNA, 15 nt, Human
ucuacuaaaaauaca

SEQ ID NO: 2119308 - RNA, 23 nt, Human
ucuaauuuaucuugucucugggc

SEQ ID NO: 2119309 - RNA, 22 nt, Human
ucuaauuuaucuugucucuggg

SEQ ID NO: 2119310 - RNA, 13 nt, Human
ucuaauugccaug

SEQ ID NO: 2119311 - RNA, 15 nt, Human
ucuaauugccaugua

SEQ ID NO: 2119312 - RNA, 14 nt, Human
ucuaauugccaugu

SEQ ID NO: 2119313 - RNA, 21 nt, Human
ucuaauugaauuuucaagcau

SEQ ID NO: 2119314 - RNA, 20 nt, Human
ucuaauggguauuuaaacaa

SEQ ID NO: 2119315 - RNA, 15 nt, Human
ucuaaugcucacgcu

SEQ ID NO: 2119316 - RNA, 20 nt, Human
ucuaaucugcuaugcuugaa

SEQ ID NO: 2119317 - RNA, 18 nt, Human
ucuaaucaugaaacuccc

SEQ ID NO: 2119318 - RNA, 18 nt, Human
ucguccucccccugccag

SEQ ID NO: 2119319 - RNA, 23 nt, Human
ucguccucccccugccagugccu

SEQ ID NO: 2119320 - RNA, 13 nt, Human
ucguccucccccu

SEQ ID NO: 2119321 - RNA, 14 nt, Human
ucguccucccccug

SEQ ID NO: 2119322 - RNA, 16 nt, Human
ucguccucccccugcc

SEQ ID NO: 2119323 - RNA, 17 nt, Human
ucguccucccccugcca

SEQ ID NO: 2119324 - RNA, 19 nt, Human
ucgucggggggacagcucc

SEQ ID NO: 2119325 - RNA, 23 nt, Human
ucucacucugucgcccagucugg

SEQ ID NO: 2119326 - RNA, 20 nt, Human
ucucacugccaugccagcuu

SEQ ID NO: 2119327 - RNA, 14 nt, Human
ucuaucucacagca

SEQ ID NO: 2119328 - RNA, 18 nt, Human
ucuaucucacagcacacu

SEQ ID NO: 2119329 - RNA, 16 nt, Human
ucuaucuuauauaguu

SEQ ID NO: 2119330 - RNA, 13 nt, Human
ucucaguuucacu

SEQ ID NO: 2119331 - RNA, 15 nt, Human
ucucacuguugccca

SEQ ID NO: 2119332 - RNA, 14 nt, Human
ucucacuguugccc

SEQ ID NO: 2119333 - RNA, 17 nt, Human
ucucacuggaugcaaag

SEQ ID NO: 2119334 - RNA, 13 nt, Human
ucucacugugucc

SEQ ID NO: 2119335 - RNA, 14 nt, Human
ucucacuguguccc

SEQ ID NO: 2119336 - RNA, 21 nt, Human
ucucacugugucccucucucu

SEQ ID NO: 2119337 - RNA, 20 nt, Human
ucucagauauuuauauuuuu

SEQ ID NO: 2119338 - RNA, 23 nt, Human
ucucagauauuuauauuuuuauu

SEQ ID NO: 2119339 - RNA, 14 nt, Human
ucucagauauuuau

SEQ ID NO: 2119340 - RNA, 16 nt, Human
ucucagauauuuauau

SEQ ID NO: 2119341 - RNA, 17 nt, Human
uccuuggggcaggcagu

SEQ ID NO: 2119342 - RNA, 22 nt, Human
uccuuugaucaguauaauuuuu

SEQ ID NO: 2119343 - RNA, 15 nt, Human
uccuuugcaggcuca

SEQ ID NO: 2119344 - RNA, 13 nt, Human
uccuuugggaaag

SEQ ID NO: 2119345 - RNA, 16 nt, Human
uccuugccuccugugu

SEQ ID NO: 2119346 - RNA, 17 nt, Human
uccuugccuccugugua

SEQ ID NO: 2119347 - RNA, 18 nt, Human
uccuugccuccuguguaa

SEQ ID NO: 2119348 - RNA, 17 nt, Human
uccuugcuguccuaggc

SEQ ID NO: 2119349 - RNA, 19 nt, Human
uccuugcuguccuaggcca

SEQ ID NO: 2119350 - RNA, 21 nt, Human
uccuugcuguccuaggccaca

SEQ ID NO: 2119351 - RNA, 14 nt, Human
uccuuacccaucug

SEQ ID NO: 2119352 - RNA, 18 nt, Human
uccuuacccaucugcacc

SEQ ID NO: 2119353 - RNA, 22 nt, Human
uccuuaccgugggcacugaagg

SEQ ID NO: 2119354 - RNA, 14 nt, Human
uccuuaccucuucc

SEQ ID NO: 2119355 - RNA, 21 nt, Human
uccugucccuucucuuaauuu

SEQ ID NO: 2119356 - RNA, 18 nt, Human
uccugucccuucucuuaa

SEQ ID NO: 2119357 - RNA, 14 nt, Human
uccuguccagagag

SEQ ID NO: 2119358 - RNA, 15 nt, Human
uccugaggggcaucu

SEQ ID NO: 2119359 - RNA, 16 nt, Human
uccugaggggcaucug

SEQ ID NO: 2119360 - RNA, 19 nt, Human
uccugaggggcaucugccc

SEQ ID NO: 2119361 - RNA, 18 nt, Human
uccuguccaaccuaaccc

SEQ ID NO: 2119362 - RNA, 20 nt, Human
uccugaggggcaucugcccc

SEQ ID NO: 2119363 - RNA, 20 nt, Human
uccuguccaaccuaaccccu

SEQ ID NO: 2119364 - RNA, 23 nt, Human
uccuuagcuuagaccucagccug

SEQ ID NO: 2119365 - RNA, 15 nt, Human
uccuuagucuucuca

SEQ ID NO: 2119366 - RNA, 16 nt, Human
uccuuagucuucucau

SEQ ID NO: 2119367 - RNA, 17 nt, Human
uccuuagucuucucaua

SEQ ID NO: 2119368 - RNA, 17 nt, Human
uccuuaccucuuccgga

SEQ ID NO: 2119369 - RNA, 17 nt, Human
uccuuaucgaaacucau

SEQ ID NO: 2119370 - RNA, 18 nt, Human
uccuuagucuucucauag

SEQ ID NO: 2119371 - RNA, 22 nt, Human
uccuuagucuucucauagcauu

SEQ ID NO: 2119372 - RNA, 21 nt, Human
uccuuaucacugacacaaaaa

SEQ ID NO: 2119373 - RNA, 23 nt, Human
ucgaugggggagucugaagcaga

SEQ ID NO: 2119374 - RNA, 17 nt, Human
ucgaugggggaugcuuc

SEQ ID NO: 2119375 - RNA, 19 nt, Human
ucgaugggggaugcuucau

SEQ ID NO: 2119376 - RNA, 22 nt, Human
ucgaugggggaugcuucaugug

SEQ ID NO: 2119377 - RNA, 23 nt, Human
ucgaugaagcccaauaaaccucu

SEQ ID NO: 2119378 - RNA, 13 nt, Human
ucgauauuuccau

SEQ ID NO: 2119379 - RNA, 14 nt, Human
ucgauauuuccauc

SEQ ID NO: 2119380 - RNA, 19 nt, Human
ucgauauuuccaucauuaa

SEQ ID NO: 2119381 - RNA, 20 nt, Human
ucgaucucauucaguauuaa

SEQ ID NO: 2119382 - RNA, 19 nt, Human
ucgaugaagcccaauaaac

SEQ ID NO: 2119383 - RNA, 16 nt, Human
uccuuuucuccuaucu

SEQ ID NO: 2119384 - RNA, 19 nt, Human
uccuuuucuccuaucuuca

SEQ ID NO: 2119385 - RNA, 13 nt, Human
uccuuuucuuguu

SEQ ID NO: 2119386 - RNA, 18 nt, Human
uccuuuucuuguuuauca

SEQ ID NO: 2119387 - RNA, 23 nt, Human
uccuuuucuuguuuaucagcagu

SEQ ID NO: 2119388 - RNA, 22 nt, Human
uccuuuucgcaggauucuuccu

SEQ ID NO: 2119389 - RNA, 17 nt, Human
ucgcaggauucuuccuc

SEQ ID NO: 2119390 - RNA, 20 nt, Human
ucgauuauucccuguacaau

SEQ ID NO: 2119391 - RNA, 21 nt, Human
ucgcaggauucuuccucccuc

SEQ ID NO: 2119392 - RNA, 23 nt, Human
ucgcaggauucuuccucccuccc

SEQ ID NO: 2119393 - RNA, 22 nt, Human
ucggaggcuugucagagcuggg

SEQ ID NO: 2119394 - RNA, 23 nt, Human
ucggagccucauccgaggcaggg

SEQ ID NO: 2119395 - RNA, 23 nt, Human
ucggagacagugaucuccauaug

SEQ ID NO: 2119396 - RNA, 22 nt, Human
ucggagccucauccgaggcagg

SEQ ID NO: 2119397 - RNA, 15 nt, Human
ucggagcccugucuc

SEQ ID NO: 2119398 - RNA, 14 nt, Human
ucggagcccugucu

SEQ ID NO: 2119399 - RNA, 23 nt, Human
ucgcccagucuggaaugcagugg

SEQ ID NO: 2119400 - RNA, 19 nt, Human
ucgcccagucuggaaugca

SEQ ID NO: 2119401 - RNA, 14 nt, Human
ucgcccagucugga

SEQ ID NO: 2119402 - RNA, 18 nt, Human
ucgccaccccuccuuccu

SEQ ID NO: 2119403 - RNA, 13 nt, Human
ucgcauuugucaa

SEQ ID NO: 2119404 - RNA, 15 nt, Human
ucgcauuugucaaug

SEQ ID NO: 2119405 - RNA, 16 nt, Human
ucgcccagugcccugg

SEQ ID NO: 2119406 - RNA, 19 nt, Human
ucgcccagugcccuggggc

SEQ ID NO: 2119407 - RNA, 23 nt, Human
ucccuaccgagucucuucuccac

SEQ ID NO: 2119408 - RNA, 22 nt, Human
ucccuaccgagucucuucucca

SEQ ID NO: 2119409 - RNA, 21 nt, Human
ucccuaccgagucucuucucc

SEQ ID NO: 2119410 - RNA, 19 nt, Human
ucccuaccgagucucuucu

SEQ ID NO: 2119411 - RNA, 18 nt, Human
ucccuaccaccuccccag

SEQ ID NO: 2119412 - RNA, 20 nt, Human
ucccuacccccuaagagcca

SEQ ID NO: 2119413 - RNA, 19 nt, Human
ucccuacccccuaagagcc

SEQ ID NO: 2119414 - RNA, 22 nt, Human
ucccaugagccucagcauccug

SEQ ID NO: 2119415 - RNA, 17 nt, Human
ucccaugagccucagca

SEQ ID NO: 2119416 - RNA, 17 nt, Human
ucccuacuuccugugac

SEQ ID NO: 2119417 - RNA, 17 nt, Human
ucccuagaggguuccug

SEQ ID NO: 2119418 - RNA, 18 nt, Human
ucccuagaggguuccugu

SEQ ID NO: 2119419 - RNA, 19 nt, Human
ucccuagaggguuccugua

SEQ ID NO: 2119420 - RNA, 20 nt, Human
ucccuagaggguuccuguag

SEQ ID NO: 2119421 - RNA, 18 nt, Human
ucccucccuuccucuuuc

SEQ ID NO: 2119422 - RNA, 15 nt, Human
ucccucccuuugaaa

SEQ ID NO: 2119423 - RNA, 12 nt, Human
ucccuccucacc

SEQ ID NO: 2119424 - RNA, 20 nt, Human
ucccugcacuugcagacucu

SEQ ID NO: 2119425 - RNA, 16 nt, Human
ucccucuggcccugcc

SEQ ID NO: 2119426 - RNA, 17 nt, Human
ucccucuggcccugccu

SEQ ID NO: 2119427 - RNA, 18 nt, Human
ucccucuggcccugccuu

SEQ ID NO: 2119428 - RNA, 19 nt, Human
ucccucuggcccugccuuc

SEQ ID NO: 2119429 - RNA, 20 nt, Human
ucccucuggcccugccuucu

SEQ ID NO: 2119430 - RNA, 23 nt, Human
ucccucucucuucugcuccaccc

SEQ ID NO: 2119431 - RNA, 13 nt, Human
ucccucugaccug

SEQ ID NO: 2119432 - RNA, 17 nt, Human
ucccucugaccugcagg

SEQ ID NO: 2119433 - RNA, 18 nt, Human
ucccucugaccugcaggc

SEQ ID NO: 2119434 - RNA, 19 nt, Human
ucccucugaccugcaggcc

SEQ ID NO: 2119435 - RNA, 13 nt, Human
ucccucugccggc

SEQ ID NO: 2119436 - RNA, 11 nt, Human
ucccucugccu

SEQ ID NO: 2119437 - RNA, 21 nt, Human
ucccucugccugaaccuucca

SEQ ID NO: 2119438 - RNA, 16 nt, Human
ucccucugccuguccc

SEQ ID NO: 2119439 - RNA, 18 nt, Human
ucccucugccugucccuc

SEQ ID NO: 2119440 - RNA, 20 nt, Human
ucccucugccugucccucuc

SEQ ID NO: 2119441 - RNA, 22 nt, Human
ucccucucaggcaugccugugu

SEQ ID NO: 2119442 - RNA, 23 nt, Human
ucccucucaggcaugccugugug

SEQ ID NO: 2119443 - RNA, 21 nt, Human
ucccucucucuucugcuccac

SEQ ID NO: 2119444 - RNA, 13 nt, Human
ucccuccucaccu

SEQ ID NO: 2119445 - RNA, 19 nt, Human
ucccucucaggcaugccug

SEQ ID NO: 2119446 - RNA, 20 nt, Human
ucccucucaggcaugccugu

SEQ ID NO: 2119447 - RNA, 17 nt, Human
ucccugcccccuccccu

SEQ ID NO: 2119448 - RNA, 15 nt, Human
ucccuggcucucaga

SEQ ID NO: 2119449 - RNA, 16 nt, Human
ucccuggcucucagaa

SEQ ID NO: 2119450 - RNA, 18 nt, Human
ucccuggcucucagaagg

SEQ ID NO: 2119451 - RNA, 19 nt, Human
ucccuggcucucagaaggu

SEQ ID NO: 2119452 - RNA, 20 nt, Human
ucccuggcucucagaaggua

SEQ ID NO: 2119453 - RNA, 18 nt, Human
ucccuggcuuguaacucc

SEQ ID NO: 2119454 - RNA, 19 nt, Human
ucccuggcuuguaacucca

SEQ ID NO: 2119455 - RNA, 21 nt, Human
ucccuggcuuguaacuccacc

SEQ ID NO: 2119456 - RNA, 11 nt, Human
ucccuggcuug

SEQ ID NO: 2119457 - RNA, 19 nt, Human
ucccugggaggaaauuuga

SEQ ID NO: 2119458 - RNA, 22 nt, Human
ucccuggcuuguaacuccacca

SEQ ID NO: 2119459 - RNA, 16 nt, Human
ucccugggcagaaagu

SEQ ID NO: 2119460 - RNA, 12 nt, Human
ucccugggcauu

SEQ ID NO: 2119461 - RNA, 17 nt, Human
ucccugggcauugcuuu

SEQ ID NO: 2119462 - RNA, 18 nt, Human
ucccugccccucccuuca

SEQ ID NO: 2119463 - RNA, 23 nt, Human
ucccugcccagaauucccagcug

SEQ ID NO: 2119464 - RNA, 14 nt, Human
ucccuggcucccau

SEQ ID NO: 2119465 - RNA, 14 nt, Human
ucccugccccuccc

SEQ ID NO: 2119466 - RNA, 15 nt, Human
ucccugccagcaccc

SEQ ID NO: 2119467 - RNA, 18 nt, Human
ucccugccagcaccccca

SEQ ID NO: 2119468 - RNA, 13 nt, Human
ucccugccagcuc

SEQ ID NO: 2119469 - RNA, 16 nt, Human
ucccuucccauaagcu

SEQ ID NO: 2119470 - RNA, 18 nt, Human
ucccugggcauugcuuuc

SEQ ID NO: 2119471 - RNA, 12 nt, Human
uccgagaacuaa

SEQ ID NO: 2119472 - RNA, 12 nt, Human
uccgaggcaggg

SEQ ID NO: 2119473 - RNA, 13 nt, Human
uccgaggcagggu

SEQ ID NO: 2119474 - RNA, 14 nt, Human
uccgaggcaggguc

SEQ ID NO: 2119475 - RNA, 22 nt, Human
uccgcccucaaaaugacagcca

SEQ ID NO: 2119476 - RNA, 21 nt, Human
uccgcuuucuacccagcgagc

SEQ ID NO: 2119477 - RNA, 15 nt, Human
uccggaauccugucc

SEQ ID NO: 2119478 - RNA, 13 nt, Human
ucccuugagaccu

SEQ ID NO: 2119479 - RNA, 16 nt, Human
ucccuugagaccucag

SEQ ID NO: 2119480 - RNA, 17 nt, Human
ucccuugagaccucagc

SEQ ID NO: 2119481 - RNA, 21 nt, Human
uccgaaagggacuuggaagcu

SEQ ID NO: 2119482 - RNA, 17 nt, Human
ucccuucuuuuucuucu

SEQ ID NO: 2119483 - RNA, 16 nt, Human
ucccuucuucugucau

SEQ ID NO: 2119484 - RNA, 19 nt, Human
uccgaacacccucgaagcg

SEQ ID NO: 2119485 - RNA, 22 nt, Human
uccgaaagggacuuggaagcuc

SEQ ID NO: 2119486 - RNA, 12 nt, Human
uccuaucccauc

SEQ ID NO: 2119487 - RNA, 14 nt, Human
uccuaucccauccc

SEQ ID NO: 2119488 - RNA, 15 nt, Human
uccuaucccauccca

SEQ ID NO: 2119489 - RNA, 16 nt, Human
uccuaucccaucccau

SEQ ID NO: 2119490 - RNA, 18 nt, Human
uccuaucccaucccaucc

SEQ ID NO: 2119491 - RNA, 22 nt, Human
uccuaucuucauaucuaucaga

SEQ ID NO: 2119492 - RNA, 18 nt, Human
uccggaauccuguccuca

SEQ ID NO: 2119493 - RNA, 22 nt, Human
uccggaauccuguccucagcuu

SEQ ID NO: 2119494 - RNA, 15 nt, Human
uccggagauguagca

SEQ ID NO: 2119495 - RNA, 21 nt, Human
uccggaggagaagaaggaaau

SEQ ID NO: 2119496 - RNA, 15 nt, Human
uccggaguagcuggg

SEQ ID NO: 2119497 - RNA, 16 nt, Human
uccuaagcuauucagu

SEQ ID NO: 2119498 - RNA, 18 nt, Human
uccuaagcuauucaguaa

SEQ ID NO: 2119499 - RNA, 22 nt, Human
uccuccugagugaucccauuuc

SEQ ID NO: 2119500 - RNA, 23 nt, Human
uccuccugagugaucccauuucu

SEQ ID NO: 2119501 - RNA, 18 nt, Human
uccuccguccagccgcca

SEQ ID NO: 2119502 - RNA, 14 nt, Human
uccuccguccagcc

SEQ ID NO: 2119503 - RNA, 16 nt, Human
uccuccguccagccgc

SEQ ID NO: 2119504 - RNA, 14 nt, Human
uccuauuuuuuuaa

SEQ ID NO: 2119505 - RNA, 22 nt, Human
uccuauuuuuuuaaaaucacua

SEQ ID NO: 2119506 - RNA, 15 nt, Human
uccuauuucuuauag

SEQ ID NO: 2119507 - RNA, 16 nt, Human
uccuauuugcacugua

SEQ ID NO: 2119508 - RNA, 17 nt, Human
uccuccugcccaccugu

SEQ ID NO: 2119509 - RNA, 12 nt, Human
uccuccugccca

SEQ ID NO: 2119510 - RNA, 16 nt, Human
uccuccugcccaccug

SEQ ID NO: 2119511 - RNA, 13 nt, Human
uccucgcaagcug

SEQ ID NO: 2119512 - RNA, 14 nt, Human
uccucgcaagcugg

SEQ ID NO: 2119513 - RNA, 15 nt, Human
uccucgcaagcuggg

SEQ ID NO: 2119514 - RNA, 16 nt, Human
uccucgcaagcugggu

SEQ ID NO: 2119515 - RNA, 23 nt, Human
uccucuggcuggcuaacuggaag

SEQ ID NO: 2119516 - RNA, 9 nt, Human
uccucuggc

SEQ ID NO: 2119517 - RNA, 15 nt, Human
uccugaggaucagaa

SEQ ID NO: 2119518 - RNA, 18 nt, Human
uccugaggaucagaaagu

SEQ ID NO: 2119519 - RNA, 19 nt, Human
uccugaggaucagaaagua

SEQ ID NO: 2119520 - RNA, 13 nt, Human
uccucuguccagg

SEQ ID NO: 2119521 - RNA, 17 nt, Human
uccucuguccaggcacu

SEQ ID NO: 2119522 - RNA, 20 nt, Human
uccucugggcaggaccucag

SEQ ID NO: 2119523 - RNA, 22 nt, Human
uccucuguccaggcacugcugc

SEQ ID NO: 2119524 - RNA, 21 nt, Human
uggaacguuuuuccuguucuu

SEQ ID NO: 2119525 - RNA, 20 nt, Human
uggaacuagguuuuaauaau

SEQ ID NO: 2119526 - RNA, 18 nt, Human
uggaacuagguuuuaaua

SEQ ID NO: 2119527 - RNA, 16 nt, Human
uggaacucauuccugc

SEQ ID NO: 2119528 - RNA, 19 nt, Human
uggaacucauuccugccug

SEQ ID NO: 2119529 - RNA, 21 nt, Human
uggaacucauuccugccuguc

SEQ ID NO: 2119530 - RNA, 16 nt, Human
uggaacucuagggaua

SEQ ID NO: 2119531 - RNA, 14 nt, Human
uggaaguuuugcau

SEQ ID NO: 2119532 - RNA, 14 nt, Human
uggaauaacaugua

SEQ ID NO: 2119533 - RNA, 15 nt, Human
uggaauaacauguaa

SEQ ID NO: 2119534 - RNA, 19 nt, Human
uggaauaacauguaauuaa

SEQ ID NO: 2119535 - RNA, 21 nt, Human
uggaauauaaggaaagcaaua

SEQ ID NO: 2119536 - RNA, 13 nt, Human
uggaauauaaaga

SEQ ID NO: 2119537 - RNA, 14 nt, Human
uggaauauaaggaa

SEQ ID NO: 2119538 - RNA, 18 nt, Human
uggaauauaaggaaagca

SEQ ID NO: 2119539 - RNA, 18 nt, Human
uggacuauuauaauuuaa

SEQ ID NO: 2119540 - RNA, 18 nt, Human
uggaaugacaugugucaa

SEQ ID NO: 2119541 - RNA, 12 nt, Human
uggacagaagaa

SEQ ID NO: 2119542 - RNA, 15 nt, Human
uggacagcaaaacca

SEQ ID NO: 2119543 - RNA, 17 nt, Human
uggacagcaaaaccauu

SEQ ID NO: 2119544 - RNA, 18 nt, Human
uggacagcaaaaccauug

SEQ ID NO: 2119545 - RNA, 20 nt, Human
uggacagcaaaaccauugcu

SEQ ID NO: 2119546 - RNA, 21 nt, Human
uggacagcaaaaccauugcuu

SEQ ID NO: 2119547 - RNA, 22 nt, Human
uggacagcaaaaccauugcuuc

SEQ ID NO: 2119548 - RNA, 19 nt, Human
uggaaagacagcuucucau

SEQ ID NO: 2119549 - RNA, 14 nt, Human
uggaaacuuuucuu

SEQ ID NO: 2119550 - RNA, 21 nt, Human
uggaaacuguugccagagaug

SEQ ID NO: 2119551 - RNA, 14 nt, Human
uggaaacaggacca

SEQ ID NO: 2119552 - RNA, 17 nt, Human
uggaaacuguugccaga

SEQ ID NO: 2119553 - RNA, 13 nt, Human
uggaaacaaagug

SEQ ID NO: 2119554 - RNA, 14 nt, Human
uggaaacaaagugg

SEQ ID NO: 2119555 - RNA, 16 nt, Human
uggaaacaaaguggaa

SEQ ID NO: 2119556 - RNA, 20 nt, Human
uggaaacaaaguggaaggaa

SEQ ID NO: 2119557 - RNA, 21 nt, Human
uggaaacaaaguggaaggaaa

SEQ ID NO: 2119558 - RNA, 22 nt, Human
uggaaacaaaguggaaggaaag

SEQ ID NO: 2119559 - RNA, 23 nt, Human
uggaaacaaaguggaaggaaaga

SEQ ID NO: 2119560 - RNA, 24 nt, Human
uggaaacaaaguggaaggaaagau

SEQ ID NO: 2119561 - RNA, 16 nt, Human
uggaaagcaucaccuc

SEQ ID NO: 2119562 - RNA, 19 nt, Human
uggaaagcaucaccucagg

SEQ ID NO: 2119563 - RNA, 22 nt, Human
uggaaacuuuucuuaaaaaguu

SEQ ID NO: 2119564 - RNA, 23 nt, Human
uggaaagacagcuucucauccug

SEQ ID NO: 2119565 - RNA, 14 nt, Human
uggaacauccuugg

SEQ ID NO: 2119566 - RNA, 21 nt, Human
uggaaccacggagaucuccuu

SEQ ID NO: 2119567 - RNA, 20 nt, Human
uggaaagcaucaccucaggc

SEQ ID NO: 2119568 - RNA, 21 nt, Human
uggaaagcaucaccucaggcc

SEQ ID NO: 2119569 - RNA, 12 nt, Human
uggaaagccucu

SEQ ID NO: 2119570 - RNA, 17 nt, Human
uggaaaaauagccugcc

SEQ ID NO: 2119571 - RNA, 20 nt, Human
uggaaaaauagccugccucu

SEQ ID NO: 2119572 - RNA, 12 nt, Human
uggaaaaauauu

SEQ ID NO: 2119573 - RNA, 13 nt, Human
uggaaaaauccag

SEQ ID NO: 2119574 - RNA, 18 nt, Human
uggaaaaauccagaaaga

SEQ ID NO: 2119575 - RNA, 19 nt, Human
uggaaaaauccagaaagaa

SEQ ID NO: 2119576 - RNA, 18 nt, Human
ugcuuucuuuguuuggcu

SEQ ID NO: 2119577 - RNA, 20 nt, Human
ugcuuugaaacuagacuuga

SEQ ID NO: 2119578 - RNA, 11 nt, Human
ugcuuuacugg

SEQ ID NO: 2119579 - RNA, 15 nt, Human
ugcuuuaauugugaa

SEQ ID NO: 2119580 - RNA, 20 nt, Human
ugcuuuaauugugaauugau

SEQ ID NO: 2119581 - RNA, 19 nt, Human
ugcuuuaauuguuaagaua

SEQ ID NO: 2119582 - RNA, 16 nt, Human
ugcuggacaggucugg

SEQ ID NO: 2119583 - RNA, 19 nt, Human
ugcuggacaggucugggag

SEQ ID NO: 2119584 - RNA, 19 nt, Human
ugcuggacggcauuccugc

SEQ ID NO: 2119585 - RNA, 20 nt, Human
ugcuggacggcauuccugcu

SEQ ID NO: 2119586 - RNA, 19 nt, Human
uggcaggaguuggaagugu

SEQ ID NO: 2119587 - RNA, 19 nt, Human
uggcacgguggcucaggcc

SEQ ID NO: 2119588 - RNA, 20 nt, Human
uggcacgguggcucaggccu

SEQ ID NO: 2119589 - RNA, 13 nt, Human
uggcagcugcuuu

SEQ ID NO: 2119590 - RNA, 21 nt, Human
uggcacccggccccugcuggu

SEQ ID NO: 2119591 - RNA, 20 nt, Human
uggcaccugucgcccagugc

SEQ ID NO: 2119592 - RNA, 12 nt, Human
uggcaccuccua

SEQ ID NO: 2119593 - RNA, 15 nt, Human
uggcaccgccuucuc

SEQ ID NO: 2119594 - RNA, 16 nt, Human
uggcaccgccuucucu

SEQ ID NO: 2119595 - RNA, 13 nt, Human
uggcagugggagc

SEQ ID NO: 2119596 - RNA, 14 nt, Human
uggcaguaaagaga

SEQ ID NO: 2119597 - RNA, 17 nt, Human
uggcaguaaagagaaac

SEQ ID NO: 2119598 - RNA, 19 nt, Human
uggcaguaaagagaaacuu

SEQ ID NO: 2119599 - RNA, 22 nt, Human
uggcaguaaagagaaacuuugu

SEQ ID NO: 2119600 - RNA, 16 nt, Human
uggcagggugggaugg

SEQ ID NO: 2119601 - RNA, 17 nt, Human
uggcagggugggaugga

SEQ ID NO: 2119602 - RNA, 21 nt, Human
uggcagggguggaggagagcc

SEQ ID NO: 2119603 - RNA, 22 nt, Human
uggcagggguggaggagagccu

SEQ ID NO: 2119604 - RNA, 24 nt, Human
uggcagggguggaggagagccugg

SEQ ID NO: 2119605 - RNA, 22 nt, Human
uggcaggaugacccugcgaagg

SEQ ID NO: 2119606 - RNA, 20 nt, Human
uggccacuccagaccccugg

SEQ ID NO: 2119607 - RNA, 17 nt, Human
uggccacuccagacccc

SEQ ID NO: 2119608 - RNA, 14 nt, Human
uggcagcugucuca

SEQ ID NO: 2119609 - RNA, 22 nt, Human
uggcagugcagcaaccagagca

SEQ ID NO: 2119610 - RNA, 21 nt, Human
uggccagaugcaccagcccuu

SEQ ID NO: 2119611 - RNA, 20 nt, Human
uggccagaugcaccagcccu

SEQ ID NO: 2119612 - RNA, 12 nt, Human
uggccagcagcu

SEQ ID NO: 2119613 - RNA, 13 nt, Human
uggccagcagcuu

SEQ ID NO: 2119614 - RNA, 21 nt, Human
uggccagccaacuuuugcaug

SEQ ID NO: 2119615 - RNA, 14 nt, Human
uggccagcagcuug

SEQ ID NO: 2119616 - RNA, 23 nt, Human
uggccaggcagaucugugcccca

SEQ ID NO: 2119617 - RNA, 14 nt, Human
uggccaggauggag

SEQ ID NO: 2119618 - RNA, 12 nt, Human
uggccaggaugg

SEQ ID NO: 2119619 - RNA, 12 nt, Human
uggccaggcaga

SEQ ID NO: 2119620 - RNA, 16 nt, Human
uggccaggcagaucug

SEQ ID NO: 2119621 - RNA, 17 nt, Human
uggccaggcagaucugu

SEQ ID NO: 2119622 - RNA, 19 nt, Human
uggccaggcagaucugugc

SEQ ID NO: 2119623 - RNA, 20 nt, Human
uggccaggcagaucugugcc

SEQ ID NO: 2119624 - RNA, 23 nt, Human
uggccaggagcucuucaggccuc

SEQ ID NO: 2119625 - RNA, 20 nt, Human
uggccaggagcucuucaggc

SEQ ID NO: 2119626 - RNA, 22 nt, Human
uggccaggagcucuucaggccu

SEQ ID NO: 2119627 - RNA, 14 nt, Human
uggccaggagcucu

SEQ ID NO: 2119628 - RNA, 15 nt, Human
uggccaggagcucuu

SEQ ID NO: 2119629 - RNA, 16 nt, Human
uggccaggagcucuuc

SEQ ID NO: 2119630 - RNA, 14 nt, Human
uggacuccucuguc

SEQ ID NO: 2119631 - RNA, 15 nt, Human
uggacuccucugucc

SEQ ID NO: 2119632 - RNA, 17 nt, Human
uggacucuacacuguga

SEQ ID NO: 2119633 - RNA, 21 nt, Human
uggacucuacacugugaacuu

SEQ ID NO: 2119634 - RNA, 15 nt, Human
uggacucuccccucu

SEQ ID NO: 2119635 - RNA, 16 nt, Human
uggacucuccccucuu

SEQ ID NO: 2119636 - RNA, 17 nt, Human
uggacucuccccucuua

SEQ ID NO: 2119637 - RNA, 21 nt, Human
uggacucuccccucuuaugua

SEQ ID NO: 2119638 - RNA, 20 nt, Human
uggagggaaacaccaaacuc

SEQ ID NO: 2119639 - RNA, 14 nt, Human
uggaggagaagaau

SEQ ID NO: 2119640 - RNA, 21 nt, Human
uggaggagaagaauuuucaga

SEQ ID NO: 2119641 - RNA, 14 nt, Human
uggaggagaaggac

SEQ ID NO: 2119642 - RNA, 11 nt, Human
uggaggagagc

SEQ ID NO: 2119643 - RNA, 15 nt, Human
uggaggagagccugg

SEQ ID NO: 2119644 - RNA, 16 nt, Human
uggaggagagccuggu

SEQ ID NO: 2119645 - RNA, 19 nt, Human
uggaggagcucaggacacu

SEQ ID NO: 2119646 - RNA, 21 nt, Human
uggauuuauguuguauagauu

SEQ ID NO: 2119647 - RNA, 22 nt, Human
uggauuuauguuguauagauua

SEQ ID NO: 2119648 - RNA, 14 nt, Human
uggauuucagaaag

SEQ ID NO: 2119649 - RNA, 17 nt, Human
uggauccccagugaaaa

SEQ ID NO: 2119650 - RNA, 19 nt, Human
uggauccccagugaaaacu

SEQ ID NO: 2119651 - RNA, 20 nt, Human
uggauccccagugaaaacua

SEQ ID NO: 2119652 - RNA, 19 nt, Human
uggaucaguccuuugauca

SEQ ID NO: 2119653 - RNA, 16 nt, Human
uggaucaguccuuuga

SEQ ID NO: 2119654 - RNA, 17 nt, Human
uggauuugccugugcca

SEQ ID NO: 2119655 - RNA, 18 nt, Human
uggauuugccugugccac

SEQ ID NO: 2119656 - RNA, 13 nt, Human
ugguauagaaaug

SEQ ID NO: 2119657 - RNA, 22 nt, Human
ugguauagaaaugcugguuuuu

SEQ ID NO: 2119658 - RNA, 14 nt, Human
ugguauagaaaugc

SEQ ID NO: 2119659 - RNA, 16 nt, Human
ugguauagaaaugcug

SEQ ID NO: 2119660 - RNA, 18 nt, Human
ugguaugaucacggcuca

SEQ ID NO: 2119661 - RNA, 16 nt, Human
ugguaucuuaaagugu

SEQ ID NO: 2119662 - RNA, 19 nt, Human
ugguauucaggauuacaug

SEQ ID NO: 2119663 - RNA, 16 nt, Human
uggguaacuagggaag

SEQ ID NO: 2119664 - RNA, 19 nt, Human
ugggguuuaucagaauucu

SEQ ID NO: 2119665 - RNA, 12 nt, Human
uggguaaauuca

SEQ ID NO: 2119666 - RNA, 15 nt, Human
uggguggggugagga

SEQ ID NO: 2119667 - RNA, 20 nt, Human
uggguggggugaggaccacu

SEQ ID NO: 2119668 - RNA, 23 nt, Human
uggguguaacaggucuccucuua

SEQ ID NO: 2119669 - RNA, 18 nt, Human
uggguguguguagccaag

SEQ ID NO: 2119670 - RNA, 22 nt, Human
uggguguaacaggucuccucuu

SEQ ID NO: 2119671 - RNA, 20 nt, Human
uggguguauuaggacuggcu

SEQ ID NO: 2119672 - RNA, 20 nt, Human
uggguguauuuauuuuccuc

SEQ ID NO: 2119673 - RNA, 17 nt, Human
ugggcuucaguggcagc

SEQ ID NO: 2119674 - RNA, 14 nt, Human
ugggcuuguuuucu

SEQ ID NO: 2119675 - RNA, 17 nt, Human
ugggcuuugauuccauc

SEQ ID NO: 2119676 - RNA, 20 nt, Human
ugggcuuugauuccaucucc

SEQ ID NO: 2119677 - RNA, 23 nt, Human
ugggcuuugauuccaucuccuug

SEQ ID NO: 2119678 - RNA, 15 nt, Human
ugggcuucaguggca

SEQ ID NO: 2119679 - RNA, 12 nt, Human
ugggcugugagu

SEQ ID NO: 2119680 - RNA, 15 nt, Human
ugggcugugagugua

SEQ ID NO: 2119681 - RNA, 22 nt, Human
ugggcugugaguguaaguguga

SEQ ID NO: 2119682 - RNA, 17 nt, Human
ugggcuggugucaccug

SEQ ID NO: 2119683 - RNA, 16 nt, Human
ugggcuaguugggcuu

SEQ ID NO: 2119684 - RNA, 16 nt, Human
ugggcuacuuuguccu

SEQ ID NO: 2119685 - RNA, 22 nt, Human
ugggcuaagugauccucccacc

SEQ ID NO: 2119686 - RNA, 16 nt, Human
ugggggcagagggcag

SEQ ID NO: 2119687 - RNA, 15 nt, Human
ugggggaugcuucau

SEQ ID NO: 2119688 - RNA, 17 nt, Human
ugggggcagagggcaga

SEQ ID NO: 2119689 - RNA, 13 nt, Human
ugggggcagaggg

SEQ ID NO: 2119690 - RNA, 19 nt, Human
uggggaacaaggguggcau

SEQ ID NO: 2119691 - RNA, 15 nt, Human
uggggaacaagggug

SEQ ID NO: 2119692 - RNA, 21 nt, Human
ugggggaucacagccucugaa

SEQ ID NO: 2119693 - RNA, 20 nt, Human
ugggggaugacuagaggcag

SEQ ID NO: 2119694 - RNA, 15 nt, Human
uggggauuucuccca

SEQ ID NO: 2119695 - RNA, 20 nt, Human
ugggggaucacagccucuga

SEQ ID NO: 2119696 - RNA, 21 nt, Human
ugggauuacagggaugagcca

SEQ ID NO: 2119697 - RNA, 13 nt, Human
ugggaucugacug

SEQ ID NO: 2119698 - RNA, 14 nt, Human
ugggaucugacugc

SEQ ID NO: 2119699 - RNA, 16 nt, Human
ugggaucugacugcac

SEQ ID NO: 2119700 - RNA, 16 nt, Human
ugggauuacaggugug

SEQ ID NO: 2119701 - RNA, 22 nt, Human
ugggagcugccuguucagcucc

SEQ ID NO: 2119702 - RNA, 21 nt, Human
ugggagcugccuguucagcuc

SEQ ID NO: 2119703 - RNA, 17 nt, Human
ugggagcugccuguuca

SEQ ID NO: 2119704 - RNA, 15 nt, Human
ugggagugagcuggu

SEQ ID NO: 2119705 - RNA, 20 nt, Human
ugggaauguuacauuguuug

SEQ ID NO: 2119706 - RNA, 14 nt, Human
uggcuuuggucucu

SEQ ID NO: 2119707 - RNA, 14 nt, Human
ugggagcugccugu

SEQ ID NO: 2119708 - RNA, 13 nt, Human
ugggagcugccug

SEQ ID NO: 2119709 - RNA, 12 nt, Human
ugggagcugccu

SEQ ID NO: 2119710 - RNA, 16 nt, Human
ugggagaggcagagug

SEQ ID NO: 2119711 - RNA, 15 nt, Human
uggcuuucagagccu

SEQ ID NO: 2119712 - RNA, 17 nt, Human
uggcuuucagagccucc

SEQ ID NO: 2119713 - RNA, 16 nt, Human
uggcuuuccagucaua

SEQ ID NO: 2119714 - RNA, 13 nt, Human
uggcuuuggaagc

SEQ ID NO: 2119715 - RNA, 17 nt, Human
uggcuuugcccaaccuc

SEQ ID NO: 2119716 - RNA, 20 nt, Human
uggcuuugcccaaccucagc

SEQ ID NO: 2119717 - RNA, 22 nt, Human
uggcuuugcccaaccucagcaa

SEQ ID NO: 2119718 - RNA, 23 nt, Human
uggcuuugcccaaccucagcaac

SEQ ID NO: 2119719 - RNA, 20 nt, Human
uggcuugaagccaagucagc

SEQ ID NO: 2119720 - RNA, 15 nt, Human
uggcuucuguuucua

SEQ ID NO: 2119721 - RNA, 16 nt, Human
uggcuucuguuucuag

SEQ ID NO: 2119722 - RNA, 12 nt, Human
uggcuucugaug

SEQ ID NO: 2119723 - RNA, 15 nt, Human
uggcuucugaugaau

SEQ ID NO: 2119724 - RNA, 17 nt, Human
uggcuucugaugaaucu

SEQ ID NO: 2119725 - RNA, 20 nt, Human
uggcuucugaugaaucuugc

SEQ ID NO: 2119726 - RNA, 14 nt, Human
uggcuucuggagcc

SEQ ID NO: 2119727 - RNA, 22 nt, Human
uggcugguaagggccaaguccc

SEQ ID NO: 2119728 - RNA, 22 nt, Human
uggcuggucaacuugagcaugu

SEQ ID NO: 2119729 - RNA, 19 nt, Human
uggcucugaccgaaacagc

SEQ ID NO: 2119730 - RNA, 21 nt, Human
uggcugggggccucagugcca

SEQ ID NO: 2119731 - RNA, 14 nt, Human
uggcuggucaacuu

SEQ ID NO: 2119732 - RNA, 17 nt, Human
uggcucuggaaugacau

SEQ ID NO: 2119733 - RNA, 13 nt, Human
uggcucugagaag

SEQ ID NO: 2119734 - RNA, 15 nt, Human
uggcucugagaaggg

SEQ ID NO: 2119735 - RNA, 18 nt, Human
ugcccaggcuggagugca

SEQ ID NO: 2119736 - RNA, 20 nt, Human
ugcccaggcuggagugcaau

SEQ ID NO: 2119737 - RNA, 13 nt, Human
ugcccaggcugga

SEQ ID NO: 2119738 - RNA, 21 nt, Human
ugcccacccguggagauggga

SEQ ID NO: 2119739 - RNA, 20 nt, Human
ugcccagggcucagccuggu

SEQ ID NO: 2119740 - RNA, 21 nt, Human
ugcccagggcucagccuggug

SEQ ID NO: 2119741 - RNA, 13 nt, Human
ugcccaggcuggc

SEQ ID NO: 2119742 - RNA, 11 nt, Human
ugcccaggcug

SEQ ID NO: 2119743 - RNA, 20 nt, Human
ugccauccagguucagcuug

SEQ ID NO: 2119744 - RNA, 21 nt, Human
ugccauccagguucagcuugu

SEQ ID NO: 2119745 - RNA, 22 nt, Human
ugcccacccucuggagaaggug

SEQ ID NO: 2119746 - RNA, 14 nt, Human
ugcccaccugccca

SEQ ID NO: 2119747 - RNA, 15 nt, Human
ugcccaccugcccau

SEQ ID NO: 2119748 - RNA, 17 nt, Human
ugcccaccugcccauca

SEQ ID NO: 2119749 - RNA, 19 nt, Human
ugcccaccugcccaucaca

SEQ ID NO: 2119750 - RNA, 15 nt, Human
ugccccagggcuccc

SEQ ID NO: 2119751 - RNA, 13 nt, Human
ugccccucccuuc

SEQ ID NO: 2119752 - RNA, 22 nt, Human
ugccccucccccaacccccacc

SEQ ID NO: 2119753 - RNA, 23 nt, Human
ugccccucccccaacccccaccc

SEQ ID NO: 2119754 - RNA, 12 nt, Human
ugccccucccag

SEQ ID NO: 2119755 - RNA, 21 nt, Human
ugccccucccagaacacacuc

SEQ ID NO: 2119756 - RNA, 12 nt, Human
ugccccuccccc

SEQ ID NO: 2119757 - RNA, 17 nt, Human
ugccccucccccaaccc

SEQ ID NO: 2119758 - RNA, 21 nt, Human
ugccccucccccaacccccac

SEQ ID NO: 2119759 - RNA, 14 nt, Human
ugcccaguuaaucu

SEQ ID NO: 2119760 - RNA, 20 nt, Human
ugcccaguuaaucuugcuuu

SEQ ID NO: 2119761 - RNA, 12 nt, Human
ugcccaguguug

SEQ ID NO: 2119762 - RNA, 18 nt, Human
ugcccaguguuguuugua

SEQ ID NO: 2119763 - RNA, 19 nt, Human
ugcccaguguuguuuguaa

SEQ ID NO: 2119764 - RNA, 20 nt, Human
ugcccaguguuguuuguaaa

SEQ ID NO: 2119765 - RNA, 21 nt, Human
ugcccaguguuguuuguaaau

SEQ ID NO: 2119766 - RNA, 22 nt, Human
ugcccaguguuguuuguaaaua

SEQ ID NO: 2119767 - RNA, 23 nt, Human
ugcccagggcucagccugguggg

SEQ ID NO: 2119768 - RNA, 23 nt, Human
ugcccaguuaaucuugcuuucuu

SEQ ID NO: 2119769 - RNA, 22 nt, Human
ugcccaguuaaucuugcuuucu

SEQ ID NO: 2119770 - RNA, 20 nt, Human
ugcccaucacaggguugggc

SEQ ID NO: 2119771 - RNA, 23 nt, Human
ugcccaucacaggguugggccca

SEQ ID NO: 2119772 - RNA, 16 nt, Human
ugcccauccugucugu

SEQ ID NO: 2119773 - RNA, 18 nt, Human
ugcauauccugagccauc

SEQ ID NO: 2119774 - RNA, 16 nt, Human
ugcauauccugagcca

SEQ ID NO: 2119775 - RNA, 17 nt, Human
ugcauauccugagccau

SEQ ID NO: 2119776 - RNA, 15 nt, Human
ugcauauguaugacu

SEQ ID NO: 2119777 - RNA, 12 nt, Human
ugcauauguaug

SEQ ID NO: 2119778 - RNA, 22 nt, Human
ugccaccaggagaaccacuaca

SEQ ID NO: 2119779 - RNA, 14 nt, Human
ugccaccaggagaa

SEQ ID NO: 2119780 - RNA, 17 nt, Human
ugccaccaggagaacca

SEQ ID NO: 2119781 - RNA, 12 nt, Human
ugccaccaggag

SEQ ID NO: 2119782 - RNA, 13 nt, Human
ugccaccaggaga

SEQ ID NO: 2119783 - RNA, 22 nt, Human
ugccacuacggaauaguuggcu

SEQ ID NO: 2119784 - RNA, 19 nt, Human
ugccacccuggggagaaag

SEQ ID NO: 2119785 - RNA, 12 nt, Human
ugccacccacca

SEQ ID NO: 2119786 - RNA, 17 nt, Human
ugccacccaccagggcg

SEQ ID NO: 2119787 - RNA, 18 nt, Human
ugccaccauggccagcca

SEQ ID NO: 2119788 - RNA, 22 nt, Human
ugccagguuuuuggucugaccc

SEQ ID NO: 2119789 - RNA, 19 nt, Human
ugccagguuuuuggucuga

SEQ ID NO: 2119790 - RNA, 18 nt, Human
ugccagguuuuuggucug

SEQ ID NO: 2119791 - RNA, 10 nt, Human
ugccaggcau

SEQ ID NO: 2119792 - RNA, 16 nt, Human
ugccacuaggcugggu

SEQ ID NO: 2119793 - RNA, 18 nt, Human
ugccacuaggcugggugc

SEQ ID NO: 2119794 - RNA, 21 nt, Human
ugccacuaggcugggugccca

SEQ ID NO: 2119795 - RNA, 22 nt, Human
ugccacuaggcugggugcccac

SEQ ID NO: 2119796 - RNA, 23 nt, Human
ugccacuaggcugggugcccaca

SEQ ID NO: 2119797 - RNA, 13 nt, Human
ugcauauccugag

SEQ ID NO: 2119798 - RNA, 17 nt, Human
ugcauauauacauauau

SEQ ID NO: 2119799 - RNA, 17 nt, Human
ugcaguggcucacgccu

SEQ ID NO: 2119800 - RNA, 22 nt, Human
ugcagugguaugaucacggcuc

SEQ ID NO: 2119801 - RNA, 16 nt, Human
ugcagugcuuccaagg

SEQ ID NO: 2119802 - RNA, 19 nt, Human
ugcaggccccgcuugucca

SEQ ID NO: 2119803 - RNA, 13 nt, Human
ugcagugagcuga

SEQ ID NO: 2119804 - RNA, 22 nt, Human
ugcagugauuaaggucucucuu

SEQ ID NO: 2119805 - RNA, 10 nt, Human
ugcaggcccc

SEQ ID NO: 2119806 - RNA, 20 nt, Human
ugcaggccaagagcagaggc

SEQ ID NO: 2119807 - RNA, 21 nt, Human
ugcaggccaagagcagaggca

SEQ ID NO: 2119808 - RNA, 23 nt, Human
ugcagcaugaccugugaccagca

SEQ ID NO: 2119809 - RNA, 22 nt, Human
ugcagcaguucaccuauuucaa

SEQ ID NO: 2119810 - RNA, 15 nt, Human
ugcagcauaugagga

SEQ ID NO: 2119811 - RNA, 17 nt, Human
ugcagcauaugaggaug

SEQ ID NO: 2119812 - RNA, 20 nt, Human
ugcagcauaugaggaugcag

SEQ ID NO: 2119813 - RNA, 13 nt, Human
ugcagcaugaccu

SEQ ID NO: 2119814 - RNA, 17 nt, Human
ugcagcaugaccuguga

SEQ ID NO: 2119815 - RNA, 19 nt, Human
ugcagcaugaccugugacc

SEQ ID NO: 2119816 - RNA, 22 nt, Human
ugcagcaugaccugugaccagc

SEQ ID NO: 2119817 - RNA, 18 nt, Human
ugcagcagugagucucuu

SEQ ID NO: 2119818 - RNA, 22 nt, Human
ugcagcagugagucucuucaga

SEQ ID NO: 2119819 - RNA, 12 nt, Human
ugcagcagcuug

SEQ ID NO: 2119820 - RNA, 16 nt, Human
ugcagcagcuugcugc

SEQ ID NO: 2119821 - RNA, 19 nt, Human
ugcagcagcuugcugcacc

SEQ ID NO: 2119822 - RNA, 20 nt, Human
ugcagcagcuugcugcaccc

SEQ ID NO: 2119823 - RNA, 15 nt, Human
ugcaccgggccacag

SEQ ID NO: 2119824 - RNA, 14 nt, Human
ugcaccgggccaca

SEQ ID NO: 2119825 - RNA, 22 nt, Human
ugcaccgggccacagagaaagu

SEQ ID NO: 2119826 - RNA, 17 nt, Human
ugcaccgggccacagag

SEQ ID NO: 2119827 - RNA, 17 nt, Human
ugcacgcccauguguga

SEQ ID NO: 2119828 - RNA, 19 nt, Human
ugcacgcccaugugugagu

SEQ ID NO: 2119829 - RNA, 22 nt, Human
ugcacgcccaugugugagugug

SEQ ID NO: 2119830 - RNA, 19 nt, Human
ugcacgcacacugucugcc

SEQ ID NO: 2119831 - RNA, 15 nt, Human
ugcacgcccaugugu

SEQ ID NO: 2119832 - RNA, 21 nt, Human
ugcagagcaggaaacaugacu

SEQ ID NO: 2119833 - RNA, 13 nt, Human
ugcagaggggaaa

SEQ ID NO: 2119834 - RNA, 13 nt, Human
ugcagcagagccu

SEQ ID NO: 2119835 - RNA, 20 nt, Human
ugcagcagcaacacaauguu

SEQ ID NO: 2119836 - RNA, 22 nt, Human
ugcagcagcaacacaauguuau

SEQ ID NO: 2119837 - RNA, 15 nt, Human
ugcacuguaugcugg

SEQ ID NO: 2119838 - RNA, 16 nt, Human
ugcacuguaugcugga

SEQ ID NO: 2119839 - RNA, 21 nt, Human
ugcacuggaguccagucucuu

SEQ ID NO: 2119840 - RNA, 15 nt, Human
ugcacuggaguccag

SEQ ID NO: 2119841 - RNA, 18 nt, Human
ugcacuggaguccagucu

SEQ ID NO: 2119842 - RNA, 19 nt, Human
ugcacuggaguccagucuc

SEQ ID NO: 2119843 - RNA, 20 nt, Human
ugcacuggaguccagucucu

SEQ ID NO: 2119844 - RNA, 15 nt, Human
ugccugugagccagu

SEQ ID NO: 2119845 - RNA, 16 nt, Human
ugccugugagccaguc

SEQ ID NO: 2119846 - RNA, 14 nt, Human
ugccugugaggcag

SEQ ID NO: 2119847 - RNA, 16 nt, Human
ugccugugaggcaggg

SEQ ID NO: 2119848 - RNA, 19 nt, Human
ugccuucguuaacugugua

SEQ ID NO: 2119849 - RNA, 20 nt, Human
ugccuucguuaacuguguau

SEQ ID NO: 2119850 - RNA, 22 nt, Human
ugccuucguuaacuguguaugu

SEQ ID NO: 2119851 - RNA, 17 nt, Human
ugccugugaggcagggg

SEQ ID NO: 2119852 - RNA, 21 nt, Human
ugccuucuucggggaacuccu

SEQ ID NO: 2119853 - RNA, 22 nt, Human
ugccuucuucggggaacuccug

SEQ ID NO: 2119854 - RNA, 23 nt, Human
ugccuucuucggggaacuccugg

SEQ ID NO: 2119855 - RNA, 21 nt, Human
ugcgaucuggguucacugcaa

SEQ ID NO: 2119856 - RNA, 20 nt, Human
ugcgaucuggguucacugca

SEQ ID NO: 2119857 - RNA, 19 nt, Human
ugcgaucuggguucacugc

SEQ ID NO: 2119858 - RNA, 15 nt, Human
ugcgaucuggguuca

SEQ ID NO: 2119859 - RNA, 15 nt, Human
ugccuugaagccacu

SEQ ID NO: 2119860 - RNA, 13 nt, Human
ugcgagugugugc

SEQ ID NO: 2119861 - RNA, 17 nt, Human
ugcgagugugugcaugu

SEQ ID NO: 2119862 - RNA, 14 nt, Human
ugccuugaagccac

SEQ ID NO: 2119863 - RNA, 14 nt, Human
ugcgaucuggguuc

SEQ ID NO: 2119864 - RNA, 22 nt, Human
ugcgagugugugcaugugugug

SEQ ID NO: 2119865 - RNA, 19 nt, Human
ugcgagugugugcaugugu

SEQ ID NO: 2119866 - RNA, 21 nt, Human
ugcgagugugugcaugugugu

SEQ ID NO: 2119867 - RNA, 15 nt, Human
ugcgaucauggcuca

SEQ ID NO: 2119868 - RNA, 21 nt, Human
ugcgaucauggcucacugcag

SEQ ID NO: 2119869 - RNA, 23 nt, Human
ugcgaucauggcucacugcagcc

SEQ ID NO: 2119870 - RNA, 22 nt, Human
ugcgugaaacacaccaggcugu

SEQ ID NO: 2119871 - RNA, 23 nt, Human
ugcgucuuagcagugauuuuuau

SEQ ID NO: 2119872 - RNA, 14 nt, Human
ugcgugaaacacac

SEQ ID NO: 2119873 - RNA, 22 nt, Human
ugcgccuacaggagugagcacu

SEQ ID NO: 2119874 - RNA, 16 nt, Human
ugcgccuacaggagug

SEQ ID NO: 2119875 - RNA, 14 nt, Human
ugcgccuacaggag

SEQ ID NO: 2119876 - RNA, 21 nt, Human
ugcuaaauuuucaguagggcu

SEQ ID NO: 2119877 - RNA, 18 nt, Human
ugcuaaauguaagaauca

SEQ ID NO: 2119878 - RNA, 24 nt, Human
ugcuaaauguaagaaucauuguaa

SEQ ID NO: 2119879 - RNA, 15 nt, Human
ugcuaaauuuucagu

SEQ ID NO: 2119880 - RNA, 15 nt, Human
ugcuaaaugugaaug

SEQ ID NO: 2119881 - RNA, 12 nt, Human
ugcuaaaucucc

SEQ ID NO: 2119882 - RNA, 16 nt, Human
ugcuaaaucuccuauu

SEQ ID NO: 2119883 - RNA, 17 nt, Human
ugcuaaaucuccuauuu

SEQ ID NO: 2119884 - RNA, 20 nt, Human
ugcuaaauggucgcccagga

SEQ ID NO: 2119885 - RNA, 21 nt, Human
ugcuaaauggucgcccaggag

SEQ ID NO: 2119886 - RNA, 22 nt, Human
ugcuaaauggucgcccaggaga

SEQ ID NO: 2119887 - RNA, 15 nt, Human
ugccuguaguuagga

SEQ ID NO: 2119888 - RNA, 22 nt, Human
ugccugucuccuuugcaggcuc

SEQ ID NO: 2119889 - RNA, 23 nt, Human
ugccugucuccuuugcaggcuca

SEQ ID NO: 2119890 - RNA, 13 nt, Human
ugccuguaguuag

SEQ ID NO: 2119891 - RNA, 15 nt, Human
ugccuguaaacauag

SEQ ID NO: 2119892 - RNA, 15 nt, Human
ugccuguaacuugag

SEQ ID NO: 2119893 - RNA, 16 nt, Human
ugccugguggcagcug

SEQ ID NO: 2119894 - RNA, 15 nt, Human
ugccugguggcagcu

SEQ ID NO: 2119895 - RNA, 14 nt, Human
ugccugguggcagc

SEQ ID NO: 2119896 - RNA, 19 nt, Human
ugccugagggcgaggggag

SEQ ID NO: 2119897 - RNA, 18 nt, Human
ugccugagcaccucccag

SEQ ID NO: 2119898 - RNA, 19 nt, Human
ugccugagcaccucccagc

SEQ ID NO: 2119899 - RNA, 20 nt, Human
ugccugagcaccucccagcc

SEQ ID NO: 2119900 - RNA, 22 nt, Human
ugccugagcaccucccagcccc

SEQ ID NO: 2119901 - RNA, 18 nt, Human
ugccugggaaccuuccug

SEQ ID NO: 2119902 - RNA, 21 nt, Human
ugccugggaaccuuccugucu

SEQ ID NO: 2119903 - RNA, 14 nt, Human
ugccugggaaugua

SEQ ID NO: 2119904 - RNA, 15 nt, Human
ugccugggaauguau

SEQ ID NO: 2119905 - RNA, 16 nt, Human
ugccugggaauguauu

SEQ ID NO: 2119906 - RNA, 22 nt, Human
ugccugggcucccuugugcgug

SEQ ID NO: 2119907 - RNA, 18 nt, Human
ugccuggucuccugcccc

SEQ ID NO: 2119908 - RNA, 20 nt, Human
ugccuggucuccugccccca

SEQ ID NO: 2119909 - RNA, 21 nt, Human
ugccuggucuccugcccccac

SEQ ID NO: 2119910 - RNA, 19 nt, Human
ugccucgaacuggcugcaa

SEQ ID NO: 2119911 - RNA, 18 nt, Human
ugccucgaacuggcugca

SEQ ID NO: 2119912 - RNA, 20 nt, Human
ugccucgaacuggcugcaaa

SEQ ID NO: 2119913 - RNA, 14 nt, Human
ugccccuucuacac

SEQ ID NO: 2119914 - RNA, 15 nt, Human
ugccccuucuacacu

SEQ ID NO: 2119915 - RNA, 16 nt, Human
ugccccuucuacacuc

SEQ ID NO: 2119916 - RNA, 18 nt, Human
ugccccuucuacacucuc

SEQ ID NO: 2119917 - RNA, 20 nt, Human
ugccccuucuacacucuccu

SEQ ID NO: 2119918 - RNA, 22 nt, Human
ugccccuucuacacucuccugg

SEQ ID NO: 2119919 - RNA, 23 nt, Human
ugccccuucuacacucuccuggg

SEQ ID NO: 2119920 - RNA, 14 nt, Human
ugccccuggcucug

SEQ ID NO: 2119921 - RNA, 16 nt, Human
ugccugaaccuuccau

SEQ ID NO: 2119922 - RNA, 13 nt, Human
ugccugaagaaca

SEQ ID NO: 2119923 - RNA, 18 nt, Human
ugccucuuuccuguuguu

SEQ ID NO: 2119924 - RNA, 14 nt, Human
ugccucuuuccugu

SEQ ID NO: 2119925 - RNA, 18 nt, Human
ugccucucccuggcccuc

SEQ ID NO: 2119926 - RNA, 20 nt, Human
ugcugaacaaaaaauaaaaa

SEQ ID NO: 2119927 - RNA, 13 nt, Human
ugcugaagcuuau

SEQ ID NO: 2119928 - RNA, 18 nt, Human
ugcugaagcuuauuaaug

SEQ ID NO: 2119929 - RNA, 19 nt, Human
ugcugaagcuuauuaaugc

SEQ ID NO: 2119930 - RNA, 23 nt, Human
ugcugaaggaauaaauugcuccu

SEQ ID NO: 2119931 - RNA, 20 nt, Human
ugcugaagcuuauuaaugcu

SEQ ID NO: 2119932 - RNA, 21 nt, Human
ugcugaagcuuauuaaugcua

SEQ ID NO: 2119933 - RNA, 22 nt, Human
ugcugaagcuuauuaaugcuaa

SEQ ID NO: 2119934 - RNA, 23 nt, Human
ugcugaagcuuauuaaugcuaag

SEQ ID NO: 2119935 - RNA, 23 nt, Human
ugcugacagacacaggcccggcu

SEQ ID NO: 2119936 - RNA, 22 nt, Human
ugcugacagacacaggcccggc

SEQ ID NO: 2119937 - RNA, 15 nt, Human
ugcugacagcugacc

SEQ ID NO: 2119938 - RNA, 21 nt, Human
ugcugcuaaucuucagggcac

SEQ ID NO: 2119939 - RNA, 22 nt, Human
ugcugcuaaucuucagggcacu

SEQ ID NO: 2119940 - RNA, 17 nt, Human
ugcugcuaaucuucagg

SEQ ID NO: 2119941 - RNA, 14 nt, Human
ugcugcgucuccca

SEQ ID NO: 2119942 - RNA, 15 nt, Human
ugcugcgucucccau

SEQ ID NO: 2119943 - RNA, 15 nt, Human
ugcugcgcccuuccc

SEQ ID NO: 2119944 - RNA, 17 nt, Human
ugcugcuuuuccuuggg

SEQ ID NO: 2119945 - RNA, 20 nt, Human
ugcugcuuuuccuuggggca

SEQ ID NO: 2119946 - RNA, 19 nt, Human
ugcugcuauccugccaaaa

SEQ ID NO: 2119947 - RNA, 14 nt, Human
ugcuccucucccca

SEQ ID NO: 2119948 - RNA, 16 nt, Human
ugcucaguagucagac

SEQ ID NO: 2119949 - RNA, 18 nt, Human
ugcucagguacagagaag

SEQ ID NO: 2119950 - RNA, 22 nt, Human
ugcucagguacagagaaggaau

SEQ ID NO: 2119951 - RNA, 16 nt, Human
ugcucagggucaauuu

SEQ ID NO: 2119952 - RNA, 20 nt, Human
ugcucagggucaauuucuuu

SEQ ID NO: 2119953 - RNA, 20 nt, Human
ugcucagcaaggggcucugc

SEQ ID NO: 2119954 - RNA, 14 nt, Human
ugcucagggcugac

SEQ ID NO: 2119955 - RNA, 19 nt, Human
ugcucaggggcguguggcu

SEQ ID NO: 2119956 - RNA, 16 nt, Human
ugcucacauaucuguc

SEQ ID NO: 2119957 - RNA, 15 nt, Human
ugcucacauaucugu

SEQ ID NO: 2119958 - RNA, 19 nt, Human
ugcucacacuccacauccc

SEQ ID NO: 2119959 - RNA, 13 nt, Human
ugcucacagcugu

SEQ ID NO: 2119960 - RNA, 14 nt, Human
ugcucacagcugua

SEQ ID NO: 2119961 - RNA, 18 nt, Human
ugcuccucuccccagcaa

SEQ ID NO: 2119962 - RNA, 17 nt, Human
ugcuccucuccccagca

SEQ ID NO: 2119963 - RNA, 23 nt, Human
ugcucgauuauucccuguacaau

SEQ ID NO: 2119964 - RNA, 23 nt, Human
ugcucuaucucacagcacacuca

SEQ ID NO: 2119965 - RNA, 21 nt, Human
ugcucuccucuugccacugcc

SEQ ID NO: 2119966 - RNA, 18 nt, Human
ugcucuccucuugccacu

SEQ ID NO: 2119967 - RNA, 14 nt, Human
ugcucuccucuugc

SEQ ID NO: 2119968 - RNA, 14 nt, Human
ugcucuccccugcc

SEQ ID NO: 2119969 - RNA, 16 nt, Human
ugcucuccucuugcca

SEQ ID NO: 2119970 - RNA, 12 nt, Human
ugcucuccccug

SEQ ID NO: 2119971 - RNA, 13 nt, Human
ugcucuccccugc

SEQ ID NO: 2119972 - RNA, 22 nt, Human
ugcucuccucuugccacugccu

SEQ ID NO: 2119973 - RNA, 12 nt, Human
ugcucuccuuuc

SEQ ID NO: 2119974 - RNA, 15 nt, Human
ugcucuccccugccc

SEQ ID NO: 2119975 - RNA, 15 nt, Human
ugcugaaacaggaga

SEQ ID NO: 2119976 - RNA, 17 nt, Human
ugcugaaacaggagaga

SEQ ID NO: 2119977 - RNA, 22 nt, Human
ugcugaaagagaaaagaggggu

SEQ ID NO: 2119978 - RNA, 15 nt, Human
ugcugaacaaaaaau

SEQ ID NO: 2119979 - RNA, 18 nt, Human
ugcugaacaaaaaauaaa

SEQ ID NO: 2119980 - RNA, 21 nt, Human
uguacagucuuguauuaaguu

SEQ ID NO: 2119981 - RNA, 13 nt, Human
uguacacacuuua

SEQ ID NO: 2119982 - RNA, 14 nt, Human
uguacacacuuuau

SEQ ID NO: 2119983 - RNA, 19 nt, Human
uguacacacuuuauuuacu

SEQ ID NO: 2119984 - RNA, 17 nt, Human
uguacaguguguaaagu

SEQ ID NO: 2119985 - RNA, 19 nt, Human
uguacaguguguaaagugu

SEQ ID NO: 2119986 - RNA, 15 nt, Human
uguacaguugggaaa

SEQ ID NO: 2119987 - RNA, 16 nt, Human
uguaauguuacugauc

SEQ ID NO: 2119988 - RNA, 17 nt, Human
uguaauguuacugauca

SEQ ID NO: 2119989 - RNA, 19 nt, Human
uguaauguuacugaucaug

SEQ ID NO: 2119990 - RNA, 22 nt, Human
uguaauguuacugaucaugcau

SEQ ID NO: 2119991 - RNA, 17 nt, Human
uguaauuaaguacuaug

SEQ ID NO: 2119992 - RNA, 17 nt, Human
uguacaauauuuaaaau

SEQ ID NO: 2119993 - RNA, 14 nt, Human
uguacaauauuuaa

SEQ ID NO: 2119994 - RNA, 15 nt, Human
uguacaauauuuaaa

SEQ ID NO: 2119995 - RNA, 15 nt, Human
uguacaauauuuuaa

SEQ ID NO: 2119996 - RNA, 18 nt, Human
uguacaauauuuuaagca

SEQ ID NO: 2119997 - RNA, 19 nt, Human
uguacaauauuuuaagcau

SEQ ID NO: 2119998 - RNA, 20 nt, Human
uguacaauauuuuaagcauu

SEQ ID NO: 2119999 - RNA, 21 nt, Human
uguacaauauuuuaagcauua

SEQ ID NO: 2120000 - RNA, 22 nt, Human
uguacaauugaacuuaaauaaa

SEQ ID NO: 2120001 - RNA, 23 nt, Human
uguacaauugaacuuaaauaaau

SEQ ID NO: 2120002 - RNA, 20 nt, Human
uguaaucccagcuacucagg

SEQ ID NO: 2120003 - RNA, 21 nt, Human
uguaaucccagcuacucagga

SEQ ID NO: 2120004 - RNA, 20 nt, Human
uguaaucccagcuacucggg

SEQ ID NO: 2120005 - RNA, 23 nt, Human
uguaaucccagcuacucaggagg

SEQ ID NO: 2120006 - RNA, 22 nt, Human
uguaaucccagcuacuugggag

SEQ ID NO: 2120007 - RNA, 23 nt, Human
uguaaugucaccaccuucccagc

SEQ ID NO: 2120008 - RNA, 14 nt, Human
uguaauguuacuga

SEQ ID NO: 2120009 - RNA, 13 nt, Human
uguaauguuacug

SEQ ID NO: 2120010 - RNA, 16 nt, Human
uguaaucguuaugugu

SEQ ID NO: 2120011 - RNA, 18 nt, Human
uguaaucguuaugugugu

SEQ ID NO: 2120012 - RNA, 19 nt, Human
uguaaucguuaugugugua

SEQ ID NO: 2120013 - RNA, 21 nt, Human
uguaaucguuauguguguaua

SEQ ID NO: 2120014 - RNA, 20 nt, Human
uguaauaaaaaguauauguu

SEQ ID NO: 2120015 - RNA, 20 nt, Human
uguaauaaacucauuucuag

SEQ ID NO: 2120016 - RNA, 13 nt, Human
uguaauaaaguau

SEQ ID NO: 2120017 - RNA, 15 nt, Human
uguaauaaaguauau

SEQ ID NO: 2120018 - RNA, 16 nt, Human
uguaauaaaguauaua

SEQ ID NO: 2120019 - RNA, 19 nt, Human
uguaauaaaguauauaauu

SEQ ID NO: 2120020 - RNA, 13 nt, Human
uguaauaaagugu

SEQ ID NO: 2120021 - RNA, 14 nt, Human
uguaauaaaguguu

SEQ ID NO: 2120022 - RNA, 16 nt, Human
uguaauaaaguguuuu

SEQ ID NO: 2120023 - RNA, 17 nt, Human
uguaauaaaguguuuuc

SEQ ID NO: 2120024 - RNA, 18 nt, Human
uguaauaaaguguuuuca

SEQ ID NO: 2120025 - RNA, 19 nt, Human
uguaauaaaguguuuucag

SEQ ID NO: 2120026 - RNA, 20 nt, Human
uguaauaaaguguuuucaga

SEQ ID NO: 2120027 - RNA, 22 nt, Human
uggucaagauuuugaaugcuuc

SEQ ID NO: 2120028 - RNA, 22 nt, Human
uggucaauccgaaguaugaggg

SEQ ID NO: 2120029 - RNA, 14 nt, Human
uggucacagagaac

SEQ ID NO: 2120030 - RNA, 22 nt, Human
uguagccucgccgucugugaau

SEQ ID NO: 2120031 - RNA, 17 nt, Human
uguagccccaagaaggc

SEQ ID NO: 2120032 - RNA, 21 nt, Human
uguagccccaagaaggcuggg

SEQ ID NO: 2120033 - RNA, 22 nt, Human
uguagccccaagaaggcugggg

SEQ ID NO: 2120034 - RNA, 16 nt, Human
uguagccuugcccgga

SEQ ID NO: 2120035 - RNA, 17 nt, Human
uguagccuugcccggau

SEQ ID NO: 2120036 - RNA, 14 nt, Human
uguagcugguuucc

SEQ ID NO: 2120037 - RNA, 15 nt, Human
uguaguuaggaaaua

SEQ ID NO: 2120038 - RNA, 23 nt, Human
uguaguuaggaaauaaaaccuuu

SEQ ID NO: 2120039 - RNA, 12 nt, Human
uguaguuaggaa

SEQ ID NO: 2120040 - RNA, 13 nt, Human
uguaguuaggaaa

SEQ ID NO: 2120041 - RNA, 14 nt, Human
uguaguuaggaaau

SEQ ID NO: 2120042 - RNA, 15 nt, Human
uguacgucugacagg

SEQ ID NO: 2120043 - RNA, 21 nt, Human
uguaccgggcuggccugugcc

SEQ ID NO: 2120044 - RNA, 19 nt, Human
uguacugcauaugaaagga

SEQ ID NO: 2120045 - RNA, 12 nt, Human
uguacuggagag

SEQ ID NO: 2120046 - RNA, 19 nt, Human
uguacuggagagcaacaca

SEQ ID NO: 2120047 - RNA, 16 nt, Human
uguacuguaaagaauu

SEQ ID NO: 2120048 - RNA, 12 nt, Human
uguacuguaguu

SEQ ID NO: 2120049 - RNA, 16 nt, Human
uguacuguaguuuuuc

SEQ ID NO: 2120050 - RNA, 22 nt, Human
uguagauauugugaaguacaua

SEQ ID NO: 2120051 - RNA, 19 nt, Human
uguagauauugugaaguac

SEQ ID NO: 2120052 - RNA, 21 nt, Human
uguagauauugugaaguacau

SEQ ID NO: 2120053 - RNA, 10 nt, Human
uguagccaag

SEQ ID NO: 2120054 - RNA, 13 nt, Human
uguauaaaaauag

SEQ ID NO: 2120055 - RNA, 19 nt, Human
uguaguuuuucuucaacau

SEQ ID NO: 2120056 - RNA, 15 nt, Human
uguauuguucccagu

SEQ ID NO: 2120057 - RNA, 19 nt, Human
uguauuguucccagugaca

SEQ ID NO: 2120058 - RNA, 12 nt, Human
uguauuguuccc

SEQ ID NO: 2120059 - RNA, 13 nt, Human
uguauuguuccca

SEQ ID NO: 2120060 - RNA, 14 nt, Human
uguauuguucccag

SEQ ID NO: 2120061 - RNA, 17 nt, Human
ugucacacacuuuggcu

SEQ ID NO: 2120062 - RNA, 12 nt, Human
ugucacaggcag

SEQ ID NO: 2120063 - RNA, 21 nt, Human
ugucaccaccuucccagcucu

SEQ ID NO: 2120064 - RNA, 23 nt, Human
ugucaccaccuucccagcucucc

SEQ ID NO: 2120065 - RNA, 18 nt, Human
ugucaccggauccugggu

SEQ ID NO: 2120066 - RNA, 19 nt, Human
ugucaccggauccugggug

SEQ ID NO: 2120067 - RNA, 16 nt, Human
ugucaccaccuuccca

SEQ ID NO: 2120068 - RNA, 18 nt, Human
ugucaccaccuucccagc

SEQ ID NO: 2120069 - RNA, 19 nt, Human
ugucaccaccuucccagcu

SEQ ID NO: 2120070 - RNA, 13 nt, Human
uguauuuaaauau

SEQ ID NO: 2120071 - RNA, 19 nt, Human
uguauuuuauaaaauuaaa

SEQ ID NO: 2120072 - RNA, 22 nt, Human
uguauuuuauaaaauuaaagaa

SEQ ID NO: 2120073 - RNA, 13 nt, Human
uguauuuuaugua

SEQ ID NO: 2120074 - RNA, 14 nt, Human
uguauuuuauguau

SEQ ID NO: 2120075 - RNA, 16 nt, Human
uguauuuuauguaugu

SEQ ID NO: 2120076 - RNA, 18 nt, Human
uguauuuuauguauguuu

SEQ ID NO: 2120077 - RNA, 19 nt, Human
uguauuuuauguauguuua

SEQ ID NO: 2120078 - RNA, 18 nt, Human
uguauuuauuuuccuccc

SEQ ID NO: 2120079 - RNA, 19 nt, Human
uguauuuauuuuccucccc

SEQ ID NO: 2120080 - RNA, 20 nt, Human
uguauuuauuuuccucccca

SEQ ID NO: 2120081 - RNA, 15 nt, Human
uguauuuccagugca

SEQ ID NO: 2120082 - RNA, 11 nt, Human
uguauuuuauu

SEQ ID NO: 2120083 - RNA, 21 nt, Human
uguauuuuauuuuuuucucuc

SEQ ID NO: 2120084 - RNA, 23 nt, Human
ugucaucuuucuucuauuuuauu

SEQ ID NO: 2120085 - RNA, 13 nt, Human
ugucauuaaaaua

SEQ ID NO: 2120086 - RNA, 18 nt, Human
ugucauuaaaauaaauaa

SEQ ID NO: 2120087 - RNA, 13 nt, Human
ugucaccugaaga

SEQ ID NO: 2120088 - RNA, 16 nt, Human
ugucaccgugagcagc

SEQ ID NO: 2120089 - RNA, 22 nt, Human
ugucaccgugagcagcuuugga

SEQ ID NO: 2120090 - RNA, 23 nt, Human
ugucaccgugagcagcuuuggaa

SEQ ID NO: 2120091 - RNA, 16 nt, Human
ugucccaacuuguaaa

SEQ ID NO: 2120092 - RNA, 16 nt, Human
ugucauuugagcaggg

SEQ ID NO: 2120093 - RNA, 19 nt, Human
ugucauuugagcagggcuc

SEQ ID NO: 2120094 - RNA, 17 nt, Human
uguccagggcccugagc

SEQ ID NO: 2120095 - RNA, 19 nt, Human
uguccagggcccugagcuc

SEQ ID NO: 2120096 - RNA, 12 nt, Human
ugucccaccuca

SEQ ID NO: 2120097 - RNA, 12 nt, Human
ugucccacagcu

SEQ ID NO: 2120098 - RNA, 13 nt, Human
ugucccacagcuu

SEQ ID NO: 2120099 - RNA, 14 nt, Human
ugucccacagcuug

SEQ ID NO: 2120100 - RNA, 17 nt, Human
ugucccacagcuugggg

SEQ ID NO: 2120101 - RNA, 20 nt, Human
ugucccacagcuuggggcca

SEQ ID NO: 2120102 - RNA, 13 nt, Human
ugucccaccagcu

SEQ ID NO: 2120103 - RNA, 13 nt, Human
uguccccagccca

SEQ ID NO: 2120104 - RNA, 14 nt, Human
uguccccagcccac

SEQ ID NO: 2120105 - RNA, 15 nt, Human
uguccccagcccacu

SEQ ID NO: 2120106 - RNA, 16 nt, Human
uguccccagcccacug

SEQ ID NO: 2120107 - RNA, 19 nt, Human
uguccccaguuugcagaaa

SEQ ID NO: 2120108 - RNA, 20 nt, Human
uguccuacccacccuccuuu

SEQ ID NO: 2120109 - RNA, 14 nt, Human
ugucccccugagau

SEQ ID NO: 2120110 - RNA, 20 nt, Human
ugucccccugagaucagagu

SEQ ID NO: 2120111 - RNA, 21 nt, Human
ugucccccugagaucagaguc

SEQ ID NO: 2120112 - RNA, 23 nt, Human
ugucccccugagaucagaguccu

SEQ ID NO: 2120113 - RNA, 17 nt, Human
uguccuacucuguguca

SEQ ID NO: 2120114 - RNA, 12 nt, Human
uguccuacucug

SEQ ID NO: 2120115 - RNA, 17 nt, Human
ugucuguagcuccucaa

SEQ ID NO: 2120116 - RNA, 23 nt, Human
ugucuguagcuccucaacucacc

SEQ ID NO: 2120117 - RNA, 13 nt, Human
ugucuuucuuugg

SEQ ID NO: 2120118 - RNA, 14 nt, Human
ugucuuucuuuggu

SEQ ID NO: 2120119 - RNA, 15 nt, Human
ugucuuucuuuggug

SEQ ID NO: 2120120 - RNA, 20 nt, Human
ugucuuucuuuggugccuuu

SEQ ID NO: 2120121 - RNA, 22 nt, Human
ugucuuucuuuggugccuuucc

SEQ ID NO: 2120122 - RNA, 20 nt, Human
ugucuuuuucuggacugaag

SEQ ID NO: 2120123 - RNA, 23 nt, Human
ugugaaaagaaaaaugagccugg

SEQ ID NO: 2120124 - RNA, 17 nt, Human
ugucuuuuucuggacug

SEQ ID NO: 2120125 - RNA, 23 nt, Human
ugucuuuuucuggacugaagccu

SEQ ID NO: 2120126 - RNA, 19 nt, Human
ugucuggacauucagaaca

SEQ ID NO: 2120127 - RNA, 14 nt, Human
ugucuggagaauaa

SEQ ID NO: 2120128 - RNA, 22 nt, Human
ugucuggaggggagcucugucu

SEQ ID NO: 2120129 - RNA, 16 nt, Human
ugucugaagucacugc

SEQ ID NO: 2120130 - RNA, 18 nt, Human
ugucugaagucacugcac

SEQ ID NO: 2120131 - RNA, 17 nt, Human
ugucugaagucacugca

SEQ ID NO: 2120132 - RNA, 19 nt, Human
ugucugaagucacugcaca

SEQ ID NO: 2120133 - RNA, 16 nt, Human
uguccucuuucagaaa

SEQ ID NO: 2120134 - RNA, 17 nt, Human
uguccucuuucagaaaa

SEQ ID NO: 2120135 - RNA, 19 nt, Human
uguccucuuucagaaaaca

SEQ ID NO: 2120136 - RNA, 21 nt, Human
uguccucuuucagaaaacaga

SEQ ID NO: 2120137 - RNA, 23 nt, Human
uguccucuuucagaaaacagaaa

SEQ ID NO: 2120138 - RNA, 21 nt, Human
uguccuccucggaucaccgag

SEQ ID NO: 2120139 - RNA, 11 nt, Human
uguccuccucg

SEQ ID NO: 2120140 - RNA, 10 nt, Human
uguccuccuc

SEQ ID NO: 2120141 - RNA, 14 nt, Human
uguccucagcuucu

SEQ ID NO: 2120142 - RNA, 20 nt, Human
ugugaucaggcuauguaugg

SEQ ID NO: 2120143 - RNA, 19 nt, Human
ugugcacacacaccacaca

SEQ ID NO: 2120144 - RNA, 22 nt, Human
ugugcacacacaccacacauac

SEQ ID NO: 2120145 - RNA, 14 nt, Human
ugugauauuaacag

SEQ ID NO: 2120146 - RNA, 16 nt, Human
ugugaguuuaaagcaa

SEQ ID NO: 2120147 - RNA, 22 nt, Human
ugugaguguguguuugugcuga

SEQ ID NO: 2120148 - RNA, 16 nt, Human
ugugaguguaagugug

SEQ ID NO: 2120149 - RNA, 20 nt, Human
ugugaguguaagugugagua

SEQ ID NO: 2120150 - RNA, 20 nt, Human
ugugaguguguccaagugug

SEQ ID NO: 2120151 - RNA, 23 nt, Human
ugugaguguguccaagugugugu

SEQ ID NO: 2120152 - RNA, 14 nt, Human
ugugagugugugca

SEQ ID NO: 2120153 - RNA, 19 nt, Human
ugugaguguguguuugugc

SEQ ID NO: 2120154 - RNA, 21 nt, Human
ugugagucaccaagcccaguu

SEQ ID NO: 2120155 - RNA, 19 nt, Human
ugugagucaccaagcccag

SEQ ID NO: 2120156 - RNA, 17 nt, Human
ugugagucaccaagccc

SEQ ID NO: 2120157 - RNA, 15 nt, Human
ugugagucaccaagc

SEQ ID NO: 2120158 - RNA, 23 nt, Human
ugugaggcccaugguugagaaau

SEQ ID NO: 2120159 - RNA, 12 nt, Human
ugugaggcaggg

SEQ ID NO: 2120160 - RNA, 13 nt, Human
ugugaccaaguua

SEQ ID NO: 2120161 - RNA, 13 nt, Human
ugugaggcagggg

SEQ ID NO: 2120162 - RNA, 18 nt, Human
ugugaggcaggggcggag

SEQ ID NO: 2120163 - RNA, 14 nt, Human
ugugaggagcugcu

SEQ ID NO: 2120164 - RNA, 17 nt, Human
ugugaggagcugcuggc

SEQ ID NO: 2120165 - RNA, 18 nt, Human
ugugaggagcugcuggcu

SEQ ID NO: 2120166 - RNA, 20 nt, Human
ugugaggagcugcuggcuug

SEQ ID NO: 2120167 - RNA, 13 nt, Human
ugugaggagcugc

SEQ ID NO: 2120168 - RNA, 14 nt, Human
ugugaagggaagga

SEQ ID NO: 2120169 - RNA, 19 nt, Human
ugugaauugaaauguucgu

SEQ ID NO: 2120170 - RNA, 16 nt, Human
ugugaauugauaauaa

SEQ ID NO: 2120171 - RNA, 17 nt, Human
ugugaauugauaauaaa

SEQ ID NO: 2120172 - RNA, 12 nt, Human
uguguagggcgg

SEQ ID NO: 2120173 - RNA, 16 nt, Human
uguguagggcgggagg

SEQ ID NO: 2120174 - RNA, 13 nt, Human
uguguacacaugg

SEQ ID NO: 2120175 - RNA, 21 nt, Human
uguguacagaauucugcuacc

SEQ ID NO: 2120176 - RNA, 23 nt, Human
uguguacagaauucugcuaccuc

SEQ ID NO: 2120177 - RNA, 19 nt, Human
uguguacaguguguaaagu

SEQ ID NO: 2120178 - RNA, 16 nt, Human
ugugggcaggaaguga

SEQ ID NO: 2120179 - RNA, 19 nt, Human
ugugggccucaaggacuug

SEQ ID NO: 2120180 - RNA, 21 nt, Human
ugugggccucaaggacuugaa

SEQ ID NO: 2120181 - RNA, 22 nt, Human
ugugggcuaguugggcuuccuc

SEQ ID NO: 2120182 - RNA, 23 nt, Human
uguguaaucauuucuugggcccu

SEQ ID NO: 2120183 - RNA, 21 nt, Human
uguguaaucauuucuugggcc

SEQ ID NO: 2120184 - RNA, 22 nt, Human
uguguaaucauuucuugggccc

SEQ ID NO: 2120185 - RNA, 20 nt, Human
uguggccuuccauuuauaug

SEQ ID NO: 2120186 - RNA, 13 nt, Human
uguggccucagaa

SEQ ID NO: 2120187 - RNA, 22 nt, Human
uguggcucacgugagagugucu

SEQ ID NO: 2120188 - RNA, 16 nt, Human
uguggcucacgugugu

SEQ ID NO: 2120189 - RNA, 10 nt, Human
uguggcucac

SEQ ID NO: 2120190 - RNA, 13 nt, Human
uguggcggugccu

SEQ ID NO: 2120191 - RNA, 13 nt, Human
ugugggagcagcg

SEQ ID NO: 2120192 - RNA, 13 nt, Human
uguggcuccccuc

SEQ ID NO: 2120193 - RNA, 14 nt, Human
uguggcuccccucu

SEQ ID NO: 2120194 - RNA, 21 nt, Human
ugugggacuguacacacuuua

SEQ ID NO: 2120195 - RNA, 19 nt, Human
uguggacacagcucuucuc

SEQ ID NO: 2120196 - RNA, 10 nt, Human
uguggccuca

SEQ ID NO: 2120197 - RNA, 11 nt, Human
uguggccucag

SEQ ID NO: 2120198 - RNA, 18 nt, Human
uguggacacagcucuucu

SEQ ID NO: 2120199 - RNA, 14 nt, Human
uguggaagggacua

SEQ ID NO: 2120200 - RNA, 15 nt, Human
uguggaagggacuag

SEQ ID NO: 2120201 - RNA, 18 nt, Human
uguggaagggacuaggag

SEQ ID NO: 2120202 - RNA, 14 nt, Human
ugugcuaugaauuu

SEQ ID NO: 2120203 - RNA, 15 nt, Human
ugugcuaugaauuuu

SEQ ID NO: 2120204 - RNA, 19 nt, Human
ugugcgccuacaggaguga

SEQ ID NO: 2120205 - RNA, 14 nt, Human
ugugcgccuacagg

SEQ ID NO: 2120206 - RNA, 17 nt, Human
ugugcuuugcauuccua

SEQ ID NO: 2120207 - RNA, 14 nt, Human
ugugcacguacaca

SEQ ID NO: 2120208 - RNA, 17 nt, Human
ugugcacuuauuuauga

SEQ ID NO: 2120209 - RNA, 18 nt, Human
ugugcagacucaauaaaa

SEQ ID NO: 2120210 - RNA, 19 nt, Human
ugugcagacucaauaaaau

SEQ ID NO: 2120211 - RNA, 22 nt, Human
ugugcagacucaauaaaaucau

SEQ ID NO: 2120212 - RNA, 15 nt, Human
ugugcaugugugugc

SEQ ID NO: 2120213 - RNA, 15 nt, Human
uuaaauguagaaagu

SEQ ID NO: 2120214 - RNA, 11 nt, Human
uuaagauuuaa

SEQ ID NO: 2120215 - RNA, 13 nt, Human
uuaagauuuaauu

SEQ ID NO: 2120216 - RNA, 15 nt, Human
uuaagauuuaauuug

SEQ ID NO: 2120217 - RNA, 19 nt, Human
uuaagauuuaauuugccaa

SEQ ID NO: 2120218 - RNA, 17 nt, Human
uuaagaugugucuucaa

SEQ ID NO: 2120219 - RNA, 21 nt, Human
uuaagaugugucuucaauuug

SEQ ID NO: 2120220 - RNA, 19 nt, Human
uuaagauuccuuuucuugu

SEQ ID NO: 2120221 - RNA, 14 nt, Human
uuaagauaugaugu

SEQ ID NO: 2120222 - RNA, 14 nt, Human
uuaagauggauucu

SEQ ID NO: 2120223 - RNA, 17 nt, Human
uuaagauggauucucag

SEQ ID NO: 2120224 - RNA, 18 nt, Human
uuaagauggauucucaga

SEQ ID NO: 2120225 - RNA, 21 nt, Human
uuaagauggauucucagauau

SEQ ID NO: 2120226 - RNA, 22 nt, Human
uuaagauggauucucagauauu

SEQ ID NO: 2120227 - RNA, 23 nt, Human
uuaagauggauucucagauauuu

SEQ ID NO: 2120228 - RNA, 18 nt, Human
uuaacuuuaucacauuau

SEQ ID NO: 2120229 - RNA, 23 nt, Human
uuaacuuuaucacauuauuugca

SEQ ID NO: 2120230 - RNA, 19 nt, Human
uuaauagaauauaauuauc

SEQ ID NO: 2120231 - RNA, 24 nt, Human
uuaauaaucagcaagaauuugauc

SEQ ID NO: 2120232 - RNA, 17 nt, Human
uuaauaaguuucacuga

SEQ ID NO: 2120233 - RNA, 20 nt, Human
uuaauaacccuugaaaguca

SEQ ID NO: 2120234 - RNA, 15 nt, Human
uuaauaaguuucacu

SEQ ID NO: 2120235 - RNA, 19 nt, Human
uuaauaacauaacaaauaa

SEQ ID NO: 2120236 - RNA, 12 nt, Human
uuaagcauuguu

SEQ ID NO: 2120237 - RNA, 14 nt, Human
uuaagcauuguuug

SEQ ID NO: 2120238 - RNA, 19 nt, Human
uuaagcauuguuugcuuau

SEQ ID NO: 2120239 - RNA, 22 nt, Human
uuaagcauuguuugcuuauugu

SEQ ID NO: 2120240 - RNA, 23 nt, Human
uuaagcauuguuugcuuauuguu

SEQ ID NO: 2120241 - RNA, 14 nt, Human
uuaagcaucacaaa

SEQ ID NO: 2120242 - RNA, 15 nt, Human
uuaagcaucacaaau

SEQ ID NO: 2120243 - RNA, 18 nt, Human
uuaagcaucacaaaugau

SEQ ID NO: 2120244 - RNA, 14 nt, Human
uuaagcauuacucu

SEQ ID NO: 2120245 - RNA, 19 nt, Human
uuaagcauuacucuuguaa

SEQ ID NO: 2120246 - RNA, 20 nt, Human
uuaagcauuacucuuguaag

SEQ ID NO: 2120247 - RNA, 21 nt, Human
uuaagcauuacucuuguaaga

SEQ ID NO: 2120248 - RNA, 22 nt, Human
uuaagcauuacucuuguaagau

SEQ ID NO: 2120249 - RNA, 23 nt, Human
uuaagcauuacucuuguaagauu

SEQ ID NO: 2120250 - RNA, 20 nt, Human
uuaagcauuggguggguaaa

SEQ ID NO: 2120251 - RNA, 17 nt, Human
uuacacauuuuucagau

SEQ ID NO: 2120252 - RNA, 23 nt, Human
uuacacauuuuucagauauaaaa

SEQ ID NO: 2120253 - RNA, 23 nt, Human
uuacacguggaggaaugcucccc

SEQ ID NO: 2120254 - RNA, 13 nt, Human
uuacacuguuaga

SEQ ID NO: 2120255 - RNA, 17 nt, Human
uuacacuguuagaacac

SEQ ID NO: 2120256 - RNA, 19 nt, Human
uuacacuguuagaacacua

SEQ ID NO: 2120257 - RNA, 20 nt, Human
uuacacuguuagaacacuau

SEQ ID NO: 2120258 - RNA, 22 nt, Human
uuacaccucguuagggaagaga

SEQ ID NO: 2120259 - RNA, 14 nt, Human
uuacacuuuugaga

SEQ ID NO: 2120260 - RNA, 13 nt, Human
uuacacuuuaugc

SEQ ID NO: 2120261 - RNA, 20 nt, Human
uuacacuuuaugcacaaaau

SEQ ID NO: 2120262 - RNA, 23 nt, Human
uuacagaauugcuuguuugcuuc

SEQ ID NO: 2120263 - RNA, 18 nt, Human
uuacauuccuugauaaug

SEQ ID NO: 2120264 - RNA, 21 nt, Human
uuacauuccuugauaauguug

SEQ ID NO: 2120265 - RNA, 22 nt, Human
uuacauuccuugauaauguugu

SEQ ID NO: 2120266 - RNA, 17 nt, Human
uuacauuguuugucugu

SEQ ID NO: 2120267 - RNA, 19 nt, Human
uuacauugcuggucuugua

SEQ ID NO: 2120268 - RNA, 20 nt, Human
uuacauugcuggucuuguaa

SEQ ID NO: 2120269 - RNA, 21 nt, Human
uuacauugcuggucuuguaag

SEQ ID NO: 2120270 - RNA, 22 nt, Human
uuacauugcuggucuuguaaga

SEQ ID NO: 2120271 - RNA, 15 nt, Human
uuacacauuuuucag

SEQ ID NO: 2120272 - RNA, 17 nt, Human
uuacacaucuucaacag

SEQ ID NO: 2120273 - RNA, 17 nt, Human
uuacaagaaaaaaugaa

SEQ ID NO: 2120274 - RNA, 13 nt, Human
uuaauuagguuaa

SEQ ID NO: 2120275 - RNA, 17 nt, Human
uuaauuagguuaacuau

SEQ ID NO: 2120276 - RNA, 18 nt, Human
uuaauuagguuaacuaug

SEQ ID NO: 2120277 - RNA, 19 nt, Human
uuaauuagggguugcuaag

SEQ ID NO: 2120278 - RNA, 20 nt, Human
uuaauuagggguugcuaaga

SEQ ID NO: 2120279 - RNA, 14 nt, Human
uuacaaauuggagc

SEQ ID NO: 2120280 - RNA, 19 nt, Human
uuaaugacagagccagugg

SEQ ID NO: 2120281 - RNA, 13 nt, Human
uuaauuaaaugca

SEQ ID NO: 2120282 - RNA, 14 nt, Human
uuaauuaaguaaac

SEQ ID NO: 2120283 - RNA, 16 nt, Human
uuaauuaaguaaacua

SEQ ID NO: 2120284 - RNA, 21 nt, Human
uuaauuaaguaaacuaaugag

SEQ ID NO: 2120285 - RNA, 18 nt, Human
uuaaagaaaaguuuugua

SEQ ID NO: 2120286 - RNA, 22 nt, Human
uuaaagcacuuacagauaggcc

SEQ ID NO: 2120287 - RNA, 21 nt, Human
uuaaagcagagggacuuugua

SEQ ID NO: 2120288 - RNA, 23 nt, Human
uuaaagaaaauaaaauuaagaau

SEQ ID NO: 2120289 - RNA, 14 nt, Human
uuaaagcagucacu

SEQ ID NO: 2120290 - RNA, 22 nt, Human
uuaaagcagagggacuuuguau

SEQ ID NO: 2120291 - RNA, 15 nt, Human
uuaaagcauuuacuu

SEQ ID NO: 2120292 - RNA, 17 nt, Human
uuaaagcauuuacuuug

SEQ ID NO: 2120293 - RNA, 20 nt, Human
uuaaagcauuuacuuugaau

SEQ ID NO: 2120294 - RNA, 14 nt, Human
uuaaauauuuacau

SEQ ID NO: 2120295 - RNA, 17 nt, Human
uuaaauauuuacauaug

SEQ ID NO: 2120296 - RNA, 18 nt, Human
uuaaauauuuacauauga

SEQ ID NO: 2120297 - RNA, 21 nt, Human
uuaaauauguuagcaaagagu

SEQ ID NO: 2120298 - RNA, 16 nt, Human
uuaaauaucaaucauu

SEQ ID NO: 2120299 - RNA, 17 nt, Human
uuaaauaucaaucauuu

SEQ ID NO: 2120300 - RNA, 18 nt, Human
uuaaauaucaaucauuuu

SEQ ID NO: 2120301 - RNA, 20 nt, Human
uuaaaucccauucauaacuu

SEQ ID NO: 2120302 - RNA, 12 nt, Human
uuaaauccuguu

SEQ ID NO: 2120303 - RNA, 14 nt, Human
uuaaauccuguuga

SEQ ID NO: 2120304 - RNA, 16 nt, Human
uuaaauccuguugaaa

SEQ ID NO: 2120305 - RNA, 18 nt, Human
uuaaauccuguugaaaag

SEQ ID NO: 2120306 - RNA, 15 nt, Human
uuaaaugaaagcaug

SEQ ID NO: 2120307 - RNA, 12 nt, Human
uuaaaugagaag

SEQ ID NO: 2120308 - RNA, 23 nt, Human
uuaaaugagaaggaauuugaguu

SEQ ID NO: 2120309 - RNA, 15 nt, Human
uuaaaauaacuagug

SEQ ID NO: 2120310 - RNA, 14 nt, Human
uuaaaacuuuaauc

SEQ ID NO: 2120311 - RNA, 23 nt, Human
uuaaaacuuaaccgcaucagaag

SEQ ID NO: 2120312 - RNA, 12 nt, Human
uuaaaacuccug

SEQ ID NO: 2120313 - RNA, 14 nt, Human
uuaaaacccaagug

SEQ ID NO: 2120314 - RNA, 13 nt, Human
uguuucugaaaau

SEQ ID NO: 2120315 - RNA, 14 nt, Human
uguuucugaaaauu

SEQ ID NO: 2120316 - RNA, 21 nt, Human
uguuucugaaaauuccagaaa

SEQ ID NO: 2120317 - RNA, 14 nt, Human
uguuucccauaauu

SEQ ID NO: 2120318 - RNA, 22 nt, Human
uguuucccauaauuuucuucau

SEQ ID NO: 2120319 - RNA, 12 nt, Human
uguuuacugaaa

SEQ ID NO: 2120320 - RNA, 16 nt, Human
uguuuuaagaggcagg

SEQ ID NO: 2120321 - RNA, 22 nt, Human
uguuuuaaauuuauuucaaaaa

SEQ ID NO: 2120322 - RNA, 18 nt, Human
uguuuuaaauauagaauu

SEQ ID NO: 2120323 - RNA, 19 nt, Human
uguuuuaaauauagaauuu

SEQ ID NO: 2120324 - RNA, 17 nt, Human
uguuuguuaaaacuggc

SEQ ID NO: 2120325 - RNA, 21 nt, Human
uguuuguuaaaacuggcaucu

SEQ ID NO: 2120326 - RNA, 12 nt, Human
uguuuguuaugg

SEQ ID NO: 2120327 - RNA, 14 nt, Human
uguuugugugagag

SEQ ID NO: 2120328 - RNA, 15 nt, Human
uguuuguggccucag

SEQ ID NO: 2120329 - RNA, 13 nt, Human
uguuuguggccuc

SEQ ID NO: 2120330 - RNA, 14 nt, Human
uguuuguggccuca

SEQ ID NO: 2120331 - RNA, 12 nt, Human
uguuuguggccu

SEQ ID NO: 2120332 - RNA, 17 nt, Human
uguuuuaagaggcaggg

SEQ ID NO: 2120333 - RNA, 14 nt, Human
uguuuuuaagcugu

SEQ ID NO: 2120334 - RNA, 12 nt, Human
uguuuuuaacuc

SEQ ID NO: 2120335 - RNA, 17 nt, Human
uguuuuuaaaaaucaua

SEQ ID NO: 2120336 - RNA, 20 nt, Human
uguuuuuaaaaaucauaaac

SEQ ID NO: 2120337 - RNA, 14 nt, Human
uguuuuugggaugu

SEQ ID NO: 2120338 - RNA, 17 nt, Human
uguuuuugggaugucuu

SEQ ID NO: 2120339 - RNA, 18 nt, Human
uguuuuugggaugucuua

SEQ ID NO: 2120340 - RNA, 13 nt, Human
uguuuuugaaaua

SEQ ID NO: 2120341 - RNA, 22 nt, Human
uguuuuuaagcuguuuccauag

SEQ ID NO: 2120342 - RNA, 20 nt, Human
uguuuuuaagcuguuuccau

SEQ ID NO: 2120343 - RNA, 17 nt, Human
uguuuuuaagcuguuuc

SEQ ID NO: 2120344 - RNA, 15 nt, Human
uguuuuuaagcuguu

SEQ ID NO: 2120345 - RNA, 22 nt, Human
ugugugucuaggcaggaccugu

SEQ ID NO: 2120346 - RNA, 22 nt, Human
ugugugcugugguuccuggggu

SEQ ID NO: 2120347 - RNA, 14 nt, Human
uguguggucagugg

SEQ ID NO: 2120348 - RNA, 17 nt, Human
uguguggcuuucagagc

SEQ ID NO: 2120349 - RNA, 15 nt, Human
uguguuuuuaauaaa

SEQ ID NO: 2120350 - RNA, 19 nt, Human
uguguuuugcuaaaggaaa

SEQ ID NO: 2120351 - RNA, 19 nt, Human
uguguuuuguuuugauuua

SEQ ID NO: 2120352 - RNA, 20 nt, Human
uguguuuuuaauaaagacag

SEQ ID NO: 2120353 - RNA, 20 nt, Human
uguguuucuaugugacaauu

SEQ ID NO: 2120354 - RNA, 11 nt, Human
uguguuuccuu

SEQ ID NO: 2120355 - RNA, 19 nt, Human
ugugugcacguacacacac

SEQ ID NO: 2120356 - RNA, 20 nt, Human
uguguggcuuucagagccuc

SEQ ID NO: 2120357 - RNA, 14 nt, Human
ugugugggacugua

SEQ ID NO: 2120358 - RNA, 15 nt, Human
ugugugggacuguac

SEQ ID NO: 2120359 - RNA, 16 nt, Human
ugugugggacuguaca

SEQ ID NO: 2120360 - RNA, 17 nt, Human
ugugugggacuguacac

SEQ ID NO: 2120361 - RNA, 18 nt, Human
ugugugggacuguacaca

SEQ ID NO: 2120362 - RNA, 16 nt, Human
uguguggacugugaug

SEQ ID NO: 2120363 - RNA, 17 nt, Human
ugugugcucauguaugu

SEQ ID NO: 2120364 - RNA, 22 nt, Human
ugugugcucauguaugugcgaa

SEQ ID NO: 2120365 - RNA, 17 nt, Human
uguguggacucaagucc

SEQ ID NO: 2120366 - RNA, 19 nt, Human
uguguggacugugaugcca

SEQ ID NO: 2120367 - RNA, 19 nt, Human
uguguaugugcgugugugc

SEQ ID NO: 2120368 - RNA, 23 nt, Human
ugugugaagaucacguuccuucc

SEQ ID NO: 2120369 - RNA, 14 nt, Human
uguguaugugcgug

SEQ ID NO: 2120370 - RNA, 20 nt, Human
ugugugaaauaccagugugg

SEQ ID NO: 2120371 - RNA, 15 nt, Human
uguguauguacauau

SEQ ID NO: 2120372 - RNA, 16 nt, Human
uguguauguacauaua

SEQ ID NO: 2120373 - RNA, 19 nt, Human
uguuaaaaucucucucugu

SEQ ID NO: 2120374 - RNA, 14 nt, Human
uguuaaaauaacua

SEQ ID NO: 2120375 - RNA, 20 nt, Human
uguuaccuaauuagagcaga

SEQ ID NO: 2120376 - RNA, 18 nt, Human
uguuaaaaaauuuuugaa

SEQ ID NO: 2120377 - RNA, 19 nt, Human
uguuaaaaaauuuuugaaa

SEQ ID NO: 2120378 - RNA, 22 nt, Human
uguguuuuuuuuucguuuguuu

SEQ ID NO: 2120379 - RNA, 19 nt, Human
uguuaaaacuggcaucuga

SEQ ID NO: 2120380 - RNA, 12 nt, Human
uguuaaaauaac

SEQ ID NO: 2120381 - RNA, 13 nt, Human
uguguuuuugaaa

SEQ ID NO: 2120382 - RNA, 18 nt, Human
uguguuuuugggaugucu

SEQ ID NO: 2120383 - RNA, 19 nt, Human
uguguuuuugggaugucuu

SEQ ID NO: 2120384 - RNA, 20 nt, Human
uguguuuuugggaugucuua

SEQ ID NO: 2120385 - RNA, 16 nt, Human
uguuaggaaaauuuca

SEQ ID NO: 2120386 - RNA, 14 nt, Human
uguuagcuguuauu

SEQ ID NO: 2120387 - RNA, 17 nt, Human
uguuagccccauaauuu

SEQ ID NO: 2120388 - RNA, 17 nt, Human
uguuacugguguccagc

SEQ ID NO: 2120389 - RNA, 21 nt, Human
uguuagcaugcuggugagcca

SEQ ID NO: 2120390 - RNA, 14 nt, Human
uguuacugaucaug

SEQ ID NO: 2120391 - RNA, 15 nt, Human
uguuacugaccagca

SEQ ID NO: 2120392 - RNA, 13 nt, Human
uguuacugaucau

SEQ ID NO: 2120393 - RNA, 20 nt, Human
uguuacugaucaugcauugu

SEQ ID NO: 2120394 - RNA, 22 nt, Human
uguuaguacuauaucuguuuua

SEQ ID NO: 2120395 - RNA, 14 nt, Human
uguuaguagaaauu

SEQ ID NO: 2120396 - RNA, 20 nt, Human
uguuaguagaaauuuuacaa

SEQ ID NO: 2120397 - RNA, 14 nt, Human
uguuaggcugggcc

SEQ ID NO: 2120398 - RNA, 16 nt, Human
uguuaggcugggccca

SEQ ID NO: 2120399 - RNA, 18 nt, Human
uguuaggcugggcccaga

SEQ ID NO: 2120400 - RNA, 22 nt, Human
uguucagcuccagcucaccagc

SEQ ID NO: 2120401 - RNA, 21 nt, Human
uguucagcuccagcucaccag

SEQ ID NO: 2120402 - RNA, 20 nt, Human
uguucagcuccagcucacca

SEQ ID NO: 2120403 - RNA, 21 nt, Human
uguucuuuucccccaaagugg

SEQ ID NO: 2120404 - RNA, 19 nt, Human
uguugaaaagccauguuua

SEQ ID NO: 2120405 - RNA, 22 nt, Human
uguugaaugcccacaggcaaau

SEQ ID NO: 2120406 - RNA, 14 nt, Human
uguugacaugugcu

SEQ ID NO: 2120407 - RNA, 17 nt, Human
uguugacauccaagcuu

SEQ ID NO: 2120408 - RNA, 19 nt, Human
uguugacauccaagcuucc

SEQ ID NO: 2120409 - RNA, 13 nt, Human
uguucuuugggga

SEQ ID NO: 2120410 - RNA, 20 nt, Human
uguucuuuggaaauacacag

SEQ ID NO: 2120411 - RNA, 13 nt, Human
uguucuggcccuc

SEQ ID NO: 2120412 - RNA, 15 nt, Human
uguucuggcccucac

SEQ ID NO: 2120413 - RNA, 23 nt, Human
uguugaaaaaaaaguuucagaga

SEQ ID NO: 2120414 - RNA, 15 nt, Human
uguucucucuucucc

SEQ ID NO: 2120415 - RNA, 16 nt, Human
uguucucucuucucca

SEQ ID NO: 2120416 - RNA, 14 nt, Human
uguucagcauucuu

SEQ ID NO: 2120417 - RNA, 19 nt, Human
uguucaucauccuaagcua

SEQ ID NO: 2120418 - RNA, 12 nt, Human
uguugaucccaa

SEQ ID NO: 2120419 - RNA, 16 nt, Human
uguugaucccaagaca

SEQ ID NO: 2120420 - RNA, 20 nt, Human
uguugauugcaggaauaagg

SEQ ID NO: 2120421 - RNA, 11 nt, Human
uguugauuauu

SEQ ID NO: 2120422 - RNA, 16 nt, Human
uguugauuauuagcca

SEQ ID NO: 2120423 - RNA, 18 nt, Human
uguuggcacaugccugua

SEQ ID NO: 2120424 - RNA, 16 nt, Human
uguuggccaggcuggu

SEQ ID NO: 2120425 - RNA, 15 nt, Human
uguuggccaggcugg

SEQ ID NO: 2120426 - RNA, 15 nt, Human
uguuggccaaagcca

SEQ ID NO: 2120427 - RNA, 19 nt, Human
uguuggcugggggccucag

SEQ ID NO: 2120428 - RNA, 14 nt, Human
uguuggcuagccuc

SEQ ID NO: 2120429 - RNA, 17 nt, Human
uguuggcugggggccuc

SEQ ID NO: 2120430 - RNA, 15 nt, Human
uguuggcuaaugaag

SEQ ID NO: 2120431 - RNA, 16 nt, Human
uguuuaauauugagaa

SEQ ID NO: 2120432 - RNA, 20 nt, Human
uguuuaauauugagaaagaa

SEQ ID NO: 2120433 - RNA, 21 nt, Human
uguuuaaguguuguaaauauu

SEQ ID NO: 2120434 - RNA, 13 nt, Human
uguuuaagauuua

SEQ ID NO: 2120435 - RNA, 14 nt, Human
uguuuaagauuuaa

SEQ ID NO: 2120436 - RNA, 18 nt, Human
uguuuaagauuuaauuug

SEQ ID NO: 2120437 - RNA, 20 nt, Human
uguuuaagauuuaauuugcc

SEQ ID NO: 2120438 - RNA, 21 nt, Human
uguuuaagauuuaauuugcca

SEQ ID NO: 2120439 - RNA, 22 nt, Human
uguuuaagauuuaauuugccaa

SEQ ID NO: 2120440 - RNA, 23 nt, Human
uguuuaagauuuaauuugccaaa

SEQ ID NO: 2120441 - RNA, 16 nt, Human
aaaacagaaaaaaaac

SEQ ID NO: 2120442 - RNA, 21 nt, Human
aaaacagaaaaaaaacacaca

SEQ ID NO: 2120443 - RNA, 21 nt, Human
aaaacacuauuuuuuuuucuu

SEQ ID NO: 2120444 - RNA, 11 nt, Human
aaaagaaaaag

SEQ ID NO: 2120445 - RNA, 20 nt, Human
aaaacuuuuuauauuuuaua

SEQ ID NO: 2120446 - RNA, 17 nt, Human
aaaacuuuuuauauuuu

SEQ ID NO: 2120447 - RNA, 13 nt, Human
aaaacuuuuauaa

SEQ ID NO: 2120448 - RNA, 15 nt, Human
aaaacuuuuauaaau

SEQ ID NO: 2120449 - RNA, 17 nt, Human
aaaacuuuuauaaauua

SEQ ID NO: 2120450 - RNA, 18 nt, Human
aaaacuuuuauaaauuaa

SEQ ID NO: 2120451 - RNA, 21 nt, Human
aaaacuuuuauaaauuaaaua

SEQ ID NO: 2120452 - RNA, 22 nt, Human
aaaacuuuuauaaauuaaauau

SEQ ID NO: 2120453 - RNA, 15 nt, Human
aaaacagacucaggu

SEQ ID NO: 2120454 - RNA, 16 nt, Human
aaaacagcauugcuuu

SEQ ID NO: 2120455 - RNA, 20 nt, Human
aaaacagcauugcuuucuga

SEQ ID NO: 2120456 - RNA, 18 nt, Human
aaaacagccucacagaag

SEQ ID NO: 2120457 - RNA, 19 nt, Human
aaaacaggaaaaaaacuuu

SEQ ID NO: 2120458 - RNA, 16 nt, Human
aaaagaauacagaaag

SEQ ID NO: 2120459 - RNA, 19 nt, Human
aaaagaaucccuguucauu

SEQ ID NO: 2120460 - RNA, 21 nt, Human
aaaagaaucugcauuuagcac

SEQ ID NO: 2120461 - RNA, 18 nt, Human
aaaagacacuugauacuu

SEQ ID NO: 2120462 - RNA, 20 nt, Human
aaaagacacacuuguccaca

SEQ ID NO: 2120463 - RNA, 15 nt, Human
aaaagaaugucagaa

SEQ ID NO: 2120464 - RNA, 21 nt, Human
aaaagaaugucagaaaaacaa

SEQ ID NO: 2120465 - RNA, 15 nt, Human
aaaagaaaugcacaa

SEQ ID NO: 2120466 - RNA, 20 nt, Human
aaaagaaauucccuggacca

SEQ ID NO: 2120467 - RNA, 20 nt, Human
aaaagauacgacuuuauuuu

SEQ ID NO: 2120468 - RNA, 14 nt, Human
aaaagauacauuug

SEQ ID NO: 2120469 - RNA, 16 nt, Human
aaaagauacauuugua

SEQ ID NO: 2120470 - RNA, 18 nt, Human
aaaagauacauuuguaug

SEQ ID NO: 2120471 - RNA, 13 nt, Human
aaaagaucgcagu

SEQ ID NO: 2120472 - RNA, 16 nt, Human
aaaagacucaguguuc

SEQ ID NO: 2120473 - RNA, 15 nt, Human
aaaagaggggcuggg

SEQ ID NO: 2120474 - RNA, 13 nt, Human
aaaaucagccugc

SEQ ID NO: 2120475 - RNA, 17 nt, Human
aaaaucagccugcucca

SEQ ID NO: 2120476 - RNA, 21 nt, Human
aaaaucagccugcuccagcug

SEQ ID NO: 2120477 - RNA, 15 nt, Human
aaaaguuuaaaaugu

SEQ ID NO: 2120478 - RNA, 20 nt, Human
aaaaguuuaaaauguauaag

SEQ ID NO: 2120479 - RNA, 21 nt, Human
aaaagugaucaauaaaaugug

SEQ ID NO: 2120480 - RNA, 13 nt, Human
aaaagucucuauu

SEQ ID NO: 2120481 - RNA, 15 nt, Human
aaaagucucuauuua

SEQ ID NO: 2120482 - RNA, 19 nt, Human
aaaagucucuauuuaaauu

SEQ ID NO: 2120483 - RNA, 20 nt, Human
aaaagucucuauuuaaauuc

SEQ ID NO: 2120484 - RNA, 21 nt, Human
aaaagucucuauuuaaauucu

SEQ ID NO: 2120485 - RNA, 23 nt, Human
aaaagucucuauuuaaauucuuu

SEQ ID NO: 2120486 - RNA, 12 nt, Human
aaaagucugauu

SEQ ID NO: 2120487 - RNA, 22 nt, Human
aaaagucugauugguuuuaauu

SEQ ID NO: 2120488 - RNA, 14 nt, Human
aaaagucugcauua

SEQ ID NO: 2120489 - RNA, 17 nt, Human
aaaagucugcauuacau

SEQ ID NO: 2120490 - RNA, 18 nt, Human
aaaagucugcauuacauu

SEQ ID NO: 2120491 - RNA, 23 nt, Human
aaaagucuucaagggcugcuuca

SEQ ID NO: 2120492 - RNA, 15 nt, Human
aaaagucaaaaggug

SEQ ID NO: 2120493 - RNA, 19 nt, Human
aaaagucagacugcuggga

SEQ ID NO: 2120494 - RNA, 15 nt, Human
aaagcccaaaguggu

SEQ ID NO: 2120495 - RNA, 16 nt, Human
aaagccucugcugcca

SEQ ID NO: 2120496 - RNA, 16 nt, Human
aaagccaucauguaaa

SEQ ID NO: 2120497 - RNA, 17 nt, Human
aaagccaucauguaaau

SEQ ID NO: 2120498 - RNA, 20 nt, Human
aaagccaucauguaaauuac

SEQ ID NO: 2120499 - RNA, 13 nt, Human
aaagccauguuua

SEQ ID NO: 2120500 - RNA, 14 nt, Human
aaagccauguuuaa

SEQ ID NO: 2120501 - RNA, 16 nt, Human
aaagccauguuuaaga

SEQ ID NO: 2120502 - RNA, 17 nt, Human
aaagccauguuuaagau

SEQ ID NO: 2120503 - RNA, 18 nt, Human
aaagccauguuuaagauu

SEQ ID NO: 2120504 - RNA, 19 nt, Human
aaagccauguuuaagauuu

SEQ ID NO: 2120505 - RNA, 22 nt, Human
aaagcauucaauuuauucaaga

SEQ ID NO: 2120506 - RNA, 13 nt, Human
aaagcaugucuca

SEQ ID NO: 2120507 - RNA, 18 nt, Human
aaagaaaaaauaauugau

SEQ ID NO: 2120508 - RNA, 19 nt, Human
aaaccaggguuuaucuuuu

SEQ ID NO: 2120509 - RNA, 15 nt, Human
aaaccgccaaggcug

SEQ ID NO: 2120510 - RNA, 16 nt, Human
aaaccgccaaggcugg

SEQ ID NO: 2120511 - RNA, 12 nt, Human
aaacccagagag

SEQ ID NO: 2120512 - RNA, 11 nt, Human
aaacccagaga

SEQ ID NO: 2120513 - RNA, 12 nt, Human
aaacucuuaaaa

SEQ ID NO: 2120514 - RNA, 23 nt, Human
aaacucuuaaaacccaagugccu

SEQ ID NO: 2120515 - RNA, 12 nt, Human
aaacugcaauag

SEQ ID NO: 2120516 - RNA, 16 nt, Human
aaacugcaauagagac

SEQ ID NO: 2120517 - RNA, 17 nt, Human
aaacugcaauagagacu

SEQ ID NO: 2120518 - RNA, 18 nt, Human
aaacugcaauagagacug

SEQ ID NO: 2120519 - RNA, 21 nt, Human
aaacugcaauagagacuguag

SEQ ID NO: 2120520 - RNA, 22 nt, Human
aaacugcaauagagacuguaga

SEQ ID NO: 2120521 - RNA, 12 nt, Human
aaaccagggagc

SEQ ID NO: 2120522 - RNA, 19 nt, Human
aaaccaguauacaagauaa

SEQ ID NO: 2120523 - RNA, 12 nt, Human
aaaccauugcuu

SEQ ID NO: 2120524 - RNA, 13 nt, Human
aaaccauugcuuc

SEQ ID NO: 2120525 - RNA, 14 nt, Human
aaaccauugcuuca

SEQ ID NO: 2120526 - RNA, 15 nt, Human
aaaccauugcuucac

SEQ ID NO: 2120527 - RNA, 16 nt, Human
aaaccauugcuucacu

SEQ ID NO: 2120528 - RNA, 17 nt, Human
aaaccauugcuucacua

SEQ ID NO: 2120529 - RNA, 19 nt, Human
aaaccaguguagccuugcc

SEQ ID NO: 2120530 - RNA, 22 nt, Human
aaaugcugguuuuucaguuuuc

SEQ ID NO: 2120531 - RNA, 21 nt, Human
aaaugcugcgcccuuccccag

SEQ ID NO: 2120532 - RNA, 20 nt, Human
aaaugcugcgcccuucccca

SEQ ID NO: 2120533 - RNA, 22 nt, Human
aaauggagguccuucugcugga

SEQ ID NO: 2120534 - RNA, 13 nt, Human
aaauggauacugg

SEQ ID NO: 2120535 - RNA, 18 nt, Human
aaaugcuuuaugcaaacc

SEQ ID NO: 2120536 - RNA, 22 nt, Human
aaaucucagaauuccuuuucua

SEQ ID NO: 2120537 - RNA, 15 nt, Human
aaaucucagcaauga

SEQ ID NO: 2120538 - RNA, 17 nt, Human
aaaucucaccccauccc

SEQ ID NO: 2120539 - RNA, 15 nt, Human
aaauauuuacauaug

SEQ ID NO: 2120540 - RNA, 17 nt, Human
aaauauuuacauaugaa

SEQ ID NO: 2120541 - RNA, 19 nt, Human
aaauauuuacauaugaaau

SEQ ID NO: 2120542 - RNA, 21 nt, Human
aaauauuuacauaugaaauuu

SEQ ID NO: 2120543 - RNA, 15 nt, Human
aaauauuuauguaaa

SEQ ID NO: 2120544 - RNA, 12 nt, Human
aaauauuuccuu

SEQ ID NO: 2120545 - RNA, 14 nt, Human
aaauauuuccuuaa

SEQ ID NO: 2120546 - RNA, 12 nt, Human
aaauauuuaaga

SEQ ID NO: 2120547 - RNA, 15 nt, Human
aaauagcaacaugcu

SEQ ID NO: 2120548 - RNA, 18 nt, Human
aaauagcaacaugcuuca

SEQ ID NO: 2120549 - RNA, 19 nt, Human
aaauagaguauaugcacuu

SEQ ID NO: 2120550 - RNA, 17 nt, Human
aaauagaguauaugcac

SEQ ID NO: 2120551 - RNA, 19 nt, Human
aaaggauguaaacagugcc

SEQ ID NO: 2120552 - RNA, 20 nt, Human
aaaggauguaaacagugccu

SEQ ID NO: 2120553 - RNA, 21 nt, Human
aaaggauguaaacagugccug

SEQ ID NO: 2120554 - RNA, 18 nt, Human
aaaggauucauguggaau

SEQ ID NO: 2120555 - RNA, 14 nt, Human
aaaggauuucuaga

SEQ ID NO: 2120556 - RNA, 14 nt, Human
aaauucuguuucuu

SEQ ID NO: 2120557 - RNA, 15 nt, Human
aaauucuguuucuug

SEQ ID NO: 2120558 - RNA, 21 nt, Human
aaauguuuuucugccagggag

SEQ ID NO: 2120559 - RNA, 23 nt, Human
aaauguuuuucugccagggagcu

SEQ ID NO: 2120560 - RNA, 19 nt, Human
aaauguuuuguaagaaacc

SEQ ID NO: 2120561 - RNA, 16 nt, Human
aaauguuuuucugcca

SEQ ID NO: 2120562 - RNA, 16 nt, Human
aaauguuuuaaggcuu

SEQ ID NO: 2120563 - RNA, 23 nt, Human
aaauguuuuaaggcuucaauuua

SEQ ID NO: 2120564 - RNA, 19 nt, Human
aacauggagaaacccuguc

SEQ ID NO: 2120565 - RNA, 20 nt, Human
aacaggcucaauauuccuga

SEQ ID NO: 2120566 - RNA, 21 nt, Human
aacaggcucaauauuccugaa

SEQ ID NO: 2120567 - RNA, 13 nt, Human
aacagccgagugg

SEQ ID NO: 2120568 - RNA, 22 nt, Human
aacagccgaguggauagaugcc

SEQ ID NO: 2120569 - RNA, 23 nt, Human
aacagccgaguggauagaugccc

SEQ ID NO: 2120570 - RNA, 20 nt, Human
aacagccgcuccugucugcc

SEQ ID NO: 2120571 - RNA, 21 nt, Human
aacagccgcuccugucugcca

SEQ ID NO: 2120572 - RNA, 22 nt, Human
aacagccgucagccaaauguaa

SEQ ID NO: 2120573 - RNA, 13 nt, Human
aacagccucacag

SEQ ID NO: 2120574 - RNA, 14 nt, Human
aacagccucacaga

SEQ ID NO: 2120575 - RNA, 11 nt, Human
aacaggcagau

SEQ ID NO: 2120576 - RNA, 20 nt, Human
aacagcauugcuuucugaaa

SEQ ID NO: 2120577 - RNA, 17 nt, Human
aacagcauugcuuucug

SEQ ID NO: 2120578 - RNA, 13 nt, Human
aaccguccucuuu

SEQ ID NO: 2120579 - RNA, 15 nt, Human
aaccguccucuuuuu

SEQ ID NO: 2120580 - RNA, 17 nt, Human
aacccugcaaaggacug

SEQ ID NO: 2120581 - RNA, 21 nt, Human
aacccuccuaucaccuccccu

SEQ ID NO: 2120582 - RNA, 15 nt, Human
aacccucguuucuga

SEQ ID NO: 2120583 - RNA, 15 nt, Human
aaccgucaauaggca

SEQ ID NO: 2120584 - RNA, 23 nt, Human
aaccggggagcccccgccccgcc

SEQ ID NO: 2120585 - RNA, 16 nt, Human
aacccucccucagccc

SEQ ID NO: 2120586 - RNA, 17 nt, Human
aacccucccucagcccc

SEQ ID NO: 2120587 - RNA, 18 nt, Human
aacccucccucagccccu

SEQ ID NO: 2120588 - RNA, 19 nt, Human
aacccucccucagccccuc

SEQ ID NO: 2120589 - RNA, 20 nt, Human
aacccucccucagccccucu

SEQ ID NO: 2120590 - RNA, 21 nt, Human
aacccucccucagccccucuu

SEQ ID NO: 2120591 - RNA, 23 nt, Human
aacccucccucagccccucuugc

SEQ ID NO: 2120592 - RNA, 19 nt, Human
aacccuccuaucaccuccc

SEQ ID NO: 2120593 - RNA, 12 nt, Human
aacccucagagc

SEQ ID NO: 2120594 - RNA, 19 nt, Human
aacccucagagccaccccu

SEQ ID NO: 2120595 - RNA, 13 nt, Human
aacccucccucag

SEQ ID NO: 2120596 - RNA, 14 nt, Human
aacccucccucagc

SEQ ID NO: 2120597 - RNA, 15 nt, Human
aacccucccucagcc

SEQ ID NO: 2120598 - RNA, 20 nt, Human
aacauggagaaacccugucu

SEQ ID NO: 2120599 - RNA, 23 nt, Human
aacaugggguuggcugggcccag

SEQ ID NO: 2120600 - RNA, 22 nt, Human
aacaugguaaacgcugucccua

SEQ ID NO: 2120601 - RNA, 22 nt, Human
aaccuaaauuugguucuaggcc

SEQ ID NO: 2120602 - RNA, 18 nt, Human
aacaucuuuccaguccuu

SEQ ID NO: 2120603 - RNA, 22 nt, Human
aaccuaaauaaacacauagauu

SEQ ID NO: 2120604 - RNA, 11 nt, Human
aauaaagacag

SEQ ID NO: 2120605 - RNA, 12 nt, Human
aauaaagacagg

SEQ ID NO: 2120606 - RNA, 19 nt, Human
aauaauguuaacauggaca

SEQ ID NO: 2120607 - RNA, 15 nt, Human
aauaaugugaaucau

SEQ ID NO: 2120608 - RNA, 16 nt, Human
aauaaugugggaagaa

SEQ ID NO: 2120609 - RNA, 21 nt, Human
aauaaugugggaagaaacaaa

SEQ ID NO: 2120610 - RNA, 12 nt, Human
aagugcugggau

SEQ ID NO: 2120611 - RNA, 20 nt, Human
aaguggaccaggacaggacc

SEQ ID NO: 2120612 - RNA, 17 nt, Human
aaguggcaugugcugug

SEQ ID NO: 2120613 - RNA, 18 nt, Human
aaguggcaugugcuguga

SEQ ID NO: 2120614 - RNA, 20 nt, Human
aaguggaccuugagaccaca

SEQ ID NO: 2120615 - RNA, 14 nt, Human
aaguggcugcugac

SEQ ID NO: 2120616 - RNA, 20 nt, Human
aaguugaaagaguccuauuu

SEQ ID NO: 2120617 - RNA, 17 nt, Human
aaguugaaauuaaccau

SEQ ID NO: 2120618 - RNA, 12 nt, Human
aaguggcugcug

SEQ ID NO: 2120619 - RNA, 17 nt, Human
aaguugaagcuaagauu

SEQ ID NO: 2120620 - RNA, 18 nt, Human
aaguugaagcuaagauuu

SEQ ID NO: 2120621 - RNA, 21 nt, Human
aaguugaauggccugccuuga

SEQ ID NO: 2120622 - RNA, 13 nt, Human
aaguuuaaaaugu

SEQ ID NO: 2120623 - RNA, 14 nt, Human
aaguuuaaaaugua

SEQ ID NO: 2120624 - RNA, 15 nt, Human
aaguuuaaaauguau

SEQ ID NO: 2120625 - RNA, 17 nt, Human
aaguuuaaaauguauaa

SEQ ID NO: 2120626 - RNA, 16 nt, Human
aaguugggagccugaa

SEQ ID NO: 2120627 - RNA, 16 nt, Human
aaguugggcaauauaa

SEQ ID NO: 2120628 - RNA, 17 nt, Human
aaguugggcaauauaac

SEQ ID NO: 2120629 - RNA, 19 nt, Human
aaguugggcaauauaacca

SEQ ID NO: 2120630 - RNA, 20 nt, Human
aaguugggcaauauaaccaa

SEQ ID NO: 2120631 - RNA, 11 nt, Human
aaguuggcuuc

SEQ ID NO: 2120632 - RNA, 16 nt, Human
aaguuggcuucuguuu

SEQ ID NO: 2120633 - RNA, 17 nt, Human
aaguuggcuucuguuuc

SEQ ID NO: 2120634 - RNA, 19 nt, Human
aaguuggcuucuguuucua

SEQ ID NO: 2120635 - RNA, 21 nt, Human
aaguuggcuucuguuucuagu

SEQ ID NO: 2120636 - RNA, 13 nt, Human
aaguuggacuggg

SEQ ID NO: 2120637 - RNA, 21 nt, Human
aauaaacagcuucaugccuuu

SEQ ID NO: 2120638 - RNA, 22 nt, Human
aauaaacagcuucaugccuuug

SEQ ID NO: 2120639 - RNA, 13 nt, Human
aauaaacauccuu

SEQ ID NO: 2120640 - RNA, 23 nt, Human
aauaaacauccuucaagaacucu

SEQ ID NO: 2120641 - RNA, 21 nt, Human
aauaaacacauagauucaccu

SEQ ID NO: 2120642 - RNA, 22 nt, Human
aauaaacacauagauucaccug

SEQ ID NO: 2120643 - RNA, 22 nt, Human
aaucaauccagcgguucucaaa

SEQ ID NO: 2120644 - RNA, 17 nt, Human
aaucacgaggucaggag

SEQ ID NO: 2120645 - RNA, 22 nt, Human
aaucaaugcuauaacuauguug

SEQ ID NO: 2120646 - RNA, 17 nt, Human
aaucaaugucacuuaaa

SEQ ID NO: 2120647 - RNA, 10 nt, Human
aaucaaaacu

SEQ ID NO: 2120648 - RNA, 18 nt, Human
aaucaaaacucuccuaca

SEQ ID NO: 2120649 - RNA, 13 nt, Human
aaucaaaauaugu

SEQ ID NO: 2120650 - RNA, 23 nt, Human
aaucaaguuggcuucuaaucaaa

SEQ ID NO: 2120651 - RNA, 19 nt, Human
aaucaaguuuccaagcaaa

SEQ ID NO: 2120652 - RNA, 20 nt, Human
aaucaaguuuccaagcaaau

SEQ ID NO: 2120653 - RNA, 12 nt, Human
aauauguauuuu

SEQ ID NO: 2120654 - RNA, 13 nt, Human
aauauguauuuua

SEQ ID NO: 2120655 - RNA, 18 nt, Human
aauauguauuuuauguau

SEQ ID NO: 2120656 - RNA, 20 nt, Human
aauauguauuuuauguaugu

SEQ ID NO: 2120657 - RNA, 21 nt, Human
aauauguauuuuauguauguu

SEQ ID NO: 2120658 - RNA, 17 nt, Human
aauauguccauaucuaa

SEQ ID NO: 2120659 - RNA, 19 nt, Human
aauauguccauaucuaacc

SEQ ID NO: 2120660 - RNA, 11 nt, Human
aauauguauuu

SEQ ID NO: 2120661 - RNA, 21 nt, Human
aauauguuaaccucaguguca

SEQ ID NO: 2120662 - RNA, 16 nt, Human
aauauguuagcaaaga

SEQ ID NO: 2120663 - RNA, 22 nt, Human
aauauguuaaccucagugucau

SEQ ID NO: 2120664 - RNA, 20 nt, Human
aauauguucuuuaaaaauau

SEQ ID NO: 2120665 - RNA, 22 nt, Human
aauauguugaugaaaaauagca

SEQ ID NO: 2120666 - RNA, 13 nt, Human
aauauuaagaaag

SEQ ID NO: 2120667 - RNA, 15 nt, Human
aaugaauaauaauua

SEQ ID NO: 2120668 - RNA, 16 nt, Human
aaugaauaauuuccca

SEQ ID NO: 2120669 - RNA, 21 nt, Human
aaugaauaauaauuauccaga

SEQ ID NO: 2120670 - RNA, 22 nt, Human
aaugaaagcauguggcauguuc

SEQ ID NO: 2120671 - RNA, 17 nt, Human
aaugaaagcaugucuca

SEQ ID NO: 2120672 - RNA, 15 nt, Human
aaugaaagcaugugg

SEQ ID NO: 2120673 - RNA, 22 nt, Human
aaugaagauuauuuuuuaugag

SEQ ID NO: 2120674 - RNA, 21 nt, Human
aaugaaagacuguacaaagua

SEQ ID NO: 2120675 - RNA, 18 nt, Human
aaugaaagacuguacaaa

SEQ ID NO: 2120676 - RNA, 20 nt, Human
aaugaaagacuguacaaagu

SEQ ID NO: 2120677 - RNA, 22 nt, Human
aaucucaccccaucccacaccc

SEQ ID NO: 2120678 - RNA, 22 nt, Human
aaucucagagguagggcugcca

SEQ ID NO: 2120679 - RNA, 23 nt, Human
aaucucagagguagggcugccac

SEQ ID NO: 2120680 - RNA, 22 nt, Human
aaucucagcaaugauuacucuu

SEQ ID NO: 2120681 - RNA, 13 nt, Human
aaucucaccccau

SEQ ID NO: 2120682 - RNA, 14 nt, Human
aaucucaauuugag

SEQ ID NO: 2120683 - RNA, 12 nt, Human
aaucugaaugua

SEQ ID NO: 2120684 - RNA, 13 nt, Human
aaucugaauguaa

SEQ ID NO: 2120685 - RNA, 14 nt, Human
aaucugaauguaau

SEQ ID NO: 2120686 - RNA, 15 nt, Human
aaucugaauguaauu

SEQ ID NO: 2120687 - RNA, 16 nt, Human
aaucugaauguaauuu

SEQ ID NO: 2120688 - RNA, 18 nt, Human
aaucugaauguaauuugu

SEQ ID NO: 2120689 - RNA, 17 nt, Human
aaucugaggccuccucu

SEQ ID NO: 2120690 - RNA, 16 nt, Human
aaucugaucguucuuu

SEQ ID NO: 2120691 - RNA, 19 nt, Human
aaucugaucguucuuucua

SEQ ID NO: 2120692 - RNA, 21 nt, Human
aaucugaucguucuuucuagc

SEQ ID NO: 2120693 - RNA, 13 nt, Human
aagcuagaaauga

SEQ ID NO: 2120694 - RNA, 15 nt, Human
aagcgugagccacug

SEQ ID NO: 2120695 - RNA, 23 nt, Human
aagcgugaaggccgagaagcaag

SEQ ID NO: 2120696 - RNA, 16 nt, Human
aagcgugagccacugc

SEQ ID NO: 2120697 - RNA, 18 nt, Human
aagcgaggucaacagaga

SEQ ID NO: 2120698 - RNA, 20 nt, Human
aagcgaugaauuuggagacu

SEQ ID NO: 2120699 - RNA, 21 nt, Human
aagcgaugaauuuggagacuc

SEQ ID NO: 2120700 - RNA, 13 nt, Human
aagcggggggagg

SEQ ID NO: 2120701 - RNA, 14 nt, Human
aagcggggggaggg

SEQ ID NO: 2120702 - RNA, 14 nt, Human
aagcggcuggcagc

SEQ ID NO: 2120703 - RNA, 15 nt, Human
aagccuuuccauaag

SEQ ID NO: 2120704 - RNA, 14 nt, Human
aagccuuuccauaa

SEQ ID NO: 2120705 - RNA, 12 nt, Human
aagccagucuua

SEQ ID NO: 2120706 - RNA, 14 nt, Human
aagccagucuuaac

SEQ ID NO: 2120707 - RNA, 22 nt, Human
aagccagggauggggccacagc

SEQ ID NO: 2120708 - RNA, 23 nt, Human
aagccagggauggggccacagcc

SEQ ID NO: 2120709 - RNA, 21 nt, Human
aagauaaucuuagcugccaag

SEQ ID NO: 2120710 - RNA, 19 nt, Human
aagauaauauuaaggaaga

SEQ ID NO: 2120711 - RNA, 21 nt, Human
aagauaauauuaaggaagaca

SEQ ID NO: 2120712 - RNA, 14 nt, Human
aagauaaaugugcu

SEQ ID NO: 2120713 - RNA, 21 nt, Human
aagaguuugagaccugaauag

SEQ ID NO: 2120714 - RNA, 19 nt, Human
aagauaacaagaucuuuca

SEQ ID NO: 2120715 - RNA, 20 nt, Human
aagauaacaagaucuuucag

SEQ ID NO: 2120716 - RNA, 21 nt, Human
aagauaacaagaucuuucagg

SEQ ID NO: 2120717 - RNA, 22 nt, Human
aagauaacaagaucuuucagga

SEQ ID NO: 2120718 - RNA, 15 nt, Human
aaggagaaggaagga

SEQ ID NO: 2120719 - RNA, 19 nt, Human
aaggagaaacagagacagg

SEQ ID NO: 2120720 - RNA, 20 nt, Human
aaggcaacugaacaaaaaaa

SEQ ID NO: 2120721 - RNA, 21 nt, Human
aaggcaacugaacaaaaaaau

SEQ ID NO: 2120722 - RNA, 13 nt, Human
aagcugcacccuc

SEQ ID NO: 2120723 - RNA, 19 nt, Human
aagcugcacccucaggcag

SEQ ID NO: 2120724 - RNA, 12 nt, Human
aaggacuugaaa

SEQ ID NO: 2120725 - RNA, 17 nt, Human
aaggacuugaaagcauc

SEQ ID NO: 2120726 - RNA, 19 nt, Human
aaggacuugaaagcaucca

SEQ ID NO: 2120727 - RNA, 22 nt, Human
aaggacuugaaagcauccaugu

SEQ ID NO: 2120728 - RNA, 16 nt, Human
aagcugauuacuguca

SEQ ID NO: 2120729 - RNA, 17 nt, Human
aagcugauuacugucaa

SEQ ID NO: 2120730 - RNA, 19 nt, Human
aagcugauuacugucaaua

SEQ ID NO: 2120731 - RNA, 22 nt, Human
aagcugauuacugucaauaaac

SEQ ID NO: 2120732 - RNA, 23 nt, Human
aagcugauuacugucaauaaaca

SEQ ID NO: 2120733 - RNA, 12 nt, Human
aagacagagucu

SEQ ID NO: 2120734 - RNA, 15 nt, Human
aagacagagcuggga

SEQ ID NO: 2120735 - RNA, 16 nt, Human
aagacagagcugggau

SEQ ID NO: 2120736 - RNA, 13 nt, Human
aagacagaagccu

SEQ ID NO: 2120737 - RNA, 12 nt, Human
aagacagaagcc

SEQ ID NO: 2120738 - RNA, 22 nt, Human
aagacagagccccacccucaga

SEQ ID NO: 2120739 - RNA, 15 nt, Human
aagacaugaauauga

SEQ ID NO: 2120740 - RNA, 13 nt, Human
aagacaugaacca

SEQ ID NO: 2120741 - RNA, 18 nt, Human
aagacaugaaugcacacu

SEQ ID NO: 2120742 - RNA, 23 nt, Human
aagacauacuccuuccaucaaau

SEQ ID NO: 2120743 - RNA, 16 nt, Human
aagacagaugccccag

SEQ ID NO: 2120744 - RNA, 17 nt, Human
aagacagaugccccaga

SEQ ID NO: 2120745 - RNA, 20 nt, Human
aagacagaugccccagagcu

SEQ ID NO: 2120746 - RNA, 22 nt, Human
aagacagaugccccagagcugu

SEQ ID NO: 2120747 - RNA, 17 nt, Human
aagaccaccucaaauuu

SEQ ID NO: 2120748 - RNA, 19 nt, Human
aagaccaccucaaauuuaa

SEQ ID NO: 2120749 - RNA, 17 nt, Human
aagacauugucaauaaa

SEQ ID NO: 2120750 - RNA, 18 nt, Human
aagaccaaaaugacaaug

SEQ ID NO: 2120751 - RNA, 19 nt, Human
aagaccaaaaugacaauga

SEQ ID NO: 2120752 - RNA, 13 nt, Human
aagagaaaaaaua

SEQ ID NO: 2120753 - RNA, 17 nt, Human
aagagaaaauguaaaua

SEQ ID NO: 2120754 - RNA, 13 nt, Human
aagagaaaauuga

SEQ ID NO: 2120755 - RNA, 15 nt, Human
aagagaaaauugaau

SEQ ID NO: 2120756 - RNA, 17 nt, Human
aagagaaaauugaauuu

SEQ ID NO: 2120757 - RNA, 18 nt, Human
aagagaaaauugaauuua

SEQ ID NO: 2120758 - RNA, 21 nt, Human
aagagaaaauugaauuuaaca

SEQ ID NO: 2120759 - RNA, 12 nt, Human
aagagaaacagg

SEQ ID NO: 2120760 - RNA, 21 nt, Human
aagagaaacaggguguuguca

SEQ ID NO: 2120761 - RNA, 12 nt, Human
aagagaaacuuu

SEQ ID NO: 2120762 - RNA, 14 nt, Human
aagagaaacuuugu

SEQ ID NO: 2120763 - RNA, 18 nt, Human
aagagaaacuuugugcua

SEQ ID NO: 2120764 - RNA, 20 nt, Human
aagagaaacuuugugcuaca

SEQ ID NO: 2120765 - RNA, 22 nt, Human
aagagaaaaaaaguuugccaga

SEQ ID NO: 2120766 - RNA, 13 nt, Human
aagagaugaagag

SEQ ID NO: 2120767 - RNA, 14 nt, Human
aagagauacagagg

SEQ ID NO: 2120768 - RNA, 21 nt, Human
aagagauauguagaaggcaca

SEQ ID NO: 2120769 - RNA, 19 nt, Human
aagagaguuaaucaacuga

SEQ ID NO: 2120770 - RNA, 22 nt, Human
aagagaguuaaucaacugaaag

SEQ ID NO: 2120771 - RNA, 13 nt, Human
aagaagaaaacac

SEQ ID NO: 2120772 - RNA, 12 nt, Human
aagaagacauga

SEQ ID NO: 2120773 - RNA, 16 nt, Human
aagaagacaugaacca

SEQ ID NO: 2120774 - RNA, 15 nt, Human
aagacaacauuaaaa

SEQ ID NO: 2120775 - RNA, 21 nt, Human
aagacaacauuaaaacaauau

SEQ ID NO: 2120776 - RNA, 19 nt, Human
aagacaaugugaaaagaaa

SEQ ID NO: 2120777 - RNA, 20 nt, Human
aagacaaugugaaaagaaaa

SEQ ID NO: 2120778 - RNA, 23 nt, Human
aagacaauggcuuacuccaggag

SEQ ID NO: 2120779 - RNA, 22 nt, Human
aagacacugaaauauacacaca

SEQ ID NO: 2120780 - RNA, 21 nt, Human
aagacacugaaauauacacac

SEQ ID NO: 2120781 - RNA, 14 nt, Human
aagacacugaaaua

SEQ ID NO: 2120782 - RNA, 18 nt, Human
aagacaccguucauucag

SEQ ID NO: 2120783 - RNA, 16 nt, Human
aacgcagcccugcuuu

SEQ ID NO: 2120784 - RNA, 12 nt, Human
aacgcagcccug

SEQ ID NO: 2120785 - RNA, 23 nt, Human
aacgcauggaguguguauuguuc

SEQ ID NO: 2120786 - RNA, 21 nt, Human
aacgcauggaguguguauugu

SEQ ID NO: 2120787 - RNA, 22 nt, Human
aacgcauggaguguguauuguu

SEQ ID NO: 2120788 - RNA, 18 nt, Human
aacgcauggaguguguau

SEQ ID NO: 2120789 - RNA, 13 nt, Human
aacgcauggagug

SEQ ID NO: 2120790 - RNA, 21 nt, Human
aagaacuagagguuuuaugau

SEQ ID NO: 2120791 - RNA, 11 nt, Human
aagaacugcau

SEQ ID NO: 2120792 - RNA, 13 nt, Human
aagaacugcaugg

SEQ ID NO: 2120793 - RNA, 18 nt, Human
aagaacugcauggaccua

SEQ ID NO: 2120794 - RNA, 23 nt, Human
aagaacugcauggaccuaacauu

SEQ ID NO: 2120795 - RNA, 14 nt, Human
aagaacugaaaaca

SEQ ID NO: 2120796 - RNA, 16 nt, Human
aagaacugaaaacaua

SEQ ID NO: 2120797 - RNA, 18 nt, Human
aagaacugaaaacauaaa

SEQ ID NO: 2120798 - RNA, 19 nt, Human
aagaacugaaaacauaaaa

SEQ ID NO: 2120799 - RNA, 23 nt, Human
aagaguaguugauguugcauuuu

SEQ ID NO: 2120800 - RNA, 22 nt, Human
aagaguaguugauguugcauuu

SEQ ID NO: 2120801 - RNA, 19 nt, Human
aagaguaguugauguugca

SEQ ID NO: 2120802 - RNA, 23 nt, Human
aagaguguccuaggaguauccuc

SEQ ID NO: 2120803 - RNA, 15 nt, Human
aagaguuaagaaugu

SEQ ID NO: 2120804 - RNA, 14 nt, Human
aagaguuggcuggu

SEQ ID NO: 2120805 - RNA, 23 nt, Human
aagaguucuuaaggauugugaua

SEQ ID NO: 2120806 - RNA, 18 nt, Human
aagaguuguguuguucuu

SEQ ID NO: 2120807 - RNA, 19 nt, Human
aagaguuguguuguucuuu

SEQ ID NO: 2120808 - RNA, 22 nt, Human
aagaguuguguuguucuuuucc

SEQ ID NO: 2120809 - RNA, 20 nt, Human
acugauguaugaggaauuuc

SEQ ID NO: 2120810 - RNA, 17 nt, Human
acugaucaugcauuguu

SEQ ID NO: 2120811 - RNA, 23 nt, Human
acugaugggcaacccccagccug

SEQ ID NO: 2120812 - RNA, 16 nt, Human
acugauguuaggcugg

SEQ ID NO: 2120813 - RNA, 18 nt, Human
acugauguuaggcugggc

SEQ ID NO: 2120814 - RNA, 19 nt, Human
acugauguuaggcugggcc

SEQ ID NO: 2120815 - RNA, 21 nt, Human
acugauguuaggcugggccca

SEQ ID NO: 2120816 - RNA, 22 nt, Human
acugauguuaggcugggcccag

SEQ ID NO: 2120817 - RNA, 23 nt, Human
acugauguuaggcugggcccaga

SEQ ID NO: 2120818 - RNA, 15 nt, Human
acugaucaugcauug

SEQ ID NO: 2120819 - RNA, 16 nt, Human
acugaucaugcauugu

SEQ ID NO: 2120820 - RNA, 18 nt, Human
acugaucaugcauuguug

SEQ ID NO: 2120821 - RNA, 16 nt, Human
acugauuuggagauau

SEQ ID NO: 2120822 - RNA, 22 nt, Human
acugaauuaaugacagagccag

SEQ ID NO: 2120823 - RNA, 13 nt, Human
acucuacccuccc

SEQ ID NO: 2120824 - RNA, 15 nt, Human
acucuacccucccac

SEQ ID NO: 2120825 - RNA, 16 nt, Human
acucuacccucccacc

SEQ ID NO: 2120826 - RNA, 18 nt, Human
acucuacccucccacccc

SEQ ID NO: 2120827 - RNA, 19 nt, Human
acucuacccucccaccccc

SEQ ID NO: 2120828 - RNA, 16 nt, Human
acugaaugcucugugc

SEQ ID NO: 2120829 - RNA, 17 nt, Human
acugaaugaacaaccuc

SEQ ID NO: 2120830 - RNA, 22 nt, Human
acugaaugcuucugacuucaua

SEQ ID NO: 2120831 - RNA, 18 nt, Human
acugacauuguuggccaa

SEQ ID NO: 2120832 - RNA, 17 nt, Human
acugacauuguuggcca

SEQ ID NO: 2120833 - RNA, 14 nt, Human
acugacagaggggg

SEQ ID NO: 2120834 - RNA, 18 nt, Human
acugacagccucccaccc

SEQ ID NO: 2120835 - RNA, 23 nt, Human
acugacacaaaaaguagauuaag

SEQ ID NO: 2120836 - RNA, 13 nt, Human
acugacacacacg

SEQ ID NO: 2120837 - RNA, 13 nt, Human
acugacacaugcu

SEQ ID NO: 2120838 - RNA, 17 nt, Human
acugaauuguccccagu

SEQ ID NO: 2120839 - RNA, 13 nt, Human
acugacaaaucaa

SEQ ID NO: 2120840 - RNA, 16 nt, Human
acugacaaaucaaguu

SEQ ID NO: 2120841 - RNA, 17 nt, Human
acugacaaaucaaguuu

SEQ ID NO: 2120842 - RNA, 19 nt, Human
acugacaaaucaaguuucc

SEQ ID NO: 2120843 - RNA, 21 nt, Human
acucuaauucuaaccagagca

SEQ ID NO: 2120844 - RNA, 16 nt, Human
acucuacacugugaac

SEQ ID NO: 2120845 - RNA, 15 nt, Human
acucuacagaggcca

SEQ ID NO: 2120846 - RNA, 17 nt, Human
acucccuggcucucaga

SEQ ID NO: 2120847 - RNA, 18 nt, Human
acucccuggcucucagaa

SEQ ID NO: 2120848 - RNA, 15 nt, Human
acucccuucccauaa

SEQ ID NO: 2120849 - RNA, 15 nt, Human
acucccuccucaccu

SEQ ID NO: 2120850 - RNA, 16 nt, Human
acucccuccucaccuc

SEQ ID NO: 2120851 - RNA, 19 nt, Human
acucccuccucaccucugg

SEQ ID NO: 2120852 - RNA, 20 nt, Human
acucccuccucaccucugga

SEQ ID NO: 2120853 - RNA, 22 nt, Human
acucccuccucaccucuggacu

SEQ ID NO: 2120854 - RNA, 15 nt, Human
acucccaagcuggac

SEQ ID NO: 2120855 - RNA, 13 nt, Human
acucccaaagagc

SEQ ID NO: 2120856 - RNA, 15 nt, Human
acucccaaagagcug

SEQ ID NO: 2120857 - RNA, 16 nt, Human
acucccaaagagcugc

SEQ ID NO: 2120858 - RNA, 18 nt, Human
acucccaaagagcugccu

SEQ ID NO: 2120859 - RNA, 19 nt, Human
acucccaaagagcugccua

SEQ ID NO: 2120860 - RNA, 13 nt, Human
acucccaagaaca

SEQ ID NO: 2120861 - RNA, 14 nt, Human
acucccaagaacag

SEQ ID NO: 2120862 - RNA, 17 nt, Human
acucccaagaacagcag

SEQ ID NO: 2120863 - RNA, 19 nt, Human
acucccaagaacagcaggc

SEQ ID NO: 2120864 - RNA, 22 nt, Human
acucccaagaacagcaggccca

SEQ ID NO: 2120865 - RNA, 20 nt, Human
acuccauguuggcuagccuc

SEQ ID NO: 2120866 - RNA, 14 nt, Human
acuccauguuggcu

SEQ ID NO: 2120867 - RNA, 22 nt, Human
acucccaguccaaauguccucc

SEQ ID NO: 2120868 - RNA, 15 nt, Human
acuccggugugccug

SEQ ID NO: 2120869 - RNA, 16 nt, Human
acuccggugugccugc

SEQ ID NO: 2120870 - RNA, 15 nt, Human
acuccgucucaagga

SEQ ID NO: 2120871 - RNA, 21 nt, Human
acuccggugugccugcagccc

SEQ ID NO: 2120872 - RNA, 19 nt, Human
acuccggugugccugcagc

SEQ ID NO: 2120873 - RNA, 20 nt, Human
acuccggugugccugcagcc

SEQ ID NO: 2120874 - RNA, 16 nt, Human
acuccgucucaaggaa

SEQ ID NO: 2120875 - RNA, 12 nt, Human
acugguggcccg

SEQ ID NO: 2120876 - RNA, 14 nt, Human
acuggugagcagac

SEQ ID NO: 2120877 - RNA, 16 nt, Human
acuggugagcagacug

SEQ ID NO: 2120878 - RNA, 21 nt, Human
acuggaggggacgcugguaga

SEQ ID NO: 2120879 - RNA, 22 nt, Human
acuggaggggacgcugguagag

SEQ ID NO: 2120880 - RNA, 12 nt, Human
acuggaguccag

SEQ ID NO: 2120881 - RNA, 17 nt, Human
acuggaguccagucucu

SEQ ID NO: 2120882 - RNA, 13 nt, Human
acuggaggccagg

SEQ ID NO: 2120883 - RNA, 18 nt, Human
acuggaggaccacacuca

SEQ ID NO: 2120884 - RNA, 11 nt, Human
acuggagcccc

SEQ ID NO: 2120885 - RNA, 14 nt, Human
acugccaugccagc

SEQ ID NO: 2120886 - RNA, 18 nt, Human
acugccauggaggcacac

SEQ ID NO: 2120887 - RNA, 21 nt, Human
acugccauggaggcacacagc

SEQ ID NO: 2120888 - RNA, 19 nt, Human
acugcccaggccugccugu

SEQ ID NO: 2120889 - RNA, 15 nt, Human
acugccuaagcccuc

SEQ ID NO: 2120890 - RNA, 14 nt, Human
acugccuaagcccu

SEQ ID NO: 2120891 - RNA, 19 nt, Human
acugccgaccgaggcugga

SEQ ID NO: 2120892 - RNA, 13 nt, Human
acugcccugucua

SEQ ID NO: 2120893 - RNA, 18 nt, Human
acugccgaccgaggcugg

SEQ ID NO: 2120894 - RNA, 22 nt, Human
acugccgaccgaggcuggagcu

SEQ ID NO: 2120895 - RNA, 23 nt, Human
acugccgaccgaggcuggagcug

SEQ ID NO: 2120896 - RNA, 18 nt, Human
acugugccaugugccagg

SEQ ID NO: 2120897 - RNA, 17 nt, Human
acugugccaugugccag

SEQ ID NO: 2120898 - RNA, 16 nt, Human
acugugaagagaacca

SEQ ID NO: 2120899 - RNA, 16 nt, Human
acuguaaaaugaaauu

SEQ ID NO: 2120900 - RNA, 12 nt, Human
acuguuucucug

SEQ ID NO: 2120901 - RNA, 14 nt, Human
acuguuuccacauu

SEQ ID NO: 2120902 - RNA, 14 nt, Human
acuguuuuuuccug

SEQ ID NO: 2120903 - RNA, 20 nt, Human
acuguuuuuuaaacuaggaa

SEQ ID NO: 2120904 - RNA, 23 nt, Human
acuguuuuucagggagguggcug

SEQ ID NO: 2120905 - RNA, 17 nt, Human
acuguuuuuuccugagc

SEQ ID NO: 2120906 - RNA, 18 nt, Human
acuguuuuuuccugagcu

SEQ ID NO: 2120907 - RNA, 19 nt, Human
acuguuuuuuccugagcuu

SEQ ID NO: 2120908 - RNA, 13 nt, Human
acuuaaaaaaaug

SEQ ID NO: 2120909 - RNA, 14 nt, Human
acuuaaaaaaauga

SEQ ID NO: 2120910 - RNA, 15 nt, Human
acuuaaaaaaaugac

SEQ ID NO: 2120911 - RNA, 16 nt, Human
acuuaaaaaaaugaca

SEQ ID NO: 2120912 - RNA, 17 nt, Human
acuuaaaaaaaugacag

SEQ ID NO: 2120913 - RNA, 22 nt, Human
acuuaaaaaaaugacagauguu

SEQ ID NO: 2120914 - RNA, 13 nt, Human
acuuaaaaaacuu

SEQ ID NO: 2120915 - RNA, 23 nt, Human
acuuaaaaaacuuguaaaugcug

SEQ ID NO: 2120916 - RNA, 14 nt, Human
acuuaaaaaauguc

SEQ ID NO: 2120917 - RNA, 13 nt, Human
acuucagacugaa

SEQ ID NO: 2120918 - RNA, 19 nt, Human
acuucagacugaacaugua

SEQ ID NO: 2120919 - RNA, 15 nt, Human
acuucagagagcugg

SEQ ID NO: 2120920 - RNA, 16 nt, Human
acuucagagagcuggu

SEQ ID NO: 2120921 - RNA, 17 nt, Human
acuucagagagcuggua

SEQ ID NO: 2120922 - RNA, 18 nt, Human
acuucagagagcugguag

SEQ ID NO: 2120923 - RNA, 20 nt, Human
acuucagagagcugguaguu

SEQ ID NO: 2120924 - RNA, 23 nt, Human
acuuggggggcugaggugggagg

SEQ ID NO: 2120925 - RNA, 17 nt, Human
accuguggccaaguucu

SEQ ID NO: 2120926 - RNA, 14 nt, Human
accuguaacuuuuu

SEQ ID NO: 2120927 - RNA, 19 nt, Human
accugugaugaggggagga

SEQ ID NO: 2120928 - RNA, 18 nt, Human
accugugaguuuaaagca

SEQ ID NO: 2120929 - RNA, 19 nt, Human
accugugaguuuaaagcaa

SEQ ID NO: 2120930 - RNA, 20 nt, Human
accuguaaucccagcuacuu

SEQ ID NO: 2120931 - RNA, 19 nt, Human
accuguaaucccagcuacu

SEQ ID NO: 2120932 - RNA, 19 nt, Human
accuguaaucccagcacuu

SEQ ID NO: 2120933 - RNA, 16 nt, Human
accuguaaucccagca

SEQ ID NO: 2120934 - RNA, 15 nt, Human
accuguaaucccagc

SEQ ID NO: 2120935 - RNA, 14 nt, Human
accuguaaucccag

SEQ ID NO: 2120936 - RNA, 20 nt, Human
accuguaacuuuuguaaaua

SEQ ID NO: 2120937 - RNA, 19 nt, Human
accugcccccuucucccac

SEQ ID NO: 2120938 - RNA, 20 nt, Human
accugcccccuucucccaca

SEQ ID NO: 2120939 - RNA, 22 nt, Human
accugcccccuucucccacacu

SEQ ID NO: 2120940 - RNA, 23 nt, Human
accugcccccuucucccacacug

SEQ ID NO: 2120941 - RNA, 16 nt, Human
accugccccgcccagc

SEQ ID NO: 2120942 - RNA, 17 nt, Human
accugccccgcccagcu

SEQ ID NO: 2120943 - RNA, 11 nt, Human
accuguaaaac

SEQ ID NO: 2120944 - RNA, 14 nt, Human
accuguaaaacuuu

SEQ ID NO: 2120945 - RNA, 15 nt, Human
accuguaaaacuuua

SEQ ID NO: 2120946 - RNA, 16 nt, Human
accuguaaaacuuuau

SEQ ID NO: 2120947 - RNA, 17 nt, Human
accuguaaaacuuuauu

SEQ ID NO: 2120948 - RNA, 20 nt, Human
accuguaaaacuuuauuuua

SEQ ID NO: 2120949 - RNA, 21 nt, Human
accuguaaaacuuuauuuuau

SEQ ID NO: 2120950 - RNA, 22 nt, Human
accuguaaaacuuuauuuuaua

SEQ ID NO: 2120951 - RNA, 12 nt, Human
accuguaaauua

SEQ ID NO: 2120952 - RNA, 18 nt, Human
accuguaaauuauuuuaa

SEQ ID NO: 2120953 - RNA, 19 nt, Human
accuguaaauuauuuuaaa

SEQ ID NO: 2120954 - RNA, 15 nt, Human
accuguaacuuuugu

SEQ ID NO: 2120955 - RNA, 23 nt, Human
accugccccgcccagcugcaccu

SEQ ID NO: 2120956 - RNA, 17 nt, Human
accuguaacuuuuguaa

SEQ ID NO: 2120957 - RNA, 23 nt, Human
accucugccugaagucacacagu

SEQ ID NO: 2120958 - RNA, 20 nt, Human
accucugccugaagucacac

SEQ ID NO: 2120959 - RNA, 12 nt, Human
accucugccuga

SEQ ID NO: 2120960 - RNA, 22 nt, Human
accucuguauuugaaucagccu

SEQ ID NO: 2120961 - RNA, 21 nt, Human
accucuguauuugaaucagcc

SEQ ID NO: 2120962 - RNA, 12 nt, Human
acgcacacacac

SEQ ID NO: 2120963 - RNA, 12 nt, Human
acgcacacagcu

SEQ ID NO: 2120964 - RNA, 13 nt, Human
acgcacacagcuu

SEQ ID NO: 2120965 - RNA, 22 nt, Human
acgcacacguacuuaaaugaaa

SEQ ID NO: 2120966 - RNA, 21 nt, Human
acgcacacacacacacaggag

SEQ ID NO: 2120967 - RNA, 14 nt, Human
acgcacacugucug

SEQ ID NO: 2120968 - RNA, 18 nt, Human
acgcacacacacacacag

SEQ ID NO: 2120969 - RNA, 19 nt, Human
acgcacacacacacacagg

SEQ ID NO: 2120970 - RNA, 20 nt, Human
acgcacacacacacacagga

SEQ ID NO: 2120971 - RNA, 19 nt, Human
acggaauaguuggcuagga

SEQ ID NO: 2120972 - RNA, 17 nt, Human
acggacacucaaaagcu

SEQ ID NO: 2120973 - RNA, 23 nt, Human
acgcagcccugcuuugggcugcc

SEQ ID NO: 2120974 - RNA, 22 nt, Human
acgcagcccugcuuugggcugc

SEQ ID NO: 2120975 - RNA, 12 nt, Human
acgcagcccugc

SEQ ID NO: 2120976 - RNA, 13 nt, Human
acgcaccucccau

SEQ ID NO: 2120977 - RNA, 15 nt, Human
acgcaccucccaucc

SEQ ID NO: 2120978 - RNA, 19 nt, Human
acgcaccucccauccuaau

SEQ ID NO: 2120979 - RNA, 18 nt, Human
acgcuugacaggacagca

SEQ ID NO: 2120980 - RNA, 21 nt, Human
acgcuugacaggacagcaugg

SEQ ID NO: 2120981 - RNA, 15 nt, Human
acgcugugggcaggu

SEQ ID NO: 2120982 - RNA, 14 nt, Human
acgcugugggcagg

SEQ ID NO: 2120983 - RNA, 14 nt, Human
acguggagagcugg

SEQ ID NO: 2120984 - RNA, 17 nt, Human
acguggacguuuuuaau

SEQ ID NO: 2120985 - RNA, 15 nt, Human
acguggagagcuggu

SEQ ID NO: 2120986 - RNA, 16 nt, Human
acguggagagcuggug

SEQ ID NO: 2120987 - RNA, 18 nt, Human
acguggagagcuggugcc

SEQ ID NO: 2120988 - RNA, 19 nt, Human
acguggagagcuggugccc

SEQ ID NO: 2120989 - RNA, 13 nt, Human
acgugccaggccc

SEQ ID NO: 2120990 - RNA, 14 nt, Human
acgugccaggcccg

SEQ ID NO: 2120991 - RNA, 18 nt, Human
acgugccaggcccggggc

SEQ ID NO: 2120992 - RNA, 19 nt, Human
acgugccaggcccggggcu

SEQ ID NO: 2120993 - RNA, 21 nt, Human
acgugccaggcccggggcugg

SEQ ID NO: 2120994 - RNA, 18 nt, Human
acuaauggggcggugaga

SEQ ID NO: 2120995 - RNA, 15 nt, Human
acuaauuaacauaua

SEQ ID NO: 2120996 - RNA, 16 nt, Human
acuaauuaacauauaa

SEQ ID NO: 2120997 - RNA, 18 nt, Human
acuaauuaacauauaaua

SEQ ID NO: 2120998 - RNA, 21 nt, Human
accucaggugauccacccacc

SEQ ID NO: 2120999 - RNA, 20 nt, Human
accucaggugauccacccac

SEQ ID NO: 2121000 - RNA, 12 nt, Human
accucaggcagg

SEQ ID NO: 2121001 - RNA, 15 nt, Human
accucaggcaggaag

SEQ ID NO: 2121002 - RNA, 13 nt, Human
accucaggccagg

SEQ ID NO: 2121003 - RNA, 20 nt, Human
accucaggccaggugcagug

SEQ ID NO: 2121004 - RNA, 21 nt, Human
accucaggccaggugcagugg

SEQ ID NO: 2121005 - RNA, 15 nt, Human
accucagccuccugu

SEQ ID NO: 2121006 - RNA, 11 nt, Human
accucagccug

SEQ ID NO: 2121007 - RNA, 12 nt, Human
accucagccugu

SEQ ID NO: 2121008 - RNA, 16 nt, Human
accucagccugugcug

SEQ ID NO: 2121009 - RNA, 17 nt, Human
accucagccugugcugc

SEQ ID NO: 2121010 - RNA, 18 nt, Human
accucagccugugcugcc

SEQ ID NO: 2121011 - RNA, 19 nt, Human
accucagccugugcugccc

SEQ ID NO: 2121012 - RNA, 20 nt, Human
accucagccuuccccuugcc

SEQ ID NO: 2121013 - RNA, 14 nt, Human
accucagccuugga

SEQ ID NO: 2121014 - RNA, 16 nt, Human
accgggcacucagaag

SEQ ID NO: 2121015 - RNA, 20 nt, Human
accgggccacagagaaagua

SEQ ID NO: 2121016 - RNA, 14 nt, Human
accgggcacucaga

SEQ ID NO: 2121017 - RNA, 12 nt, Human
accgggcacuca

SEQ ID NO: 2121018 - RNA, 11 nt, Human
accucagccuc

SEQ ID NO: 2121019 - RNA, 12 nt, Human
accucagccucc

SEQ ID NO: 2121020 - RNA, 22 nt, Human
accggggagcccccgccccgcc

SEQ ID NO: 2121021 - RNA, 21 nt, Human
accgggcugggagcucugcag

SEQ ID NO: 2121022 - RNA, 23 nt, Human
accgggcugggagcucugcagag

SEQ ID NO: 2121023 - RNA, 11 nt, Human
accuccacagc

SEQ ID NO: 2121024 - RNA, 12 nt, Human
accuccacagcu

SEQ ID NO: 2121025 - RNA, 13 nt, Human
accuccacagcuu

SEQ ID NO: 2121026 - RNA, 19 nt, Human
accuccaaaagcccugagu

SEQ ID NO: 2121027 - RNA, 14 nt, Human
accuccacagcuuc

SEQ ID NO: 2121028 - RNA, 22 nt, Human
acccuagucccuuccccucccu

SEQ ID NO: 2121029 - RNA, 13 nt, Human
acccuauugcugc

SEQ ID NO: 2121030 - RNA, 17 nt, Human
acccuauauguaguaua

SEQ ID NO: 2121031 - RNA, 11 nt, Human
acccucagagc

SEQ ID NO: 2121032 - RNA, 14 nt, Human
acccuauugcugcu

SEQ ID NO: 2121033 - RNA, 19 nt, Human
acccuauugcugcuugagg

SEQ ID NO: 2121034 - RNA, 22 nt, Human
acccuaaggucauuaccacagg

SEQ ID NO: 2121035 - RNA, 14 nt, Human
acccuaccccacca

SEQ ID NO: 2121036 - RNA, 15 nt, Human
acccuaccccaccac

SEQ ID NO: 2121037 - RNA, 19 nt, Human
acccuaaaaagcagagcuu

SEQ ID NO: 2121038 - RNA, 14 nt, Human
acccguuuuaugau

SEQ ID NO: 2121039 - RNA, 21 nt, Human
acccguuuuaugauuuacuca

SEQ ID NO: 2121040 - RNA, 22 nt, Human
acccguuuuaugauuuacucau

SEQ ID NO: 2121041 - RNA, 15 nt, Human
acccuaaaucugagg

SEQ ID NO: 2121042 - RNA, 16 nt, Human
acccuaaaucugagga

SEQ ID NO: 2121043 - RNA, 23 nt, Human
acccuggcacuauaauguaagcu

SEQ ID NO: 2121044 - RNA, 13 nt, Human
acccuggagccca

SEQ ID NO: 2121045 - RNA, 15 nt, Human
acccucaucugucug

SEQ ID NO: 2121046 - RNA, 16 nt, Human
acccucaucugucugg

SEQ ID NO: 2121047 - RNA, 16 nt, Human
acccuggaucaguccu

SEQ ID NO: 2121048 - RNA, 18 nt, Human
acccucauacacagaaac

SEQ ID NO: 2121049 - RNA, 18 nt, Human
acccucagagccaccccu

SEQ ID NO: 2121050 - RNA, 20 nt, Human
acccucagaugcacaugagc

SEQ ID NO: 2121051 - RNA, 13 nt, Human
acccucaggcagg

SEQ ID NO: 2121052 - RNA, 14 nt, Human
acccucaggcaggu

SEQ ID NO: 2121053 - RNA, 19 nt, Human
acccucaggcauaggccug

SEQ ID NO: 2121054 - RNA, 20 nt, Human
acccucaggcauaggccugg

SEQ ID NO: 2121055 - RNA, 22 nt, Human
acccucaggcauaggccugggu

SEQ ID NO: 2121056 - RNA, 23 nt, Human
acccucaggcauaggccugggug

SEQ ID NO: 2121057 - RNA, 15 nt, Human
acccucaggcaggug

SEQ ID NO: 2121058 - RNA, 16 nt, Human
acccucaggcaggugg

SEQ ID NO: 2121059 - RNA, 16 nt, Human
acccuggggagaaagu

SEQ ID NO: 2121060 - RNA, 21 nt, Human
acccugucucuuaaagaaaaa

SEQ ID NO: 2121061 - RNA, 11 nt, Human
acccugucucu

SEQ ID NO: 2121062 - RNA, 19 nt, Human
acccuguccaaacugccua

SEQ ID NO: 2121063 - RNA, 20 nt, Human
acccuggugaggaagcucca

SEQ ID NO: 2121064 - RNA, 18 nt, Human
acaguggaaccagcccag

SEQ ID NO: 2121065 - RNA, 18 nt, Human
acaguggaauauaaggaa

SEQ ID NO: 2121066 - RNA, 17 nt, Human
acaguggauugcauuuc

SEQ ID NO: 2121067 - RNA, 14 nt, Human
acagugcuucagcc

SEQ ID NO: 2121068 - RNA, 15 nt, Human
acagugcuucagccu

SEQ ID NO: 2121069 - RNA, 17 nt, Human
acagugcuucagccuga

SEQ ID NO: 2121070 - RNA, 18 nt, Human
acagugcuucagccugag

SEQ ID NO: 2121071 - RNA, 20 nt, Human
acagugcuucagccugaggc

SEQ ID NO: 2121072 - RNA, 21 nt, Human
acagugcuucagccugaggcu

SEQ ID NO: 2121073 - RNA, 22 nt, Human
acagugcuucagccugaggcug

SEQ ID NO: 2121074 - RNA, 20 nt, Human
acagugcugaccagacagcc

SEQ ID NO: 2121075 - RNA, 24 nt, Human
acagugaugcugugcuaugaauuu

SEQ ID NO: 2121076 - RNA, 15 nt, Human
acagugccauugucu

SEQ ID NO: 2121077 - RNA, 16 nt, Human
acagugccauugucuu

SEQ ID NO: 2121078 - RNA, 17 nt, Human
acagugccauugucuuu

SEQ ID NO: 2121079 - RNA, 18 nt, Human
acagugccauugucuuua

SEQ ID NO: 2121080 - RNA, 11 nt, Human
acagugccugc

SEQ ID NO: 2121081 - RNA, 22 nt, Human
acagugaucuccauauguuaca

SEQ ID NO: 2121082 - RNA, 13 nt, Human
acagugccugcug

SEQ ID NO: 2121083 - RNA, 14 nt, Human
acagugccugcuga

SEQ ID NO: 2121084 - RNA, 14 nt, Human
acagugccugggaa

SEQ ID NO: 2121085 - RNA, 18 nt, Human
acagugccugggaaugua

SEQ ID NO: 2121086 - RNA, 20 nt, Human
acagugccugggaauguauu

SEQ ID NO: 2121087 - RNA, 21 nt, Human
acagugccugggaauguauua

SEQ ID NO: 2121088 - RNA, 14 nt, Human
acagugaucuccau

SEQ ID NO: 2121089 - RNA, 12 nt, Human
acaggcagaaag

SEQ ID NO: 2121090 - RNA, 13 nt, Human
acaggcagaaaga

SEQ ID NO: 2121091 - RNA, 14 nt, Human
acaggcagaaagag

SEQ ID NO: 2121092 - RNA, 15 nt, Human
acaggcagaaagagu

SEQ ID NO: 2121093 - RNA, 23 nt, Human
acaggcacccaccaucaugucug

SEQ ID NO: 2121094 - RNA, 14 nt, Human
acaggcaccgagaa

SEQ ID NO: 2121095 - RNA, 17 nt, Human
acaggcaccgagaaugu

SEQ ID NO: 2121096 - RNA, 20 nt, Human
acaggcaccgagaauguugu

SEQ ID NO: 2121097 - RNA, 21 nt, Human
acaggcaccgagaauguugua

SEQ ID NO: 2121098 - RNA, 18 nt, Human
acagugcaucucagccca

SEQ ID NO: 2121099 - RNA, 17 nt, Human
acagugcaucucagccc

SEQ ID NO: 2121100 - RNA, 15 nt, Human
acagugcaucucagc

SEQ ID NO: 2121101 - RNA, 15 nt, Human
acagugaucuccaua

SEQ ID NO: 2121102 - RNA, 18 nt, Human
acagugaucuccauaugu

SEQ ID NO: 2121103 - RNA, 19 nt, Human
acagugaucuccauauguu

SEQ ID NO: 2121104 - RNA, 21 nt, Human
acagugaucuccauauguuac

SEQ ID NO: 2121105 - RNA, 13 nt, Human
acagugcaucuca

SEQ ID NO: 2121106 - RNA, 15 nt, Human
acagugggagccagg

SEQ ID NO: 2121107 - RNA, 14 nt, Human
acagugggagccag

SEQ ID NO: 2121108 - RNA, 13 nt, Human
acagugggagcca

SEQ ID NO: 2121109 - RNA, 17 nt, Human
acagugggagccagggc

SEQ ID NO: 2121110 - RNA, 16 nt, Human
acagugggagccaggg

SEQ ID NO: 2121111 - RNA, 17 nt, Human
acaggcaaugcuggcug

SEQ ID NO: 2121112 - RNA, 14 nt, Human
acaggcacccacca

SEQ ID NO: 2121113 - RNA, 16 nt, Human
acaggcaaugcuggcu

SEQ ID NO: 2121114 - RNA, 15 nt, Human
acaggcaaugcuggc

SEQ ID NO: 2121115 - RNA, 15 nt, Human
acaggauuagacagu

SEQ ID NO: 2121116 - RNA, 20 nt, Human
acagcucuucuccaggcugu

SEQ ID NO: 2121117 - RNA, 19 nt, Human
acagcucuucuccaggcug

SEQ ID NO: 2121118 - RNA, 19 nt, Human
acauguuuuucuucucccu

SEQ ID NO: 2121119 - RNA, 20 nt, Human
acaugcagcccaugcccacc

SEQ ID NO: 2121120 - RNA, 18 nt, Human
acaugcagcccaugccca

SEQ ID NO: 2121121 - RNA, 15 nt, Human
acaugcagcccaugc

SEQ ID NO: 2121122 - RNA, 17 nt, Human
acaugcagcccaugccc

SEQ ID NO: 2121123 - RNA, 21 nt, Human
acaugccugccccaaacaaau

SEQ ID NO: 2121124 - RNA, 15 nt, Human
acaugccugccccaa

SEQ ID NO: 2121125 - RNA, 22 nt, Human
acaugccugccccaaacaaaua

SEQ ID NO: 2121126 - RNA, 14 nt, Human
acaugcgggcuggg

SEQ ID NO: 2121127 - RNA, 16 nt, Human
acaugcgggcugggca

SEQ ID NO: 2121128 - RNA, 17 nt, Human
acaugcgggcugggcag

SEQ ID NO: 2121129 - RNA, 19 nt, Human
acaugcgggcugggcagcu

SEQ ID NO: 2121130 - RNA, 21 nt, Human
acaugcgggcugggcagcugu

SEQ ID NO: 2121131 - RNA, 22 nt, Human
acaugcgggcugggcagcuguu

SEQ ID NO: 2121132 - RNA, 15 nt, Human
acauguggugggaca

SEQ ID NO: 2121133 - RNA, 23 nt, Human
acauguggugggacagggaccca

SEQ ID NO: 2121134 - RNA, 13 nt, Human
acaugugucaagc

SEQ ID NO: 2121135 - RNA, 19 nt, Human
acaugugucaagcugcuug

SEQ ID NO: 2121136 - RNA, 20 nt, Human
acaugugucaagcugcuugg

SEQ ID NO: 2121137 - RNA, 16 nt, Human
acaugugugcgugugc

SEQ ID NO: 2121138 - RNA, 18 nt, Human
acauguggaaagugaauu

SEQ ID NO: 2121139 - RNA, 19 nt, Human
acauguggaaagugaauuu

SEQ ID NO: 2121140 - RNA, 13 nt, Human
acaugcacgugug

SEQ ID NO: 2121141 - RNA, 15 nt, Human
acaucccugccagcu

SEQ ID NO: 2121142 - RNA, 23 nt, Human
acaucccuacaaaaaauuagaaa

SEQ ID NO: 2121143 - RNA, 16 nt, Human
acaucccugccagcuc

SEQ ID NO: 2121144 - RNA, 17 nt, Human
acaucccugccagcucu

SEQ ID NO: 2121145 - RNA, 14 nt, Human
acauccccacccuu

SEQ ID NO: 2121146 - RNA, 16 nt, Human
acauccccgcuggcug

SEQ ID NO: 2121147 - RNA, 17 nt, Human
acauccccgcuggcugg

SEQ ID NO: 2121148 - RNA, 19 nt, Human
acauccccgcuggcugggg

SEQ ID NO: 2121149 - RNA, 16 nt, Human
acaucccauugcccug

SEQ ID NO: 2121150 - RNA, 17 nt, Human
acaucccauugcccugg

SEQ ID NO: 2121151 - RNA, 18 nt, Human
acaucccauugcccuggu

SEQ ID NO: 2121152 - RNA, 13 nt, Human
acauccaagcuuc

SEQ ID NO: 2121153 - RNA, 16 nt, Human
acauacaauuccaaac

SEQ ID NO: 2121154 - RNA, 20 nt, Human
acauacaggaagguagaaau

SEQ ID NO: 2121155 - RNA, 15 nt, Human
acauaagauaaaugu

SEQ ID NO: 2121156 - RNA, 13 nt, Human
acauaacagaaug

SEQ ID NO: 2121157 - RNA, 15 nt, Human
acauaacagaaugca

SEQ ID NO: 2121158 - RNA, 18 nt, Human
acauaacagaaugcacca

SEQ ID NO: 2121159 - RNA, 16 nt, Human
acauaacaggguaaau

SEQ ID NO: 2121160 - RNA, 20 nt, Human
acauaacaggguaaauuauu

SEQ ID NO: 2121161 - RNA, 22 nt, Human
acauaacaggguaaauuauuca

SEQ ID NO: 2121162 - RNA, 14 nt, Human
acauaacaaaauca

SEQ ID NO: 2121163 - RNA, 17 nt, Human
acauaacaaaaucacuu

SEQ ID NO: 2121164 - RNA, 22 nt, Human
acauaacaaaaucacuuccaua

SEQ ID NO: 2121165 - RNA, 14 nt, Human
acauaacaaauaac

SEQ ID NO: 2121166 - RNA, 16 nt, Human
acauaaccacugcuuc

SEQ ID NO: 2121167 - RNA, 16 nt, Human
acauuugagucccuuc

SEQ ID NO: 2121168 - RNA, 19 nt, Human
acauuugagucccuuccag

SEQ ID NO: 2121169 - RNA, 16 nt, Human
accacgcuggaccuug

SEQ ID NO: 2121170 - RNA, 14 nt, Human
accacgcuggaccu

SEQ ID NO: 2121171 - RNA, 18 nt, Human
accacgcuggaccuugaa

SEQ ID NO: 2121172 - RNA, 20 nt, Human
accaccccagcugcuccccu

SEQ ID NO: 2121173 - RNA, 22 nt, Human
accaccccagcugcuccccucc

SEQ ID NO: 2121174 - RNA, 14 nt, Human
accacguccagcug

SEQ ID NO: 2121175 - RNA, 17 nt, Human
accacgucugucuucac

SEQ ID NO: 2121176 - RNA, 18 nt, Human
accacgcuugacaggaca

SEQ ID NO: 2121177 - RNA, 20 nt, Human
accacgcuugacaggacagc

SEQ ID NO: 2121178 - RNA, 14 nt, Human
accacggaaaagag

SEQ ID NO: 2121179 - RNA, 18 nt, Human
accacggaaaagagcgca

SEQ ID NO: 2121180 - RNA, 18 nt, Human
accaagccguggcuuccc

SEQ ID NO: 2121181 - RNA, 17 nt, Human
accaagccguggcuucc

SEQ ID NO: 2121182 - RNA, 16 nt, Human
accaagccguggcuuc

SEQ ID NO: 2121183 - RNA, 15 nt, Human
accaagccguggcuu

SEQ ID NO: 2121184 - RNA, 14 nt, Human
accaagccguggcu

SEQ ID NO: 2121185 - RNA, 19 nt, Human
accaaccugaagacaccgu

SEQ ID NO: 2121186 - RNA, 13 nt, Human
accaaccugacca

SEQ ID NO: 2121187 - RNA, 13 nt, Human
accaccaggucuc

SEQ ID NO: 2121188 - RNA, 14 nt, Human
accaccaggucucc

SEQ ID NO: 2121189 - RNA, 17 nt, Human
accaccaggucucccgg

SEQ ID NO: 2121190 - RNA, 16 nt, Human
accaacccuucccuga

SEQ ID NO: 2121191 - RNA, 19 nt, Human
accaccccagcugcucccc

SEQ ID NO: 2121192 - RNA, 18 nt, Human
accacgucugucuucaca

SEQ ID NO: 2121193 - RNA, 22 nt, Human
aauuggauacgacaacuugcac

SEQ ID NO: 2121194 - RNA, 14 nt, Human
aauucuuaaaauau

SEQ ID NO: 2121195 - RNA, 14 nt, Human
aauucuguuuuucu

SEQ ID NO: 2121196 - RNA, 18 nt, Human
aauucuguuuuucuaggc

SEQ ID NO: 2121197 - RNA, 13 nt, Human
aauuggcauuaaa

SEQ ID NO: 2121198 - RNA, 16 nt, Human
aauuggcauuaaaacu

SEQ ID NO: 2121199 - RNA, 17 nt, Human
aauuggcauuaaaacuu

SEQ ID NO: 2121200 - RNA, 16 nt, Human
aauucuguuucuugag

SEQ ID NO: 2121201 - RNA, 16 nt, Human
aauucuguucauuugu

SEQ ID NO: 2121202 - RNA, 17 nt, Human
aauucuguucauuuguu

SEQ ID NO: 2121203 - RNA, 18 nt, Human
aauucuguucauuuguua

SEQ ID NO: 2121204 - RNA, 22 nt, Human
aauucuguucauuuguuauucu

SEQ ID NO: 2121205 - RNA, 12 nt, Human
aauucuguuucu

SEQ ID NO: 2121206 - RNA, 13 nt, Human
aauucuguuucuu

SEQ ID NO: 2121207 - RNA, 19 nt, Human
aauucugcuaccucacugg

SEQ ID NO: 2121208 - RNA, 15 nt, Human
aauucugcuaccuca

SEQ ID NO: 2121209 - RNA, 16 nt, Human
aauucugcuaccucac

SEQ ID NO: 2121210 - RNA, 22 nt, Human
aauucuagcuuugagcuuaaga

SEQ ID NO: 2121211 - RNA, 15 nt, Human
aauucuacauuguca

SEQ ID NO: 2121212 - RNA, 14 nt, Human
aauucuacuuugag

SEQ ID NO: 2121213 - RNA, 14 nt, Human
aauucuaacuuuuu

SEQ ID NO: 2121214 - RNA, 22 nt, Human
aauucuaaccagagcaagcuuu

SEQ ID NO: 2121215 - RNA, 15 nt, Human
aauucuaaucuaaca

SEQ ID NO: 2121216 - RNA, 22 nt, Human
aauucuaaucuaacaauggaag

SEQ ID NO: 2121217 - RNA, 18 nt, Human
aauucuaaauaaaauaua

SEQ ID NO: 2121218 - RNA, 20 nt, Human
aauucuaaauaaaauauaau

SEQ ID NO: 2121219 - RNA, 22 nt, Human
aauucuaaauaaaauauaauug

SEQ ID NO: 2121220 - RNA, 19 nt, Human
aauucucagaaucucaaau

SEQ ID NO: 2121221 - RNA, 23 nt, Human
aauucuaggcaucccaggggacc

SEQ ID NO: 2121222 - RNA, 21 nt, Human
aauucucauuugucacacacu

SEQ ID NO: 2121223 - RNA, 15 nt, Human
aauucucuuauccaa

SEQ ID NO: 2121224 - RNA, 19 nt, Human
aauuaugaguuauuuuuau

SEQ ID NO: 2121225 - RNA, 12 nt, Human
aauuaucuauuu

SEQ ID NO: 2121226 - RNA, 13 nt, Human
aauuaucuauuug

SEQ ID NO: 2121227 - RNA, 14 nt, Human
aauuaucuauuugu

SEQ ID NO: 2121228 - RNA, 16 nt, Human
aauuaucuauuuguau

SEQ ID NO: 2121229 - RNA, 19 nt, Human
aauuaucuauuuguauaua

SEQ ID NO: 2121230 - RNA, 23 nt, Human
aauuaucuauuuguauauauaca

SEQ ID NO: 2121231 - RNA, 20 nt, Human
aauuaucgggaacaguguuu

SEQ ID NO: 2121232 - RNA, 23 nt, Human
aauuaucgggaacaguguuuccc

SEQ ID NO: 2121233 - RNA, 19 nt, Human
aauuaucaagcuaauaaaa

SEQ ID NO: 2121234 - RNA, 15 nt, Human
aauuaucccuuuucu

SEQ ID NO: 2121235 - RNA, 16 nt, Human
aauuaucccuuuucuu

SEQ ID NO: 2121236 - RNA, 21 nt, Human
aauuaucccuuuucuugacua

SEQ ID NO: 2121237 - RNA, 15 nt, Human
aauuauccagaguuu

SEQ ID NO: 2121238 - RNA, 15 nt, Human
aauuaucggaagcag

SEQ ID NO: 2121239 - RNA, 17 nt, Human
aauuaucggaagcagug

SEQ ID NO: 2121240 - RNA, 20 nt, Human
aauuaucggaagcagugccu

SEQ ID NO: 2121241 - RNA, 21 nt, Human
aauuaucggaagcagugccuu

SEQ ID NO: 2121242 - RNA, 17 nt, Human
aauuaucgggaacagug

SEQ ID NO: 2121243 - RNA, 19 nt, Human
aauuaucgggaacaguguu

SEQ ID NO: 2121244 - RNA, 13 nt, Human
aauuaugacaguu

SEQ ID NO: 2121245 - RNA, 12 nt, Human
aauuaugacagu

SEQ ID NO: 2121246 - RNA, 15 nt, Human
aauuaugacaguuau

SEQ ID NO: 2121247 - RNA, 11 nt, Human
aauuccugggc

SEQ ID NO: 2121248 - RNA, 18 nt, Human
aauucgcugcaaccuguu

SEQ ID NO: 2121249 - RNA, 19 nt, Human
aauuccuuuucuaacucuc

SEQ ID NO: 2121250 - RNA, 13 nt, Human
aauuccuuagcuu

SEQ ID NO: 2121251 - RNA, 23 nt, Human
aauuccuuagcuuagaccucagc

SEQ ID NO: 2121252 - RNA, 21 nt, Human
aauuccuuggcaugccuucca

SEQ ID NO: 2121253 - RNA, 20 nt, Human
aauuauacuggagaagucuu

SEQ ID NO: 2121254 - RNA, 22 nt, Human
aauuauaucaguccucuuucaa

SEQ ID NO: 2121255 - RNA, 15 nt, Human
aauuaucaagcuaau

SEQ ID NO: 2121256 - RNA, 16 nt, Human
aauuaucaagcuaaua

SEQ ID NO: 2121257 - RNA, 21 nt, Human
aauuuccacucaggucuguuu

SEQ ID NO: 2121258 - RNA, 15 nt, Human
aauuucauuuauuuu

SEQ ID NO: 2121259 - RNA, 21 nt, Human
aauuuccacaaaaucugucca

SEQ ID NO: 2121260 - RNA, 15 nt, Human
aauuuccaguaccuu

SEQ ID NO: 2121261 - RNA, 17 nt, Human
aauuuccaguaccuuug

SEQ ID NO: 2121262 - RNA, 20 nt, Human
aauuuccaguaccuuuguca

SEQ ID NO: 2121263 - RNA, 24 nt, Human
aauuuccagugagcuuaucaugcu

SEQ ID NO: 2121264 - RNA, 19 nt, Human
aauuucccaauuaggaagu

SEQ ID NO: 2121265 - RNA, 18 nt, Human
aauuguaggggugugugu

SEQ ID NO: 2121266 - RNA, 19 nt, Human
acacgccuuguucuuggcc

SEQ ID NO: 2121267 - RNA, 20 nt, Human
acacguggaggaaugcuccc

SEQ ID NO: 2121268 - RNA, 21 nt, Human
acacguggaggaaugcucccc

SEQ ID NO: 2121269 - RNA, 22 nt, Human
acacguggaggaaugcuccccc

SEQ ID NO: 2121270 - RNA, 24 nt, Human
acacguggaggaaugcucccccau

SEQ ID NO: 2121271 - RNA, 23 nt, Human
acacguacuuaaaugaaagcaug

SEQ ID NO: 2121272 - RNA, 14 nt, Human
acacguccacccca

SEQ ID NO: 2121273 - RNA, 17 nt, Human
acacgucugacccucuc

SEQ ID NO: 2121274 - RNA, 19 nt, Human
acacgucugacccucucca

SEQ ID NO: 2121275 - RNA, 17 nt, Human
acacguggaggaaugcu

SEQ ID NO: 2121276 - RNA, 13 nt, Human
acaccagagccca

SEQ ID NO: 2121277 - RNA, 23 nt, Human
acaccagagcccaccuuggcuca

SEQ ID NO: 2121278 - RNA, 18 nt, Human
acaccagagcccaccuug

SEQ ID NO: 2121279 - RNA, 18 nt, Human
acacagcucuucuccagg

SEQ ID NO: 2121280 - RNA, 16 nt, Human
acacagcucuucucca

SEQ ID NO: 2121281 - RNA, 14 nt, Human
acacagcucuucuc

SEQ ID NO: 2121282 - RNA, 14 nt, Human
acacagcaugugua

SEQ ID NO: 2121283 - RNA, 15 nt, Human
acacagcauguguau

SEQ ID NO: 2121284 - RNA, 19 nt, Human
acacacuuuuuaagaaaua

SEQ ID NO: 2121285 - RNA, 14 nt, Human
acacacuuuuuaag

SEQ ID NO: 2121286 - RNA, 14 nt, Human
acaaggugggcagg

SEQ ID NO: 2121287 - RNA, 15 nt, Human
acaaggugggcaggg

SEQ ID NO: 2121288 - RNA, 22 nt, Human
acaagguucuucccuuuuacau

SEQ ID NO: 2121289 - RNA, 13 nt, Human
acaagguucuucc

SEQ ID NO: 2121290 - RNA, 18 nt, Human
acaaggguggcaucccag

SEQ ID NO: 2121291 - RNA, 22 nt, Human
acaagguagcccuggccagagg

SEQ ID NO: 2121292 - RNA, 14 nt, Human
acaagguaguuuuu

SEQ ID NO: 2121293 - RNA, 19 nt, Human
acaagggucuagggagaga

SEQ ID NO: 2121294 - RNA, 20 nt, Human
acaagggucuagggagagac

SEQ ID NO: 2121295 - RNA, 16 nt, Human
acaagguaguuuuuac

SEQ ID NO: 2121296 - RNA, 16 nt, Human
acaagggcaguggagg

SEQ ID NO: 2121297 - RNA, 21 nt, Human
acaagggcaguggaggugcug

SEQ ID NO: 2121298 - RNA, 17 nt, Human
acaagggucuagggaga

SEQ ID NO: 2121299 - RNA, 18 nt, Human
acaagggucuagggagag

SEQ ID NO: 2121300 - RNA, 15 nt, Human
acaaguuaaauaaau

SEQ ID NO: 2121301 - RNA, 11 nt, Human
acaacccaucu

SEQ ID NO: 2121302 - RNA, 14 nt, Human
acaacuuaaaaagu

SEQ ID NO: 2121303 - RNA, 15 nt, Human
acaacuuaaaaaguc

SEQ ID NO: 2121304 - RNA, 16 nt, Human
acaacuuaaaaagucu

SEQ ID NO: 2121305 - RNA, 14 nt, Human
acaacuuaaauaau

SEQ ID NO: 2121306 - RNA, 15 nt, Human
acaacuuaaauaaua

SEQ ID NO: 2121307 - RNA, 10 nt, Human
acaaacugca

SEQ ID NO: 2121308 - RNA, 11 nt, Human
acaaacugcaa

SEQ ID NO: 2121309 - RNA, 13 nt, Human
acaaacugcaaua

SEQ ID NO: 2121310 - RNA, 14 nt, Human
acaaacugcaauag

SEQ ID NO: 2121311 - RNA, 16 nt, Human
acaaacugcaauagag

SEQ ID NO: 2121312 - RNA, 19 nt, Human
acaaacugcaauagagacu

SEQ ID NO: 2121313 - RNA, 20 nt, Human
acaaacugcaauagagacug

SEQ ID NO: 2121314 - RNA, 15 nt, Human
acaaccaccgcuccc

SEQ ID NO: 2121315 - RNA, 19 nt, Human
acaaccaccgcuccccagc

SEQ ID NO: 2121316 - RNA, 20 nt, Human
acaaccaccgcuccccagcc

SEQ ID NO: 2121317 - RNA, 17 nt, Human
acaaccacucauucaaa

SEQ ID NO: 2121318 - RNA, 22 nt, Human
acaacauguauaauauuuuuaa

SEQ ID NO: 2121319 - RNA, 15 nt, Human
acaaacuguguaacu

SEQ ID NO: 2121320 - RNA, 16 nt, Human
acaaacuguguaacug

SEQ ID NO: 2121321 - RNA, 16 nt, Human
acaacauuaaaacaau

SEQ ID NO: 2121322 - RNA, 21 nt, Human
acaaacaaccccccaucacaa

SEQ ID NO: 2121323 - RNA, 13 nt, Human
acaaacaaacaag

SEQ ID NO: 2121324 - RNA, 14 nt, Human
acaaacaaacaagc

SEQ ID NO: 2121325 - RNA, 18 nt, Human
acaaacaagcuaggugcu

SEQ ID NO: 2121326 - RNA, 18 nt, Human
acaaacaauuaacugagc

SEQ ID NO: 2121327 - RNA, 19 nt, Human
acaaacauauuuguuaaau

SEQ ID NO: 2121328 - RNA, 22 nt, Human
acaaacauauuuguuaaauauu

SEQ ID NO: 2121329 - RNA, 19 nt, Human
acaaacaugugguuaaugc

SEQ ID NO: 2121330 - RNA, 19 nt, Human
agugauucuccugccucag

SEQ ID NO: 2121331 - RNA, 18 nt, Human
agugauucuccugccuca

SEQ ID NO: 2121332 - RNA, 20 nt, Human
agugauucuccugccucagc

SEQ ID NO: 2121333 - RNA, 18 nt, Human
agugcgauguuucaggag

SEQ ID NO: 2121334 - RNA, 16 nt, Human
agugccuuccauaauu

SEQ ID NO: 2121335 - RNA, 13 nt, Human
agugccuuccaua

SEQ ID NO: 2121336 - RNA, 15 nt, Human
agugccuuccauaau

SEQ ID NO: 2121337 - RNA, 16 nt, Human
agugauguaccaugaa

SEQ ID NO: 2121338 - RNA, 13 nt, Human
agugauggucaga

SEQ ID NO: 2121339 - RNA, 18 nt, Human
agugauuaaggucucucu

SEQ ID NO: 2121340 - RNA, 19 nt, Human
agugauuaaggucucucuu

SEQ ID NO: 2121341 - RNA, 21 nt, Human
agugauuaaggucucucuuug

SEQ ID NO: 2121342 - RNA, 22 nt, Human
agugauuaaggucucucuuugg

SEQ ID NO: 2121343 - RNA, 23 nt, Human
agugauuaaggucucucuuugga

SEQ ID NO: 2121344 - RNA, 23 nt, Human
agugauccucccaccucagccuc

SEQ ID NO: 2121345 - RNA, 22 nt, Human
agugauccucccaccucagccu

SEQ ID NO: 2121346 - RNA, 20 nt, Human
agugauccucccaccucagc

SEQ ID NO: 2121347 - RNA, 19 nt, Human
agugauccucccaccucag

SEQ ID NO: 2121348 - RNA, 14 nt, Human
agugacagaggcag

SEQ ID NO: 2121349 - RNA, 23 nt, Human
agugaaucuaaaagcuuuugcuu

SEQ ID NO: 2121350 - RNA, 19 nt, Human
agugacagaggcagcccca

SEQ ID NO: 2121351 - RNA, 16 nt, Human
agugacagaggcagcc

SEQ ID NO: 2121352 - RNA, 19 nt, Human
agugacagaguucacuaua

SEQ ID NO: 2121353 - RNA, 13 nt, Human
agugacagaguaa

SEQ ID NO: 2121354 - RNA, 15 nt, Human
agugacagaguucac

SEQ ID NO: 2121355 - RNA, 22 nt, Human
agucauuugcgcacaacuuaaa

SEQ ID NO: 2121356 - RNA, 21 nt, Human
agucauuuuaacuuuaucaca

SEQ ID NO: 2121357 - RNA, 19 nt, Human
agucauuuuaacuuuauca

SEQ ID NO: 2121358 - RNA, 15 nt, Human
aguccucguagccau

SEQ ID NO: 2121359 - RNA, 17 nt, Human
aguccucguagccaucu

SEQ ID NO: 2121360 - RNA, 21 nt, Human
aguccucguagccaucucucu

SEQ ID NO: 2121361 - RNA, 14 nt, Human
aguccucuuuucug

SEQ ID NO: 2121362 - RNA, 20 nt, Human
agucugguuucuagacuugu

SEQ ID NO: 2121363 - RNA, 15 nt, Human
agucugguuucuaga

SEQ ID NO: 2121364 - RNA, 17 nt, Human
agucugucucaaaagaa

SEQ ID NO: 2121365 - RNA, 18 nt, Human
agucuggcccuuccuuuu

SEQ ID NO: 2121366 - RNA, 17 nt, Human
agucuggaucugggacc

SEQ ID NO: 2121367 - RNA, 13 nt, Human
agucuggaggggc

SEQ ID NO: 2121368 - RNA, 15 nt, Human
agucuggaucuggga

SEQ ID NO: 2121369 - RNA, 22 nt, Human
agucuggaggggcauggccagc

SEQ ID NO: 2121370 - RNA, 16 nt, Human
agucgaggacagggag

SEQ ID NO: 2121371 - RNA, 18 nt, Human
aguccuugcaagaaucag

SEQ ID NO: 2121372 - RNA, 20 nt, Human
agucugauucccaagcucug

SEQ ID NO: 2121373 - RNA, 22 nt, Human
agucugauucccaagcucugcu

SEQ ID NO: 2121374 - RNA, 21 nt, Human
agucugauucccaagcucugc

SEQ ID NO: 2121375 - RNA, 15 nt, Human
aguaucaggccugcc

SEQ ID NO: 2121376 - RNA, 18 nt, Human
aguauauuuucuuuuccu

SEQ ID NO: 2121377 - RNA, 19 nt, Human
aguauauuuucuuuuccuc

SEQ ID NO: 2121378 - RNA, 13 nt, Human
aguaaagaaauga

SEQ ID NO: 2121379 - RNA, 15 nt, Human
aguaaagaaaugaca

SEQ ID NO: 2121380 - RNA, 12 nt, Human
aguaaagaaauu

SEQ ID NO: 2121381 - RNA, 16 nt, Human
aguaaacuaaugaguu

SEQ ID NO: 2121382 - RNA, 19 nt, Human
aguaaacuaaugaguuucu

SEQ ID NO: 2121383 - RNA, 14 nt, Human
aguaaacuauuuau

SEQ ID NO: 2121384 - RNA, 16 nt, Human
aguaaacuauuuaucu

SEQ ID NO: 2121385 - RNA, 14 nt, Human
aguaaacugcccug

SEQ ID NO: 2121386 - RNA, 13 nt, Human
aguaaagagaaac

SEQ ID NO: 2121387 - RNA, 14 nt, Human
aguaaagagaaacu

SEQ ID NO: 2121388 - RNA, 15 nt, Human
aguaaagagaaacuu

SEQ ID NO: 2121389 - RNA, 18 nt, Human
aguaaagagaaacuuugu

SEQ ID NO: 2121390 - RNA, 22 nt, Human
aguaaagagaaacuuugugcua

SEQ ID NO: 2121391 - RNA, 13 nt, Human
aguaaagaaauuu

SEQ ID NO: 2121392 - RNA, 20 nt, Human
aguaaagaaauuuaaaagac

SEQ ID NO: 2121393 - RNA, 18 nt, Human
aguaaagugauaauuucu

SEQ ID NO: 2121394 - RNA, 19 nt, Human
aguaaagugauaauuucug

SEQ ID NO: 2121395 - RNA, 15 nt, Human
aguaaaguguaacau

SEQ ID NO: 2121396 - RNA, 21 nt, Human
aguaaaguguaacauaugcaa

SEQ ID NO: 2121397 - RNA, 22 nt, Human
aguaaaguguaacauaugcaaa

SEQ ID NO: 2121398 - RNA, 14 nt, Human
aguaaauauuucag

SEQ ID NO: 2121399 - RNA, 19 nt, Human
aguaacugccaucaagaug

SEQ ID NO: 2121400 - RNA, 14 nt, Human
aguaacugacaacu

SEQ ID NO: 2121401 - RNA, 15 nt, Human
aguaacuugguuaua

SEQ ID NO: 2121402 - RNA, 17 nt, Human
aguaacuugguuauaca

SEQ ID NO: 2121403 - RNA, 18 nt, Human
aguaacuugguuauacau

SEQ ID NO: 2121404 - RNA, 19 nt, Human
aguaacuugguuauacaug

SEQ ID NO: 2121405 - RNA, 20 nt, Human
aguaacuugguuauacauga

SEQ ID NO: 2121406 - RNA, 22 nt, Human
aguaacuugguuauacaugaca

SEQ ID NO: 2121407 - RNA, 15 nt, Human
aguaacuugucuuaa

SEQ ID NO: 2121408 - RNA, 20 nt, Human
aguaacuugucuuaaauaaa

SEQ ID NO: 2121409 - RNA, 23 nt, Human
aguaacuugucuuaaauaaaaga

SEQ ID NO: 2121410 - RNA, 17 nt, Human
aguaacuuacuuaggug

SEQ ID NO: 2121411 - RNA, 22 nt, Human
aguacuucuccacccugcucuc

SEQ ID NO: 2121412 - RNA, 21 nt, Human
aguacuucuccacccugcucu

SEQ ID NO: 2121413 - RNA, 19 nt, Human
aguacuucuccacccugcu

SEQ ID NO: 2121414 - RNA, 20 nt, Human
aguacuucuccacccugcuc

SEQ ID NO: 2121415 - RNA, 16 nt, Human
aguauauuuauauaau

SEQ ID NO: 2121416 - RNA, 17 nt, Human
aguauauuuauauaauu

SEQ ID NO: 2121417 - RNA, 18 nt, Human
aguauauuuauauaauua

SEQ ID NO: 2121418 - RNA, 19 nt, Human
aguauauuuauauaauuau

SEQ ID NO: 2121419 - RNA, 20 nt, Human
aguauauuuauauaauuaug

SEQ ID NO: 2121420 - RNA, 11 nt, Human
aguauauuuau

SEQ ID NO: 2121421 - RNA, 14 nt, Human
aguauauuuauagu

SEQ ID NO: 2121422 - RNA, 18 nt, Human
aguauauuuauagucaca

SEQ ID NO: 2121423 - RNA, 13 nt, Human
aguauauuuucuu

SEQ ID NO: 2121424 - RNA, 14 nt, Human
aguauauuaaaaau

SEQ ID NO: 2121425 - RNA, 15 nt, Human
aguauauuaaaaaug

SEQ ID NO: 2121426 - RNA, 16 nt, Human
aguauauuaaaaaugg

SEQ ID NO: 2121427 - RNA, 17 nt, Human
aguauauuaaaaauggu

SEQ ID NO: 2121428 - RNA, 19 nt, Human
aguauauuaaaaaugguaa

SEQ ID NO: 2121429 - RNA, 22 nt, Human
aguauauuaaaaaugguaaaau

SEQ ID NO: 2121430 - RNA, 13 nt, Human
aguaccuuugcuc

SEQ ID NO: 2121431 - RNA, 14 nt, Human
aguaccuuugcucu

SEQ ID NO: 2121432 - RNA, 16 nt, Human
aguaccuuugcucuug

SEQ ID NO: 2121433 - RNA, 17 nt, Human
aguaccuuugcucuugc

SEQ ID NO: 2121434 - RNA, 18 nt, Human
aguaccuuugcucuugca

SEQ ID NO: 2121435 - RNA, 21 nt, Human
aguaccuuugcucuugcagag

SEQ ID NO: 2121436 - RNA, 13 nt, Human
aguaccuuuguca

SEQ ID NO: 2121437 - RNA, 16 nt, Human
aguaccuucagauccu

SEQ ID NO: 2121438 - RNA, 20 nt, Human
aguaccuucagauccuaccc

SEQ ID NO: 2121439 - RNA, 14 nt, Human
aguaccuuugucac

SEQ ID NO: 2121440 - RNA, 15 nt, Human
aguaccuuugucaca

SEQ ID NO: 2121441 - RNA, 15 nt, Human
aguacuggcauggua

SEQ ID NO: 2121442 - RNA, 20 nt, Human
aguacuccugcaaaauuuua

SEQ ID NO: 2121443 - RNA, 21 nt, Human
aguacuccugcaaaauuuuau

SEQ ID NO: 2121444 - RNA, 15 nt, Human
aguacuccuuaagaa

SEQ ID NO: 2121445 - RNA, 17 nt, Human
aguacuccuuaagaaca

SEQ ID NO: 2121446 - RNA, 18 nt, Human
aguacuccuuaagaacac

SEQ ID NO: 2121447 - RNA, 19 nt, Human
aguacuccuuaagaacaca

SEQ ID NO: 2121448 - RNA, 18 nt, Human
aguacgugcuaacaggcu

SEQ ID NO: 2121449 - RNA, 16 nt, Human
aguacuccugcaaaau

SEQ ID NO: 2121450 - RNA, 18 nt, Human
aguacuccugcaaaauuu

SEQ ID NO: 2121451 - RNA, 19 nt, Human
aguacuccugcaaaauuuu

SEQ ID NO: 2121452 - RNA, 22 nt, Human
aggggccaaauauauucucuuu

SEQ ID NO: 2121453 - RNA, 23 nt, Human
aggggccaaauauauucucuuug

SEQ ID NO: 2121454 - RNA, 13 nt, Human
aguuacacauuuu

SEQ ID NO: 2121455 - RNA, 20 nt, Human
aguuacaaauugcuugaaag

SEQ ID NO: 2121456 - RNA, 16 nt, Human
aguuacacauuuuuca

SEQ ID NO: 2121457 - RNA, 19 nt, Human
aguuacacauuuuucagau

SEQ ID NO: 2121458 - RNA, 14 nt, Human
aguucauacccugu

SEQ ID NO: 2121459 - RNA, 16 nt, Human
aguucauccaauccuc

SEQ ID NO: 2121460 - RNA, 18 nt, Human
aguucauccaauccucac

SEQ ID NO: 2121461 - RNA, 20 nt, Human
aguucauccaauccucacug

SEQ ID NO: 2121462 - RNA, 22 nt, Human
aguucauccaauccucacuggg

SEQ ID NO: 2121463 - RNA, 20 nt, Human
aguucauagggucucuucag

SEQ ID NO: 2121464 - RNA, 17 nt, Human
aguugaaaaacagcuga

SEQ ID NO: 2121465 - RNA, 18 nt, Human
aguugaaaaacagcugag

SEQ ID NO: 2121466 - RNA, 19 nt, Human
aguuaacagacaacacguu

SEQ ID NO: 2121467 - RNA, 12 nt, Human
aguuaacagaga

SEQ ID NO: 2121468 - RNA, 23 nt, Human
aguuaaauagaguauaugcacuu

SEQ ID NO: 2121469 - RNA, 20 nt, Human
aguguuuuaagauaaauuau

SEQ ID NO: 2121470 - RNA, 12 nt, Human
aguguuuucaga

SEQ ID NO: 2121471 - RNA, 13 nt, Human
aguguuuucagag

SEQ ID NO: 2121472 - RNA, 14 nt, Human
aguguuuucagagc

SEQ ID NO: 2121473 - RNA, 15 nt, Human
aguggcauggcucca

SEQ ID NO: 2121474 - RNA, 18 nt, Human
aguggcauggcuccaguc

SEQ ID NO: 2121475 - RNA, 16 nt, Human
aguggcaugugcugug

SEQ ID NO: 2121476 - RNA, 16 nt, Human
aguggcccccacagaa

SEQ ID NO: 2121477 - RNA, 21 nt, Human
aguguuuggguauauucauuu

SEQ ID NO: 2121478 - RNA, 11 nt, Human
aguggccagac

SEQ ID NO: 2121479 - RNA, 14 nt, Human
aguggccagaccag

SEQ ID NO: 2121480 - RNA, 17 nt, Human
aguggccagaccagagc

SEQ ID NO: 2121481 - RNA, 19 nt, Human
aguggccagaccagagcuc

SEQ ID NO: 2121482 - RNA, 21 nt, Human
aguggccagaccagagcucug

SEQ ID NO: 2121483 - RNA, 22 nt, Human
aguggccagaccagagcucugg

SEQ ID NO: 2121484 - RNA, 23 nt, Human
aguggccagaccagagcucugga

SEQ ID NO: 2121485 - RNA, 13 nt, Human
aguuguuauuaca

SEQ ID NO: 2121486 - RNA, 19 nt, Human
aguuguuauuacauccuug

SEQ ID NO: 2121487 - RNA, 14 nt, Human
aguugaaucuauug

SEQ ID NO: 2121488 - RNA, 16 nt, Human
aguugaagcuaagauu

SEQ ID NO: 2121489 - RNA, 14 nt, Human
aguuugaggcugca

SEQ ID NO: 2121490 - RNA, 17 nt, Human
aguuugaggcugcagcg

SEQ ID NO: 2121491 - RNA, 13 nt, Human
aguuugccagaag

SEQ ID NO: 2121492 - RNA, 12 nt, Human
aguuugcccugg

SEQ ID NO: 2121493 - RNA, 21 nt, Human
aguuugcccugguuucacugg

SEQ ID NO: 2121494 - RNA, 22 nt, Human
aguuugcagaaaagcaccugcc

SEQ ID NO: 2121495 - RNA, 23 nt, Human
aguuugcagaaaagcaccugccg

SEQ ID NO: 2121496 - RNA, 11 nt, Human
aguuugcaguu

SEQ ID NO: 2121497 - RNA, 14 nt, Human
aguuugcagaaaag

SEQ ID NO: 2121498 - RNA, 20 nt, Human
aguuugcagaaaagcaccug

SEQ ID NO: 2121499 - RNA, 21 nt, Human
aguuugcagaaaagcaccugc

SEQ ID NO: 2121500 - RNA, 18 nt, Human
auaaaacaggucaauaca

SEQ ID NO: 2121501 - RNA, 16 nt, Human
auaaaacaggucaaua

SEQ ID NO: 2121502 - RNA, 12 nt, Human
auaaaaauggau

SEQ ID NO: 2121503 - RNA, 22 nt, Human
auaaaaaagcuggugggugaaa

SEQ ID NO: 2121504 - RNA, 14 nt, Human
auaaaaaagucucu

SEQ ID NO: 2121505 - RNA, 15 nt, Human
auaaaaaagucucua

SEQ ID NO: 2121506 - RNA, 16 nt, Human
auaaaaaagucucuau

SEQ ID NO: 2121507 - RNA, 18 nt, Human
auaaaaaagucucuauuu

SEQ ID NO: 2121508 - RNA, 14 nt, Human
auaaaaaauaauaa

SEQ ID NO: 2121509 - RNA, 20 nt, Human
auaaaaaauaauaauacaag

SEQ ID NO: 2121510 - RNA, 23 nt, Human
aguuugcuagcagaaaucuagaa

SEQ ID NO: 2121511 - RNA, 15 nt, Human
auaaaaaaaaugaaa

SEQ ID NO: 2121512 - RNA, 18 nt, Human
auaaaaaaaaugaaaugu

SEQ ID NO: 2121513 - RNA, 20 nt, Human
auaaaaaaaaugaaauguuu

SEQ ID NO: 2121514 - RNA, 13 nt, Human
auaaaaaauuuug

SEQ ID NO: 2121515 - RNA, 15 nt, Human
auaaaaaauuuugua

SEQ ID NO: 2121516 - RNA, 18 nt, Human
auaaaaaauuuuguaauu

SEQ ID NO: 2121517 - RNA, 19 nt, Human
auaaaaaauuuuguaauuu

SEQ ID NO: 2121518 - RNA, 21 nt, Human
auaaaaaauuuuguaauuuuc

SEQ ID NO: 2121519 - RNA, 17 nt, Human
auaaaaaccaagaagau

SEQ ID NO: 2121520 - RNA, 17 nt, Human
auaaugugggaagaaac

SEQ ID NO: 2121521 - RNA, 19 nt, Human
auaaugugggaagaaacaa

SEQ ID NO: 2121522 - RNA, 21 nt, Human
auaaugugggaagaaacaaac

SEQ ID NO: 2121523 - RNA, 13 nt, Human
auaaguacugugu

SEQ ID NO: 2121524 - RNA, 16 nt, Human
auaaguacuguguaca

SEQ ID NO: 2121525 - RNA, 18 nt, Human
auaaguacuguguacaga

SEQ ID NO: 2121526 - RNA, 18 nt, Human
auaauguugugguuuguu

SEQ ID NO: 2121527 - RNA, 15 nt, Human
auacaauucuacauu

SEQ ID NO: 2121528 - RNA, 12 nt, Human
auaauguuaaca

SEQ ID NO: 2121529 - RNA, 13 nt, Human
auaagcuuccagg

SEQ ID NO: 2121530 - RNA, 23 nt, Human
auaagcuuccaggcugcauagaa

SEQ ID NO: 2121531 - RNA, 17 nt, Human
auaagcuaaagaggcug

SEQ ID NO: 2121532 - RNA, 13 nt, Human
auaagcuaaagag

SEQ ID NO: 2121533 - RNA, 16 nt, Human
auaagcuaaagaggcu

SEQ ID NO: 2121534 - RNA, 14 nt, Human
auaaaagauacauu

SEQ ID NO: 2121535 - RNA, 15 nt, Human
auaaaagauacauuu

SEQ ID NO: 2121536 - RNA, 18 nt, Human
auaaaagauacauuugua

SEQ ID NO: 2121537 - RNA, 16 nt, Human
auaaaacaucuuucca

SEQ ID NO: 2121538 - RNA, 13 nt, Human
auaaagagaaaau

SEQ ID NO: 2121539 - RNA, 16 nt, Human
auaaagagaaaauuga

SEQ ID NO: 2121540 - RNA, 17 nt, Human
auaaagagaaaauugaa

SEQ ID NO: 2121541 - RNA, 18 nt, Human
auaaagagaaaauugaau

SEQ ID NO: 2121542 - RNA, 20 nt, Human
auaaagagaaaauugaauuu

SEQ ID NO: 2121543 - RNA, 21 nt, Human
auaaagagaaaauugaauuua

SEQ ID NO: 2121544 - RNA, 16 nt, Human
auaaagaccuauaaau

SEQ ID NO: 2121545 - RNA, 21 nt, Human
auacugucgguuuuuuuuaaa

SEQ ID NO: 2121546 - RNA, 19 nt, Human
auacuuuuuucuuauuuaa

SEQ ID NO: 2121547 - RNA, 16 nt, Human
auagcaacacucuaua

SEQ ID NO: 2121548 - RNA, 21 nt, Human
auagaaaacaggaaaaaaacu

SEQ ID NO: 2121549 - RNA, 22 nt, Human
auagaaaacaggaaaaaaacuu

SEQ ID NO: 2121550 - RNA, 23 nt, Human
auagaaaacaggaaaaaaacuuu

SEQ ID NO: 2121551 - RNA, 18 nt, Human
auacaccgggccuggaga

SEQ ID NO: 2121552 - RNA, 14 nt, Human
auacaccgggccug

SEQ ID NO: 2121553 - RNA, 19 nt, Human
auacaccagagauaauaug

SEQ ID NO: 2121554 - RNA, 22 nt, Human
auacacuauuugugagcaaagg

SEQ ID NO: 2121555 - RNA, 21 nt, Human
auacacuaugaagauguuuca

SEQ ID NO: 2121556 - RNA, 17 nt, Human
auacacgagguaugagg

SEQ ID NO: 2121557 - RNA, 21 nt, Human
auacacugaaguuaacagaga

SEQ ID NO: 2121558 - RNA, 16 nt, Human
auauuuuuuucuaaga

SEQ ID NO: 2121559 - RNA, 14 nt, Human
auauuuuuuuaagu

SEQ ID NO: 2121560 - RNA, 17 nt, Human
auauuuuuuuaagucuu

SEQ ID NO: 2121561 - RNA, 24 nt, Human
aucaaaagguuaauaaaguaauua

SEQ ID NO: 2121562 - RNA, 22 nt, Human
aucaaacccggcgguccccucc

SEQ ID NO: 2121563 - RNA, 20 nt, Human
aucaaaagguuaauaaagua

SEQ ID NO: 2121564 - RNA, 17 nt, Human
aucaaacugaagccaga

SEQ ID NO: 2121565 - RNA, 19 nt, Human
aucaaagagguuuuaaaaa

SEQ ID NO: 2121566 - RNA, 14 nt, Human
aucaaacugaagcc

SEQ ID NO: 2121567 - RNA, 15 nt, Human
aucaaacugaagcca

SEQ ID NO: 2121568 - RNA, 16 nt, Human
aucaaacugaagccag

SEQ ID NO: 2121569 - RNA, 19 nt, Human
auagcaagacacaucccua

SEQ ID NO: 2121570 - RNA, 15 nt, Human
auagcaacaugcuuc

SEQ ID NO: 2121571 - RNA, 17 nt, Human
auagcaagauugcuuaa

SEQ ID NO: 2121572 - RNA, 13 nt, Human
auagcaagugaau

SEQ ID NO: 2121573 - RNA, 19 nt, Human
auagcaagugaauuuuucu

SEQ ID NO: 2121574 - RNA, 22 nt, Human
auagcaagugaauuuuucucua

SEQ ID NO: 2121575 - RNA, 22 nt, Human
auagcaauccauguuaguuuuu

SEQ ID NO: 2121576 - RNA, 15 nt, Human
aucauccuaagcuau

SEQ ID NO: 2121577 - RNA, 15 nt, Human
aucauggaaauauua

SEQ ID NO: 2121578 - RNA, 19 nt, Human
aucauggaaauauuaugca

SEQ ID NO: 2121579 - RNA, 22 nt, Human
aucaugcauuguugaggugguc

SEQ ID NO: 2121580 - RNA, 12 nt, Human
aucaugcauugu

SEQ ID NO: 2121581 - RNA, 13 nt, Human
aucaugcauuguu

SEQ ID NO: 2121582 - RNA, 14 nt, Human
aucaugcauuguug

SEQ ID NO: 2121583 - RNA, 21 nt, Human
aucaugcauuguugagguggu

SEQ ID NO: 2121584 - RNA, 22 nt, Human
aucaugcaucuuacugaaggua

SEQ ID NO: 2121585 - RNA, 19 nt, Human
aucaugcaaaugcuguauu

SEQ ID NO: 2121586 - RNA, 15 nt, Human
aucaugagauugaug

SEQ ID NO: 2121587 - RNA, 17 nt, Human
aucaugagauugaugca

SEQ ID NO: 2121588 - RNA, 20 nt, Human
aucaugacacucguauaagc

SEQ ID NO: 2121589 - RNA, 21 nt, Human
auccacugugccaugugccag

SEQ ID NO: 2121590 - RNA, 22 nt, Human
auccacucuacccucccacccc

SEQ ID NO: 2121591 - RNA, 23 nt, Human
auccacucuacccucccaccccc

SEQ ID NO: 2121592 - RNA, 19 nt, Human
auccagccggaggccagag

SEQ ID NO: 2121593 - RNA, 20 nt, Human
auccagauacacccaaagua

SEQ ID NO: 2121594 - RNA, 18 nt, Human
auccuuuuucuuuauaaa

SEQ ID NO: 2121595 - RNA, 17 nt, Human
auccuuccucacaccag

SEQ ID NO: 2121596 - RNA, 12 nt, Human
auccuucuaauc

SEQ ID NO: 2121597 - RNA, 13 nt, Human
auccuucuaaucu

SEQ ID NO: 2121598 - RNA, 19 nt, Human
auccuucuaaucugcuaug

SEQ ID NO: 2121599 - RNA, 18 nt, Human
auccagggaugccaucug

SEQ ID NO: 2121600 - RNA, 14 nt, Human
auggcuucuaacaa

SEQ ID NO: 2121601 - RNA, 18 nt, Human
auggcuugccacagcucu

SEQ ID NO: 2121602 - RNA, 18 nt, Human
augggaaacuuccaagac

SEQ ID NO: 2121603 - RNA, 18 nt, Human
auggaguguguauuguuc

SEQ ID NO: 2121604 - RNA, 21 nt, Human
auggaguguguauuguuccca

SEQ ID NO: 2121605 - RNA, 20 nt, Human
augggaaaugccuaagaaga

SEQ ID NO: 2121606 - RNA, 14 nt, Human
augggaagacauga

SEQ ID NO: 2121607 - RNA, 22 nt, Human
augcuuucugaacucgcuucuc

SEQ ID NO: 2121608 - RNA, 13 nt, Human
auggagagagggg

SEQ ID NO: 2121609 - RNA, 14 nt, Human
auggagagagggga

SEQ ID NO: 2121610 - RNA, 15 nt, Human
auggagagaggggaa

SEQ ID NO: 2121611 - RNA, 17 nt, Human
auggagagaggggaaua

SEQ ID NO: 2121612 - RNA, 18 nt, Human
augcucugcauguuacau

SEQ ID NO: 2121613 - RNA, 19 nt, Human
augcucugcauguuacaua

SEQ ID NO: 2121614 - RNA, 23 nt, Human
augcucugugcgaggguuacuau

SEQ ID NO: 2121615 - RNA, 12 nt, Human
augcauaacuga

SEQ ID NO: 2121616 - RNA, 19 nt, Human
augcauaacugacaaauca

SEQ ID NO: 2121617 - RNA, 20 nt, Human
augcauaacugacaaaucaa

SEQ ID NO: 2121618 - RNA, 22 nt, Human
augcauaacugacaaaucaagu

SEQ ID NO: 2121619 - RNA, 17 nt, Human
augcauacacucucaaa

SEQ ID NO: 2121620 - RNA, 14 nt, Human
augcauacauacac

SEQ ID NO: 2121621 - RNA, 17 nt, Human
augcauacauacacaua

SEQ ID NO: 2121622 - RNA, 23 nt, Human
augcauacauacacauauauaca

SEQ ID NO: 2121623 - RNA, 23 nt, Human
augcauccauuccucagggacag

SEQ ID NO: 2121624 - RNA, 14 nt, Human
augcauccauuccu

SEQ ID NO: 2121625 - RNA, 17 nt, Human
augcauccauuccucag

SEQ ID NO: 2121626 - RNA, 18 nt, Human
augcauccauuccucagg

SEQ ID NO: 2121627 - RNA, 22 nt, Human
augcauccauuccucagggaca

SEQ ID NO: 2121628 - RNA, 15 nt, Human
augcaucaauccugu

SEQ ID NO: 2121629 - RNA, 16 nt, Human
augcaucaauccugug

SEQ ID NO: 2121630 - RNA, 22 nt, Human
augcaucucacuggaugcaaag

SEQ ID NO: 2121631 - RNA, 21 nt, Human
augcauggcagcaggccuguu

SEQ ID NO: 2121632 - RNA, 21 nt, Human
augccugguggcagcugcggu

SEQ ID NO: 2121633 - RNA, 16 nt, Human
augccuguccagccug

SEQ ID NO: 2121634 - RNA, 18 nt, Human
augccugguggcagcugc

SEQ ID NO: 2121635 - RNA, 19 nt, Human
augccugguggcagcugcg

SEQ ID NO: 2121636 - RNA, 14 nt, Human
augccugguggcag

SEQ ID NO: 2121637 - RNA, 13 nt, Human
augccugguggca

SEQ ID NO: 2121638 - RNA, 12 nt, Human
augccugguggc

SEQ ID NO: 2121639 - RNA, 11 nt, Human
augccuggugg

SEQ ID NO: 2121640 - RNA, 22 nt, Human
augaauaauuucccaauuagga

SEQ ID NO: 2121641 - RNA, 21 nt, Human
augaauacagggcaugcauuu

SEQ ID NO: 2121642 - RNA, 17 nt, Human
augaauaaagacaccua

SEQ ID NO: 2121643 - RNA, 21 nt, Human
augaaguaacuugucuuaaau

SEQ ID NO: 2121644 - RNA, 15 nt, Human
augaauaauuuccca

SEQ ID NO: 2121645 - RNA, 15 nt, Human
augaagcuaccucaa

SEQ ID NO: 2121646 - RNA, 14 nt, Human
augaaagaaaggcc

SEQ ID NO: 2121647 - RNA, 17 nt, Human
augaagccacagcccag

SEQ ID NO: 2121648 - RNA, 23 nt, Human
augaagccacagcccaggccucc

SEQ ID NO: 2121649 - RNA, 23 nt, Human
augaagcauuuacuuuguguuca

SEQ ID NO: 2121650 - RNA, 14 nt, Human
augaagcuaccuca

SEQ ID NO: 2121651 - RNA, 12 nt, Human
augaagcccaag

SEQ ID NO: 2121652 - RNA, 15 nt, Human
augaagcccaaguga

SEQ ID NO: 2121653 - RNA, 17 nt, Human
augaagcccaagugaaa

SEQ ID NO: 2121654 - RNA, 16 nt, Human
augaagcccaauaaac

SEQ ID NO: 2121655 - RNA, 12 nt, Human
augaaagacugu

SEQ ID NO: 2121656 - RNA, 19 nt, Human
augagccucagcauccugg

SEQ ID NO: 2121657 - RNA, 21 nt, Human
augagccucagcauccuggca

SEQ ID NO: 2121658 - RNA, 11 nt, Human
augagccuggc

SEQ ID NO: 2121659 - RNA, 12 nt, Human
augagccuggca

SEQ ID NO: 2121660 - RNA, 17 nt, Human
augaccuucuaggaagc

SEQ ID NO: 2121661 - RNA, 18 nt, Human
augaccuucuaggaagcu

SEQ ID NO: 2121662 - RNA, 18 nt, Human
augagcuuuauguaauaa

SEQ ID NO: 2121663 - RNA, 20 nt, Human
augagcuuuauguaauaaug

SEQ ID NO: 2121664 - RNA, 22 nt, Human
augagcuuuauguaauaaugug

SEQ ID NO: 2121665 - RNA, 18 nt, Human
augaggccucaguggacu

SEQ ID NO: 2121666 - RNA, 15 nt, Human
agauauaaaagacug

SEQ ID NO: 2121667 - RNA, 21 nt, Human
agauaggcucugcacagaugg

SEQ ID NO: 2121668 - RNA, 22 nt, Human
agauaggcucugcacagaugga

SEQ ID NO: 2121669 - RNA, 23 nt, Human
agauaguuuugccagaacaguuu

SEQ ID NO: 2121670 - RNA, 12 nt, Human
agauaggccugu

SEQ ID NO: 2121671 - RNA, 18 nt, Human
agauaggccuucuuguga

SEQ ID NO: 2121672 - RNA, 13 nt, Human
agauaggcucugc

SEQ ID NO: 2121673 - RNA, 14 nt, Human
agauaggcucugca

SEQ ID NO: 2121674 - RNA, 16 nt, Human
agauaggcucugcaca

SEQ ID NO: 2121675 - RNA, 17 nt, Human
agauagaagaaaaaaga

SEQ ID NO: 2121676 - RNA, 21 nt, Human
agauagaagaaaaaagaaugu

SEQ ID NO: 2121677 - RNA, 13 nt, Human
agauagaagaacu

SEQ ID NO: 2121678 - RNA, 14 nt, Human
agauagaagaacug

SEQ ID NO: 2121679 - RNA, 15 nt, Human
agauagaagaacugc

SEQ ID NO: 2121680 - RNA, 16 nt, Human
agauagaagaacugca

SEQ ID NO: 2121681 - RNA, 17 nt, Human
agauagaagauguuugc

SEQ ID NO: 2121682 - RNA, 18 nt, Human
agaguggucuuucuggag

SEQ ID NO: 2121683 - RNA, 22 nt, Human
agagggucuggagaagcaguga

SEQ ID NO: 2121684 - RNA, 14 nt, Human
agagggugcugccc

SEQ ID NO: 2121685 - RNA, 23 nt, Human
agagggugcugccccaugaagcc

SEQ ID NO: 2121686 - RNA, 13 nt, Human
agaguggccuggc

SEQ ID NO: 2121687 - RNA, 14 nt, Human
agaguggccuggcc

SEQ ID NO: 2121688 - RNA, 15 nt, Human
agaguggccuggcca

SEQ ID NO: 2121689 - RNA, 16 nt, Human
agaguggccuggccag

SEQ ID NO: 2121690 - RNA, 18 nt, Human
agagggucuggagaagca

SEQ ID NO: 2121691 - RNA, 20 nt, Human
agagggucugaggaauccag

SEQ ID NO: 2121692 - RNA, 14 nt, Human
agaguggcuccucc

SEQ ID NO: 2121693 - RNA, 13 nt, Human
agaguggcuccuc

SEQ ID NO: 2121694 - RNA, 12 nt, Human
agaguggcuccu

SEQ ID NO: 2121695 - RNA, 17 nt, Human
agaguggccuggccagg

SEQ ID NO: 2121696 - RNA, 19 nt, Human
agaguggccuggccaggag

SEQ ID NO: 2121697 - RNA, 15 nt, Human
agaguggcuccuccc

SEQ ID NO: 2121698 - RNA, 22 nt, Human
agaguggccuggccaggagcuc

SEQ ID NO: 2121699 - RNA, 16 nt, Human
agaguggguuucacaa

SEQ ID NO: 2121700 - RNA, 17 nt, Human
agauaucuugaaaugaa

SEQ ID NO: 2121701 - RNA, 14 nt, Human
agauaucuuuuuau

SEQ ID NO: 2121702 - RNA, 17 nt, Human
agauaucuuuuuauuga

SEQ ID NO: 2121703 - RNA, 18 nt, Human
agauaucuuuuuauugau

SEQ ID NO: 2121704 - RNA, 22 nt, Human
agauaucuuuuuauugaugugc

SEQ ID NO: 2121705 - RNA, 24 nt, Human
agauaucuuuuuauugaugugcaa

SEQ ID NO: 2121706 - RNA, 15 nt, Human
agauaugaguuguuu

SEQ ID NO: 2121707 - RNA, 16 nt, Human
agauaugauauguaaa

SEQ ID NO: 2121708 - RNA, 17 nt, Human
agauaugauauguaaac

SEQ ID NO: 2121709 - RNA, 23 nt, Human
agaucucugcuuuggaaaucaca

SEQ ID NO: 2121710 - RNA, 18 nt, Human
agaucucugcuuuggaaa

SEQ ID NO: 2121711 - RNA, 14 nt, Human
agaucugcaccgcc

SEQ ID NO: 2121712 - RNA, 15 nt, Human
agaucugcaccgccg

SEQ ID NO: 2121713 - RNA, 19 nt, Human
agauucuacauauucuuua

SEQ ID NO: 2121714 - RNA, 20 nt, Human
agauggcugugccucugccu

SEQ ID NO: 2121715 - RNA, 19 nt, Human
agauggcugugccucugcc

SEQ ID NO: 2121716 - RNA, 18 nt, Human
agauggcugugccucugc

SEQ ID NO: 2121717 - RNA, 17 nt, Human
agauggcugugccucug

SEQ ID NO: 2121718 - RNA, 22 nt, Human
agauggcugugccucugccugu

SEQ ID NO: 2121719 - RNA, 21 nt, Human
agauggcugugccucugccug

SEQ ID NO: 2121720 - RNA, 19 nt, Human
agcaaauaaacuaggaaau

SEQ ID NO: 2121721 - RNA, 19 nt, Human
agcaaauucuguuuuucua

SEQ ID NO: 2121722 - RNA, 16 nt, Human
agcaaaucagaaacuu

SEQ ID NO: 2121723 - RNA, 20 nt, Human
agcaaaucagaaacuuguga

SEQ ID NO: 2121724 - RNA, 14 nt, Human
agcaaauuuauaau

SEQ ID NO: 2121725 - RNA, 15 nt, Human
agcaaauuuauaauu

SEQ ID NO: 2121726 - RNA, 16 nt, Human
agcaaauuuauaauuu

SEQ ID NO: 2121727 - RNA, 18 nt, Human
agcaaauuuauaauuuua

SEQ ID NO: 2121728 - RNA, 19 nt, Human
agcaaauuuauaauuuuaa

SEQ ID NO: 2121729 - RNA, 20 nt, Human
agcaaauuuauaauuuuaag

SEQ ID NO: 2121730 - RNA, 21 nt, Human
agauugcgccauugcacucca

SEQ ID NO: 2121731 - RNA, 19 nt, Human
agauugcaacaggcugggc

SEQ ID NO: 2121732 - RNA, 17 nt, Human
agauugcaacaggcugg

SEQ ID NO: 2121733 - RNA, 16 nt, Human
agauugcaccacugca

SEQ ID NO: 2121734 - RNA, 16 nt, Human
agauugcaacaggcug

SEQ ID NO: 2121735 - RNA, 18 nt, Human
agauugaguaagauuuac

SEQ ID NO: 2121736 - RNA, 22 nt, Human
agauugaguaagauuuacccag

SEQ ID NO: 2121737 - RNA, 14 nt, Human
agcaucucaugagu

SEQ ID NO: 2121738 - RNA, 13 nt, Human
agcaucuaaacuu

SEQ ID NO: 2121739 - RNA, 14 nt, Human
agcaucuaaacuuu

SEQ ID NO: 2121740 - RNA, 16 nt, Human
agcaucuaaacuuuaa

SEQ ID NO: 2121741 - RNA, 17 nt, Human
agcaucuaaacuuuaau

SEQ ID NO: 2121742 - RNA, 22 nt, Human
agcaucuaaacuuuaauaugua

SEQ ID NO: 2121743 - RNA, 13 nt, Human
agcaucggaggga

SEQ ID NO: 2121744 - RNA, 22 nt, Human
agccaaggugggcugagcccug

SEQ ID NO: 2121745 - RNA, 23 nt, Human
agccaaggugggcugagcccugg

SEQ ID NO: 2121746 - RNA, 13 nt, Human
agcccaccuuggc

SEQ ID NO: 2121747 - RNA, 23 nt, Human
agcccaccccucaacaccucugc

SEQ ID NO: 2121748 - RNA, 13 nt, Human
agcccaaagaagg

SEQ ID NO: 2121749 - RNA, 14 nt, Human
agcccaaagaagga

SEQ ID NO: 2121750 - RNA, 18 nt, Human
agcaucuucacuucuaaa

SEQ ID NO: 2121751 - RNA, 21 nt, Human
agccaacgacaaagccaaacu

SEQ ID NO: 2121752 - RNA, 15 nt, Human
agccaacuuuugcau

SEQ ID NO: 2121753 - RNA, 13 nt, Human
agcaucugcuaau

SEQ ID NO: 2121754 - RNA, 19 nt, Human
agcaucucuugaggccagg

SEQ ID NO: 2121755 - RNA, 22 nt, Human
agcaucucuugaggccaggagu

SEQ ID NO: 2121756 - RNA, 23 nt, Human
agcaucuccugaggaucagaaag

SEQ ID NO: 2121757 - RNA, 17 nt, Human
agcaucucuugaggcca

SEQ ID NO: 2121758 - RNA, 17 nt, Human
agccaaggguauccaag

SEQ ID NO: 2121759 - RNA, 18 nt, Human
agccaaggguucagagac

SEQ ID NO: 2121760 - RNA, 15 nt, Human
agccaagggccucuu

SEQ ID NO: 2121761 - RNA, 22 nt, Human
agccaaggguucagagacucag

SEQ ID NO: 2121762 - RNA, 19 nt, Human
agccaaggugggcugagcc

SEQ ID NO: 2121763 - RNA, 20 nt, Human
agccaaggugggcugagccc

SEQ ID NO: 2121764 - RNA, 16 nt, Human
agcagccuggacccug

SEQ ID NO: 2121765 - RNA, 16 nt, Human
agcacugagcaaagca

SEQ ID NO: 2121766 - RNA, 13 nt, Human
agcacucacaugc

SEQ ID NO: 2121767 - RNA, 14 nt, Human
agcacucacaugcu

SEQ ID NO: 2121768 - RNA, 21 nt, Human
agcacucacaugcuggacagg

SEQ ID NO: 2121769 - RNA, 19 nt, Human
agcacuccucccugaugua

SEQ ID NO: 2121770 - RNA, 20 nt, Human
agcacuccucccugauguac

SEQ ID NO: 2121771 - RNA, 11 nt, Human
agcagcuacca

SEQ ID NO: 2121772 - RNA, 17 nt, Human
agcagcuaucucucagu

SEQ ID NO: 2121773 - RNA, 19 nt, Human
agcagcuaucucucaguga

SEQ ID NO: 2121774 - RNA, 15 nt, Human
agcagcucaaaggca

SEQ ID NO: 2121775 - RNA, 16 nt, Human
agcagcucaaaggcac

SEQ ID NO: 2121776 - RNA, 19 nt, Human
agcagcucaaaggcacagu

SEQ ID NO: 2121777 - RNA, 12 nt, Human
agcagcucaggc

SEQ ID NO: 2121778 - RNA, 13 nt, Human
agcagcucaggca

SEQ ID NO: 2121779 - RNA, 14 nt, Human
agcagcucaggcac

SEQ ID NO: 2121780 - RNA, 20 nt, Human
agcagccuggacccugugga

SEQ ID NO: 2121781 - RNA, 13 nt, Human
agcagccuguggc

SEQ ID NO: 2121782 - RNA, 14 nt, Human
agcagccuguggca

SEQ ID NO: 2121783 - RNA, 19 nt, Human
agcaguggacaccaggagu

SEQ ID NO: 2121784 - RNA, 12 nt, Human
agcaguggacac

SEQ ID NO: 2121785 - RNA, 15 nt, Human
agcaguggacaccag

SEQ ID NO: 2121786 - RNA, 20 nt, Human
agcagcucaaaggcacagug

SEQ ID NO: 2121787 - RNA, 21 nt, Human
agcagcucaggcacacuucuu

SEQ ID NO: 2121788 - RNA, 23 nt, Human
agcagugccuuccauaauuauga

SEQ ID NO: 2121789 - RNA, 20 nt, Human
agcaauuuauacaauaucau

SEQ ID NO: 2121790 - RNA, 20 nt, Human
agcaauuccaugcuauaaaa

SEQ ID NO: 2121791 - RNA, 23 nt, Human
agcaauuccaugcuauaaaaacu

SEQ ID NO: 2121792 - RNA, 17 nt, Human
agcaauugcugcaucuu

SEQ ID NO: 2121793 - RNA, 18 nt, Human
agcaauugcugcaucuua

SEQ ID NO: 2121794 - RNA, 20 nt, Human
agcaauugcugcaucuuagu

SEQ ID NO: 2121795 - RNA, 16 nt, Human
agcaauugugugguca

SEQ ID NO: 2121796 - RNA, 23 nt, Human
agcaauuguguggucaguggcuc

SEQ ID NO: 2121797 - RNA, 19 nt, Human
agcacagagagggggccac

SEQ ID NO: 2121798 - RNA, 20 nt, Human
agcacagagagggggccacc

SEQ ID NO: 2121799 - RNA, 21 nt, Human
agcacagagagggggccaccu

SEQ ID NO: 2121800 - RNA, 23 nt, Human
agcacagagagggggccaccucc

SEQ ID NO: 2121801 - RNA, 16 nt, Human
agcacaaaagccucuc

SEQ ID NO: 2121802 - RNA, 12 nt, Human
agcacagagagg

SEQ ID NO: 2121803 - RNA, 21 nt, Human
agcaauuucgccguugaagag

SEQ ID NO: 2121804 - RNA, 22 nt, Human
agcaauuucgccguugaagagg

SEQ ID NO: 2121805 - RNA, 18 nt, Human
agaagaugaaugagcaaa

SEQ ID NO: 2121806 - RNA, 12 nt, Human
agaagaugaaaa

SEQ ID NO: 2121807 - RNA, 22 nt, Human
agaagaugaaaauggaaguggc

SEQ ID NO: 2121808 - RNA, 19 nt, Human
agaagauggcacuuauaac

SEQ ID NO: 2121809 - RNA, 16 nt, Human
agaagaugacuuccca

SEQ ID NO: 2121810 - RNA, 16 nt, Human
agaaggggaagcacuc

SEQ ID NO: 2121811 - RNA, 17 nt, Human
agaagucaacagugaaa

SEQ ID NO: 2121812 - RNA, 17 nt, Human
agaagucaaaguaaaac

SEQ ID NO: 2121813 - RNA, 15 nt, Human
agaaggggaagcacu

SEQ ID NO: 2121814 - RNA, 19 nt, Human
agaagggccaguccugccu

SEQ ID NO: 2121815 - RNA, 20 nt, Human
agaagggccaguccugccug

SEQ ID NO: 2121816 - RNA, 20 nt, Human
agaagucaugaagcccaagu

SEQ ID NO: 2121817 - RNA, 14 nt, Human
agaagucacacagu

SEQ ID NO: 2121818 - RNA, 15 nt, Human
agaagucuuagacuu

SEQ ID NO: 2121819 - RNA, 17 nt, Human
agaagucuuagauguau

SEQ ID NO: 2121820 - RNA, 19 nt, Human
agaagucuuagauguauau

SEQ ID NO: 2121821 - RNA, 18 nt, Human
agaaccaguuucaggugu

SEQ ID NO: 2121822 - RNA, 22 nt, Human
agaaccaucccuauuuuguauu

SEQ ID NO: 2121823 - RNA, 20 nt, Human
agaaccaggcaacuugggaa

SEQ ID NO: 2121824 - RNA, 13 nt, Human
agaaccacuauga

SEQ ID NO: 2121825 - RNA, 17 nt, Human
agaaccaggcaacuugg

SEQ ID NO: 2121826 - RNA, 17 nt, Human
agaacaccaagacuuga

SEQ ID NO: 2121827 - RNA, 22 nt, Human
agaagagaauauuagcuuuacu

SEQ ID NO: 2121828 - RNA, 13 nt, Human
agaaucugaaugu

SEQ ID NO: 2121829 - RNA, 18 nt, Human
agaaucugaauguaauuu

SEQ ID NO: 2121830 - RNA, 17 nt, Human
agaaucucaaauaacua

SEQ ID NO: 2121831 - RNA, 21 nt, Human
agaaucgaugggggaugcuuc

SEQ ID NO: 2121832 - RNA, 22 nt, Human
agaaucgaugggggaugcuuca

SEQ ID NO: 2121833 - RNA, 23 nt, Human
agaaucgaugggggaugcuucau

SEQ ID NO: 2121834 - RNA, 16 nt, Human
agaaugaaagggccca

SEQ ID NO: 2121835 - RNA, 13 nt, Human
agaaugaggagga

SEQ ID NO: 2121836 - RNA, 16 nt, Human
agaaugaggaggaagg

SEQ ID NO: 2121837 - RNA, 12 nt, Human
agaaucuuuccu

SEQ ID NO: 2121838 - RNA, 19 nt, Human
agaaucuuuccuuccucuc

SEQ ID NO: 2121839 - RNA, 14 nt, Human
agaaugaugcacau

SEQ ID NO: 2121840 - RNA, 19 nt, Human
agaaugaugcacauuucau

SEQ ID NO: 2121841 - RNA, 14 nt, Human
agaaugagugaauc

SEQ ID NO: 2121842 - RNA, 16 nt, Human
agaaugccauucucuu

SEQ ID NO: 2121843 - RNA, 18 nt, Human
agaaugcucuuuacuuca

SEQ ID NO: 2121844 - RNA, 17 nt, Human
agaaugaggaggaagga

SEQ ID NO: 2121845 - RNA, 16 nt, Human
agaaugagggccaaga

SEQ ID NO: 2121846 - RNA, 18 nt, Human
agaacagaucuccaaagc

SEQ ID NO: 2121847 - RNA, 19 nt, Human
agaacagaucuccaaagcu

SEQ ID NO: 2121848 - RNA, 20 nt, Human
agaacagaucuccaaagcuu

SEQ ID NO: 2121849 - RNA, 13 nt, Human
agaacagcaggcc

SEQ ID NO: 2121850 - RNA, 17 nt, Human
agaacagcaggcccacc

SEQ ID NO: 2121851 - RNA, 18 nt, Human
agaacagcaggcccaccu

SEQ ID NO: 2121852 - RNA, 19 nt, Human
agaacagcaggcccaccua

SEQ ID NO: 2121853 - RNA, 23 nt, Human
agaacagcaggguagucugguuu

SEQ ID NO: 2121854 - RNA, 13 nt, Human
agaacagcagagg

SEQ ID NO: 2121855 - RNA, 18 nt, Human
agaacagccgcuccuguc

SEQ ID NO: 2121856 - RNA, 19 nt, Human
agaacagccgcuccugucu

SEQ ID NO: 2121857 - RNA, 20 nt, Human
agaacagccgcuccugucug

SEQ ID NO: 2121858 - RNA, 18 nt, Human
agaacagcagagguucuu

SEQ ID NO: 2121859 - RNA, 22 nt, Human
agaacagccgcuccugucugcc

SEQ ID NO: 2121860 - RNA, 23 nt, Human
agaacagccgcuccugucugcca

SEQ ID NO: 2121861 - RNA, 11 nt, Human
agaacauagaa

SEQ ID NO: 2121862 - RNA, 17 nt, Human
agaacaguuuguacaga

SEQ ID NO: 2121863 - RNA, 17 nt, Human
agaacaguuaagcagcc

SEQ ID NO: 2121864 - RNA, 20 nt, Human
agaacaguuaagcagccgcc

SEQ ID NO: 2121865 - RNA, 21 nt, Human
agaacaguuaagcagccgcca

SEQ ID NO: 2121866 - RNA, 15 nt, Human
agaacaguuuguaca

SEQ ID NO: 2121867 - RNA, 14 nt, Human
agaacagugauuuu

SEQ ID NO: 2121868 - RNA, 18 nt, Human
agaacaucccugccagcu

SEQ ID NO: 2121869 - RNA, 19 nt, Human
agaacaucccugccagcuc

SEQ ID NO: 2121870 - RNA, 15 nt, Human
agaacauccaaggag

SEQ ID NO: 2121871 - RNA, 18 nt, Human
agaacauccaaggagaaa

SEQ ID NO: 2121872 - RNA, 16 nt, Human
agaacaucccugccag

SEQ ID NO: 2121873 - RNA, 17 nt, Human
agaacaucccugccagc

SEQ ID NO: 2121874 - RNA, 16 nt, Human
agaacauguugguauu

SEQ ID NO: 2121875 - RNA, 19 nt, Human
agaacauguugguauuuau

SEQ ID NO: 2121876 - RNA, 20 nt, Human
agaacauguugguauuuauc

SEQ ID NO: 2121877 - RNA, 21 nt, Human
agaacauguugguauuuaucu

SEQ ID NO: 2121878 - RNA, 22 nt, Human
agaacauguugguauuuaucua

SEQ ID NO: 2121879 - RNA, 18 nt, Human
agaacauugauugcugug

SEQ ID NO: 2121880 - RNA, 19 nt, Human
agaacauugauugcugugu

SEQ ID NO: 2121881 - RNA, 14 nt, Human
agaacacuauuuuc

SEQ ID NO: 2121882 - RNA, 16 nt, Human
agaacacuauuuucag

SEQ ID NO: 2121883 - RNA, 17 nt, Human
agaacacuauuuucaga

SEQ ID NO: 2121884 - RNA, 18 nt, Human
agaacacuauuuucagaa

SEQ ID NO: 2121885 - RNA, 19 nt, Human
agaacacuauuuucagaau

SEQ ID NO: 2121886 - RNA, 20 nt, Human
agaacacuauuuucagaauc

SEQ ID NO: 2121887 - RNA, 21 nt, Human
agaacacuauuuucagaaucu

SEQ ID NO: 2121888 - RNA, 22 nt, Human
agaacacuauuuucagaaucug

SEQ ID NO: 2121889 - RNA, 23 nt, Human
agaacacuauuuucagaaucuga

SEQ ID NO: 2121890 - RNA, 10 nt, Human
agaacagaaa

SEQ ID NO: 2121891 - RNA, 11 nt, Human
agaacagaaaa

SEQ ID NO: 2121892 - RNA, 12 nt, Human
agaacagaaaac

SEQ ID NO: 2121893 - RNA, 13 nt, Human
agaacagaaaaca

SEQ ID NO: 2121894 - RNA, 14 nt, Human
agaacagaaaacaa

SEQ ID NO: 2121895 - RNA, 15 nt, Human
agaacagaaaacaac

SEQ ID NO: 2121896 - RNA, 20 nt, Human
agaacagaaaacaacaaaaa

SEQ ID NO: 2121897 - RNA, 21 nt, Human
agaacagaaaacaacaaaaaa

SEQ ID NO: 2121898 - RNA, 22 nt, Human
agaacagaaaacaacaaaaaau

SEQ ID NO: 2121899 - RNA, 16 nt, Human
agaacagacuggccug

SEQ ID NO: 2121900 - RNA, 20 nt, Human
agaacagacuggccugagga

SEQ ID NO: 2121901 - RNA, 20 nt, Human
agaacacagcaauuccucag

SEQ ID NO: 2121902 - RNA, 17 nt, Human
agaacaagguaguuuuu

SEQ ID NO: 2121903 - RNA, 19 nt, Human
agaacaagguaguuuuuac

SEQ ID NO: 2121904 - RNA, 16 nt, Human
agaacacaaggucauu

SEQ ID NO: 2121905 - RNA, 15 nt, Human
agaacacaaagcggg

SEQ ID NO: 2121906 - RNA, 22 nt, Human
agaacacaaagcggggggaggg

SEQ ID NO: 2121907 - RNA, 21 nt, Human
agacugaccaauauuguacag

SEQ ID NO: 2121908 - RNA, 16 nt, Human
agagaaaauguaaaua

SEQ ID NO: 2121909 - RNA, 17 nt, Human
agagaaaauguaaauaa

SEQ ID NO: 2121910 - RNA, 13 nt, Human
agagaaaauugaa

SEQ ID NO: 2121911 - RNA, 14 nt, Human
agagaaaauugaau

SEQ ID NO: 2121912 - RNA, 16 nt, Human
agagaaaauugaauuu

SEQ ID NO: 2121913 - RNA, 21 nt, Human
agagaaaauugaauuuaacaa

SEQ ID NO: 2121914 - RNA, 12 nt, Human
agacugaccaau

SEQ ID NO: 2121915 - RNA, 16 nt, Human
agacugaacuguguga

SEQ ID NO: 2121916 - RNA, 15 nt, Human
agacucuuugcauau

SEQ ID NO: 2121917 - RNA, 15 nt, Human
agacugaacagccaa

SEQ ID NO: 2121918 - RNA, 17 nt, Human
agacugaacauguacac

SEQ ID NO: 2121919 - RNA, 17 nt, Human
agagaaaccguccucuu

SEQ ID NO: 2121920 - RNA, 20 nt, Human
agagaaaccguccucuuuuu

SEQ ID NO: 2121921 - RNA, 21 nt, Human
agagaaaccguccucuuuuuc

SEQ ID NO: 2121922 - RNA, 23 nt, Human
agagaaaccguccucuuuuucca

SEQ ID NO: 2121923 - RNA, 21 nt, Human
agagaaacucuauggguauca

SEQ ID NO: 2121924 - RNA, 19 nt, Human
agagaaacuuugugcuaca

SEQ ID NO: 2121925 - RNA, 14 nt, Human
agagaagugccccu

SEQ ID NO: 2121926 - RNA, 15 nt, Human
agagaagugccccug

SEQ ID NO: 2121927 - RNA, 17 nt, Human
agagaagugccccugcu

SEQ ID NO: 2121928 - RNA, 18 nt, Human
agagaagugccccugcug

SEQ ID NO: 2121929 - RNA, 22 nt, Human
agagaauauuagcuuuacuguu

SEQ ID NO: 2121930 - RNA, 22 nt, Human
agagaaccucacgcaccuccca

SEQ ID NO: 2121931 - RNA, 23 nt, Human
agagaaccucacgcaccucccau

SEQ ID NO: 2121932 - RNA, 20 nt, Human
agagaaccucacgcaccucc

SEQ ID NO: 2121933 - RNA, 14 nt, Human
agagagauguuuug

SEQ ID NO: 2121934 - RNA, 13 nt, Human
agagaggagucag

SEQ ID NO: 2121935 - RNA, 20 nt, Human
agagaggagucagagagaau

SEQ ID NO: 2121936 - RNA, 13 nt, Human
agagccugcuccc

SEQ ID NO: 2121937 - RNA, 15 nt, Human
agagccugcuccccc

SEQ ID NO: 2121938 - RNA, 16 nt, Human
agagccugcuccccca

SEQ ID NO: 2121939 - RNA, 18 nt, Human
agagccugcucccccacc

SEQ ID NO: 2121940 - RNA, 15 nt, Human
agagccugcugcaug

SEQ ID NO: 2121941 - RNA, 19 nt, Human
agagccugcucccccaccc

SEQ ID NO: 2121942 - RNA, 20 nt, Human
agagccugcucccccacccc

SEQ ID NO: 2121943 - RNA, 12 nt, Human
agagccugcugc

SEQ ID NO: 2121944 - RNA, 21 nt, Human
agagcccagcagggccucaaa

SEQ ID NO: 2121945 - RNA, 14 nt, Human
agagcccagccauu

SEQ ID NO: 2121946 - RNA, 16 nt, Human
agacucuuuggacacu

SEQ ID NO: 2121947 - RNA, 14 nt, Human
agaauuuuuaaugu

SEQ ID NO: 2121948 - RNA, 19 nt, Human
agacaaaaaacuauaugua

SEQ ID NO: 2121949 - RNA, 16 nt, Human
agacaaaaacagccuc

SEQ ID NO: 2121950 - RNA, 15 nt, Human
agaauuuugagcagg

SEQ ID NO: 2121951 - RNA, 20 nt, Human
agaauuuucagaccccagcg

SEQ ID NO: 2121952 - RNA, 21 nt, Human
agaauuuucagaccccagcgg

SEQ ID NO: 2121953 - RNA, 17 nt, Human
agacaaaaacagccuca

SEQ ID NO: 2121954 - RNA, 14 nt, Human
agacaaaaauacuc

SEQ ID NO: 2121955 - RNA, 17 nt, Human
agacaaaaauacucuaa

SEQ ID NO: 2121956 - RNA, 22 nt, Human
agacaaaaauacucuaauucua

SEQ ID NO: 2121957 - RNA, 23 nt, Human
agacaaaaauacucuaauucuaa

SEQ ID NO: 2121958 - RNA, 12 nt, Human
agacaaaaauua

SEQ ID NO: 2121959 - RNA, 14 nt, Human
agacaaaaauuauc

SEQ ID NO: 2121960 - RNA, 21 nt, Human
agacaaaaauuaucuauuugu

SEQ ID NO: 2121961 - RNA, 22 nt, Human
agacaaaaacagccucacagaa

SEQ ID NO: 2121962 - RNA, 16 nt, Human
agacaagguagcccug

SEQ ID NO: 2121963 - RNA, 23 nt, Human
agacaagugacuguaucugugua

SEQ ID NO: 2121964 - RNA, 20 nt, Human
agacaagugacuguaucugu

SEQ ID NO: 2121965 - RNA, 22 nt, Human
agacaagugacuguaucugugu

SEQ ID NO: 2121966 - RNA, 20 nt, Human
agacaaugugaaaagaaaaa

SEQ ID NO: 2121967 - RNA, 16 nt, Human
agacaaugcagaugcc

SEQ ID NO: 2121968 - RNA, 17 nt, Human
agacaaugcagaugcca

SEQ ID NO: 2121969 - RNA, 22 nt, Human
agacaaugcagaugccagagca

SEQ ID NO: 2121970 - RNA, 21 nt, Human
agaccauccuggccaacauga

SEQ ID NO: 2121971 - RNA, 17 nt, Human
agacuauauuguacaca

SEQ ID NO: 2121972 - RNA, 12 nt, Human
agacuagagaaa

SEQ ID NO: 2121973 - RNA, 13 nt, Human
agacuagagaaac

SEQ ID NO: 2121974 - RNA, 14 nt, Human
agacuagagaaacc

SEQ ID NO: 2121975 - RNA, 15 nt, Human
agacuagagaaaccg

SEQ ID NO: 2121976 - RNA, 16 nt, Human
agacuagauugccuuu

SEQ ID NO: 2121977 - RNA, 19 nt, Human
agacuagauugccuuuguu

SEQ ID NO: 2121978 - RNA, 22 nt, Human
agacuaguuuuuauuccuugug

SEQ ID NO: 2121979 - RNA, 22 nt, Human
aggcaugugccacccacccaac

SEQ ID NO: 2121980 - RNA, 20 nt, Human
aggcaugagggaucacaggg

SEQ ID NO: 2121981 - RNA, 22 nt, Human
aggcaugagggaucacagggcc

SEQ ID NO: 2121982 - RNA, 13 nt, Human
aggcaugccugug

SEQ ID NO: 2121983 - RNA, 14 nt, Human
aggcaugccugugu

SEQ ID NO: 2121984 - RNA, 12 nt, Human
aggcauguucuc

SEQ ID NO: 2121985 - RNA, 14 nt, Human
aggcaucugcaccc

SEQ ID NO: 2121986 - RNA, 15 nt, Human
aggcaugagggauca

SEQ ID NO: 2121987 - RNA, 23 nt, Human
aggcaugagggaucacagggccc

SEQ ID NO: 2121988 - RNA, 19 nt, Human
aggcaucugugggcauggu

SEQ ID NO: 2121989 - RNA, 22 nt, Human
aggcauguucucugaggacacu

SEQ ID NO: 2121990 - RNA, 20 nt, Human
aggcauguucucugaggaca

SEQ ID NO: 2121991 - RNA, 15 nt, Human
aggcaugccugugug

SEQ ID NO: 2121992 - RNA, 16 nt, Human
aggcaugccuguguga

SEQ ID NO: 2121993 - RNA, 12 nt, Human
aggcauucaagu

SEQ ID NO: 2121994 - RNA, 13 nt, Human
aggcauucucuga

SEQ ID NO: 2121995 - RNA, 11 nt, Human
aggccaggcuc

SEQ ID NO: 2121996 - RNA, 12 nt, Human
aggccaggcucc

SEQ ID NO: 2121997 - RNA, 17 nt, Human
aggccaggcuccuuccu

SEQ ID NO: 2121998 - RNA, 22 nt, Human
aggccaggcuccuuccugucuu

SEQ ID NO: 2121999 - RNA, 17 nt, Human
aggccaugggccuccug

SEQ ID NO: 2122000 - RNA, 16 nt, Human
aggccaugggccuccu

SEQ ID NO: 2122001 - RNA, 14 nt, Human
aggccaugggccuc

SEQ ID NO: 2122002 - RNA, 13 nt, Human
aggcagauacagg

SEQ ID NO: 2122003 - RNA, 21 nt, Human
aggcagaagaauugaacccag

SEQ ID NO: 2122004 - RNA, 13 nt, Human
aggcagaaagagu

SEQ ID NO: 2122005 - RNA, 15 nt, Human
aggcagaagaauuga

SEQ ID NO: 2122006 - RNA, 16 nt, Human
aggcagaaagcagagg

SEQ ID NO: 2122007 - RNA, 17 nt, Human
aggcagaaagcagaggc

SEQ ID NO: 2122008 - RNA, 18 nt, Human
aggcagaaagcagaggcu

SEQ ID NO: 2122009 - RNA, 19 nt, Human
aggcagaaagcagaggcug

SEQ ID NO: 2122010 - RNA, 21 nt, Human
aggcagaaagcagaggcuggc

SEQ ID NO: 2122011 - RNA, 23 nt, Human
aggcagaaagcagaggcuggccu

SEQ ID NO: 2122012 - RNA, 14 nt, Human
aggcagaacccugg

SEQ ID NO: 2122013 - RNA, 22 nt, Human
aggcagaacccuggugaggaag

SEQ ID NO: 2122014 - RNA, 17 nt, Human
aggcagagugccccacc

SEQ ID NO: 2122015 - RNA, 19 nt, Human
aggcagagugccccaccug

SEQ ID NO: 2122016 - RNA, 20 nt, Human
aggcagagugccccaccugc

SEQ ID NO: 2122017 - RNA, 21 nt, Human
aggcagagugccccaccugcc

SEQ ID NO: 2122018 - RNA, 22 nt, Human
aggcagagugccccaccugcca

SEQ ID NO: 2122019 - RNA, 24 nt, Human
aggcagagugccccaccugccacu

SEQ ID NO: 2122020 - RNA, 17 nt, Human
aggaguucgaggcugca

SEQ ID NO: 2122021 - RNA, 22 nt, Human
aggaguucgagaccagccuggc

SEQ ID NO: 2122022 - RNA, 16 nt, Human
aggaguucgaggcugc

SEQ ID NO: 2122023 - RNA, 14 nt, Human
aggaguugcuguuu

SEQ ID NO: 2122024 - RNA, 21 nt, Human
aggaguugcuguuuguuugac

SEQ ID NO: 2122025 - RNA, 19 nt, Human
aggaguuuaagaccagccu

SEQ ID NO: 2122026 - RNA, 21 nt, Human
aggaguuuaagaccagccugg

SEQ ID NO: 2122027 - RNA, 20 nt, Human
aggaguuuccuaaaaguuca

SEQ ID NO: 2122028 - RNA, 12 nt, Human
aggauggagggg

SEQ ID NO: 2122029 - RNA, 19 nt, Human
aggauggaggggugguccu

SEQ ID NO: 2122030 - RNA, 23 nt, Human
aggaguucagggucauagcaugc

SEQ ID NO: 2122031 - RNA, 19 nt, Human
aggaguuccuaaccagccu

SEQ ID NO: 2122032 - RNA, 20 nt, Human
aggaguuccuugaucuguau

SEQ ID NO: 2122033 - RNA, 16 nt, Human
aggaguucgagaccag

SEQ ID NO: 2122034 - RNA, 21 nt, Human
aggaguucgagaccagccugg

SEQ ID NO: 2122035 - RNA, 14 nt, Human
aggagugagcacua

SEQ ID NO: 2122036 - RNA, 18 nt, Human
aggagguuuaggucaaga

SEQ ID NO: 2122037 - RNA, 12 nt, Human
aggagugagcac

SEQ ID NO: 2122038 - RNA, 20 nt, Human
aggagguggaggcugcagug

SEQ ID NO: 2122039 - RNA, 20 nt, Human
aggagguggagguugcagug

SEQ ID NO: 2122040 - RNA, 14 nt, Human
aggagguggcagcc

SEQ ID NO: 2122041 - RNA, 17 nt, Human
aggagguggcagcccug

SEQ ID NO: 2122042 - RNA, 18 nt, Human
aggagguggcagcccugu

SEQ ID NO: 2122043 - RNA, 20 nt, Human
aggagguggcagcccuguag

SEQ ID NO: 2122044 - RNA, 21 nt, Human
aggagguggcagcccuguagg

SEQ ID NO: 2122045 - RNA, 23 nt, Human
aggagguggcagcccuguaggga

SEQ ID NO: 2122046 - RNA, 16 nt, Human
aggagagcccuucauu

SEQ ID NO: 2122047 - RNA, 14 nt, Human
aggagacccacagg

SEQ ID NO: 2122048 - RNA, 17 nt, Human
aggagaccaaggcggga

SEQ ID NO: 2122049 - RNA, 21 nt, Human
aggagaccuggcacuggaugc

SEQ ID NO: 2122050 - RNA, 11 nt, Human
aggagacucac

SEQ ID NO: 2122051 - RNA, 13 nt, Human
aggagacucaccu

SEQ ID NO: 2122052 - RNA, 14 nt, Human
aggagacucaccuc

SEQ ID NO: 2122053 - RNA, 15 nt, Human
aggagacucaccucu

SEQ ID NO: 2122054 - RNA, 16 nt, Human
aggagacucaccucug

SEQ ID NO: 2122055 - RNA, 17 nt, Human
aggagacucaccucugc

SEQ ID NO: 2122056 - RNA, 18 nt, Human
aggagacucaccucugcc

SEQ ID NO: 2122057 - RNA, 19 nt, Human
aggagacucaccucugccu

SEQ ID NO: 2122058 - RNA, 21 nt, Human
aggagacucaccucugccuca

SEQ ID NO: 2122059 - RNA, 14 nt, Human
aggagaccaaggcg

SEQ ID NO: 2122060 - RNA, 18 nt, Human
aggaggguuagggagggg

SEQ ID NO: 2122061 - RNA, 20 nt, Human
aggagggcccuaccugauug

SEQ ID NO: 2122062 - RNA, 17 nt, Human
aggagggcgugacucac

SEQ ID NO: 2122063 - RNA, 22 nt, Human
aggagggcgugacucacccaag

SEQ ID NO: 2122064 - RNA, 19 nt, Human
aggagggaugcugccugag

SEQ ID NO: 2122065 - RNA, 15 nt, Human
aggagggagggggcu

SEQ ID NO: 2122066 - RNA, 16 nt, Human
aggagagccagcccuc

SEQ ID NO: 2122067 - RNA, 23 nt, Human
aggagggagguauucgugcagca

SEQ ID NO: 2122068 - RNA, 14 nt, Human
aggagagccagccc

SEQ ID NO: 2122069 - RNA, 15 nt, Human
aggagagccagcccu

SEQ ID NO: 2122070 - RNA, 12 nt, Human
aggagagccugc

SEQ ID NO: 2122071 - RNA, 13 nt, Human
aggagagccugcu

SEQ ID NO: 2122072 - RNA, 14 nt, Human
aggagagccugcug

SEQ ID NO: 2122073 - RNA, 15 nt, Human
aggagagccugcugc

SEQ ID NO: 2122074 - RNA, 16 nt, Human
aggagagccugcugca

SEQ ID NO: 2122075 - RNA, 18 nt, Human
aggagagccugcugcaug

SEQ ID NO: 2122076 - RNA, 20 nt, Human
aggagagccugcugcauggg

SEQ ID NO: 2122077 - RNA, 17 nt, Human
aggaugggaaggaggga

SEQ ID NO: 2122078 - RNA, 12 nt, Human
aggaugggaagg

SEQ ID NO: 2122079 - RNA, 18 nt, Human
aggauggcuuugaaugcg

SEQ ID NO: 2122080 - RNA, 22 nt, Human
aggaugggucugguuugcagag

SEQ ID NO: 2122081 - RNA, 19 nt, Human
aggaugucacucagaugga

SEQ ID NO: 2122082 - RNA, 20 nt, Human
aggauguggaaaccuccuuc

SEQ ID NO: 2122083 - RNA, 23 nt, Human
aggcuguaucccaugagccucag

SEQ ID NO: 2122084 - RNA, 14 nt, Human
aggcugaggcagaa

SEQ ID NO: 2122085 - RNA, 21 nt, Human
aggcugcagucagucaugaug

SEQ ID NO: 2122086 - RNA, 13 nt, Human
aggcugcauagaa

SEQ ID NO: 2122087 - RNA, 15 nt, Human
aggcugcauagaagg

SEQ ID NO: 2122088 - RNA, 16 nt, Human
aggcugcauagaagga

SEQ ID NO: 2122089 - RNA, 17 nt, Human
aggcugcauagaaggag

SEQ ID NO: 2122090 - RNA, 19 nt, Human
aggcugcauagaaggagga

SEQ ID NO: 2122091 - RNA, 23 nt, Human
aggcugcauagaaggaggagagg

SEQ ID NO: 2122092 - RNA, 17 nt, Human
aggcugcagugagccga

SEQ ID NO: 2122093 - RNA, 19 nt, Human
aggcugcagugagccgaga

SEQ ID NO: 2122094 - RNA, 17 nt, Human
aggcugccaaggccaga

SEQ ID NO: 2122095 - RNA, 24 nt, Human
aggcuguaucccaugagccucagc

SEQ ID NO: 2122096 - RNA, 13 nt, Human
agggacauauuca

SEQ ID NO: 2122097 - RNA, 14 nt, Human
agggacauguggaa

SEQ ID NO: 2122098 - RNA, 15 nt, Human
agggacauauucauu

SEQ ID NO: 2122099 - RNA, 23 nt, Human
agggacauauucauuuggaaaua

SEQ ID NO: 2122100 - RNA, 16 nt, Human
agggaccaacugggcc

SEQ ID NO: 2122101 - RNA, 17 nt, Human
agggaccaacugggccc

SEQ ID NO: 2122102 - RNA, 19 nt, Human
agggaccaacugggcccaa

SEQ ID NO: 2122103 - RNA, 14 nt, Human
agggaccaaggacc

SEQ ID NO: 2122104 - RNA, 18 nt, Human
agggaccaaggaccccuc

SEQ ID NO: 2122105 - RNA, 21 nt, Human
agggaccaaggaccccucacc

SEQ ID NO: 2122106 - RNA, 19 nt, Human
agggaccaaggaccccuca

SEQ ID NO: 2122107 - RNA, 16 nt, Human
aggcuguuuuugggug

SEQ ID NO: 2122108 - RNA, 17 nt, Human
aggcuguuuuugggugc

SEQ ID NO: 2122109 - RNA, 14 nt, Human
aggcuuacacccac

SEQ ID NO: 2122110 - RNA, 14 nt, Human
aggcugaggaaagg

SEQ ID NO: 2122111 - RNA, 13 nt, Human
aggcucuucuccu

SEQ ID NO: 2122112 - RNA, 11 nt, Human
aggcugaggac

SEQ ID NO: 2122113 - RNA, 15 nt, Human
aggcugaggaaaggc

SEQ ID NO: 2122114 - RNA, 18 nt, Human
aggcugaggaaaggccag

SEQ ID NO: 2122115 - RNA, 19 nt, Human
aggcugaggaaaggccagc

SEQ ID NO: 2122116 - RNA, 20 nt, Human
aggcugaggaaaggccagcu

SEQ ID NO: 2122117 - RNA, 13 nt, Human
aggcugaggacuu

SEQ ID NO: 2122118 - RNA, 18 nt, Human
aggcugaggcaagagaau

SEQ ID NO: 2122119 - RNA, 22 nt, Human
aggcugaggaaaggccagcugg

SEQ ID NO: 2122120 - RNA, 11 nt, Human
aggcugaggca

SEQ ID NO: 2122121 - RNA, 13 nt, Human
aggccaggggcuu

SEQ ID NO: 2122122 - RNA, 16 nt, Human
aggccaggggcuuuug

SEQ ID NO: 2122123 - RNA, 17 nt, Human
agggcgugacucaccca

SEQ ID NO: 2122124 - RNA, 19 nt, Human
agggcgugacucacccaag

SEQ ID NO: 2122125 - RNA, 13 nt, Human
agggcuaagagcu

SEQ ID NO: 2122126 - RNA, 19 nt, Human
agggcuacccucccccagg

SEQ ID NO: 2122127 - RNA, 14 nt, Human
agggcuaagagcua

SEQ ID NO: 2122128 - RNA, 21 nt, Human
agggcuaagagcuagcgcugc

SEQ ID NO: 2122129 - RNA, 22 nt, Human
agggcuaagagcuagcgcugcc

SEQ ID NO: 2122130 - RNA, 23 nt, Human
agggcuaagagcuagcgcugccg

SEQ ID NO: 2122131 - RNA, 18 nt, Human
aggggcauggccagcagc

SEQ ID NO: 2122132 - RNA, 21 nt, Human
aggggcaucugccccuccccc

SEQ ID NO: 2122133 - RNA, 22 nt, Human
aggggcaucugccccuccccca

SEQ ID NO: 2122134 - RNA, 17 nt, Human
aggggcaucugccccuc

SEQ ID NO: 2122135 - RNA, 19 nt, Human
aggggcaucugccccuccc

SEQ ID NO: 2122136 - RNA, 20 nt, Human
aggggcaucugccccucccc

SEQ ID NO: 2122137 - RNA, 19 nt, Human
agggauucaggcugcuugg

SEQ ID NO: 2122138 - RNA, 16 nt, Human
agggauucaggcugcu

SEQ ID NO: 2122139 - RNA, 18 nt, Human
agggauucaggcugcuug

SEQ ID NO: 2122140 - RNA, 18 nt, Human
agggauucacaucugcau

SEQ ID NO: 2122141 - RNA, 17 nt, Human
agggauggggccacagc

SEQ ID NO: 2122142 - RNA, 14 nt, Human
agggauucaggcug

SEQ ID NO: 2122143 - RNA, 15 nt, Human
agggauucaggcugc

SEQ ID NO: 2122144 - RNA, 19 nt, Human
agggaugaggugcugggag

SEQ ID NO: 2122145 - RNA, 23 nt, Human
agggaugaggugcugggagggau

SEQ ID NO: 2122146 - RNA, 18 nt, Human
agggaugccaucuguggg

SEQ ID NO: 2122147 - RNA, 15 nt, Human
agggauggaaaagga

SEQ ID NO: 2122148 - RNA, 22 nt, Human
agggauggaaaaggaagacuag

SEQ ID NO: 2122149 - RNA, 16 nt, Human
agggaugcugccugag

SEQ ID NO: 2122150 - RNA, 17 nt, Human
agggaugcugccugagu

SEQ ID NO: 2122151 - RNA, 18 nt, Human
agggaugcugccugaguc

SEQ ID NO: 2122152 - RNA, 19 nt, Human
agggaugcugccugaguca

SEQ ID NO: 2122153 - RNA, 16 nt, Human
agggaugaggugcugg

SEQ ID NO: 2122154 - RNA, 17 nt, Human
agggaugaggugcuggg

SEQ ID NO: 2122155 - RNA, 19 nt, Human
aggaaaaccaagccguggc

SEQ ID NO: 2122156 - RNA, 14 nt, Human
aggaaaaaaaugac

SEQ ID NO: 2122157 - RNA, 15 nt, Human
aggaaaaaaaugacu

SEQ ID NO: 2122158 - RNA, 18 nt, Human
agcuuuuuuacacaaaug

SEQ ID NO: 2122159 - RNA, 20 nt, Human
agcuuuuuuauuuuuuauac

SEQ ID NO: 2122160 - RNA, 22 nt, Human
agcuuuuuuauuuuuuauacag

SEQ ID NO: 2122161 - RNA, 13 nt, Human
aggaaaaaaacuu

SEQ ID NO: 2122162 - RNA, 14 nt, Human
aggaaaaaaacuuu

SEQ ID NO: 2122163 - RNA, 15 nt, Human
aggaaaaaaacuuuu

SEQ ID NO: 2122164 - RNA, 16 nt, Human
aggaaaaaaacuuuua

SEQ ID NO: 2122165 - RNA, 17 nt, Human
aggaaaaaaacuuuuau

SEQ ID NO: 2122166 - RNA, 21 nt, Human
aggaaaaaaacuuuuauaaau

SEQ ID NO: 2122167 - RNA, 17 nt, Human
agcuuuuugucuuuucu

SEQ ID NO: 2122168 - RNA, 19 nt, Human
agcuuuguuucaaccaagu

SEQ ID NO: 2122169 - RNA, 22 nt, Human
agcuuuguuuguugucagcuga

SEQ ID NO: 2122170 - RNA, 21 nt, Human
agcuuuguuuguugucagcug

SEQ ID NO: 2122171 - RNA, 15 nt, Human
aggaacacucugaau

SEQ ID NO: 2122172 - RNA, 13 nt, Human
aggaacagaagga

SEQ ID NO: 2122173 - RNA, 14 nt, Human
aggaacagaaggau

SEQ ID NO: 2122174 - RNA, 21 nt, Human
aggaacagaaggaugaaugag

SEQ ID NO: 2122175 - RNA, 21 nt, Human
aggaacagcuaugggagcccc

SEQ ID NO: 2122176 - RNA, 16 nt, Human
aggaacauaugaaaau

SEQ ID NO: 2122177 - RNA, 23 nt, Human
aggaacacccgacuccucaaaag

SEQ ID NO: 2122178 - RNA, 19 nt, Human
aggaacauaugaaaauaca

SEQ ID NO: 2122179 - RNA, 14 nt, Human
aggaagaaaaauca

SEQ ID NO: 2122180 - RNA, 16 nt, Human
aggaagaaaaaucagu

SEQ ID NO: 2122181 - RNA, 23 nt, Human
aggaaaaccaagccguggcuucc

SEQ ID NO: 2122182 - RNA, 22 nt, Human
aggaaaaccaagccguggcuuc

SEQ ID NO: 2122183 - RNA, 21 nt, Human
aggaaaaccaagccguggcuu

SEQ ID NO: 2122184 - RNA, 20 nt, Human
aggaaaaccaagccguggcu

SEQ ID NO: 2122185 - RNA, 14 nt, Human
aggaagguagaaau

SEQ ID NO: 2122186 - RNA, 16 nt, Human
agcugguuccugcuag

SEQ ID NO: 2122187 - RNA, 19 nt, Human
agcugguuccugcuagaaa

SEQ ID NO: 2122188 - RNA, 22 nt, Human
agcugguuccugcuagaaaugg

SEQ ID NO: 2122189 - RNA, 15 nt, Human
agcuggucccacuca

SEQ ID NO: 2122190 - RNA, 22 nt, Human
agcugguaguuaguagcauguu

SEQ ID NO: 2122191 - RNA, 19 nt, Human
agcugguaguuaguagcau

SEQ ID NO: 2122192 - RNA, 21 nt, Human
agcugguaguuaguagcaugu

SEQ ID NO: 2122193 - RNA, 14 nt, Human
agcuggguuggaaa

SEQ ID NO: 2122194 - RNA, 16 nt, Human
agcuggguuggaaaac

SEQ ID NO: 2122195 - RNA, 20 nt, Human
agcuggguuggaaaacagua

SEQ ID NO: 2122196 - RNA, 15 nt, Human
agcugguaguuagua

SEQ ID NO: 2122197 - RNA, 18 nt, Human
agcuggugucugauuguu

SEQ ID NO: 2122198 - RNA, 21 nt, Human
agcuggugguaucugaguuga

SEQ ID NO: 2122199 - RNA, 15 nt, Human
agcuggugggaagcg

SEQ ID NO: 2122200 - RNA, 13 nt, Human
agcuggugggaag

SEQ ID NO: 2122201 - RNA, 20 nt, Human
agcuggugggugaaagaaau

SEQ ID NO: 2122202 - RNA, 21 nt, Human
agcuggugggugaaagaaauc

SEQ ID NO: 2122203 - RNA, 23 nt, Human
agcuggugggugaaagaaaucau

SEQ ID NO: 2122204 - RNA, 22 nt, Human
agcugccuugagccuuaaaacc

SEQ ID NO: 2122205 - RNA, 15 nt, Human
agcugacuuuucugu

SEQ ID NO: 2122206 - RNA, 21 nt, Human
agcugacuuuucuguccgagc

SEQ ID NO: 2122207 - RNA, 15 nt, Human
agcugacgaggcugg

SEQ ID NO: 2122208 - RNA, 16 nt, Human
agcugacgaggcuggg

SEQ ID NO: 2122209 - RNA, 17 nt, Human
agcugacgaggcugggc

SEQ ID NO: 2122210 - RNA, 18 nt, Human
agcugacgaggcugggcc

SEQ ID NO: 2122211 - RNA, 19 nt, Human
agcugacgaggcugggcca

SEQ ID NO: 2122212 - RNA, 20 nt, Human
agcugacgaggcugggccaa

SEQ ID NO: 2122213 - RNA, 12 nt, Human
agcuccucuggg

SEQ ID NO: 2122214 - RNA, 14 nt, Human
agcuccucugggca

SEQ ID NO: 2122215 - RNA, 15 nt, Human
agcuccucugggcag

SEQ ID NO: 2122216 - RNA, 23 nt, Human
agcucaccagccccagugcccac

SEQ ID NO: 2122217 - RNA, 22 nt, Human
agcucaccagccccagugccca

SEQ ID NO: 2122218 - RNA, 21 nt, Human
agcucacaguuccucgcccug

SEQ ID NO: 2122219 - RNA, 23 nt, Human
agcucacaguuccucgcccuggg

SEQ ID NO: 2122220 - RNA, 18 nt, Human
agccuggcacagggcagu

SEQ ID NO: 2122221 - RNA, 17 nt, Human
agccuggcacagggcag

SEQ ID NO: 2122222 - RNA, 11 nt, Human
agccuggaggc

SEQ ID NO: 2122223 - RNA, 23 nt, Human
agccuggaggccgggugcucagg

SEQ ID NO: 2122224 - RNA, 20 nt, Human
agccuggcacagggcagugg

SEQ ID NO: 2122225 - RNA, 14 nt, Human
agccuggccaacau

SEQ ID NO: 2122226 - RNA, 14 nt, Human
agccugcuuuuuaa

SEQ ID NO: 2122227 - RNA, 14 nt, Human
agccuggacccugu

SEQ ID NO: 2122228 - RNA, 11 nt, Human
agccugcugca

SEQ ID NO: 2122229 - RNA, 12 nt, Human
agccugcuggau

SEQ ID NO: 2122230 - RNA, 12 nt, Human
agccugcugcau

SEQ ID NO: 2122231 - RNA, 15 nt, Human
agccugggcaacaga

SEQ ID NO: 2122232 - RNA, 17 nt, Human
agccugggcaacagagc

SEQ ID NO: 2122233 - RNA, 18 nt, Human
agccugggcaacagagca

SEQ ID NO: 2122234 - RNA, 20 nt, Human
agccugggaggucaaggcug

SEQ ID NO: 2122235 - RNA, 18 nt, Human
agccugggcaaugugaua

SEQ ID NO: 2122236 - RNA, 20 nt, Human
agccugggcaacagagcaag

SEQ ID NO: 2122237 - RNA, 17 nt, Human
agccugggcagcauagc

SEQ ID NO: 2122238 - RNA, 20 nt, Human
agccugggcagcauagcaag

SEQ ID NO: 2122239 - RNA, 15 nt, Human
agccugggcagccag

SEQ ID NO: 2122240 - RNA, 15 nt, Human
agccuuugccucccc

SEQ ID NO: 2122241 - RNA, 16 nt, Human
agccuuugccuccccg

SEQ ID NO: 2122242 - RNA, 18 nt, Human
agcgaaccaauauuugua

SEQ ID NO: 2122243 - RNA, 12 nt, Human
agcgaaacuccg

SEQ ID NO: 2122244 - RNA, 14 nt, Human
agccuuuccauaag

SEQ ID NO: 2122245 - RNA, 22 nt, Human
agccuuuccauaaggaauguag

SEQ ID NO: 2122246 - RNA, 16 nt, Human
agccuuucucccaggc

SEQ ID NO: 2122247 - RNA, 23 nt, Human
agccuuuccauaaggaauguagc

SEQ ID NO: 2122248 - RNA, 17 nt, Human
agccugggcagccaggc

SEQ ID NO: 2122249 - RNA, 18 nt, Human
agccugggcagccaggcu

SEQ ID NO: 2122250 - RNA, 13 nt, Human
agcuaaagaggcu

SEQ ID NO: 2122251 - RNA, 15 nt, Human
agcuaaagaggcuga

SEQ ID NO: 2122252 - RNA, 21 nt, Human
agcuaaagaggcugaaagagg

SEQ ID NO: 2122253 - RNA, 16 nt, Human
agcuaaagcccaaccu

SEQ ID NO: 2122254 - RNA, 16 nt, Human
agcuaacacuggcccc

SEQ ID NO: 2122255 - RNA, 17 nt, Human
agcuaacacuggccccu

SEQ ID NO: 2122256 - RNA, 18 nt, Human
agcuaacacuggccccua

SEQ ID NO: 2122257 - RNA, 19 nt, Human
agcuaacacuggccccuag

SEQ ID NO: 2122258 - RNA, 23 nt, Human
agcuaacccccuucuacugagcc

SEQ ID NO: 2122259 - RNA, 15 nt, Human
agcgauucuucugcu

SEQ ID NO: 2122260 - RNA, 19 nt, Human
agcgauucuucugcuucag

SEQ ID NO: 2122261 - RNA, 17 nt, Human
agcgauucuucugcuuc

SEQ ID NO: 2122262 - RNA, 20 nt, Human
agcucacaguuccucgcccu

SEQ ID NO: 2122263 - RNA, 16 nt, Human
agcucacacaugagau

SEQ ID NO: 2122264 - RNA, 21 nt, Human
agcucaccagccccagugccc

SEQ ID NO: 2122265 - RNA, 15 nt, Human
agcucaccagcccca

SEQ ID NO: 2122266 - RNA, 14 nt, Human
agcucaccagcccc

SEQ ID NO: 2122267 - RNA, 13 nt, Human
agcucaccagccc

SEQ ID NO: 2122268 - RNA, 15 nt, Human
agcuaaugggacacu

SEQ ID NO: 2122269 - RNA, 14 nt, Human
agcuaaugggacac

SEQ ID NO: 2122270 - RNA, 13 nt, Human
agcuaaugggaca

SEQ ID NO: 2122271 - RNA, 19 nt, Human
agcuaagugaaaaggucau

SEQ ID NO: 2122272 - RNA, 16 nt, Human
agcuaauggaaaauga

SEQ ID NO: 2122273 - RNA, 17 nt, Human
agcuaauggaaaaugau

SEQ ID NO: 2122274 - RNA, 16 nt, Human
agcuaaggacauuucc

SEQ ID NO: 2122275 - RNA, 19 nt, Human
agcuaaggacauuucccag

SEQ ID NO: 2122276 - RNA, 21 nt, Human
cucucuguaauaaacucauuu

SEQ ID NO: 2122277 - RNA, 16 nt, Human
cucucuguaauaaacu

SEQ ID NO: 2122278 - RNA, 23 nt, Human
cucucuuauagaauauuuauuac

SEQ ID NO: 2122279 - RNA, 14 nt, Human
cucucuuccuaucc

SEQ ID NO: 2122280 - RNA, 15 nt, Human
cucucuuccuauccc

SEQ ID NO: 2122281 - RNA, 16 nt, Human
cucucuuccuauccca

SEQ ID NO: 2122282 - RNA, 19 nt, Human
cucucuuccuaucccaucc

SEQ ID NO: 2122283 - RNA, 20 nt, Human
cucucuuccuaucccauccc

SEQ ID NO: 2122284 - RNA, 21 nt, Human
cucucuuccuaucccauccca

SEQ ID NO: 2122285 - RNA, 12 nt, Human
cucucuucugcu

SEQ ID NO: 2122286 - RNA, 14 nt, Human
cucucuucugcucc

SEQ ID NO: 2122287 - RNA, 15 nt, Human
cucucuucugcucca

SEQ ID NO: 2122288 - RNA, 16 nt, Human
cucucuucugcuccac

SEQ ID NO: 2122289 - RNA, 21 nt, Human
cucucuuauagaauauuuauu

SEQ ID NO: 2122290 - RNA, 19 nt, Human
cucucuuauagaauauuua

SEQ ID NO: 2122291 - RNA, 18 nt, Human
cucucuuauagaauauuu

SEQ ID NO: 2122292 - RNA, 15 nt, Human
cucucuuacccuucu

SEQ ID NO: 2122293 - RNA, 18 nt, Human
cucucuuacccuucugug

SEQ ID NO: 2122294 - RNA, 19 nt, Human
cucucuuacccuucugugc

SEQ ID NO: 2122295 - RNA, 22 nt, Human
cucucuuacccuucugugccca

SEQ ID NO: 2122296 - RNA, 23 nt, Human
cucucuuacccuucugugcccag

SEQ ID NO: 2122297 - RNA, 20 nt, Human
cucuauggguaucaaacagc

SEQ ID NO: 2122298 - RNA, 21 nt, Human
cucuauggguaucaaacagcu

SEQ ID NO: 2122299 - RNA, 19 nt, Human
cucuaugguaaagauauua

SEQ ID NO: 2122300 - RNA, 20 nt, Human
cucuaugguaaagauauuau

SEQ ID NO: 2122301 - RNA, 21 nt, Human
cucuaugccagcucaguccca

SEQ ID NO: 2122302 - RNA, 13 nt, Human
cucucccuccccu

SEQ ID NO: 2122303 - RNA, 17 nt, Human
cucucccuccccugcca

SEQ ID NO: 2122304 - RNA, 12 nt, Human
cucucccucugg

SEQ ID NO: 2122305 - RNA, 13 nt, Human
cucucccucuggc

SEQ ID NO: 2122306 - RNA, 18 nt, Human
cucucccucuggcccugc

SEQ ID NO: 2122307 - RNA, 19 nt, Human
cucucccucuggcccugcc

SEQ ID NO: 2122308 - RNA, 21 nt, Human
cucucccucuggcccugccuu

SEQ ID NO: 2122309 - RNA, 22 nt, Human
cucucccucuggcccugccuuc

SEQ ID NO: 2122310 - RNA, 16 nt, Human
cucgguguggagaagc

SEQ ID NO: 2122311 - RNA, 12 nt, Human
cucgugcuuuaa

SEQ ID NO: 2122312 - RNA, 15 nt, Human
cucgugcuuuaagug

SEQ ID NO: 2122313 - RNA, 17 nt, Human
cucuaugccagcucagu

SEQ ID NO: 2122314 - RNA, 16 nt, Human
cucguccucccccugc

SEQ ID NO: 2122315 - RNA, 17 nt, Human
cucguccucccccugcc

SEQ ID NO: 2122316 - RNA, 18 nt, Human
cucguccucccccugcca

SEQ ID NO: 2122317 - RNA, 20 nt, Human
cucguccucccccugccagu

SEQ ID NO: 2122318 - RNA, 22 nt, Human
cucguccucccccugccagugc

SEQ ID NO: 2122319 - RNA, 24 nt, Human
cucguccucccccugccagugccu

SEQ ID NO: 2122320 - RNA, 20 nt, Human
cucgucggggggacagcucc

SEQ ID NO: 2122321 - RNA, 17 nt, Human
cucgguguggagaagcg

SEQ ID NO: 2122322 - RNA, 23 nt, Human
cucgguguggagaagcggcuggc

SEQ ID NO: 2122323 - RNA, 22 nt, Human
cuccugguauggguuucuccca

SEQ ID NO: 2122324 - RNA, 17 nt, Human
cuccuuuggccauucca

SEQ ID NO: 2122325 - RNA, 20 nt, Human
cuccuuucacaaccuucugu

SEQ ID NO: 2122326 - RNA, 15 nt, Human
cuccuuuacccucau

SEQ ID NO: 2122327 - RNA, 17 nt, Human
cuccuuuacccucaucu

SEQ ID NO: 2122328 - RNA, 18 nt, Human
cuccuuuacccucaucug

SEQ ID NO: 2122329 - RNA, 20 nt, Human
cucugcacaagcugcacccu

SEQ ID NO: 2122330 - RNA, 21 nt, Human
cucugcacaagcugcacccuc

SEQ ID NO: 2122331 - RNA, 10 nt, Human
cucugcacag

SEQ ID NO: 2122332 - RNA, 14 nt, Human
cucugcacagaugg

SEQ ID NO: 2122333 - RNA, 15 nt, Human
cucugcacagaugga

SEQ ID NO: 2122334 - RNA, 21 nt, Human
cucugcuccucuccccagcaa

SEQ ID NO: 2122335 - RNA, 16 nt, Human
cucugcagccagccca

SEQ ID NO: 2122336 - RNA, 17 nt, Human
cucugcagccagcccag

SEQ ID NO: 2122337 - RNA, 18 nt, Human
cucugcagccagcccagc

SEQ ID NO: 2122338 - RNA, 19 nt, Human
cucugcagccagcccagcc

SEQ ID NO: 2122339 - RNA, 23 nt, Human
cucugcugacagacacaggcccg

SEQ ID NO: 2122340 - RNA, 13 nt, Human
cucugcugccaug

SEQ ID NO: 2122341 - RNA, 15 nt, Human
cucugcugccauggc

SEQ ID NO: 2122342 - RNA, 20 nt, Human
cucugcugacagacacaggc

SEQ ID NO: 2122343 - RNA, 22 nt, Human
cucugcugacagacacaggccc

SEQ ID NO: 2122344 - RNA, 21 nt, Human
cucugcugacagacacaggcc

SEQ ID NO: 2122345 - RNA, 15 nt, Human
cucugcuggccgggc

SEQ ID NO: 2122346 - RNA, 20 nt, Human
cucugcuggccgggcacagc

SEQ ID NO: 2122347 - RNA, 21 nt, Human
cucugcuggccgggcacagcu

SEQ ID NO: 2122348 - RNA, 22 nt, Human
cucugcuggccgggcacagcug

SEQ ID NO: 2122349 - RNA, 21 nt, Human
cucuuauagaauauuuauuac

SEQ ID NO: 2122350 - RNA, 20 nt, Human
cucuuauagaauauuuauua

SEQ ID NO: 2122351 - RNA, 18 nt, Human
cucuuauagaauauuuau

SEQ ID NO: 2122352 - RNA, 17 nt, Human
cucuuauagaauauuua

SEQ ID NO: 2122353 - RNA, 16 nt, Human
cucuuauagaauauuu

SEQ ID NO: 2122354 - RNA, 19 nt, Human
cucuuaggaagagaaacca

SEQ ID NO: 2122355 - RNA, 14 nt, Human
cucugcuggcccag

SEQ ID NO: 2122356 - RNA, 18 nt, Human
cucugcuggcccagccaa

SEQ ID NO: 2122357 - RNA, 23 nt, Human
cuccgcuuucuacccagcgagcc

SEQ ID NO: 2122358 - RNA, 22 nt, Human
cuccggaggcugaggcaggaga

SEQ ID NO: 2122359 - RNA, 23 nt, Human
cuccggaggcugaggcaggagaa

SEQ ID NO: 2122360 - RNA, 21 nt, Human
cuccuagacugacccugauca

SEQ ID NO: 2122361 - RNA, 11 nt, Human
cuccucugcca

SEQ ID NO: 2122362 - RNA, 12 nt, Human
cuccucugccac

SEQ ID NO: 2122363 - RNA, 14 nt, Human
cuccucugccaccu

SEQ ID NO: 2122364 - RNA, 15 nt, Human
cuccucugccaccuc

SEQ ID NO: 2122365 - RNA, 16 nt, Human
cuccucugccaccucc

SEQ ID NO: 2122366 - RNA, 17 nt, Human
cuccucugccaccuccc

SEQ ID NO: 2122367 - RNA, 12 nt, Human
cuccuagacuga

SEQ ID NO: 2122368 - RNA, 14 nt, Human
cuccuaccucugcu

SEQ ID NO: 2122369 - RNA, 13 nt, Human
cuccuaccuggua

SEQ ID NO: 2122370 - RNA, 16 nt, Human
cuccuaccucagccua

SEQ ID NO: 2122371 - RNA, 18 nt, Human
cuccuaccucagccuaga

SEQ ID NO: 2122372 - RNA, 12 nt, Human
cuccuaccucag

SEQ ID NO: 2122373 - RNA, 13 nt, Human
cuccuaccucagc

SEQ ID NO: 2122374 - RNA, 14 nt, Human
cuccuaccucagcc

SEQ ID NO: 2122375 - RNA, 15 nt, Human
cuccuaccucagccu

SEQ ID NO: 2122376 - RNA, 16 nt, Human
cuccucuugccacugc

SEQ ID NO: 2122377 - RNA, 15 nt, Human
cuccucuugccacug

SEQ ID NO: 2122378 - RNA, 12 nt, Human
cuccucuugcca

SEQ ID NO: 2122379 - RNA, 23 nt, Human
cuccucuucuuuuuuuucauuau

SEQ ID NO: 2122380 - RNA, 18 nt, Human
cuccucuugccacugccu

SEQ ID NO: 2122381 - RNA, 19 nt, Human
cuccuggcccacugcaucg

SEQ ID NO: 2122382 - RNA, 19 nt, Human
cuccuggccucaagugauu

SEQ ID NO: 2122383 - RNA, 18 nt, Human
cuccugggcuaagugauc

SEQ ID NO: 2122384 - RNA, 15 nt, Human
cuccucuguccaggc

SEQ ID NO: 2122385 - RNA, 15 nt, Human
cuccucuguccaggg

SEQ ID NO: 2122386 - RNA, 16 nt, Human
cuccucuguccagggc

SEQ ID NO: 2122387 - RNA, 12 nt, Human
cuccucugucca

SEQ ID NO: 2122388 - RNA, 15 nt, Human
cuccucugggcagga

SEQ ID NO: 2122389 - RNA, 23 nt, Human
cuccucugggcaggaccucagag

SEQ ID NO: 2122390 - RNA, 14 nt, Human
cuccucuguccagg

SEQ ID NO: 2122391 - RNA, 17 nt, Human
cuccucuguccagggcc

SEQ ID NO: 2122392 - RNA, 18 nt, Human
cuccucuguccagggccc

SEQ ID NO: 2122393 - RNA, 13 nt, Human
cuccucugucccu

SEQ ID NO: 2122394 - RNA, 12 nt, Human
cuccucugggca

SEQ ID NO: 2122395 - RNA, 13 nt, Human
cuccucugggcag

SEQ ID NO: 2122396 - RNA, 14 nt, Human
cuccuguccaaccu

SEQ ID NO: 2122397 - RNA, 17 nt, Human
cuccuguacuuuuucca

SEQ ID NO: 2122398 - RNA, 14 nt, Human
cuccugggcucaag

SEQ ID NO: 2122399 - RNA, 15 nt, Human
cuccugggcucaagc

SEQ ID NO: 2122400 - RNA, 13 nt, Human
cuccugggcucag

SEQ ID NO: 2122401 - RNA, 15 nt, Human
cuccuggucuugaga

SEQ ID NO: 2122402 - RNA, 23 nt, Human
cuccuggucuugagaugucuucu

SEQ ID NO: 2122403 - RNA, 17 nt, Human
cuccuuucacaaccuuc

SEQ ID NO: 2122404 - RNA, 16 nt, Human
cuccuuucacaaccuu

SEQ ID NO: 2122405 - RNA, 15 nt, Human
cuccuuucaccacau

SEQ ID NO: 2122406 - RNA, 13 nt, Human
cuccuuucacaac

SEQ ID NO: 2122407 - RNA, 13 nt, Human
cuccugucugcca

SEQ ID NO: 2122408 - RNA, 16 nt, Human
cuccuuguaaagacug

SEQ ID NO: 2122409 - RNA, 16 nt, Human
cuccugucugccagcc

SEQ ID NO: 2122410 - RNA, 14 nt, Human
cuccugucugccag

SEQ ID NO: 2122411 - RNA, 15 nt, Human
cuccugucugccagc

SEQ ID NO: 2122412 - RNA, 13 nt, Human
cucccccuccuuc

SEQ ID NO: 2122413 - RNA, 14 nt, Human
cucccccuccuucc

SEQ ID NO: 2122414 - RNA, 15 nt, Human
cucccccuccuuccc

SEQ ID NO: 2122415 - RNA, 17 nt, Human
cucccccuccuucccag

SEQ ID NO: 2122416 - RNA, 20 nt, Human
cucccccuccuucccagcug

SEQ ID NO: 2122417 - RNA, 14 nt, Human
cuccccggcucgag

SEQ ID NO: 2122418 - RNA, 20 nt, Human
cuccccuaaccucuuuucug

SEQ ID NO: 2122419 - RNA, 15 nt, Human
cuccccuaaugccug

SEQ ID NO: 2122420 - RNA, 16 nt, Human
cuccccuaaugccugc

SEQ ID NO: 2122421 - RNA, 17 nt, Human
cuccccuauccacccag

SEQ ID NO: 2122422 - RNA, 18 nt, Human
cuccccuauccacccagc

SEQ ID NO: 2122423 - RNA, 19 nt, Human
cuccccuauccacccagcc

SEQ ID NO: 2122424 - RNA, 21 nt, Human
cuccccuauccacccagccca

SEQ ID NO: 2122425 - RNA, 23 nt, Human
cuccccuauccacccagcccauu

SEQ ID NO: 2122426 - RNA, 13 nt, Human
cuccccucaagga

SEQ ID NO: 2122427 - RNA, 19 nt, Human
cucccuccuuccuucuugc

SEQ ID NO: 2122428 - RNA, 20 nt, Human
cucccuccuuccuucuugcu

SEQ ID NO: 2122429 - RNA, 18 nt, Human
cucccucgaacccacacu

SEQ ID NO: 2122430 - RNA, 20 nt, Human
cucccucgaacccacacugc

SEQ ID NO: 2122431 - RNA, 21 nt, Human
cucccucgaacccacacugca

SEQ ID NO: 2122432 - RNA, 22 nt, Human
cucccucgaacccacacugcaa

SEQ ID NO: 2122433 - RNA, 20 nt, Human
cucccugaaguaagcaaaga

SEQ ID NO: 2122434 - RNA, 19 nt, Human
cucccugaaccaucccuga

SEQ ID NO: 2122435 - RNA, 21 nt, Human
cucccugaaaauguuuuucug

SEQ ID NO: 2122436 - RNA, 23 nt, Human
cucccugaaaauguuuuucugcc

SEQ ID NO: 2122437 - RNA, 12 nt, Human
cucccucuccug

SEQ ID NO: 2122438 - RNA, 20 nt, Human
cucccucuuucccucccuuc

SEQ ID NO: 2122439 - RNA, 20 nt, Human
cuccaggcuguaucccauga

SEQ ID NO: 2122440 - RNA, 23 nt, Human
cuccaggcuccuuuagcgcccag

SEQ ID NO: 2122441 - RNA, 15 nt, Human
cuccaggcuccuuua

SEQ ID NO: 2122442 - RNA, 16 nt, Human
cuccaguacuggagcu

SEQ ID NO: 2122443 - RNA, 21 nt, Human
cuccaguacuggagcuucucu

SEQ ID NO: 2122444 - RNA, 21 nt, Human
cucccacaggcccuuccucuc

SEQ ID NO: 2122445 - RNA, 20 nt, Human
cucccacaggcccuuccucu

SEQ ID NO: 2122446 - RNA, 16 nt, Human
cucccacaggcccuuc

SEQ ID NO: 2122447 - RNA, 14 nt, Human
cucccacaggcccu

SEQ ID NO: 2122448 - RNA, 15 nt, Human
cucccacaggcccuu

SEQ ID NO: 2122449 - RNA, 24 nt, Human
cucccagaacacacuccaucagcu

SEQ ID NO: 2122450 - RNA, 16 nt, Human
cucccagcucugagga

SEQ ID NO: 2122451 - RNA, 16 nt, Human
cucccagaacacacuc

SEQ ID NO: 2122452 - RNA, 12 nt, Human
cucauguagcaa

SEQ ID NO: 2122453 - RNA, 12 nt, Human
cucaugggcccc

SEQ ID NO: 2122454 - RNA, 15 nt, Human
cucaugggccccucu

SEQ ID NO: 2122455 - RNA, 16 nt, Human
cucaugggccccucug

SEQ ID NO: 2122456 - RNA, 17 nt, Human
cucaugggccccucuga

SEQ ID NO: 2122457 - RNA, 20 nt, Human
cucaugggccccucugacuc

SEQ ID NO: 2122458 - RNA, 17 nt, Human
cucaugguccccauggc

SEQ ID NO: 2122459 - RNA, 20 nt, Human
cucaugguccccauggcaug

SEQ ID NO: 2122460 - RNA, 23 nt, Human
cucauggugaggcuuaacaaugu

SEQ ID NO: 2122461 - RNA, 15 nt, Human
cucaugguggguuca

SEQ ID NO: 2122462 - RNA, 20 nt, Human
cucaaugugaaucagacccu

SEQ ID NO: 2122463 - RNA, 21 nt, Human
cucaaugugaaucagacccua

SEQ ID NO: 2122464 - RNA, 19 nt, Human
cucaauucauauuuaugaa

SEQ ID NO: 2122465 - RNA, 22 nt, Human
cucaauauuuuccaugaaaaug

SEQ ID NO: 2122466 - RNA, 15 nt, Human
cucaaucaagaaaau

SEQ ID NO: 2122467 - RNA, 18 nt, Human
cucaaucccagcuacuca

SEQ ID NO: 2122468 - RNA, 14 nt, Human
cucaauccucuaag

SEQ ID NO: 2122469 - RNA, 21 nt, Human
cucaagugauucuccugccuc

SEQ ID NO: 2122470 - RNA, 11 nt, Human
cuauguuugcu

SEQ ID NO: 2122471 - RNA, 14 nt, Human
cucaaguugaaaga

SEQ ID NO: 2122472 - RNA, 20 nt, Human
cucaaguuucuucaaucuga

SEQ ID NO: 2122473 - RNA, 13 nt, Human
cucaauaaaauca

SEQ ID NO: 2122474 - RNA, 18 nt, Human
cucaauauuuuccaugaa

SEQ ID NO: 2122475 - RNA, 19 nt, Human
cucaauauuuuccaugaaa

SEQ ID NO: 2122476 - RNA, 22 nt, Human
cucaauaaaaucauguacauuu

SEQ ID NO: 2122477 - RNA, 23 nt, Human
cucaauaaaaucauguacauuuc

SEQ ID NO: 2122478 - RNA, 22 nt, Human
cucaagugucucaguccaccug

SEQ ID NO: 2122479 - RNA, 14 nt, Human
cucaaguucaagga

SEQ ID NO: 2122480 - RNA, 15 nt, Human
cucaaguucaaggac

SEQ ID NO: 2122481 - RNA, 17 nt, Human
cucaaguucaaggacca

SEQ ID NO: 2122482 - RNA, 18 nt, Human
cucaaguucaaggaccaa

SEQ ID NO: 2122483 - RNA, 19 nt, Human
cucaaguucaaggaccaac

SEQ ID NO: 2122484 - RNA, 12 nt, Human
cuaugugacaau

SEQ ID NO: 2122485 - RNA, 22 nt, Human
cuauguugcccaggcaggucuu

SEQ ID NO: 2122486 - RNA, 21 nt, Human
cuauguugcccaggcaggucu

SEQ ID NO: 2122487 - RNA, 19 nt, Human
cuauguugcccaggcaggu

SEQ ID NO: 2122488 - RNA, 18 nt, Human
cuauguugcccaggcagg

SEQ ID NO: 2122489 - RNA, 14 nt, Human
cuaucucacagcac

SEQ ID NO: 2122490 - RNA, 18 nt, Human
cuaucucacagcacacuc

SEQ ID NO: 2122491 - RNA, 20 nt, Human
cuaucucacagcacacucag

SEQ ID NO: 2122492 - RNA, 13 nt, Human
cuaugucccuugc

SEQ ID NO: 2122493 - RNA, 16 nt, Human
cuaugucccuugcugu

SEQ ID NO: 2122494 - RNA, 12 nt, Human
cuauccuggcuu

SEQ ID NO: 2122495 - RNA, 13 nt, Human
cuauccuggcuuu

SEQ ID NO: 2122496 - RNA, 14 nt, Human
cuauccuggcuuug

SEQ ID NO: 2122497 - RNA, 18 nt, Human
cuauccuggcuuugccca

SEQ ID NO: 2122498 - RNA, 19 nt, Human
cuauccuggcuuugcccaa

SEQ ID NO: 2122499 - RNA, 21 nt, Human
cuauccuggcuuugcccaacc

SEQ ID NO: 2122500 - RNA, 22 nt, Human
cuauccuggcuuugcccaaccu

SEQ ID NO: 2122501 - RNA, 20 nt, Human
cuauccggacagagcacguu

SEQ ID NO: 2122502 - RNA, 13 nt, Human
cuauccuacccca

SEQ ID NO: 2122503 - RNA, 14 nt, Human
cuaucaccuccccu

SEQ ID NO: 2122504 - RNA, 15 nt, Human
cuaucaccuccccuc

SEQ ID NO: 2122505 - RNA, 18 nt, Human
cuaucagaguauccacug

SEQ ID NO: 2122506 - RNA, 16 nt, Human
cuaucaccuccccucc

SEQ ID NO: 2122507 - RNA, 17 nt, Human
cuaucaccuccccuccu

SEQ ID NO: 2122508 - RNA, 19 nt, Human
cuaucaccuccccuccuug

SEQ ID NO: 2122509 - RNA, 20 nt, Human
cuacaaaaccugauguuaaa

SEQ ID NO: 2122510 - RNA, 21 nt, Human
cuacaaaaccugauguuaaaa

SEQ ID NO: 2122511 - RNA, 17 nt, Human
cuacaaaauuugaaauu

SEQ ID NO: 2122512 - RNA, 18 nt, Human
cuacaaaauuugaaauuu

SEQ ID NO: 2122513 - RNA, 23 nt, Human
cucagaagacacugaugggcaac

SEQ ID NO: 2122514 - RNA, 11 nt, Human
cucagaagccu

SEQ ID NO: 2122515 - RNA, 13 nt, Human
cucagaagccuga

SEQ ID NO: 2122516 - RNA, 14 nt, Human
cucagaagccugag

SEQ ID NO: 2122517 - RNA, 15 nt, Human
cucagaagccugagg

SEQ ID NO: 2122518 - RNA, 18 nt, Human
cucagaagccugaggcug

SEQ ID NO: 2122519 - RNA, 16 nt, Human
cucagaagccugaggc

SEQ ID NO: 2122520 - RNA, 17 nt, Human
cucagaagccugaggcu

SEQ ID NO: 2122521 - RNA, 13 nt, Human
cucagacccccac

SEQ ID NO: 2122522 - RNA, 23 nt, Human
cucagacccccacucucauuccc

SEQ ID NO: 2122523 - RNA, 17 nt, Human
cucagacucauacagaa

SEQ ID NO: 2122524 - RNA, 14 nt, Human
cucagacuccauuu

SEQ ID NO: 2122525 - RNA, 14 nt, Human
cucagacccccacu

SEQ ID NO: 2122526 - RNA, 15 nt, Human
cucagacccccacuc

SEQ ID NO: 2122527 - RNA, 16 nt, Human
cucagacccccacucu

SEQ ID NO: 2122528 - RNA, 22 nt, Human
cucagacccccacucucauucc

SEQ ID NO: 2122529 - RNA, 13 nt, Human
cucagacugcuca

SEQ ID NO: 2122530 - RNA, 14 nt, Human
cucagacugcucaa

SEQ ID NO: 2122531 - RNA, 13 nt, Human
cucagcccugagg

SEQ ID NO: 2122532 - RNA, 14 nt, Human
cucagcccugaggu

SEQ ID NO: 2122533 - RNA, 15 nt, Human
cucagcccugaggug

SEQ ID NO: 2122534 - RNA, 11 nt, Human
cucagcccugg

SEQ ID NO: 2122535 - RNA, 12 nt, Human
cucagcccuggg

SEQ ID NO: 2122536 - RNA, 13 nt, Human
cucagcccugggc

SEQ ID NO: 2122537 - RNA, 14 nt, Human
cucagcccugggcc

SEQ ID NO: 2122538 - RNA, 22 nt, Human
cucagccucccgaauagcuggg

SEQ ID NO: 2122539 - RNA, 22 nt, Human
cucagccuccuguguagcuggg

SEQ ID NO: 2122540 - RNA, 15 nt, Human
cucagcccugggccc

SEQ ID NO: 2122541 - RNA, 19 nt, Human
cucagcccugggccccacc

SEQ ID NO: 2122542 - RNA, 21 nt, Human
cucagcccugggccccaccac

SEQ ID NO: 2122543 - RNA, 21 nt, Human
cucagccucccgaauagcugg

SEQ ID NO: 2122544 - RNA, 19 nt, Human
cucagccucccgaauagcu

SEQ ID NO: 2122545 - RNA, 22 nt, Human
cucagaagacacugaugggcaa

SEQ ID NO: 2122546 - RNA, 20 nt, Human
cucagaagacacugaugggc

SEQ ID NO: 2122547 - RNA, 17 nt, Human
cucagaagacacugaug

SEQ ID NO: 2122548 - RNA, 15 nt, Human
cucagaagacacuga

SEQ ID NO: 2122549 - RNA, 15 nt, Human
cucagaacacauucu

SEQ ID NO: 2122550 - RNA, 17 nt, Human
cucagaacacauucuuu

SEQ ID NO: 2122551 - RNA, 13 nt, Human
cucagaagacacu

SEQ ID NO: 2122552 - RNA, 18 nt, Human
cucacgccuguaauccca

SEQ ID NO: 2122553 - RNA, 19 nt, Human
cucacgccuguaaucccag

SEQ ID NO: 2122554 - RNA, 20 nt, Human
cucacgccuguaaucccagc

SEQ ID NO: 2122555 - RNA, 21 nt, Human
cucacgccuguaaucccagca

SEQ ID NO: 2122556 - RNA, 23 nt, Human
cucacgccuguaaucccagcacu

SEQ ID NO: 2122557 - RNA, 22 nt, Human
cucacgccuguaaucccagcag

SEQ ID NO: 2122558 - RNA, 20 nt, Human
cucacgcucccaacacaagg

SEQ ID NO: 2122559 - RNA, 23 nt, Human
cucacgccuguaaucccagcagu

SEQ ID NO: 2122560 - RNA, 19 nt, Human
cucacgggcaguagcugug

SEQ ID NO: 2122561 - RNA, 13 nt, Human
cucacguguguga

SEQ ID NO: 2122562 - RNA, 16 nt, Human
cucacgugagaguguc

SEQ ID NO: 2122563 - RNA, 15 nt, Human
cucacgcaccuccca

SEQ ID NO: 2122564 - RNA, 16 nt, Human
cucacgcaccucccau

SEQ ID NO: 2122565 - RNA, 19 nt, Human
cucacgcaccucccauccu

SEQ ID NO: 2122566 - RNA, 20 nt, Human
cucacgccuaugaucccagc

SEQ ID NO: 2122567 - RNA, 17 nt, Human
cucaccuuucccaucuu

SEQ ID NO: 2122568 - RNA, 23 nt, Human
cucaggccuauaaccccagcucc

SEQ ID NO: 2122569 - RNA, 19 nt, Human
cucaggccaacaagccaac

SEQ ID NO: 2122570 - RNA, 13 nt, Human
cucaggccaccug

SEQ ID NO: 2122571 - RNA, 23 nt, Human
cucagccuccuguguagcuggga

SEQ ID NO: 2122572 - RNA, 17 nt, Human
cucagccucugaauaug

SEQ ID NO: 2122573 - RNA, 19 nt, Human
cucagggacagagacaccu

SEQ ID NO: 2122574 - RNA, 20 nt, Human
cucagggacagagacaccug

SEQ ID NO: 2122575 - RNA, 20 nt, Human
cucaggcuguuuuugggugc

SEQ ID NO: 2122576 - RNA, 17 nt, Human
cucaggcuuccuuggca

SEQ ID NO: 2122577 - RNA, 14 nt, Human
cucagggaagccca

SEQ ID NO: 2122578 - RNA, 15 nt, Human
cucagggaagcccag

SEQ ID NO: 2122579 - RNA, 16 nt, Human
cucagggaagcccagc

SEQ ID NO: 2122580 - RNA, 17 nt, Human
cucagggaagcccagcu

SEQ ID NO: 2122581 - RNA, 18 nt, Human
cucagggaagcccagcuc

SEQ ID NO: 2122582 - RNA, 19 nt, Human
cucagggaagcccagcucc

SEQ ID NO: 2122583 - RNA, 20 nt, Human
cucagggaagcccagcucca

SEQ ID NO: 2122584 - RNA, 21 nt, Human
cucagggaagcccagcuccag

SEQ ID NO: 2122585 - RNA, 23 nt, Human
cucagggaagcccagcuccaggg

SEQ ID NO: 2122586 - RNA, 14 nt, Human
cucagggacagaga

SEQ ID NO: 2122587 - RNA, 20 nt, Human
cucaggcgauccaccugucu

SEQ ID NO: 2122588 - RNA, 13 nt, Human
cucaggcucugcc

SEQ ID NO: 2122589 - RNA, 21 nt, Human
cucaggcgauccaccugucuc

SEQ ID NO: 2122590 - RNA, 17 nt, Human
cucaggcugaccacuuu

SEQ ID NO: 2122591 - RNA, 14 nt, Human
cucaggcucugccc

SEQ ID NO: 2122592 - RNA, 15 nt, Human
cucaggcucugcccu

SEQ ID NO: 2122593 - RNA, 16 nt, Human
cucaggcucugcccug

SEQ ID NO: 2122594 - RNA, 17 nt, Human
cucaggcucugcccugc

SEQ ID NO: 2122595 - RNA, 19 nt, Human
cucaggcucugcccugccc

SEQ ID NO: 2122596 - RNA, 22 nt, Human
cucaggcucugcccugcccuag

SEQ ID NO: 2122597 - RNA, 11 nt, Human
cucaggcugcu

SEQ ID NO: 2122598 - RNA, 12 nt, Human
cucaggcugcug

SEQ ID NO: 2122599 - RNA, 13 nt, Human
cucaggcugcugg

SEQ ID NO: 2122600 - RNA, 14 nt, Human
cucaggcugcugga

SEQ ID NO: 2122601 - RNA, 15 nt, Human
cucaggcugcuggag

SEQ ID NO: 2122602 - RNA, 16 nt, Human
cucaggcugcuggagg

SEQ ID NO: 2122603 - RNA, 17 nt, Human
cucaggcugcuggagga

SEQ ID NO: 2122604 - RNA, 17 nt, Human
cucaguccauagcagag

SEQ ID NO: 2122605 - RNA, 15 nt, Human
cucaguccauagcag

SEQ ID NO: 2122606 - RNA, 14 nt, Human
cucagguugucuga

SEQ ID NO: 2122607 - RNA, 19 nt, Human
cucagguuguaguaaagaa

SEQ ID NO: 2122608 - RNA, 22 nt, Human
cucagguuguaguaaagaaauu

SEQ ID NO: 2122609 - RNA, 16 nt, Human
cucaguccaccugagc

SEQ ID NO: 2122610 - RNA, 17 nt, Human
cucaguccaccugagcu

SEQ ID NO: 2122611 - RNA, 18 nt, Human
cucaguccaccugagcug

SEQ ID NO: 2122612 - RNA, 20 nt, Human
cucagucuggcccuuccuuu

SEQ ID NO: 2122613 - RNA, 22 nt, Human
cucagucuggcccuuccuuuuc

SEQ ID NO: 2122614 - RNA, 13 nt, Human
cucagucuucccu

SEQ ID NO: 2122615 - RNA, 20 nt, Human
cucagucuucccuagggcug

SEQ ID NO: 2122616 - RNA, 22 nt, Human
cucagucuucccuagggcuggg

SEQ ID NO: 2122617 - RNA, 23 nt, Human
cucagucuucccuagggcugggu

SEQ ID NO: 2122618 - RNA, 22 nt, Human
cucaugaggggcccgagcagaa

SEQ ID NO: 2122619 - RNA, 19 nt, Human
cucaugaucuugugacaua

SEQ ID NO: 2122620 - RNA, 20 nt, Human
cucaugaucuugugacauau

SEQ ID NO: 2122621 - RNA, 18 nt, Human
cucaugcauagucccagc

SEQ ID NO: 2122622 - RNA, 19 nt, Human
cucaugcauagucccagcu

SEQ ID NO: 2122623 - RNA, 20 nt, Human
cucaugcauagucccagcua

SEQ ID NO: 2122624 - RNA, 22 nt, Human
cucagguugucugaagucacug

SEQ ID NO: 2122625 - RNA, 23 nt, Human
cucaggugucccugcacuugcag

SEQ ID NO: 2122626 - RNA, 17 nt, Human
cguaaagcuagaaauga

SEQ ID NO: 2122627 - RNA, 16 nt, Human
cguaaagcuagaaaug

SEQ ID NO: 2122628 - RNA, 20 nt, Human
cguaaauacacaacacacac

SEQ ID NO: 2122629 - RNA, 15 nt, Human
cguaaccacggaaaa

SEQ ID NO: 2122630 - RNA, 20 nt, Human
cgguggcucacgccuguaau

SEQ ID NO: 2122631 - RNA, 20 nt, Human
cgguggcucaggccuauaac

SEQ ID NO: 2122632 - RNA, 16 nt, Human
cgggcuggccugugcc

SEQ ID NO: 2122633 - RNA, 17 nt, Human
cgggcuggccugugccu

SEQ ID NO: 2122634 - RNA, 15 nt, Human
cgggcuuuuccccgg

SEQ ID NO: 2122635 - RNA, 14 nt, Human
cggggaacuccugg

SEQ ID NO: 2122636 - RNA, 15 nt, Human
cggggaacuccugga

SEQ ID NO: 2122637 - RNA, 13 nt, Human
cgguggcuaaagg

SEQ ID NO: 2122638 - RNA, 22 nt, Human
cgguggcuaaaggucccaaggc

SEQ ID NO: 2122639 - RNA, 16 nt, Human
cggggaacuccuggaa

SEQ ID NO: 2122640 - RNA, 15 nt, Human
cguacugcagccucc

SEQ ID NO: 2122641 - RNA, 22 nt, Human
cguacuuagcagcuaucucuca

SEQ ID NO: 2122642 - RNA, 14 nt, Human
cguacugcagccuc

SEQ ID NO: 2122643 - RNA, 17 nt, Human
cguacauucaauguuua

SEQ ID NO: 2122644 - RNA, 21 nt, Human
cggcuacucagcagcccuccu

SEQ ID NO: 2122645 - RNA, 12 nt, Human
cggcuacucagc

SEQ ID NO: 2122646 - RNA, 13 nt, Human
cggcuacucagca

SEQ ID NO: 2122647 - RNA, 14 nt, Human
cggcuacucagcag

SEQ ID NO: 2122648 - RNA, 16 nt, Human
cggcuacucagcagcc

SEQ ID NO: 2122649 - RNA, 18 nt, Human
cggcuacucagcagcccu

SEQ ID NO: 2122650 - RNA, 19 nt, Human
cggcuacucagcagcccuc

SEQ ID NO: 2122651 - RNA, 20 nt, Human
cggcuacucagcagcccucc

SEQ ID NO: 2122652 - RNA, 14 nt, Human
cgggcucagcucug

SEQ ID NO: 2122653 - RNA, 15 nt, Human
cgggcucagcucugg

SEQ ID NO: 2122654 - RNA, 14 nt, Human
cgggcucucugcug

SEQ ID NO: 2122655 - RNA, 15 nt, Human
cgggcucucugcugu

SEQ ID NO: 2122656 - RNA, 20 nt, Human
cgggccuggagaacuagaga

SEQ ID NO: 2122657 - RNA, 16 nt, Human
cgggccuggagaacua

SEQ ID NO: 2122658 - RNA, 19 nt, Human
cgggcucagcaaaagaugc

SEQ ID NO: 2122659 - RNA, 20 nt, Human
cgggcugggagcucugcaga

SEQ ID NO: 2122660 - RNA, 16 nt, Human
cgggcugggagcucug

SEQ ID NO: 2122661 - RNA, 14 nt, Human
cgggcugggcagcu

SEQ ID NO: 2122662 - RNA, 15 nt, Human
cgggcugggcagcug

SEQ ID NO: 2122663 - RNA, 16 nt, Human
cgggcugggcagcugu

SEQ ID NO: 2122664 - RNA, 17 nt, Human
cgggcugggcagcuguu

SEQ ID NO: 2122665 - RNA, 15 nt, Human
cggaggggccuggca

SEQ ID NO: 2122666 - RNA, 23 nt, Human
cggagucccaccuuggcugcagg

SEQ ID NO: 2122667 - RNA, 22 nt, Human
cggagucccaccuuggcugcag

SEQ ID NO: 2122668 - RNA, 21 nt, Human
cggagucccaccuuggcugca

SEQ ID NO: 2122669 - RNA, 17 nt, Human
cggagggauuccccuaa

SEQ ID NO: 2122670 - RNA, 19 nt, Human
cggagggaauugaggucug

SEQ ID NO: 2122671 - RNA, 19 nt, Human
cggaggcuugucagagcug

SEQ ID NO: 2122672 - RNA, 20 nt, Human
cggaggcuugucagagcugg

SEQ ID NO: 2122673 - RNA, 21 nt, Human
cggaggcuugucagagcuggg

SEQ ID NO: 2122674 - RNA, 23 nt, Human
cggaggcuugucagagcugggag

SEQ ID NO: 2122675 - RNA, 18 nt, Human
cggaggcuugucagagcu

SEQ ID NO: 2122676 - RNA, 17 nt, Human
cggagacggagucccac

SEQ ID NO: 2122677 - RNA, 20 nt, Human
cggagacggagucccaccuu

SEQ ID NO: 2122678 - RNA, 21 nt, Human
cggagacgugaugaagggagg

SEQ ID NO: 2122679 - RNA, 13 nt, Human
cggagagaaaaaa

SEQ ID NO: 2122680 - RNA, 14 nt, Human
cggagagaaaaaag

SEQ ID NO: 2122681 - RNA, 16 nt, Human
cggagagaaaaaagaa

SEQ ID NO: 2122682 - RNA, 23 nt, Human
cggagagcgccugccccucccag

SEQ ID NO: 2122683 - RNA, 20 nt, Human
cggaggcugaggcaggagaa

SEQ ID NO: 2122684 - RNA, 19 nt, Human
cgcucuguugcccaggcug

SEQ ID NO: 2122685 - RNA, 22 nt, Human
cgcucuguugcccaggcuggag

SEQ ID NO: 2122686 - RNA, 21 nt, Human
cgcucuuggcagguacucagc

SEQ ID NO: 2122687 - RNA, 23 nt, Human
cgcugacaaccaccgcuccccag

SEQ ID NO: 2122688 - RNA, 13 nt, Human
cgcucuuuuccua

SEQ ID NO: 2122689 - RNA, 15 nt, Human
cgccugccccuccca

SEQ ID NO: 2122690 - RNA, 16 nt, Human
cgccugccccucccag

SEQ ID NO: 2122691 - RNA, 17 nt, Human
cgccaccccuccuuccu

SEQ ID NO: 2122692 - RNA, 19 nt, Human
cgccacauccccgcuggcu

SEQ ID NO: 2122693 - RNA, 23 nt, Human
cgccacauccccgcuggcugggg

SEQ ID NO: 2122694 - RNA, 21 nt, Human
cgccacuacacuccagccuga

SEQ ID NO: 2122695 - RNA, 18 nt, Human
cgcuggagugcagugagc

SEQ ID NO: 2122696 - RNA, 17 nt, Human
cgcuggagugcagugag

SEQ ID NO: 2122697 - RNA, 20 nt, Human
cgcugccgcaccccagagug

SEQ ID NO: 2122698 - RNA, 21 nt, Human
cgcugccgcaccccagagugu

SEQ ID NO: 2122699 - RNA, 17 nt, Human
cgcugccuaaguggcug

SEQ ID NO: 2122700 - RNA, 20 nt, Human
cgcugccuaaguggcugcug

SEQ ID NO: 2122701 - RNA, 13 nt, Human
cgcugccgcaccc

SEQ ID NO: 2122702 - RNA, 18 nt, Human
cgcugccgcaccccagag

SEQ ID NO: 2122703 - RNA, 10 nt, Human
cgcuggcccc

SEQ ID NO: 2122704 - RNA, 12 nt, Human
cgcuggccccca

SEQ ID NO: 2122705 - RNA, 13 nt, Human
cgcuggcccccac

SEQ ID NO: 2122706 - RNA, 16 nt, Human
cgcuggcccccacugg

SEQ ID NO: 2122707 - RNA, 17 nt, Human
cgcuggcccccacuggc

SEQ ID NO: 2122708 - RNA, 18 nt, Human
cgcuggcccccacuggcu

SEQ ID NO: 2122709 - RNA, 19 nt, Human
cgcuggcccccacuggcug

SEQ ID NO: 2122710 - RNA, 20 nt, Human
cgcuggcccccacuggcugu

SEQ ID NO: 2122711 - RNA, 21 nt, Human
cgcuggcccccacuggcugug

SEQ ID NO: 2122712 - RNA, 16 nt, Human
cgagucucuucuccac

SEQ ID NO: 2122713 - RNA, 16 nt, Human
cgaggguccuggcucc

SEQ ID NO: 2122714 - RNA, 23 nt, Human
cgaggguccuggcuccugagggg

SEQ ID NO: 2122715 - RNA, 18 nt, Human
cgagucucuucuccacug

SEQ ID NO: 2122716 - RNA, 17 nt, Human
cgagucucuucuccacu

SEQ ID NO: 2122717 - RNA, 14 nt, Human
cgaggguccuggcu

SEQ ID NO: 2122718 - RNA, 15 nt, Human
cgaggguccuggcuc

SEQ ID NO: 2122719 - RNA, 18 nt, Human
cgaggggaggguggcagg

SEQ ID NO: 2122720 - RNA, 19 nt, Human
cgaggggaggguggcaggu

SEQ ID NO: 2122721 - RNA, 21 nt, Human
cgagucucuucuccacuggau

SEQ ID NO: 2122722 - RNA, 20 nt, Human
cgagucucuucuccacugga

SEQ ID NO: 2122723 - RNA, 19 nt, Human
cgcagugcuucucuacaga

SEQ ID NO: 2122724 - RNA, 12 nt, Human
ccuuuuccaugc

SEQ ID NO: 2122725 - RNA, 20 nt, Human
ccuuuucgcaggauucuucc

SEQ ID NO: 2122726 - RNA, 12 nt, Human
ccuuucccuuua

SEQ ID NO: 2122727 - RNA, 11 nt, Human
ccuuuccuguu

SEQ ID NO: 2122728 - RNA, 15 nt, Human
ccuuuccuguucagc

SEQ ID NO: 2122729 - RNA, 18 nt, Human
ccuuuccuguucagcauu

SEQ ID NO: 2122730 - RNA, 20 nt, Human
ccuuuccuguucagcauucu

SEQ ID NO: 2122731 - RNA, 16 nt, Human
ccuuuccuuccauccc

SEQ ID NO: 2122732 - RNA, 18 nt, Human
ccuuuccuuccaucccua

SEQ ID NO: 2122733 - RNA, 12 nt, Human
ccuuuccuuccu

SEQ ID NO: 2122734 - RNA, 21 nt, Human
ccuuuccuuccuucccuggcu

SEQ ID NO: 2122735 - RNA, 13 nt, Human
ccuuuccuuccuu

SEQ ID NO: 2122736 - RNA, 22 nt, Human
cuaagaaagcccuuaggaagaa

SEQ ID NO: 2122737 - RNA, 16 nt, Human
cuaacuuuccuucauu

SEQ ID NO: 2122738 - RNA, 22 nt, Human
cuaacuuggagccccagugcca

SEQ ID NO: 2122739 - RNA, 17 nt, Human
cuaacuuggagccccag

SEQ ID NO: 2122740 - RNA, 20 nt, Human
cuaacuuggagccccagugc

SEQ ID NO: 2122741 - RNA, 21 nt, Human
cuaacuuggagccccagugcc

SEQ ID NO: 2122742 - RNA, 17 nt, Human
cuaaaguagacuucauu

SEQ ID NO: 2122743 - RNA, 20 nt, Human
cuaaaggucccaaggcaagg

SEQ ID NO: 2122744 - RNA, 17 nt, Human
cuaaagcccaaccuccu

SEQ ID NO: 2122745 - RNA, 20 nt, Human
cuaacgacuucagggcaggg

SEQ ID NO: 2122746 - RNA, 15 nt, Human
cuaacguaaauacac

SEQ ID NO: 2122747 - RNA, 19 nt, Human
cgugagugaaccaucauua

SEQ ID NO: 2122748 - RNA, 14 nt, Human
cguuagggaagaga

SEQ ID NO: 2122749 - RNA, 16 nt, Human
cguuagggaagagaaa

SEQ ID NO: 2122750 - RNA, 17 nt, Human
cguuagggaagagaaac

SEQ ID NO: 2122751 - RNA, 15 nt, Human
cguucaccccuccac

SEQ ID NO: 2122752 - RNA, 22 nt, Human
cguuauguguguauauguaugu

SEQ ID NO: 2122753 - RNA, 13 nt, Human
cuaaagcaggccu

SEQ ID NO: 2122754 - RNA, 11 nt, Human
cuaaagcagug

SEQ ID NO: 2122755 - RNA, 20 nt, Human
cguucaccccuccacccuug

SEQ ID NO: 2122756 - RNA, 18 nt, Human
cuaaagcaguggacacca

SEQ ID NO: 2122757 - RNA, 15 nt, Human
cgugacaacacuugu

SEQ ID NO: 2122758 - RNA, 14 nt, Human
cgugacaacacuug

SEQ ID NO: 2122759 - RNA, 20 nt, Human
cgugagccacugcaccgggc

SEQ ID NO: 2122760 - RNA, 15 nt, Human
cgugagccacugcac

SEQ ID NO: 2122761 - RNA, 14 nt, Human
cgugagccacugca

SEQ ID NO: 2122762 - RNA, 19 nt, Human
cgugaggaugucacucaga

SEQ ID NO: 2122763 - RNA, 22 nt, Human
cgugagccacugcaccgggcca

SEQ ID NO: 2122764 - RNA, 15 nt, Human
cuaauuugauguuua

SEQ ID NO: 2122765 - RNA, 16 nt, Human
cuaauuugauguuuac

SEQ ID NO: 2122766 - RNA, 13 nt, Human
cuaauaaaauauc

SEQ ID NO: 2122767 - RNA, 14 nt, Human
cuaauaaaauauca

SEQ ID NO: 2122768 - RNA, 13 nt, Human
cuaauaaaagcau

SEQ ID NO: 2122769 - RNA, 15 nt, Human
cuaauaaaauaucau

SEQ ID NO: 2122770 - RNA, 16 nt, Human
cuaauaaaauaucauu

SEQ ID NO: 2122771 - RNA, 17 nt, Human
cuaauaaaauaucauuc

SEQ ID NO: 2122772 - RNA, 18 nt, Human
cuaauaaaauaucauuca

SEQ ID NO: 2122773 - RNA, 19 nt, Human
cuaauaaaauaucauucag

SEQ ID NO: 2122774 - RNA, 20 nt, Human
cuaauaaaauaucauucagc

SEQ ID NO: 2122775 - RNA, 21 nt, Human
cuaauaaaauaucauucagca

SEQ ID NO: 2122776 - RNA, 22 nt, Human
cuaauaaaauaucauucagcaa

SEQ ID NO: 2122777 - RNA, 23 nt, Human
cuaauaaaauaucauucagcaac

SEQ ID NO: 2122778 - RNA, 19 nt, Human
cuacaaaaagcauaaaaau

SEQ ID NO: 2122779 - RNA, 12 nt, Human
cuaauuuuuaag

SEQ ID NO: 2122780 - RNA, 13 nt, Human
cuaaguuucaguu

SEQ ID NO: 2122781 - RNA, 15 nt, Human
cuaaguucuuagaua

SEQ ID NO: 2122782 - RNA, 17 nt, Human
cuaaguucuuagauauc

SEQ ID NO: 2122783 - RNA, 18 nt, Human
cuaaguucuuagauaucu

SEQ ID NO: 2122784 - RNA, 20 nt, Human
cuaaguucuuagauaucuuu

SEQ ID NO: 2122785 - RNA, 12 nt, Human
cuaagucucugu

SEQ ID NO: 2122786 - RNA, 13 nt, Human
cuaagucucugug

SEQ ID NO: 2122787 - RNA, 14 nt, Human
cuaagucucuguga

SEQ ID NO: 2122788 - RNA, 15 nt, Human
cuaagucccugcccc

SEQ ID NO: 2122789 - RNA, 16 nt, Human
cuaagucccugccccc

SEQ ID NO: 2122790 - RNA, 17 nt, Human
cuaagucccugcccccu

SEQ ID NO: 2122791 - RNA, 18 nt, Human
cuaagucccugcccccuc

SEQ ID NO: 2122792 - RNA, 10 nt, Human
cuaauaaaac

SEQ ID NO: 2122793 - RNA, 19 nt, Human
cuaaguuucaguugauuuu

SEQ ID NO: 2122794 - RNA, 14 nt, Human
ccuuagucuucuca

SEQ ID NO: 2122795 - RNA, 13 nt, Human
ccuuagucuucuc

SEQ ID NO: 2122796 - RNA, 23 nt, Human
ccuuagcuuagaccucagccugu

SEQ ID NO: 2122797 - RNA, 13 nt, Human
ccuuaggcaggga

SEQ ID NO: 2122798 - RNA, 15 nt, Human
ccuuaggcagggaag

SEQ ID NO: 2122799 - RNA, 19 nt, Human
ccuuagcuuagaccucagc

SEQ ID NO: 2122800 - RNA, 20 nt, Human
ccuuagcuuagaccucagcc

SEQ ID NO: 2122801 - RNA, 21 nt, Human
ccuuagcuuagaccucagccu

SEQ ID NO: 2122802 - RNA, 22 nt, Human
ccuuagcuuagaccucagccug

SEQ ID NO: 2122803 - RNA, 16 nt, Human
ccuuaggcagggaagu

SEQ ID NO: 2122804 - RNA, 16 nt, Human
ccuuaucgaaacucau

SEQ ID NO: 2122805 - RNA, 13 nt, Human
ccuuaucugugcg

SEQ ID NO: 2122806 - RNA, 20 nt, Human
ccuuaucugugcgugaaaca

SEQ ID NO: 2122807 - RNA, 21 nt, Human
ccuuaucugugcgugaaacac

SEQ ID NO: 2122808 - RNA, 12 nt, Human
ccuucccagcuc

SEQ ID NO: 2122809 - RNA, 13 nt, Human
ccuucccagcucu

SEQ ID NO: 2122810 - RNA, 14 nt, Human
ccuucccagcucuc

SEQ ID NO: 2122811 - RNA, 17 nt, Human
ccuucccagcucucccu

SEQ ID NO: 2122812 - RNA, 18 nt, Human
ccuucccagcucucccuc

SEQ ID NO: 2122813 - RNA, 15 nt, Human
ccuucccaugcccug

SEQ ID NO: 2122814 - RNA, 22 nt, Human
ccuucccagcucucccucuggc

SEQ ID NO: 2122815 - RNA, 19 nt, Human
ccuucccagcucucccucu

SEQ ID NO: 2122816 - RNA, 21 nt, Human
ccuucccagcucucccucugg

SEQ ID NO: 2122817 - RNA, 13 nt, Human
ccuucccagcugc

SEQ ID NO: 2122818 - RNA, 16 nt, Human
ccuucccagcugcccc

SEQ ID NO: 2122819 - RNA, 18 nt, Human
ccuucccagcugccccuc

SEQ ID NO: 2122820 - RNA, 22 nt, Human
ccuucccagcugccccucccug

SEQ ID NO: 2122821 - RNA, 19 nt, Human
ccuguucagcuccagcuca

SEQ ID NO: 2122822 - RNA, 16 nt, Human
ccuguucagcuccagc

SEQ ID NO: 2122823 - RNA, 15 nt, Human
ccuguucagcuccag

SEQ ID NO: 2122824 - RNA, 14 nt, Human
ccuguucagcucca

SEQ ID NO: 2122825 - RNA, 21 nt, Human
ccuguucagcuccagcucacc

SEQ ID NO: 2122826 - RNA, 20 nt, Human
ccuguucagcuccagcucac

SEQ ID NO: 2122827 - RNA, 23 nt, Human
ccuguucagcuccagcucaccag

SEQ ID NO: 2122828 - RNA, 12 nt, Human
ccuguucagcau

SEQ ID NO: 2122829 - RNA, 15 nt, Human
ccuguucagcauucu

SEQ ID NO: 2122830 - RNA, 19 nt, Human
ccuguucugggugcagcug

SEQ ID NO: 2122831 - RNA, 12 nt, Human
ccuguugaaaag

SEQ ID NO: 2122832 - RNA, 22 nt, Human
ccuguugaaaagccauguuuaa

SEQ ID NO: 2122833 - RNA, 12 nt, Human
ccuguucccauu

SEQ ID NO: 2122834 - RNA, 16 nt, Human
ccuguucauuguaagc

SEQ ID NO: 2122835 - RNA, 22 nt, Human
ccuguugcccuuucuguaccau

SEQ ID NO: 2122836 - RNA, 20 nt, Human
ccuuagcagggaaacagcua

SEQ ID NO: 2122837 - RNA, 19 nt, Human
ccuuagcagggaaacagcu

SEQ ID NO: 2122838 - RNA, 16 nt, Human
ccuuagcaaauucugu

SEQ ID NO: 2122839 - RNA, 12 nt, Human
ccuguugcuuuu

SEQ ID NO: 2122840 - RNA, 17 nt, Human
ccuuagcaacagccgag

SEQ ID NO: 2122841 - RNA, 18 nt, Human
ccuuagccaguuguauau

SEQ ID NO: 2122842 - RNA, 14 nt, Human
ccuuagccucccug

SEQ ID NO: 2122843 - RNA, 15 nt, Human
ccuuagccucccuga

SEQ ID NO: 2122844 - RNA, 16 nt, Human
ccuuagccucccugaa

SEQ ID NO: 2122845 - RNA, 17 nt, Human
ccuuagcuuagaccuca

SEQ ID NO: 2122846 - RNA, 18 nt, Human
ccuuagcuuagaccucag

SEQ ID NO: 2122847 - RNA, 11 nt, Human
ccuuagcugcc

SEQ ID NO: 2122848 - RNA, 13 nt, Human
ccuuagcugccaa

SEQ ID NO: 2122849 - RNA, 15 nt, Human
ccuuagcugccaagc

SEQ ID NO: 2122850 - RNA, 20 nt, Human
ccuuagcugccaagccccau

SEQ ID NO: 2122851 - RNA, 21 nt, Human
ccuguucacucuacuuagcau

SEQ ID NO: 2122852 - RNA, 18 nt, Human
ccuguuagcuguuauuuc

SEQ ID NO: 2122853 - RNA, 13 nt, Human
ccuguucagcucc

SEQ ID NO: 2122854 - RNA, 21 nt, Human
ccuguuaccuaauuagagcag

SEQ ID NO: 2122855 - RNA, 22 nt, Human
ccuguuaccuaauuagagcaga

SEQ ID NO: 2122856 - RNA, 23 nt, Human
ccuguuaccuaauuagagcagau

SEQ ID NO: 2122857 - RNA, 13 nt, Human
ccugcuggaucuc

SEQ ID NO: 2122858 - RNA, 15 nt, Human
ccugcuggaucuccc

SEQ ID NO: 2122859 - RNA, 16 nt, Human
ccugcuggaucuccca

SEQ ID NO: 2122860 - RNA, 17 nt, Human
ccugcuggaucucccag

SEQ ID NO: 2122861 - RNA, 21 nt, Human
ccugcuggaucucccagggcu

SEQ ID NO: 2122862 - RNA, 22 nt, Human
ccugcuggaucucccagggcua

SEQ ID NO: 2122863 - RNA, 12 nt, Human
ccugcuggcccc

SEQ ID NO: 2122864 - RNA, 13 nt, Human
ccugcuggccccu

SEQ ID NO: 2122865 - RNA, 11 nt, Human
ccugcuggccc

SEQ ID NO: 2122866 - RNA, 22 nt, Human
ccugcugccgccucccagccug

SEQ ID NO: 2122867 - RNA, 21 nt, Human
ccuucuguccuacucuguguc

SEQ ID NO: 2122868 - RNA, 20 nt, Human
ccuucuguccuacucugugu

SEQ ID NO: 2122869 - RNA, 14 nt, Human
ccuucucuuaauuu

SEQ ID NO: 2122870 - RNA, 22 nt, Human
ccuucuguccuacucuguguca

SEQ ID NO: 2122871 - RNA, 16 nt, Human
ccuucucugaaggaca

SEQ ID NO: 2122872 - RNA, 14 nt, Human
ccuucucugaagga

SEQ ID NO: 2122873 - RNA, 13 nt, Human
ccuucucugccca

SEQ ID NO: 2122874 - RNA, 14 nt, Human
ccuucucugcccau

SEQ ID NO: 2122875 - RNA, 18 nt, Human
ccuucucugcccauuccc

SEQ ID NO: 2122876 - RNA, 19 nt, Human
ccuucucugcccauucccc

SEQ ID NO: 2122877 - RNA, 22 nt, Human
ccuucucugcccauuccccagc

SEQ ID NO: 2122878 - RNA, 13 nt, Human
ccuucucugcucc

SEQ ID NO: 2122879 - RNA, 14 nt, Human
ccuucucugcucca

SEQ ID NO: 2122880 - RNA, 16 nt, Human
ccuucucugcuccacc

SEQ ID NO: 2122881 - RNA, 17 nt, Human
ccuucucugcuccacca

SEQ ID NO: 2122882 - RNA, 20 nt, Human
ccuucucugcuccaccacau

SEQ ID NO: 2122883 - RNA, 22 nt, Human
ccuucucugcuccaccacaucc

SEQ ID NO: 2122884 - RNA, 20 nt, Human
ccuuccucuccacugccuuc

SEQ ID NO: 2122885 - RNA, 15 nt, Human
ccuuccucuccacug

SEQ ID NO: 2122886 - RNA, 14 nt, Human
ccuuccucuccacu

SEQ ID NO: 2122887 - RNA, 22 nt, Human
ccuuccucucauccuuuucucc

SEQ ID NO: 2122888 - RNA, 17 nt, Human
ccuuccucuccacugcc

SEQ ID NO: 2122889 - RNA, 16 nt, Human
ccuuccucuccacugc

SEQ ID NO: 2122890 - RNA, 16 nt, Human
ccuucccuugagcccu

SEQ ID NO: 2122891 - RNA, 12 nt, Human
ccuucccucucc

SEQ ID NO: 2122892 - RNA, 11 nt, Human
ccuucccuggc

SEQ ID NO: 2122893 - RNA, 12 nt, Human
ccuucccugcaa

SEQ ID NO: 2122894 - RNA, 20 nt, Human
ccuucccccucccagggcca

SEQ ID NO: 2122895 - RNA, 16 nt, Human
ccuucccccucccagg

SEQ ID NO: 2122896 - RNA, 17 nt, Human
ccuucccccucccaggg

SEQ ID NO: 2122897 - RNA, 19 nt, Human
ccuucccccuccaauccca

SEQ ID NO: 2122898 - RNA, 20 nt, Human
ccuuccccacugccugccca

SEQ ID NO: 2122899 - RNA, 12 nt, Human
ccuuccccacug

SEQ ID NO: 2122900 - RNA, 13 nt, Human
ccuuccccagccu

SEQ ID NO: 2122901 - RNA, 22 nt, Human
ccuuccccacugccugcccacc

SEQ ID NO: 2122902 - RNA, 15 nt, Human
ccuuccccagccucu

SEQ ID NO: 2122903 - RNA, 16 nt, Human
ccuuccccuccuucuc

SEQ ID NO: 2122904 - RNA, 19 nt, Human
ccuuccccucccuggcucc

SEQ ID NO: 2122905 - RNA, 22 nt, Human
ccuuccccucccuggcucccau

SEQ ID NO: 2122906 - RNA, 15 nt, Human
ccuuccccucccugg

SEQ ID NO: 2122907 - RNA, 17 nt, Human
ccuuccccucccuggcu

SEQ ID NO: 2122908 - RNA, 18 nt, Human
ccuuccccucccuggcuc

SEQ ID NO: 2122909 - RNA, 18 nt, Human
ccuuccccuugcccaggg

SEQ ID NO: 2122910 - RNA, 20 nt, Human
ccuuccccuugcccagggcu

SEQ ID NO: 2122911 - RNA, 22 nt, Human
ccuuccccuugcccagggcuca

SEQ ID NO: 2122912 - RNA, 13 nt, Human
ccuuuauuuuaga

SEQ ID NO: 2122913 - RNA, 14 nt, Human
ccuuuauuaaaauc

SEQ ID NO: 2122914 - RNA, 16 nt, Human
ccuuuauuaaaaucuu

SEQ ID NO: 2122915 - RNA, 15 nt, Human
ccuuucaaauuucac

SEQ ID NO: 2122916 - RNA, 16 nt, Human
ccuuucaaauuucaca

SEQ ID NO: 2122917 - RNA, 20 nt, Human
ccuuucccuccacuccuucc

SEQ ID NO: 2122918 - RNA, 12 nt, Human
ccuuucccucca

SEQ ID NO: 2122919 - RNA, 20 nt, Human
ccuugcucuccccugcccug

SEQ ID NO: 2122920 - RNA, 18 nt, Human
ccuugcucgcuguaaaau

SEQ ID NO: 2122921 - RNA, 11 nt, Human
ccuugcuaccu

SEQ ID NO: 2122922 - RNA, 12 nt, Human
ccuugcuaccuc

SEQ ID NO: 2122923 - RNA, 14 nt, Human
ccuugcuaccucaa

SEQ ID NO: 2122924 - RNA, 17 nt, Human
ccuugcuaccucaaggg

SEQ ID NO: 2122925 - RNA, 16 nt, Human
ccuugccuccugugua

SEQ ID NO: 2122926 - RNA, 21 nt, Human
ccuugcgcuuuugcuggucac

SEQ ID NO: 2122927 - RNA, 13 nt, Human
ccuugccagacau

SEQ ID NO: 2122928 - RNA, 19 nt, Human
ccuugcacacuccccugca

SEQ ID NO: 2122929 - RNA, 22 nt, Human
ccuugcacacuccccugcacug

SEQ ID NO: 2122930 - RNA, 15 nt, Human
ccuugcaagaaucag

SEQ ID NO: 2122931 - RNA, 12 nt, Human
ccuugcaccugc

SEQ ID NO: 2122932 - RNA, 13 nt, Human
ccuugcaccugca

SEQ ID NO: 2122933 - RNA, 14 nt, Human
ccuugcaccugcau

SEQ ID NO: 2122934 - RNA, 16 nt, Human
ccuugcaccugcaucc

SEQ ID NO: 2122935 - RNA, 15 nt, Human
ccuugcagcuaguuu

SEQ ID NO: 2122936 - RNA, 17 nt, Human
ccuugcaguucagcacc

SEQ ID NO: 2122937 - RNA, 19 nt, Human
ccuugcaguucagcaccac

SEQ ID NO: 2122938 - RNA, 20 nt, Human
ccuugcaguucagcaccacc

SEQ ID NO: 2122939 - RNA, 22 nt, Human
ccuugcaguucagcaccacccu

SEQ ID NO: 2122940 - RNA, 23 nt, Human
ccuugcaguucagcaccacccua

SEQ ID NO: 2122941 - RNA, 16 nt, Human
ccucgagguuucucaa

SEQ ID NO: 2122942 - RNA, 19 nt, Human
ccucgaagcgcgccacucg

SEQ ID NO: 2122943 - RNA, 18 nt, Human
ccucgaagcgcgccacuc

SEQ ID NO: 2122944 - RNA, 15 nt, Human
ccucgaacuggcugc

SEQ ID NO: 2122945 - RNA, 16 nt, Human
ccucgaacuggcugca

SEQ ID NO: 2122946 - RNA, 15 nt, Human
ccuccuuucuggcuu

SEQ ID NO: 2122947 - RNA, 23 nt, Human
ccuccgccauucucaagcccugc

SEQ ID NO: 2122948 - RNA, 14 nt, Human
ccuccgccaggcga

SEQ ID NO: 2122949 - RNA, 16 nt, Human
ccuccgccaggcgaga

SEQ ID NO: 2122950 - RNA, 16 nt, Human
ccuccguauuucagac

SEQ ID NO: 2122951 - RNA, 15 nt, Human
ccuccguauuucaga

SEQ ID NO: 2122952 - RNA, 16 nt, Human
ccucccuguccuccuc

SEQ ID NO: 2122953 - RNA, 15 nt, Human
ccucccuguccuccu

SEQ ID NO: 2122954 - RNA, 21 nt, Human
ccucccuguugaagcucuggu

SEQ ID NO: 2122955 - RNA, 14 nt, Human
ccucccuguccacc

SEQ ID NO: 2122956 - RNA, 15 nt, Human
ccucccuguccaccc

SEQ ID NO: 2122957 - RNA, 12 nt, Human
ccucccuguccu

SEQ ID NO: 2122958 - RNA, 11 nt, Human
ccucccugucc

SEQ ID NO: 2122959 - RNA, 14 nt, Human
ccucccuguccucc

SEQ ID NO: 2122960 - RNA, 14 nt, Human
ccucccuggccugu

SEQ ID NO: 2122961 - RNA, 20 nt, Human
ccucccuggagccuccacug

SEQ ID NO: 2122962 - RNA, 15 nt, Human
ccucccuggccuguu

SEQ ID NO: 2122963 - RNA, 12 nt, Human
ccucccuggcuc

SEQ ID NO: 2122964 - RNA, 13 nt, Human
ccucccuggcucc

SEQ ID NO: 2122965 - RNA, 14 nt, Human
ccucccuggcuccc

SEQ ID NO: 2122966 - RNA, 15 nt, Human
ccucccuggcuccca

SEQ ID NO: 2122967 - RNA, 16 nt, Human
ccucccuggcucccau

SEQ ID NO: 2122968 - RNA, 18 nt, Human
ccucccuggcucccauga

SEQ ID NO: 2122969 - RNA, 20 nt, Human
ccucccuggcucccaugacc

SEQ ID NO: 2122970 - RNA, 20 nt, Human
ccucugccugaagucacaca

SEQ ID NO: 2122971 - RNA, 11 nt, Human
ccucugccuga

SEQ ID NO: 2122972 - RNA, 23 nt, Human
ccucugccucugacacacagcuc

SEQ ID NO: 2122973 - RNA, 21 nt, Human
ccucugccucugacacacagc

SEQ ID NO: 2122974 - RNA, 20 nt, Human
ccucugccucugacacacag

SEQ ID NO: 2122975 - RNA, 12 nt, Human
ccucugccggcu

SEQ ID NO: 2122976 - RNA, 11 nt, Human
ccucugccuca

SEQ ID NO: 2122977 - RNA, 12 nt, Human
ccucugccucaa

SEQ ID NO: 2122978 - RNA, 13 nt, Human
ccucugccucaau

SEQ ID NO: 2122979 - RNA, 13 nt, Human
ccucucuaaccuc

SEQ ID NO: 2122980 - RNA, 16 nt, Human
ccucucuaaccuccuu

SEQ ID NO: 2122981 - RNA, 17 nt, Human
ccucucuaaccuccuuu

SEQ ID NO: 2122982 - RNA, 19 nt, Human
ccucucuaaccuccuuuac

SEQ ID NO: 2122983 - RNA, 20 nt, Human
ccucucuaaccuccuuuacc

SEQ ID NO: 2122984 - RNA, 21 nt, Human
ccucucggaaggcuggcuggg

SEQ ID NO: 2122985 - RNA, 19 nt, Human
ccucucgguggccagcagg

SEQ ID NO: 2122986 - RNA, 15 nt, Human
ccucggcuccuggac

SEQ ID NO: 2122987 - RNA, 19 nt, Human
ccucggcuccuggacucau

SEQ ID NO: 2122988 - RNA, 17 nt, Human
ccucucggaaggcuggc

SEQ ID NO: 2122989 - RNA, 19 nt, Human
ccucgggcgagucacugcc

SEQ ID NO: 2122990 - RNA, 15 nt, Human
ccucagccuccugag

SEQ ID NO: 2122991 - RNA, 23 nt, Human
ccuaggacauguucccuucuccu

SEQ ID NO: 2122992 - RNA, 16 nt, Human
ccuaggaauucccagc

SEQ ID NO: 2122993 - RNA, 17 nt, Human
ccuaggaauucccagcc

SEQ ID NO: 2122994 - RNA, 11 nt, Human
ccuagcugugu

SEQ ID NO: 2122995 - RNA, 21 nt, Human
ccuagcuugggaggcuucccc

SEQ ID NO: 2122996 - RNA, 13 nt, Human
ccuagcugugugc

SEQ ID NO: 2122997 - RNA, 17 nt, Human
ccuagcugugugcaguc

SEQ ID NO: 2122998 - RNA, 20 nt, Human
ccuagcuugggaggcuuccc

SEQ ID NO: 2122999 - RNA, 18 nt, Human
ccuaaugagaagucaaca

SEQ ID NO: 2123000 - RNA, 11 nt, Human
ccucaggcagg

SEQ ID NO: 2123001 - RNA, 13 nt, Human
ccucaggcaggaa

SEQ ID NO: 2123002 - RNA, 14 nt, Human
ccucaugccaaccc

SEQ ID NO: 2123003 - RNA, 11 nt, Human
ccucccaccuu

SEQ ID NO: 2123004 - RNA, 13 nt, Human
ccucccaccuuug

SEQ ID NO: 2123005 - RNA, 17 nt, Human
ccucccagaacacacuc

SEQ ID NO: 2123006 - RNA, 18 nt, Human
ccucccagaacacacucc

SEQ ID NO: 2123007 - RNA, 12 nt, Human
ccuccccagcag

SEQ ID NO: 2123008 - RNA, 16 nt, Human
ccuccccagcaggugg

SEQ ID NO: 2123009 - RNA, 17 nt, Human
ccuccccagcagguggg

SEQ ID NO: 2123010 - RNA, 20 nt, Human
ccuccccagcagguggggag

SEQ ID NO: 2123011 - RNA, 22 nt, Human
ccuccccaggggagagggucug

SEQ ID NO: 2123012 - RNA, 13 nt, Human
ccuccccaggccg

SEQ ID NO: 2123013 - RNA, 12 nt, Human
ccuccccagggg

SEQ ID NO: 2123014 - RNA, 14 nt, Human
ccuccccaggggag

SEQ ID NO: 2123015 - RNA, 10 nt, Human
ccugacucaa

SEQ ID NO: 2123016 - RNA, 16 nt, Human
ccugacucaggcauca

SEQ ID NO: 2123017 - RNA, 19 nt, Human
ccugacggcgcccccagug

SEQ ID NO: 2123018 - RNA, 20 nt, Human
ccugacggcgcccccagugu

SEQ ID NO: 2123019 - RNA, 21 nt, Human
ccugacggcgcccccagugug

SEQ ID NO: 2123020 - RNA, 16 nt, Human
ccugaccugucucacc

SEQ ID NO: 2123021 - RNA, 18 nt, Human
ccugaggggcaucugccc

SEQ ID NO: 2123022 - RNA, 19 nt, Human
ccugaggggcaucugcccc

SEQ ID NO: 2123023 - RNA, 20 nt, Human
ccugaggggcaucugccccu

SEQ ID NO: 2123024 - RNA, 22 nt, Human
ccugaggggcaucugccccucc

SEQ ID NO: 2123025 - RNA, 23 nt, Human
ccugaggggcaucugccccuccc

SEQ ID NO: 2123026 - RNA, 19 nt, Human
ccugagugaucccauuucu

SEQ ID NO: 2123027 - RNA, 12 nt, Human
ccugcagagaug

SEQ ID NO: 2123028 - RNA, 19 nt, Human
ccucugccugucuccccca

SEQ ID NO: 2123029 - RNA, 22 nt, Human
ccucugccugucccucucaggc

SEQ ID NO: 2123030 - RNA, 20 nt, Human
ccucugccugugcacggcca

SEQ ID NO: 2123031 - RNA, 15 nt, Human
ccucugccugucucc

SEQ ID NO: 2123032 - RNA, 14 nt, Human
ccucugccucaaug

SEQ ID NO: 2123033 - RNA, 19 nt, Human
ccucugccugaaccuucca

SEQ ID NO: 2123034 - RNA, 21 nt, Human
ccucugccugaaccuuccauc

SEQ ID NO: 2123035 - RNA, 19 nt, Human
ccucugccugucccucuca

SEQ ID NO: 2123036 - RNA, 21 nt, Human
ccucugccugaagucacacag

SEQ ID NO: 2123037 - RNA, 15 nt, Human
ccucuucuucuucag

SEQ ID NO: 2123038 - RNA, 12 nt, Human
ccucuucuuacu

SEQ ID NO: 2123039 - RNA, 14 nt, Human
ccucuucuuacuug

SEQ ID NO: 2123040 - RNA, 17 nt, Human
ccucuucuuacuugaug

SEQ ID NO: 2123041 - RNA, 16 nt, Human
ccucuucuucuucaga

SEQ ID NO: 2123042 - RNA, 17 nt, Human
ccucuucuucuucagaa

SEQ ID NO: 2123043 - RNA, 14 nt, Human
ccugcugccgccuc

SEQ ID NO: 2123044 - RNA, 15 nt, Human
ccugcugccgccucc

SEQ ID NO: 2123045 - RNA, 18 nt, Human
ccugcugccgccucccag

SEQ ID NO: 2123046 - RNA, 21 nt, Human
ccugcugccgccucccagccu

SEQ ID NO: 2123047 - RNA, 10 nt, Human
ccugcugcau

SEQ ID NO: 2123048 - RNA, 21 nt, Human
ccugccucuuaaauaaaccuu

SEQ ID NO: 2123049 - RNA, 14 nt, Human
ccugccucuuaaau

SEQ ID NO: 2123050 - RNA, 15 nt, Human
ccugccucuucucua

SEQ ID NO: 2123051 - RNA, 13 nt, Human
cccugaaccaucc

SEQ ID NO: 2123052 - RNA, 18 nt, Human
cccugaaccaucccugau

SEQ ID NO: 2123053 - RNA, 17 nt, Human
cccucgggcgagucacu

SEQ ID NO: 2123054 - RNA, 15 nt, Human
cccucggucuucggc

SEQ ID NO: 2123055 - RNA, 18 nt, Human
cccugaaagcccugagcu

SEQ ID NO: 2123056 - RNA, 22 nt, Human
cccucgaagcgcgccacucgcu

SEQ ID NO: 2123057 - RNA, 13 nt, Human
cccucgcuggccc

SEQ ID NO: 2123058 - RNA, 14 nt, Human
cccucgcuggcccc

SEQ ID NO: 2123059 - RNA, 15 nt, Human
cccucgcuggccccc

SEQ ID NO: 2123060 - RNA, 17 nt, Human
cccucgcuggcccccac

SEQ ID NO: 2123061 - RNA, 18 nt, Human
cccucgcuggcccccacu

SEQ ID NO: 2123062 - RNA, 19 nt, Human
cccucgcuggcccccacug

SEQ ID NO: 2123063 - RNA, 20 nt, Human
cccucgcuggcccccacugg

SEQ ID NO: 2123064 - RNA, 21 nt, Human
cccucgcuggcccccacuggc

SEQ ID NO: 2123065 - RNA, 23 nt, Human
cccucgcuggcccccacuggcug

SEQ ID NO: 2123066 - RNA, 22 nt, Human
cccuccgccuucacuccggugu

SEQ ID NO: 2123067 - RNA, 13 nt, Human
cccuccgccuuca

SEQ ID NO: 2123068 - RNA, 21 nt, Human
cccuccgccuucacuccggug

SEQ ID NO: 2123069 - RNA, 18 nt, Human
cccuccguggcaucaccu

SEQ ID NO: 2123070 - RNA, 23 nt, Human
cccuccguggcaucaccuuaggc

SEQ ID NO: 2123071 - RNA, 20 nt, Human
cccuccuaucaccuccccuc

SEQ ID NO: 2123072 - RNA, 21 nt, Human
cccuccuaucaccuccccucc

SEQ ID NO: 2123073 - RNA, 15 nt, Human
cccucgaagcgcgcc

SEQ ID NO: 2123074 - RNA, 19 nt, Human
cccucgaagcgcgccacuc

SEQ ID NO: 2123075 - RNA, 21 nt, Human
cccucgaagcgcgccacucgc

SEQ ID NO: 2123076 - RNA, 12 nt, Human
cccugagcucgg

SEQ ID NO: 2123077 - RNA, 18 nt, Human
cccugagaucagaguccu

SEQ ID NO: 2123078 - RNA, 16 nt, Human
cccugagcuuucugcu

SEQ ID NO: 2123079 - RNA, 22 nt, Human
cccugagcucgguggacccagg

SEQ ID NO: 2123080 - RNA, 17 nt, Human
cccugagacaaauggag

SEQ ID NO: 2123081 - RNA, 16 nt, Human
cccugagacaaaugga

SEQ ID NO: 2123082 - RNA, 23 nt, Human
cccugagacaaauggaggccugu

SEQ ID NO: 2123083 - RNA, 20 nt, Human
cccugagacaaauggaggcc

SEQ ID NO: 2123084 - RNA, 18 nt, Human
cccugacucucugugacc

SEQ ID NO: 2123085 - RNA, 13 nt, Human
cccugacucucug

SEQ ID NO: 2123086 - RNA, 17 nt, Human
cccugacucucugugac

SEQ ID NO: 2123087 - RNA, 17 nt, Human
cccugaccucccucuaa

SEQ ID NO: 2123088 - RNA, 15 nt, Human
cccugaccucacugu

SEQ ID NO: 2123089 - RNA, 12 nt, Human
cccugacccugc

SEQ ID NO: 2123090 - RNA, 15 nt, Human
cccugacccugcaga

SEQ ID NO: 2123091 - RNA, 17 nt, Human
cccugccccucccuuca

SEQ ID NO: 2123092 - RNA, 15 nt, Human
cccugccccgucacc

SEQ ID NO: 2123093 - RNA, 23 nt, Human
cccugccccucccuucaaccauu

SEQ ID NO: 2123094 - RNA, 21 nt, Human
cccugccccgucaccaucuca

SEQ ID NO: 2123095 - RNA, 12 nt, Human
cccugccccugc

SEQ ID NO: 2123096 - RNA, 19 nt, Human
cccugccccucccuucaac

SEQ ID NO: 2123097 - RNA, 18 nt, Human
cccugccccucccuucaa

SEQ ID NO: 2123098 - RNA, 17 nt, Human
cccugcccggcugcgga

SEQ ID NO: 2123099 - RNA, 14 nt, Human
cccugcccggcugc

SEQ ID NO: 2123100 - RNA, 14 nt, Human
cccugcccuagcuc

SEQ ID NO: 2123101 - RNA, 16 nt, Human
cccugcccuagcucca

SEQ ID NO: 2123102 - RNA, 17 nt, Human
cccugcccuagcuccac

SEQ ID NO: 2123103 - RNA, 23 nt, Human
cccugcccccuccccuucacacc

SEQ ID NO: 2123104 - RNA, 16 nt, Human
cccugccccucaugcc

SEQ ID NO: 2123105 - RNA, 13 nt, Human
cccugccccugcc

SEQ ID NO: 2123106 - RNA, 17 nt, Human
cccugccccugccccgu

SEQ ID NO: 2123107 - RNA, 18 nt, Human
cccugccccugccccguc

SEQ ID NO: 2123108 - RNA, 19 nt, Human
cccugccccugccccguca

SEQ ID NO: 2123109 - RNA, 18 nt, Human
cccugccccuucuacacu

SEQ ID NO: 2123110 - RNA, 23 nt, Human
cccugccccuucuacacucuccu

SEQ ID NO: 2123111 - RNA, 20 nt, Human
cccuggcucccacaggcccu

SEQ ID NO: 2123112 - RNA, 13 nt, Human
cccuggcucccau

SEQ ID NO: 2123113 - RNA, 14 nt, Human
cccuggcucccaug

SEQ ID NO: 2123114 - RNA, 15 nt, Human
cccuggcucccauga

SEQ ID NO: 2123115 - RNA, 23 nt, Human
cccuggcucccaugaccauacug

SEQ ID NO: 2123116 - RNA, 19 nt, Human
cccuggcucucagaaggua

SEQ ID NO: 2123117 - RNA, 12 nt, Human
cccugcccuggu

SEQ ID NO: 2123118 - RNA, 13 nt, Human
cccugcccugcug

SEQ ID NO: 2123119 - RNA, 11 nt, Human
cccugcccugc

SEQ ID NO: 2123120 - RNA, 18 nt, Human
cccugcccugguccaggg

SEQ ID NO: 2123121 - RNA, 14 nt, Human
cccugcccuggucc

SEQ ID NO: 2123122 - RNA, 15 nt, Human
cccugcccuggucca

SEQ ID NO: 2123123 - RNA, 13 nt, Human
cccugcccuggga

SEQ ID NO: 2123124 - RNA, 23 nt, Human
cccuggaucaguccuuugaucag

SEQ ID NO: 2123125 - RNA, 19 nt, Human
cccuggauccaucaggcca

SEQ ID NO: 2123126 - RNA, 22 nt, Human
cccuggaugaaguuaucuggcu

SEQ ID NO: 2123127 - RNA, 22 nt, Human
ccuaaucccugggcauugcuuu

SEQ ID NO: 2123128 - RNA, 21 nt, Human
ccuaaucccugggcauugcuu

SEQ ID NO: 2123129 - RNA, 20 nt, Human
ccuagccugugccucuggga

SEQ ID NO: 2123130 - RNA, 20 nt, Human
ccuagccgaccucagccuuc

SEQ ID NO: 2123131 - RNA, 18 nt, Human
ccuagccgaccucagccu

SEQ ID NO: 2123132 - RNA, 19 nt, Human
ccuagccgaccucagccuu

SEQ ID NO: 2123133 - RNA, 14 nt, Human
ccuagccgaccuca

SEQ ID NO: 2123134 - RNA, 15 nt, Human
ccuagccgaccucag

SEQ ID NO: 2123135 - RNA, 16 nt, Human
ccuagccgaccucagc

SEQ ID NO: 2123136 - RNA, 17 nt, Human
ccuagccgaccucagcc

SEQ ID NO: 2123137 - RNA, 17 nt, Human
ccuagcacuuugggagg

SEQ ID NO: 2123138 - RNA, 14 nt, Human
ccggcuccaggcuc

SEQ ID NO: 2123139 - RNA, 13 nt, Human
ccggcuccaggcu

SEQ ID NO: 2123140 - RNA, 12 nt, Human
ccggcuccaggc

SEQ ID NO: 2123141 - RNA, 15 nt, Human
ccggcuccaggcucc

SEQ ID NO: 2123142 - RNA, 15 nt, Human
ccggccccugcuggu

SEQ ID NO: 2123143 - RNA, 13 nt, Human
ccggcccuggggc

SEQ ID NO: 2123144 - RNA, 12 nt, Human
ccggcccugggg

SEQ ID NO: 2123145 - RNA, 18 nt, Human
ccggcaggguccuagaaa

SEQ ID NO: 2123146 - RNA, 17 nt, Human
ccggcaguucugggugc

SEQ ID NO: 2123147 - RNA, 22 nt, Human
ccggcaguucugggugcucccu

SEQ ID NO: 2123148 - RNA, 21 nt, Human
cccuuccucuccacugccuuc

SEQ ID NO: 2123149 - RNA, 14 nt, Human
cccuguccuccucg

SEQ ID NO: 2123150 - RNA, 15 nt, Human
cccuguccuccucgg

SEQ ID NO: 2123151 - RNA, 16 nt, Human
cccuguccuccucgga

SEQ ID NO: 2123152 - RNA, 17 nt, Human
ccgcccagcugcaccug

SEQ ID NO: 2123153 - RNA, 22 nt, Human
ccgcccagcugcaccugccagc

SEQ ID NO: 2123154 - RNA, 17 nt, Human
cccuuccuguccgcccu

SEQ ID NO: 2123155 - RNA, 15 nt, Human
cccuuccucuuucca

SEQ ID NO: 2123156 - RNA, 15 nt, Human
ccgaaaaucauauaa

SEQ ID NO: 2123157 - RNA, 19 nt, Human
ccgaaagggacuuggaagc

SEQ ID NO: 2123158 - RNA, 17 nt, Human
ccgaccagacaccuuga

SEQ ID NO: 2123159 - RNA, 13 nt, Human
ccgaccagacacc

SEQ ID NO: 2123160 - RNA, 15 nt, Human
ccgaccaccugccca

SEQ ID NO: 2123161 - RNA, 18 nt, Human
ccgaccagacaccuugac

SEQ ID NO: 2123162 - RNA, 17 nt, Human
ccgaauagcugggacua

SEQ ID NO: 2123163 - RNA, 16 nt, Human
ccgaauagcugggacu

SEQ ID NO: 2123164 - RNA, 19 nt, Human
ccgaaggaaaagggcuuuc

SEQ ID NO: 2123165 - RNA, 23 nt, Human
ccagagggguggguuccucuucc

SEQ ID NO: 2123166 - RNA, 13 nt, Human
ccagagagggugg

SEQ ID NO: 2123167 - RNA, 16 nt, Human
ccagagaggaaucaga

SEQ ID NO: 2123168 - RNA, 21 nt, Human
ccagagagccuggugcugcug

SEQ ID NO: 2123169 - RNA, 22 nt, Human
ccagagagccuggugcugcugc

SEQ ID NO: 2123170 - RNA, 21 nt, Human
ccagagagagaagugccccug

SEQ ID NO: 2123171 - RNA, 22 nt, Human
ccagagagagaagugccccugc

SEQ ID NO: 2123172 - RNA, 23 nt, Human
ccagagagagaagugccccugcu

SEQ ID NO: 2123173 - RNA, 14 nt, Human
ccagaucugcaccg

SEQ ID NO: 2123174 - RNA, 13 nt, Human
ccagaucuggucc

SEQ ID NO: 2123175 - RNA, 14 nt, Human
ccagauaagaaugc

SEQ ID NO: 2123176 - RNA, 21 nt, Human
ccagauacacccaaaguauca

SEQ ID NO: 2123177 - RNA, 21 nt, Human
ccagauacuucccauuuugga

SEQ ID NO: 2123178 - RNA, 19 nt, Human
ccagauauucaagucaccu

SEQ ID NO: 2123179 - RNA, 14 nt, Human
ccagaugcaccagc

SEQ ID NO: 2123180 - RNA, 13 nt, Human
ccagaugcaccag

SEQ ID NO: 2123181 - RNA, 19 nt, Human
ccagaucuggucccuugca

SEQ ID NO: 2123182 - RNA, 18 nt, Human
ccagaugcacaucccugg

SEQ ID NO: 2123183 - RNA, 21 nt, Human
ccagaugagcagaagcucucg

SEQ ID NO: 2123184 - RNA, 14 nt, Human
ccagagacaagacu

SEQ ID NO: 2123185 - RNA, 13 nt, Human
ccagagacaggaa

SEQ ID NO: 2123186 - RNA, 14 nt, Human
ccagagacaggaaa

SEQ ID NO: 2123187 - RNA, 15 nt, Human
ccagagacaggaaaa

SEQ ID NO: 2123188 - RNA, 12 nt, Human
ccagagacagga

SEQ ID NO: 2123189 - RNA, 14 nt, Human
ccagagagagaagu

SEQ ID NO: 2123190 - RNA, 18 nt, Human
ccagagagagaagugccc

SEQ ID NO: 2123191 - RNA, 19 nt, Human
ccagagagagaagugcccc

SEQ ID NO: 2123192 - RNA, 20 nt, Human
ccagagagagaagugccccu

SEQ ID NO: 2123193 - RNA, 15 nt, Human
ccagagacucagagg

SEQ ID NO: 2123194 - RNA, 23 nt, Human
ccagagacaggaaaauccucugg

SEQ ID NO: 2123195 - RNA, 23 nt, Human
ccagagaagcaucggagggaauu

SEQ ID NO: 2123196 - RNA, 14 nt, Human
ccagacuugcugaa

SEQ ID NO: 2123197 - RNA, 15 nt, Human
ccagacggcacccac

SEQ ID NO: 2123198 - RNA, 16 nt, Human
ccagacgguucaccag

SEQ ID NO: 2123199 - RNA, 16 nt, Human
ccagacggcacccacc

SEQ ID NO: 2123200 - RNA, 17 nt, Human
ccagacgguucaccagc

SEQ ID NO: 2123201 - RNA, 18 nt, Human
ccagacgguucaccagcc

SEQ ID NO: 2123202 - RNA, 19 nt, Human
ccagacgguucaccagccu

SEQ ID NO: 2123203 - RNA, 16 nt, Human
ccagacuacuugggag

SEQ ID NO: 2123204 - RNA, 20 nt, Human
ccagacgguucaccagccuc

SEQ ID NO: 2123205 - RNA, 18 nt, Human
ccagacgcacgugggucu

SEQ ID NO: 2123206 - RNA, 23 nt, Human
ccagacgcacgugggucuucagg

SEQ ID NO: 2123207 - RNA, 14 nt, Human
ccagaccuuuuauc

SEQ ID NO: 2123208 - RNA, 13 nt, Human
ccagaccugagcu

SEQ ID NO: 2123209 - RNA, 15 nt, Human
ccagaccugagcucc

SEQ ID NO: 2123210 - RNA, 16 nt, Human
ccagacccggcugcgu

SEQ ID NO: 2123211 - RNA, 17 nt, Human
ccagacccggcugcgug

SEQ ID NO: 2123212 - RNA, 21 nt, Human
ccacuuugguacauggccagu

SEQ ID NO: 2123213 - RNA, 14 nt, Human
ccacugaagcuggg

SEQ ID NO: 2123214 - RNA, 15 nt, Human
ccacugaagcuggga

SEQ ID NO: 2123215 - RNA, 16 nt, Human
ccacugaagcugggau

SEQ ID NO: 2123216 - RNA, 18 nt, Human
ccacugaagauagaagaa

SEQ ID NO: 2123217 - RNA, 19 nt, Human
ccacugaagauagaagaaa

SEQ ID NO: 2123218 - RNA, 15 nt, Human
ccacugacagccucc

SEQ ID NO: 2123219 - RNA, 16 nt, Human
ccacugacagccuccc

SEQ ID NO: 2123220 - RNA, 17 nt, Human
ccacugacagccuccca

SEQ ID NO: 2123221 - RNA, 19 nt, Human
ccacugacagccucccacc

SEQ ID NO: 2123222 - RNA, 19 nt, Human
ccacugagagaucugcugu

SEQ ID NO: 2123223 - RNA, 15 nt, Human
ccacugauggaaaca

SEQ ID NO: 2123224 - RNA, 21 nt, Human
ccacugauggaaacaaagugg

SEQ ID NO: 2123225 - RNA, 19 nt, Human
ccacugcaccgggccacag

SEQ ID NO: 2123226 - RNA, 17 nt, Human
ccacugcaccgggccac

SEQ ID NO: 2123227 - RNA, 14 nt, Human
ccacugcaccgggc

SEQ ID NO: 2123228 - RNA, 13 nt, Human
ccacugcaccggg

SEQ ID NO: 2123229 - RNA, 20 nt, Human
ccacugcacuauagccuagg

SEQ ID NO: 2123230 - RNA, 19 nt, Human
ccacugcacuauagccuag

SEQ ID NO: 2123231 - RNA, 23 nt, Human
ccacuucauucuugaaagcugug

SEQ ID NO: 2123232 - RNA, 21 nt, Human
ccacuucauucuugaaagcug

SEQ ID NO: 2123233 - RNA, 11 nt, Human
ccacugcacuc

SEQ ID NO: 2123234 - RNA, 14 nt, Human
ccacugcacuccag

SEQ ID NO: 2123235 - RNA, 17 nt, Human
ccacugcacuccagccu

SEQ ID NO: 2123236 - RNA, 21 nt, Human
ccacuuggaggccuuucaucc

SEQ ID NO: 2123237 - RNA, 23 nt, Human
ccacuugacacuauucacuaaaa

SEQ ID NO: 2123238 - RNA, 19 nt, Human
ccacuucuuguuccccacu

SEQ ID NO: 2123239 - RNA, 20 nt, Human
ccacuucuuguuccccacug

SEQ ID NO: 2123240 - RNA, 16 nt, Human
ccacuucuuuuauaac

SEQ ID NO: 2123241 - RNA, 22 nt, Human
ccaguauucuagguagugcccu

SEQ ID NO: 2123242 - RNA, 14 nt, Human
ccaguccugccugg

SEQ ID NO: 2123243 - RNA, 15 nt, Human
ccaguccugccuggc

SEQ ID NO: 2123244 - RNA, 16 nt, Human
ccaguccugccuggcc

SEQ ID NO: 2123245 - RNA, 17 nt, Human
ccaguccugccuggcca

SEQ ID NO: 2123246 - RNA, 12 nt, Human
ccaguccugcuc

SEQ ID NO: 2123247 - RNA, 13 nt, Human
ccaguccugcucu

SEQ ID NO: 2123248 - RNA, 14 nt, Human
ccaguccugcucuc

SEQ ID NO: 2123249 - RNA, 15 nt, Human
ccaguccugcucucu

SEQ ID NO: 2123250 - RNA, 18 nt, Human
ccaguccugccuggccag

SEQ ID NO: 2123251 - RNA, 19 nt, Human
ccaguccugccuggccagg

SEQ ID NO: 2123252 - RNA, 21 nt, Human
ccaguccugccuggccaggca

SEQ ID NO: 2123253 - RNA, 22 nt, Human
ccaguccugccuggccaggcag

SEQ ID NO: 2123254 - RNA, 17 nt, Human
ccaggcugcauagaagg

SEQ ID NO: 2123255 - RNA, 18 nt, Human
ccaggcugcauagaagga

SEQ ID NO: 2123256 - RNA, 21 nt, Human
ccaggcugcauagaaggagga

SEQ ID NO: 2123257 - RNA, 13 nt, Human
ccaggcugccaag

SEQ ID NO: 2123258 - RNA, 16 nt, Human
ccaggggaugggaggu

SEQ ID NO: 2123259 - RNA, 23 nt, Human
ccaggcagaucugugccccaugc

SEQ ID NO: 2123260 - RNA, 21 nt, Human
ccaggcagaucugugccccau

SEQ ID NO: 2123261 - RNA, 14 nt, Human
ccaggcaggcugug

SEQ ID NO: 2123262 - RNA, 21 nt, Human
ccaggaguuuaagaccagccu

SEQ ID NO: 2123263 - RNA, 23 nt, Human
ccaggaguuuaagaccagccugg

SEQ ID NO: 2123264 - RNA, 17 nt, Human
ccaggaguuugagacca

SEQ ID NO: 2123265 - RNA, 18 nt, Human
ccaggaguuugagaccag

SEQ ID NO: 2123266 - RNA, 17 nt, Human
ccaggaguuugaggcug

SEQ ID NO: 2123267 - RNA, 20 nt, Human
ccaggaguuugaggcugcag

SEQ ID NO: 2123268 - RNA, 21 nt, Human
ccaggaguuugaggcugcagc

SEQ ID NO: 2123269 - RNA, 22 nt, Human
ccaggaguuugaggcugcagcg

SEQ ID NO: 2123270 - RNA, 14 nt, Human
ccagcuugcucuuc

SEQ ID NO: 2123271 - RNA, 16 nt, Human
ccagcuugcucuucag

SEQ ID NO: 2123272 - RNA, 23 nt, Human
ccagcuugcucuucagugggaga

SEQ ID NO: 2123273 - RNA, 21 nt, Human
ccagcggcuggugcagggccu

SEQ ID NO: 2123274 - RNA, 22 nt, Human
ccagcggcuggugcagggccuc

SEQ ID NO: 2123275 - RNA, 22 nt, Human
ccagcgccuaguggggucuccc

SEQ ID NO: 2123276 - RNA, 13 nt, Human
ccagcggcugagu

SEQ ID NO: 2123277 - RNA, 16 nt, Human
ccagcuuguuauuuau

SEQ ID NO: 2123278 - RNA, 15 nt, Human
ccagcuuguuauuua

SEQ ID NO: 2123279 - RNA, 17 nt, Human
ccagcuuguuauuuaua

SEQ ID NO: 2123280 - RNA, 21 nt, Human
ccagcgagcccugguggcagu

SEQ ID NO: 2123281 - RNA, 13 nt, Human
ccagcagccugga

SEQ ID NO: 2123282 - RNA, 11 nt, Human
ccagcagccug

SEQ ID NO: 2123283 - RNA, 12 nt, Human
ccagcagccugg

SEQ ID NO: 2123284 - RNA, 18 nt, Human
cccagggccacucugccu

SEQ ID NO: 2123285 - RNA, 15 nt, Human
cccagggccagggcc

SEQ ID NO: 2123286 - RNA, 17 nt, Human
cccagggccagggcccu

SEQ ID NO: 2123287 - RNA, 18 nt, Human
cccagggccagggcccug

SEQ ID NO: 2123288 - RNA, 23 nt, Human
cccagggccacucugccucugcc

SEQ ID NO: 2123289 - RNA, 20 nt, Human
cccagggccagggcccugca

SEQ ID NO: 2123290 - RNA, 20 nt, Human
cccauccagucucccaacuu

SEQ ID NO: 2123291 - RNA, 13 nt, Human
cccaucccacacc

SEQ ID NO: 2123292 - RNA, 15 nt, Human
cccaucccacacccu

SEQ ID NO: 2123293 - RNA, 12 nt, Human
cccaucccaucc

SEQ ID NO: 2123294 - RNA, 13 nt, Human
cccaucccauccc

SEQ ID NO: 2123295 - RNA, 14 nt, Human
cccaucccauccca

SEQ ID NO: 2123296 - RNA, 15 nt, Human
cccaucccaucccau

SEQ ID NO: 2123297 - RNA, 16 nt, Human
cccaucccaucccauc

SEQ ID NO: 2123298 - RNA, 18 nt, Human
cccaucccaucccauccc

SEQ ID NO: 2123299 - RNA, 20 nt, Human
cccaggcuggcgugcagugg

SEQ ID NO: 2123300 - RNA, 19 nt, Human
cccaggcuggcgugcagug

SEQ ID NO: 2123301 - RNA, 21 nt, Human
cccagggauuuguccuugggg

SEQ ID NO: 2123302 - RNA, 21 nt, Human
cccagggagcggaaagcagcu

SEQ ID NO: 2123303 - RNA, 22 nt, Human
cccagggagcggaaagcagcuc

SEQ ID NO: 2123304 - RNA, 15 nt, Human
cccagcugucugugu

SEQ ID NO: 2123305 - RNA, 16 nt, Human
cccagcugucuguguc

SEQ ID NO: 2123306 - RNA, 23 nt, Human
cccagcugucugugucagccugu

SEQ ID NO: 2123307 - RNA, 18 nt, Human
cccaggcuggcgugcagu

SEQ ID NO: 2123308 - RNA, 22 nt, Human
cccagcccauucucucuccugu

SEQ ID NO: 2123309 - RNA, 16 nt, Human
cccagcuggugggaag

SEQ ID NO: 2123310 - RNA, 19 nt, Human
cccagcuggugggaagcgu

SEQ ID NO: 2123311 - RNA, 22 nt, Human
cccagcuggugggaagcgucug

SEQ ID NO: 2123312 - RNA, 16 nt, Human
cccagcaguuugggag

SEQ ID NO: 2123313 - RNA, 19 nt, Human
cccagcagguggggagggg

SEQ ID NO: 2123314 - RNA, 21 nt, Human
cccagcauccuuuucugcaga

SEQ ID NO: 2123315 - RNA, 17 nt, Human
cccagccaaacccuguc

SEQ ID NO: 2123316 - RNA, 19 nt, Human
cccagcccacuucugccau

SEQ ID NO: 2123317 - RNA, 12 nt, Human
cccagccacccc

SEQ ID NO: 2123318 - RNA, 17 nt, Human
cccagcccacuucugcc

SEQ ID NO: 2123319 - RNA, 17 nt, Human
cccagcccagcccagcu

SEQ ID NO: 2123320 - RNA, 12 nt, Human
cccagcccagcu

SEQ ID NO: 2123321 - RNA, 13 nt, Human
cccagcccagcug

SEQ ID NO: 2123322 - RNA, 15 nt, Human
cccagcccagcugcu

SEQ ID NO: 2123323 - RNA, 16 nt, Human
cccagcccagcugcuc

SEQ ID NO: 2123324 - RNA, 18 nt, Human
cccagcccagcugcucug

SEQ ID NO: 2123325 - RNA, 20 nt, Human
cccagcccagcugcucugcc

SEQ ID NO: 2123326 - RNA, 22 nt, Human
cccagcccagcugcucugccca

SEQ ID NO: 2123327 - RNA, 16 nt, Human
cccagcccagcuggug

SEQ ID NO: 2123328 - RNA, 21 nt, Human
cccagcccaggguucccccag

SEQ ID NO: 2123329 - RNA, 21 nt, Human
cccagcccauucucucuccug

SEQ ID NO: 2123330 - RNA, 18 nt, Human
cccagcccagcugguggg

SEQ ID NO: 2123331 - RNA, 13 nt, Human
cccagcccaucuu

SEQ ID NO: 2123332 - RNA, 16 nt, Human
cccagcccaucuugcc

SEQ ID NO: 2123333 - RNA, 21 nt, Human
cccagcccaucuugccuccau

SEQ ID NO: 2123334 - RNA, 23 nt, Human
cccauucugccugcccaggcccc

SEQ ID NO: 2123335 - RNA, 23 nt, Human
ccccaaaaccacagcccugucag

SEQ ID NO: 2123336 - RNA, 20 nt, Human
ccccaaaaccacagcccugu

SEQ ID NO: 2123337 - RNA, 22 nt, Human
ccccaaaaccacagcccuguca

SEQ ID NO: 2123338 - RNA, 12 nt, Human
ccccagcaggug

SEQ ID NO: 2123339 - RNA, 11 nt, Human
ccccagcaggu

SEQ ID NO: 2123340 - RNA, 15 nt, Human
ccccaaaaccacagc

SEQ ID NO: 2123341 - RNA, 16 nt, Human
ccccaaaaccacagcc

SEQ ID NO: 2123342 - RNA, 19 nt, Human
ccccaaaaccacagcccug

SEQ ID NO: 2123343 - RNA, 20 nt, Human
ccccaaaaaccucacccgag

SEQ ID NO: 2123344 - RNA, 11 nt, Human
cccauucuuug

SEQ ID NO: 2123345 - RNA, 20 nt, Human
cccauucuuugcuugaacac

SEQ ID NO: 2123346 - RNA, 21 nt, Human
cccauucuuugcuugaacaca

SEQ ID NO: 2123347 - RNA, 14 nt, Human
cccauugcccuggu

SEQ ID NO: 2123348 - RNA, 21 nt, Human
ccccauucugccugcccaggc

SEQ ID NO: 2123349 - RNA, 11 nt, Human
ccccagcccac

SEQ ID NO: 2123350 - RNA, 13 nt, Human
ccccgccccgccc

SEQ ID NO: 2123351 - RNA, 16 nt, Human
ccccgcucaugggccc

SEQ ID NO: 2123352 - RNA, 23 nt, Human
ccccgcucaugggccccucugac

SEQ ID NO: 2123353 - RNA, 13 nt, Human
ccccgccccacau

SEQ ID NO: 2123354 - RNA, 16 nt, Human
ccccgccccacauucc

SEQ ID NO: 2123355 - RNA, 17 nt, Human
ccccgccccacauuccg

SEQ ID NO: 2123356 - RNA, 20 nt, Human
ccccgccccacauuccgaca

SEQ ID NO: 2123357 - RNA, 16 nt, Human
ccccgccccgccccac

SEQ ID NO: 2123358 - RNA, 17 nt, Human
ccccgcauuccaggcuc

SEQ ID NO: 2123359 - RNA, 17 nt, Human
ccccgcccagcugcacc

SEQ ID NO: 2123360 - RNA, 23 nt, Human
ccccgcccagcugcaccugccag

SEQ ID NO: 2123361 - RNA, 13 nt, Human
cccccuucuccca

SEQ ID NO: 2123362 - RNA, 14 nt, Human
cccccuucucccac

SEQ ID NO: 2123363 - RNA, 15 nt, Human
cccccuucucccaca

SEQ ID NO: 2123364 - RNA, 17 nt, Human
cccccuucucccacacu

SEQ ID NO: 2123365 - RNA, 21 nt, Human
cccccuucucugcccauuccc

SEQ ID NO: 2123366 - RNA, 15 nt, Human
cccccuucucugcuc

SEQ ID NO: 2123367 - RNA, 16 nt, Human
cccccuucucugcucc

SEQ ID NO: 2123368 - RNA, 17 nt, Human
cccccuucucugcucca

SEQ ID NO: 2123369 - RNA, 22 nt, Human
cccccuucucugcuccaccaca

SEQ ID NO: 2123370 - RNA, 15 nt, Human
cccccuucagugccc

SEQ ID NO: 2123371 - RNA, 23 nt, Human
cccccuucagugcccaccaacau

SEQ ID NO: 2123372 - RNA, 14 nt, Human
cccccuucagugcc

SEQ ID NO: 2123373 - RNA, 21 nt, Human
ccccauucuuugcuugaacac

SEQ ID NO: 2123374 - RNA, 22 nt, Human
ccccauucuuugcuugaacaca

SEQ ID NO: 2123375 - RNA, 21 nt, Human
cccaagaauagaugcugacug

SEQ ID NO: 2123376 - RNA, 20 nt, Human
cccaagaauagaugcugacu

SEQ ID NO: 2123377 - RNA, 17 nt, Human
cccaagcucugcuccuc

SEQ ID NO: 2123378 - RNA, 11 nt, Human
cccaagcugga

SEQ ID NO: 2123379 - RNA, 19 nt, Human
cccaagcuggagugcagug

SEQ ID NO: 2123380 - RNA, 22 nt, Human
cccaagcuggagugcaguggug

SEQ ID NO: 2123381 - RNA, 17 nt, Human
cccacccccuccccagg

SEQ ID NO: 2123382 - RNA, 19 nt, Human
cccacccccuccccagggg

SEQ ID NO: 2123383 - RNA, 19 nt, Human
cccacccccuucagugccc

SEQ ID NO: 2123384 - RNA, 23 nt, Human
cccacccccuucagugcccacca

SEQ ID NO: 2123385 - RNA, 16 nt, Human
cccacccccuucucug

SEQ ID NO: 2123386 - RNA, 19 nt, Human
cccacccccuucucugcuc

SEQ ID NO: 2123387 - RNA, 22 nt, Human
cccacccccuucucugcuccac

SEQ ID NO: 2123388 - RNA, 18 nt, Human
cccaccaucaugucuggc

SEQ ID NO: 2123389 - RNA, 14 nt, Human
cccaaggaaagccc

SEQ ID NO: 2123390 - RNA, 19 nt, Human
cccaaggaaagccccagca

SEQ ID NO: 2123391 - RNA, 18 nt, Human
cccaccaugucugcccca

SEQ ID NO: 2123392 - RNA, 15 nt, Human
ccauugucucagagc

SEQ ID NO: 2123393 - RNA, 12 nt, Human
ccauugucuuua

SEQ ID NO: 2123394 - RNA, 14 nt, Human
ccauugucuuuaua

SEQ ID NO: 2123395 - RNA, 18 nt, Human
ccauugucuuuauaugaa

SEQ ID NO: 2123396 - RNA, 20 nt, Human
ccauugucuuuauaugaaca

SEQ ID NO: 2123397 - RNA, 22 nt, Human
ccauugucuuuauaugaacaua

SEQ ID NO: 2123398 - RNA, 23 nt, Human
ccauugucuuuauaugaacauag

SEQ ID NO: 2123399 - RNA, 23 nt, Human
cccaaccugcucuccucuugcca

SEQ ID NO: 2123400 - RNA, 15 nt, Human
cccaacgaaaagcac

SEQ ID NO: 2123401 - RNA, 16 nt, Human
cccaacgaaaagcaca

SEQ ID NO: 2123402 - RNA, 19 nt, Human
cccaacgaaaagcacaucc

SEQ ID NO: 2123403 - RNA, 14 nt, Human
cccaagaacagcag

SEQ ID NO: 2123404 - RNA, 22 nt, Human
cccaagaacagcaggcccaccu

SEQ ID NO: 2123405 - RNA, 23 nt, Human
cccaagaacagcaggcccaccua

SEQ ID NO: 2123406 - RNA, 14 nt, Human
cccaagaaggcugg

SEQ ID NO: 2123407 - RNA, 15 nt, Human
cccaagaaggcuggg

SEQ ID NO: 2123408 - RNA, 16 nt, Human
cccaagaaggcugggg

SEQ ID NO: 2123409 - RNA, 12 nt, Human
cccaacuguuau

SEQ ID NO: 2123410 - RNA, 21 nt, Human
cccaacugcaagucacaaagg

SEQ ID NO: 2123411 - RNA, 21 nt, Human
cccaaccugcucuccucuugc

SEQ ID NO: 2123412 - RNA, 14 nt, Human
cccaaccugcucuc

SEQ ID NO: 2123413 - RNA, 13 nt, Human
cccaaccugcucu

SEQ ID NO: 2123414 - RNA, 12 nt, Human
ccauugugugag

SEQ ID NO: 2123415 - RNA, 22 nt, Human
cccaaggaaagccccagcacua

SEQ ID NO: 2123416 - RNA, 13 nt, Human
ccaugagccucag

SEQ ID NO: 2123417 - RNA, 18 nt, Human
ccaugacuugagaaacaa

SEQ ID NO: 2123418 - RNA, 15 nt, Human
ccaugacugcauuuu

SEQ ID NO: 2123419 - RNA, 17 nt, Human
ccaugacugcauuuuac

SEQ ID NO: 2123420 - RNA, 16 nt, Human
ccaugucucucagaau

SEQ ID NO: 2123421 - RNA, 17 nt, Human
ccaugucugccccauca

SEQ ID NO: 2123422 - RNA, 13 nt, Human
ccaugggggcagg

SEQ ID NO: 2123423 - RNA, 14 nt, Human
ccaugggggcaggg

SEQ ID NO: 2123424 - RNA, 17 nt, Human
ccaugggccuccugugu

SEQ ID NO: 2123425 - RNA, 20 nt, Human
caauuggauacgacaacuug

SEQ ID NO: 2123426 - RNA, 18 nt, Human
caaugcugcgucucccau

SEQ ID NO: 2123427 - RNA, 12 nt, Human
caaugcuggcug

SEQ ID NO: 2123428 - RNA, 19 nt, Human
caauuguaaaacugaggca

SEQ ID NO: 2123429 - RNA, 22 nt, Human
caauugggauggcgcuaggcau

SEQ ID NO: 2123430 - RNA, 15 nt, Human
caauggcagccuugg

SEQ ID NO: 2123431 - RNA, 14 nt, Human
caauggcagccuug

SEQ ID NO: 2123432 - RNA, 13 nt, Human
caauggcagccuu

SEQ ID NO: 2123433 - RNA, 15 nt, Human
caaugcgaaugguag

SEQ ID NO: 2123434 - RNA, 19 nt, Human
caaugcgaaugguagucua

SEQ ID NO: 2123435 - RNA, 16 nt, Human
caaucagauuuuccug

SEQ ID NO: 2123436 - RNA, 15 nt, Human
caaucaacucuaaua

SEQ ID NO: 2123437 - RNA, 12 nt, Human
caaucaagauaa

SEQ ID NO: 2123438 - RNA, 16 nt, Human
caaucaagauaaagga

SEQ ID NO: 2123439 - RNA, 17 nt, Human
caaucaagauaaaggac

SEQ ID NO: 2123440 - RNA, 14 nt, Human
caaucaaaucugcu

SEQ ID NO: 2123441 - RNA, 18 nt, Human
caaucaaaggaaaauagu

SEQ ID NO: 2123442 - RNA, 17 nt, Human
caauauuguacaguuuu

SEQ ID NO: 2123443 - RNA, 18 nt, Human
caauauuguacaguuuuu

SEQ ID NO: 2123444 - RNA, 14 nt, Human
caauauuguuucua

SEQ ID NO: 2123445 - RNA, 15 nt, Human
caauauuuaaggaga

SEQ ID NO: 2123446 - RNA, 16 nt, Human
caauauuuaaggagau

SEQ ID NO: 2123447 - RNA, 19 nt, Human
caauauuuaaggagaugua

SEQ ID NO: 2123448 - RNA, 22 nt, Human
caauauuuaaggagauguaaga

SEQ ID NO: 2123449 - RNA, 13 nt, Human
caauauuuauuau

SEQ ID NO: 2123450 - RNA, 14 nt, Human
caauauuuauuauu

SEQ ID NO: 2123451 - RNA, 12 nt, Human
caauauuuauua

SEQ ID NO: 2123452 - RNA, 11 nt, Human
caauauuuucc

SEQ ID NO: 2123453 - RNA, 13 nt, Human
caauauuuuccau

SEQ ID NO: 2123454 - RNA, 15 nt, Human
caauauuuuccauga

SEQ ID NO: 2123455 - RNA, 13 nt, Human
caauauuuguaga

SEQ ID NO: 2123456 - RNA, 14 nt, Human
caauauuuguagaa

SEQ ID NO: 2123457 - RNA, 15 nt, Human
caauauuuguagaag

SEQ ID NO: 2123458 - RNA, 11 nt, Human
caauauuuuaa

SEQ ID NO: 2123459 - RNA, 13 nt, Human
caauauuuuaagc

SEQ ID NO: 2123460 - RNA, 14 nt, Human
caauauuuuaagca

SEQ ID NO: 2123461 - RNA, 16 nt, Human
caauauuuuaagcauu

SEQ ID NO: 2123462 - RNA, 17 nt, Human
caauauuuuaagcauua

SEQ ID NO: 2123463 - RNA, 23 nt, Human
caauauuuuaagcauuacucuug

SEQ ID NO: 2123464 - RNA, 16 nt, Human
caauauuuuccaugaa

SEQ ID NO: 2123465 - RNA, 19 nt, Human
caauauuuuccaugaaaau

SEQ ID NO: 2123466 - RNA, 20 nt, Human
caauauuuuccaugaaaaug

SEQ ID NO: 2123467 - RNA, 22 nt, Human
caauauuuuccaugaaaaugca

SEQ ID NO: 2123468 - RNA, 15 nt, Human
caauauuguacaguu

SEQ ID NO: 2123469 - RNA, 16 nt, Human
caauauuguacaguuu

SEQ ID NO: 2123470 - RNA, 18 nt, Human
caauugugagccaccacg

SEQ ID NO: 2123471 - RNA, 21 nt, Human
caauugugagccaccacgucc

SEQ ID NO: 2123472 - RNA, 14 nt, Human
caauuuauucaaga

SEQ ID NO: 2123473 - RNA, 17 nt, Human
caauuuauucaagaaaa

SEQ ID NO: 2123474 - RNA, 16 nt, Human
caauuuauugcacaaa

SEQ ID NO: 2123475 - RNA, 22 nt, Human
caauuuauugcacaaaauauaa

SEQ ID NO: 2123476 - RNA, 13 nt, Human
caauuuauuuuau

SEQ ID NO: 2123477 - RNA, 14 nt, Human
caauuuauuuuauu

SEQ ID NO: 2123478 - RNA, 19 nt, Human
caauuuauuuuauuuuagc

SEQ ID NO: 2123479 - RNA, 16 nt, Human
caagcucugcuccucu

SEQ ID NO: 2123480 - RNA, 15 nt, Human
caagcucugcuccuc

SEQ ID NO: 2123481 - RNA, 17 nt, Human
caagcuccaucuccacu

SEQ ID NO: 2123482 - RNA, 21 nt, Human
caagcuccaucuccacuccag

SEQ ID NO: 2123483 - RNA, 20 nt, Human
caaggauugcuacuguccua

SEQ ID NO: 2123484 - RNA, 19 nt, Human
caaggauugcuacuguccu

SEQ ID NO: 2123485 - RNA, 17 nt, Human
caaggccagaguggccu

SEQ ID NO: 2123486 - RNA, 19 nt, Human
caaggccagcaagguggag

SEQ ID NO: 2123487 - RNA, 21 nt, Human
caaggccagcaagguggagug

SEQ ID NO: 2123488 - RNA, 22 nt, Human
caaggccagcaagguggagugg

SEQ ID NO: 2123489 - RNA, 23 nt, Human
caaggccagcaagguggagugga

SEQ ID NO: 2123490 - RNA, 21 nt, Human
caaggccagaguggccuggcc

SEQ ID NO: 2123491 - RNA, 22 nt, Human
caaggccagaguggccuggcca

SEQ ID NO: 2123492 - RNA, 18 nt, Human
caaggccagaguggccug

SEQ ID NO: 2123493 - RNA, 19 nt, Human
caaggccagaguggccugg

SEQ ID NO: 2123494 - RNA, 20 nt, Human
caaggccagaguggccuggc

SEQ ID NO: 2123495 - RNA, 18 nt, Human
caaguaagaagacaugaa

SEQ ID NO: 2123496 - RNA, 14 nt, Human
caaguaagaagaca

SEQ ID NO: 2123497 - RNA, 16 nt, Human
caaguaagaagacaug

SEQ ID NO: 2123498 - RNA, 13 nt, Human
caaguaagaagac

SEQ ID NO: 2123499 - RNA, 22 nt, Human
caaguaagaagacaugaaccaa

SEQ ID NO: 2123500 - RNA, 12 nt, Human
caaggccccaga

SEQ ID NO: 2123501 - RNA, 14 nt, Human
caaggccccagaga

SEQ ID NO: 2123502 - RNA, 15 nt, Human
caaggccccagagac

SEQ ID NO: 2123503 - RNA, 16 nt, Human
caaggccccagagacu

SEQ ID NO: 2123504 - RNA, 17 nt, Human
caaggccccagagacuc

SEQ ID NO: 2123505 - RNA, 21 nt, Human
caaggccccagagacucagag

SEQ ID NO: 2123506 - RNA, 21 nt, Human
caaguuccucuagugcccucc

SEQ ID NO: 2123507 - RNA, 12 nt, Human
caaguucaagga

SEQ ID NO: 2123508 - RNA, 14 nt, Human
caaguucaaggacc

SEQ ID NO: 2123509 - RNA, 14 nt, Human
caaguauucugccu

SEQ ID NO: 2123510 - RNA, 15 nt, Human
caaguauucugccuu

SEQ ID NO: 2123511 - RNA, 18 nt, Human
caaguauucugccuuugc

SEQ ID NO: 2123512 - RNA, 23 nt, Human
caaguauucugccuuugcagaaa

SEQ ID NO: 2123513 - RNA, 15 nt, Human
caaguuauuaauuuc

SEQ ID NO: 2123514 - RNA, 21 nt, Human
caaguuauuaauuucuucaca

SEQ ID NO: 2123515 - RNA, 19 nt, Human
caaguuauugacaaacucu

SEQ ID NO: 2123516 - RNA, 23 nt, Human
caaguaaauagcaacaugcuuca

SEQ ID NO: 2123517 - RNA, 13 nt, Human
caagcaagaaaca

SEQ ID NO: 2123518 - RNA, 19 nt, Human
caagcaaaggugaagagac

SEQ ID NO: 2123519 - RNA, 14 nt, Human
caagcaaauguuac

SEQ ID NO: 2123520 - RNA, 15 nt, Human
caagcaaauguuaca

SEQ ID NO: 2123521 - RNA, 18 nt, Human
caagcaagaaacacuggg

SEQ ID NO: 2123522 - RNA, 14 nt, Human
caagcaauccuccu

SEQ ID NO: 2123523 - RNA, 15 nt, Human
caagcaauccuccug

SEQ ID NO: 2123524 - RNA, 17 nt, Human
caagcaauccuccugag

SEQ ID NO: 2123525 - RNA, 19 nt, Human
caagauccugucuuuaagg

SEQ ID NO: 2123526 - RNA, 11 nt, Human
caagaccaaaa

SEQ ID NO: 2123527 - RNA, 18 nt, Human
caagaccaaaaugacaau

SEQ ID NO: 2123528 - RNA, 15 nt, Human
caagaucuuucagga

SEQ ID NO: 2123529 - RNA, 19 nt, Human
caagaugagagaacuggag

SEQ ID NO: 2123530 - RNA, 22 nt, Human
caagauccugucuuuaaggaaa

SEQ ID NO: 2123531 - RNA, 12 nt, Human
caagaucuuuca

SEQ ID NO: 2123532 - RNA, 13 nt, Human
caagaucuuucag

SEQ ID NO: 2123533 - RNA, 14 nt, Human
caagaucuuucagg

SEQ ID NO: 2123534 - RNA, 18 nt, Human
caagaugccaucuguguc

SEQ ID NO: 2123535 - RNA, 22 nt, Human
caagauuuugaaugcuuccuga

SEQ ID NO: 2123536 - RNA, 16 nt, Human
caagcaaaaggagaga

SEQ ID NO: 2123537 - RNA, 13 nt, Human
caagcaccuccug

SEQ ID NO: 2123538 - RNA, 17 nt, Human
caagcacaucugcauuu

SEQ ID NO: 2123539 - RNA, 20 nt, Human
caagcacaucugcauuuuca

SEQ ID NO: 2123540 - RNA, 17 nt, Human
caagcacagugccugca

SEQ ID NO: 2123541 - RNA, 16 nt, Human
caagcaccagggaaga

SEQ ID NO: 2123542 - RNA, 18 nt, Human
caagcaccuagccucgcu

SEQ ID NO: 2123543 - RNA, 14 nt, Human
caagcaccuccugc

SEQ ID NO: 2123544 - RNA, 16 nt, Human
caaccccuucgcuccu

SEQ ID NO: 2123545 - RNA, 14 nt, Human
caaccccuucgcuc

SEQ ID NO: 2123546 - RNA, 17 nt, Human
caaccccuucgcuccug

SEQ ID NO: 2123547 - RNA, 21 nt, Human
caaccccuguggagcccgcac

SEQ ID NO: 2123548 - RNA, 17 nt, Human
caacuaggcuucagcau

SEQ ID NO: 2123549 - RNA, 22 nt, Human
caaccccuguggagcccgcacc

SEQ ID NO: 2123550 - RNA, 18 nt, Human
caacuauauuaucaugca

SEQ ID NO: 2123551 - RNA, 19 nt, Human
caacuauauuaucaugcaa

SEQ ID NO: 2123552 - RNA, 14 nt, Human
caacccccagccug

SEQ ID NO: 2123553 - RNA, 17 nt, Human
caacccccaccccacac

SEQ ID NO: 2123554 - RNA, 18 nt, Human
caacccccaccccacacu

SEQ ID NO: 2123555 - RNA, 23 nt, Human
caacccccaccccacacuuguuc

SEQ ID NO: 2123556 - RNA, 11 nt, Human
caacccccacc

SEQ ID NO: 2123557 - RNA, 12 nt, Human
caacccccaccc

SEQ ID NO: 2123558 - RNA, 13 nt, Human
caacccccacccc

SEQ ID NO: 2123559 - RNA, 14 nt, Human
caacccccacccca

SEQ ID NO: 2123560 - RNA, 17 nt, Human
caacuccaguacuggag

SEQ ID NO: 2123561 - RNA, 19 nt, Human
caacuccaguacuggagcu

SEQ ID NO: 2123562 - RNA, 20 nt, Human
caacuccaguacuggagcuu

SEQ ID NO: 2123563 - RNA, 22 nt, Human
caacuccaguacuggagcuucu

SEQ ID NO: 2123564 - RNA, 11 nt, Human
caagacauugu

SEQ ID NO: 2123565 - RNA, 13 nt, Human
caagacauuguca

SEQ ID NO: 2123566 - RNA, 14 nt, Human
caagacauugucaa

SEQ ID NO: 2123567 - RNA, 17 nt, Human
caagacauugucaauaa

SEQ ID NO: 2123568 - RNA, 18 nt, Human
caagacauugucaauaaa

SEQ ID NO: 2123569 - RNA, 18 nt, Human
caagaaucagugcaaaga

SEQ ID NO: 2123570 - RNA, 19 nt, Human
caagaaucagugcaaagau

SEQ ID NO: 2123571 - RNA, 18 nt, Human
caagaauagaugcugacu

SEQ ID NO: 2123572 - RNA, 16 nt, Human
cacggaagagccuugc

SEQ ID NO: 2123573 - RNA, 22 nt, Human
cacggaagagccuugcggaagg

SEQ ID NO: 2123574 - RNA, 17 nt, Human
cacgcuuucuagcuguu

SEQ ID NO: 2123575 - RNA, 20 nt, Human
cacggaaaaugccaaucucu

SEQ ID NO: 2123576 - RNA, 16 nt, Human
cacuccagaccccugg

SEQ ID NO: 2123577 - RNA, 14 nt, Human
cacuccagaccccu

SEQ ID NO: 2123578 - RNA, 10 nt, Human
cacuccacca

SEQ ID NO: 2123579 - RNA, 11 nt, Human
cacuccaccac

SEQ ID NO: 2123580 - RNA, 19 nt, Human
cacuccaccacccaaaagu

SEQ ID NO: 2123581 - RNA, 15 nt, Human
cacuagaacucucca

SEQ ID NO: 2123582 - RNA, 17 nt, Human
cacuagaacucuccauc

SEQ ID NO: 2123583 - RNA, 21 nt, Human
cacuacugcuaccacaacuau

SEQ ID NO: 2123584 - RNA, 15 nt, Human
cacgcuggagugcag

SEQ ID NO: 2123585 - RNA, 20 nt, Human
cacgcuggagugcagugagc

SEQ ID NO: 2123586 - RNA, 18 nt, Human
cacgcuggagugcaguga

SEQ ID NO: 2123587 - RNA, 17 nt, Human
cacgcuggagugcagug

SEQ ID NO: 2123588 - RNA, 16 nt, Human
cacgcuggagugcagu

SEQ ID NO: 2123589 - RNA, 13 nt, Human
cacgcugucucca

SEQ ID NO: 2123590 - RNA, 14 nt, Human
cacgcugucuccag

SEQ ID NO: 2123591 - RNA, 15 nt, Human
cacgcugucuccaga

SEQ ID NO: 2123592 - RNA, 16 nt, Human
cacgcugucuccagac

SEQ ID NO: 2123593 - RNA, 17 nt, Human
cacgcugucuccagacc

SEQ ID NO: 2123594 - RNA, 21 nt, Human
cacgcuggagugcagugagcc

SEQ ID NO: 2123595 - RNA, 19 nt, Human
cacgcuugacaggacagca

SEQ ID NO: 2123596 - RNA, 22 nt, Human
cacgcuugacaggacagcaugg

SEQ ID NO: 2123597 - RNA, 14 nt, Human
cacgcuuucuagcu

SEQ ID NO: 2123598 - RNA, 18 nt, Human
cacgcugucuccagaccc

SEQ ID NO: 2123599 - RNA, 19 nt, Human
cacgcugucuccagacccc

SEQ ID NO: 2123600 - RNA, 20 nt, Human
cacgcugucuccagaccccc

SEQ ID NO: 2123601 - RNA, 23 nt, Human
cacgcugucuccagacccccacc

SEQ ID NO: 2123602 - RNA, 16 nt, Human
cacgcugugggcaggu

SEQ ID NO: 2123603 - RNA, 18 nt, Human
cacgcugugggcaggugg

SEQ ID NO: 2123604 - RNA, 22 nt, Human
cacgcugugggcaggugggagc

SEQ ID NO: 2123605 - RNA, 19 nt, Human
cacugaaguuaacagagac

SEQ ID NO: 2123606 - RNA, 22 nt, Human
cacugaaguuaacagagacaga

SEQ ID NO: 2123607 - RNA, 20 nt, Human
cacugaaggcuuucagggcc

SEQ ID NO: 2123608 - RNA, 21 nt, Human
cacugaaggcuuucagggccu

SEQ ID NO: 2123609 - RNA, 22 nt, Human
cacugaaggcuuucagggccuc

SEQ ID NO: 2123610 - RNA, 17 nt, Human
cacugaagcuuuuuagu

SEQ ID NO: 2123611 - RNA, 17 nt, Human
cacugaagcugggauuc

SEQ ID NO: 2123612 - RNA, 14 nt, Human
cacugaagauagaa

SEQ ID NO: 2123613 - RNA, 16 nt, Human
cacugaagauagaaga

SEQ ID NO: 2123614 - RNA, 17 nt, Human
cacugaagauagaagaa

SEQ ID NO: 2123615 - RNA, 13 nt, Human
cacugaagcuggg

SEQ ID NO: 2123616 - RNA, 17 nt, Human
cacuccagaccccuggc

SEQ ID NO: 2123617 - RNA, 14 nt, Human
cacuccaccaccca

SEQ ID NO: 2123618 - RNA, 15 nt, Human
cacuccaccacccaa

SEQ ID NO: 2123619 - RNA, 18 nt, Human
cacuccaccacccaaaag

SEQ ID NO: 2123620 - RNA, 12 nt, Human
cacccugcucuc

SEQ ID NO: 2123621 - RNA, 11 nt, Human
cacccuggaau

SEQ ID NO: 2123622 - RNA, 21 nt, Human
cacccuggaggauuucaucuc

SEQ ID NO: 2123623 - RNA, 17 nt, Human
cacccugauuucuugcu

SEQ ID NO: 2123624 - RNA, 16 nt, Human
cacccucgaagcgcgc

SEQ ID NO: 2123625 - RNA, 24 nt, Human
cacccucgaagcgcgccacucgcu

SEQ ID NO: 2123626 - RNA, 19 nt, Human
cacccucgaagcgcgccac

SEQ ID NO: 2123627 - RNA, 23 nt, Human
cacccucgaagcgcgccacucgc

SEQ ID NO: 2123628 - RNA, 12 nt, Human
cacccuccuuuc

SEQ ID NO: 2123629 - RNA, 22 nt, Human
caccugccagccuggcuucugg

SEQ ID NO: 2123630 - RNA, 14 nt, Human
caccuauaauacca

SEQ ID NO: 2123631 - RNA, 20 nt, Human
caccuauaauaccagcuacu

SEQ ID NO: 2123632 - RNA, 16 nt, Human
caccuauagucccagc

SEQ ID NO: 2123633 - RNA, 18 nt, Human
caccugccacuaggcugg

SEQ ID NO: 2123634 - RNA, 21 nt, Human
caccugccacuaggcugggug

SEQ ID NO: 2123635 - RNA, 23 nt, Human
caccugccacuaggcugggugcc

SEQ ID NO: 2123636 - RNA, 13 nt, Human
caccugccagccu

SEQ ID NO: 2123637 - RNA, 14 nt, Human
caccugccagccug

SEQ ID NO: 2123638 - RNA, 15 nt, Human
caccugccagccugg

SEQ ID NO: 2123639 - RNA, 16 nt, Human
caccugccagccuggc

SEQ ID NO: 2123640 - RNA, 17 nt, Human
caccugccagccuggcu

SEQ ID NO: 2123641 - RNA, 20 nt, Human
caccugccagccuggcuucu

SEQ ID NO: 2123642 - RNA, 17 nt, Human
cacccuggggagaaagu

SEQ ID NO: 2123643 - RNA, 20 nt, Human
cacccuguccaaacugccua

SEQ ID NO: 2123644 - RNA, 23 nt, Human
cacccuguccaaacugccuaagc

SEQ ID NO: 2123645 - RNA, 14 nt, Human
caccuauaaaacag

SEQ ID NO: 2123646 - RNA, 16 nt, Human
caccuauaaaacaggu

SEQ ID NO: 2123647 - RNA, 19 nt, Human
caccuauaaaacaggucaa

SEQ ID NO: 2123648 - RNA, 22 nt, Human
cacaucuugcucugcugacaga

SEQ ID NO: 2123649 - RNA, 21 nt, Human
cacaucuugcucugcugacag

SEQ ID NO: 2123650 - RNA, 20 nt, Human
cacaucuugcucugcugaca

SEQ ID NO: 2123651 - RNA, 15 nt, Human
cacaucuugcucugc

SEQ ID NO: 2123652 - RNA, 22 nt, Human
cacaucuucccuagaggguucc

SEQ ID NO: 2123653 - RNA, 23 nt, Human
cacauccauuucaucuauuucug

SEQ ID NO: 2123654 - RNA, 21 nt, Human
cacauccauuucaucuauuuc

SEQ ID NO: 2123655 - RNA, 18 nt, Human
cacauccaggcaauggcc

SEQ ID NO: 2123656 - RNA, 21 nt, Human
cacauccaggcaauggccuaa

SEQ ID NO: 2123657 - RNA, 14 nt, Human
cacaucuugcucug

SEQ ID NO: 2123658 - RNA, 13 nt, Human
cacaucuugcucu

SEQ ID NO: 2123659 - RNA, 14 nt, Human
cacccauccuagag

SEQ ID NO: 2123660 - RNA, 15 nt, Human
cacccaugaagacag

SEQ ID NO: 2123661 - RNA, 14 nt, Human
cacccaugaagaca

SEQ ID NO: 2123662 - RNA, 14 nt, Human
cacccagacagcuc

SEQ ID NO: 2123663 - RNA, 16 nt, Human
cacccagacagcuccc

SEQ ID NO: 2123664 - RNA, 22 nt, Human
cacccagacagcucccucugcc

SEQ ID NO: 2123665 - RNA, 23 nt, Human
caccaggcacgaacccaccugcu

SEQ ID NO: 2123666 - RNA, 24 nt, Human
caccaggcacgaacccaccugcug

SEQ ID NO: 2123667 - RNA, 19 nt, Human
caccaggcacgaacccacc

SEQ ID NO: 2123668 - RNA, 20 nt, Human
caccaggcacgaacccaccu

SEQ ID NO: 2123669 - RNA, 21 nt, Human
caccaggcacgaacccaccug

SEQ ID NO: 2123670 - RNA, 22 nt, Human
caccaggcacgaacccaccugc

SEQ ID NO: 2123671 - RNA, 23 nt, Human
caccaggaauguuaaagucagug

SEQ ID NO: 2123672 - RNA, 12 nt, Human
cacccagcccac

SEQ ID NO: 2123673 - RNA, 18 nt, Human
cacccagcaacuccaacu

SEQ ID NO: 2123674 - RNA, 11 nt, Human
cacccagccca

SEQ ID NO: 2123675 - RNA, 10 nt, Human
cacccagccc

SEQ ID NO: 2123676 - RNA, 22 nt, Human
caccagccccagugcccacagg

SEQ ID NO: 2123677 - RNA, 21 nt, Human
caccagccccagugcccacag

SEQ ID NO: 2123678 - RNA, 18 nt, Human
caccagccccagugccca

SEQ ID NO: 2123679 - RNA, 19 nt, Human
caccagcccuuagcaggga

SEQ ID NO: 2123680 - RNA, 12 nt, Human
caccaggaaugu

SEQ ID NO: 2123681 - RNA, 17 nt, Human
caccaggaauguuaaag

SEQ ID NO: 2123682 - RNA, 21 nt, Human
caccaggaauguuaaagucag

SEQ ID NO: 2123683 - RNA, 16 nt, Human
caccaggagaaccacu

SEQ ID NO: 2123684 - RNA, 17 nt, Human
caccaggagaaccacua

SEQ ID NO: 2123685 - RNA, 19 nt, Human
caccaggagaaccacuaca

SEQ ID NO: 2123686 - RNA, 14 nt, Human
caccaggagacaga

SEQ ID NO: 2123687 - RNA, 17 nt, Human
caccaggagucccuggu

SEQ ID NO: 2123688 - RNA, 17 nt, Human
caccagccccagugccc

SEQ ID NO: 2123689 - RNA, 18 nt, Human
cacauuuauucugcucac

SEQ ID NO: 2123690 - RNA, 17 nt, Human
cacauuuauucugcuca

SEQ ID NO: 2123691 - RNA, 12 nt, Human
cacaucuuucac

SEQ ID NO: 2123692 - RNA, 18 nt, Human
cacaucuuucacacuucc

SEQ ID NO: 2123693 - RNA, 19 nt, Human
cacaucuuucacacuucca

SEQ ID NO: 2123694 - RNA, 21 nt, Human
cacaucuuucacacuuccacc

SEQ ID NO: 2123695 - RNA, 23 nt, Human
cacaucuugcucugcugacagac

SEQ ID NO: 2123696 - RNA, 15 nt, Human
auuuauauaaauuuu

SEQ ID NO: 2123697 - RNA, 14 nt, Human
auuuauauauuuau

SEQ ID NO: 2123698 - RNA, 14 nt, Human
auuuauauaauuau

SEQ ID NO: 2123699 - RNA, 15 nt, Human
auuuauauaauuaug

SEQ ID NO: 2123700 - RNA, 16 nt, Human
auuuauauaauuaugu

SEQ ID NO: 2123701 - RNA, 18 nt, Human
auuuauauaauuauguua

SEQ ID NO: 2123702 - RNA, 20 nt, Human
auuuauauaauuauguuauu

SEQ ID NO: 2123703 - RNA, 22 nt, Human
auuuauauaauuauguuauuga

SEQ ID NO: 2123704 - RNA, 15 nt, Human
auuuaauucauguuu

SEQ ID NO: 2123705 - RNA, 17 nt, Human
auuuaauucauguuucu

SEQ ID NO: 2123706 - RNA, 13 nt, Human
auuuaauuguaaa

SEQ ID NO: 2123707 - RNA, 14 nt, Human
auuuaauuguaaac

SEQ ID NO: 2123708 - RNA, 15 nt, Human
auuuaauuguaaacu

SEQ ID NO: 2123709 - RNA, 16 nt, Human
auuuaauuguaaacug

SEQ ID NO: 2123710 - RNA, 17 nt, Human
auuuaauuguaaacugu

SEQ ID NO: 2123711 - RNA, 18 nt, Human
auuuaauuguaaacugua

SEQ ID NO: 2123712 - RNA, 12 nt, Human
auuuaagcauug

SEQ ID NO: 2123713 - RNA, 13 nt, Human
auuuaagcauugu

SEQ ID NO: 2123714 - RNA, 14 nt, Human
auuuaagcauuguu

SEQ ID NO: 2123715 - RNA, 15 nt, Human
auuuaagcauuguuu

SEQ ID NO: 2123716 - RNA, 11 nt, Human
auuuaagcauu

SEQ ID NO: 2123717 - RNA, 15 nt, Human
auuuaagauaguuuu

SEQ ID NO: 2123718 - RNA, 15 nt, Human
auuuaaguauucaag

SEQ ID NO: 2123719 - RNA, 18 nt, Human
auuuaaguauucaagaaa

SEQ ID NO: 2123720 - RNA, 18 nt, Human
auuuaagcuuaugucaga

SEQ ID NO: 2123721 - RNA, 19 nt, Human
auuuaaggagauguaagag

SEQ ID NO: 2123722 - RNA, 22 nt, Human
auuuaaggagauguaagagcuu

SEQ ID NO: 2123723 - RNA, 21 nt, Human
auuucacauuaauauuugcug

SEQ ID NO: 2123724 - RNA, 22 nt, Human
auuucacauuaauauuugcuga

SEQ ID NO: 2123725 - RNA, 20 nt, Human
auuucacgucgucuucugua

SEQ ID NO: 2123726 - RNA, 14 nt, Human
auuucacuauuuuu

SEQ ID NO: 2123727 - RNA, 22 nt, Human
auuucacuauuuuuauuuauau

SEQ ID NO: 2123728 - RNA, 19 nt, Human
auuucaggauacucuguca

SEQ ID NO: 2123729 - RNA, 22 nt, Human
auuucaggauacucugucagau

SEQ ID NO: 2123730 - RNA, 23 nt, Human
auuucacaguguguuugugauug

SEQ ID NO: 2123731 - RNA, 13 nt, Human
auuucacauuaau

SEQ ID NO: 2123732 - RNA, 17 nt, Human
auuucaauuuguucagu

SEQ ID NO: 2123733 - RNA, 21 nt, Human
auuucaauuuccaagagcuga

SEQ ID NO: 2123734 - RNA, 16 nt, Human
auuuaucuauuguaag

SEQ ID NO: 2123735 - RNA, 17 nt, Human
auuuaucuauuguaaga

SEQ ID NO: 2123736 - RNA, 18 nt, Human
auuuaucuauuguaagau

SEQ ID NO: 2123737 - RNA, 20 nt, Human
auuuaucuauuguaagauaa

SEQ ID NO: 2123738 - RNA, 23 nt, Human
auuuaucuauuguaagauaaaaa

SEQ ID NO: 2123739 - RNA, 19 nt, Human
auuuauauauuuauaacuc

SEQ ID NO: 2123740 - RNA, 15 nt, Human
auuuauauauuuaua

SEQ ID NO: 2123741 - RNA, 16 nt, Human
auuuauauauuuauaa

SEQ ID NO: 2123742 - RNA, 17 nt, Human
auuuauauauuuauaac

SEQ ID NO: 2123743 - RNA, 18 nt, Human
auuuauauauuuauaacu

SEQ ID NO: 2123744 - RNA, 23 nt, Human
auuuaucagugacagaguucacu

SEQ ID NO: 2123745 - RNA, 17 nt, Human
auuuaagaaaauacaau

SEQ ID NO: 2123746 - RNA, 20 nt, Human
auuuaagaaaauacaauaaa

SEQ ID NO: 2123747 - RNA, 21 nt, Human
auuuaagaaaauacaauaaac

SEQ ID NO: 2123748 - RNA, 23 nt, Human
auuucugagaagguccuuaauga

SEQ ID NO: 2123749 - RNA, 13 nt, Human
auuucuuaaacaa

SEQ ID NO: 2123750 - RNA, 21 nt, Human
auuucuuaaacaaauguauga

SEQ ID NO: 2123751 - RNA, 13 nt, Human
auuucucucucca

SEQ ID NO: 2123752 - RNA, 18 nt, Human
auuucucucuccagucuu

SEQ ID NO: 2123753 - RNA, 22 nt, Human
auuucucucuccagucuuccac

SEQ ID NO: 2123754 - RNA, 17 nt, Human
auuucucuacagauguc

SEQ ID NO: 2123755 - RNA, 14 nt, Human
auuucagucuuuuc

SEQ ID NO: 2123756 - RNA, 19 nt, Human
auuucagucuuuuccuguu

SEQ ID NO: 2123757 - RNA, 14 nt, Human
auuucaggauucuc

SEQ ID NO: 2123758 - RNA, 19 nt, Human
auuucaggggucgucacca

SEQ ID NO: 2123759 - RNA, 22 nt, Human
auuucaggggucgucaccaccu

SEQ ID NO: 2123760 - RNA, 20 nt, Human
auuucagguuuuguaaagau

SEQ ID NO: 2123761 - RNA, 21 nt, Human
auuucagguuuuguaaagaug

SEQ ID NO: 2123762 - RNA, 20 nt, Human
auuucugaaaugaccucaag

SEQ ID NO: 2123763 - RNA, 11 nt, Human
auuucugagaa

SEQ ID NO: 2123764 - RNA, 17 nt, Human
auuucugagaagguccu

SEQ ID NO: 2123765 - RNA, 15 nt, Human
auuucugauauagaa

SEQ ID NO: 2123766 - RNA, 17 nt, Human
auuucugauauagaauu

SEQ ID NO: 2123767 - RNA, 18 nt, Human
auuucugauauagaauug

SEQ ID NO: 2123768 - RNA, 11 nt, Human
auuucugauuu

SEQ ID NO: 2123769 - RNA, 13 nt, Human
auuucugauuuua

SEQ ID NO: 2123770 - RNA, 16 nt, Human
auuucugauuuuaugu

SEQ ID NO: 2123771 - RNA, 17 nt, Human
auuucugauuuuaugua

SEQ ID NO: 2123772 - RNA, 19 nt, Human
auuucugauuuuauguaaa

SEQ ID NO: 2123773 - RNA, 15 nt, Human
auuuuuuuuguuuca

SEQ ID NO: 2123774 - RNA, 15 nt, Human
auuuuuuuucuuuua

SEQ ID NO: 2123775 - RNA, 15 nt, Human
auuuuuuuuuagaac

SEQ ID NO: 2123776 - RNA, 21 nt, Human
auuuuuuuuuagaacagaaaa

SEQ ID NO: 2123777 - RNA, 23 nt, Human
auuuuuuuuuagaacagaaaaca

SEQ ID NO: 2123778 - RNA, 15 nt, Human
caaaagcaaaugaga

SEQ ID NO: 2123779 - RNA, 14 nt, Human
caaaagcacccuug

SEQ ID NO: 2123780 - RNA, 20 nt, Human
caaaagguuaauaaaguaau

SEQ ID NO: 2123781 - RNA, 19 nt, Human
caaaagguucacuaaagca

SEQ ID NO: 2123782 - RNA, 13 nt, Human
caaaaggugccug

SEQ ID NO: 2123783 - RNA, 15 nt, Human
caaaaggugccugug

SEQ ID NO: 2123784 - RNA, 18 nt, Human
caaaaggugccugugagg

SEQ ID NO: 2123785 - RNA, 22 nt, Human
caaaaggugccugugaggcagg

SEQ ID NO: 2123786 - RNA, 18 nt, Human
caaacauccuaucaacaa

SEQ ID NO: 2123787 - RNA, 23 nt, Human
caaaaggugccugugaggcaggg

SEQ ID NO: 2123788 - RNA, 21 nt, Human
caaacaucuggaaaauaaaag

SEQ ID NO: 2123789 - RNA, 12 nt, Human
caaacaugaagu

SEQ ID NO: 2123790 - RNA, 14 nt, Human
caaacaugaagugu

SEQ ID NO: 2123791 - RNA, 21 nt, Human
caaacaugaaguguguuuccu

SEQ ID NO: 2123792 - RNA, 20 nt, Human
caaaaggguuuaaacugauu

SEQ ID NO: 2123793 - RNA, 22 nt, Human
caaaaggguuuaaacugauuca

SEQ ID NO: 2123794 - RNA, 18 nt, Human
auuuuuauuacccuucuu

SEQ ID NO: 2123795 - RNA, 14 nt, Human
auuuuuauuaugca

SEQ ID NO: 2123796 - RNA, 15 nt, Human
auuuuuauuaugcau

SEQ ID NO: 2123797 - RNA, 17 nt, Human
auuuuuauuaugcauaa

SEQ ID NO: 2123798 - RNA, 19 nt, Human
auuuuuauuaugcauaacu

SEQ ID NO: 2123799 - RNA, 20 nt, Human
auuuuuauuaugcauaacug

SEQ ID NO: 2123800 - RNA, 22 nt, Human
auuuuuauuaugcauaacugac

SEQ ID NO: 2123801 - RNA, 16 nt, Human
auuuuuauuaaauuau

SEQ ID NO: 2123802 - RNA, 14 nt, Human
auuuuuauuuauau

SEQ ID NO: 2123803 - RNA, 14 nt, Human
auuuuuauuucaaa

SEQ ID NO: 2123804 - RNA, 20 nt, Human
auuuuuuucuaccuugaggu

SEQ ID NO: 2123805 - RNA, 13 nt, Human
auuuuuuucuacc

SEQ ID NO: 2123806 - RNA, 22 nt, Human
auuuuguuuuugucuuaaaaag

SEQ ID NO: 2123807 - RNA, 15 nt, Human
auuuuuauggaauuu

SEQ ID NO: 2123808 - RNA, 12 nt, Human
auuuuuauggaa

SEQ ID NO: 2123809 - RNA, 14 nt, Human
auuuuuauggaauu

SEQ ID NO: 2123810 - RNA, 12 nt, Human
auuuuuauccaa

SEQ ID NO: 2123811 - RNA, 18 nt, Human
auuuuuauccaaucuugu

SEQ ID NO: 2123812 - RNA, 18 nt, Human
caaacaugugguuaaugc

SEQ ID NO: 2123813 - RNA, 13 nt, Human
auuuuuuucucuc

SEQ ID NO: 2123814 - RNA, 20 nt, Human
caaacaugggguuggcuggg

SEQ ID NO: 2123815 - RNA, 13 nt, Human
caaaccagaagca

SEQ ID NO: 2123816 - RNA, 22 nt, Human
caaacaugaaguguguuuccuu

SEQ ID NO: 2123817 - RNA, 23 nt, Human
caaacaugggguuggcugggccc

SEQ ID NO: 2123818 - RNA, 16 nt, Human
auuuugaaaacuacau

SEQ ID NO: 2123819 - RNA, 18 nt, Human
auuuugaaaacuacauuu

SEQ ID NO: 2123820 - RNA, 19 nt, Human
auuuugaaaacuacauuuu

SEQ ID NO: 2123821 - RNA, 22 nt, Human
auuuugaaaacuacauuuuaac

SEQ ID NO: 2123822 - RNA, 13 nt, Human
auuuuauaaaauu

SEQ ID NO: 2123823 - RNA, 17 nt, Human
auuuuauaaaauuaaag

SEQ ID NO: 2123824 - RNA, 18 nt, Human
auuuuauaaaauuaaaga

SEQ ID NO: 2123825 - RNA, 19 nt, Human
auuuuauaaaauuaaagaa

SEQ ID NO: 2123826 - RNA, 20 nt, Human
auuuuauaaaauuaaagaaa

SEQ ID NO: 2123827 - RNA, 21 nt, Human
auuuuauaaaauuaaagaaaa

SEQ ID NO: 2123828 - RNA, 22 nt, Human
auuuuauaaaauuaaagaaaau

SEQ ID NO: 2123829 - RNA, 15 nt, Human
auuuucugaaacuaa

SEQ ID NO: 2123830 - RNA, 16 nt, Human
auuuucugaaacuaau

SEQ ID NO: 2123831 - RNA, 19 nt, Human
auuuucugaaacuaaugaa

SEQ ID NO: 2123832 - RNA, 20 nt, Human
auuuucugaaacuaaugaaa

SEQ ID NO: 2123833 - RNA, 21 nt, Human
auuuucugaaacuaaugaaag

SEQ ID NO: 2123834 - RNA, 22 nt, Human
auuuucugaaacuaaugaaagc

SEQ ID NO: 2123835 - RNA, 18 nt, Human
auuuucugguagauagaa

SEQ ID NO: 2123836 - RNA, 17 nt, Human
auuuucugguagauaga

SEQ ID NO: 2123837 - RNA, 20 nt, Human
auuuucugguagauagaaau

SEQ ID NO: 2123838 - RNA, 21 nt, Human
auuuucugguagauagaaaua

SEQ ID NO: 2123839 - RNA, 20 nt, Human
auuuucuggguucugggugg

SEQ ID NO: 2123840 - RNA, 22 nt, Human
auuuucuuuuuauuuuuuaauu

SEQ ID NO: 2123841 - RNA, 17 nt, Human
auuuuaguauauuuaua

SEQ ID NO: 2123842 - RNA, 22 nt, Human
auuuuaguauauuuauauaauu

SEQ ID NO: 2123843 - RNA, 23 nt, Human
auuuuaguauauuuauauaauua

SEQ ID NO: 2123844 - RNA, 12 nt, Human
auuuguuaaugg

SEQ ID NO: 2123845 - RNA, 15 nt, Human
auuuguuauucuuaa

SEQ ID NO: 2123846 - RNA, 16 nt, Human
auuuguuauucuuaag

SEQ ID NO: 2123847 - RNA, 17 nt, Human
auuuguuauucuuaaga

SEQ ID NO: 2123848 - RNA, 14 nt, Human
auuuguuauaauga

SEQ ID NO: 2123849 - RNA, 15 nt, Human
auuuguuaaauauuu

SEQ ID NO: 2123850 - RNA, 16 nt, Human
auuuguuaaauauuua

SEQ ID NO: 2123851 - RNA, 17 nt, Human
auuuguuaaauauuuac

SEQ ID NO: 2123852 - RNA, 18 nt, Human
auuuguuaaauauuuaca

SEQ ID NO: 2123853 - RNA, 19 nt, Human
auuugcagagacaggaccu

SEQ ID NO: 2123854 - RNA, 22 nt, Human
auuugcagagacaggaccugac

SEQ ID NO: 2123855 - RNA, 16 nt, Human
auuugcacccuccgcc

SEQ ID NO: 2123856 - RNA, 15 nt, Human
auuugcagagacagg

SEQ ID NO: 2123857 - RNA, 15 nt, Human
auuugugugugugca

SEQ ID NO: 2123858 - RNA, 20 nt, Human
auuugugugugugcaagugu

SEQ ID NO: 2123859 - RNA, 12 nt, Human
auuugugugugu

SEQ ID NO: 2123860 - RNA, 14 nt, Human
auuugugugugugc

SEQ ID NO: 2123861 - RNA, 14 nt, Human
auuaauuucuucac

SEQ ID NO: 2123862 - RNA, 23 nt, Human
auuaaugcuaagggcaggcccaa

SEQ ID NO: 2123863 - RNA, 14 nt, Human
auuaaugcuaaggg

SEQ ID NO: 2123864 - RNA, 15 nt, Human
auuaaugcuaagggc

SEQ ID NO: 2123865 - RNA, 18 nt, Human
auuacacaaauacuuauu

SEQ ID NO: 2123866 - RNA, 22 nt, Human
auuacaagcgugagccacugca

SEQ ID NO: 2123867 - RNA, 15 nt, Human
auuacagagaggaga

SEQ ID NO: 2123868 - RNA, 17 nt, Human
auuacagagaggagaaa

SEQ ID NO: 2123869 - RNA, 18 nt, Human
auuacagagaggagaaac

SEQ ID NO: 2123870 - RNA, 12 nt, Human
auuacagagagg

SEQ ID NO: 2123871 - RNA, 20 nt, Human
auuaaauuuuuuaaaaagca

SEQ ID NO: 2123872 - RNA, 13 nt, Human
auuaaauuuuucc

SEQ ID NO: 2123873 - RNA, 14 nt, Human
auuaaauuuuuccu

SEQ ID NO: 2123874 - RNA, 16 nt, Human
auuaaauuuuuccuua

SEQ ID NO: 2123875 - RNA, 14 nt, Human
auuaacaaauuaug

SEQ ID NO: 2123876 - RNA, 23 nt, Human
auuaacaguuuuccaugaaaacg

SEQ ID NO: 2123877 - RNA, 14 nt, Human
auuaacauauaaua

SEQ ID NO: 2123878 - RNA, 17 nt, Human
auuaacauauaauauau

SEQ ID NO: 2123879 - RNA, 18 nt, Human
auuaacauauaauauaug

SEQ ID NO: 2123880 - RNA, 20 nt, Human
auuaacauauaauauauguu

SEQ ID NO: 2123881 - RNA, 12 nt, Human
auuaacaguuuu

SEQ ID NO: 2123882 - RNA, 14 nt, Human
auuaacaguuuucc

SEQ ID NO: 2123883 - RNA, 16 nt, Human
auuaacaguuuuccau

SEQ ID NO: 2123884 - RNA, 18 nt, Human
auuaacaguuuuccauga

SEQ ID NO: 2123885 - RNA, 19 nt, Human
auuaacaguuuuccaugaa

SEQ ID NO: 2123886 - RNA, 21 nt, Human
auuaacaguuuuccaugaaaa

SEQ ID NO: 2123887 - RNA, 22 nt, Human
auuaacaguuuuccaugaaaac

SEQ ID NO: 2123888 - RNA, 20 nt, Human
auuaacaaauuauguuacau

SEQ ID NO: 2123889 - RNA, 11 nt, Human
auuaacacugc

SEQ ID NO: 2123890 - RNA, 12 nt, Human
auucauguuucu

SEQ ID NO: 2123891 - RNA, 13 nt, Human
auucauguuucuu

SEQ ID NO: 2123892 - RNA, 15 nt, Human
auucauguuucuuaa

SEQ ID NO: 2123893 - RNA, 19 nt, Human
auucauucuggucucucua

SEQ ID NO: 2123894 - RNA, 22 nt, Human
auucauucuggucucucuauua

SEQ ID NO: 2123895 - RNA, 14 nt, Human
auucauauuuacuu

SEQ ID NO: 2123896 - RNA, 16 nt, Human
auucaagguaaaauuc

SEQ ID NO: 2123897 - RNA, 17 nt, Human
auucaagguaaaauucu

SEQ ID NO: 2123898 - RNA, 18 nt, Human
auucaagguaaaauucua

SEQ ID NO: 2123899 - RNA, 19 nt, Human
auucaagguaaaauucuaa

SEQ ID NO: 2123900 - RNA, 20 nt, Human
auucaagguaaaauucuaaa

SEQ ID NO: 2123901 - RNA, 21 nt, Human
auucaagguaaaauucuaaau

SEQ ID NO: 2123902 - RNA, 16 nt, Human
auucaaguguacagug

SEQ ID NO: 2123903 - RNA, 15 nt, Human
auuagagucagccuu

SEQ ID NO: 2123904 - RNA, 21 nt, Human
auucgugcagcauaugaggau

SEQ ID NO: 2123905 - RNA, 23 nt, Human
auucguggugaucaauuaaaugu

SEQ ID NO: 2123906 - RNA, 16 nt, Human
auucucuccucagacu

SEQ ID NO: 2123907 - RNA, 18 nt, Human
auucucuccucagacugc

SEQ ID NO: 2123908 - RNA, 19 nt, Human
auucucuccucagacugcu

SEQ ID NO: 2123909 - RNA, 22 nt, Human
auucucuccucagacugcucaa

SEQ ID NO: 2123910 - RNA, 12 nt, Human
auucucuuaucc

SEQ ID NO: 2123911 - RNA, 14 nt, Human
auucucuuauccaa

SEQ ID NO: 2123912 - RNA, 16 nt, Human
auucauuguauaaaaa

SEQ ID NO: 2123913 - RNA, 20 nt, Human
auucauugugguuauuuuua

SEQ ID NO: 2123914 - RNA, 21 nt, Human
auucauugugguuauuuuuau

SEQ ID NO: 2123915 - RNA, 22 nt, Human
auucauugugguuauuuuuaua

SEQ ID NO: 2123916 - RNA, 19 nt, Human
auucauuguauaaaaauag

SEQ ID NO: 2123917 - RNA, 22 nt, Human
auucauuucaaagggagagaga

SEQ ID NO: 2123918 - RNA, 14 nt, Human
auuccuuucccuuu

SEQ ID NO: 2123919 - RNA, 15 nt, Human
auuccuuucccuuua

SEQ ID NO: 2123920 - RNA, 17 nt, Human
auuccuuucccuuuagc

SEQ ID NO: 2123921 - RNA, 18 nt, Human
auuccuuuccugaucacu

SEQ ID NO: 2123922 - RNA, 11 nt, Human
auucauuucaa

SEQ ID NO: 2123923 - RNA, 15 nt, Human
auuccuuuucuuguu

SEQ ID NO: 2123924 - RNA, 19 nt, Human
auuccuuuucuuguuuauc

SEQ ID NO: 2123925 - RNA, 20 nt, Human
auuccuuuucuuguuuauca

SEQ ID NO: 2123926 - RNA, 18 nt, Human
auuccuuuuguguacagu

SEQ ID NO: 2123927 - RNA, 21 nt, Human
auucgcccaaagccagacagc

SEQ ID NO: 2123928 - RNA, 20 nt, Human
auucgcccaaagccagacag

SEQ ID NO: 2123929 - RNA, 14 nt, Human
auucgagcuauauu

SEQ ID NO: 2123930 - RNA, 15 nt, Human
auucgagcuauauuu

SEQ ID NO: 2123931 - RNA, 20 nt, Human
auucgagcuauauuuaagua

SEQ ID NO: 2123932 - RNA, 19 nt, Human
auucgaucucauucaguau

SEQ ID NO: 2123933 - RNA, 19 nt, Human
auucgcccaaagccagaca

SEQ ID NO: 2123934 - RNA, 17 nt, Human
auucuuuaaauuucauc

SEQ ID NO: 2123935 - RNA, 17 nt, Human
auucucuuggcuggcuu

SEQ ID NO: 2123936 - RNA, 20 nt, Human
auucucuuggcuggcuuccu

SEQ ID NO: 2123937 - RNA, 15 nt, Human
auucucuuauccaac

SEQ ID NO: 2123938 - RNA, 19 nt, Human
auucuuucaauaacgaagu

SEQ ID NO: 2123939 - RNA, 19 nt, Human
auucuuucaagugaaucua

SEQ ID NO: 2123940 - RNA, 16 nt, Human
auucuuuccauuauga

SEQ ID NO: 2123941 - RNA, 17 nt, Human
auucuuuccauuaugau

SEQ ID NO: 2123942 - RNA, 21 nt, Human
auucuuuccauuaugauucuu

SEQ ID NO: 2123943 - RNA, 22 nt, Human
auucuuuccauuaugauucuuu

SEQ ID NO: 2123944 - RNA, 21 nt, Human
auugagcuggaccucaccaag

SEQ ID NO: 2123945 - RNA, 22 nt, Human
cagauauaaaagacugaccaau

SEQ ID NO: 2123946 - RNA, 17 nt, Human
cagauaggccuucuugu

SEQ ID NO: 2123947 - RNA, 18 nt, Human
cagauaggccuucuugug

SEQ ID NO: 2123948 - RNA, 19 nt, Human
cagauaggccuucuuguga

SEQ ID NO: 2123949 - RNA, 19 nt, Human
cagauagauauaugcucug

SEQ ID NO: 2123950 - RNA, 19 nt, Human
cagaggggcuuucuggaga

SEQ ID NO: 2123951 - RNA, 19 nt, Human
cagauacuuggggggcuga

SEQ ID NO: 2123952 - RNA, 15 nt, Human
cagaucccagcucac

SEQ ID NO: 2123953 - RNA, 12 nt, Human
cagaucccagcu

SEQ ID NO: 2123954 - RNA, 14 nt, Human
cagaucccagcuca

SEQ ID NO: 2123955 - RNA, 22 nt, Human
cagaucccagaaggaccuccug

SEQ ID NO: 2123956 - RNA, 19 nt, Human
cagauauauuuuucacagu

SEQ ID NO: 2123957 - RNA, 18 nt, Human
cagauaugauauguaaac

SEQ ID NO: 2123958 - RNA, 13 nt, Human
cagauauauuuuu

SEQ ID NO: 2123959 - RNA, 14 nt, Human
cagauauauuuuuc

SEQ ID NO: 2123960 - RNA, 15 nt, Human
cagauauauuuuuca

SEQ ID NO: 2123961 - RNA, 15 nt, Human
cagauaugauaugua

SEQ ID NO: 2123962 - RNA, 16 nt, Human
cagauauauuuuucac

SEQ ID NO: 2123963 - RNA, 18 nt, Human
cagauauauuuuucacag

SEQ ID NO: 2123964 - RNA, 18 nt, Human
cagaggggcuuucuggag

SEQ ID NO: 2123965 - RNA, 23 nt, Human
cagagaggguggugaccucugcc

SEQ ID NO: 2123966 - RNA, 19 nt, Human
cagagaggucaagcccagg

SEQ ID NO: 2123967 - RNA, 21 nt, Human
cagagaggucaagcccaggag

SEQ ID NO: 2123968 - RNA, 15 nt, Human
cagagcucuggagcc

SEQ ID NO: 2123969 - RNA, 19 nt, Human
cagagcucuggagccaccu

SEQ ID NO: 2123970 - RNA, 21 nt, Human
cagagcucuggagccaccugu

SEQ ID NO: 2123971 - RNA, 23 nt, Human
cagagcuccuccuugucuuggca

SEQ ID NO: 2123972 - RNA, 11 nt, Human
cagagagaaac

SEQ ID NO: 2123973 - RNA, 22 nt, Human
cagagaggguggugaccucugc

SEQ ID NO: 2123974 - RNA, 20 nt, Human
cagagaggguggugaccucu

SEQ ID NO: 2123975 - RNA, 17 nt, Human
cagagaggguggugacc

SEQ ID NO: 2123976 - RNA, 20 nt, Human
cagagagggggccaccuccc

SEQ ID NO: 2123977 - RNA, 22 nt, Human
cagagagggggccaccucccca

SEQ ID NO: 2123978 - RNA, 16 nt, Human
cagagagaauggcuuu

SEQ ID NO: 2123979 - RNA, 11 nt, Human
cagagagacag

SEQ ID NO: 2123980 - RNA, 15 nt, Human
cagagagacagacuu

SEQ ID NO: 2123981 - RNA, 17 nt, Human
cagagagacagacuuga

SEQ ID NO: 2123982 - RNA, 18 nt, Human
cagagagacagacuugag

SEQ ID NO: 2123983 - RNA, 22 nt, Human
cagagagacagacuugagaacu

SEQ ID NO: 2123984 - RNA, 22 nt, Human
cagagagagaagugccccugcu

SEQ ID NO: 2123985 - RNA, 23 nt, Human
cagagagagaagugccccugcug

SEQ ID NO: 2123986 - RNA, 19 nt, Human
cagagagagaagugccccu

SEQ ID NO: 2123987 - RNA, 20 nt, Human
cagagagagaagugccccug

SEQ ID NO: 2123988 - RNA, 21 nt, Human
cagagagagaagugccccugc

SEQ ID NO: 2123989 - RNA, 12 nt, Human
cagagagggugg

SEQ ID NO: 2123990 - RNA, 15 nt, Human
cagagagggggccac

SEQ ID NO: 2123991 - RNA, 20 nt, Human
cagcacuaaagcaguggaca

SEQ ID NO: 2123992 - RNA, 10 nt, Human
cagcacuaac

SEQ ID NO: 2123993 - RNA, 14 nt, Human
cagcacuaaagcag

SEQ ID NO: 2123994 - RNA, 17 nt, Human
cagcacuaaagcagugg

SEQ ID NO: 2123995 - RNA, 19 nt, Human
cagcacuaaagcaguggac

SEQ ID NO: 2123996 - RNA, 20 nt, Human
cagccagcccagcccagcug

SEQ ID NO: 2123997 - RNA, 17 nt, Human
cagccagcccagcccag

SEQ ID NO: 2123998 - RNA, 19 nt, Human
cagccagcccagcccagcu

SEQ ID NO: 2123999 - RNA, 13 nt, Human
cagccagcccagc

SEQ ID NO: 2124000 - RNA, 14 nt, Human
cagccagcccagcc

SEQ ID NO: 2124001 - RNA, 15 nt, Human
cagccagcccagccc

SEQ ID NO: 2124002 - RNA, 16 nt, Human
cagccagcccagccca

SEQ ID NO: 2124003 - RNA, 11 nt, Human
cagccagccca

SEQ ID NO: 2124004 - RNA, 12 nt, Human
cagccagcccag

SEQ ID NO: 2124005 - RNA, 22 nt, Human
cagccaggcugccaaggccaga

SEQ ID NO: 2124006 - RNA, 13 nt, Human
cagccaggcugcc

SEQ ID NO: 2124007 - RNA, 16 nt, Human
cagccaggcugccaag

SEQ ID NO: 2124008 - RNA, 19 nt, Human
cagccaggcucaggccaug

SEQ ID NO: 2124009 - RNA, 12 nt, Human
cagccaggcugc

SEQ ID NO: 2124010 - RNA, 18 nt, Human
cagauugcaacaggcugg

SEQ ID NO: 2124011 - RNA, 20 nt, Human
cagauugcaacaggcugggc

SEQ ID NO: 2124012 - RNA, 19 nt, Human
cagauugcaacaggcuggg

SEQ ID NO: 2124013 - RNA, 14 nt, Human
cagauugucagcuc

SEQ ID NO: 2124014 - RNA, 22 nt, Human
cagauuuagugaaagcuagaga

SEQ ID NO: 2124015 - RNA, 17 nt, Human
cagauuuagugaaagcu

SEQ ID NO: 2124016 - RNA, 20 nt, Human
cagauuuagugaaagcuaga

SEQ ID NO: 2124017 - RNA, 22 nt, Human
cagcaccacccuagucccuucc

SEQ ID NO: 2124018 - RNA, 19 nt, Human
cagauuugaacucuucaau

SEQ ID NO: 2124019 - RNA, 21 nt, Human
cagauuucagucuuuuccugu

SEQ ID NO: 2124020 - RNA, 18 nt, Human
cagcacccagcaacucca

SEQ ID NO: 2124021 - RNA, 14 nt, Human
cagcacccccacgc

SEQ ID NO: 2124022 - RNA, 22 nt, Human
cagcacccccuucucugcccau

SEQ ID NO: 2124023 - RNA, 17 nt, Human
cagacucuacagaggcc

SEQ ID NO: 2124024 - RNA, 21 nt, Human
cagacuccugugcaacuuucc

SEQ ID NO: 2124025 - RNA, 23 nt, Human
cagacaggcaagcaccuccugcc

SEQ ID NO: 2124026 - RNA, 22 nt, Human
cagacaggcaagcaccuccugc

SEQ ID NO: 2124027 - RNA, 21 nt, Human
cagacucuacagaggccaugg

SEQ ID NO: 2124028 - RNA, 20 nt, Human
cagacucuacagaggccaug

SEQ ID NO: 2124029 - RNA, 19 nt, Human
cagacucuacagaggccau

SEQ ID NO: 2124030 - RNA, 18 nt, Human
cagacucuacagaggcca

SEQ ID NO: 2124031 - RNA, 23 nt, Human
cagacucuacagaggccaugggc

SEQ ID NO: 2124032 - RNA, 20 nt, Human
cagacugacaaauguguauc

SEQ ID NO: 2124033 - RNA, 13 nt, Human
cagacuggaagca

SEQ ID NO: 2124034 - RNA, 20 nt, Human
cagacugcugggacuggcca

SEQ ID NO: 2124035 - RNA, 23 nt, Human
cagacugcugggacuggccaggu

SEQ ID NO: 2124036 - RNA, 13 nt, Human
cagacugcuggga

SEQ ID NO: 2124037 - RNA, 15 nt, Human
cagacugcugggacu

SEQ ID NO: 2124038 - RNA, 16 nt, Human
cagacugcugggacug

SEQ ID NO: 2124039 - RNA, 18 nt, Human
cagacuggaagcacagcu

SEQ ID NO: 2124040 - RNA, 17 nt, Human
cagacuggaagcacagc

SEQ ID NO: 2124041 - RNA, 16 nt, Human
cagacuggaagcacag

SEQ ID NO: 2124042 - RNA, 14 nt, Human
cagacuggaagcac

SEQ ID NO: 2124043 - RNA, 21 nt, Human
cagacuggaagcacagcuuca

SEQ ID NO: 2124044 - RNA, 20 nt, Human
cagacuggaagcacagcuuc

SEQ ID NO: 2124045 - RNA, 19 nt, Human
cagacuggauaguccgucu

SEQ ID NO: 2124046 - RNA, 11 nt, Human
cagacuggagg

SEQ ID NO: 2124047 - RNA, 16 nt, Human
cagacuggccugagga

SEQ ID NO: 2124048 - RNA, 21 nt, Human
cagacuggccugaggagcagc

SEQ ID NO: 2124049 - RNA, 16 nt, Human
cagacuggcuggcugc

SEQ ID NO: 2124050 - RNA, 12 nt, Human
cagacuggaggg

SEQ ID NO: 2124051 - RNA, 15 nt, Human
cagacuggugagcag

SEQ ID NO: 2124052 - RNA, 17 nt, Human
cagacuggugagcagac

SEQ ID NO: 2124053 - RNA, 21 nt, Human
cagacaggcaagcaccuccug

SEQ ID NO: 2124054 - RNA, 20 nt, Human
cagacaggcaagcaccuccu

SEQ ID NO: 2124055 - RNA, 18 nt, Human
cagacaggcaagcaccuc

SEQ ID NO: 2124056 - RNA, 13 nt, Human
cagacaggcaagc

SEQ ID NO: 2124057 - RNA, 13 nt, Human
cagacaggagaaa

SEQ ID NO: 2124058 - RNA, 21 nt, Human
cagacaggagaaaugcaucca

SEQ ID NO: 2124059 - RNA, 23 nt, Human
cagacaggaaagggaaggcccca

SEQ ID NO: 2124060 - RNA, 11 nt, Human
cagacaggcaa

SEQ ID NO: 2124061 - RNA, 11 nt, Human
cagacagcucc

SEQ ID NO: 2124062 - RNA, 12 nt, Human
cagacagcuccc

SEQ ID NO: 2124063 - RNA, 17 nt, Human
cagacagcucccucugc

SEQ ID NO: 2124064 - RNA, 19 nt, Human
cagacagcucccucugccu

SEQ ID NO: 2124065 - RNA, 15 nt, Human
cagacaggaaaggga

SEQ ID NO: 2124066 - RNA, 20 nt, Human
cagacaggaaagggaaggcc

SEQ ID NO: 2124067 - RNA, 17 nt, Human
cagacagcagcucaggc

SEQ ID NO: 2124068 - RNA, 18 nt, Human
cagacagcagcucaggca

SEQ ID NO: 2124069 - RNA, 19 nt, Human
cagacagcagcucaggcac

SEQ ID NO: 2124070 - RNA, 16 nt, Human
cagacagacacacaca

SEQ ID NO: 2124071 - RNA, 21 nt, Human
cagacagauggaaaagggaga

SEQ ID NO: 2124072 - RNA, 21 nt, Human
cagacagcaacggggaggcca

SEQ ID NO: 2124073 - RNA, 13 nt, Human
cagacagcagcuc

SEQ ID NO: 2124074 - RNA, 15 nt, Human
cagacagcagcucag

SEQ ID NO: 2124075 - RNA, 16 nt, Human
cagacagcagcucagg

SEQ ID NO: 2124076 - RNA, 15 nt, Human
cagacagacacacac

SEQ ID NO: 2124077 - RNA, 14 nt, Human
cagacagacacaca

SEQ ID NO: 2124078 - RNA, 23 nt, Human
cagacagaagucacucaauuguu

SEQ ID NO: 2124079 - RNA, 14 nt, Human
cagacugcuuuaaa

SEQ ID NO: 2124080 - RNA, 14 nt, Human
cagacuucacacug

SEQ ID NO: 2124081 - RNA, 23 nt, Human
cagacugguugaguucagguagc

SEQ ID NO: 2124082 - RNA, 20 nt, Human
cagacuggugagcagacugg

SEQ ID NO: 2124083 - RNA, 16 nt, Human
caggaccacaaaaaug

SEQ ID NO: 2124084 - RNA, 12 nt, Human
caggaccacaaa

SEQ ID NO: 2124085 - RNA, 16 nt, Human
caggaccucaggugag

SEQ ID NO: 2124086 - RNA, 23 nt, Human
caggaccucaggugagaagcaga

SEQ ID NO: 2124087 - RNA, 20 nt, Human
caggacccaccaugucugcc

SEQ ID NO: 2124088 - RNA, 21 nt, Human
caggacccaucacgccugugc

SEQ ID NO: 2124089 - RNA, 23 nt, Human
caggaggauugcuugagcccagg

SEQ ID NO: 2124090 - RNA, 19 nt, Human
caggaggaucacuugaguc

SEQ ID NO: 2124091 - RNA, 21 nt, Human
caggaggacugccccgugcag

SEQ ID NO: 2124092 - RNA, 23 nt, Human
caggaggacugccccgugcagac

SEQ ID NO: 2124093 - RNA, 23 nt, Human
caggaggagacuagauuuaugaa

SEQ ID NO: 2124094 - RNA, 22 nt, Human
caggaggauugcuugagcccag

SEQ ID NO: 2124095 - RNA, 19 nt, Human
caggaggacugccccgugc

SEQ ID NO: 2124096 - RNA, 17 nt, Human
caggcaaugcuggcugu

SEQ ID NO: 2124097 - RNA, 16 nt, Human
caggcaaugcuggcug

SEQ ID NO: 2124098 - RNA, 15 nt, Human
caggcaaugcuggcu

SEQ ID NO: 2124099 - RNA, 14 nt, Human
caggcaaugcuggc

SEQ ID NO: 2124100 - RNA, 12 nt, Human
caggaggcugag

SEQ ID NO: 2124101 - RNA, 13 nt, Human
caggaggcugagg

SEQ ID NO: 2124102 - RNA, 15 nt, Human
caggaggcugaggca

SEQ ID NO: 2124103 - RNA, 16 nt, Human
caggaggcugaggcag

SEQ ID NO: 2124104 - RNA, 17 nt, Human
caggaggcugaggcaga

SEQ ID NO: 2124105 - RNA, 18 nt, Human
caggaggcugaggcagaa

SEQ ID NO: 2124106 - RNA, 20 nt, Human
caggaggcugaggcagaaga

SEQ ID NO: 2124107 - RNA, 21 nt, Human
caggaggcugaggcagaagaa

SEQ ID NO: 2124108 - RNA, 17 nt, Human
caggaggcugaggcagg

SEQ ID NO: 2124109 - RNA, 18 nt, Human
caggaggcugaggcagga

SEQ ID NO: 2124110 - RNA, 19 nt, Human
caggaggcugaggcaggag

SEQ ID NO: 2124111 - RNA, 20 nt, Human
caggaggcugaggcaggagg

SEQ ID NO: 2124112 - RNA, 21 nt, Human
caggaggcugaggcaggagga

SEQ ID NO: 2124113 - RNA, 15 nt, Human
caggaggcugagggg

SEQ ID NO: 2124114 - RNA, 14 nt, Human
caggaggcugaggu

SEQ ID NO: 2124115 - RNA, 13 nt, Human
caggaggcuggag

SEQ ID NO: 2124116 - RNA, 15 nt, Human
caggaggcuggagga

SEQ ID NO: 2124117 - RNA, 18 nt, Human
caggaggcuggaggaagg

SEQ ID NO: 2124118 - RNA, 21 nt, Human
caggaggcuuggaaagcauca

SEQ ID NO: 2124119 - RNA, 13 nt, Human
caggcaccgagaa

SEQ ID NO: 2124120 - RNA, 16 nt, Human
caggcaccgagaaugu

SEQ ID NO: 2124121 - RNA, 17 nt, Human
caggcaccgagaauguu

SEQ ID NO: 2124122 - RNA, 16 nt, Human
caggcacgaacccacc

SEQ ID NO: 2124123 - RNA, 17 nt, Human
caggcacgaacccaccu

SEQ ID NO: 2124124 - RNA, 19 nt, Human
caggcacgaacccaccugc

SEQ ID NO: 2124125 - RNA, 22 nt, Human
caggcacgaacccaccugcuga

SEQ ID NO: 2124126 - RNA, 20 nt, Human
caggcacgaacccaccugcu

SEQ ID NO: 2124127 - RNA, 21 nt, Human
caggcacgaacccaccugcug

SEQ ID NO: 2124128 - RNA, 12 nt, Human
caggccagcugu

SEQ ID NO: 2124129 - RNA, 13 nt, Human
caggccagcugug

SEQ ID NO: 2124130 - RNA, 17 nt, Human
cagggagaggccaugau

SEQ ID NO: 2124131 - RNA, 16 nt, Human
cagggagaggccauga

SEQ ID NO: 2124132 - RNA, 17 nt, Human
cagggcuaagagcuagc

SEQ ID NO: 2124133 - RNA, 15 nt, Human
cagggcuacccuccc

SEQ ID NO: 2124134 - RNA, 17 nt, Human
cagggcuacccuccccc

SEQ ID NO: 2124135 - RNA, 12 nt, Human
cagggcucagcc

SEQ ID NO: 2124136 - RNA, 13 nt, Human
cagggcucagccu

SEQ ID NO: 2124137 - RNA, 14 nt, Human
cagggcucagccug

SEQ ID NO: 2124138 - RNA, 17 nt, Human
caggggaaaaucagccu

SEQ ID NO: 2124139 - RNA, 19 nt, Human
caggccggugugggcugug

SEQ ID NO: 2124140 - RNA, 22 nt, Human
caggccggugugggcugugucg

SEQ ID NO: 2124141 - RNA, 15 nt, Human
caggccguggcugcc

SEQ ID NO: 2124142 - RNA, 17 nt, Human
caggccguggcugccca

SEQ ID NO: 2124143 - RNA, 19 nt, Human
caggccguggcugcccaca

SEQ ID NO: 2124144 - RNA, 19 nt, Human
caggccugggucugugucu

SEQ ID NO: 2124145 - RNA, 20 nt, Human
caggccugggucugugucuc

SEQ ID NO: 2124146 - RNA, 16 nt, Human
caggccugggucugug

SEQ ID NO: 2124147 - RNA, 18 nt, Human
caggccugggucuguguc

SEQ ID NO: 2124148 - RNA, 19 nt, Human
caggcgauccaccugucuc

SEQ ID NO: 2124149 - RNA, 16 nt, Human
caggcgauccaccugu

SEQ ID NO: 2124150 - RNA, 14 nt, Human
caggccuguugcuu

SEQ ID NO: 2124151 - RNA, 16 nt, Human
caggccuguugcuuuu

SEQ ID NO: 2124152 - RNA, 22 nt, Human
cagcugucccugucaccaagcu

SEQ ID NO: 2124153 - RNA, 18 nt, Human
cagcugucccugucacca

SEQ ID NO: 2124154 - RNA, 17 nt, Human
cagcugccucacuuccu

SEQ ID NO: 2124155 - RNA, 12 nt, Human
cagcugucccug

SEQ ID NO: 2124156 - RNA, 13 nt, Human
cagcugucccugu

SEQ ID NO: 2124157 - RNA, 14 nt, Human
cagcugucccuguc

SEQ ID NO: 2124158 - RNA, 15 nt, Human
cagcugucccuguca

SEQ ID NO: 2124159 - RNA, 16 nt, Human
cagcugucccugucac

SEQ ID NO: 2124160 - RNA, 17 nt, Human
cagcugucccugucacc

SEQ ID NO: 2124161 - RNA, 22 nt, Human
cagcugagaaaaugagugacua

SEQ ID NO: 2124162 - RNA, 21 nt, Human
cagcugacuuuucuguccgag

SEQ ID NO: 2124163 - RNA, 14 nt, Human
cagcugccucacuu

SEQ ID NO: 2124164 - RNA, 17 nt, Human
cagccugcuccagcugu

SEQ ID NO: 2124165 - RNA, 19 nt, Human
cagccugcuccagcuguuc

SEQ ID NO: 2124166 - RNA, 15 nt, Human
cagccugcuccagcu

SEQ ID NO: 2124167 - RNA, 16 nt, Human
cagccugcuccagcug

SEQ ID NO: 2124168 - RNA, 18 nt, Human
cagcuaaagcccaaccuc

SEQ ID NO: 2124169 - RNA, 22 nt, Human
cagcuaaagcccaaccuccuga

SEQ ID NO: 2124170 - RNA, 19 nt, Human
cagcgcuggguccacccca

SEQ ID NO: 2124171 - RNA, 11 nt, Human
caguuuuccuu

SEQ ID NO: 2124172 - RNA, 17 nt, Human
caguuuuccaugaaaac

SEQ ID NO: 2124173 - RNA, 18 nt, Human
caguuuuccaugaaaacg

SEQ ID NO: 2124174 - RNA, 13 nt, Human
caguuuuccauug

SEQ ID NO: 2124175 - RNA, 12 nt, Human
caguuuuccaug

SEQ ID NO: 2124176 - RNA, 13 nt, Human
caguuuuccauga

SEQ ID NO: 2124177 - RNA, 14 nt, Human
caguuuuccaugaa

SEQ ID NO: 2124178 - RNA, 15 nt, Human
caguuuuccaugaaa

SEQ ID NO: 2124179 - RNA, 16 nt, Human
caguuuuccaugaaaa

SEQ ID NO: 2124180 - RNA, 19 nt, Human
caguuuuccaugaaaacgu

SEQ ID NO: 2124181 - RNA, 13 nt, Human
caguuuuccuucu

SEQ ID NO: 2124182 - RNA, 15 nt, Human
cauaauguauaaaga

SEQ ID NO: 2124183 - RNA, 14 nt, Human
cauaauuaugacag

SEQ ID NO: 2124184 - RNA, 19 nt, Human
cauaauuaugacaguuaua

SEQ ID NO: 2124185 - RNA, 15 nt, Human
cauaauuaugacagu

SEQ ID NO: 2124186 - RNA, 17 nt, Human
cauaauuaugacaguua

SEQ ID NO: 2124187 - RNA, 23 nt, Human
cauacaggaagguagaaauaucu

SEQ ID NO: 2124188 - RNA, 17 nt, Human
cauauguauuccugauc

SEQ ID NO: 2124189 - RNA, 14 nt, Human
cauauguaaaauaa

SEQ ID NO: 2124190 - RNA, 17 nt, Human
cauaugugaauauggac

SEQ ID NO: 2124191 - RNA, 15 nt, Human
cauauguuacacuaa

SEQ ID NO: 2124192 - RNA, 20 nt, Human
cauauuaggaaaauaugggu

SEQ ID NO: 2124193 - RNA, 14 nt, Human
cauauuaggaaaau

SEQ ID NO: 2124194 - RNA, 13 nt, Human
cauauuaugucuu

SEQ ID NO: 2124195 - RNA, 13 nt, Human
cauauguaaaaua

SEQ ID NO: 2124196 - RNA, 23 nt, Human
cauagcagagaaugaaagggccc

SEQ ID NO: 2124197 - RNA, 17 nt, Human
cauagcagauuuuaauu

SEQ ID NO: 2124198 - RNA, 16 nt, Human
cauagcagauuuuaau

SEQ ID NO: 2124199 - RNA, 18 nt, Human
cauagcagauuuuaauuu

SEQ ID NO: 2124200 - RNA, 18 nt, Human
caguuucaauucagugcu

SEQ ID NO: 2124201 - RNA, 23 nt, Human
caguuucacuuucacauagaugu

SEQ ID NO: 2124202 - RNA, 15 nt, Human
caguuucagguguuu

SEQ ID NO: 2124203 - RNA, 22 nt, Human
caguuucagguguuuaguugca

SEQ ID NO: 2124204 - RNA, 15 nt, Human
caguuugagacagga

SEQ ID NO: 2124205 - RNA, 16 nt, Human
caguuugagacaggag

SEQ ID NO: 2124206 - RNA, 18 nt, Human
caguuugagacaggagac

SEQ ID NO: 2124207 - RNA, 16 nt, Human
caguuuuaacuagaau

SEQ ID NO: 2124208 - RNA, 12 nt, Human
caguuuuaaaga

SEQ ID NO: 2124209 - RNA, 11 nt, Human
caucuggccuu

SEQ ID NO: 2124210 - RNA, 14 nt, Human
caucuggccuuaca

SEQ ID NO: 2124211 - RNA, 15 nt, Human
caucuggccuuacac

SEQ ID NO: 2124212 - RNA, 20 nt, Human
caucuggccuuacaccucgu

SEQ ID NO: 2124213 - RNA, 12 nt, Human
caucuguagaua

SEQ ID NO: 2124214 - RNA, 12 nt, Human
caucuaaacuuu

SEQ ID NO: 2124215 - RNA, 14 nt, Human
caucuaaacuuuaa

SEQ ID NO: 2124216 - RNA, 15 nt, Human
caucuaaacuuuaau

SEQ ID NO: 2124217 - RNA, 17 nt, Human
caucuaaacuuuaauau

SEQ ID NO: 2124218 - RNA, 20 nt, Human
caucuaaacuuuaauaugua

SEQ ID NO: 2124219 - RNA, 22 nt, Human
caucuaaacuuuaauauguauu

SEQ ID NO: 2124220 - RNA, 23 nt, Human
caucuaaacuuuaauauguauuu

SEQ ID NO: 2124221 - RNA, 12 nt, Human
cauccugcaggc

SEQ ID NO: 2124222 - RNA, 13 nt, Human
caucagcuagcaa

SEQ ID NO: 2124223 - RNA, 17 nt, Human
caucagcuagcaaaaga

SEQ ID NO: 2124224 - RNA, 16 nt, Human
caucagcuauucaguu

SEQ ID NO: 2124225 - RNA, 14 nt, Human
caucagcuccagcu

SEQ ID NO: 2124226 - RNA, 22 nt, Human
cauccauuuauuuggcaucugu

SEQ ID NO: 2124227 - RNA, 19 nt, Human
cauccauuucaucuauuuc

SEQ ID NO: 2124228 - RNA, 16 nt, Human
cauccauuccucaggg

SEQ ID NO: 2124229 - RNA, 17 nt, Human
cauccauuccucaggga

SEQ ID NO: 2124230 - RNA, 18 nt, Human
cauccauuccucagggac

SEQ ID NO: 2124231 - RNA, 19 nt, Human
cauccauuccucagggaca

SEQ ID NO: 2124232 - RNA, 18 nt, Human
caucagaagccuauugua

SEQ ID NO: 2124233 - RNA, 20 nt, Human
caucagaagccuauuguaaa

SEQ ID NO: 2124234 - RNA, 11 nt, Human
caucagaagga

SEQ ID NO: 2124235 - RNA, 14 nt, Human
caucagaaggagaa

SEQ ID NO: 2124236 - RNA, 11 nt, Human
caucagaaaug

SEQ ID NO: 2124237 - RNA, 12 nt, Human
caucagaaaugu

SEQ ID NO: 2124238 - RNA, 20 nt, Human
cauccauuucaucuauuucu

SEQ ID NO: 2124239 - RNA, 23 nt, Human
cauccauuucaucuauuucugag

SEQ ID NO: 2124240 - RNA, 14 nt, Human
caucccacacccug

SEQ ID NO: 2124241 - RNA, 23 nt, Human
caucccacucacaacagcugccu

SEQ ID NO: 2124242 - RNA, 17 nt, Human
caguucagcaccacccu

SEQ ID NO: 2124243 - RNA, 17 nt, Human
caguucaggagucccaa

SEQ ID NO: 2124244 - RNA, 20 nt, Human
caguucaggagucccaagga

SEQ ID NO: 2124245 - RNA, 23 nt, Human
caguucaggagucccaaggaaag

SEQ ID NO: 2124246 - RNA, 23 nt, Human
caguucaguaauaaacuguguuu

SEQ ID NO: 2124247 - RNA, 13 nt, Human
caguucagcacca

SEQ ID NO: 2124248 - RNA, 16 nt, Human
caguucagcaccaccc

SEQ ID NO: 2124249 - RNA, 18 nt, Human
caguuaugugaaugaucu

SEQ ID NO: 2124250 - RNA, 20 nt, Human
caguuaugugaaugaucucu

SEQ ID NO: 2124251 - RNA, 22 nt, Human
caguucaccuauuucaaaaauu

SEQ ID NO: 2124252 - RNA, 23 nt, Human
caguucaccuauuucaaaaauuu

SEQ ID NO: 2124253 - RNA, 14 nt, Human
caguucacuugcag

SEQ ID NO: 2124254 - RNA, 19 nt, Human
caguggugcgaucuggguu

SEQ ID NO: 2124255 - RNA, 21 nt, Human
caguggugcgaucauggcuca

SEQ ID NO: 2124256 - RNA, 21 nt, Human
cagugguaugaucacggcuca

SEQ ID NO: 2124257 - RNA, 15 nt, Human
caguuagagaugccu

SEQ ID NO: 2124258 - RNA, 17 nt, Human
caguuagagaugccucc

SEQ ID NO: 2124259 - RNA, 18 nt, Human
caguuagagaugccuccc

SEQ ID NO: 2124260 - RNA, 19 nt, Human
caguuaggguugaguuacu

SEQ ID NO: 2124261 - RNA, 19 nt, Human
caguuacucagcccugggc

SEQ ID NO: 2124262 - RNA, 15 nt, Human
caguuacucugaagg

SEQ ID NO: 2124263 - RNA, 16 nt, Human
caguuacucugaaggg

SEQ ID NO: 2124264 - RNA, 13 nt, Human
caguuacucagcc

SEQ ID NO: 2124265 - RNA, 14 nt, Human
caguuacucagccc

SEQ ID NO: 2124266 - RNA, 15 nt, Human
caguuacucagcccu

SEQ ID NO: 2124267 - RNA, 16 nt, Human
caguuacucagcccug

SEQ ID NO: 2124268 - RNA, 17 nt, Human
caguuacucagcccugg

SEQ ID NO: 2124269 - RNA, 18 nt, Human
caguuacucagcccuggg

SEQ ID NO: 2124270 - RNA, 13 nt, Human
caguuacucugaa

SEQ ID NO: 2124271 - RNA, 23 nt, Human
cagucugauucccaagcucugcu

SEQ ID NO: 2124272 - RNA, 13 nt, Human
cagugauuuuuau

SEQ ID NO: 2124273 - RNA, 14 nt, Human
cagugauuuuuauc

SEQ ID NO: 2124274 - RNA, 15 nt, Human
cagugauuuuuaucc

SEQ ID NO: 2124275 - RNA, 16 nt, Human
cagugauuuuuaucca

SEQ ID NO: 2124276 - RNA, 17 nt, Human
cagugauuuuuauccaa

SEQ ID NO: 2124277 - RNA, 18 nt, Human
cagugauuuuuuuuuaga

SEQ ID NO: 2124278 - RNA, 18 nt, Human
cagugauucgagcuauau

SEQ ID NO: 2124279 - RNA, 19 nt, Human
cagugauucgagcuauauu

SEQ ID NO: 2124280 - RNA, 20 nt, Human
cagugauucgagcuauauuu

SEQ ID NO: 2124281 - RNA, 12 nt, Human
cagucugcugcc

SEQ ID NO: 2124282 - RNA, 13 nt, Human
cagucugcugccc

SEQ ID NO: 2124283 - RNA, 22 nt, Human
cagucucucuuacccuucugug

SEQ ID NO: 2124284 - RNA, 22 nt, Human
cagugcccacaggaucagucug

SEQ ID NO: 2124285 - RNA, 18 nt, Human
cagugcccacaggaucag

SEQ ID NO: 2124286 - RNA, 16 nt, Human
cagugcccaccaacau

SEQ ID NO: 2124287 - RNA, 21 nt, Human
cagugcccacaggaucagucu

SEQ ID NO: 2124288 - RNA, 15 nt, Human
cagugcaacacugaa

SEQ ID NO: 2124289 - RNA, 18 nt, Human
cagugggagcugccuguu

SEQ ID NO: 2124290 - RNA, 17 nt, Human
cagugggagcugccugu

SEQ ID NO: 2124291 - RNA, 21 nt, Human
cagugcccaccaacaucccau

SEQ ID NO: 2124292 - RNA, 16 nt, Human
cagugggagcugccug

SEQ ID NO: 2124293 - RNA, 13 nt, Human
caguggggcuggg

SEQ ID NO: 2124294 - RNA, 14 nt, Human
caguggggcugggg

SEQ ID NO: 2124295 - RNA, 20 nt, Human
cagugguaugaucacggcuc

SEQ ID NO: 2124296 - RNA, 13 nt, Human
cagugggugcccc

SEQ ID NO: 2124297 - RNA, 21 nt, Human
cagucuacccaccucagccuc

SEQ ID NO: 2124298 - RNA, 23 nt, Human
cagucuacccaccucagccuccu

SEQ ID NO: 2124299 - RNA, 22 nt, Human
cagucugauucccaagcucugc

SEQ ID NO: 2124300 - RNA, 21 nt, Human
cagucugauucccaagcucug

SEQ ID NO: 2124301 - RNA, 15 nt, Human
cagucucggguggcu

SEQ ID NO: 2124302 - RNA, 22 nt, Human
cagucucggguggcuagucaga

SEQ ID NO: 2124303 - RNA, 13 nt, Human
cagucuaguuccu

SEQ ID NO: 2124304 - RNA, 14 nt, Human
cagucuaguuccug

SEQ ID NO: 2124305 - RNA, 22 nt, Human
caugaaugguauggaacucucu

SEQ ID NO: 2124306 - RNA, 16 nt, Human
caugaaugcacacuag

SEQ ID NO: 2124307 - RNA, 13 nt, Human
caugaauguauca

SEQ ID NO: 2124308 - RNA, 21 nt, Human
caugaauuuuuuucaucuucu

SEQ ID NO: 2124309 - RNA, 16 nt, Human
caugacaacuucuaau

SEQ ID NO: 2124310 - RNA, 14 nt, Human
caugacaagcccca

SEQ ID NO: 2124311 - RNA, 15 nt, Human
caugacaagccccag

SEQ ID NO: 2124312 - RNA, 18 nt, Human
caugauggagcgcaccug

SEQ ID NO: 2124313 - RNA, 19 nt, Human
caugauggagcgcaccugc

SEQ ID NO: 2124314 - RNA, 12 nt, Human
caugauggaguc

SEQ ID NO: 2124315 - RNA, 19 nt, Human
caugauggagucagguuug

SEQ ID NO: 2124316 - RNA, 23 nt, Human
caugauggagucagguuuggggu

SEQ ID NO: 2124317 - RNA, 18 nt, Human
caugacaagccccaggca

SEQ ID NO: 2124318 - RNA, 16 nt, Human
caugacaagccccagg

SEQ ID NO: 2124319 - RNA, 17 nt, Human
caugacaagccccaggc

SEQ ID NO: 2124320 - RNA, 19 nt, Human
caugacaagccccaggcag

SEQ ID NO: 2124321 - RNA, 14 nt, Human
caugcaaaugcugu

SEQ ID NO: 2124322 - RNA, 16 nt, Human
caugcaaaugcuguau

SEQ ID NO: 2124323 - RNA, 22 nt, Human
caugcaaaugcuguauucuucu

SEQ ID NO: 2124324 - RNA, 14 nt, Human
caugcaaggggaaa

SEQ ID NO: 2124325 - RNA, 20 nt, Human
caugggaaaugucaacaagu

SEQ ID NO: 2124326 - RNA, 18 nt, Human
cauggcuugccacagcuc

SEQ ID NO: 2124327 - RNA, 15 nt, Human
cauggcuugccacag

SEQ ID NO: 2124328 - RNA, 19 nt, Human
cauggcuugccacagcucu

SEQ ID NO: 2124329 - RNA, 19 nt, Human
caugcaaggggaaaaucuc

SEQ ID NO: 2124330 - RNA, 20 nt, Human
caugcaaggggaaaaucuca

SEQ ID NO: 2124331 - RNA, 15 nt, Human
cauggccagguggcc

SEQ ID NO: 2124332 - RNA, 20 nt, Human
caugcuccuggcccacugca

SEQ ID NO: 2124333 - RNA, 17 nt, Human
caugcuccuggcccacu

SEQ ID NO: 2124334 - RNA, 14 nt, Human
caugcuccuggccc

SEQ ID NO: 2124335 - RNA, 16 nt, Human
caugcuccuggcccac

SEQ ID NO: 2124336 - RNA, 19 nt, Human
cauuaucacuuuaaagccc

SEQ ID NO: 2124337 - RNA, 19 nt, Human
cauguuggccaggcugguc

SEQ ID NO: 2124338 - RNA, 17 nt, Human
cauguuggccaggcugg

SEQ ID NO: 2124339 - RNA, 18 nt, Human
cauguuggccaggcuggu

SEQ ID NO: 2124340 - RNA, 17 nt, Human
cauguuaccuccuauaa

SEQ ID NO: 2124341 - RNA, 16 nt, Human
cauguuaauccuagcu

SEQ ID NO: 2124342 - RNA, 17 nt, Human
cauguuaauccuagcug

SEQ ID NO: 2124343 - RNA, 22 nt, Human
cauguuaauccuagcugugugc

SEQ ID NO: 2124344 - RNA, 21 nt, Human
cauguuacauaagauaaaugu

SEQ ID NO: 2124345 - RNA, 16 nt, Human
cauguuacauaagaua

SEQ ID NO: 2124346 - RNA, 17 nt, Human
cauguuacauaagauaa

SEQ ID NO: 2124347 - RNA, 20 nt, Human
cauuaucgccuuuugacagc

SEQ ID NO: 2124348 - RNA, 22 nt, Human
cauuaucgccuuuugacagcug

SEQ ID NO: 2124349 - RNA, 16 nt, Human
cauuaucgggagcagu

SEQ ID NO: 2124350 - RNA, 17 nt, Human
cauuaucgggagcagug

SEQ ID NO: 2124351 - RNA, 18 nt, Human
cauuaucgggagcagugu

SEQ ID NO: 2124352 - RNA, 20 nt, Human
cauuaucgggagcagugucu

SEQ ID NO: 2124353 - RNA, 21 nt, Human
cauuaucgggagcagugucuu

SEQ ID NO: 2124354 - RNA, 23 nt, Human
cauuaucgggagcagugucuucc

SEQ ID NO: 2124355 - RNA, 12 nt, Human
cauucucucucc

SEQ ID NO: 2124356 - RNA, 16 nt, Human
cauucucucuccugua

SEQ ID NO: 2124357 - RNA, 15 nt, Human
cauucucucuccugu

SEQ ID NO: 2124358 - RNA, 16 nt, Human
cauucucucuccuguc

SEQ ID NO: 2124359 - RNA, 18 nt, Human
cauucucucuccugucca

SEQ ID NO: 2124360 - RNA, 20 nt, Human
cauucucucuccuguccaac

SEQ ID NO: 2124361 - RNA, 12 nt, Human
cauucucugaag

SEQ ID NO: 2124362 - RNA, 13 nt, Human
cauucucugaaga

SEQ ID NO: 2124363 - RNA, 19 nt, Human
cauuaucuaacugugcuca

SEQ ID NO: 2124364 - RNA, 15 nt, Human
ccaagcucugcuccu

SEQ ID NO: 2124365 - RNA, 14 nt, Human
ccaagcucugcucc

SEQ ID NO: 2124366 - RNA, 16 nt, Human
ccaagcucugcuccuc

SEQ ID NO: 2124367 - RNA, 16 nt, Human
ccaaaucauaguggcu

SEQ ID NO: 2124368 - RNA, 23 nt, Human
ccaaaucagcugcuacuacuccu

SEQ ID NO: 2124369 - RNA, 15 nt, Human
ccaaaucagcugcua

SEQ ID NO: 2124370 - RNA, 15 nt, Human
ccaaaucaaaauaug

SEQ ID NO: 2124371 - RNA, 21 nt, Human
ccaauggagacugucucaaga

SEQ ID NO: 2124372 - RNA, 21 nt, Human
ccaauucaacccuuugcccca

SEQ ID NO: 2124373 - RNA, 11 nt, Human
ccaauucuuac

SEQ ID NO: 2124374 - RNA, 20 nt, Human
ccaauggaguagaccccugg

SEQ ID NO: 2124375 - RNA, 23 nt, Human
ccaauggaguagaccccuggcug

SEQ ID NO: 2124376 - RNA, 14 nt, Human
ccaaggaccccuca

SEQ ID NO: 2124377 - RNA, 15 nt, Human
ccaaggaccccucac

SEQ ID NO: 2124378 - RNA, 16 nt, Human
ccaaggaccccucacc

SEQ ID NO: 2124379 - RNA, 11 nt, Human
ccaacuccagu

SEQ ID NO: 2124380 - RNA, 20 nt, Human
ccaacuccaguacuggagcu

SEQ ID NO: 2124381 - RNA, 21 nt, Human
ccaacuccaguacuggagcuu

SEQ ID NO: 2124382 - RNA, 22 nt, Human
ccaaggaccccucaccuugcaa

SEQ ID NO: 2124383 - RNA, 18 nt, Human
ccaaggaccccucaccuu

SEQ ID NO: 2124384 - RNA, 11 nt, Human
ccaaggacugc

SEQ ID NO: 2124385 - RNA, 13 nt, Human
ccaaggacugccg

SEQ ID NO: 2124386 - RNA, 15 nt, Human
ccaaggacugccgac

SEQ ID NO: 2124387 - RNA, 14 nt, Human
ccaaggagaaacag

SEQ ID NO: 2124388 - RNA, 15 nt, Human
ccaaggagaaacaga

SEQ ID NO: 2124389 - RNA, 18 nt, Human
ccaaggagaaacagagac

SEQ ID NO: 2124390 - RNA, 21 nt, Human
ccaaggagaaacagagacagg

SEQ ID NO: 2124391 - RNA, 19 nt, Human
ccaaggagaaacagagaca

SEQ ID NO: 2124392 - RNA, 18 nt, Human
ccaaugccccacuggcag

SEQ ID NO: 2124393 - RNA, 13 nt, Human
ccaaggaggaaaa

SEQ ID NO: 2124394 - RNA, 21 nt, Human
ccaaggaggaaaaacagacaa

SEQ ID NO: 2124395 - RNA, 14 nt, Human
ccaaggagaugaag

SEQ ID NO: 2124396 - RNA, 15 nt, Human
ccaaggagcugagaa

SEQ ID NO: 2124397 - RNA, 17 nt, Human
ccaaggagcugagaaua

SEQ ID NO: 2124398 - RNA, 20 nt, Human
ccaaggagcugagaauagaa

SEQ ID NO: 2124399 - RNA, 22 nt, Human
ccaaggagcugagaauagaagg

SEQ ID NO: 2124400 - RNA, 23 nt, Human
ccaaggagaugaagcaaacacau

SEQ ID NO: 2124401 - RNA, 14 nt, Human
ccaaagugcuggga

SEQ ID NO: 2124402 - RNA, 20 nt, Human
cauuuggucaagauuuugaa

SEQ ID NO: 2124403 - RNA, 17 nt, Human
cauuugggugguaagag

SEQ ID NO: 2124404 - RNA, 23 nt, Human
cauuugggugguaagagaauguu

SEQ ID NO: 2124405 - RNA, 12 nt, Human
cauuuguaauaa

SEQ ID NO: 2124406 - RNA, 13 nt, Human
cauuuguaauaaa

SEQ ID NO: 2124407 - RNA, 14 nt, Human
cauuuguaauaaag

SEQ ID NO: 2124408 - RNA, 16 nt, Human
cauuuguaauaaagua

SEQ ID NO: 2124409 - RNA, 17 nt, Human
cauuuguaauaaaguau

SEQ ID NO: 2124410 - RNA, 18 nt, Human
cauuuguaauaaaguaua

SEQ ID NO: 2124411 - RNA, 20 nt, Human
cauuuggcuuuccagucaua

SEQ ID NO: 2124412 - RNA, 17 nt, Human
cauuugggguagcuaga

SEQ ID NO: 2124413 - RNA, 22 nt, Human
cauuugggguagcuagaggaac

SEQ ID NO: 2124414 - RNA, 15 nt, Human
cauuuggguaaauca

SEQ ID NO: 2124415 - RNA, 16 nt, Human
cauuuggguaaaucau

SEQ ID NO: 2124416 - RNA, 15 nt, Human
cauuuguuauucuua

SEQ ID NO: 2124417 - RNA, 19 nt, Human
cauuuguuauucuuaagac

SEQ ID NO: 2124418 - RNA, 21 nt, Human
cauuuuuuuucagcagacuau

SEQ ID NO: 2124419 - RNA, 13 nt, Human
ccaaaaaaauaag

SEQ ID NO: 2124420 - RNA, 18 nt, Human
ccaaaaaaauaaggugua

SEQ ID NO: 2124421 - RNA, 17 nt, Human
cauuuuuuuuuuuaauu

SEQ ID NO: 2124422 - RNA, 20 nt, Human
cauuuuuuuuuuuaauuuug

SEQ ID NO: 2124423 - RNA, 22 nt, Human
cauuuuuuuuuuuaauuuugua

SEQ ID NO: 2124424 - RNA, 22 nt, Human
ccaaaagucaaaaggugccugu

SEQ ID NO: 2124425 - RNA, 18 nt, Human
ccaaaaguaucgggggcu

SEQ ID NO: 2124426 - RNA, 21 nt, Human
ccaaaagucaaaaggugccug

SEQ ID NO: 2124427 - RNA, 20 nt, Human
cauuuaguucuuuguuauuu

SEQ ID NO: 2124428 - RNA, 17 nt, Human
cauugguucccuuugcu

SEQ ID NO: 2124429 - RNA, 18 nt, Human
cauugguucccuuugcuc

SEQ ID NO: 2124430 - RNA, 22 nt, Human
cauugguucccuuugcuccacc

SEQ ID NO: 2124431 - RNA, 14 nt, Human
cauuuaguucuuug

SEQ ID NO: 2124432 - RNA, 20 nt, Human
cauuuaguccaaugucuuuu

SEQ ID NO: 2124433 - RNA, 18 nt, Human
cauuggguggguaaauuc

SEQ ID NO: 2124434 - RNA, 19 nt, Human
cauuggguggguaaauuca

SEQ ID NO: 2124435 - RNA, 18 nt, Human
cauuggacccacaugagg

SEQ ID NO: 2124436 - RNA, 19 nt, Human
gcccuagagcacacuguag

SEQ ID NO: 2124437 - RNA, 13 nt, Human
gcccuagagcaca

SEQ ID NO: 2124438 - RNA, 17 nt, Human
gcccuagagcacacugu

SEQ ID NO: 2124439 - RNA, 15 nt, Human
gccccugcccggcug

SEQ ID NO: 2124440 - RNA, 20 nt, Human
gcccgugacauccccacccu

SEQ ID NO: 2124441 - RNA, 23 nt, Human
gcccccagugugcacgaguggga

SEQ ID NO: 2124442 - RNA, 13 nt, Human
gcccguguggccc

SEQ ID NO: 2124443 - RNA, 15 nt, Human
gcccguguggccccu

SEQ ID NO: 2124444 - RNA, 16 nt, Human
gcccguguggccccuu

SEQ ID NO: 2124445 - RNA, 17 nt, Human
gcccguguggccccuuc

SEQ ID NO: 2124446 - RNA, 18 nt, Human
gcccguguggccccuuca

SEQ ID NO: 2124447 - RNA, 20 nt, Human
gcccaugugugagugugugc

SEQ ID NO: 2124448 - RNA, 13 nt, Human
gcccaugugugag

SEQ ID NO: 2124449 - RNA, 14 nt, Human
gcccaugugugagu

SEQ ID NO: 2124450 - RNA, 15 nt, Human
gcccaugugugagug

SEQ ID NO: 2124451 - RNA, 15 nt, Human
gccccaaaaccacag

SEQ ID NO: 2124452 - RNA, 16 nt, Human
gccccaaaaccacagc

SEQ ID NO: 2124453 - RNA, 19 nt, Human
gccccaaaaccacagcccu

SEQ ID NO: 2124454 - RNA, 20 nt, Human
gccccaaaaccacagcccug

SEQ ID NO: 2124455 - RNA, 21 nt, Human
gccccaaaaccacagcccugu

SEQ ID NO: 2124456 - RNA, 22 nt, Human
gccccaaaaccacagcccuguc

SEQ ID NO: 2124457 - RNA, 23 nt, Human
gccccaaaaccacagcccuguca

SEQ ID NO: 2124458 - RNA, 16 nt, Human
gcccccaggcugcugg

SEQ ID NO: 2124459 - RNA, 17 nt, Human
gcccccaggcugcugga

SEQ ID NO: 2124460 - RNA, 14 nt, Human
gccccugccccguc

SEQ ID NO: 2124461 - RNA, 15 nt, Human
gccccugccccguca

SEQ ID NO: 2124462 - RNA, 16 nt, Human
gccccugccccgucac

SEQ ID NO: 2124463 - RNA, 20 nt, Human
gccccugccccgucaccauc

SEQ ID NO: 2124464 - RNA, 22 nt, Human
gccccugccccgucaccaucuc

SEQ ID NO: 2124465 - RNA, 14 nt, Human
gccccugccccuca

SEQ ID NO: 2124466 - RNA, 19 nt, Human
gccccugccccucaugcca

SEQ ID NO: 2124467 - RNA, 14 nt, Human
gccccugcccggcu

SEQ ID NO: 2124468 - RNA, 13 nt, Human
gccccugcccggc

SEQ ID NO: 2124469 - RNA, 21 nt, Human
gcccaugguugagaaaugaau

SEQ ID NO: 2124470 - RNA, 18 nt, Human
gcccacguucucucugcc

SEQ ID NO: 2124471 - RNA, 21 nt, Human
gcccacguucucucugccugu

SEQ ID NO: 2124472 - RNA, 23 nt, Human
gcccacguucucucugccuguga

SEQ ID NO: 2124473 - RNA, 18 nt, Human
gcccacuauggucaucuu

SEQ ID NO: 2124474 - RNA, 21 nt, Human
gcccugcugccgccucccagc

SEQ ID NO: 2124475 - RNA, 22 nt, Human
gcccugcugccgccucccagcc

SEQ ID NO: 2124476 - RNA, 23 nt, Human
gcccugcugccgccucccagccu

SEQ ID NO: 2124477 - RNA, 21 nt, Human
gcccuguucugggugcagcug

SEQ ID NO: 2124478 - RNA, 16 nt, Human
gccgccaugcuccugg

SEQ ID NO: 2124479 - RNA, 20 nt, Human
gccgccaggaccgccaaaga

SEQ ID NO: 2124480 - RNA, 16 nt, Human
gccgccauugccacca

SEQ ID NO: 2124481 - RNA, 17 nt, Human
gccgccauugccaccag

SEQ ID NO: 2124482 - RNA, 18 nt, Human
gccgccauugccaccagg

SEQ ID NO: 2124483 - RNA, 21 nt, Human
gccgccauugccaccaggaga

SEQ ID NO: 2124484 - RNA, 12 nt, Human
gccgccucccag

SEQ ID NO: 2124485 - RNA, 13 nt, Human
gccgccucccagc

SEQ ID NO: 2124486 - RNA, 14 nt, Human
gccgccucccagcc

SEQ ID NO: 2124487 - RNA, 15 nt, Human
gccgccucccagccu

SEQ ID NO: 2124488 - RNA, 16 nt, Human
gccgccucccagccug

SEQ ID NO: 2124489 - RNA, 17 nt, Human
gccgccucccagccugg

SEQ ID NO: 2124490 - RNA, 15 nt, Human
gccgccaugcuccug

SEQ ID NO: 2124491 - RNA, 16 nt, Human
gccgcauucccugagu

SEQ ID NO: 2124492 - RNA, 18 nt, Human
gccgcauucccugaguca

SEQ ID NO: 2124493 - RNA, 19 nt, Human
gccgccugcgggcugcccc

SEQ ID NO: 2124494 - RNA, 23 nt, Human
gccgcuccugucugccagccagc

SEQ ID NO: 2124495 - RNA, 19 nt, Human
gccgccucccagccugggg

SEQ ID NO: 2124496 - RNA, 15 nt, Human
gccgcuguucaccca

SEQ ID NO: 2124497 - RNA, 16 nt, Human
gccgcuguucacccac

SEQ ID NO: 2124498 - RNA, 17 nt, Human
gccgcuguucacccaca

SEQ ID NO: 2124499 - RNA, 23 nt, Human
gccuggcuucuggagcccuuggg

SEQ ID NO: 2124500 - RNA, 18 nt, Human
gccuggcuucuggagccc

SEQ ID NO: 2124501 - RNA, 22 nt, Human
gccuggcuucuggagcccuugg

SEQ ID NO: 2124502 - RNA, 14 nt, Human
gccuggcuucugga

SEQ ID NO: 2124503 - RNA, 15 nt, Human
gccuggcuucuggag

SEQ ID NO: 2124504 - RNA, 16 nt, Human
gccuggcuucuggagc

SEQ ID NO: 2124505 - RNA, 17 nt, Human
gccuggcuucuggagcc

SEQ ID NO: 2124506 - RNA, 21 nt, Human
gccugggaggucaaggcugca

SEQ ID NO: 2124507 - RNA, 23 nt, Human
gccugggaauguauuauucugca

SEQ ID NO: 2124508 - RNA, 21 nt, Human
gccugggaaccuuccugucuu

SEQ ID NO: 2124509 - RNA, 15 nt, Human
gccugggaauguauu

SEQ ID NO: 2124510 - RNA, 22 nt, Human
gccugggaggucaaggcugcag

SEQ ID NO: 2124511 - RNA, 21 nt, Human
gccugugugacaucaguggca

SEQ ID NO: 2124512 - RNA, 17 nt, Human
gccugccuguucccauu

SEQ ID NO: 2124513 - RNA, 16 nt, Human
gccugccucuucucua

SEQ ID NO: 2124514 - RNA, 15 nt, Human
gccugccuucguuaa

SEQ ID NO: 2124515 - RNA, 16 nt, Human
gccugccuugaagcca

SEQ ID NO: 2124516 - RNA, 23 nt, Human
gccugccuugaagccacugaagc

SEQ ID NO: 2124517 - RNA, 18 nt, Human
gccuacuagggaccuggg

SEQ ID NO: 2124518 - RNA, 19 nt, Human
gccuacuagggaccugggg

SEQ ID NO: 2124519 - RNA, 20 nt, Human
gccuacuagggaccugggga

SEQ ID NO: 2124520 - RNA, 22 nt, Human
gccuacuagggaccuggggaag

SEQ ID NO: 2124521 - RNA, 12 nt, Human
gccuacucacga

SEQ ID NO: 2124522 - RNA, 22 nt, Human
gccuaccggcaauuuccggcca

SEQ ID NO: 2124523 - RNA, 14 nt, Human
gccuacauuaucua

SEQ ID NO: 2124524 - RNA, 15 nt, Human
gccggccagcuggga

SEQ ID NO: 2124525 - RNA, 12 nt, Human
gccggcccuggg

SEQ ID NO: 2124526 - RNA, 20 nt, Human
gccggcccuggggcuaggcu

SEQ ID NO: 2124527 - RNA, 13 nt, Human
gccggcccugggg

SEQ ID NO: 2124528 - RNA, 14 nt, Human
gccggcccuggggc

SEQ ID NO: 2124529 - RNA, 13 nt, Human
gccuccuccagcc

SEQ ID NO: 2124530 - RNA, 16 nt, Human
gccuccucuaacaggg

SEQ ID NO: 2124531 - RNA, 18 nt, Human
gccuccuguguagcuggg

SEQ ID NO: 2124532 - RNA, 13 nt, Human
gccuccuguguaa

SEQ ID NO: 2124533 - RNA, 13 nt, Human
gccuccugugugu

SEQ ID NO: 2124534 - RNA, 12 nt, Human
gccucugcuggc

SEQ ID NO: 2124535 - RNA, 15 nt, Human
gccucugcugccaug

SEQ ID NO: 2124536 - RNA, 17 nt, Human
gccucuggaggccucug

SEQ ID NO: 2124537 - RNA, 19 nt, Human
gccucuggaggccucuggg

SEQ ID NO: 2124538 - RNA, 20 nt, Human
gccucuggaggccucugggc

SEQ ID NO: 2124539 - RNA, 21 nt, Human
gccucuggaggccucugggcc

SEQ ID NO: 2124540 - RNA, 17 nt, Human
gccucuggauuguggga

SEQ ID NO: 2124541 - RNA, 12 nt, Human
gccucuggcuag

SEQ ID NO: 2124542 - RNA, 22 nt, Human
gccucuggcuagaggccagccc

SEQ ID NO: 2124543 - RNA, 23 nt, Human
gccucuggcuagaggccagcccc

SEQ ID NO: 2124544 - RNA, 12 nt, Human
gccucugggacu

SEQ ID NO: 2124545 - RNA, 13 nt, Human
gccucuggcuaga

SEQ ID NO: 2124546 - RNA, 18 nt, Human
gccucuggcuagaggcca

SEQ ID NO: 2124547 - RNA, 19 nt, Human
gccucuggcuagaggccag

SEQ ID NO: 2124548 - RNA, 21 nt, Human
gccucuggcuagaggccagcc

SEQ ID NO: 2124549 - RNA, 20 nt, Human
gccugcccaggccccugcca

SEQ ID NO: 2124550 - RNA, 19 nt, Human
gccugcccaggccccugcc

SEQ ID NO: 2124551 - RNA, 17 nt, Human
gccugccuagcacucac

SEQ ID NO: 2124552 - RNA, 21 nt, Human
gccugccuagcacucacaugc

SEQ ID NO: 2124553 - RNA, 22 nt, Human
gccugccuagcacucacaugcu

SEQ ID NO: 2124554 - RNA, 18 nt, Human
gccugcccaggccccugc

SEQ ID NO: 2124555 - RNA, 17 nt, Human
gccugcccaggccccug

SEQ ID NO: 2124556 - RNA, 20 nt, Human
gccucuugcggucccuucuu

SEQ ID NO: 2124557 - RNA, 12 nt, Human
gccucuuccucc

SEQ ID NO: 2124558 - RNA, 22 nt, Human
gccucuuccucccucauuccac

SEQ ID NO: 2124559 - RNA, 18 nt, Human
gccucuuaaagcugccug

SEQ ID NO: 2124560 - RNA, 16 nt, Human
gccucuucuucuucag

SEQ ID NO: 2124561 - RNA, 20 nt, Human
gccucuucuucuucagaaga

SEQ ID NO: 2124562 - RNA, 21 nt, Human
gccucuucuucuucagaagac

SEQ ID NO: 2124563 - RNA, 15 nt, Human
gccucuucuucuuca

SEQ ID NO: 2124564 - RNA, 19 nt, Human
gccucuuaaagcugccugu

SEQ ID NO: 2124565 - RNA, 17 nt, Human
gccucuucuagagccgu

SEQ ID NO: 2124566 - RNA, 12 nt, Human
gccucuucucua

SEQ ID NO: 2124567 - RNA, 23 nt, Human
gccucuucucuacucuagggaaa

SEQ ID NO: 2124568 - RNA, 14 nt, Human
gccaggccuggguc

SEQ ID NO: 2124569 - RNA, 21 nt, Human
gccaggccugggucugugucu

SEQ ID NO: 2124570 - RNA, 13 nt, Human
gccaggccagagg

SEQ ID NO: 2124571 - RNA, 12 nt, Human
gccaggccagag

SEQ ID NO: 2124572 - RNA, 19 nt, Human
gccaggaguuugagaccag

SEQ ID NO: 2124573 - RNA, 21 nt, Human
gccagcacccccacgcccuca

SEQ ID NO: 2124574 - RNA, 12 nt, Human
gccagccagcag

SEQ ID NO: 2124575 - RNA, 13 nt, Human
gccagccagcagc

SEQ ID NO: 2124576 - RNA, 14 nt, Human
gccagccagcagcc

SEQ ID NO: 2124577 - RNA, 20 nt, Human
gccaggagcucuucaggccu

SEQ ID NO: 2124578 - RNA, 23 nt, Human
gccaggagcugggcagaaggcca

SEQ ID NO: 2124579 - RNA, 22 nt, Human
gccaggagcugggcagaaggcc

SEQ ID NO: 2124580 - RNA, 13 nt, Human
gccaggagcuggg

SEQ ID NO: 2124581 - RNA, 22 nt, Human
gccaggagcucuucaggccucc

SEQ ID NO: 2124582 - RNA, 16 nt, Human
gccagcagccagcucu

SEQ ID NO: 2124583 - RNA, 17 nt, Human
gccagcagccagcucuc

SEQ ID NO: 2124584 - RNA, 18 nt, Human
gccagcagccagcucuca

SEQ ID NO: 2124585 - RNA, 19 nt, Human
gccagcagccagcucucag

SEQ ID NO: 2124586 - RNA, 20 nt, Human
gccagcagccagcucucagc

SEQ ID NO: 2124587 - RNA, 21 nt, Human
gccagcagccagcucucagcc

SEQ ID NO: 2124588 - RNA, 22 nt, Human
gccagcagccagcucucagcca

SEQ ID NO: 2124589 - RNA, 23 nt, Human
gccagcagccagcucucagccaa

SEQ ID NO: 2124590 - RNA, 12 nt, Human
gccagcagccag

SEQ ID NO: 2124591 - RNA, 13 nt, Human
gccagcagccagc

SEQ ID NO: 2124592 - RNA, 15 nt, Human
gccagcagccagcuc

SEQ ID NO: 2124593 - RNA, 21 nt, Human
gccagaaguuugucaagucaa

SEQ ID NO: 2124594 - RNA, 14 nt, Human
gccagacauguggu

SEQ ID NO: 2124595 - RNA, 13 nt, Human
gccagaccagagc

SEQ ID NO: 2124596 - RNA, 14 nt, Human
gccagaccagagcu

SEQ ID NO: 2124597 - RNA, 15 nt, Human
gccagaccagagcuc

SEQ ID NO: 2124598 - RNA, 17 nt, Human
gccagaccagagcucug

SEQ ID NO: 2124599 - RNA, 19 nt, Human
gccagaccagagcucugga

SEQ ID NO: 2124600 - RNA, 14 nt, Human
gccagaaccccgag

SEQ ID NO: 2124601 - RNA, 15 nt, Human
gccagaaccccgagc

SEQ ID NO: 2124602 - RNA, 20 nt, Human
gccagaaccccgagcccuac

SEQ ID NO: 2124603 - RNA, 21 nt, Human
gccagaagcugagcaccaggg

SEQ ID NO: 2124604 - RNA, 18 nt, Human
gccagaagggggccauga

SEQ ID NO: 2124605 - RNA, 12 nt, Human
gccagaagcuga

SEQ ID NO: 2124606 - RNA, 22 nt, Human
gccagacggcacccacccagca

SEQ ID NO: 2124607 - RNA, 23 nt, Human
gccagacggcacccacccagcac

SEQ ID NO: 2124608 - RNA, 15 nt, Human
gccagcaagguggag

SEQ ID NO: 2124609 - RNA, 18 nt, Human
gccagcaagguggagugg

SEQ ID NO: 2124610 - RNA, 20 nt, Human
gccauauucuguuggccagu

SEQ ID NO: 2124611 - RNA, 19 nt, Human
gccauauucuguuggccag

SEQ ID NO: 2124612 - RNA, 14 nt, Human
gccauguuggccag

SEQ ID NO: 2124613 - RNA, 15 nt, Human
gccaugugaagaggg

SEQ ID NO: 2124614 - RNA, 17 nt, Human
gccaugugaagagggag

SEQ ID NO: 2124615 - RNA, 18 nt, Human
gccauguuggccaggcug

SEQ ID NO: 2124616 - RNA, 17 nt, Human
gccauguuggccaggcu

SEQ ID NO: 2124617 - RNA, 16 nt, Human
gccauguuggccaggc

SEQ ID NO: 2124618 - RNA, 15 nt, Human
gccauguuggccagg

SEQ ID NO: 2124619 - RNA, 24 nt, Human
gccauguuggccaggcuggucuca

SEQ ID NO: 2124620 - RNA, 22 nt, Human
gccauguuggccaggcuggucu

SEQ ID NO: 2124621 - RNA, 20 nt, Human
gccauguuggccaggcuggu

SEQ ID NO: 2124622 - RNA, 19 nt, Human
gccauguuggccaggcugg

SEQ ID NO: 2124623 - RNA, 18 nt, Human
gccauucucaagcccugc

SEQ ID NO: 2124624 - RNA, 16 nt, Human
gccauucucaagcccu

SEQ ID NO: 2124625 - RNA, 14 nt, Human
gccauuccaacagc

SEQ ID NO: 2124626 - RNA, 14 nt, Human
gccauguuuaagau

SEQ ID NO: 2124627 - RNA, 15 nt, Human
gccauguuuaagauu

SEQ ID NO: 2124628 - RNA, 16 nt, Human
gccauguuuaagauuu

SEQ ID NO: 2124629 - RNA, 17 nt, Human
gccauguuuaagauuua

SEQ ID NO: 2124630 - RNA, 21 nt, Human
gccauguuuaagauuuaauuu

SEQ ID NO: 2124631 - RNA, 17 nt, Human
gcccacgcuggagugca

SEQ ID NO: 2124632 - RNA, 16 nt, Human
gcccacgcuggagugc

SEQ ID NO: 2124633 - RNA, 15 nt, Human
gcccacgcuggagug

SEQ ID NO: 2124634 - RNA, 18 nt, Human
gcccaccuuggcucaagu

SEQ ID NO: 2124635 - RNA, 18 nt, Human
gcacuuggagacuuguau

SEQ ID NO: 2124636 - RNA, 13 nt, Human
gcacuuggagcca

SEQ ID NO: 2124637 - RNA, 16 nt, Human
gcacuuggagccaagg

SEQ ID NO: 2124638 - RNA, 14 nt, Human
gcacuuggccucug

SEQ ID NO: 2124639 - RNA, 22 nt, Human
gcacuuggagccaaggguucag

SEQ ID NO: 2124640 - RNA, 16 nt, Human
gccaccacguccagcu

SEQ ID NO: 2124641 - RNA, 14 nt, Human
gccaccacguccag

SEQ ID NO: 2124642 - RNA, 15 nt, Human
gccaccacguccagc

SEQ ID NO: 2124643 - RNA, 16 nt, Human
gccaccaugcccagcu

SEQ ID NO: 2124644 - RNA, 22 nt, Human
gccaccaugcccagcucagagg

SEQ ID NO: 2124645 - RNA, 14 nt, Human
gccaccauggccag

SEQ ID NO: 2124646 - RNA, 16 nt, Human
gccaccauggccagcc

SEQ ID NO: 2124647 - RNA, 17 nt, Human
gccaccauggccagcca

SEQ ID NO: 2124648 - RNA, 18 nt, Human
gccaccauggccagccaa

SEQ ID NO: 2124649 - RNA, 16 nt, Human
gccaccaggucaucuc

SEQ ID NO: 2124650 - RNA, 22 nt, Human
gccaccauauucagugcugugg

SEQ ID NO: 2124651 - RNA, 23 nt, Human
gccaccauauucagugcuguggc

SEQ ID NO: 2124652 - RNA, 16 nt, Human
gccaccaacuggcccu

SEQ ID NO: 2124653 - RNA, 18 nt, Human
gccaccaacuggcccucu

SEQ ID NO: 2124654 - RNA, 19 nt, Human
gccaccaacuggcccucuu

SEQ ID NO: 2124655 - RNA, 18 nt, Human
gccaccccgggcucucug

SEQ ID NO: 2124656 - RNA, 19 nt, Human
gccaccccgggcucucugc

SEQ ID NO: 2124657 - RNA, 15 nt, Human
gccacccucccagcu

SEQ ID NO: 2124658 - RNA, 16 nt, Human
gccacccucccagcuc

SEQ ID NO: 2124659 - RNA, 18 nt, Human
gccacccucccagcucug

SEQ ID NO: 2124660 - RNA, 15 nt, Human
gccaccccuccuucc

SEQ ID NO: 2124661 - RNA, 21 nt, Human
gccaccccgggcucucugcug

SEQ ID NO: 2124662 - RNA, 16 nt, Human
gccaccccuccuuccu

SEQ ID NO: 2124663 - RNA, 23 nt, Human
gccacugcaccgggccacagaga

SEQ ID NO: 2124664 - RNA, 19 nt, Human
gccacccuggggagaaagu

SEQ ID NO: 2124665 - RNA, 13 nt, Human
gccacccugggga

SEQ ID NO: 2124666 - RNA, 12 nt, Human
gccacugcacuc

SEQ ID NO: 2124667 - RNA, 19 nt, Human
gccacugcacuccaaucug

SEQ ID NO: 2124668 - RNA, 18 nt, Human
gccacugcacuccagccu

SEQ ID NO: 2124669 - RNA, 21 nt, Human
gccacugcacuauagccuagg

SEQ ID NO: 2124670 - RNA, 19 nt, Human
gccacugcauaccaaccug

SEQ ID NO: 2124671 - RNA, 16 nt, Human
gccacugcccgagcug

SEQ ID NO: 2124672 - RNA, 17 nt, Human
gccacugcccgagcugg

SEQ ID NO: 2124673 - RNA, 18 nt, Human
gccacugcccgagcuggu

SEQ ID NO: 2124674 - RNA, 19 nt, Human
gccacugcacuccagccug

SEQ ID NO: 2124675 - RNA, 20 nt, Human
gccacugcacuccagccugg

SEQ ID NO: 2124676 - RNA, 21 nt, Human
gccacugcacuccagccuggg

SEQ ID NO: 2124677 - RNA, 22 nt, Human
gccacugcacuccagccugggc

SEQ ID NO: 2124678 - RNA, 21 nt, Human
gccacuugaugacccccaacc

SEQ ID NO: 2124679 - RNA, 22 nt, Human
gccacuuaccuucaauaaagua

SEQ ID NO: 2124680 - RNA, 23 nt, Human
gccacuuaccuucaauaaaguau

SEQ ID NO: 2124681 - RNA, 14 nt, Human
gccacuuaccuuca

SEQ ID NO: 2124682 - RNA, 19 nt, Human
gccacuuaccuucaauaaa

SEQ ID NO: 2124683 - RNA, 21 nt, Human
gccacuuaccuucaauaaagu

SEQ ID NO: 2124684 - RNA, 12 nt, Human
gccagaaauaaa

SEQ ID NO: 2124685 - RNA, 16 nt, Human
gccagaacaguuugua

SEQ ID NO: 2124686 - RNA, 18 nt, Human
gccagaacaguuuguaca

SEQ ID NO: 2124687 - RNA, 21 nt, Human
gccacuuugguacauggccag

SEQ ID NO: 2124688 - RNA, 22 nt, Human
gccacuuugguacauggccagu

SEQ ID NO: 2124689 - RNA, 23 nt, Human
gccacuuugguacauggccagug

SEQ ID NO: 2124690 - RNA, 23 nt, Human
gccacuuuugacuagggauucag

SEQ ID NO: 2124691 - RNA, 17 nt, Human
gccacugccucuuccuc

SEQ ID NO: 2124692 - RNA, 16 nt, Human
gccacugccucuuccu

SEQ ID NO: 2124693 - RNA, 13 nt, Human
gccacugccucuu

SEQ ID NO: 2124694 - RNA, 12 nt, Human
gccacugccucu

SEQ ID NO: 2124695 - RNA, 19 nt, Human
gccacugcccgagcuggug

SEQ ID NO: 2124696 - RNA, 21 nt, Human
gccacugcccgagcuggugca

SEQ ID NO: 2124697 - RNA, 18 nt, Human
gccacugugaagagaacc

SEQ ID NO: 2124698 - RNA, 19 nt, Human
gccacugugaagagaacca

SEQ ID NO: 2124699 - RNA, 12 nt, Human
gcucaccugggg

SEQ ID NO: 2124700 - RNA, 13 nt, Human
gcucaccuggggu

SEQ ID NO: 2124701 - RNA, 22 nt, Human
gcucaccuggggugugggaggc

SEQ ID NO: 2124702 - RNA, 22 nt, Human
gcuauguauggaauacaguguu

SEQ ID NO: 2124703 - RNA, 18 nt, Human
gcuauggggagaaaagac

SEQ ID NO: 2124704 - RNA, 19 nt, Human
gcuaugggagccccagggu

SEQ ID NO: 2124705 - RNA, 21 nt, Human
gcuaugggagccccagggucu

SEQ ID NO: 2124706 - RNA, 18 nt, Human
gcuaggauguugcucaga

SEQ ID NO: 2124707 - RNA, 15 nt, Human
gcuaggccuggccag

SEQ ID NO: 2124708 - RNA, 14 nt, Human
gcuaggccuggcca

SEQ ID NO: 2124709 - RNA, 18 nt, Human
gcuaggcauacaaguagg

SEQ ID NO: 2124710 - RNA, 18 nt, Human
gcuaugggagccccaggg

SEQ ID NO: 2124711 - RNA, 19 nt, Human
gccuguucagcuccagcuc

SEQ ID NO: 2124712 - RNA, 22 nt, Human
gccugugugacaucaguggcau

SEQ ID NO: 2124713 - RNA, 20 nt, Human
gccuguucagcuccagcuca

SEQ ID NO: 2124714 - RNA, 21 nt, Human
gccuguuagcaugcuggugag

SEQ ID NO: 2124715 - RNA, 20 nt, Human
gcucaggggcguguggcuca

SEQ ID NO: 2124716 - RNA, 17 nt, Human
gcucagguacagagaag

SEQ ID NO: 2124717 - RNA, 19 nt, Human
gcucagguacagagaagga

SEQ ID NO: 2124718 - RNA, 20 nt, Human
gcucagguacagagaaggaa

SEQ ID NO: 2124719 - RNA, 21 nt, Human
gcucagguacagagaaggaau

SEQ ID NO: 2124720 - RNA, 23 nt, Human
gcucagguacagagaaggaaugu

SEQ ID NO: 2124721 - RNA, 13 nt, Human
gcucacgugugug

SEQ ID NO: 2124722 - RNA, 15 nt, Human
gcucacgugugugac

SEQ ID NO: 2124723 - RNA, 17 nt, Human
gcucacgugugugacuc

SEQ ID NO: 2124724 - RNA, 21 nt, Human
gcucacgccuaugaucccagc

SEQ ID NO: 2124725 - RNA, 22 nt, Human
gcucacgccuaugaucccagca

SEQ ID NO: 2124726 - RNA, 22 nt, Human
gcucacgugagagugucuucac

SEQ ID NO: 2124727 - RNA, 14 nt, Human
gcucacgucacacu

SEQ ID NO: 2124728 - RNA, 15 nt, Human
gcucacgucacacuu

SEQ ID NO: 2124729 - RNA, 21 nt, Human
gcucacgccuguaaucccagc

SEQ ID NO: 2124730 - RNA, 22 nt, Human
gcucacgccuguaaucccagca

SEQ ID NO: 2124731 - RNA, 12 nt, Human
gcucuaauugaa

SEQ ID NO: 2124732 - RNA, 22 nt, Human
gcucuacagcuaaucagcauuc

SEQ ID NO: 2124733 - RNA, 20 nt, Human
gcucuacagcuaaucagcau

SEQ ID NO: 2124734 - RNA, 13 nt, Human
gcuccccagccca

SEQ ID NO: 2124735 - RNA, 14 nt, Human
gcuccccagcccag

SEQ ID NO: 2124736 - RNA, 15 nt, Human
gcuccccagcccagg

SEQ ID NO: 2124737 - RNA, 16 nt, Human
gcuccccagcccaggg

SEQ ID NO: 2124738 - RNA, 15 nt, Human
gcuccccucccuccu

SEQ ID NO: 2124739 - RNA, 11 nt, Human
gcuccucuggg

SEQ ID NO: 2124740 - RNA, 19 nt, Human
gcuccucugggcaggaccu

SEQ ID NO: 2124741 - RNA, 12 nt, Human
gcuccucugggc

SEQ ID NO: 2124742 - RNA, 13 nt, Human
gcuccucugggca

SEQ ID NO: 2124743 - RNA, 14 nt, Human
gcuccucugggcag

SEQ ID NO: 2124744 - RNA, 16 nt, Human
gcuccucugggcagga

SEQ ID NO: 2124745 - RNA, 21 nt, Human
gcucugaccgaaacagcgcug

SEQ ID NO: 2124746 - RNA, 21 nt, Human
gcucugagcaaauguggcucc

SEQ ID NO: 2124747 - RNA, 20 nt, Human
gcucugagcaaauguggcuc

SEQ ID NO: 2124748 - RNA, 11 nt, Human
gcucugcacag

SEQ ID NO: 2124749 - RNA, 12 nt, Human
gcucugcacaga

SEQ ID NO: 2124750 - RNA, 13 nt, Human
gcucugcacagau

SEQ ID NO: 2124751 - RNA, 14 nt, Human
gcucugcacagaug

SEQ ID NO: 2124752 - RNA, 18 nt, Human
gcucugcacagauggauu

SEQ ID NO: 2124753 - RNA, 15 nt, Human
gcucugcacagaugg

SEQ ID NO: 2124754 - RNA, 15 nt, Human
gcucuggccuccaag

SEQ ID NO: 2124755 - RNA, 17 nt, Human
gcucuggccuccaaguc

SEQ ID NO: 2124756 - RNA, 14 nt, Human
gcucuggcucacag

SEQ ID NO: 2124757 - RNA, 15 nt, Human
gcucuggcucacaga

SEQ ID NO: 2124758 - RNA, 18 nt, Human
gcucuggcucacagacug

SEQ ID NO: 2124759 - RNA, 22 nt, Human
gcucuggcucacagacuggaga

SEQ ID NO: 2124760 - RNA, 21 nt, Human
gcucuggcucuccccaauauc

SEQ ID NO: 2124761 - RNA, 14 nt, Human
gcucuguccuggga

SEQ ID NO: 2124762 - RNA, 15 nt, Human
gcucuguccugggag

SEQ ID NO: 2124763 - RNA, 16 nt, Human
gcucuguccugggagu

SEQ ID NO: 2124764 - RNA, 21 nt, Human
gcucugggauagcugacccag

SEQ ID NO: 2124765 - RNA, 17 nt, Human
gcucuguguugccaugu

SEQ ID NO: 2124766 - RNA, 12 nt, Human
gcucuucaggcc

SEQ ID NO: 2124767 - RNA, 15 nt, Human
gcucuucaggccucc

SEQ ID NO: 2124768 - RNA, 18 nt, Human
gcucuucaggccucccuc

SEQ ID NO: 2124769 - RNA, 12 nt, Human
gcugaaauacug

SEQ ID NO: 2124770 - RNA, 19 nt, Human
gcucuucagugggagaaaa

SEQ ID NO: 2124771 - RNA, 20 nt, Human
gcugaaauacugaggggucu

SEQ ID NO: 2124772 - RNA, 22 nt, Human
gcugaagcuuauuaaugcuaag

SEQ ID NO: 2124773 - RNA, 21 nt, Human
gcugaagcuuauuaaugcuaa

SEQ ID NO: 2124774 - RNA, 19 nt, Human
gcugaagccgccaggaccg

SEQ ID NO: 2124775 - RNA, 17 nt, Human
gcugaaugguuuucaaa

SEQ ID NO: 2124776 - RNA, 22 nt, Human
gcugaauacagaggcaacugca

SEQ ID NO: 2124777 - RNA, 15 nt, Human
gcugacagacacagg

SEQ ID NO: 2124778 - RNA, 14 nt, Human
gcugacagacacag

SEQ ID NO: 2124779 - RNA, 16 nt, Human
gcugacagacacaggc

SEQ ID NO: 2124780 - RNA, 20 nt, Human
gcuuccauuugugugugugc

SEQ ID NO: 2124781 - RNA, 14 nt, Human
gcuuccccucucuc

SEQ ID NO: 2124782 - RNA, 16 nt, Human
gcuuccccucucuccu

SEQ ID NO: 2124783 - RNA, 16 nt, Human
gcuucccccauagcca

SEQ ID NO: 2124784 - RNA, 18 nt, Human
gcuucccccauagccacc

SEQ ID NO: 2124785 - RNA, 14 nt, Human
gcuucccccauagc

SEQ ID NO: 2124786 - RNA, 15 nt, Human
gcuucccccauagcc

SEQ ID NO: 2124787 - RNA, 17 nt, Human
gcuucccucugccuguc

SEQ ID NO: 2124788 - RNA, 19 nt, Human
gcuucccucugccuguccc

SEQ ID NO: 2124789 - RNA, 20 nt, Human
gcuucccucugccugucccu

SEQ ID NO: 2124790 - RNA, 23 nt, Human
gcuucccucugccugucccucuc

SEQ ID NO: 2124791 - RNA, 18 nt, Human
gcuucccgcucagcccuc

SEQ ID NO: 2124792 - RNA, 17 nt, Human
gcuucccgcucagcccu

SEQ ID NO: 2124793 - RNA, 16 nt, Human
gcuucccgcucagccc

SEQ ID NO: 2124794 - RNA, 15 nt, Human
gcuucccgcucagcc

SEQ ID NO: 2124795 - RNA, 12 nt, Human
gcuucccucugc

SEQ ID NO: 2124796 - RNA, 13 nt, Human
gcuucccucugcc

SEQ ID NO: 2124797 - RNA, 15 nt, Human
gcuucccucugccug

SEQ ID NO: 2124798 - RNA, 23 nt, Human
gcuucccgcucagcccucccugc

SEQ ID NO: 2124799 - RNA, 18 nt, Human
gcuuccccucucuccucc

SEQ ID NO: 2124800 - RNA, 22 nt, Human
gcuuccuuggcaucacagggca

SEQ ID NO: 2124801 - RNA, 22 nt, Human
gcuuccuuuguuuuuuuuuccu

SEQ ID NO: 2124802 - RNA, 23 nt, Human
gcuuccuuuguuuuuuuuuccug

SEQ ID NO: 2124803 - RNA, 19 nt, Human
gcuucgaggcccagcgacc

SEQ ID NO: 2124804 - RNA, 21 nt, Human
gcuucgaggcccagcgaccuc

SEQ ID NO: 2124805 - RNA, 23 nt, Human
gcuucuuuuaguuguaucucuuu

SEQ ID NO: 2124806 - RNA, 16 nt, Human
gcuuggggcuuccuaa

SEQ ID NO: 2124807 - RNA, 24 nt, Human
gcuugggggaugacuagaggcagg

SEQ ID NO: 2124808 - RNA, 19 nt, Human
gcuuggguguaacaggucu

SEQ ID NO: 2124809 - RNA, 21 nt, Human
gcuuggguguaacaggucucc

SEQ ID NO: 2124810 - RNA, 14 nt, Human
gcuucagccaggag

SEQ ID NO: 2124811 - RNA, 17 nt, Human
gcuucagcauauuuaua

SEQ ID NO: 2124812 - RNA, 19 nt, Human
gcuucagcauauuuauagc

SEQ ID NO: 2124813 - RNA, 20 nt, Human
gcuucacggaagagccuugc

SEQ ID NO: 2124814 - RNA, 20 nt, Human
gcuucaauuuauugcacaaa

SEQ ID NO: 2124815 - RNA, 18 nt, Human
gcuucaagucugugccug

SEQ ID NO: 2124816 - RNA, 22 nt, Human
gcuucaagucugugccuggagc

SEQ ID NO: 2124817 - RNA, 23 nt, Human
gcuucaagucugugccuggagcu

SEQ ID NO: 2124818 - RNA, 20 nt, Human
gcugugaacaagugaacaca

SEQ ID NO: 2124819 - RNA, 22 nt, Human
gcugugaccauuuauaauguua

SEQ ID NO: 2124820 - RNA, 19 nt, Human
gcugugacccucaauucau

SEQ ID NO: 2124821 - RNA, 21 nt, Human
gcugugcucuggacaggcaug

SEQ ID NO: 2124822 - RNA, 14 nt, Human
gcuguggcaggcca

SEQ ID NO: 2124823 - RNA, 23 nt, Human
gcuguggcaggccagcugugguu

SEQ ID NO: 2124824 - RNA, 15 nt, Human
gcuuaaaacuuuuca

SEQ ID NO: 2124825 - RNA, 16 nt, Human
gcuuaaaacuuuucaa

SEQ ID NO: 2124826 - RNA, 18 nt, Human
gcuguugucauugcuuua

SEQ ID NO: 2124827 - RNA, 22 nt, Human
gcuguugucauugcuuuacugg

SEQ ID NO: 2124828 - RNA, 22 nt, Human
gcuguuggcugggggccucagu

SEQ ID NO: 2124829 - RNA, 21 nt, Human
gcuguuggcugggggccucag

SEQ ID NO: 2124830 - RNA, 20 nt, Human
gcuggguguauuaggacugg

SEQ ID NO: 2124831 - RNA, 22 nt, Human
gcuggguguauuaggacuggcu

SEQ ID NO: 2124832 - RNA, 21 nt, Human
gcuggguuggaggguguccca

SEQ ID NO: 2124833 - RNA, 14 nt, Human
gcuggguuggaggg

SEQ ID NO: 2124834 - RNA, 14 nt, Human
gcugguuuuucagu

SEQ ID NO: 2124835 - RNA, 15 nt, Human
gcugguuuuucaguu

SEQ ID NO: 2124836 - RNA, 15 nt, Human
gcuguaaauaaaugc

SEQ ID NO: 2124837 - RNA, 14 nt, Human
gcuguaaauaaaug

SEQ ID NO: 2124838 - RNA, 14 nt, Human
gcuguaaaaucuug

SEQ ID NO: 2124839 - RNA, 16 nt, Human
gcuguaagaagagacu

SEQ ID NO: 2124840 - RNA, 24 nt, Human
gcuguaagaagagacugggaagau

SEQ ID NO: 2124841 - RNA, 23 nt, Human
gcuguaucccaugagccucagca

SEQ ID NO: 2124842 - RNA, 20 nt, Human
gcuguaucccaugagccuca

SEQ ID NO: 2124843 - RNA, 16 nt, Human
gcuguaucuuguuuuu

SEQ ID NO: 2124844 - RNA, 18 nt, Human
gcuguaucuuguuuuucc

SEQ ID NO: 2124845 - RNA, 14 nt, Human
gcuguaucuuguuu

SEQ ID NO: 2124846 - RNA, 18 nt, Human
gcugagggugagugggug

SEQ ID NO: 2124847 - RNA, 22 nt, Human
gcugaggggaggaucacuggag

SEQ ID NO: 2124848 - RNA, 11 nt, Human
gcugaggggca

SEQ ID NO: 2124849 - RNA, 23 nt, Human
gcugaggggcaacgaagaaaaaa

SEQ ID NO: 2124850 - RNA, 15 nt, Human
gcugagggaccagcc

SEQ ID NO: 2124851 - RNA, 16 nt, Human
gcugagggaccagcca

SEQ ID NO: 2124852 - RNA, 12 nt, Human
gcugaggaaagg

SEQ ID NO: 2124853 - RNA, 15 nt, Human
gcugaggaaaggcca

SEQ ID NO: 2124854 - RNA, 16 nt, Human
gcugaggaaaggccag

SEQ ID NO: 2124855 - RNA, 17 nt, Human
gcugaggaaaggccagc

SEQ ID NO: 2124856 - RNA, 21 nt, Human
gcugaggaaaggccagcuggc

SEQ ID NO: 2124857 - RNA, 22 nt, Human
gcugaggaaaggccagcuggca

SEQ ID NO: 2124858 - RNA, 23 nt, Human
gcugaggaaaggccagcuggcag

SEQ ID NO: 2124859 - RNA, 17 nt, Human
gcugcaccugccagccu

SEQ ID NO: 2124860 - RNA, 18 nt, Human
gcugcaccugccagccug

SEQ ID NO: 2124861 - RNA, 19 nt, Human
gcugcaccugccagccugg

SEQ ID NO: 2124862 - RNA, 20 nt, Human
gcugcaccugccagccuggc

SEQ ID NO: 2124863 - RNA, 23 nt, Human
gcugccauccagguucagcuugu

SEQ ID NO: 2124864 - RNA, 23 nt, Human
gcugccauggcgugucccucucg

SEQ ID NO: 2124865 - RNA, 22 nt, Human
gcugccauggcgugucccucuc

SEQ ID NO: 2124866 - RNA, 21 nt, Human
gcugccauccagguucagcuu

SEQ ID NO: 2124867 - RNA, 12 nt, Human
gcugccagagaa

SEQ ID NO: 2124868 - RNA, 21 nt, Human
gcugcaccugccagccuggcu

SEQ ID NO: 2124869 - RNA, 22 nt, Human
gcugcaccugccagccuggcuu

SEQ ID NO: 2124870 - RNA, 12 nt, Human
gcugcugcugcu

SEQ ID NO: 2124871 - RNA, 20 nt, Human
gcugcugcuaaucuucaggg

SEQ ID NO: 2124872 - RNA, 23 nt, Human
gcugcugccuuuagucgcugagg

SEQ ID NO: 2124873 - RNA, 13 nt, Human
gcugcucugccca

SEQ ID NO: 2124874 - RNA, 14 nt, Human
gcugcucugcccag

SEQ ID NO: 2124875 - RNA, 15 nt, Human
gcugcucugcccaga

SEQ ID NO: 2124876 - RNA, 16 nt, Human
gcugcucugcccagag

SEQ ID NO: 2124877 - RNA, 17 nt, Human
gcugcucugcccagagc

SEQ ID NO: 2124878 - RNA, 18 nt, Human
gcugcucugcccagagcu

SEQ ID NO: 2124879 - RNA, 19 nt, Human
gcugcucugcccagagcug

SEQ ID NO: 2124880 - RNA, 20 nt, Human
gcugcucugcccagagcugg

SEQ ID NO: 2124881 - RNA, 21 nt, Human
gcugcucugcccagagcuggg

SEQ ID NO: 2124882 - RNA, 17 nt, Human
gcugcuccuuagcugcc

SEQ ID NO: 2124883 - RNA, 18 nt, Human
gcugcuccuuagcugcca

SEQ ID NO: 2124884 - RNA, 19 nt, Human
gcugcuccuuagcugccaa

SEQ ID NO: 2124885 - RNA, 20 nt, Human
gcugcuccuuagcugccaag

SEQ ID NO: 2124886 - RNA, 23 nt, Human
gcugcuccuuagcugccaagccc

SEQ ID NO: 2124887 - RNA, 13 nt, Human
gcugcuccucaug

SEQ ID NO: 2124888 - RNA, 11 nt, Human
gcugcuccucc

SEQ ID NO: 2124889 - RNA, 12 nt, Human
gcugcuccucca

SEQ ID NO: 2124890 - RNA, 14 nt, Human
gcugcuccuccagg

SEQ ID NO: 2124891 - RNA, 15 nt, Human
gcugcuccuccaggg

SEQ ID NO: 2124892 - RNA, 18 nt, Human
gcugcuccuccagggcca

SEQ ID NO: 2124893 - RNA, 23 nt, Human
gcugcuccuccagggccacgugc

SEQ ID NO: 2124894 - RNA, 22 nt, Human
gcugccuggcccccagcugugg

SEQ ID NO: 2124895 - RNA, 21 nt, Human
gcugccuggcccccagcugug

SEQ ID NO: 2124896 - RNA, 20 nt, Human
gcugccuggaagagcagccc

SEQ ID NO: 2124897 - RNA, 13 nt, Human
gcugccuggagcc

SEQ ID NO: 2124898 - RNA, 14 nt, Human
gcugccuggagccc

SEQ ID NO: 2124899 - RNA, 16 nt, Human
gcugccuggagcccca

SEQ ID NO: 2124900 - RNA, 17 nt, Human
gcugccuggagccccac

SEQ ID NO: 2124901 - RNA, 22 nt, Human
gcugccuggagccccacugccc

SEQ ID NO: 2124902 - RNA, 19 nt, Human
gcugccuggcccccagcug

SEQ ID NO: 2124903 - RNA, 18 nt, Human
gcugccuaaguggcugcu

SEQ ID NO: 2124904 - RNA, 13 nt, Human
gcugccaugugaa

SEQ ID NO: 2124905 - RNA, 21 nt, Human
gcugccaugugaagagggaga

SEQ ID NO: 2124906 - RNA, 17 nt, Human
gcugccaugugaagagg

SEQ ID NO: 2124907 - RNA, 17 nt, Human
gcugcccacacacccca

SEQ ID NO: 2124908 - RNA, 19 nt, Human
gcugccccaugaagccaca

SEQ ID NO: 2124909 - RNA, 20 nt, Human
gcugccccaugaagccacag

SEQ ID NO: 2124910 - RNA, 21 nt, Human
gcugccccaugaagccacagc

SEQ ID NO: 2124911 - RNA, 23 nt, Human
gcugccccaugaagccacagccc

SEQ ID NO: 2124912 - RNA, 17 nt, Human
gcugccuaaguggcugc

SEQ ID NO: 2124913 - RNA, 15 nt, Human
gcugccuaagaggca

SEQ ID NO: 2124914 - RNA, 16 nt, Human
gcugccuaaguggcug

SEQ ID NO: 2124915 - RNA, 15 nt, Human
gcugccgcaccccag

SEQ ID NO: 2124916 - RNA, 18 nt, Human
gcugccgcaccccagagu

SEQ ID NO: 2124917 - RNA, 22 nt, Human
gcugccgcaccccagagugugg

SEQ ID NO: 2124918 - RNA, 13 nt, Human
gcugccgccuccc

SEQ ID NO: 2124919 - RNA, 15 nt, Human
gcugccgccucccag

SEQ ID NO: 2124920 - RNA, 16 nt, Human
gcugccgccucccagc

SEQ ID NO: 2124921 - RNA, 18 nt, Human
gcugccgccucccagccu

SEQ ID NO: 2124922 - RNA, 19 nt, Human
gcugccgccucccagccug

SEQ ID NO: 2124923 - RNA, 20 nt, Human
gcugccgccucccagccugg

SEQ ID NO: 2124924 - RNA, 12 nt, Human
gcuggagugcag

SEQ ID NO: 2124925 - RNA, 12 nt, Human
gcuggacuggcu

SEQ ID NO: 2124926 - RNA, 13 nt, Human
gcuggacuggcug

SEQ ID NO: 2124927 - RNA, 14 nt, Human
gcuggacuggcugu

SEQ ID NO: 2124928 - RNA, 12 nt, Human
gcuggagcuggc

SEQ ID NO: 2124929 - RNA, 22 nt, Human
gcuggagcuggcgucugucuuc

SEQ ID NO: 2124930 - RNA, 17 nt, Human
gcuggacuccagaucug

SEQ ID NO: 2124931 - RNA, 18 nt, Human
gcuggacuccagaucugc

SEQ ID NO: 2124932 - RNA, 20 nt, Human
gcuggacuccagaucugcac

SEQ ID NO: 2124933 - RNA, 21 nt, Human
gcuggacuccagaucugcacc

SEQ ID NO: 2124934 - RNA, 22 nt, Human
gcuggacuccagaucugcaccg

SEQ ID NO: 2124935 - RNA, 23 nt, Human
gcuggacuccagaucugcaccgc

SEQ ID NO: 2124936 - RNA, 16 nt, Human
gcuggacggcauuccu

SEQ ID NO: 2124937 - RNA, 17 nt, Human
gcugggauuacagggau

SEQ ID NO: 2124938 - RNA, 18 nt, Human
gcugggauuacaggugug

SEQ ID NO: 2124939 - RNA, 19 nt, Human
gcugggauuacagguguga

SEQ ID NO: 2124940 - RNA, 19 nt, Human
gcugggcaacaugccugcu

SEQ ID NO: 2124941 - RNA, 19 nt, Human
gcugggcagaaggccaaga

SEQ ID NO: 2124942 - RNA, 13 nt, Human
gcugggcagaagg

SEQ ID NO: 2124943 - RNA, 16 nt, Human
gcugggauuacaggug

SEQ ID NO: 2124944 - RNA, 15 nt, Human
gcuggagugcaguga

SEQ ID NO: 2124945 - RNA, 14 nt, Human
gcuggagugcagug

SEQ ID NO: 2124946 - RNA, 13 nt, Human
gcugggugcccac

SEQ ID NO: 2124947 - RNA, 15 nt, Human
gcugggugcccacag

SEQ ID NO: 2124948 - RNA, 16 nt, Human
gcugggugcccacagc

SEQ ID NO: 2124949 - RNA, 17 nt, Human
gcugggugcccacagcc

SEQ ID NO: 2124950 - RNA, 14 nt, Human
gcugggcagcuguu

SEQ ID NO: 2124951 - RNA, 12 nt, Human
gcugggcagcug

SEQ ID NO: 2124952 - RNA, 13 nt, Human
gcugggcagcugu

SEQ ID NO: 2124953 - RNA, 22 nt, Human
gcuuggguguaacaggucuccu

SEQ ID NO: 2124954 - RNA, 23 nt, Human
gcuuggguguaacaggucuccuc

SEQ ID NO: 2124955 - RNA, 13 nt, Human
ggaccccugcccu

SEQ ID NO: 2124956 - RNA, 13 nt, Human
ggaccccucaccu

SEQ ID NO: 2124957 - RNA, 17 nt, Human
ggaccgguacagaaagg

SEQ ID NO: 2124958 - RNA, 21 nt, Human
ggacccggaggggccuggcag

SEQ ID NO: 2124959 - RNA, 20 nt, Human
ggacccggaggggccuggca

SEQ ID NO: 2124960 - RNA, 12 nt, Human
ggagagccuggu

SEQ ID NO: 2124961 - RNA, 15 nt, Human
ggagagcuagcagca

SEQ ID NO: 2124962 - RNA, 18 nt, Human
ggagagcgccugccccuc

SEQ ID NO: 2124963 - RNA, 20 nt, Human
ggagagcgccugccccuccc

SEQ ID NO: 2124964 - RNA, 22 nt, Human
ggagagcgccugccccucccag

SEQ ID NO: 2124965 - RNA, 14 nt, Human
ggagagagacucca

SEQ ID NO: 2124966 - RNA, 11 nt, Human
ggagagccagc

SEQ ID NO: 2124967 - RNA, 12 nt, Human
ggagagccagcc

SEQ ID NO: 2124968 - RNA, 14 nt, Human
ggagagccagcccu

SEQ ID NO: 2124969 - RNA, 15 nt, Human
ggagagccagcccuc

SEQ ID NO: 2124970 - RNA, 21 nt, Human
ggagagaggggaauaauagaa

SEQ ID NO: 2124971 - RNA, 12 nt, Human
ggagagagggga

SEQ ID NO: 2124972 - RNA, 14 nt, Human
ggagagaggggaau

SEQ ID NO: 2124973 - RNA, 23 nt, Human
ggagagccagcccucccuguccu

SEQ ID NO: 2124974 - RNA, 18 nt, Human
ggagagccagcccucccu

SEQ ID NO: 2124975 - RNA, 21 nt, Human
ggagagccagcccucccuguc

SEQ ID NO: 2124976 - RNA, 11 nt, Human
ggagagcccag

SEQ ID NO: 2124977 - RNA, 12 nt, Human
ggagagcccagc

SEQ ID NO: 2124978 - RNA, 16 nt, Human
ggagagcgccugcccc

SEQ ID NO: 2124979 - RNA, 18 nt, Human
ggacuuuucguuaacauu

SEQ ID NO: 2124980 - RNA, 22 nt, Human
ggacuuuucguuaacauugacc

SEQ ID NO: 2124981 - RNA, 13 nt, Human
ggagaaaacacuu

SEQ ID NO: 2124982 - RNA, 17 nt, Human
ggacuuggaagcuccgc

SEQ ID NO: 2124983 - RNA, 15 nt, Human
ggacuuggcgcgccc

SEQ ID NO: 2124984 - RNA, 15 nt, Human
ggacuuggaagcucc

SEQ ID NO: 2124985 - RNA, 16 nt, Human
ggagacugucucaaga

SEQ ID NO: 2124986 - RNA, 22 nt, Human
ggagacugcugagucaacccaa

SEQ ID NO: 2124987 - RNA, 13 nt, Human
ggagaacuagaga

SEQ ID NO: 2124988 - RNA, 11 nt, Human
ggagaaacaca

SEQ ID NO: 2124989 - RNA, 13 nt, Human
ggagaaacagaga

SEQ ID NO: 2124990 - RNA, 14 nt, Human
ggagaaacagagac

SEQ ID NO: 2124991 - RNA, 20 nt, Human
ggagaaaugcauccauuccu

SEQ ID NO: 2124992 - RNA, 23 nt, Human
ggagaaaugcauccauuccucag

SEQ ID NO: 2124993 - RNA, 15 nt, Human
ggagaaccucaggcu

SEQ ID NO: 2124994 - RNA, 22 nt, Human
ggacucaaugcacugacauugu

SEQ ID NO: 2124995 - RNA, 13 nt, Human
ggacucagcccug

SEQ ID NO: 2124996 - RNA, 15 nt, Human
ggacucacuggcagc

SEQ ID NO: 2124997 - RNA, 16 nt, Human
ggacucacuggcagcc

SEQ ID NO: 2124998 - RNA, 19 nt, Human
ggacucacuggcagcccca

SEQ ID NO: 2124999 - RNA, 23 nt, Human
ggacucacuggcagccccagcac

SEQ ID NO: 2125000 - RNA, 20 nt, Human
ggacuacaggugugagucac

SEQ ID NO: 2125001 - RNA, 13 nt, Human
ggaccucaccaag

SEQ ID NO: 2125002 - RNA, 19 nt, Human
ggaccucagaguccaggcc

SEQ ID NO: 2125003 - RNA, 22 nt, Human
ggaccuaacauucgaucucauu

SEQ ID NO: 2125004 - RNA, 21 nt, Human
ggaccucagaguccaggcccc

SEQ ID NO: 2125005 - RNA, 13 nt, Human
ggacuacugaagc

SEQ ID NO: 2125006 - RNA, 14 nt, Human
ggacucagcccuga

SEQ ID NO: 2125007 - RNA, 15 nt, Human
ggacucagcccugag

SEQ ID NO: 2125008 - RNA, 16 nt, Human
ggacucagcccugagg

SEQ ID NO: 2125009 - RNA, 17 nt, Human
ggacucagcccugaggu

SEQ ID NO: 2125010 - RNA, 23 nt, Human
ggacuguugacauccaagcuucc

SEQ ID NO: 2125011 - RNA, 20 nt, Human
ggacuguuuuuuccugagcu

SEQ ID NO: 2125012 - RNA, 21 nt, Human
ggacuguuuuuuccugagcuu

SEQ ID NO: 2125013 - RNA, 23 nt, Human
ggacuguuuuuuccugagcuugg

SEQ ID NO: 2125014 - RNA, 12 nt, Human
ggagcagagaag

SEQ ID NO: 2125015 - RNA, 14 nt, Human
ggagcagagaaggc

SEQ ID NO: 2125016 - RNA, 16 nt, Human
ggagcagagaaggcca

SEQ ID NO: 2125017 - RNA, 13 nt, Human
ggagccagggcug

SEQ ID NO: 2125018 - RNA, 12 nt, Human
ggagcagugucu

SEQ ID NO: 2125019 - RNA, 18 nt, Human
ggagcagggacagaucau

SEQ ID NO: 2125020 - RNA, 21 nt, Human
ggagguugcagugagcugaga

SEQ ID NO: 2125021 - RNA, 17 nt, Human
ggagguugcagggagcc

SEQ ID NO: 2125022 - RNA, 20 nt, Human
ggagguugcagugagcugag

SEQ ID NO: 2125023 - RNA, 12 nt, Human
ggagguugcagg

SEQ ID NO: 2125024 - RNA, 14 nt, Human
ggagguugcaggga

SEQ ID NO: 2125025 - RNA, 18 nt, Human
ggaggucgaggcaggagg

SEQ ID NO: 2125026 - RNA, 13 nt, Human
ggaggcugaggcg

SEQ ID NO: 2125027 - RNA, 19 nt, Human
ggaggcugaggcaggagga

SEQ ID NO: 2125028 - RNA, 16 nt, Human
ggagguucucucggag

SEQ ID NO: 2125029 - RNA, 17 nt, Human
ggagguuaaggcugagg

SEQ ID NO: 2125030 - RNA, 19 nt, Human
ggagguuaaggcugaggaa

SEQ ID NO: 2125031 - RNA, 21 nt, Human
ggagguuaaggcugaggaaag

SEQ ID NO: 2125032 - RNA, 15 nt, Human
ggaggucgaggcagg

SEQ ID NO: 2125033 - RNA, 16 nt, Human
ggaggucgaggcagga

SEQ ID NO: 2125034 - RNA, 12 nt, Human
ggaggcugaggc

SEQ ID NO: 2125035 - RNA, 14 nt, Human
ggaggcugaggcag

SEQ ID NO: 2125036 - RNA, 15 nt, Human
ggaggcugaggcaga

SEQ ID NO: 2125037 - RNA, 16 nt, Human
ggaggcugaggcagaa

SEQ ID NO: 2125038 - RNA, 18 nt, Human
ggaggcugaggcagaaga

SEQ ID NO: 2125039 - RNA, 15 nt, Human
ggaggcugaggcagg

SEQ ID NO: 2125040 - RNA, 17 nt, Human
ggaggcugaggcaggag

SEQ ID NO: 2125041 - RNA, 19 nt, Human
ggaggcugaggugggcaga

SEQ ID NO: 2125042 - RNA, 20 nt, Human
ggagcuuucaaagaaggaau

SEQ ID NO: 2125043 - RNA, 17 nt, Human
ggagcuucucuuuaacu

SEQ ID NO: 2125044 - RNA, 23 nt, Human
ggagcugcuggcuugcagugcgc

SEQ ID NO: 2125045 - RNA, 13 nt, Human
ggagcugcuggcu

SEQ ID NO: 2125046 - RNA, 15 nt, Human
ggagcugcuggcuug

SEQ ID NO: 2125047 - RNA, 12 nt, Human
ggagcugagaau

SEQ ID NO: 2125048 - RNA, 20 nt, Human
ggagcugagaauagaaggaa

SEQ ID NO: 2125049 - RNA, 22 nt, Human
ggagcugccuguucagcuccag

SEQ ID NO: 2125050 - RNA, 18 nt, Human
ggagcucuucaggccucc

SEQ ID NO: 2125051 - RNA, 20 nt, Human
ggagcucuucaggccucccu

SEQ ID NO: 2125052 - RNA, 16 nt, Human
ggagcugaguggggga

SEQ ID NO: 2125053 - RNA, 11 nt, Human
ggagcuccugg

SEQ ID NO: 2125054 - RNA, 12 nt, Human
ggagcuccuggg

SEQ ID NO: 2125055 - RNA, 14 nt, Human
ggagcuccugggaa

SEQ ID NO: 2125056 - RNA, 17 nt, Human
ggagcucuucaggccuc

SEQ ID NO: 2125057 - RNA, 14 nt, Human
ggagccccacugcc

SEQ ID NO: 2125058 - RNA, 15 nt, Human
ggagccccacugccc

SEQ ID NO: 2125059 - RNA, 14 nt, Human
ggagccccagugcc

SEQ ID NO: 2125060 - RNA, 14 nt, Human
ggagccccaggguc

SEQ ID NO: 2125061 - RNA, 20 nt, Human
ggagccccagggucuucccu

SEQ ID NO: 2125062 - RNA, 12 nt, Human
ggagccccaggg

SEQ ID NO: 2125063 - RNA, 13 nt, Human
ggagccccagggu

SEQ ID NO: 2125064 - RNA, 18 nt, Human
ggaggccaaggugggagg

SEQ ID NO: 2125065 - RNA, 12 nt, Human
ggaggaagagaa

SEQ ID NO: 2125066 - RNA, 23 nt, Human
ggaggaaauuugaauggguccau

SEQ ID NO: 2125067 - RNA, 18 nt, Human
ggaggaacacugcacucu

SEQ ID NO: 2125068 - RNA, 20 nt, Human
ggaggaaccgaaaggccaaa

SEQ ID NO: 2125069 - RNA, 22 nt, Human
ggaggaaaaccaagccguggcu

SEQ ID NO: 2125070 - RNA, 21 nt, Human
ggaggaaaaccaagccguggc

SEQ ID NO: 2125071 - RNA, 20 nt, Human
ggaggaaaaccaagccgugg

SEQ ID NO: 2125072 - RNA, 14 nt, Human
ggaggcaucugcac

SEQ ID NO: 2125073 - RNA, 19 nt, Human
ggaggaagcagguugaggg

SEQ ID NO: 2125074 - RNA, 16 nt, Human
ggcaggcuggcuggcc

SEQ ID NO: 2125075 - RNA, 10 nt, Human
ggcaggcagu

SEQ ID NO: 2125076 - RNA, 15 nt, Human
ggcaggccagcugug

SEQ ID NO: 2125077 - RNA, 10 nt, Human
ggcagaaaga

SEQ ID NO: 2125078 - RNA, 22 nt, Human
ggcagaaagcaaaugugaccug

SEQ ID NO: 2125079 - RNA, 17 nt, Human
ggcagaaagcagaggcu

SEQ ID NO: 2125080 - RNA, 18 nt, Human
ggcagaaagcagaggcug

SEQ ID NO: 2125081 - RNA, 19 nt, Human
ggcagaaagcagaggcugg

SEQ ID NO: 2125082 - RNA, 19 nt, Human
ggcagaauaaucuuugggu

SEQ ID NO: 2125083 - RNA, 16 nt, Human
ggcagaaggccaagag

SEQ ID NO: 2125084 - RNA, 14 nt, Human
ggcagagaaucaua

SEQ ID NO: 2125085 - RNA, 14 nt, Human
ggcagaacugagcu

SEQ ID NO: 2125086 - RNA, 15 nt, Human
ggcagaacugagcuc

SEQ ID NO: 2125087 - RNA, 21 nt, Human
ggcagaacugagcuccucugg

SEQ ID NO: 2125088 - RNA, 17 nt, Human
ggcagaagaauugaacc

SEQ ID NO: 2125089 - RNA, 22 nt, Human
ggcagaagaauugaacccagga

SEQ ID NO: 2125090 - RNA, 23 nt, Human
ggcagaagaauugaacccaggag

SEQ ID NO: 2125091 - RNA, 14 nt, Human
ggcagaaaguggcc

SEQ ID NO: 2125092 - RNA, 16 nt, Human
ggcagaaaguggccau

SEQ ID NO: 2125093 - RNA, 14 nt, Human
ggcagaacagccgc

SEQ ID NO: 2125094 - RNA, 18 nt, Human
ggcagaacagccgcuccu

SEQ ID NO: 2125095 - RNA, 20 nt, Human
ggcagaacagccgcuccugu

SEQ ID NO: 2125096 - RNA, 14 nt, Human
ggcagaacccuggu

SEQ ID NO: 2125097 - RNA, 15 nt, Human
ggcagaacccuggug

SEQ ID NO: 2125098 - RNA, 13 nt, Human
ggcagaacugagc

SEQ ID NO: 2125099 - RNA, 13 nt, Human
ggcaggagcucag

SEQ ID NO: 2125100 - RNA, 14 nt, Human
ggcaggagcucaga

SEQ ID NO: 2125101 - RNA, 15 nt, Human
ggcaggagcucagau

SEQ ID NO: 2125102 - RNA, 22 nt, Human
ggcagccgugccuucagcucua

SEQ ID NO: 2125103 - RNA, 19 nt, Human
ggcagccuacuagggaccu

SEQ ID NO: 2125104 - RNA, 21 nt, Human
ggcagccuacuagggaccugg

SEQ ID NO: 2125105 - RNA, 22 nt, Human
ggcagccuacuagggaccuggg

SEQ ID NO: 2125106 - RNA, 19 nt, Human
ggcaggacaacgaggaagc

SEQ ID NO: 2125107 - RNA, 18 nt, Human
ggcaggacaacgaggaag

SEQ ID NO: 2125108 - RNA, 15 nt, Human
ggcaggaccucagag

SEQ ID NO: 2125109 - RNA, 21 nt, Human
ggcaggaccucagaguccagg

SEQ ID NO: 2125110 - RNA, 20 nt, Human
ggcaggacaacgaggaagcc

SEQ ID NO: 2125111 - RNA, 21 nt, Human
ggcaggacaacgaggaagccc

SEQ ID NO: 2125112 - RNA, 12 nt, Human
ggcagccaggcu

SEQ ID NO: 2125113 - RNA, 19 nt, Human
ggcagccaggcugccaagg

SEQ ID NO: 2125114 - RNA, 13 nt, Human
ggcagccaggcug

SEQ ID NO: 2125115 - RNA, 15 nt, Human
ggcagccaggcugcc

SEQ ID NO: 2125116 - RNA, 18 nt, Human
ggcagccgugccuucagc

SEQ ID NO: 2125117 - RNA, 21 nt, Human
ggcagccgugccuucagcucu

SEQ ID NO: 2125118 - RNA, 19 nt, Human
ggcagccgugccuucagcu

SEQ ID NO: 2125119 - RNA, 22 nt, Human
ggaugaaugaggucccaggcag

SEQ ID NO: 2125120 - RNA, 14 nt, Human
ggaugaaugagguc

SEQ ID NO: 2125121 - RNA, 18 nt, Human
ggaugaaugaggucccag

SEQ ID NO: 2125122 - RNA, 21 nt, Human
ggaugaauuccaaauucugcu

SEQ ID NO: 2125123 - RNA, 15 nt, Human
ggaugacaugucccu

SEQ ID NO: 2125124 - RNA, 16 nt, Human
ggaugacaugucccua

SEQ ID NO: 2125125 - RNA, 20 nt, Human
ggaugacaugucccuacacc

SEQ ID NO: 2125126 - RNA, 22 nt, Human
ggaugagaaagguugaagcacc

SEQ ID NO: 2125127 - RNA, 12 nt, Human
ggaugagaaagg

SEQ ID NO: 2125128 - RNA, 19 nt, Human
ggaugacuagaggcaggga

SEQ ID NO: 2125129 - RNA, 18 nt, Human
ggaugacuagaggcaggg

SEQ ID NO: 2125130 - RNA, 15 nt, Human
ggauguucuggcccu

SEQ ID NO: 2125131 - RNA, 16 nt, Human
ggauguaaacagugcc

SEQ ID NO: 2125132 - RNA, 17 nt, Human
ggauguaaacagugccu

SEQ ID NO: 2125133 - RNA, 18 nt, Human
ggauguaaacagugccug

SEQ ID NO: 2125134 - RNA, 19 nt, Human
ggauguaaacagugccugc

SEQ ID NO: 2125135 - RNA, 21 nt, Human
ggauguaaacagugccugcug

SEQ ID NO: 2125136 - RNA, 20 nt, Human
ggauguaaacagugccugcu

SEQ ID NO: 2125137 - RNA, 20 nt, Human
ggcaacacagcgagacuccg

SEQ ID NO: 2125138 - RNA, 12 nt, Human
ggcaacagagca

SEQ ID NO: 2125139 - RNA, 21 nt, Human
ggcaacacagcgagacuccgu

SEQ ID NO: 2125140 - RNA, 17 nt, Human
ggcaaacuucagacuga

SEQ ID NO: 2125141 - RNA, 16 nt, Human
ggcaaagacagaagcc

SEQ ID NO: 2125142 - RNA, 23 nt, Human
ggcaaacaggcaguuggccagag

SEQ ID NO: 2125143 - RNA, 13 nt, Human
ggcaaacaggcag

SEQ ID NO: 2125144 - RNA, 23 nt, Human
ggauguuucugucacaucagcuc

SEQ ID NO: 2125145 - RNA, 14 nt, Human
ggauguugcucaga

SEQ ID NO: 2125146 - RNA, 19 nt, Human
ggauuuggguuggaaguga

SEQ ID NO: 2125147 - RNA, 12 nt, Human
ggauuuucagcc

SEQ ID NO: 2125148 - RNA, 21 nt, Human
ggauuuugauccaagcugguc

SEQ ID NO: 2125149 - RNA, 21 nt, Human
ggcaaccacaggcagcauuua

SEQ ID NO: 2125150 - RNA, 19 nt, Human
ggcaacagagcaagauccu

SEQ ID NO: 2125151 - RNA, 22 nt, Human
ggcaacaugccugcuuuagaau

SEQ ID NO: 2125152 - RNA, 20 nt, Human
ggcaaccacaggcagcauuu

SEQ ID NO: 2125153 - RNA, 19 nt, Human
ggccagguggccacuccag

SEQ ID NO: 2125154 - RNA, 17 nt, Human
ggccagguuucugccca

SEQ ID NO: 2125155 - RNA, 14 nt, Human
ggccaggugcacag

SEQ ID NO: 2125156 - RNA, 14 nt, Human
ggccaggugcagug

SEQ ID NO: 2125157 - RNA, 12 nt, Human
ggcauucucuga

SEQ ID NO: 2125158 - RNA, 15 nt, Human
ggcauuccugcuuau

SEQ ID NO: 2125159 - RNA, 23 nt, Human
ggcauugauggggaaggaggcug

SEQ ID NO: 2125160 - RNA, 15 nt, Human
ggccaaagccaaagc

SEQ ID NO: 2125161 - RNA, 21 nt, Human
ggccaaaggagggucaggaag

SEQ ID NO: 2125162 - RNA, 22 nt, Human
ggccaaaggagggucaggaagg

SEQ ID NO: 2125163 - RNA, 21 nt, Human
ggccaaauauauucucuuugg

SEQ ID NO: 2125164 - RNA, 22 nt, Human
ggccaaauauauucucuuuggu

SEQ ID NO: 2125165 - RNA, 16 nt, Human
ggcauugauggggaag

SEQ ID NO: 2125166 - RNA, 12 nt, Human
ggcauugcuuuc

SEQ ID NO: 2125167 - RNA, 13 nt, Human
ggcauugcuuucc

SEQ ID NO: 2125168 - RNA, 20 nt, Human
ggcauugguucccuuugcuc

SEQ ID NO: 2125169 - RNA, 20 nt, Human
ggccagaugcaccagcccuu

SEQ ID NO: 2125170 - RNA, 19 nt, Human
ggccagaugcaccagcccu

SEQ ID NO: 2125171 - RNA, 17 nt, Human
ggccagaugcaccagcc

SEQ ID NO: 2125172 - RNA, 20 nt, Human
ggccagaguggccuggccag

SEQ ID NO: 2125173 - RNA, 18 nt, Human
ggccagaguggccuggcc

SEQ ID NO: 2125174 - RNA, 19 nt, Human
ggccagaguggccuggcca

SEQ ID NO: 2125175 - RNA, 17 nt, Human
ggccaaccccaaagaag

SEQ ID NO: 2125176 - RNA, 18 nt, Human
ggccagcaagguggagug

SEQ ID NO: 2125177 - RNA, 22 nt, Human
ggccagcaagguggaguggaug

SEQ ID NO: 2125178 - RNA, 23 nt, Human
ggccagcaagguggaguggaugc

SEQ ID NO: 2125179 - RNA, 12 nt, Human
ggccagccccuc

SEQ ID NO: 2125180 - RNA, 14 nt, Human
ggccagccccuccc

SEQ ID NO: 2125181 - RNA, 15 nt, Human
ggccagccccuccca

SEQ ID NO: 2125182 - RNA, 16 nt, Human
ggccagccccucccac

SEQ ID NO: 2125183 - RNA, 23 nt, Human
ggccagccccucccaccacagca

SEQ ID NO: 2125184 - RNA, 18 nt, Human
ggccagccccucccacca

SEQ ID NO: 2125185 - RNA, 21 nt, Human
ggccagccccucccaccacag

SEQ ID NO: 2125186 - RNA, 23 nt, Human
ggccagagggagugacagaggca

SEQ ID NO: 2125187 - RNA, 16 nt, Human
ggccaagugcaggcug

SEQ ID NO: 2125188 - RNA, 18 nt, Human
ggccaagugcaggcuggc

SEQ ID NO: 2125189 - RNA, 14 nt, Human
ggccagaguggccu

SEQ ID NO: 2125190 - RNA, 15 nt, Human
ggccagaguggccug

SEQ ID NO: 2125191 - RNA, 16 nt, Human
ggccagaguggccugg

SEQ ID NO: 2125192 - RNA, 14 nt, Human
ggccaagucccacc

SEQ ID NO: 2125193 - RNA, 16 nt, Human
ggccaagucccaccgg

SEQ ID NO: 2125194 - RNA, 20 nt, Human
ggccaagugcaggcuggcac

SEQ ID NO: 2125195 - RNA, 13 nt, Human
ggccaagguggga

SEQ ID NO: 2125196 - RNA, 13 nt, Human
ggccaacauggua

SEQ ID NO: 2125197 - RNA, 15 nt, Human
ggccaacaccaggga

SEQ ID NO: 2125198 - RNA, 18 nt, Human
ggccaacaccagggaugg

SEQ ID NO: 2125199 - RNA, 13 nt, Human
ggccaaaguguua

SEQ ID NO: 2125200 - RNA, 13 nt, Human
ggccaaauucccu

SEQ ID NO: 2125201 - RNA, 15 nt, Human
ggcccaggcaggcca

SEQ ID NO: 2125202 - RNA, 20 nt, Human
ggcccagggagaggccauga

SEQ ID NO: 2125203 - RNA, 16 nt, Human
ggcccagcgaccucgg

SEQ ID NO: 2125204 - RNA, 17 nt, Human
ggcccgacagccuggca

SEQ ID NO: 2125205 - RNA, 16 nt, Human
ggcccgacagccuggc

SEQ ID NO: 2125206 - RNA, 15 nt, Human
ggcccgacagccugg

SEQ ID NO: 2125207 - RNA, 19 nt, Human
ggcccgccuggcagaacug

SEQ ID NO: 2125208 - RNA, 23 nt, Human
ggcccgccuggcagaacugagcu

SEQ ID NO: 2125209 - RNA, 15 nt, Human
ggcccgccuggcaga

SEQ ID NO: 2125210 - RNA, 13 nt, Human
ggccccaggaagc

SEQ ID NO: 2125211 - RNA, 14 nt, Human
ggccccaggaagcc

SEQ ID NO: 2125212 - RNA, 15 nt, Human
ggccccaggaagccg

SEQ ID NO: 2125213 - RNA, 17 nt, Human
ggccccagggcuacccu

SEQ ID NO: 2125214 - RNA, 18 nt, Human
ggccccagggcuacccuc

SEQ ID NO: 2125215 - RNA, 15 nt, Human
ggccccaccaccuag

SEQ ID NO: 2125216 - RNA, 14 nt, Human
ggccccaccaccua

SEQ ID NO: 2125217 - RNA, 16 nt, Human
ggccccaaaaccacag

SEQ ID NO: 2125218 - RNA, 20 nt, Human
ggccccaaaaccacagcccu

SEQ ID NO: 2125219 - RNA, 21 nt, Human
ggccccaaaaccacagcccug

SEQ ID NO: 2125220 - RNA, 15 nt, Human
ggccucccucucucu

SEQ ID NO: 2125221 - RNA, 23 nt, Human
ggccucccucucucuucugcucc

SEQ ID NO: 2125222 - RNA, 13 nt, Human
ggccucccaaagu

SEQ ID NO: 2125223 - RNA, 17 nt, Human
ggccuccauuccuggag

SEQ ID NO: 2125224 - RNA, 21 nt, Human
ggccuccauuccuggagcccg

SEQ ID NO: 2125225 - RNA, 22 nt, Human
ggccuccauuccuggagcccga

SEQ ID NO: 2125226 - RNA, 23 nt, Human
ggccuccauuccuggagcccgag

SEQ ID NO: 2125227 - RNA, 14 nt, Human
ggcccuuccuuuuc

SEQ ID NO: 2125228 - RNA, 23 nt, Human
ggcccuuccucuccacugccuuc

SEQ ID NO: 2125229 - RNA, 22 nt, Human
ggcccuuccucuccacugccuu

SEQ ID NO: 2125230 - RNA, 19 nt, Human
ggcccuuccucuccacugc

SEQ ID NO: 2125231 - RNA, 18 nt, Human
ggcccuuccucuccacug

SEQ ID NO: 2125232 - RNA, 12 nt, Human
aaaaaaaacaaa

SEQ ID NO: 2125233 - RNA, 13 nt, Human
aaaaaaaaaguuc

SEQ ID NO: 2125234 - RNA, 13 nt, Human
aaaaaaguugaag

SEQ ID NO: 2125235 - RNA, 12 nt, Human
aaaaaauaacac

SEQ ID NO: 2125236 - RNA, 21 nt, Human
aaaaaagcuggugggugaaag

SEQ ID NO: 2125237 - RNA, 11 nt, Human
aaaaaagucuc

SEQ ID NO: 2125238 - RNA, 17 nt, Human
aaaaaagucucuauuua

SEQ ID NO: 2125239 - RNA, 13 nt, Human
aaaaaaacacaaa

SEQ ID NO: 2125240 - RNA, 12 nt, Human
aaaaaagaaugu

SEQ ID NO: 2125241 - RNA, 14 nt, Human
aaaaaagaauguca

SEQ ID NO: 2125242 - RNA, 13 nt, Human
aaaaaaaauccuu

SEQ ID NO: 2125243 - RNA, 20 nt, Human
aaaaagucagacugcuggga

SEQ ID NO: 2125244 - RNA, 22 nt, Human
aaaaagucuacgcucuccuuuc

SEQ ID NO: 2125245 - RNA, 15 nt, Human
aaaaagucucuauuu

SEQ ID NO: 2125246 - RNA, 17 nt, Human
aaaaagucucuauuuaa

SEQ ID NO: 2125247 - RNA, 18 nt, Human
aaaaagucucuauuuaaa

SEQ ID NO: 2125248 - RNA, 21 nt, Human
aaaaagucucuauuuaaauuc

SEQ ID NO: 2125249 - RNA, 22 nt, Human
aaaaagucucuauuuaaauucu

SEQ ID NO: 2125250 - RNA, 23 nt, Human
aaaaagucucuauuuaaauucuu

SEQ ID NO: 2125251 - RNA, 14 nt, Human
aaaaagucugcauu

SEQ ID NO: 2125252 - RNA, 21 nt, Human
aaaaaguaaguaccacucagg

SEQ ID NO: 2125253 - RNA, 21 nt, Human
aaaaagggauccguacauuca

SEQ ID NO: 2125254 - RNA, 22 nt, Human
aaaaagggcagggcaucuccug

SEQ ID NO: 2125255 - RNA, 13 nt, Human
aaaaagcuggugg

SEQ ID NO: 2125256 - RNA, 22 nt, Human
aaaaagcuggugggugaaagaa

SEQ ID NO: 2125257 - RNA, 14 nt, Human
aaaaagcuuuuaug

SEQ ID NO: 2125258 - RNA, 13 nt, Human
aaaaagcuucccc

SEQ ID NO: 2125259 - RNA, 23 nt, Human
gggaaaaucagccugcuccagcu

SEQ ID NO: 2125260 - RNA, 16 nt, Human
gggaaaauguuuugua

SEQ ID NO: 2125261 - RNA, 21 nt, Human
gggaaaauguuuuguaagaaa

SEQ ID NO: 2125262 - RNA, 23 nt, Human
gggaaaagggaacaggaaaagaa

SEQ ID NO: 2125263 - RNA, 13 nt, Human
gggaaaaucagcc

SEQ ID NO: 2125264 - RNA, 17 nt, Human
ggcuuccauuugugugu

SEQ ID NO: 2125265 - RNA, 18 nt, Human
ggcuuccauuugugugug

SEQ ID NO: 2125266 - RNA, 22 nt, Human
ggcuuccauuugugugugugca

SEQ ID NO: 2125267 - RNA, 18 nt, Human
ggcuucaggggagucccg

SEQ ID NO: 2125268 - RNA, 16 nt, Human
ggcuucaguggcagcu

SEQ ID NO: 2125269 - RNA, 21 nt, Human
ggcuuccagaaaaccccagca

SEQ ID NO: 2125270 - RNA, 23 nt, Human
ggcuguaucccaugagccucagc

SEQ ID NO: 2125271 - RNA, 22 nt, Human
ggcuguaucccaugagccucag

SEQ ID NO: 2125272 - RNA, 20 nt, Human
ggcuguaucccaugagccuc

SEQ ID NO: 2125273 - RNA, 15 nt, Human
ggcuucaguggcagc

SEQ ID NO: 2125274 - RNA, 20 nt, Human
ggcuucagcauauuuauagc

SEQ ID NO: 2125275 - RNA, 15 nt, Human
ggcuggugggcacca

SEQ ID NO: 2125276 - RNA, 15 nt, Human
ggcugucagcaggaa

SEQ ID NO: 2125277 - RNA, 16 nt, Human
ggcugucagcaggaag

SEQ ID NO: 2125278 - RNA, 17 nt, Human
ggcugucagcaggaagc

SEQ ID NO: 2125279 - RNA, 18 nt, Human
ggcugucagcaggaagca

SEQ ID NO: 2125280 - RNA, 18 nt, Human
ggcugucaguaugacauu

SEQ ID NO: 2125281 - RNA, 16 nt, Human
ggcuggugucaccuga

SEQ ID NO: 2125282 - RNA, 19 nt, Human
ggcuguaucccaugagccu

SEQ ID NO: 2125283 - RNA, 13 nt, Human
ggcuggugcaggg

SEQ ID NO: 2125284 - RNA, 14 nt, Human
ggcuggugcagggc

SEQ ID NO: 2125285 - RNA, 22 nt, Human
aaaaaguaucauggaaauauua

SEQ ID NO: 2125286 - RNA, 13 nt, Human
aaaaaguugaagg

SEQ ID NO: 2125287 - RNA, 20 nt, Human
aaaaaguuaaaaaaaauaau

SEQ ID NO: 2125288 - RNA, 13 nt, Human
ggcuggcugggca

SEQ ID NO: 2125289 - RNA, 14 nt, Human
ggcuggcugcagug

SEQ ID NO: 2125290 - RNA, 15 nt, Human
ggcuggcugcaguga

SEQ ID NO: 2125291 - RNA, 20 nt, Human
ggcuggcggcuacucagcag

SEQ ID NO: 2125292 - RNA, 17 nt, Human
ggcuggcuaacuggaag

SEQ ID NO: 2125293 - RNA, 20 nt, Human
ggcugcccacacaccccaau

SEQ ID NO: 2125294 - RNA, 18 nt, Human
ggcugcccacuaugguca

SEQ ID NO: 2125295 - RNA, 18 nt, Human
ggcugccaugugaagagg

SEQ ID NO: 2125296 - RNA, 17 nt, Human
ggcugcccacacacccc

SEQ ID NO: 2125297 - RNA, 19 nt, Human
ggcugcccacacaccccaa

SEQ ID NO: 2125298 - RNA, 19 nt, Human
ggcuggcaccgccuucucu

SEQ ID NO: 2125299 - RNA, 21 nt, Human
ggcuggauuuugaauuuucuu

SEQ ID NO: 2125300 - RNA, 18 nt, Human
ggcuggaugugguggcau

SEQ ID NO: 2125301 - RNA, 19 nt, Human
ggcuggaugugguggcaua

SEQ ID NO: 2125302 - RNA, 15 nt, Human
ggcuggauguggugg

SEQ ID NO: 2125303 - RNA, 20 nt, Human
ggcuggcgugcaguggugcg

SEQ ID NO: 2125304 - RNA, 16 nt, Human
ggcuggcgugcagugg

SEQ ID NO: 2125305 - RNA, 14 nt, Human
ggcuggcgugcagu

SEQ ID NO: 2125306 - RNA, 17 nt, Human
ggcuccucccggugccc

SEQ ID NO: 2125307 - RNA, 14 nt, Human
ggcuccucccuccc

SEQ ID NO: 2125308 - RNA, 16 nt, Human
ggcuccucccucccuc

SEQ ID NO: 2125309 - RNA, 21 nt, Human
ggcuccucucuaaccuccuuu

SEQ ID NO: 2125310 - RNA, 12 nt, Human
ggcuccugaggg

SEQ ID NO: 2125311 - RNA, 24 nt, Human
ggcuccgucaguaucaggccugcc

SEQ ID NO: 2125312 - RNA, 13 nt, Human
ggcucccuuccuc

SEQ ID NO: 2125313 - RNA, 16 nt, Human
ggcucccuuccuccca

SEQ ID NO: 2125314 - RNA, 15 nt, Human
ggcuccgaacacccu

SEQ ID NO: 2125315 - RNA, 15 nt, Human
ggcuccgcugugugg

SEQ ID NO: 2125316 - RNA, 18 nt, Human
ggcuccgucaguaucagg

SEQ ID NO: 2125317 - RNA, 22 nt, Human
ggcuccgucaguaucaggccug

SEQ ID NO: 2125318 - RNA, 13 nt, Human
ggcugcauagaag

SEQ ID NO: 2125319 - RNA, 16 nt, Human
ggcugcauagaaggag

SEQ ID NO: 2125320 - RNA, 19 nt, Human
ggcugcauagaaggaggag

SEQ ID NO: 2125321 - RNA, 13 nt, Human
ggcugccaccaag

SEQ ID NO: 2125322 - RNA, 15 nt, Human
ggcugaacggggaga

SEQ ID NO: 2125323 - RNA, 17 nt, Human
ggcugaacggggagaaa

SEQ ID NO: 2125324 - RNA, 20 nt, Human
ggcugaacggggagaaaagg

SEQ ID NO: 2125325 - RNA, 22 nt, Human
ggcugcagugacgugcaccugu

SEQ ID NO: 2125326 - RNA, 17 nt, Human
ggcugcagggaguccga

SEQ ID NO: 2125327 - RNA, 21 nt, Human
ggcucgagcaguccugccuca

SEQ ID NO: 2125328 - RNA, 20 nt, Human
ggcugaaagaggccaaugcc

SEQ ID NO: 2125329 - RNA, 18 nt, Human
aaaagggaacugaacauu

SEQ ID NO: 2125330 - RNA, 15 nt, Human
aaaagggaacaggaa

SEQ ID NO: 2125331 - RNA, 14 nt, Human
aaaagggacaugaa

SEQ ID NO: 2125332 - RNA, 19 nt, Human
gggcaggaaggagagccug

SEQ ID NO: 2125333 - RNA, 21 nt, Human
gggcaggaaggagagccugcu

SEQ ID NO: 2125334 - RNA, 19 nt, Human
gggcagcuguuagagucca

SEQ ID NO: 2125335 - RNA, 16 nt, Human
gggcaggaaggagagc

SEQ ID NO: 2125336 - RNA, 18 nt, Human
gggcaggaaggagagccu

SEQ ID NO: 2125337 - RNA, 18 nt, Human
gggcaggagggcccuacc

SEQ ID NO: 2125338 - RNA, 18 nt, Human
gggcaaacaccugcugau

SEQ ID NO: 2125339 - RNA, 20 nt, Human
aaaaggcgguacuaguucag

SEQ ID NO: 2125340 - RNA, 16 nt, Human
gggcagcacagagagg

SEQ ID NO: 2125341 - RNA, 20 nt, Human
gggcagcauagcaagacaca

SEQ ID NO: 2125342 - RNA, 13 nt, Human
gggcagccaggcu

SEQ ID NO: 2125343 - RNA, 17 nt, Human
gggcagccaaacccaug

SEQ ID NO: 2125344 - RNA, 14 nt, Human
gggcagccaggcug

SEQ ID NO: 2125345 - RNA, 16 nt, Human
gggcagccaggcugcc

SEQ ID NO: 2125346 - RNA, 15 nt, Human
gggauuucucccagc

SEQ ID NO: 2125347 - RNA, 13 nt, Human
gggagggggaggg

SEQ ID NO: 2125348 - RNA, 19 nt, Human
gggauuuguccuuggggac

SEQ ID NO: 2125349 - RNA, 21 nt, Human
gggauuuucagcccucagaau

SEQ ID NO: 2125350 - RNA, 14 nt, Human
gggcaaacaggcag

SEQ ID NO: 2125351 - RNA, 17 nt, Human
gggauuucucccagcuc

SEQ ID NO: 2125352 - RNA, 15 nt, Human
gggcaaacaggcagu

SEQ ID NO: 2125353 - RNA, 13 nt, Human
gggcagagccggg

SEQ ID NO: 2125354 - RNA, 14 nt, Human
gggcagagccggga

SEQ ID NO: 2125355 - RNA, 17 nt, Human
gggcagagccgggaagc

SEQ ID NO: 2125356 - RNA, 15 nt, Human
gggagggcccacuuc

SEQ ID NO: 2125357 - RNA, 23 nt, Human
gggaggggcggcaggagggaggu

SEQ ID NO: 2125358 - RNA, 17 nt, Human
gggauugaaggaugcug

SEQ ID NO: 2125359 - RNA, 14 nt, Human
gggauucaggcugc

SEQ ID NO: 2125360 - RNA, 15 nt, Human
gggauucaggcugcu

SEQ ID NO: 2125361 - RNA, 16 nt, Human
gggauucaggcugcuu

SEQ ID NO: 2125362 - RNA, 12 nt, Human
aaaauaaauuga

SEQ ID NO: 2125363 - RNA, 21 nt, Human
aaaauagcaacacucuauauu

SEQ ID NO: 2125364 - RNA, 22 nt, Human
aaaauagcaacacucuauauuu

SEQ ID NO: 2125365 - RNA, 13 nt, Human
aaaauacucuaau

SEQ ID NO: 2125366 - RNA, 14 nt, Human
aaaauacucuaauu

SEQ ID NO: 2125367 - RNA, 15 nt, Human
aaaauacucuaauuc

SEQ ID NO: 2125368 - RNA, 16 nt, Human
aaaauacucuaauucu

SEQ ID NO: 2125369 - RNA, 17 nt, Human
aaaauacucuaauucua

SEQ ID NO: 2125370 - RNA, 18 nt, Human
aaaauacucuaauucuaa

SEQ ID NO: 2125371 - RNA, 20 nt, Human
aaaauacucuaauucuaacc

SEQ ID NO: 2125372 - RNA, 23 nt, Human
aaaauacucuaauucuaaccaga

SEQ ID NO: 2125373 - RNA, 13 nt, Human
aaaauacaaacaa

SEQ ID NO: 2125374 - RNA, 12 nt, Human
aaaauaaauuau

SEQ ID NO: 2125375 - RNA, 14 nt, Human
aaaauaacacacau

SEQ ID NO: 2125376 - RNA, 16 nt, Human
aaaauaaaguuacauu

SEQ ID NO: 2125377 - RNA, 12 nt, Human
aaaauaaauaaa

SEQ ID NO: 2125378 - RNA, 14 nt, Human
aaaauaaauaaaua

SEQ ID NO: 2125379 - RNA, 15 nt, Human
aaaaguacaauuuac

SEQ ID NO: 2125380 - RNA, 23 nt, Human
aaaaguaaguaccacucaggcca

SEQ ID NO: 2125381 - RNA, 22 nt, Human
aaaaguaaguaccacucaggcc

SEQ ID NO: 2125382 - RNA, 12 nt, Human
aaaauauaauug

SEQ ID NO: 2125383 - RNA, 15 nt, Human
aaaauauaauuguuu

SEQ ID NO: 2125384 - RNA, 19 nt, Human
aaaauauaauuguuuuuua

SEQ ID NO: 2125385 - RNA, 22 nt, Human
aaaauauaauuguuuuuuaucu

SEQ ID NO: 2125386 - RNA, 24 nt, Human
aaaauauaauuuuuuagagagcug

SEQ ID NO: 2125387 - RNA, 20 nt, Human
aaaauauggguugcauuugg

SEQ ID NO: 2125388 - RNA, 21 nt, Human
aaaauauauauguugauuucu

SEQ ID NO: 2125389 - RNA, 15 nt, Human
aaaauaggagagaga

SEQ ID NO: 2125390 - RNA, 18 nt, Human
aaaauauaaagcaucuaa

SEQ ID NO: 2125391 - RNA, 12 nt, Human
aaaauagccugc

SEQ ID NO: 2125392 - RNA, 23 nt, Human
aaaauagcaaccuuuuuaucucc

SEQ ID NO: 2125393 - RNA, 10 nt, Human
aaaauagcca

SEQ ID NO: 2125394 - RNA, 18 nt, Human
aaaauagguauacagugg

SEQ ID NO: 2125395 - RNA, 13 nt, Human
gggagagacccuu

SEQ ID NO: 2125396 - RNA, 12 nt, Human
gggagagagaga

SEQ ID NO: 2125397 - RNA, 12 nt, Human
gggagagccagc

SEQ ID NO: 2125398 - RNA, 13 nt, Human
gggacuguacaca

SEQ ID NO: 2125399 - RNA, 21 nt, Human
gggacugucuuucagauacau

SEQ ID NO: 2125400 - RNA, 13 nt, Human
gggacugggaggg

SEQ ID NO: 2125401 - RNA, 14 nt, Human
gggacugggagggc

SEQ ID NO: 2125402 - RNA, 15 nt, Human
gggacugggagggcc

SEQ ID NO: 2125403 - RNA, 17 nt, Human
gggacugggagggccca

SEQ ID NO: 2125404 - RNA, 13 nt, Human
gggaggccaagga

SEQ ID NO: 2125405 - RNA, 14 nt, Human
gggagagccagcuc

SEQ ID NO: 2125406 - RNA, 15 nt, Human
gggagagccagcucc

SEQ ID NO: 2125407 - RNA, 12 nt, Human
gggagagcccag

SEQ ID NO: 2125408 - RNA, 13 nt, Human
gggaggcagccgg

SEQ ID NO: 2125409 - RNA, 20 nt, Human
gggaggcagagguugcagug

SEQ ID NO: 2125410 - RNA, 14 nt, Human
aaaagcugggcagg

SEQ ID NO: 2125411 - RNA, 22 nt, Human
aaaacuugauguguuaucucuu

SEQ ID NO: 2125412 - RNA, 17 nt, Human
aaaacuuguaaaugcug

SEQ ID NO: 2125413 - RNA, 12 nt, Human
aaaacuuuauuu

SEQ ID NO: 2125414 - RNA, 13 nt, Human
aaaacuuuauuuu

SEQ ID NO: 2125415 - RNA, 15 nt, Human
aaaacuuuauuuuau

SEQ ID NO: 2125416 - RNA, 16 nt, Human
aaaacuuuauuuuaua

SEQ ID NO: 2125417 - RNA, 17 nt, Human
aaaacuuuauuuuauau

SEQ ID NO: 2125418 - RNA, 18 nt, Human
aaaacuuuauuuuauaua

SEQ ID NO: 2125419 - RNA, 19 nt, Human
aaaacuuuauuuuauauaa

SEQ ID NO: 2125420 - RNA, 20 nt, Human
aaaacuuuauuuuauauaau

SEQ ID NO: 2125421 - RNA, 23 nt, Human
aaaacuuuauuuuauauaauaaa

SEQ ID NO: 2125422 - RNA, 22 nt, Human
gggaacagacuggaagcacagc

SEQ ID NO: 2125423 - RNA, 14 nt, Human
gggaacagacagga

SEQ ID NO: 2125424 - RNA, 15 nt, Human
gggaacagacaggag

SEQ ID NO: 2125425 - RNA, 16 nt, Human
gggaacagacaggaga

SEQ ID NO: 2125426 - RNA, 15 nt, Human
gggaaaggauauuuu

SEQ ID NO: 2125427 - RNA, 22 nt, Human
gggaaaggcucugaaagccagc

SEQ ID NO: 2125428 - RNA, 14 nt, Human
gggaaauaagagag

SEQ ID NO: 2125429 - RNA, 19 nt, Human
gggaacaaggguggcaucc

SEQ ID NO: 2125430 - RNA, 19 nt, Human
gggaacagacaacagaagu

SEQ ID NO: 2125431 - RNA, 14 nt, Human
gggaacagacugga

SEQ ID NO: 2125432 - RNA, 20 nt, Human
aaaaauguucuauuuuaauu

SEQ ID NO: 2125433 - RNA, 22 nt, Human
aaaaaugucuuggguaggcggg

SEQ ID NO: 2125434 - RNA, 18 nt, Human
aaaaaugcccuuaaauca

SEQ ID NO: 2125435 - RNA, 12 nt, Human
aaaaaugaaagc

SEQ ID NO: 2125436 - RNA, 10 nt, Human
aaaaaugaaa

SEQ ID NO: 2125437 - RNA, 17 nt, Human
aaaaaugacagauguug

SEQ ID NO: 2125438 - RNA, 20 nt, Human
aaaaaugacuaaaaauauua

SEQ ID NO: 2125439 - RNA, 11 nt, Human
aaaaaugagaa

SEQ ID NO: 2125440 - RNA, 12 nt, Human
aaaaaugagaac

SEQ ID NO: 2125441 - RNA, 14 nt, Human
aaaaaugagaacau

SEQ ID NO: 2125442 - RNA, 16 nt, Human
aaaaaugagaacaugu

SEQ ID NO: 2125443 - RNA, 17 nt, Human
aaaaaugagaacauguu

SEQ ID NO: 2125444 - RNA, 21 nt, Human
aaaaaugagaacauguuggua

SEQ ID NO: 2125445 - RNA, 22 nt, Human
aaaaaucugaccaaaacaaaca

SEQ ID NO: 2125446 - RNA, 18 nt, Human
gggaacagacaggagaaa

SEQ ID NO: 2125447 - RNA, 20 nt, Human
aaaacugcugacuguuuucu

SEQ ID NO: 2125448 - RNA, 19 nt, Human
aaaaccaagccguggcuuc

SEQ ID NO: 2125449 - RNA, 15 nt, Human
aaaacguuuuauugu

SEQ ID NO: 2125450 - RNA, 16 nt, Human
aaaacguuuuauugug

SEQ ID NO: 2125451 - RNA, 17 nt, Human
aaaacguuuuauugugu

SEQ ID NO: 2125452 - RNA, 19 nt, Human
aaaacguuuuauuguguuu

SEQ ID NO: 2125453 - RNA, 23 nt, Human
aaaacguuuuguuugaaaaagca

SEQ ID NO: 2125454 - RNA, 12 nt, Human
aaaacuacauuu

SEQ ID NO: 2125455 - RNA, 15 nt, Human
aaaacuacauuuuaa

SEQ ID NO: 2125456 - RNA, 16 nt, Human
aaaacuacauuuuaac

SEQ ID NO: 2125457 - RNA, 17 nt, Human
aaaacuacauuuuaaca

SEQ ID NO: 2125458 - RNA, 18 nt, Human
aaaacuacauuuuaacau

SEQ ID NO: 2125459 - RNA, 14 nt, Human
aaaaccaagaagau

SEQ ID NO: 2125460 - RNA, 15 nt, Human
aaaaccaauguucuc

SEQ ID NO: 2125461 - RNA, 18 nt, Human
aaaaauuaucuauuugua

SEQ ID NO: 2125462 - RNA, 22 nt, Human
aaaaauuaucuauuuguauaua

SEQ ID NO: 2125463 - RNA, 13 nt, Human
aaaaauuagcuga

SEQ ID NO: 2125464 - RNA, 19 nt, Human
aaaacauuuucacacaaua

SEQ ID NO: 2125465 - RNA, 11 nt, Human
aaacuccugac

SEQ ID NO: 2125466 - RNA, 19 nt, Human
aaacuccgucuuagaagug

SEQ ID NO: 2125467 - RNA, 16 nt, Human
aaacucauuucuagca

SEQ ID NO: 2125468 - RNA, 19 nt, Human
aaacuagcuuacaugagaa

SEQ ID NO: 2125469 - RNA, 23 nt, Human
aaacuagcuuacaugagaacaga

SEQ ID NO: 2125470 - RNA, 13 nt, Human
aaacuaggaaaau

SEQ ID NO: 2125471 - RNA, 15 nt, Human
aaacuaggaaaauug

SEQ ID NO: 2125472 - RNA, 17 nt, Human
aaacuaggaaaauugga

SEQ ID NO: 2125473 - RNA, 15 nt, Human
aaacuagaauuucau

SEQ ID NO: 2125474 - RNA, 16 nt, Human
aaacuagaauuucauu

SEQ ID NO: 2125475 - RNA, 21 nt, Human
aaacuagacuugaggaaacca

SEQ ID NO: 2125476 - RNA, 23 nt, Human
aaacuagacuugaggaaaccagg

SEQ ID NO: 2125477 - RNA, 20 nt, Human
aaacuggcaucugacacaaa

SEQ ID NO: 2125478 - RNA, 21 nt, Human
aaacuggcaucugacacaaaa

SEQ ID NO: 2125479 - RNA, 20 nt, Human
aaacuggcaaacuucagacu

SEQ ID NO: 2125480 - RNA, 22 nt, Human
aaacugguuuguugcagccaaa

SEQ ID NO: 2125481 - RNA, 18 nt, Human
aaaccacagcccugucag

SEQ ID NO: 2125482 - RNA, 15 nt, Human
aaaccacagcccugu

SEQ ID NO: 2125483 - RNA, 16 nt, Human
aaaccacagcccuguc

SEQ ID NO: 2125484 - RNA, 17 nt, Human
aaaccacagcccuguca

SEQ ID NO: 2125485 - RNA, 12 nt, Human
aaacgugaaaau

SEQ ID NO: 2125486 - RNA, 14 nt, Human
aaacgugcccucug

SEQ ID NO: 2125487 - RNA, 12 nt, Human
aaacuaaugagu

SEQ ID NO: 2125488 - RNA, 13 nt, Human
aaacuaaugaguu

SEQ ID NO: 2125489 - RNA, 13 nt, Human
aaacuacauuuua

SEQ ID NO: 2125490 - RNA, 14 nt, Human
aaacuacauuuuaa

SEQ ID NO: 2125491 - RNA, 15 nt, Human
aaacuacauuuuaac

SEQ ID NO: 2125492 - RNA, 16 nt, Human
aaacuacauuuuaaca

SEQ ID NO: 2125493 - RNA, 17 nt, Human
aaacuacauuuuaacau

SEQ ID NO: 2125494 - RNA, 18 nt, Human
aaacuacauuuuaacaug

SEQ ID NO: 2125495 - RNA, 16 nt, Human
aaacuaauauuuuaug

SEQ ID NO: 2125496 - RNA, 20 nt, Human
aaacuaacagauaagcaaga

SEQ ID NO: 2125497 - RNA, 15 nt, Human
aaacuaacagauaag

SEQ ID NO: 2125498 - RNA, 12 nt, Human
ggggcccugguc

SEQ ID NO: 2125499 - RNA, 21 nt, Human
ggggcccugguccuuccaggc

SEQ ID NO: 2125500 - RNA, 22 nt, Human
ggggucucccucuccugccuac

SEQ ID NO: 2125501 - RNA, 22 nt, Human
gggguccuucaaguuagcucag

SEQ ID NO: 2125502 - RNA, 15 nt, Human
ggggucuccaggagg

SEQ ID NO: 2125503 - RNA, 19 nt, Human
ggggucucccucuccugcc

SEQ ID NO: 2125504 - RNA, 20 nt, Human
ggggucucccucuccugccu

SEQ ID NO: 2125505 - RNA, 13 nt, Human
gggucaggaagga

SEQ ID NO: 2125506 - RNA, 14 nt, Human
gggucaggagaggg

SEQ ID NO: 2125507 - RNA, 15 nt, Human
gggucaggccacggc

SEQ ID NO: 2125508 - RNA, 17 nt, Human
gggucaggccacggcag

SEQ ID NO: 2125509 - RNA, 21 nt, Human
gggucaggccacggcagccua

SEQ ID NO: 2125510 - RNA, 20 nt, Human
ggguauauuuuuguuuguuu

SEQ ID NO: 2125511 - RNA, 23 nt, Human
ggguauauuuuuguuuguuuugu

SEQ ID NO: 2125512 - RNA, 16 nt, Human
ggguauaucugggcug

SEQ ID NO: 2125513 - RNA, 13 nt, Human
ggguauauucauu

SEQ ID NO: 2125514 - RNA, 19 nt, Human
ggguauccaaguuggacug

SEQ ID NO: 2125515 - RNA, 20 nt, Human
ggguauccaaguuggacugg

SEQ ID NO: 2125516 - RNA, 21 nt, Human
ggguauccaaguuggacuggg

SEQ ID NO: 2125517 - RNA, 20 nt, Human
ggguaucaggugcugccauc

SEQ ID NO: 2125518 - RNA, 16 nt, Human
ggguaggcgggaagga

SEQ ID NO: 2125519 - RNA, 12 nt, Human
ggguaggcggga

SEQ ID NO: 2125520 - RNA, 22 nt, Human
ggggccuguacaaaagggacau

SEQ ID NO: 2125521 - RNA, 19 nt, Human
ggguagcuucugaccucag

SEQ ID NO: 2125522 - RNA, 21 nt, Human
ggguagcuucugaccucagca

SEQ ID NO: 2125523 - RNA, 23 nt, Human
gggucucacuauguugcccaggc

SEQ ID NO: 2125524 - RNA, 12 nt, Human
gggucucacucu

SEQ ID NO: 2125525 - RNA, 14 nt, Human
gggucuagggagag

SEQ ID NO: 2125526 - RNA, 19 nt, Human
gggucaggaaggaugagca

SEQ ID NO: 2125527 - RNA, 20 nt, Human
gggucgucaccaccucuccu

SEQ ID NO: 2125528 - RNA, 22 nt, Human
gggucucacuauguugcccagg

SEQ ID NO: 2125529 - RNA, 14 nt, Human
aaaccaagccgugg

SEQ ID NO: 2125530 - RNA, 12 nt, Human
aaaccaagaaga

SEQ ID NO: 2125531 - RNA, 20 nt, Human
aaacauugaaguaaugaauu

SEQ ID NO: 2125532 - RNA, 18 nt, Human
aaacaagaaaguuucccc

SEQ ID NO: 2125533 - RNA, 16 nt, Human
aaacaagaaaguuucc

SEQ ID NO: 2125534 - RNA, 17 nt, Human
aaacaagaaaguuuccc

SEQ ID NO: 2125535 - RNA, 15 nt, Human
aaacaagaaaguuuc

SEQ ID NO: 2125536 - RNA, 17 nt, Human
aaacaacuuucucuugu

SEQ ID NO: 2125537 - RNA, 18 nt, Human
aaacaacuuucucuugua

SEQ ID NO: 2125538 - RNA, 15 nt, Human
aaacaaacaagcuag

SEQ ID NO: 2125539 - RNA, 13 nt, Human
aaacaaagccaga

SEQ ID NO: 2125540 - RNA, 12 nt, Human
aaacaaagccag

SEQ ID NO: 2125541 - RNA, 14 nt, Human
aaaauuuuuggauu

SEQ ID NO: 2125542 - RNA, 23 nt, Human
aaaauuuuuggauugacaguaac

SEQ ID NO: 2125543 - RNA, 21 nt, Human
aaaauguaggguuauaauaau

SEQ ID NO: 2125544 - RNA, 17 nt, Human
aaaauguauaaguugag

SEQ ID NO: 2125545 - RNA, 21 nt, Human
aaaauguauaaguugaggcau

SEQ ID NO: 2125546 - RNA, 23 nt, Human
aaaauguauaaguugaggcauuu

SEQ ID NO: 2125547 - RNA, 12 nt, Human
aaaauguacaaa

SEQ ID NO: 2125548 - RNA, 19 nt, Human
aaaauguacaaaauaaagu

SEQ ID NO: 2125549 - RNA, 21 nt, Human
aaaauguacaaaauaaaguua

SEQ ID NO: 2125550 - RNA, 23 nt, Human
aaaauguaaguaaaugucugugg

SEQ ID NO: 2125551 - RNA, 14 nt, Human
aaaauauguucuuu

SEQ ID NO: 2125552 - RNA, 11 nt, Human
aaaauauuauc

SEQ ID NO: 2125553 - RNA, 17 nt, Human
aaaauauuaucuuugua

SEQ ID NO: 2125554 - RNA, 21 nt, Human
aaaauauuaucuuuguaauua

SEQ ID NO: 2125555 - RNA, 16 nt, Human
aaaauauuauaacuua

SEQ ID NO: 2125556 - RNA, 19 nt, Human
aaaauauuauaacuuaaaa

SEQ ID NO: 2125557 - RNA, 16 nt, Human
gggcuggacuggcugu

SEQ ID NO: 2125558 - RNA, 17 nt, Human
gggcuggacuggcuguc

SEQ ID NO: 2125559 - RNA, 17 nt, Human
gggcuggccaguuggaa

SEQ ID NO: 2125560 - RNA, 13 nt, Human
aaacauaauucuu

SEQ ID NO: 2125561 - RNA, 18 nt, Human
aaacauagagggagagag

SEQ ID NO: 2125562 - RNA, 21 nt, Human
aaacauaauucuuguauauua

SEQ ID NO: 2125563 - RNA, 15 nt, Human
aaacaauaaaugugc

SEQ ID NO: 2125564 - RNA, 14 nt, Human
aaacacaauauuuu

SEQ ID NO: 2125565 - RNA, 16 nt, Human
aaacacaccaggcugu

SEQ ID NO: 2125566 - RNA, 17 nt, Human
aaacacaccaggcugug

SEQ ID NO: 2125567 - RNA, 18 nt, Human
aaacacaccaggcugugg

SEQ ID NO: 2125568 - RNA, 23 nt, Human
aaacacaccaggcugugggccuc

SEQ ID NO: 2125569 - RNA, 15 nt, Human
aaacacacugaggca

SEQ ID NO: 2125570 - RNA, 16 nt, Human
aaacacacugaggcag

SEQ ID NO: 2125571 - RNA, 19 nt, Human
aaacacacugaggcaggga

SEQ ID NO: 2125572 - RNA, 16 nt, Human
aaacauaagagagccu

SEQ ID NO: 2125573 - RNA, 13 nt, Human
aaacauaaaaagu

SEQ ID NO: 2125574 - RNA, 17 nt, Human
aaacacacugaggcagg

SEQ ID NO: 2125575 - RNA, 21 nt, Human
aaacacagacauucugccagg

SEQ ID NO: 2125576 - RNA, 13 nt, Human
ggggaacuccugg

SEQ ID NO: 2125577 - RNA, 24 nt, Human
ggggaaaaucagccugcuccagcu

SEQ ID NO: 2125578 - RNA, 13 nt, Human
aaagcuagaaaug

SEQ ID NO: 2125579 - RNA, 17 nt, Human
aaagcuaggccuggcca

SEQ ID NO: 2125580 - RNA, 18 nt, Human
aaagcuaggccuggccag

SEQ ID NO: 2125581 - RNA, 18 nt, Human
aaagcuaaaguaucugua

SEQ ID NO: 2125582 - RNA, 14 nt, Human
aaagcggggggagg

SEQ ID NO: 2125583 - RNA, 16 nt, Human
aaagcggggggagggu

SEQ ID NO: 2125584 - RNA, 18 nt, Human
aaagcggggggaggguug

SEQ ID NO: 2125585 - RNA, 12 nt, Human
aaagcacaucca

SEQ ID NO: 2125586 - RNA, 16 nt, Human
aaagcacauugaaaga

SEQ ID NO: 2125587 - RNA, 20 nt, Human
aaagcuugaagaucguuagu

SEQ ID NO: 2125588 - RNA, 15 nt, Human
aaaggaaaaaguauc

SEQ ID NO: 2125589 - RNA, 21 nt, Human
aaaggaaaaaguaucauggaa

SEQ ID NO: 2125590 - RNA, 22 nt, Human
aaaggaaaaaguaucauggaaa

SEQ ID NO: 2125591 - RNA, 11 nt, Human
aaagcuucccc

SEQ ID NO: 2125592 - RNA, 17 nt, Human
aaaggacaggcagaaag

SEQ ID NO: 2125593 - RNA, 18 nt, Human
aaaggacaggcagaaaga

SEQ ID NO: 2125594 - RNA, 19 nt, Human
aaaggacaggcagaaagag

SEQ ID NO: 2125595 - RNA, 22 nt, Human
aaaggacaccuuuuaacucacc

SEQ ID NO: 2125596 - RNA, 15 nt, Human
aaaggaauggaggcu

SEQ ID NO: 2125597 - RNA, 18 nt, Human
aaaggaaaauaguaaugu

SEQ ID NO: 2125598 - RNA, 14 nt, Human
aaaggaagucuagg

SEQ ID NO: 2125599 - RNA, 22 nt, Human
ggucuugaacuccuggccucaa

SEQ ID NO: 2125600 - RNA, 21 nt, Human
ggucuugaacuccuggccuca

SEQ ID NO: 2125601 - RNA, 15 nt, Human
ggucugucccaccag

SEQ ID NO: 2125602 - RNA, 22 nt, Human
ggucuggagaagcagugagccg

SEQ ID NO: 2125603 - RNA, 20 nt, Human
ggucugggagaggcagagug

SEQ ID NO: 2125604 - RNA, 20 nt, Human
ggucugggggucaggaggca

SEQ ID NO: 2125605 - RNA, 22 nt, Human
ggucugggggucaggaggcagg

SEQ ID NO: 2125606 - RNA, 14 nt, Human
ggucugucccacca

SEQ ID NO: 2125607 - RNA, 20 nt, Human
ggugcacagacgucccucca

SEQ ID NO: 2125608 - RNA, 20 nt, Human
ggugauuuagcaggaagcug

SEQ ID NO: 2125609 - RNA, 21 nt, Human
ggucuuuugacauguggaaag

SEQ ID NO: 2125610 - RNA, 17 nt, Human
ggucuuuugacaugugg

SEQ ID NO: 2125611 - RNA, 17 nt, Human
ggugaucugggauuagg

SEQ ID NO: 2125612 - RNA, 13 nt, Human
ggucuuguaagag

SEQ ID NO: 2125613 - RNA, 14 nt, Human
gguccaccccaugu

SEQ ID NO: 2125614 - RNA, 22 nt, Human
gguccacccaggagccccgagg

SEQ ID NO: 2125615 - RNA, 20 nt, Human
gguccacccaggagccccga

SEQ ID NO: 2125616 - RNA, 23 nt, Human
ggucccaaggcaaggggugccug

SEQ ID NO: 2125617 - RNA, 15 nt, Human
aaacuuguuagaaau

SEQ ID NO: 2125618 - RNA, 20 nt, Human
aaacuuuucuuaaaaaguua

SEQ ID NO: 2125619 - RNA, 14 nt, Human
aaacuuuaauaugu

SEQ ID NO: 2125620 - RNA, 18 nt, Human
aaacuuuaauauguauuu

SEQ ID NO: 2125621 - RNA, 24 nt, Human
aaacuuuuuugaaauaauaaaucu

SEQ ID NO: 2125622 - RNA, 15 nt, Human
aaacuguagaaauga

SEQ ID NO: 2125623 - RNA, 16 nt, Human
aaacuguagaaaugau

SEQ ID NO: 2125624 - RNA, 18 nt, Human
aaacuguagaaaugauga

SEQ ID NO: 2125625 - RNA, 15 nt, Human
aaacuguagucucag

SEQ ID NO: 2125626 - RNA, 16 nt, Human
aaacuguagucucagg

SEQ ID NO: 2125627 - RNA, 17 nt, Human
aaacugucaaagaauca

SEQ ID NO: 2125628 - RNA, 23 nt, Human
gguaguacuccugcaaaauuuua

SEQ ID NO: 2125629 - RNA, 22 nt, Human
gguaguacuccugcaaaauuuu

SEQ ID NO: 2125630 - RNA, 16 nt, Human
gguaguuaguagcaug

SEQ ID NO: 2125631 - RNA, 19 nt, Human
gguaguuaguagcauguug

SEQ ID NO: 2125632 - RNA, 23 nt, Human
gguaguuuuccauggucacagag

SEQ ID NO: 2125633 - RNA, 18 nt, Human
gguaguugcaauugaauu

SEQ ID NO: 2125634 - RNA, 17 nt, Human
gguauaaugguugacug

SEQ ID NO: 2125635 - RNA, 14 nt, Human
gguaugugugugua

SEQ ID NO: 2125636 - RNA, 20 nt, Human
gguauaaugguugacugggu

SEQ ID NO: 2125637 - RNA, 21 nt, Human
gguauggaaggguuuguggcu

SEQ ID NO: 2125638 - RNA, 18 nt, Human
gguauuccuuuuguguac

SEQ ID NO: 2125639 - RNA, 19 nt, Human
gguauuccuuuuguguaca

SEQ ID NO: 2125640 - RNA, 19 nt, Human
gguccacccaggagccccg

SEQ ID NO: 2125641 - RNA, 20 nt, Human
aaagaggcugaaagaggcca

SEQ ID NO: 2125642 - RNA, 20 nt, Human
aaagaugcaaggaccaggac

SEQ ID NO: 2125643 - RNA, 22 nt, Human
aaagaugcucagguacagagaa

SEQ ID NO: 2125644 - RNA, 23 nt, Human
aaagaugcucagguacagagaag

SEQ ID NO: 2125645 - RNA, 24 nt, Human
aaagaugcucagguacagagaagg

SEQ ID NO: 2125646 - RNA, 22 nt, Human
aaagaugccggguuuuauauuu

SEQ ID NO: 2125647 - RNA, 13 nt, Human
aaagaugugggga

SEQ ID NO: 2125648 - RNA, 20 nt, Human
aaagauguuugucagauaug

SEQ ID NO: 2125649 - RNA, 21 nt, Human
aaagauguuugucagauauga

SEQ ID NO: 2125650 - RNA, 16 nt, Human
aaagaggcugaaagag

SEQ ID NO: 2125651 - RNA, 13 nt, Human
aaagagagaaugu

SEQ ID NO: 2125652 - RNA, 13 nt, Human
aaagagagcacug

SEQ ID NO: 2125653 - RNA, 18 nt, Human
aaagagagaauguagaua

SEQ ID NO: 2125654 - RNA, 21 nt, Human
aaagaauuucaauuuguucag

SEQ ID NO: 2125655 - RNA, 18 nt, Human
aaagaauuccuacaauau

SEQ ID NO: 2125656 - RNA, 17 nt, Human
aaagaauggaaggugga

SEQ ID NO: 2125657 - RNA, 15 nt, Human
aaagacucaguguuc

SEQ ID NO: 2125658 - RNA, 15 nt, Human
aaagacuguacaaag

SEQ ID NO: 2125659 - RNA, 18 nt, Human
aaagacuuaguauauuuu

SEQ ID NO: 2125660 - RNA, 20 nt, Human
aaagacuuaguauauuuucu

SEQ ID NO: 2125661 - RNA, 15 nt, Human
aaagagaaaauugaa

SEQ ID NO: 2125662 - RNA, 22 nt, Human
aaagagaaaauugaauuuaaca

SEQ ID NO: 2125663 - RNA, 18 nt, Human
aaagagaaaaaaaguuug

SEQ ID NO: 2125664 - RNA, 20 nt, Human
aaagagaaugccauucucuu

SEQ ID NO: 2125665 - RNA, 11 nt, Human
aaagagaaacu

SEQ ID NO: 2125666 - RNA, 12 nt, Human
aaagagaaacuu

SEQ ID NO: 2125667 - RNA, 13 nt, Human
aaagagaaacuuu

SEQ ID NO: 2125668 - RNA, 14 nt, Human
aaagagaaacuuug

SEQ ID NO: 2125669 - RNA, 21 nt, Human
aaagagaaacuuugugcuaca

SEQ ID NO: 2125670 - RNA, 23 nt, Human
aaagagaaacuuugugcuacaug

SEQ ID NO: 2125671 - RNA, 13 nt, Human
gacagaacacugu

SEQ ID NO: 2125672 - RNA, 14 nt, Human
gacagaacacuguc

SEQ ID NO: 2125673 - RNA, 15 nt, Human
gacagaacacugucu

SEQ ID NO: 2125674 - RNA, 13 nt, Human
gacacagcucuuc

SEQ ID NO: 2125675 - RNA, 16 nt, Human
gacacagcucuucucc

SEQ ID NO: 2125676 - RNA, 14 nt, Human
gacacagcucuucu

SEQ ID NO: 2125677 - RNA, 21 nt, Human
gacacaggauagauaacucuu

SEQ ID NO: 2125678 - RNA, 12 nt, Human
gacacaggcccg

SEQ ID NO: 2125679 - RNA, 23 nt, Human
gacacagcucuucuccaggcugu

SEQ ID NO: 2125680 - RNA, 22 nt, Human
gacacagcucuucuccaggcug

SEQ ID NO: 2125681 - RNA, 17 nt, Human
gacacagcucuucucca

SEQ ID NO: 2125682 - RNA, 19 nt, Human
gacauuguuggccaaagcc

SEQ ID NO: 2125683 - RNA, 11 nt, Human
gacauuuccca

SEQ ID NO: 2125684 - RNA, 15 nt, Human
gacagugaucuccau

SEQ ID NO: 2125685 - RNA, 15 nt, Human
gacagugagguccug

SEQ ID NO: 2125686 - RNA, 17 nt, Human
gacagugagguccuggg

SEQ ID NO: 2125687 - RNA, 19 nt, Human
gacagugagguccuggggg

SEQ ID NO: 2125688 - RNA, 20 nt, Human
gacagugagguccugggggc

SEQ ID NO: 2125689 - RNA, 21 nt, Human
gacagugaucuccauauguua

SEQ ID NO: 2125690 - RNA, 16 nt, Human
gacagugccuauacug

SEQ ID NO: 2125691 - RNA, 13 nt, Human
gacagugccuggg

SEQ ID NO: 2125692 - RNA, 16 nt, Human
gacagugcuucagccu

SEQ ID NO: 2125693 - RNA, 16 nt, Human
gacagugaucuccaua

SEQ ID NO: 2125694 - RNA, 17 nt, Human
gacagugccugggaaug

SEQ ID NO: 2125695 - RNA, 21 nt, Human
gacagugccugggaauguauu

SEQ ID NO: 2125696 - RNA, 22 nt, Human
gacagugccugggaauguauua

SEQ ID NO: 2125697 - RNA, 13 nt, Human
gacagaagaaggc

SEQ ID NO: 2125698 - RNA, 15 nt, Human
gacauugcggacagc

SEQ ID NO: 2125699 - RNA, 14 nt, Human
gacauugcggacag

SEQ ID NO: 2125700 - RNA, 12 nt, Human
gacauugucaau

SEQ ID NO: 2125701 - RNA, 19 nt, Human
gacauuguagagcuucugg

SEQ ID NO: 2125702 - RNA, 15 nt, Human
gacauugucaauaaa

SEQ ID NO: 2125703 - RNA, 13 nt, Human
gacauugucaaua

SEQ ID NO: 2125704 - RNA, 14 nt, Human
gacauugucaauaa

SEQ ID NO: 2125705 - RNA, 17 nt, Human
gacagugcuucagccug

SEQ ID NO: 2125706 - RNA, 17 nt, Human
gacauucugccaggccc

SEQ ID NO: 2125707 - RNA, 22 nt, Human
gacauucugccaggcccccaag

SEQ ID NO: 2125708 - RNA, 14 nt, Human
gacauucugccagg

SEQ ID NO: 2125709 - RNA, 12 nt, Human
gaccagccuggg

SEQ ID NO: 2125710 - RNA, 17 nt, Human
gaccagccugggcagca

SEQ ID NO: 2125711 - RNA, 19 nt, Human
gaccauccacucuacccuc

SEQ ID NO: 2125712 - RNA, 20 nt, Human
gaccauccuggccaacauga

SEQ ID NO: 2125713 - RNA, 16 nt, Human
gaccucguccuccccc

SEQ ID NO: 2125714 - RNA, 15 nt, Human
gaccucgugcuuuaa

SEQ ID NO: 2125715 - RNA, 18 nt, Human
gaccucgugcuuuaagug

SEQ ID NO: 2125716 - RNA, 17 nt, Human
gaccucguccucccccu

SEQ ID NO: 2125717 - RNA, 18 nt, Human
gaccucguccucccccug

SEQ ID NO: 2125718 - RNA, 19 nt, Human
gaccucguccucccccugc

SEQ ID NO: 2125719 - RNA, 21 nt, Human
gaccucguccucccccugcca

SEQ ID NO: 2125720 - RNA, 13 nt, Human
gaccauccuauuu

SEQ ID NO: 2125721 - RNA, 21 nt, Human
gaccauccacucuacccuccc

SEQ ID NO: 2125722 - RNA, 23 nt, Human
gaccauccacucuacccucccac

SEQ ID NO: 2125723 - RNA, 22 nt, Human
gaccucguccucccccugccag

SEQ ID NO: 2125724 - RNA, 23 nt, Human
gaccucuauaauugccacugaga

SEQ ID NO: 2125725 - RNA, 10 nt, Human
gaccucuggg

SEQ ID NO: 2125726 - RNA, 11 nt, Human
gaccucugggc

SEQ ID NO: 2125727 - RNA, 13 nt, Human
gaccucugggcuu

SEQ ID NO: 2125728 - RNA, 15 nt, Human
gaccugacuauugaa

SEQ ID NO: 2125729 - RNA, 15 nt, Human
gaccugacucaggca

SEQ ID NO: 2125730 - RNA, 16 nt, Human
gaccugagcuccccac

SEQ ID NO: 2125731 - RNA, 18 nt, Human
gaccugagcuccccacca

SEQ ID NO: 2125732 - RNA, 22 nt, Human
gaccugagcuccccaccacccc

SEQ ID NO: 2125733 - RNA, 13 nt, Human
gaccugaggaagc

SEQ ID NO: 2125734 - RNA, 14 nt, Human
gaccugaggaagcg

SEQ ID NO: 2125735 - RNA, 13 nt, Human
gacuuuccacccc

SEQ ID NO: 2125736 - RNA, 12 nt, Human
gacuuucaggua

SEQ ID NO: 2125737 - RNA, 14 nt, Human
gacuuucagguacu

SEQ ID NO: 2125738 - RNA, 19 nt, Human
gacuuuauuuucugguaga

SEQ ID NO: 2125739 - RNA, 13 nt, Human
gacuuuagaaaua

SEQ ID NO: 2125740 - RNA, 17 nt, Human
gacuuuagaaauaaaug

SEQ ID NO: 2125741 - RNA, 18 nt, Human
gacuuuagaaauaaaugu

SEQ ID NO: 2125742 - RNA, 19 nt, Human
gacuuuauagaucagccag

SEQ ID NO: 2125743 - RNA, 12 nt, Human
gacucaccucug

SEQ ID NO: 2125744 - RNA, 13 nt, Human
gacucaccucugc

SEQ ID NO: 2125745 - RNA, 14 nt, Human
gacucaccucugcc

SEQ ID NO: 2125746 - RNA, 15 nt, Human
gacucaccucugccu

SEQ ID NO: 2125747 - RNA, 17 nt, Human
gacucaccucugccuca

SEQ ID NO: 2125748 - RNA, 18 nt, Human
gacucaccucugccucaa

SEQ ID NO: 2125749 - RNA, 14 nt, Human
gacucacuggcagc

SEQ ID NO: 2125750 - RNA, 16 nt, Human
gacucacuggcagccc

SEQ ID NO: 2125751 - RNA, 21 nt, Human
gacucacuggcagccccagca

SEQ ID NO: 2125752 - RNA, 22 nt, Human
gacucacuggcagccccagcac

SEQ ID NO: 2125753 - RNA, 23 nt, Human
gacucacuggcagccccagcacc

SEQ ID NO: 2125754 - RNA, 23 nt, Human
gacucacuuaucccaagagaaug

SEQ ID NO: 2125755 - RNA, 16 nt, Human
gacucugccuccucuu

SEQ ID NO: 2125756 - RNA, 12 nt, Human
gacucugccucc

SEQ ID NO: 2125757 - RNA, 14 nt, Human
gacucuuguuuuca

SEQ ID NO: 2125758 - RNA, 9 nt, Human
gacucuugu

SEQ ID NO: 2125759 - RNA, 17 nt, Human
gacucuguggggccuug

SEQ ID NO: 2125760 - RNA, 18 nt, Human
gacucuguggggccuugg

SEQ ID NO: 2125761 - RNA, 19 nt, Human
gacucugucucaaaaaaac

SEQ ID NO: 2125762 - RNA, 11 nt, Human
gacuguagaaa

SEQ ID NO: 2125763 - RNA, 18 nt, Human
gacugaauuguccccagu

SEQ ID NO: 2125764 - RNA, 20 nt, Human
gacuguagauugcuucugua

SEQ ID NO: 2125765 - RNA, 21 nt, Human
gacuguagauugcuucuguag

SEQ ID NO: 2125766 - RNA, 22 nt, Human
gacuguagauugcuucuguagu

SEQ ID NO: 2125767 - RNA, 13 nt, Human
gacugucuuucag

SEQ ID NO: 2125768 - RNA, 14 nt, Human
gacuguaucugugu

SEQ ID NO: 2125769 - RNA, 15 nt, Human
gacuguaucugugua

SEQ ID NO: 2125770 - RNA, 16 nt, Human
gacuguaucuguguag

SEQ ID NO: 2125771 - RNA, 17 nt, Human
gacuguaucuguguaga

SEQ ID NO: 2125772 - RNA, 18 nt, Human
gacuguauuauacauggg

SEQ ID NO: 2125773 - RNA, 22 nt, Human
gacuguauuauacauggguagc

SEQ ID NO: 2125774 - RNA, 19 nt, Human
gacuguaucuguguagacu

SEQ ID NO: 2125775 - RNA, 23 nt, Human
gacuguacuccucccaggcgccc

SEQ ID NO: 2125776 - RNA, 18 nt, Human
gacuguacuccucccagg

SEQ ID NO: 2125777 - RNA, 16 nt, Human
gacugaagccugcagg

SEQ ID NO: 2125778 - RNA, 19 nt, Human
gacucuuguuuucaguuuc

SEQ ID NO: 2125779 - RNA, 19 nt, Human
gacugugaugccacacaga

SEQ ID NO: 2125780 - RNA, 13 nt, Human
gacugugaugcca

SEQ ID NO: 2125781 - RNA, 12 nt, Human
gacuguggcugc

SEQ ID NO: 2125782 - RNA, 14 nt, Human
gacuguggcugcua

SEQ ID NO: 2125783 - RNA, 15 nt, Human
gacuguggcugcuag

SEQ ID NO: 2125784 - RNA, 21 nt, Human
gaagcagaugcaaagaggcaa

SEQ ID NO: 2125785 - RNA, 19 nt, Human
gaagcagaugcaaagaggc

SEQ ID NO: 2125786 - RNA, 20 nt, Human
gaagcagaugcaaagaggca

SEQ ID NO: 2125787 - RNA, 15 nt, Human
gaagcagaggaagga

SEQ ID NO: 2125788 - RNA, 16 nt, Human
gaagcaacagaaaaaa

SEQ ID NO: 2125789 - RNA, 16 nt, Human
gaagcaacgaagggaa

SEQ ID NO: 2125790 - RNA, 17 nt, Human
gaagcaaacacauuaag

SEQ ID NO: 2125791 - RNA, 23 nt, Human
gaagacaaugugaaaagaaaaau

SEQ ID NO: 2125792 - RNA, 14 nt, Human
gaagacaaaaauac

SEQ ID NO: 2125793 - RNA, 15 nt, Human
gaagacaaaaauacu

SEQ ID NO: 2125794 - RNA, 16 nt, Human
gaagacaaaaauacuc

SEQ ID NO: 2125795 - RNA, 17 nt, Human
gaagacaaaaauacucu

SEQ ID NO: 2125796 - RNA, 20 nt, Human
gaagacaaaaauacucuaau

SEQ ID NO: 2125797 - RNA, 17 nt, Human
gaagaauuuucagaccc

SEQ ID NO: 2125798 - RNA, 20 nt, Human
gaagaauuuucagaccccag

SEQ ID NO: 2125799 - RNA, 21 nt, Human
gaagaauuuucagaccccagc

SEQ ID NO: 2125800 - RNA, 23 nt, Human
gaagauuuugaaauuuuuauuaa

SEQ ID NO: 2125801 - RNA, 15 nt, Human
gaagcaaacacauua

SEQ ID NO: 2125802 - RNA, 13 nt, Human
gaagcaaacacau

SEQ ID NO: 2125803 - RNA, 19 nt, Human
gaagcaaaaacgaaagcug

SEQ ID NO: 2125804 - RNA, 20 nt, Human
gaagcaaaaacgaaagcugg

SEQ ID NO: 2125805 - RNA, 21 nt, Human
gaagcaaaaacgaaagcuggg

SEQ ID NO: 2125806 - RNA, 17 nt, Human
gaacccuuuuggccccc

SEQ ID NO: 2125807 - RNA, 18 nt, Human
gaacccuuuuggcccccg

SEQ ID NO: 2125808 - RNA, 19 nt, Human
gaacccuuuuggcccccga

SEQ ID NO: 2125809 - RNA, 14 nt, Human
gaaccgaaaggcca

SEQ ID NO: 2125810 - RNA, 22 nt, Human
gaacccuggugaggaagcucca

SEQ ID NO: 2125811 - RNA, 23 nt, Human
gaacccuggugaggaagcuccag

SEQ ID NO: 2125812 - RNA, 20 nt, Human
gaacucgcuucucugugacu

SEQ ID NO: 2125813 - RNA, 20 nt, Human
gaacuccugggcucaagcag

SEQ ID NO: 2125814 - RNA, 23 nt, Human
gaacucuagggauagucaccuuu

SEQ ID NO: 2125815 - RNA, 17 nt, Human
gaacucucuccacccua

SEQ ID NO: 2125816 - RNA, 11 nt, Human
gaacuccuggg

SEQ ID NO: 2125817 - RNA, 14 nt, Human
gaacuccugggcuc

SEQ ID NO: 2125818 - RNA, 23 nt, Human
gaacccuuuuggcccccgagcug

SEQ ID NO: 2125819 - RNA, 23 nt, Human
gaagaauugaacccaggaggugg

SEQ ID NO: 2125820 - RNA, 13 nt, Human
gaagaauuauuuu

SEQ ID NO: 2125821 - RNA, 18 nt, Human
gaagaauugaacccagga

SEQ ID NO: 2125822 - RNA, 19 nt, Human
gaagaauugaacccaggag

SEQ ID NO: 2125823 - RNA, 20 nt, Human
gaagaauugaacccaggagg

SEQ ID NO: 2125824 - RNA, 15 nt, Human
gaagaauuuucagac

SEQ ID NO: 2125825 - RNA, 17 nt, Human
gaacugggccuguugcc

SEQ ID NO: 2125826 - RNA, 13 nt, Human
gaagaauauuguu

SEQ ID NO: 2125827 - RNA, 19 nt, Human
gaagaauauuguuccuaag

SEQ ID NO: 2125828 - RNA, 20 nt, Human
gaagaauauuguuccuaagu

SEQ ID NO: 2125829 - RNA, 22 nt, Human
gaagaauauuguuccuaaguuc

SEQ ID NO: 2125830 - RNA, 12 nt, Human
gaacuggcugca

SEQ ID NO: 2125831 - RNA, 11 nt, Human
gaacuggcugc

SEQ ID NO: 2125832 - RNA, 23 nt, Human
gaacuggacucaggaugcccagg

SEQ ID NO: 2125833 - RNA, 15 nt, Human
gaacuggaggccagg

SEQ ID NO: 2125834 - RNA, 21 nt, Human
gaacugcuuuaucccacggaa

SEQ ID NO: 2125835 - RNA, 14 nt, Human
gaacuggacucagg

SEQ ID NO: 2125836 - RNA, 15 nt, Human
gaacuggacucagga

SEQ ID NO: 2125837 - RNA, 21 nt, Human
gaacuggacucaggaugccca

SEQ ID NO: 2125838 - RNA, 17 nt, Human
gaacugagcuccucugg

SEQ ID NO: 2125839 - RNA, 19 nt, Human
gaacugagcuccucugggc

SEQ ID NO: 2125840 - RNA, 17 nt, Human
gaacugccucuuuccug

SEQ ID NO: 2125841 - RNA, 12 nt, Human
gaauauuuauua

SEQ ID NO: 2125842 - RNA, 21 nt, Human
gaauauuguuccuaaguucuu

SEQ ID NO: 2125843 - RNA, 19 nt, Human
gaauauuuauauuucacua

SEQ ID NO: 2125844 - RNA, 10 nt, Human
gaauauuuau

SEQ ID NO: 2125845 - RNA, 13 nt, Human
gaauauuuauaac

SEQ ID NO: 2125846 - RNA, 15 nt, Human
gaauauuuauaacag

SEQ ID NO: 2125847 - RNA, 16 nt, Human
gaauauuuauaacagc

SEQ ID NO: 2125848 - RNA, 18 nt, Human
gaauauuuauaacagcau

SEQ ID NO: 2125849 - RNA, 18 nt, Human
gaauauuuauauuucacu

SEQ ID NO: 2125850 - RNA, 18 nt, Human
gaauauuuauuaccucug

SEQ ID NO: 2125851 - RNA, 17 nt, Human
gaauauuuauuaccucu

SEQ ID NO: 2125852 - RNA, 15 nt, Human
gaauauuuauuaccu

SEQ ID NO: 2125853 - RNA, 13 nt, Human
gaauauuuauuac

SEQ ID NO: 2125854 - RNA, 21 nt, Human
gaauauuuauuaccucugaua

SEQ ID NO: 2125855 - RNA, 19 nt, Human
gaauauuuauuaccucuga

SEQ ID NO: 2125856 - RNA, 20 nt, Human
gaauauuuauauuucacuau

SEQ ID NO: 2125857 - RNA, 21 nt, Human
gaauauuagcuuuacuguuug

SEQ ID NO: 2125858 - RNA, 12 nt, Human
gaauauuagcuu

SEQ ID NO: 2125859 - RNA, 13 nt, Human
gaauauaauuauc

SEQ ID NO: 2125860 - RNA, 21 nt, Human
gaauauaaacacuauauggca

SEQ ID NO: 2125861 - RNA, 14 nt, Human
gaauauaaacacua

SEQ ID NO: 2125862 - RNA, 12 nt, Human
gaauauaauuau

SEQ ID NO: 2125863 - RNA, 15 nt, Human
gaaguuaacagagac

SEQ ID NO: 2125864 - RNA, 18 nt, Human
gaaguuacuguuauagag

SEQ ID NO: 2125865 - RNA, 15 nt, Human
gaaguguguuuccuu

SEQ ID NO: 2125866 - RNA, 17 nt, Human
gaaggggaggagggcgg

SEQ ID NO: 2125867 - RNA, 23 nt, Human
gaaggggaggcagccggcaccca

SEQ ID NO: 2125868 - RNA, 19 nt, Human
gaaggggaagcacucgugu

SEQ ID NO: 2125869 - RNA, 22 nt, Human
gaaggggaggaccucugggcuu

SEQ ID NO: 2125870 - RNA, 15 nt, Human
gaaggggaggagggc

SEQ ID NO: 2125871 - RNA, 13 nt, Human
gaauauaaacacu

SEQ ID NO: 2125872 - RNA, 18 nt, Human
gaaguugggcaauauaac

SEQ ID NO: 2125873 - RNA, 22 nt, Human
gaaguugggcaauauaaccaau

SEQ ID NO: 2125874 - RNA, 17 nt, Human
gaaguugcagugagcug

SEQ ID NO: 2125875 - RNA, 13 nt, Human
gaaguuggacagc

SEQ ID NO: 2125876 - RNA, 16 nt, Human
gaaguuggacagcaaa

SEQ ID NO: 2125877 - RNA, 23 nt, Human
gaaguuggacagcaaaaccauug

SEQ ID NO: 2125878 - RNA, 22 nt, Human
gaaguuggagugaguguggcuc

SEQ ID NO: 2125879 - RNA, 19 nt, Human
gaagcuccgcuuucuaccc

SEQ ID NO: 2125880 - RNA, 14 nt, Human
gaagcucagacugg

SEQ ID NO: 2125881 - RNA, 12 nt, Human
gaagcucagccc

SEQ ID NO: 2125882 - RNA, 13 nt, Human
gaagcucagccca

SEQ ID NO: 2125883 - RNA, 22 nt, Human
gaagcuccgcuuucuacccagc

SEQ ID NO: 2125884 - RNA, 14 nt, Human
gaagcucagcccac

SEQ ID NO: 2125885 - RNA, 15 nt, Human
gaagcucagcccacc

SEQ ID NO: 2125886 - RNA, 17 nt, Human
gaagcucagcccacccc

SEQ ID NO: 2125887 - RNA, 18 nt, Human
gaagcucagcccaccccc

SEQ ID NO: 2125888 - RNA, 19 nt, Human
gaagcucagcccacccccc

SEQ ID NO: 2125889 - RNA, 12 nt, Human
gaagcuccuggu

SEQ ID NO: 2125890 - RNA, 13 nt, Human
gaagcuccuggua

SEQ ID NO: 2125891 - RNA, 13 nt, Human
gaagcucugaagu

SEQ ID NO: 2125892 - RNA, 15 nt, Human
gaagcucugaaguca

SEQ ID NO: 2125893 - RNA, 14 nt, Human
gaagcugagcacca

SEQ ID NO: 2125894 - RNA, 17 nt, Human
gaagcugagcaccaggg

SEQ ID NO: 2125895 - RNA, 19 nt, Human
gaagcugagcaccagggga

SEQ ID NO: 2125896 - RNA, 18 nt, Human
gaagcucuugaagacacu

SEQ ID NO: 2125897 - RNA, 16 nt, Human
gaagcucugaagucac

SEQ ID NO: 2125898 - RNA, 20 nt, Human
gaagcucugaagucacauca

SEQ ID NO: 2125899 - RNA, 21 nt, Human
gaagggcuuggacucaagcaa

SEQ ID NO: 2125900 - RNA, 14 nt, Human
gaagggccaguccu

SEQ ID NO: 2125901 - RNA, 16 nt, Human
gaagggccaguccugc

SEQ ID NO: 2125902 - RNA, 18 nt, Human
gaagggccaguccugccu

SEQ ID NO: 2125903 - RNA, 19 nt, Human
gaagggccaguccugccug

SEQ ID NO: 2125904 - RNA, 20 nt, Human
gaagggccaguccugccugg

SEQ ID NO: 2125905 - RNA, 22 nt, Human
gaagggccaguccugccuggcc

SEQ ID NO: 2125906 - RNA, 18 nt, Human
gaaggcuggggcuauuua

SEQ ID NO: 2125907 - RNA, 12 nt, Human
gaaggcuguccu

SEQ ID NO: 2125908 - RNA, 17 nt, Human
gaaggcuguccuuaccc

SEQ ID NO: 2125909 - RNA, 13 nt, Human
gaaggcuggcugg

SEQ ID NO: 2125910 - RNA, 16 nt, Human
gaaggcuggcugggca

SEQ ID NO: 2125911 - RNA, 22 nt, Human
gaaggccgagaagcaagaaaga

SEQ ID NO: 2125912 - RNA, 17 nt, Human
gaaggccgagaagcaag

SEQ ID NO: 2125913 - RNA, 18 nt, Human
gaaggccgagaagcaaga

SEQ ID NO: 2125914 - RNA, 20 nt, Human
gagcgcaccugcccccuggu

SEQ ID NO: 2125915 - RNA, 16 nt, Human
gagcgcaucaggccug

SEQ ID NO: 2125916 - RNA, 18 nt, Human
gagcgcaccugcccccug

SEQ ID NO: 2125917 - RNA, 16 nt, Human
gagcugcuggcuugca

SEQ ID NO: 2125918 - RNA, 21 nt, Human
gagcugcuggcuugcagugcg

SEQ ID NO: 2125919 - RNA, 15 nt, Human
gagcuggaccagugg

SEQ ID NO: 2125920 - RNA, 17 nt, Human
gagcuggaccucaccaa

SEQ ID NO: 2125921 - RNA, 12 nt, Human
gagcugcuggcu

SEQ ID NO: 2125922 - RNA, 13 nt, Human
gaggaccucuggg

SEQ ID NO: 2125923 - RNA, 14 nt, Human
gaggaccucugggc

SEQ ID NO: 2125924 - RNA, 15 nt, Human
gaggaccucugggcu

SEQ ID NO: 2125925 - RNA, 14 nt, Human
gaggcagggucuca

SEQ ID NO: 2125926 - RNA, 15 nt, Human
gaggcaggggcggag

SEQ ID NO: 2125927 - RNA, 23 nt, Human
gaggcagggccuugcccagagau

SEQ ID NO: 2125928 - RNA, 14 nt, Human
gaggcaggggcgga

SEQ ID NO: 2125929 - RNA, 19 nt, Human
gaggaccuuaucugugcgu

SEQ ID NO: 2125930 - RNA, 15 nt, Human
gaggaccuuaucugu

SEQ ID NO: 2125931 - RNA, 15 nt, Human
gaggcagggucucac

SEQ ID NO: 2125932 - RNA, 17 nt, Human
gaggccaaggugggagg

SEQ ID NO: 2125933 - RNA, 22 nt, Human
gaggccaaggugggaggauugc

SEQ ID NO: 2125934 - RNA, 13 nt, Human
gaggcagggucag

SEQ ID NO: 2125935 - RNA, 18 nt, Human
gaggcaggugacagugag

SEQ ID NO: 2125936 - RNA, 15 nt, Human
gaggccaagugcagg

SEQ ID NO: 2125937 - RNA, 17 nt, Human
gaggccaagugcaggcu

SEQ ID NO: 2125938 - RNA, 16 nt, Human
gaggcugaggcagaag

SEQ ID NO: 2125939 - RNA, 18 nt, Human
gaggcugaggcagaagaa

SEQ ID NO: 2125940 - RNA, 16 nt, Human
gaggcugaggcaggag

SEQ ID NO: 2125941 - RNA, 15 nt, Human
gaggcugaggcagga

SEQ ID NO: 2125942 - RNA, 18 nt, Human
gaggcugaggcaggagaa

SEQ ID NO: 2125943 - RNA, 17 nt, Human
gaggcugaggcaggagg

SEQ ID NO: 2125944 - RNA, 14 nt, Human
gaggggccucaggu

SEQ ID NO: 2125945 - RNA, 13 nt, Human
gaggggcccgagc

SEQ ID NO: 2125946 - RNA, 12 nt, Human
gaggcugaggcg

SEQ ID NO: 2125947 - RNA, 18 nt, Human
gaggcugaggugggcaga

SEQ ID NO: 2125948 - RNA, 17 nt, Human
gaggggcaucugccccu

SEQ ID NO: 2125949 - RNA, 22 nt, Human
gaggggcaucugccccuccccc

SEQ ID NO: 2125950 - RNA, 19 nt, Human
gaggggcauggccagcagc

SEQ ID NO: 2125951 - RNA, 13 nt, Human
gaguuuaaagcaa

SEQ ID NO: 2125952 - RNA, 18 nt, Human
gaguugauucagcucugc

SEQ ID NO: 2125953 - RNA, 16 nt, Human
gaguggaugccucaga

SEQ ID NO: 2125954 - RNA, 16 nt, Human
gaguuggcauugcauu

SEQ ID NO: 2125955 - RNA, 16 nt, Human
gaguuguuuucagacu

SEQ ID NO: 2125956 - RNA, 22 nt, Human
gaguuguuuucagacucagacu

SEQ ID NO: 2125957 - RNA, 15 nt, Human
gaggucgaggcagga

SEQ ID NO: 2125958 - RNA, 21 nt, Human
gagguccugggggccugaccu

SEQ ID NO: 2125959 - RNA, 23 nt, Human
gagguccugggggccugaccucc

SEQ ID NO: 2125960 - RNA, 22 nt, Human
gaggucgaccccaaagccccuu

SEQ ID NO: 2125961 - RNA, 20 nt, Human
gaggucgggaguucgagacc

SEQ ID NO: 2125962 - RNA, 15 nt, Human
gaggugaaagggagc

SEQ ID NO: 2125963 - RNA, 17 nt, Human
gaggucucuugagggag

SEQ ID NO: 2125964 - RNA, 19 nt, Human
gaggucuuuugacaugugg

SEQ ID NO: 2125965 - RNA, 15 nt, Human
gaggucucuugaggg

SEQ ID NO: 2125966 - RNA, 22 nt, Human
gaggucuuuugacauguggaaa

SEQ ID NO: 2125967 - RNA, 14 nt, Human
gaggucucuugagg

SEQ ID NO: 2125968 - RNA, 23 nt, Human
gaggugaacuguuuccacauuca

SEQ ID NO: 2125969 - RNA, 16 nt, Human
gaggugaaagggagcu

SEQ ID NO: 2125970 - RNA, 23 nt, Human
gaggugaccccagguuucuaugu

SEQ ID NO: 2125971 - RNA, 19 nt, Human
gagugcaaugacacagucu

SEQ ID NO: 2125972 - RNA, 22 nt, Human
gagugauacaacuucaagugca

SEQ ID NO: 2125973 - RNA, 10 nt, Human
gagugaucuu

SEQ ID NO: 2125974 - RNA, 16 nt, Human
gagugcaacaguagca

SEQ ID NO: 2125975 - RNA, 19 nt, Human
gaguggagguuaaggcuga

SEQ ID NO: 2125976 - RNA, 20 nt, Human
gagugacagaggcagcccca

SEQ ID NO: 2125977 - RNA, 19 nt, Human
gagugacaguggauugcau

SEQ ID NO: 2125978 - RNA, 14 nt, Human
gagugacagaguaa

SEQ ID NO: 2125979 - RNA, 18 nt, Human
gagucccaaggaaagccc

SEQ ID NO: 2125980 - RNA, 14 nt, Human
gagugacuagacgu

SEQ ID NO: 2125981 - RNA, 19 nt, Human
gagugaguguggcuccccu

SEQ ID NO: 2125982 - RNA, 15 nt, Human
gaguugauucagcuc

SEQ ID NO: 2125983 - RNA, 16 nt, Human
gaguugauucagcucu

SEQ ID NO: 2125984 - RNA, 17 nt, Human
gaguugauucagcucug

SEQ ID NO: 2125985 - RNA, 16 nt, Human
gaguggauagaugccc

SEQ ID NO: 2125986 - RNA, 18 nt, Human
gaguggauagaugcccug

SEQ ID NO: 2125987 - RNA, 20 nt, Human
gaguggauagaugcccugcu

SEQ ID NO: 2125988 - RNA, 18 nt, Human
gaguggaugauguuucgu

SEQ ID NO: 2125989 - RNA, 18 nt, Human
gagugacagaggcagccc

SEQ ID NO: 2125990 - RNA, 15 nt, Human
gagucccaaggaaag

SEQ ID NO: 2125991 - RNA, 16 nt, Human
gagucccaaggaaagc

SEQ ID NO: 2125992 - RNA, 18 nt, Human
gagucagguuugggguuc

SEQ ID NO: 2125993 - RNA, 14 nt, Human
gagucccaaggaaa

SEQ ID NO: 2125994 - RNA, 12 nt, Human
gagucccaccuu

SEQ ID NO: 2125995 - RNA, 11 nt, Human
gagucagccuu

SEQ ID NO: 2125996 - RNA, 17 nt, Human
gagucagggaccccugc

SEQ ID NO: 2125997 - RNA, 18 nt, Human
gagucagggaccccugcc

SEQ ID NO: 2125998 - RNA, 22 nt, Human
gagucagggaccccugcccuug

SEQ ID NO: 2125999 - RNA, 16 nt, Human
gagucaccaagcccag

SEQ ID NO: 2126000 - RNA, 15 nt, Human
gagguggaagcccuc

SEQ ID NO: 2126001 - RNA, 17 nt, Human
gagucaccaagcccagu

SEQ ID NO: 2126002 - RNA, 20 nt, Human
gagguggaagcccuccuucc

SEQ ID NO: 2126003 - RNA, 14 nt, Human
gagucaccaggaau

SEQ ID NO: 2126004 - RNA, 20 nt, Human
gagucacccaugaagacagg

SEQ ID NO: 2126005 - RNA, 21 nt, Human
gcaccuacuacaucgcccucc

SEQ ID NO: 2126006 - RNA, 23 nt, Human
gcaccuacuacaucgcccuccac

SEQ ID NO: 2126007 - RNA, 17 nt, Human
gcaccuauagucccagc

SEQ ID NO: 2126008 - RNA, 18 nt, Human
gcaccuauagucccagcu

SEQ ID NO: 2126009 - RNA, 21 nt, Human
gcaccuauagucccagcuacu

SEQ ID NO: 2126010 - RNA, 14 nt, Human
gcaccgggccacag

SEQ ID NO: 2126011 - RNA, 13 nt, Human
gcacaucccugga

SEQ ID NO: 2126012 - RNA, 19 nt, Human
gcacauccaggcaauggcc

SEQ ID NO: 2126013 - RNA, 23 nt, Human
gcaccgggccacagagaaaguac

SEQ ID NO: 2126014 - RNA, 13 nt, Human
gcacucacaugcu

SEQ ID NO: 2126015 - RNA, 14 nt, Human
gcacucacaugcug

SEQ ID NO: 2126016 - RNA, 17 nt, Human
gcacucagaagacacug

SEQ ID NO: 2126017 - RNA, 16 nt, Human
gcacucagaagacacu

SEQ ID NO: 2126018 - RNA, 13 nt, Human
gcacucagaagac

SEQ ID NO: 2126019 - RNA, 14 nt, Human
gcacuccggaggua

SEQ ID NO: 2126020 - RNA, 19 nt, Human
gcacuccucccugauguac

SEQ ID NO: 2126021 - RNA, 21 nt, Human
gauuuuuuuuuagaacagaaa

SEQ ID NO: 2126022 - RNA, 23 nt, Human
gauuuuuuuuuagaacagaaaac

SEQ ID NO: 2126023 - RNA, 16 nt, Human
gcaagucacaaaggaa

SEQ ID NO: 2126024 - RNA, 20 nt, Human
gcaagucacaaaggaaugga

SEQ ID NO: 2126025 - RNA, 14 nt, Human
gcaauauaaccaau

SEQ ID NO: 2126026 - RNA, 17 nt, Human
gcaauauaaccaauguu

SEQ ID NO: 2126027 - RNA, 13 nt, Human
gcaauaguguguu

SEQ ID NO: 2126028 - RNA, 17 nt, Human
gcaauaguguguucuga

SEQ ID NO: 2126029 - RNA, 20 nt, Human
gcaauaguguguucugauua

SEQ ID NO: 2126030 - RNA, 19 nt, Human
gcaagugugugcaugugug

SEQ ID NO: 2126031 - RNA, 21 nt, Human
gcaagugugugcaugugugcg

SEQ ID NO: 2126032 - RNA, 22 nt, Human
gcaagugugugcaugugugcga

SEQ ID NO: 2126033 - RNA, 23 nt, Human
gcaaguguguaugugcgugugug

SEQ ID NO: 2126034 - RNA, 12 nt, Human
gcaagugugugc

SEQ ID NO: 2126035 - RNA, 13 nt, Human
gcaagugugugca

SEQ ID NO: 2126036 - RNA, 23 nt, Human
gcaagugugugcacaugugugcg

SEQ ID NO: 2126037 - RNA, 21 nt, Human
gcaagugagcaaaccugcccc

SEQ ID NO: 2126038 - RNA, 22 nt, Human
gcaagugagcaaaccugcccca

SEQ ID NO: 2126039 - RNA, 21 nt, Human
gcaaguguaugcacgugugca

SEQ ID NO: 2126040 - RNA, 15 nt, Human
gcaagugucugugug

SEQ ID NO: 2126041 - RNA, 16 nt, Human
gcaagugucugugugc

SEQ ID NO: 2126042 - RNA, 17 nt, Human
gcaagugucugugugca

SEQ ID NO: 2126043 - RNA, 12 nt, Human
gcaagucaggac

SEQ ID NO: 2126044 - RNA, 20 nt, Human
gcaagucccugacucucugu

SEQ ID NO: 2126045 - RNA, 22 nt, Human
gcaagucccugacucucuguga

SEQ ID NO: 2126046 - RNA, 21 nt, Human
gcacagugcaucucagcccac

SEQ ID NO: 2126047 - RNA, 20 nt, Human
gcacagugcaucucagccca

SEQ ID NO: 2126048 - RNA, 19 nt, Human
gcacagugcaucucagccc

SEQ ID NO: 2126049 - RNA, 14 nt, Human
gcacagugccugca

SEQ ID NO: 2126050 - RNA, 14 nt, Human
gcacauagagaggg

SEQ ID NO: 2126051 - RNA, 14 nt, Human
gcacaccgggcacu

SEQ ID NO: 2126052 - RNA, 11 nt, Human
gcacaauaaau

SEQ ID NO: 2126053 - RNA, 19 nt, Human
gcacaaggcugaccaagag

SEQ ID NO: 2126054 - RNA, 22 nt, Human
gcacaagcugcacccucaggca

SEQ ID NO: 2126055 - RNA, 21 nt, Human
gauuauauaaagaccuauaaa

SEQ ID NO: 2126056 - RNA, 12 nt, Human
gauuauuggaaa

SEQ ID NO: 2126057 - RNA, 23 nt, Human
gauuauucccuguacaauauuua

SEQ ID NO: 2126058 - RNA, 18 nt, Human
gauguauccaugggggca

SEQ ID NO: 2126059 - RNA, 19 nt, Human
gauguaggguaaggugccu

SEQ ID NO: 2126060 - RNA, 20 nt, Human
gauguaggguaaggugccuu

SEQ ID NO: 2126061 - RNA, 21 nt, Human
gauguaggguaaggugccuuc

SEQ ID NO: 2126062 - RNA, 20 nt, Human
gauuauagauuggagccacc

SEQ ID NO: 2126063 - RNA, 17 nt, Human
gauuauauugagacaaa

SEQ ID NO: 2126064 - RNA, 18 nt, Human
gauuauauugagacaaaa

SEQ ID NO: 2126065 - RNA, 19 nt, Human
gauuauauugagacaaaaa

SEQ ID NO: 2126066 - RNA, 18 nt, Human
gauucuccugccucagcc

SEQ ID NO: 2126067 - RNA, 17 nt, Human
gauucuccugccucagc

SEQ ID NO: 2126068 - RNA, 15 nt, Human
gauucuccugccuca

SEQ ID NO: 2126069 - RNA, 17 nt, Human
gauucuuccucccuccc

SEQ ID NO: 2126070 - RNA, 18 nt, Human
gauucuuccucccucccu

SEQ ID NO: 2126071 - RNA, 16 nt, Human
gauucuucaaaagcau

SEQ ID NO: 2126072 - RNA, 22 nt, Human
gauucugggaggaagcagguug

SEQ ID NO: 2126073 - RNA, 15 nt, Human
gauucugggaggaag

SEQ ID NO: 2126074 - RNA, 20 nt, Human
gauuuuuuacagcugccugc

SEQ ID NO: 2126075 - RNA, 15 nt, Human
gauuuaucacacaaa

SEQ ID NO: 2126076 - RNA, 17 nt, Human
gauuuaucacacaaagc

SEQ ID NO: 2126077 - RNA, 20 nt, Human
gauuuaucacacaaagcaga

SEQ ID NO: 2126078 - RNA, 17 nt, Human
gauuuauguuguauaga

SEQ ID NO: 2126079 - RNA, 19 nt, Human
gauuuaucacacaaagcag

SEQ ID NO: 2126080 - RNA, 22 nt, Human
gauuuagugaaagcuagagaua

SEQ ID NO: 2126081 - RNA, 20 nt, Human
gauuuacccagaaugucaga

SEQ ID NO: 2126082 - RNA, 21 nt, Human
gauuuacccagaaugucagau

SEQ ID NO: 2126083 - RNA, 22 nt, Human
gauuuacccagaaugucagauu

SEQ ID NO: 2126084 - RNA, 14 nt, Human
gaugaggggaggaa

SEQ ID NO: 2126085 - RNA, 14 nt, Human
gaugaggugcuggg

SEQ ID NO: 2126086 - RNA, 16 nt, Human
gaugaggugcugggag

SEQ ID NO: 2126087 - RNA, 17 nt, Human
gaugaggugcugggagg

SEQ ID NO: 2126088 - RNA, 19 nt, Human
gaugaggugcugggaggga

SEQ ID NO: 2126089 - RNA, 17 nt, Human
gaugaguguaacaagaa

SEQ ID NO: 2126090 - RNA, 18 nt, Human
gaugaguguaacaagaaa

SEQ ID NO: 2126091 - RNA, 20 nt, Human
gaugaguguaacaagaaagg

SEQ ID NO: 2126092 - RNA, 21 nt, Human
gaugaguguaacaagaaagga

SEQ ID NO: 2126093 - RNA, 19 nt, Human
gaugauaaugaugaugacg

SEQ ID NO: 2126094 - RNA, 18 nt, Human
gauguaaaagacuuuuuu

SEQ ID NO: 2126095 - RNA, 16 nt, Human
gauguaaacagugccu

SEQ ID NO: 2126096 - RNA, 16 nt, Human
gauggagcgcaccugc

SEQ ID NO: 2126097 - RNA, 22 nt, Human
gauggagcgcaccugcccccug

SEQ ID NO: 2126098 - RNA, 19 nt, Human
gauguaaacagugccugcu

SEQ ID NO: 2126099 - RNA, 20 nt, Human
gauguaaacagugccugcug

SEQ ID NO: 2126100 - RNA, 21 nt, Human
gauguaaacagugccugcuga

SEQ ID NO: 2126101 - RNA, 16 nt, Human
gaugcuggaugcuccu

SEQ ID NO: 2126102 - RNA, 18 nt, Human
gaugcuggaugcuccuuc

SEQ ID NO: 2126103 - RNA, 14 nt, Human
gaugcuggaugcuc

SEQ ID NO: 2126104 - RNA, 14 nt, Human
gauggagagagggg

SEQ ID NO: 2126105 - RNA, 15 nt, Human
gauggagagagggga

SEQ ID NO: 2126106 - RNA, 16 nt, Human
gauggagagaggggaa

SEQ ID NO: 2126107 - RNA, 22 nt, Human
gauggagacuccaugagaagcc

SEQ ID NO: 2126108 - RNA, 12 nt, Human
gaugcugccuga

SEQ ID NO: 2126109 - RNA, 23 nt, Human
gaugcugccagggcgccaucgcc

SEQ ID NO: 2126110 - RNA, 14 nt, Human
gaugcugccugagu

SEQ ID NO: 2126111 - RNA, 16 nt, Human
gaugcugccugaguca

SEQ ID NO: 2126112 - RNA, 19 nt, Human
cuuaccucggugccuuccu

SEQ ID NO: 2126113 - RNA, 21 nt, Human
cuuaccucggugccuuccucu

SEQ ID NO: 2126114 - RNA, 17 nt, Human
cuuaccuccugcccagg

SEQ ID NO: 2126115 - RNA, 18 nt, Human
cuuaccuccugcccagga

SEQ ID NO: 2126116 - RNA, 19 nt, Human
cuuaccuccugcccaggag

SEQ ID NO: 2126117 - RNA, 20 nt, Human
cuuaccuccugcccaggaga

SEQ ID NO: 2126118 - RNA, 15 nt, Human
cuuaccucuuccgga

SEQ ID NO: 2126119 - RNA, 13 nt, Human
cuuaccucuuccg

SEQ ID NO: 2126120 - RNA, 16 nt, Human
cuuagcagcuaucucu

SEQ ID NO: 2126121 - RNA, 18 nt, Human
cuuacacaucuuccacag

SEQ ID NO: 2126122 - RNA, 12 nt, Human
cuuagcaacagc

SEQ ID NO: 2126123 - RNA, 20 nt, Human
cuuaccgugggcacugaagg

SEQ ID NO: 2126124 - RNA, 20 nt, Human
cuuaccccuuagccucccug

SEQ ID NO: 2126125 - RNA, 13 nt, Human
cuuacccuucugu

SEQ ID NO: 2126126 - RNA, 17 nt, Human
cuuacccuucugugccc

SEQ ID NO: 2126127 - RNA, 18 nt, Human
cuuacccuucugugccca

SEQ ID NO: 2126128 - RNA, 20 nt, Human
cuuacccuucugugcccagc

SEQ ID NO: 2126129 - RNA, 21 nt, Human
cuuacccuucugugcccagcu

SEQ ID NO: 2126130 - RNA, 23 nt, Human
cuuacccuucugugcccagcuca

SEQ ID NO: 2126131 - RNA, 13 nt, Human
cuuaccucggugc

SEQ ID NO: 2126132 - RNA, 14 nt, Human
cuuaccucccaccu

SEQ ID NO: 2126133 - RNA, 18 nt, Human
cuuaccucccaccuuugg

SEQ ID NO: 2126134 - RNA, 13 nt, Human
cuuaccuccugcc

SEQ ID NO: 2126135 - RNA, 14 nt, Human
cuuaccuccugccc

SEQ ID NO: 2126136 - RNA, 15 nt, Human
cuuaccuccugccca

SEQ ID NO: 2126137 - RNA, 16 nt, Human
cuuaccuccugcccag

SEQ ID NO: 2126138 - RNA, 21 nt, Human
cuuacagauaggccuucuugu

SEQ ID NO: 2126139 - RNA, 22 nt, Human
cuuacagauaggccuucuugug

SEQ ID NO: 2126140 - RNA, 23 nt, Human
cuuacagauaggccuucuuguga

SEQ ID NO: 2126141 - RNA, 16 nt, Human
cuuacagcauaaggga

SEQ ID NO: 2126142 - RNA, 23 nt, Human
cuuacagcauaagggagcguaga

SEQ ID NO: 2126143 - RNA, 14 nt, Human
cuuaaacaaaugua

SEQ ID NO: 2126144 - RNA, 23 nt, Human
cuuaaaggcugugguaguacucc

SEQ ID NO: 2126145 - RNA, 18 nt, Human
cuuaaagcugccuguagu

SEQ ID NO: 2126146 - RNA, 23 nt, Human
cuuaaagcugccuguaguuagga

SEQ ID NO: 2126147 - RNA, 21 nt, Human
cuuaaaggcugugguaguacu

SEQ ID NO: 2126148 - RNA, 20 nt, Human
cuuacaccucguuagggaag

SEQ ID NO: 2126149 - RNA, 23 nt, Human
cuuacaccucguuagggaagaga

SEQ ID NO: 2126150 - RNA, 20 nt, Human
cuuacacccacaguggaaag

SEQ ID NO: 2126151 - RNA, 11 nt, Human
cuuacacccac

SEQ ID NO: 2126152 - RNA, 13 nt, Human
cuuacacacaaaa

SEQ ID NO: 2126153 - RNA, 20 nt, Human
cuuaaaauauuccugcauuu

SEQ ID NO: 2126154 - RNA, 18 nt, Human
cuuaaaauauuccugcau

SEQ ID NO: 2126155 - RNA, 14 nt, Human
cuuaaaauauuuua

SEQ ID NO: 2126156 - RNA, 17 nt, Human
cuuaaaauauauuucag

SEQ ID NO: 2126157 - RNA, 13 nt, Human
cuuaaaauauuuu

SEQ ID NO: 2126158 - RNA, 12 nt, Human
cuguugcuuuuu

SEQ ID NO: 2126159 - RNA, 14 nt, Human
cuguucagcuccag

SEQ ID NO: 2126160 - RNA, 12 nt, Human
cuguucagcauu

SEQ ID NO: 2126161 - RNA, 13 nt, Human
cuguucagcauuc

SEQ ID NO: 2126162 - RNA, 14 nt, Human
cuguucagcauucu

SEQ ID NO: 2126163 - RNA, 17 nt, Human
cuguucagcauucuuag

SEQ ID NO: 2126164 - RNA, 13 nt, Human
cuguucagcucca

SEQ ID NO: 2126165 - RNA, 19 nt, Human
cugugucuugcaauggcag

SEQ ID NO: 2126166 - RNA, 16 nt, Human
cugugucuugcaaugg

SEQ ID NO: 2126167 - RNA, 15 nt, Human
cuguucacucuacuu

SEQ ID NO: 2126168 - RNA, 20 nt, Human
cugugucuugcaauggcagc

SEQ ID NO: 2126169 - RNA, 14 nt, Human
cugugaccagcacu

SEQ ID NO: 2126170 - RNA, 18 nt, Human
cugugaccaggaaggaag

SEQ ID NO: 2126171 - RNA, 23 nt, Human
cugugaccaggaaggaagucagc

SEQ ID NO: 2126172 - RNA, 16 nt, Human
cugugcgugaaacaca

SEQ ID NO: 2126173 - RNA, 15 nt, Human
cugugagacccccac

SEQ ID NO: 2126174 - RNA, 14 nt, Human
cugugcgugaaaca

SEQ ID NO: 2126175 - RNA, 17 nt, Human
cugugcguuacuaauug

SEQ ID NO: 2126176 - RNA, 13 nt, Human
cugugcuaugaau

SEQ ID NO: 2126177 - RNA, 15 nt, Human
cugugcuaugaauuu

SEQ ID NO: 2126178 - RNA, 16 nt, Human
cugugcuaugaauuuu

SEQ ID NO: 2126179 - RNA, 22 nt, Human
cugugacuucagcucuguuuua

SEQ ID NO: 2126180 - RNA, 21 nt, Human
cugugacugauguuaggcugg

SEQ ID NO: 2126181 - RNA, 22 nt, Human
cugugacugauguuaggcuggg

SEQ ID NO: 2126182 - RNA, 13 nt, Human
cugugagaaaacg

SEQ ID NO: 2126183 - RNA, 14 nt, Human
cugugagaccccca

SEQ ID NO: 2126184 - RNA, 17 nt, Human
cugugacuucagcucug

SEQ ID NO: 2126185 - RNA, 16 nt, Human
cugugaccugugggga

SEQ ID NO: 2126186 - RNA, 13 nt, Human
cugugaccugugg

SEQ ID NO: 2126187 - RNA, 14 nt, Human
cugugaccuguggg

SEQ ID NO: 2126188 - RNA, 15 nt, Human
cugugaccugugggg

SEQ ID NO: 2126189 - RNA, 20 nt, Human
cugugaccagcacugucuca

SEQ ID NO: 2126190 - RNA, 14 nt, Human
cugugaccauuuau

SEQ ID NO: 2126191 - RNA, 17 nt, Human
cugugaccauuuauaau

SEQ ID NO: 2126192 - RNA, 19 nt, Human
cugugaccauuuauaaugu

SEQ ID NO: 2126193 - RNA, 20 nt, Human
cugugcugcccgucuucagc

SEQ ID NO: 2126194 - RNA, 22 nt, Human
cugugcugcccgucuucagccu

SEQ ID NO: 2126195 - RNA, 21 nt, Human
cuguguacagaauucugcuac

SEQ ID NO: 2126196 - RNA, 19 nt, Human
cuguguaaucauuucuugg

SEQ ID NO: 2126197 - RNA, 16 nt, Human
cuguguaacugcccaa

SEQ ID NO: 2126198 - RNA, 11 nt, Human
cuguguaacug

SEQ ID NO: 2126199 - RNA, 13 nt, Human
cuguguaacugcc

SEQ ID NO: 2126200 - RNA, 15 nt, Human
cuguguaacugccca

SEQ ID NO: 2126201 - RNA, 14 nt, Human
cugugucuugcaau

SEQ ID NO: 2126202 - RNA, 17 nt, Human
cugugucucuuuucucu

SEQ ID NO: 2126203 - RNA, 19 nt, Human
cugugucagguggggcagc

SEQ ID NO: 2126204 - RNA, 20 nt, Human
cugugucagcauagaaguaa

SEQ ID NO: 2126205 - RNA, 21 nt, Human
cugugucagguggggcagcuu

SEQ ID NO: 2126206 - RNA, 16 nt, Human
cugugucagccugucc

SEQ ID NO: 2126207 - RNA, 13 nt, Human
cuguguagcuggg

SEQ ID NO: 2126208 - RNA, 21 nt, Human
cuuagcagggaaacagcuaau

SEQ ID NO: 2126209 - RNA, 18 nt, Human
cuuagcagggaaacagcu

SEQ ID NO: 2126210 - RNA, 22 nt, Human
cuuagcagcuaucucucaguga

SEQ ID NO: 2126211 - RNA, 23 nt, Human
cuuagcagcuaucucucagugaa

SEQ ID NO: 2126212 - RNA, 14 nt, Human
cuuauuaaugcuaa

SEQ ID NO: 2126213 - RNA, 15 nt, Human
cuuauuaaugcuaag

SEQ ID NO: 2126214 - RNA, 19 nt, Human
cuuauuaaugcuaagggca

SEQ ID NO: 2126215 - RNA, 13 nt, Human
cuuauugcccacg

SEQ ID NO: 2126216 - RNA, 12 nt, Human
cuuauugcccac

SEQ ID NO: 2126217 - RNA, 15 nt, Human
cuuauguaccucuuu

SEQ ID NO: 2126218 - RNA, 20 nt, Human
cuuccaugucgccucugcau

SEQ ID NO: 2126219 - RNA, 19 nt, Human
cuuccaugucgccucugca

SEQ ID NO: 2126220 - RNA, 18 nt, Human
cuuccaugucgccucugc

SEQ ID NO: 2126221 - RNA, 17 nt, Human
cuuccaugucgccucug

SEQ ID NO: 2126222 - RNA, 16 nt, Human
cuuccaugucgccucu

SEQ ID NO: 2126223 - RNA, 15 nt, Human
cuuccaugucgccuc

SEQ ID NO: 2126224 - RNA, 19 nt, Human
cuucauccuuagcaacagc

SEQ ID NO: 2126225 - RNA, 20 nt, Human
cuucauccuuagcaacagcc

SEQ ID NO: 2126226 - RNA, 14 nt, Human
cuucaugccuuugu

SEQ ID NO: 2126227 - RNA, 15 nt, Human
cuucaugccuuugua

SEQ ID NO: 2126228 - RNA, 16 nt, Human
cuucaugccuuuguaa

SEQ ID NO: 2126229 - RNA, 17 nt, Human
cuucaugccuuuguaag

SEQ ID NO: 2126230 - RNA, 19 nt, Human
cuucaugccuuuguaaguu

SEQ ID NO: 2126231 - RNA, 13 nt, Human
cuucagugggaga

SEQ ID NO: 2126232 - RNA, 15 nt, Human
cuucagugggagaaa

SEQ ID NO: 2126233 - RNA, 18 nt, Human
cuucaguggcagcugcuu

SEQ ID NO: 2126234 - RNA, 19 nt, Human
cuucauccggcagccugga

SEQ ID NO: 2126235 - RNA, 19 nt, Human
cuucaucccacuccaacuc

SEQ ID NO: 2126236 - RNA, 18 nt, Human
cuucagugggagaaaaca

SEQ ID NO: 2126237 - RNA, 18 nt, Human
cuuauugcccacgcugga

SEQ ID NO: 2126238 - RNA, 16 nt, Human
cuuauuaaugcuaagg

SEQ ID NO: 2126239 - RNA, 16 nt, Human
cuucagacugcaagug

SEQ ID NO: 2126240 - RNA, 15 nt, Human
cuucacuucugacca

SEQ ID NO: 2126241 - RNA, 16 nt, Human
cuucacuucugaccac

SEQ ID NO: 2126242 - RNA, 17 nt, Human
cuucacuucugaccaca

SEQ ID NO: 2126243 - RNA, 19 nt, Human
cuucacuucugaccacacu

SEQ ID NO: 2126244 - RNA, 21 nt, Human
cuucacuucugaccacacuuc

SEQ ID NO: 2126245 - RNA, 17 nt, Human
cuucagaagacacugca

SEQ ID NO: 2126246 - RNA, 13 nt, Human
cuucugacugcug

SEQ ID NO: 2126247 - RNA, 21 nt, Human
cuucugacugcugauucuccc

SEQ ID NO: 2126248 - RNA, 14 nt, Human
cuucugaccucagc

SEQ ID NO: 2126249 - RNA, 15 nt, Human
cuucugaccucagca

SEQ ID NO: 2126250 - RNA, 13 nt, Human
cuucuuaaagagu

SEQ ID NO: 2126251 - RNA, 18 nt, Human
cuuggccaguuaucccuu

SEQ ID NO: 2126252 - RNA, 22 nt, Human
cuuggccagaagggggccauga

SEQ ID NO: 2126253 - RNA, 17 nt, Human
cuuggcaugccuuccag

SEQ ID NO: 2126254 - RNA, 20 nt, Human
cuuggcaugccuuccagcac

SEQ ID NO: 2126255 - RNA, 17 nt, Human
cuuggccagaagggggc

SEQ ID NO: 2126256 - RNA, 20 nt, Human
cuuggcaucacagggcagag

SEQ ID NO: 2126257 - RNA, 22 nt, Human
cuuggcaucacagggcagagcc

SEQ ID NO: 2126258 - RNA, 16 nt, Human
cuuggcaugccuucca

SEQ ID NO: 2126259 - RNA, 12 nt, Human
cuugacagggca

SEQ ID NO: 2126260 - RNA, 14 nt, Human
cuugccuagggccu

SEQ ID NO: 2126261 - RNA, 14 nt, Human
cuugacagaacacu

SEQ ID NO: 2126262 - RNA, 16 nt, Human
cuugacagaacacugu

SEQ ID NO: 2126263 - RNA, 17 nt, Human
cuugacagaacacuguc

SEQ ID NO: 2126264 - RNA, 22 nt, Human
cuugacaaguugcgacggagag

SEQ ID NO: 2126265 - RNA, 17 nt, Human
cuugacaauagaacauu

SEQ ID NO: 2126266 - RNA, 12 nt, Human
cuugcucugcug

SEQ ID NO: 2126267 - RNA, 20 nt, Human
cuugcucuccccugcccugc

SEQ ID NO: 2126268 - RNA, 20 nt, Human
cuugcucgcuguaaaaucuu

SEQ ID NO: 2126269 - RNA, 14 nt, Human
cuugcucuaucuca

SEQ ID NO: 2126270 - RNA, 16 nt, Human
cuugcucuaucucaca

SEQ ID NO: 2126271 - RNA, 18 nt, Human
cuugcucuaucucacagc

SEQ ID NO: 2126272 - RNA, 19 nt, Human
cuugcucuaucucacagca

SEQ ID NO: 2126273 - RNA, 20 nt, Human
cuugcucuaucucacagcac

SEQ ID NO: 2126274 - RNA, 22 nt, Human
cuugcucuaucucacagcacac

SEQ ID NO: 2126275 - RNA, 23 nt, Human
cuugcucuaucucacagcacacu

SEQ ID NO: 2126276 - RNA, 19 nt, Human
cuugcucuccccugcccug

SEQ ID NO: 2126277 - RNA, 16 nt, Human
cuugccuagggccugg

SEQ ID NO: 2126278 - RNA, 18 nt, Human
cuugccuagggccugguc

SEQ ID NO: 2126279 - RNA, 19 nt, Human
cuugccuagggccuggucc

SEQ ID NO: 2126280 - RNA, 20 nt, Human
cuugccuagggccuggucca

SEQ ID NO: 2126281 - RNA, 19 nt, Human
cuuucagauacaugguugu

SEQ ID NO: 2126282 - RNA, 14 nt, Human
cuuucagagccucc

SEQ ID NO: 2126283 - RNA, 22 nt, Human
cuugugacuagugcugaagcuu

SEQ ID NO: 2126284 - RNA, 20 nt, Human
cuugugacuagugcugaagc

SEQ ID NO: 2126285 - RNA, 15 nt, Human
cuugugaucugggaa

SEQ ID NO: 2126286 - RNA, 16 nt, Human
cuugugaucugggaac

SEQ ID NO: 2126287 - RNA, 13 nt, Human
cuuguggacacag

SEQ ID NO: 2126288 - RNA, 15 nt, Human
cuuguggacacagcu

SEQ ID NO: 2126289 - RNA, 14 nt, Human
cuuguggacacagc

SEQ ID NO: 2126290 - RNA, 16 nt, Human
cuuguggacacagcuc

SEQ ID NO: 2126291 - RNA, 19 nt, Human
cuuuaacucaggacuccag

SEQ ID NO: 2126292 - RNA, 20 nt, Human
cuuuaacucaggacuccagc

SEQ ID NO: 2126293 - RNA, 21 nt, Human
cuuuaacucaggacuccagcc

SEQ ID NO: 2126294 - RNA, 17 nt, Human
cuuuaaccagucugaag

SEQ ID NO: 2126295 - RNA, 18 nt, Human
cuuuaaccagucugaagu

SEQ ID NO: 2126296 - RNA, 13 nt, Human
cuuucagaaaaca

SEQ ID NO: 2126297 - RNA, 14 nt, Human
cuuucagaaaacag

SEQ ID NO: 2126298 - RNA, 18 nt, Human
cuuucagaaaacagaaaa

SEQ ID NO: 2126299 - RNA, 23 nt, Human
cuuucagaaaacagaaaaaaaac

SEQ ID NO: 2126300 - RNA, 13 nt, Human
cuuucagagccuc

SEQ ID NO: 2126301 - RNA, 12 nt, Human
cuuucagagccu

SEQ ID NO: 2126302 - RNA, 11 nt, Human
cuuucagagcc

SEQ ID NO: 2126303 - RNA, 12 nt, Human
cuuuacaaaaag

SEQ ID NO: 2126304 - RNA, 13 nt, Human
cuuuacaaaaaga

SEQ ID NO: 2126305 - RNA, 22 nt, Human
cuuuaaucuucaguuuuaucuu

SEQ ID NO: 2126306 - RNA, 17 nt, Human
cuuuaaucuucaguuuu

SEQ ID NO: 2126307 - RNA, 21 nt, Human
cuuuaaucuucaguuuuaucu

SEQ ID NO: 2126308 - RNA, 14 nt, Human
cuuuaaucuucagu

SEQ ID NO: 2126309 - RNA, 14 nt, Human
cuuuaauauguauu

SEQ ID NO: 2126310 - RNA, 15 nt, Human
cuuuaauauguauuu

SEQ ID NO: 2126311 - RNA, 21 nt, Human
cuuuaauauguauuuuaugua

SEQ ID NO: 2126312 - RNA, 12 nt, Human
cuuuaauauaaa

SEQ ID NO: 2126313 - RNA, 20 nt, Human
cuuuaagugccuacauuauc

SEQ ID NO: 2126314 - RNA, 13 nt, Human
cuuuccuuuuucc

SEQ ID NO: 2126315 - RNA, 21 nt, Human
cuuuccuuuuucccaauaaau

SEQ ID NO: 2126316 - RNA, 22 nt, Human
cuuucggggagaggcugaggac

SEQ ID NO: 2126317 - RNA, 14 nt, Human
cuuucuagcuguug

SEQ ID NO: 2126318 - RNA, 23 nt, Human
cuuucuagcuguugagcuguuuu

SEQ ID NO: 2126319 - RNA, 21 nt, Human
cuuucuccuuagucuucucau

SEQ ID NO: 2126320 - RNA, 23 nt, Human
cuuucuccuuagucuucucauag

SEQ ID NO: 2126321 - RNA, 15 nt, Human
cuuucuccuuagucu

SEQ ID NO: 2126322 - RNA, 20 nt, Human
cuuucuccuuagucuucuca

SEQ ID NO: 2126323 - RNA, 21 nt, Human
cuuucucccaggccaggcucc

SEQ ID NO: 2126324 - RNA, 19 nt, Human
cuuucucccaggccaggcu

SEQ ID NO: 2126325 - RNA, 20 nt, Human
cuuucucccaggccaggcuc

SEQ ID NO: 2126326 - RNA, 16 nt, Human
cuuugagcuuaagaau

SEQ ID NO: 2126327 - RNA, 15 nt, Human
cuuugauuccaucuc

SEQ ID NO: 2126328 - RNA, 16 nt, Human
cuuugauuccaucucc

SEQ ID NO: 2126329 - RNA, 13 nt, Human
cuuugagugaucc

SEQ ID NO: 2126330 - RNA, 16 nt, Human
cuuugaguuuccucag

SEQ ID NO: 2126331 - RNA, 17 nt, Human
cuuugaguuuccucagg

SEQ ID NO: 2126332 - RNA, 18 nt, Human
cuuugaguuuccucaggc

SEQ ID NO: 2126333 - RNA, 19 nt, Human
cuuugaguuuccucaggcu

SEQ ID NO: 2126334 - RNA, 22 nt, Human
cuuugaguuuccucaggcugcu

SEQ ID NO: 2126335 - RNA, 23 nt, Human
cuuugguccuaagucccugcccc

SEQ ID NO: 2126336 - RNA, 15 nt, Human
cuuuucaaaacauuu

SEQ ID NO: 2126337 - RNA, 15 nt, Human
cuuuggugaacauug

SEQ ID NO: 2126338 - RNA, 17 nt, Human
cuuuggucucuugcuug

SEQ ID NO: 2126339 - RNA, 13 nt, Human
cuuuggugccuuu

SEQ ID NO: 2126340 - RNA, 14 nt, Human
cuuuggugccuuuc

SEQ ID NO: 2126341 - RNA, 15 nt, Human
cuuuggugccuuucc

SEQ ID NO: 2126342 - RNA, 16 nt, Human
cuuuggugccuuuccu

SEQ ID NO: 2126343 - RNA, 18 nt, Human
cuuuggugccuuuccugu

SEQ ID NO: 2126344 - RNA, 19 nt, Human
cuuuggugccuuuccuguu

SEQ ID NO: 2126345 - RNA, 20 nt, Human
cuuuggugccuuuccuguuc

SEQ ID NO: 2126346 - RNA, 21 nt, Human
cuuuggugcgggcacaauaaa

SEQ ID NO: 2126347 - RNA, 17 nt, Human
cuuugguggagauaaag

SEQ ID NO: 2126348 - RNA, 20 nt, Human
cuuugguguacaaaauggaa

SEQ ID NO: 2126349 - RNA, 14 nt, Human
cuuugguccuucaa

SEQ ID NO: 2126350 - RNA, 15 nt, Human
cuuuggucucuugcu

SEQ ID NO: 2126351 - RNA, 16 nt, Human
cuuuggucucuugcuu

SEQ ID NO: 2126352 - RNA, 22 nt, Human
cuuugguacauggccaguguga

SEQ ID NO: 2126353 - RNA, 20 nt, Human
cuuuggggcuuuuacaccag

SEQ ID NO: 2126354 - RNA, 21 nt, Human
cuuuggggcuuuuacaccagu

SEQ ID NO: 2126355 - RNA, 18 nt, Human
cuuuuaggccaaaaaaau

SEQ ID NO: 2126356 - RNA, 17 nt, Human
cuuuuaggacccuuccc

SEQ ID NO: 2126357 - RNA, 16 nt, Human
cuuuuaggccaaaaaa

SEQ ID NO: 2126358 - RNA, 13 nt, Human
cuuuuagccuagu

SEQ ID NO: 2126359 - RNA, 17 nt, Human
cuuuuauuucuuaaaca

SEQ ID NO: 2126360 - RNA, 15 nt, Human
cuuuuaguacccacc

SEQ ID NO: 2126361 - RNA, 16 nt, Human
cuuuuaguacccaccu

SEQ ID NO: 2126362 - RNA, 17 nt, Human
cuuuuaguacccaccug

SEQ ID NO: 2126363 - RNA, 16 nt, Human
cuggaugcuccuucca

SEQ ID NO: 2126364 - RNA, 20 nt, Human
cuggaugaaguuaucuggcu

SEQ ID NO: 2126365 - RNA, 23 nt, Human
cuggaugaaguuaucuggcuuca

SEQ ID NO: 2126366 - RNA, 12 nt, Human
cugcuuagcuug

SEQ ID NO: 2126367 - RNA, 19 nt, Human
cugcuuagcuugcaccuug

SEQ ID NO: 2126368 - RNA, 14 nt, Human
cugcuuaaugaaaa

SEQ ID NO: 2126369 - RNA, 20 nt, Human
cugcuuauccguuagccgug

SEQ ID NO: 2126370 - RNA, 23 nt, Human
cugcuuaucaauaaaccuguuug

SEQ ID NO: 2126371 - RNA, 13 nt, Human
cuggacuugagcu

SEQ ID NO: 2126372 - RNA, 15 nt, Human
cuggacuugagcuug

SEQ ID NO: 2126373 - RNA, 14 nt, Human
cuggagaagcagug

SEQ ID NO: 2126374 - RNA, 20 nt, Human
cuggaucugggacccuuucc

SEQ ID NO: 2126375 - RNA, 21 nt, Human
cuggaucugggacccuuuccu

SEQ ID NO: 2126376 - RNA, 21 nt, Human
cuggagaagcagugagccgca

SEQ ID NO: 2126377 - RNA, 22 nt, Human
cuggagaagucuuagacuugaa

SEQ ID NO: 2126378 - RNA, 13 nt, Human
cuggagaauaauu

SEQ ID NO: 2126379 - RNA, 17 nt, Human
cuggagaauaauucuuu

SEQ ID NO: 2126380 - RNA, 19 nt, Human
cuggagaauaauucuuuga

SEQ ID NO: 2126381 - RNA, 20 nt, Human
cuggagacaaugcagaugcc

SEQ ID NO: 2126382 - RNA, 21 nt, Human
cuggagacaaugcagaugcca

SEQ ID NO: 2126383 - RNA, 22 nt, Human
cugcugugaacaagugaacaca

SEQ ID NO: 2126384 - RNA, 14 nt, Human
cugcucacauaucu

SEQ ID NO: 2126385 - RNA, 19 nt, Human
cugcucacauaucugucau

SEQ ID NO: 2126386 - RNA, 16 nt, Human
cugcucacauaucugu

SEQ ID NO: 2126387 - RNA, 12 nt, Human
cugcugacagug

SEQ ID NO: 2126388 - RNA, 15 nt, Human
cugcugacaguguug

SEQ ID NO: 2126389 - RNA, 13 nt, Human
cugcugacagugu

SEQ ID NO: 2126390 - RNA, 14 nt, Human
cugcugaugcucau

SEQ ID NO: 2126391 - RNA, 15 nt, Human
cugcugaugcucaug

SEQ ID NO: 2126392 - RNA, 16 nt, Human
cugcugaugcucaugg

SEQ ID NO: 2126393 - RNA, 17 nt, Human
cugcugaugcucauggu

SEQ ID NO: 2126394 - RNA, 18 nt, Human
cugcugauguggcaacug

SEQ ID NO: 2126395 - RNA, 14 nt, Human
cuggcccugccuuc

SEQ ID NO: 2126396 - RNA, 12 nt, Human
cuggcccuuccu

SEQ ID NO: 2126397 - RNA, 13 nt, Human
cuggcccuggggc

SEQ ID NO: 2126398 - RNA, 14 nt, Human
cuggcccuggggcc

SEQ ID NO: 2126399 - RNA, 15 nt, Human
cuggcccuggggccu

SEQ ID NO: 2126400 - RNA, 16 nt, Human
cuggcccuggggccug

SEQ ID NO: 2126401 - RNA, 17 nt, Human
cuggcccuggggccugu

SEQ ID NO: 2126402 - RNA, 19 nt, Human
cuggcccuggggccuguac

SEQ ID NO: 2126403 - RNA, 17 nt, Human
cuggccgaggguccugg

SEQ ID NO: 2126404 - RNA, 21 nt, Human
cuggccgaggguccuggcucc

SEQ ID NO: 2126405 - RNA, 19 nt, Human
cuggccgaggguccuggcu

SEQ ID NO: 2126406 - RNA, 20 nt, Human
cuggccgaggguccuggcuc

SEQ ID NO: 2126407 - RNA, 11 nt, Human
cuggcccuggg

SEQ ID NO: 2126408 - RNA, 22 nt, Human
cuggcuagaguccucacuccca

SEQ ID NO: 2126409 - RNA, 20 nt, Human
cuggcuagaguccucacucc

SEQ ID NO: 2126410 - RNA, 21 nt, Human
cuggcuagaguccucacuccc

SEQ ID NO: 2126411 - RNA, 16 nt, Human
cuggcuagaguccuca

SEQ ID NO: 2126412 - RNA, 17 nt, Human
cuggcuagaguccucac

SEQ ID NO: 2126413 - RNA, 18 nt, Human
cuggcuagaguccucacu

SEQ ID NO: 2126414 - RNA, 19 nt, Human
cuggcuagaguccucacuc

SEQ ID NO: 2126415 - RNA, 12 nt, Human
cuggcucacaga

SEQ ID NO: 2126416 - RNA, 16 nt, Human
cuggcucacagacugg

SEQ ID NO: 2126417 - RNA, 18 nt, Human
cuggcucacagacuggag

SEQ ID NO: 2126418 - RNA, 19 nt, Human
cuggcucacagacuggaga

SEQ ID NO: 2126419 - RNA, 16 nt, Human
cugggacuacaggcac

SEQ ID NO: 2126420 - RNA, 15 nt, Human
cugggacuacaggca

SEQ ID NO: 2126421 - RNA, 13 nt, Human
cugggacuacagg

SEQ ID NO: 2126422 - RNA, 22 nt, Human
cugggaccacagguucaugcca

SEQ ID NO: 2126423 - RNA, 16 nt, Human
cuggcuccgcugugug

SEQ ID NO: 2126424 - RNA, 17 nt, Human
cuggcuccgcugugugg

SEQ ID NO: 2126425 - RNA, 14 nt, Human
cuggcuccugaggg

SEQ ID NO: 2126426 - RNA, 15 nt, Human
cuggcuccugagggg

SEQ ID NO: 2126427 - RNA, 16 nt, Human
cuggcuccugaggggc

SEQ ID NO: 2126428 - RNA, 17 nt, Human
cuggcuccugaggggca

SEQ ID NO: 2126429 - RNA, 17 nt, Human
cugggcagcauagcaag

SEQ ID NO: 2126430 - RNA, 18 nt, Human
cugggcagcauagcaaga

SEQ ID NO: 2126431 - RNA, 17 nt, Human
cugggcagccaggcugc

SEQ ID NO: 2126432 - RNA, 15 nt, Human
cugggcagccaggcu

SEQ ID NO: 2126433 - RNA, 16 nt, Human
cugggcagccaggcug

SEQ ID NO: 2126434 - RNA, 18 nt, Human
cugggcagccaggcugcc

SEQ ID NO: 2126435 - RNA, 20 nt, Human
cugggcagguuggugggggc

SEQ ID NO: 2126436 - RNA, 21 nt, Human
cugggcagcuguuagagucca

SEQ ID NO: 2126437 - RNA, 12 nt, Human
cugggcauugcu

SEQ ID NO: 2126438 - RNA, 13 nt, Human
cugggcauugcuu

SEQ ID NO: 2126439 - RNA, 12 nt, Human
cugggcccagag

SEQ ID NO: 2126440 - RNA, 14 nt, Human
cugggcccagaggc

SEQ ID NO: 2126441 - RNA, 15 nt, Human
cugggcccagaggca

SEQ ID NO: 2126442 - RNA, 18 nt, Human
cugggcccagaggcacag

SEQ ID NO: 2126443 - RNA, 19 nt, Human
cugggcccagaggcacagc

SEQ ID NO: 2126444 - RNA, 20 nt, Human
cugggcccagaggcacagcc

SEQ ID NO: 2126445 - RNA, 21 nt, Human
cugggcccagaggcacagccg

SEQ ID NO: 2126446 - RNA, 14 nt, Human
cugggcccagaagg

SEQ ID NO: 2126447 - RNA, 23 nt, Human
cugggcccagaagguugugauga

SEQ ID NO: 2126448 - RNA, 13 nt, Human
cuggggagaaagu

SEQ ID NO: 2126449 - RNA, 23 nt, Human
cuggggccucggagccucauccg

SEQ ID NO: 2126450 - RNA, 12 nt, Human
cuggggccucuu

SEQ ID NO: 2126451 - RNA, 18 nt, Human
cuggguggcaccagcagc

SEQ ID NO: 2126452 - RNA, 20 nt, Human
cuggguggcaccagcagccu

SEQ ID NO: 2126453 - RNA, 14 nt, Human
cugggugcucccua

SEQ ID NO: 2126454 - RNA, 15 nt, Human
cugggugcucccuac

SEQ ID NO: 2126455 - RNA, 15 nt, Human
cugggugcagcugag

SEQ ID NO: 2126456 - RNA, 12 nt, Human
cugggugcccac

SEQ ID NO: 2126457 - RNA, 13 nt, Human
cugggugcccaca

SEQ ID NO: 2126458 - RNA, 14 nt, Human
cugggugcccacag

SEQ ID NO: 2126459 - RNA, 15 nt, Human
cugggugcccacagc

SEQ ID NO: 2126460 - RNA, 16 nt, Human
cugggugcccacagcc

SEQ ID NO: 2126461 - RNA, 19 nt, Human
cugggugcccacagcccgc

SEQ ID NO: 2126462 - RNA, 23 nt, Human
cugggugcccacagcccgcaugc

SEQ ID NO: 2126463 - RNA, 23 nt, Human
cugggugacagagcaagacucug

SEQ ID NO: 2126464 - RNA, 14 nt, Human
cugggugagugggg

SEQ ID NO: 2126465 - RNA, 18 nt, Human
cugggugaguggggagac

SEQ ID NO: 2126466 - RNA, 14 nt, Human
cugggugcagcuga

SEQ ID NO: 2126467 - RNA, 22 nt, Human
cugggugacagagcaagacucu

SEQ ID NO: 2126468 - RNA, 13 nt, Human
cugggugacagag

SEQ ID NO: 2126469 - RNA, 14 nt, Human
cuggugcccggaga

SEQ ID NO: 2126470 - RNA, 19 nt, Human
cuggguguauuaggacugg

SEQ ID NO: 2126471 - RNA, 13 nt, Human
cuggugcagggcc

SEQ ID NO: 2126472 - RNA, 14 nt, Human
cuggugcagggccu

SEQ ID NO: 2126473 - RNA, 17 nt, Human
cuggugcagggccucca

SEQ ID NO: 2126474 - RNA, 20 nt, Human
cuggugcagggccuccauuc

SEQ ID NO: 2126475 - RNA, 12 nt, Human
cuggugcagugg

SEQ ID NO: 2126476 - RNA, 14 nt, Human
cuggugcauuacag

SEQ ID NO: 2126477 - RNA, 15 nt, Human
cuggugcauuacaga

SEQ ID NO: 2126478 - RNA, 16 nt, Human
cuggugcauuacagag

SEQ ID NO: 2126479 - RNA, 17 nt, Human
cuggugcauuacagaga

SEQ ID NO: 2126480 - RNA, 18 nt, Human
cuggugcauuacagagag

SEQ ID NO: 2126481 - RNA, 19 nt, Human
cuggugcauuacagagagg

SEQ ID NO: 2126482 - RNA, 16 nt, Human
cugggugguugcccuu

SEQ ID NO: 2126483 - RNA, 18 nt, Human
cugggugguugcccuuca

SEQ ID NO: 2126484 - RNA, 19 nt, Human
cuggguggucugcaggcag

SEQ ID NO: 2126485 - RNA, 21 nt, Human
cuggguggucugcaggcaggg

SEQ ID NO: 2126486 - RNA, 21 nt, Human
cuggguggcaccagcagccug

SEQ ID NO: 2126487 - RNA, 15 nt, Human
cugggugcuggcugc

SEQ ID NO: 2126488 - RNA, 13 nt, Human
cuggguggucugc

SEQ ID NO: 2126489 - RNA, 17 nt, Human
cugccccucccuucaac

SEQ ID NO: 2126490 - RNA, 14 nt, Human
cugccccucccuuc

SEQ ID NO: 2126491 - RNA, 13 nt, Human
cugccccucccuu

SEQ ID NO: 2126492 - RNA, 22 nt, Human
cugccccgugcagacuggaggg

SEQ ID NO: 2126493 - RNA, 18 nt, Human
cugccccgugcagacugg

SEQ ID NO: 2126494 - RNA, 19 nt, Human
cugccccgugcagacugga

SEQ ID NO: 2126495 - RNA, 23 nt, Human
cugccagugccuuaccuccugcc

SEQ ID NO: 2126496 - RNA, 21 nt, Human
cugccagugccuuaccuccug

SEQ ID NO: 2126497 - RNA, 22 nt, Human
cugccagugccuuaccuccugc

SEQ ID NO: 2126498 - RNA, 12 nt, Human
cugccagugccu

SEQ ID NO: 2126499 - RNA, 13 nt, Human
cugccagugccuu

SEQ ID NO: 2126500 - RNA, 14 nt, Human
cugccagugccuua

SEQ ID NO: 2126501 - RNA, 17 nt, Human
cugccagugccuuaccu

SEQ ID NO: 2126502 - RNA, 18 nt, Human
cugccagugccuuaccuc

SEQ ID NO: 2126503 - RNA, 20 nt, Human
cugccagugccuuaccuccu

SEQ ID NO: 2126504 - RNA, 17 nt, Human
cugccagucccccugcc

SEQ ID NO: 2126505 - RNA, 21 nt, Human
cugccagucccccugccccag

SEQ ID NO: 2126506 - RNA, 20 nt, Human
cugccagucccccugcccca

SEQ ID NO: 2126507 - RNA, 22 nt, Human
cugccagucccccugccccagg

SEQ ID NO: 2126508 - RNA, 12 nt, Human
cugccagggagc

SEQ ID NO: 2126509 - RNA, 13 nt, Human
cugccagggagcu

SEQ ID NO: 2126510 - RNA, 17 nt, Human
cugcccccgcucauggg

SEQ ID NO: 2126511 - RNA, 17 nt, Human
cugcccccuccccuuca

SEQ ID NO: 2126512 - RNA, 23 nt, Human
cugcccccuucucccacacugcu

SEQ ID NO: 2126513 - RNA, 15 nt, Human
cugccccgcccagcu

SEQ ID NO: 2126514 - RNA, 16 nt, Human
cugccccgcccagcug

SEQ ID NO: 2126515 - RNA, 17 nt, Human
cugccccgcccagcugc

SEQ ID NO: 2126516 - RNA, 18 nt, Human
cugccccgucaccaucuc

SEQ ID NO: 2126517 - RNA, 19 nt, Human
cugccccgucaccaucuca

SEQ ID NO: 2126518 - RNA, 21 nt, Human
cugccccgucaccaucucagg

SEQ ID NO: 2126519 - RNA, 23 nt, Human
cugccccgucaccaucucaggcc

SEQ ID NO: 2126520 - RNA, 22 nt, Human
cugccccgucucaugaggggcc

SEQ ID NO: 2126521 - RNA, 15 nt, Human
cugccccgugcagac

SEQ ID NO: 2126522 - RNA, 17 nt, Human
cugccccgugcagacug

SEQ ID NO: 2126523 - RNA, 19 nt, Human
cugccauccagguucagcu

SEQ ID NO: 2126524 - RNA, 18 nt, Human
cugccauccagguucagc

SEQ ID NO: 2126525 - RNA, 16 nt, Human
cugccauccagguuca

SEQ ID NO: 2126526 - RNA, 16 nt, Human
cugccauauucuguug

SEQ ID NO: 2126527 - RNA, 17 nt, Human
cugccauccagggaugc

SEQ ID NO: 2126528 - RNA, 16 nt, Human
cugccccaugaagcca

SEQ ID NO: 2126529 - RNA, 14 nt, Human
cugcccccacaccu

SEQ ID NO: 2126530 - RNA, 17 nt, Human
cugcccccacaccuggc

SEQ ID NO: 2126531 - RNA, 19 nt, Human
cugcccccacaccuggccc

SEQ ID NO: 2126532 - RNA, 20 nt, Human
cugcccccacaccuggcccu

SEQ ID NO: 2126533 - RNA, 13 nt, Human
cugcauuggcuuu

SEQ ID NO: 2126534 - RNA, 22 nt, Human
cugcaggccccgcuuguccagc

SEQ ID NO: 2126535 - RNA, 23 nt, Human
cugcaggccccgcuuguccagcg

SEQ ID NO: 2126536 - RNA, 24 nt, Human
cugcaggccaagagcagaggcagc

SEQ ID NO: 2126537 - RNA, 22 nt, Human
cugcaggccaagagcagaggca

SEQ ID NO: 2126538 - RNA, 23 nt, Human
cugcaggccaagagcagaggcag

SEQ ID NO: 2126539 - RNA, 11 nt, Human
cugcaggcccc

SEQ ID NO: 2126540 - RNA, 14 nt, Human
cugcaggccccgcu

SEQ ID NO: 2126541 - RNA, 20 nt, Human
cugcaggccccgcuugucca

SEQ ID NO: 2126542 - RNA, 11 nt, Human
cugcaggcagg

SEQ ID NO: 2126543 - RNA, 12 nt, Human
cugcaggcaggg

SEQ ID NO: 2126544 - RNA, 15 nt, Human
cugcaggccaagagc

SEQ ID NO: 2126545 - RNA, 19 nt, Human
cugcaggccaagagcagag

SEQ ID NO: 2126546 - RNA, 21 nt, Human
cugcaggccaagagcagaggc

SEQ ID NO: 2126547 - RNA, 12 nt, Human
cugcagcuuugu

SEQ ID NO: 2126548 - RNA, 19 nt, Human
cugcaggaugauuguacag

SEQ ID NO: 2126549 - RNA, 20 nt, Human
cugcaggaugauuguacaga

SEQ ID NO: 2126550 - RNA, 16 nt, Human
cugcaggaguuaaaaa

SEQ ID NO: 2126551 - RNA, 23 nt, Human
cugcacuauagccuaggugacag

SEQ ID NO: 2126552 - RNA, 22 nt, Human
cugcacuauagccuaggugaca

SEQ ID NO: 2126553 - RNA, 13 nt, Human
cugcacuccagcc

SEQ ID NO: 2126554 - RNA, 15 nt, Human
cugcacuccagccug

SEQ ID NO: 2126555 - RNA, 15 nt, Human
cugcaccuuaucuua

SEQ ID NO: 2126556 - RNA, 17 nt, Human
cugcacguggcuucuga

SEQ ID NO: 2126557 - RNA, 19 nt, Human
cugcacguggcuucugaug

SEQ ID NO: 2126558 - RNA, 16 nt, Human
cugcacuaauuugaug

SEQ ID NO: 2126559 - RNA, 20 nt, Human
cugcacuauagccuagguga

SEQ ID NO: 2126560 - RNA, 18 nt, Human
cugcacuauagccuaggu

SEQ ID NO: 2126561 - RNA, 17 nt, Human
cugcacuauagccuagg

SEQ ID NO: 2126562 - RNA, 16 nt, Human
cugcacuauagccuag

SEQ ID NO: 2126563 - RNA, 11 nt, Human
cugcagccucc

SEQ ID NO: 2126564 - RNA, 19 nt, Human
cugcagccucgaacuccug

SEQ ID NO: 2126565 - RNA, 20 nt, Human
cugcagccucgaacuccugg

SEQ ID NO: 2126566 - RNA, 21 nt, Human
cugcagccucgaacuccuggg

SEQ ID NO: 2126567 - RNA, 22 nt, Human
cugcagccucgaacuccugggc

SEQ ID NO: 2126568 - RNA, 23 nt, Human
cugcagccucgaacuccugggcu

SEQ ID NO: 2126569 - RNA, 11 nt, Human
cugcagccugg

SEQ ID NO: 2126570 - RNA, 14 nt, Human
cugcagccuggagg

SEQ ID NO: 2126571 - RNA, 15 nt, Human
cugcagccuggaggc

SEQ ID NO: 2126572 - RNA, 13 nt, Human
cugcagcugggcu

SEQ ID NO: 2126573 - RNA, 14 nt, Human
cugcagcugggcug

SEQ ID NO: 2126574 - RNA, 20 nt, Human
cugcagccuggaggccgggu

SEQ ID NO: 2126575 - RNA, 18 nt, Human
cugcagccuuugccuccc

SEQ ID NO: 2126576 - RNA, 20 nt, Human
cugcagccuuugccuccccg

SEQ ID NO: 2126577 - RNA, 20 nt, Human
cugcagcggccacacuguac

SEQ ID NO: 2126578 - RNA, 23 nt, Human
cugcagccucaaccuccugggcu

SEQ ID NO: 2126579 - RNA, 19 nt, Human
cugcacuccagccugggug

SEQ ID NO: 2126580 - RNA, 24 nt, Human
cugcagccucaaccuccugggcua

SEQ ID NO: 2126581 - RNA, 20 nt, Human
cugcacuccaaucuggguga

SEQ ID NO: 2126582 - RNA, 20 nt, Human
cugcacuccagccugggcga

SEQ ID NO: 2126583 - RNA, 18 nt, Human
cugcacuccagccugggu

SEQ ID NO: 2126584 - RNA, 14 nt, Human
cugcacuccagccu

SEQ ID NO: 2126585 - RNA, 18 nt, Human
cugcacuccagccugggc

SEQ ID NO: 2126586 - RNA, 19 nt, Human
cugcacuccagccugggcg

SEQ ID NO: 2126587 - RNA, 16 nt, Human
cugcacuccagccugg

SEQ ID NO: 2126588 - RNA, 17 nt, Human
cugcacuccagccuggg

SEQ ID NO: 2126589 - RNA, 15 nt, Human
cugcaacuucugccu

SEQ ID NO: 2126590 - RNA, 18 nt, Human
cugcaacuuguaaaugug

SEQ ID NO: 2126591 - RNA, 14 nt, Human
cugcaacuucugcc

SEQ ID NO: 2126592 - RNA, 19 nt, Human
cugcaacuuguaaaugugg

SEQ ID NO: 2126593 - RNA, 18 nt, Human
cugcaagaauugaagcag

SEQ ID NO: 2126594 - RNA, 15 nt, Human
cugcaaccuguugau

SEQ ID NO: 2126595 - RNA, 22 nt, Human
cugcaaccuccgccucuugggu

SEQ ID NO: 2126596 - RNA, 20 nt, Human
cugcaacaggaacugugaga

SEQ ID NO: 2126597 - RNA, 20 nt, Human
cugcaaccuccgccucuugg

SEQ ID NO: 2126598 - RNA, 17 nt, Human
cugcaaauagaaaacag

SEQ ID NO: 2126599 - RNA, 19 nt, Human
cugcaaauagaaaacagga

SEQ ID NO: 2126600 - RNA, 20 nt, Human
cugcaaauagaaaacaggaa

SEQ ID NO: 2126601 - RNA, 23 nt, Human
cugcaccgggccacagagaaagu

SEQ ID NO: 2126602 - RNA, 16 nt, Human
cugcaagucacaaagg

SEQ ID NO: 2126603 - RNA, 17 nt, Human
cugcaagucacaaagga

SEQ ID NO: 2126604 - RNA, 18 nt, Human
cugcaagucacaaaggaa

SEQ ID NO: 2126605 - RNA, 11 nt, Human
cugcaccuccc

SEQ ID NO: 2126606 - RNA, 14 nt, Human
cugcaccucccccc

SEQ ID NO: 2126607 - RNA, 17 nt, Human
cugcaccuccccccacu

SEQ ID NO: 2126608 - RNA, 18 nt, Human
cugcaccuccccccacug

SEQ ID NO: 2126609 - RNA, 19 nt, Human
cugcaccuccccccacugc

SEQ ID NO: 2126610 - RNA, 20 nt, Human
cugcaccuccccccacugca

SEQ ID NO: 2126611 - RNA, 21 nt, Human
cugcaccuccccccacugcag

SEQ ID NO: 2126612 - RNA, 22 nt, Human
cugcaccuccccccacugcagg

SEQ ID NO: 2126613 - RNA, 13 nt, Human
cugcaccugccag

SEQ ID NO: 2126614 - RNA, 16 nt, Human
cugcaccugccagccu

SEQ ID NO: 2126615 - RNA, 17 nt, Human
cugcaccugccagccug

SEQ ID NO: 2126616 - RNA, 18 nt, Human
cugcaccugccagccugg

SEQ ID NO: 2126617 - RNA, 19 nt, Human
cugcaccugccagccuggc

SEQ ID NO: 2126618 - RNA, 20 nt, Human
cugcaccugccagccuggcu

SEQ ID NO: 2126619 - RNA, 20 nt, Human
cugcaagaauugaagcagga

SEQ ID NO: 2126620 - RNA, 13 nt, Human
cugcaagagccuu

SEQ ID NO: 2126621 - RNA, 14 nt, Human
cugcaagagccuug

SEQ ID NO: 2126622 - RNA, 15 nt, Human
cugcaagagccuugg

SEQ ID NO: 2126623 - RNA, 17 nt, Human
cugcaagagccuuggug

SEQ ID NO: 2126624 - RNA, 18 nt, Human
cugcaagagccuuggugu

SEQ ID NO: 2126625 - RNA, 19 nt, Human
cugcaagagccuugguguc

SEQ ID NO: 2126626 - RNA, 23 nt, Human
cugcaagagccuugguguccacc

SEQ ID NO: 2126627 - RNA, 21 nt, Human
cugcaagagccuuggugucca

SEQ ID NO: 2126628 - RNA, 20 nt, Human
cugcaagcacaucugcauuu

SEQ ID NO: 2126629 - RNA, 22 nt, Human
cugcaaaggguaucaggugcug

SEQ ID NO: 2126630 - RNA, 13 nt, Human
cugcaaaggacug

SEQ ID NO: 2126631 - RNA, 22 nt, Human
cugcaaaggacuguuuuuuccu

SEQ ID NO: 2126632 - RNA, 23 nt, Human
cugcaaagguaauaauacagcca

SEQ ID NO: 2126633 - RNA, 21 nt, Human
cugcaaaggguaucaggugcu

SEQ ID NO: 2126634 - RNA, 23 nt, Human
cugaugggcaacccccagccugc

SEQ ID NO: 2126635 - RNA, 22 nt, Human
cugaugggcaacccccagccug

SEQ ID NO: 2126636 - RNA, 24 nt, Human
cugaugggcaacccccagccugcu

SEQ ID NO: 2126637 - RNA, 19 nt, Human
cugaugaccuaaccuaagc

SEQ ID NO: 2126638 - RNA, 21 nt, Human
cugaugggcaacccccagccu

SEQ ID NO: 2126639 - RNA, 18 nt, Human
cugaugggcaacccccag

SEQ ID NO: 2126640 - RNA, 14 nt, Human
cugauggaaacaaa

SEQ ID NO: 2126641 - RNA, 18 nt, Human
cugauggaaacaaagugg

SEQ ID NO: 2126642 - RNA, 20 nt, Human
cugauggaaacaaaguggaa

SEQ ID NO: 2126643 - RNA, 17 nt, Human
cucuuaugcacaccucc

SEQ ID NO: 2126644 - RNA, 13 nt, Human
cucuuaugccauu

SEQ ID NO: 2126645 - RNA, 18 nt, Human
cucuuaugccauuuguuu

SEQ ID NO: 2126646 - RNA, 22 nt, Human
cucuuauagaauauuuauuacc

SEQ ID NO: 2126647 - RNA, 17 nt, Human
cucuuauguaccucuuu

SEQ ID NO: 2126648 - RNA, 19 nt, Human
cucuuauguaccucuuuua

SEQ ID NO: 2126649 - RNA, 20 nt, Human
cucuuauguaccucuuuuag

SEQ ID NO: 2126650 - RNA, 14 nt, Human
cugaugacacugag

SEQ ID NO: 2126651 - RNA, 15 nt, Human
cugaugacacugaga

SEQ ID NO: 2126652 - RNA, 16 nt, Human
cucuuauucaguaaaa

SEQ ID NO: 2126653 - RNA, 12 nt, Human
cugaugacccag

SEQ ID NO: 2126654 - RNA, 13 nt, Human
cugaugacccagg

SEQ ID NO: 2126655 - RNA, 14 nt, Human
cugaugacccaggc

SEQ ID NO: 2126656 - RNA, 15 nt, Human
cugaugacccaggcu

SEQ ID NO: 2126657 - RNA, 19 nt, Human
cugaugacccaggcugccu

SEQ ID NO: 2126658 - RNA, 23 nt, Human
cugaugacccaggcugccugagc

SEQ ID NO: 2126659 - RNA, 17 nt, Human
cugaugagaauacugag

SEQ ID NO: 2126660 - RNA, 16 nt, Human
cugaugagaauuuaua

SEQ ID NO: 2126661 - RNA, 23 nt, Human
cugaugagaauuuauaaauuauu

SEQ ID NO: 2126662 - RNA, 23 nt, Human
cugaugcucccuccccugcccug

SEQ ID NO: 2126663 - RNA, 24 nt, Human
cugaugcucccuccccugcccugg

SEQ ID NO: 2126664 - RNA, 21 nt, Human
cugaugauuuagagugcuguc

SEQ ID NO: 2126665 - RNA, 12 nt, Human
cugaugcucccu

SEQ ID NO: 2126666 - RNA, 14 nt, Human
cugaugcucccucc

SEQ ID NO: 2126667 - RNA, 15 nt, Human
cugaugcucccuccc

SEQ ID NO: 2126668 - RNA, 17 nt, Human
cugaugcucccuccccu

SEQ ID NO: 2126669 - RNA, 18 nt, Human
cugaugcucccuccccug

SEQ ID NO: 2126670 - RNA, 19 nt, Human
cugaugcucccuccccugc

SEQ ID NO: 2126671 - RNA, 21 nt, Human
cugaugcucccuccccugccc

SEQ ID NO: 2126672 - RNA, 22 nt, Human
cugaugcucccuccccugcccu

SEQ ID NO: 2126673 - RNA, 22 nt, Human
aaauuuccacucaggucuguuu

SEQ ID NO: 2126674 - RNA, 16 nt, Human
aaauuuccaguaccuu

SEQ ID NO: 2126675 - RNA, 22 nt, Human
aaauuuccaguaccuuugucac

SEQ ID NO: 2126676 - RNA, 23 nt, Human
aaauuuccaguaccuuugucaca

SEQ ID NO: 2126677 - RNA, 19 nt, Human
aaauuuccagugagcuuau

SEQ ID NO: 2126678 - RNA, 14 nt, Human
aaauuuccacucag

SEQ ID NO: 2126679 - RNA, 13 nt, Human
aaauuuauaugua

SEQ ID NO: 2126680 - RNA, 20 nt, Human
aaauuuauauguauccagua

SEQ ID NO: 2126681 - RNA, 14 nt, Human
aaauuuauaauuuu

SEQ ID NO: 2126682 - RNA, 19 nt, Human
aaauuuauaauuuuaagau

SEQ ID NO: 2126683 - RNA, 21 nt, Human
aaauuuauaauuuuaagauuc

SEQ ID NO: 2126684 - RNA, 17 nt, Human
aaauuuaauucauguuu

SEQ ID NO: 2126685 - RNA, 18 nt, Human
aaauuuaauucauguuuc

SEQ ID NO: 2126686 - RNA, 12 nt, Human
aaauucccugga

SEQ ID NO: 2126687 - RNA, 20 nt, Human
aaauucccuggaccagaugc

SEQ ID NO: 2126688 - RNA, 20 nt, Human
gucacacaguauuacuucug

SEQ ID NO: 2126689 - RNA, 16 nt, Human
gucacacacuuuggcu

SEQ ID NO: 2126690 - RNA, 11 nt, Human
gucacaauaaa

SEQ ID NO: 2126691 - RNA, 12 nt, Human
gucacaauaaau

SEQ ID NO: 2126692 - RNA, 17 nt, Human
gucacaagagcccagca

SEQ ID NO: 2126693 - RNA, 12 nt, Human
gucaacagugaa

SEQ ID NO: 2126694 - RNA, 15 nt, Human
aaauuaucaagcuaa

SEQ ID NO: 2126695 - RNA, 16 nt, Human
aaauuaucaagcuaau

SEQ ID NO: 2126696 - RNA, 17 nt, Human
aaauuaucaagcuaaua

SEQ ID NO: 2126697 - RNA, 18 nt, Human
aaauuaucaagcuaauaa

SEQ ID NO: 2126698 - RNA, 19 nt, Human
aaauuaucaagcuaauaaa

SEQ ID NO: 2126699 - RNA, 20 nt, Human
aaauuaucaagcuaauaaaa

SEQ ID NO: 2126700 - RNA, 15 nt, Human
aaauuauuuuaaauu

SEQ ID NO: 2126701 - RNA, 16 nt, Human
aaauuauuuuaaauua

SEQ ID NO: 2126702 - RNA, 20 nt, Human
aaauuauuuuaaauuauaag

SEQ ID NO: 2126703 - RNA, 22 nt, Human
aaauuauuuuaaauuauaagga

SEQ ID NO: 2126704 - RNA, 20 nt, Human
aaauucagauauauuuuuca

SEQ ID NO: 2126705 - RNA, 12 nt, Human
guauuggcaaag

SEQ ID NO: 2126706 - RNA, 13 nt, Human
guauuggcaaaga

SEQ ID NO: 2126707 - RNA, 20 nt, Human
guauugggguuauuuucugg

SEQ ID NO: 2126708 - RNA, 16 nt, Human
guauuuaauuguaaac

SEQ ID NO: 2126709 - RNA, 17 nt, Human
guauuuaauuguaaacu

SEQ ID NO: 2126710 - RNA, 18 nt, Human
guauuuaauuguaaacug

SEQ ID NO: 2126711 - RNA, 19 nt, Human
guauuuaauuguaaacugu

SEQ ID NO: 2126712 - RNA, 20 nt, Human
guauuuaauuguaaacugua

SEQ ID NO: 2126713 - RNA, 21 nt, Human
guauuuaauuguaaacuguac

SEQ ID NO: 2126714 - RNA, 22 nt, Human
guauuuaauuguaaacuguacu

SEQ ID NO: 2126715 - RNA, 12 nt, Human
aaauguuacaua

SEQ ID NO: 2126716 - RNA, 17 nt, Human
aaauguuacauagugua

SEQ ID NO: 2126717 - RNA, 18 nt, Human
aaauguuacauaguguag

SEQ ID NO: 2126718 - RNA, 21 nt, Human
aaauguuacauaguguaggcu

SEQ ID NO: 2126719 - RNA, 16 nt, Human
aaauuaccaguaaagu

SEQ ID NO: 2126720 - RNA, 18 nt, Human
aaauuaccaguaaagugu

SEQ ID NO: 2126721 - RNA, 20 nt, Human
aaauuaccaguaaaguguaa

SEQ ID NO: 2126722 - RNA, 15 nt, Human
aaauuacuacaaaau

SEQ ID NO: 2126723 - RNA, 20 nt, Human
aaauguuaaguugaugguga

SEQ ID NO: 2126724 - RNA, 13 nt, Human
guaguucccugaa

SEQ ID NO: 2126725 - RNA, 17 nt, Human
guaguucccugaaaacc

SEQ ID NO: 2126726 - RNA, 20 nt, Human
guaguucccugaaaacccag

SEQ ID NO: 2126727 - RNA, 23 nt, Human
guaguucccugaaaacccagaga

SEQ ID NO: 2126728 - RNA, 16 nt, Human
aaauguaccugaugua

SEQ ID NO: 2126729 - RNA, 16 nt, Human
guaguuaguagcaugu

SEQ ID NO: 2126730 - RNA, 16 nt, Human
aaauguagguaugaau

SEQ ID NO: 2126731 - RNA, 12 nt, Human
aaauguacaaaa

SEQ ID NO: 2126732 - RNA, 19 nt, Human
aaauguacaaaauaaaguu

SEQ ID NO: 2126733 - RNA, 21 nt, Human
aaauguacaaaauaaaguuac

SEQ ID NO: 2126734 - RNA, 12 nt, Human
aaauguaauuga

SEQ ID NO: 2126735 - RNA, 20 nt, Human
guauaacacaauaugaauac

SEQ ID NO: 2126736 - RNA, 15 nt, Human
guauauucauauauu

SEQ ID NO: 2126737 - RNA, 14 nt, Human
guauauucauuuca

SEQ ID NO: 2126738 - RNA, 16 nt, Human
guauauucauuucaaa

SEQ ID NO: 2126739 - RNA, 23 nt, Human
guauaaaugaaguuuauacagua

SEQ ID NO: 2126740 - RNA, 16 nt, Human
guauaaagcucagaag

SEQ ID NO: 2126741 - RNA, 12 nt, Human
guauaaagaaca

SEQ ID NO: 2126742 - RNA, 14 nt, Human
guauaaagaaaagu

SEQ ID NO: 2126743 - RNA, 16 nt, Human
guauaaacugauggau

SEQ ID NO: 2126744 - RNA, 13 nt, Human
guauaaagaaaag

SEQ ID NO: 2126745 - RNA, 19 nt, Human
guauaaaaugguguuuuca

SEQ ID NO: 2126746 - RNA, 19 nt, Human
guauucugccuuugcagaa

SEQ ID NO: 2126747 - RNA, 21 nt, Human
guauucugccuuugcagaaac

SEQ ID NO: 2126748 - RNA, 23 nt, Human
guauucugccuuugcagaaacag

SEQ ID NO: 2126749 - RNA, 11 nt, Human
guauucuguac

SEQ ID NO: 2126750 - RNA, 12 nt, Human
guauguggaagg

SEQ ID NO: 2126751 - RNA, 15 nt, Human
guauucuuauuuaau

SEQ ID NO: 2126752 - RNA, 13 nt, Human
guaugguggcugg

SEQ ID NO: 2126753 - RNA, 17 nt, Human
guauggguuucucccag

SEQ ID NO: 2126754 - RNA, 15 nt, Human
guauggguguguguu

SEQ ID NO: 2126755 - RNA, 11 nt, Human
guaugugccau

SEQ ID NO: 2126756 - RNA, 14 nt, Human
guaugugccauuua

SEQ ID NO: 2126757 - RNA, 22 nt, Human
guaugaucacggcucacugcag

SEQ ID NO: 2126758 - RNA, 22 nt, Human
guauccucauuugggguagcua

SEQ ID NO: 2126759 - RNA, 17 nt, Human
guaucaacccagaaaca

SEQ ID NO: 2126760 - RNA, 18 nt, Human
guaucaacccagaaacac

SEQ ID NO: 2126761 - RNA, 17 nt, Human
guaucaggacgagaaug

SEQ ID NO: 2126762 - RNA, 21 nt, Human
guaucaggaaauauauaugug

SEQ ID NO: 2126763 - RNA, 19 nt, Human
guaucaaguggcaugugcu

SEQ ID NO: 2126764 - RNA, 18 nt, Human
guauggaauacaguguua

SEQ ID NO: 2126765 - RNA, 17 nt, Human
guauggaauacaguguu

SEQ ID NO: 2126766 - RNA, 15 nt, Human
guaggacuguagaaa

SEQ ID NO: 2126767 - RNA, 18 nt, Human
guaggaagguuaauguuc

SEQ ID NO: 2126768 - RNA, 11 nt, Human
guagcuucuga

SEQ ID NO: 2126769 - RNA, 19 nt, Human
guagcuucugaccucagca

SEQ ID NO: 2126770 - RNA, 18 nt, Human
guaggaacgguaaauuuc

SEQ ID NO: 2126771 - RNA, 21 nt, Human
guaggaacgguaaauuucugu

SEQ ID NO: 2126772 - RNA, 17 nt, Human
guaggcaugagggauca

SEQ ID NO: 2126773 - RNA, 20 nt, Human
guaggcaugagggaucacag

SEQ ID NO: 2126774 - RNA, 22 nt, Human
guaggcaugagggaucacaggg

SEQ ID NO: 2126775 - RNA, 23 nt, Human
guaggcaugagggaucacagggc

SEQ ID NO: 2126776 - RNA, 17 nt, Human
guagcuggauuacaggc

SEQ ID NO: 2126777 - RNA, 16 nt, Human
guagcugccccuggcu

SEQ ID NO: 2126778 - RNA, 12 nt, Human
guagcugccccu

SEQ ID NO: 2126779 - RNA, 15 nt, Human
guagcugccccuggc

SEQ ID NO: 2126780 - RNA, 12 nt, Human
guagcugggacu

SEQ ID NO: 2126781 - RNA, 19 nt, Human
guagcugggacuacaggca

SEQ ID NO: 2126782 - RNA, 18 nt, Human
guagcugggacuacaggc

SEQ ID NO: 2126783 - RNA, 18 nt, Human
guagcuguggugaggugg

SEQ ID NO: 2126784 - RNA, 21 nt, Human
guagcugggacuacaggcacc

SEQ ID NO: 2126785 - RNA, 20 nt, Human
aaaggacuguuuuuuccuga

SEQ ID NO: 2126786 - RNA, 22 nt, Human
aaaggacuguuuuuuccugagc

SEQ ID NO: 2126787 - RNA, 19 nt, Human
aaaggagagaagagagaaa

SEQ ID NO: 2126788 - RNA, 21 nt, Human
aaaggagcuuaccucccaccu

SEQ ID NO: 2126789 - RNA, 13 nt, Human
aaaggaggcuggc

SEQ ID NO: 2126790 - RNA, 14 nt, Human
aaaggaggcuggca

SEQ ID NO: 2126791 - RNA, 19 nt, Human
aaaggauaaacuuuuagaa

SEQ ID NO: 2126792 - RNA, 20 nt, Human
aaaggauaaacuuuuagaaa

SEQ ID NO: 2126793 - RNA, 15 nt, Human
aaaggauauuuucuu

SEQ ID NO: 2126794 - RNA, 13 nt, Human
aaaggauauuuaa

SEQ ID NO: 2126795 - RNA, 16 nt, Human
aaaggauauuuaagaa

SEQ ID NO: 2126796 - RNA, 19 nt, Human
aaaggauauuuaagaaaau

SEQ ID NO: 2126797 - RNA, 21 nt, Human
aaaggauauuuaagaaaauac

SEQ ID NO: 2126798 - RNA, 23 nt, Human
aaaggauauuuaagaaaauacaa

SEQ ID NO: 2126799 - RNA, 12 nt, Human
aaaggauauuuu

SEQ ID NO: 2126800 - RNA, 13 nt, Human
aaaucgaugcagu

SEQ ID NO: 2126801 - RNA, 17 nt, Human
aaauccuuuuucuuuau

SEQ ID NO: 2126802 - RNA, 18 nt, Human
aaauccuuuuucuuuaua

SEQ ID NO: 2126803 - RNA, 19 nt, Human
aaauccuuuuucuuuauaa

SEQ ID NO: 2126804 - RNA, 16 nt, Human
aaauccuuccaugaaa

SEQ ID NO: 2126805 - RNA, 13 nt, Human
aaauccuucuaau

SEQ ID NO: 2126806 - RNA, 14 nt, Human
aaauccuucuaauc

SEQ ID NO: 2126807 - RNA, 15 nt, Human
aaauccuucuaaucu

SEQ ID NO: 2126808 - RNA, 18 nt, Human
aaauccuucuaaucugcu

SEQ ID NO: 2126809 - RNA, 17 nt, Human
aaauccuaccaaccucu

SEQ ID NO: 2126810 - RNA, 19 nt, Human
aaauccuaccaaccucuga

SEQ ID NO: 2126811 - RNA, 15 nt, Human
aaauccuacugaaug

SEQ ID NO: 2126812 - RNA, 21 nt, Human
aaaucccauucauaacuuuca

SEQ ID NO: 2126813 - RNA, 11 nt, Human
aaauccucugg

SEQ ID NO: 2126814 - RNA, 12 nt, Human
aaauccucuggc

SEQ ID NO: 2126815 - RNA, 12 nt, Human
aaauccuguuga

SEQ ID NO: 2126816 - RNA, 17 nt, Human
aaauccuguugaaaagc

SEQ ID NO: 2126817 - RNA, 20 nt, Human
aaauccuguugaaaagccau

SEQ ID NO: 2126818 - RNA, 21 nt, Human
aaauccuguugaaaagccaug

SEQ ID NO: 2126819 - RNA, 15 nt, Human
aaaucccauuuaaaa

SEQ ID NO: 2126820 - RNA, 18 nt, Human
aaaucccuuaccucggug

SEQ ID NO: 2126821 - RNA, 11 nt, Human
aaaugaaaauu

SEQ ID NO: 2126822 - RNA, 12 nt, Human
aaaugaaagaaa

SEQ ID NO: 2126823 - RNA, 18 nt, Human
aaaugaaaacauguaaua

SEQ ID NO: 2126824 - RNA, 17 nt, Human
aaaugaaaaucgugaca

SEQ ID NO: 2126825 - RNA, 23 nt, Human
aaaucggaucuggggcucuggga

SEQ ID NO: 2126826 - RNA, 14 nt, Human
aaaucuaagggaaa

SEQ ID NO: 2126827 - RNA, 22 nt, Human
aaaucggaucuggggcucuggg

SEQ ID NO: 2126828 - RNA, 14 nt, Human
aaaugaaagugaga

SEQ ID NO: 2126829 - RNA, 18 nt, Human
aaaugaaagcaugucuca

SEQ ID NO: 2126830 - RNA, 15 nt, Human
aaaugaaagcaugug

SEQ ID NO: 2126831 - RNA, 20 nt, Human
aaaugaaaguauaacugagu

SEQ ID NO: 2126832 - RNA, 12 nt, Human
aaaugaaauguu

SEQ ID NO: 2126833 - RNA, 14 nt, Human
aaaugaaauguuuu

SEQ ID NO: 2126834 - RNA, 21 nt, Human
aaaugaaauguuuuaaggcuu

SEQ ID NO: 2126835 - RNA, 22 nt, Human
aaaugaaauuacuacaaaauuu

SEQ ID NO: 2126836 - RNA, 23 nt, Human
aaaugaagauuauuuuuuaugag

SEQ ID NO: 2126837 - RNA, 21 nt, Human
aaaugaaguaacuugucuuaa

SEQ ID NO: 2126838 - RNA, 11 nt, Human
aaaugaagugc

SEQ ID NO: 2126839 - RNA, 13 nt, Human
aaaugaaauuuua

SEQ ID NO: 2126840 - RNA, 14 nt, Human
aaaugaaauuuuac

SEQ ID NO: 2126841 - RNA, 15 nt, Human
aaaugaaauuuuacc

SEQ ID NO: 2126842 - RNA, 16 nt, Human
aaaugaaauuuuacca

SEQ ID NO: 2126843 - RNA, 17 nt, Human
aaaugaaauuuuaccaa

SEQ ID NO: 2126844 - RNA, 18 nt, Human
aaaugaaauuuuaccaag

SEQ ID NO: 2126845 - RNA, 20 nt, Human
aaaugaaauuuuaccaaguu

SEQ ID NO: 2126846 - RNA, 17 nt, Human
aaaugacuaaaaauauu

SEQ ID NO: 2126847 - RNA, 20 nt, Human
aaaugacuaaaaauauuaua

SEQ ID NO: 2126848 - RNA, 15 nt, Human
aaaugaccaauauua

SEQ ID NO: 2126849 - RNA, 14 nt, Human
aaaugacagauguu

SEQ ID NO: 2126850 - RNA, 19 nt, Human
aaaugacuaaaaaacaaag

SEQ ID NO: 2126851 - RNA, 22 nt, Human
aaaugacuaaaaaacaaagaag

SEQ ID NO: 2126852 - RNA, 20 nt, Human
aaaugaagugcaaauuugau

SEQ ID NO: 2126853 - RNA, 17 nt, Human
aaaugaaguuuauacag

SEQ ID NO: 2126854 - RNA, 15 nt, Human
aaaugaauaauuucc

SEQ ID NO: 2126855 - RNA, 17 nt, Human
aaaugaauaauuuccca

SEQ ID NO: 2126856 - RNA, 18 nt, Human
aaaugaauaauuucccaa

SEQ ID NO: 2126857 - RNA, 15 nt, Human
aaaugacaaugauga

SEQ ID NO: 2126858 - RNA, 23 nt, Human
aaaugauccccagcuguuuaugc

SEQ ID NO: 2126859 - RNA, 18 nt, Human
aaaugaguguguuuguca

SEQ ID NO: 2126860 - RNA, 11 nt, Human
aaaugauauua

SEQ ID NO: 2126861 - RNA, 18 nt, Human
aaaugauauuaaaaauug

SEQ ID NO: 2126862 - RNA, 19 nt, Human
aaaugauauuaaaaauugg

SEQ ID NO: 2126863 - RNA, 20 nt, Human
aaaugauauuaaaaauuggc

SEQ ID NO: 2126864 - RNA, 21 nt, Human
aaaugaguuaccuacauuuua

SEQ ID NO: 2126865 - RNA, 22 nt, Human
aaaugaguuuuuauggggcuga

SEQ ID NO: 2126866 - RNA, 12 nt, Human
aaaugagugugu

SEQ ID NO: 2126867 - RNA, 19 nt, Human
aaaugaggucagagccugc

SEQ ID NO: 2126868 - RNA, 17 nt, Human
aaaugaggucagagccu

SEQ ID NO: 2126869 - RNA, 16 nt, Human
aaaugagguacucucc

SEQ ID NO: 2126870 - RNA, 23 nt, Human
aaaugagguacucuccuggaaau

SEQ ID NO: 2126871 - RNA, 14 nt, Human
aaaugagaacaugu

SEQ ID NO: 2126872 - RNA, 15 nt, Human
aaaugagaacauguu

SEQ ID NO: 2126873 - RNA, 18 nt, Human
aaaugagaacauguuggu

SEQ ID NO: 2126874 - RNA, 22 nt, Human
aaaugagaacauguugguauuu

SEQ ID NO: 2126875 - RNA, 23 nt, Human
aaaugagaacauguugguauuua

SEQ ID NO: 2126876 - RNA, 13 nt, Human
aaaugagaaggaa

SEQ ID NO: 2126877 - RNA, 20 nt, Human
aaaugagacccucguggccu

SEQ ID NO: 2126878 - RNA, 13 nt, Human
aaaugagccuggc

SEQ ID NO: 2126879 - RNA, 19 nt, Human
aaaugagccuggcaagaau

SEQ ID NO: 2126880 - RNA, 23 nt, Human
aaaugagcucgcauuugucaaug

SEQ ID NO: 2126881 - RNA, 13 nt, Human
aaaugaggaaacu

SEQ ID NO: 2126882 - RNA, 13 nt, Human
aaaugcauggagg

SEQ ID NO: 2126883 - RNA, 14 nt, Human
aaaugccaaucucu

SEQ ID NO: 2126884 - RNA, 13 nt, Human
aaaugcccagcuu

SEQ ID NO: 2126885 - RNA, 22 nt, Human
aaaugggaaaugccuaagaaga

SEQ ID NO: 2126886 - RNA, 15 nt, Human
aaaugccuaagaaga

SEQ ID NO: 2126887 - RNA, 16 nt, Human
aaaugccuaagaagau

SEQ ID NO: 2126888 - RNA, 13 nt, Human
aaaugcaauaugu

SEQ ID NO: 2126889 - RNA, 14 nt, Human
aaaugcaagauuuu

SEQ ID NO: 2126890 - RNA, 15 nt, Human
aaaugcaauauguau

SEQ ID NO: 2126891 - RNA, 16 nt, Human
aaaugcaauauguauu

SEQ ID NO: 2126892 - RNA, 21 nt, Human
aaaugcaaacacacaaaggua

SEQ ID NO: 2126893 - RNA, 16 nt, Human
aaaugcaacaacaugu

SEQ ID NO: 2126894 - RNA, 17 nt, Human
aaaugcaaacacacaaa

SEQ ID NO: 2126895 - RNA, 22 nt, Human
aaaugaugauguggaagaacuu

SEQ ID NO: 2126896 - RNA, 16 nt, Human
aaaugaucuuuucaag

SEQ ID NO: 2126897 - RNA, 19 nt, Human
aaaugaugauguggaagaa

SEQ ID NO: 2126898 - RNA, 12 nt, Human
aaaugcagugaa

SEQ ID NO: 2126899 - RNA, 21 nt, Human
aaaugcagcgaaccaauauuu

SEQ ID NO: 2126900 - RNA, 23 nt, Human
aaaugcagcgaaccaauauuugu

SEQ ID NO: 2126901 - RNA, 12 nt, Human
aaaugcacaaug

SEQ ID NO: 2126902 - RNA, 15 nt, Human
aaaugcacaaugucu

SEQ ID NO: 2126903 - RNA, 16 nt, Human
aaaugcacaaugucuu

SEQ ID NO: 2126904 - RNA, 17 nt, Human
aaaugcacaaugucuug

SEQ ID NO: 2126905 - RNA, 18 nt, Human
aaaugcacaaugucuugg

SEQ ID NO: 2126906 - RNA, 23 nt, Human
aaaugcauccauuccucagggac

SEQ ID NO: 2126907 - RNA, 19 nt, Human
aaaugcauauccugagcca

SEQ ID NO: 2126908 - RNA, 20 nt, Human
aaaugcauauccugagccau

SEQ ID NO: 2126909 - RNA, 17 nt, Human
aaaugcaucaauccugu

SEQ ID NO: 2126910 - RNA, 18 nt, Human
aaaugcaucaauccugug

SEQ ID NO: 2126911 - RNA, 21 nt, Human
aaaugcaucaauccugugugg

SEQ ID NO: 2126912 - RNA, 16 nt, Human
aaaugcauccauuccu

SEQ ID NO: 2126913 - RNA, 20 nt, Human
aaaugcauccauuccucagg

SEQ ID NO: 2126914 - RNA, 22 nt, Human
aaaugcauccauuccucaggga

SEQ ID NO: 2126915 - RNA, 17 nt, Human
aacauugcaauagaaau

SEQ ID NO: 2126916 - RNA, 18 nt, Human
aacauugauugcuguguc

SEQ ID NO: 2126917 - RNA, 22 nt, Human
aacauuucuaacucugauguaa

SEQ ID NO: 2126918 - RNA, 14 nt, Human
aacauugcaauaga

SEQ ID NO: 2126919 - RNA, 17 nt, Human
aacauugaccaagaacu

SEQ ID NO: 2126920 - RNA, 18 nt, Human
aacauugaccaagaacug

SEQ ID NO: 2126921 - RNA, 19 nt, Human
aacauugaccaagaacugc

SEQ ID NO: 2126922 - RNA, 20 nt, Human
aacauugaccaagaacugca

SEQ ID NO: 2126923 - RNA, 21 nt, Human
aacauugaccaagaacugcau

SEQ ID NO: 2126924 - RNA, 22 nt, Human
aacauugaccaagaacugcaug

SEQ ID NO: 2126925 - RNA, 23 nt, Human
aacauugaccaagaacugcaugg

SEQ ID NO: 2126926 - RNA, 15 nt, Human
aacauugcaauagaa

SEQ ID NO: 2126927 - RNA, 16 nt, Human
aacauugcaauagaaa

SEQ ID NO: 2126928 - RNA, 16 nt, Human
aacauugaaguaauga

SEQ ID NO: 2126929 - RNA, 18 nt, Human
aacauugaaguaaugaau

SEQ ID NO: 2126930 - RNA, 19 nt, Human
aacauugaaguaaugaauu

SEQ ID NO: 2126931 - RNA, 17 nt, Human
aacauaauucuuguaua

SEQ ID NO: 2126932 - RNA, 19 nt, Human
aacaguuuuccaugaaaac

SEQ ID NO: 2126933 - RNA, 18 nt, Human
aacauaauucuuguauau

SEQ ID NO: 2126934 - RNA, 15 nt, Human
aacaguuuuccauga

SEQ ID NO: 2126935 - RNA, 16 nt, Human
aacaguuuuccaugaa

SEQ ID NO: 2126936 - RNA, 17 nt, Human
aacaguuuuccaugaaa

SEQ ID NO: 2126937 - RNA, 18 nt, Human
aacaguuuuccaugaaaa

SEQ ID NO: 2126938 - RNA, 13 nt, Human
guccuucaaaggc

SEQ ID NO: 2126939 - RNA, 19 nt, Human
guccugccuggccaggcag

SEQ ID NO: 2126940 - RNA, 20 nt, Human
guccugccuggccaggcaga

SEQ ID NO: 2126941 - RNA, 14 nt, Human
guccugccaccugg

SEQ ID NO: 2126942 - RNA, 16 nt, Human
guccugccaccugggg

SEQ ID NO: 2126943 - RNA, 17 nt, Human
guccugccaccuggggc

SEQ ID NO: 2126944 - RNA, 18 nt, Human
guccugccaccuggggca

SEQ ID NO: 2126945 - RNA, 15 nt, Human
guccugccucagccu

SEQ ID NO: 2126946 - RNA, 17 nt, Human
guccugccucagccucc

SEQ ID NO: 2126947 - RNA, 13 nt, Human
guccugccuggcc

SEQ ID NO: 2126948 - RNA, 14 nt, Human
guccugccuggcca

SEQ ID NO: 2126949 - RNA, 15 nt, Human
guccugccuggccag

SEQ ID NO: 2126950 - RNA, 16 nt, Human
guccugaccugucuca

SEQ ID NO: 2126951 - RNA, 15 nt, Human
guccugaccugucuc

SEQ ID NO: 2126952 - RNA, 16 nt, Human
guccugacggcgcccc

SEQ ID NO: 2126953 - RNA, 21 nt, Human
guccugacggcgcccccagug

SEQ ID NO: 2126954 - RNA, 13 nt, Human
guccugacucaac

SEQ ID NO: 2126955 - RNA, 13 nt, Human
guccgagcuuuga

SEQ ID NO: 2126956 - RNA, 23 nt, Human
gucccaaggaaagccccagcacu

SEQ ID NO: 2126957 - RNA, 12 nt, Human
guccgcccucuu

SEQ ID NO: 2126958 - RNA, 19 nt, Human
guccgcccucuuccccucu

SEQ ID NO: 2126959 - RNA, 15 nt, Human
gucccaacuuguaaa

SEQ ID NO: 2126960 - RNA, 16 nt, Human
gucccaaggaaagccc

SEQ ID NO: 2126961 - RNA, 12 nt, Human
aacagaaaaaaa

SEQ ID NO: 2126962 - RNA, 15 nt, Human
aacagaaaaaaaaca

SEQ ID NO: 2126963 - RNA, 16 nt, Human
aacagaaaaaaaacac

SEQ ID NO: 2126964 - RNA, 17 nt, Human
aacagaaaaaaaacaca

SEQ ID NO: 2126965 - RNA, 11 nt, Human
aacagaaaaca

SEQ ID NO: 2126966 - RNA, 13 nt, Human
aacagaaaacaac

SEQ ID NO: 2126967 - RNA, 14 nt, Human
aacagaaaacaaca

SEQ ID NO: 2126968 - RNA, 18 nt, Human
aacagaaaacaacaaaaa

SEQ ID NO: 2126969 - RNA, 20 nt, Human
aacagaaaacaacaaaaaau

SEQ ID NO: 2126970 - RNA, 21 nt, Human
guccggucccugucccagugc

SEQ ID NO: 2126971 - RNA, 19 nt, Human
aacagacccccucuagaaa

SEQ ID NO: 2126972 - RNA, 18 nt, Human
aacagacccccucuagaa

SEQ ID NO: 2126973 - RNA, 11 nt, Human
aacagacagga

SEQ ID NO: 2126974 - RNA, 14 nt, Human
aacagacaggagaa

SEQ ID NO: 2126975 - RNA, 15 nt, Human
aacagacaggagaaa

SEQ ID NO: 2126976 - RNA, 14 nt, Human
aacaguaaaugugc

SEQ ID NO: 2126977 - RNA, 23 nt, Human
aacaggcugggcuucaguggcag

SEQ ID NO: 2126978 - RNA, 13 nt, Human
aacaggcugggcu

SEQ ID NO: 2126979 - RNA, 22 nt, Human
aacaggcugggcuucaguggca

SEQ ID NO: 2126980 - RNA, 19 nt, Human
aacagacuggaagcacagc

SEQ ID NO: 2126981 - RNA, 13 nt, Human
aacagacucaggu

SEQ ID NO: 2126982 - RNA, 15 nt, Human
aacaguggaauauaa

SEQ ID NO: 2126983 - RNA, 12 nt, Human
aacaguagcaua

SEQ ID NO: 2126984 - RNA, 22 nt, Human
aacagugugguaguuaauaaaa

SEQ ID NO: 2126985 - RNA, 13 nt, Human
aacaguuuguaca

SEQ ID NO: 2126986 - RNA, 14 nt, Human
aacaguuuguacag

SEQ ID NO: 2126987 - RNA, 11 nt, Human
aacaguuuucc

SEQ ID NO: 2126988 - RNA, 13 nt, Human
aacaguuuuccau

SEQ ID NO: 2126989 - RNA, 14 nt, Human
aacaguuuuccaug

SEQ ID NO: 2126990 - RNA, 15 nt, Human
aacaguguuucccau

SEQ ID NO: 2126991 - RNA, 13 nt, Human
aacaguguuuccc

SEQ ID NO: 2126992 - RNA, 18 nt, Human
aacaguguuucccauaau

SEQ ID NO: 2126993 - RNA, 21 nt, Human
gucauuuuaacuuuaucacau

SEQ ID NO: 2126994 - RNA, 12 nt, Human
aacacuuguaau

SEQ ID NO: 2126995 - RNA, 21 nt, Human
gucauuugcgcacaacuuaaa

SEQ ID NO: 2126996 - RNA, 22 nt, Human
gucauuugagcagggcucagcg

SEQ ID NO: 2126997 - RNA, 11 nt, Human
aacacuuccau

SEQ ID NO: 2126998 - RNA, 21 nt, Human
gucauuugagcagggcucagc

SEQ ID NO: 2126999 - RNA, 22 nt, Human
aacacuuaaggguuuuagaaaa

SEQ ID NO: 2127000 - RNA, 15 nt, Human
aacacuuauugcuuu

SEQ ID NO: 2127001 - RNA, 19 nt, Human
aacacuuauugcuuugaaa

SEQ ID NO: 2127002 - RNA, 16 nt, Human
aacaaugcgaauggua

SEQ ID NO: 2127003 - RNA, 15 nt, Human
guccacagaugccuc

SEQ ID NO: 2127004 - RNA, 17 nt, Human
guccacagaugccucca

SEQ ID NO: 2127005 - RNA, 19 nt, Human
guccaauuuguaaaaacag

SEQ ID NO: 2127006 - RNA, 16 nt, Human
guccacagaugccucc

SEQ ID NO: 2127007 - RNA, 19 nt, Human
guccaagugugugugcgug

SEQ ID NO: 2127008 - RNA, 15 nt, Human
guccaagugugugug

SEQ ID NO: 2127009 - RNA, 16 nt, Human
guccaagugugugugc

SEQ ID NO: 2127010 - RNA, 17 nt, Human
guccaagugugugugcg

SEQ ID NO: 2127011 - RNA, 16 nt, Human
aacacugucuugaaga

SEQ ID NO: 2127012 - RNA, 17 nt, Human
aacacugcuuguguuuu

SEQ ID NO: 2127013 - RNA, 19 nt, Human
aacacuggcaacaacaaag

SEQ ID NO: 2127014 - RNA, 14 nt, Human
aacacugcuugugu

SEQ ID NO: 2127015 - RNA, 13 nt, Human
aacacucuauauu

SEQ ID NO: 2127016 - RNA, 14 nt, Human
aacaauuuucugca

SEQ ID NO: 2127017 - RNA, 23 nt, Human
aaauuuuucuuccuuaaacuccu

SEQ ID NO: 2127018 - RNA, 17 nt, Human
aaauuuuuccuuagcau

SEQ ID NO: 2127019 - RNA, 14 nt, Human
aacaagcuaggugc

SEQ ID NO: 2127020 - RNA, 19 nt, Human
aacaagcuaggugcuaauu

SEQ ID NO: 2127021 - RNA, 15 nt, Human
gucacaggcaggucc

SEQ ID NO: 2127022 - RNA, 13 nt, Human
gucacaggcaggu

SEQ ID NO: 2127023 - RNA, 16 nt, Human
gucacaggcaggucca

SEQ ID NO: 2127024 - RNA, 21 nt, Human
aaauuuuucagaugcuucugg

SEQ ID NO: 2127025 - RNA, 17 nt, Human
aaauuuuucagaugcuu

SEQ ID NO: 2127026 - RNA, 18 nt, Human
aaauuuuucagaugcuuc

SEQ ID NO: 2127027 - RNA, 20 nt, Human
aaauuuuucagaugcuucug

SEQ ID NO: 2127028 - RNA, 13 nt, Human
aaauuuuugaaaa

SEQ ID NO: 2127029 - RNA, 13 nt, Human
aaauuuuuggauu

SEQ ID NO: 2127030 - RNA, 15 nt, Human
aaauuuuuggauuga

SEQ ID NO: 2127031 - RNA, 17 nt, Human
aaauuuuuggauugaca

SEQ ID NO: 2127032 - RNA, 19 nt, Human
aaauuuuuggauugacagu

SEQ ID NO: 2127033 - RNA, 21 nt, Human
aaauuuuuggauugacaguaa

SEQ ID NO: 2127034 - RNA, 14 nt, Human
aaauuuuguaauuu

SEQ ID NO: 2127035 - RNA, 15 nt, Human
aaauuuuguaauuuu

SEQ ID NO: 2127036 - RNA, 17 nt, Human
aaauuuuguaauuuucu

SEQ ID NO: 2127037 - RNA, 18 nt, Human
aaauuuuguaauuuucuu

SEQ ID NO: 2127038 - RNA, 19 nt, Human
aaauuuuguaauuuucuug

SEQ ID NO: 2127039 - RNA, 21 nt, Human
aaauuuuguaauuuucuugau

SEQ ID NO: 2127040 - RNA, 22 nt, Human
aacaauuuauuuuauuuuagca

SEQ ID NO: 2127041 - RNA, 14 nt, Human
aacaagggcagugg

SEQ ID NO: 2127042 - RNA, 18 nt, Human
aacaagggcaguggaggu

SEQ ID NO: 2127043 - RNA, 19 nt, Human
aacaaggguggcaucccag

SEQ ID NO: 2127044 - RNA, 16 nt, Human
aacaagguaguuuuua

SEQ ID NO: 2127045 - RNA, 15 nt, Human
aacaauaaaugugca

SEQ ID NO: 2127046 - RNA, 16 nt, Human
aacaauauuguuucua

SEQ ID NO: 2127047 - RNA, 12 nt, Human
aacaauauuuau

SEQ ID NO: 2127048 - RNA, 15 nt, Human
aacaauauuuauugu

SEQ ID NO: 2127049 - RNA, 15 nt, Human
aacaauaacuacugu

SEQ ID NO: 2127050 - RNA, 17 nt, Human
aacaauaacuacugugu

SEQ ID NO: 2127051 - RNA, 18 nt, Human
aacaauaacuacuguguu

SEQ ID NO: 2127052 - RNA, 19 nt, Human
aacaauaacuacuguguuc

SEQ ID NO: 2127053 - RNA, 20 nt, Human
aacaauaacuacuguguucc

SEQ ID NO: 2127054 - RNA, 21 nt, Human
aacaauaacuacuguguuccu

SEQ ID NO: 2127055 - RNA, 20 nt, Human
aacaauaagagcguuugccc

SEQ ID NO: 2127056 - RNA, 12 nt, Human
aacccaggaggu

SEQ ID NO: 2127057 - RNA, 22 nt, Human
aaccccaaaaugaagauuauuu

SEQ ID NO: 2127058 - RNA, 15 nt, Human
aacccaugagauuca

SEQ ID NO: 2127059 - RNA, 17 nt, Human
aacccaucuaccccugg

SEQ ID NO: 2127060 - RNA, 20 nt, Human
aacccaucuaccccuggaug

SEQ ID NO: 2127061 - RNA, 21 nt, Human
aacccaucuaccccuggauga

SEQ ID NO: 2127062 - RNA, 11 nt, Human
aacccaggagg

SEQ ID NO: 2127063 - RNA, 15 nt, Human
aacccaucagaagga

SEQ ID NO: 2127064 - RNA, 17 nt, Human
aacccaucagaaggaga

SEQ ID NO: 2127065 - RNA, 19 nt, Human
aacccaucagaaggagaag

SEQ ID NO: 2127066 - RNA, 20 nt, Human
aaccauuuuuuuucagcaga

SEQ ID NO: 2127067 - RNA, 13 nt, Human
aacccaaaccugg

SEQ ID NO: 2127068 - RNA, 14 nt, Human
aacccaaaccugga

SEQ ID NO: 2127069 - RNA, 15 nt, Human
aacccaaaccuggag

SEQ ID NO: 2127070 - RNA, 16 nt, Human
aacccaaaccuggaga

SEQ ID NO: 2127071 - RNA, 17 nt, Human
aacccaaaccuggagau

SEQ ID NO: 2127072 - RNA, 15 nt, Human
aacccccagccugcu

SEQ ID NO: 2127073 - RNA, 14 nt, Human
aacccccagccugc

SEQ ID NO: 2127074 - RNA, 13 nt, Human
aacccccagccug

SEQ ID NO: 2127075 - RNA, 14 nt, Human
aaccccagcauccu

SEQ ID NO: 2127076 - RNA, 12 nt, Human
aaccccagcucc

SEQ ID NO: 2127077 - RNA, 15 nt, Human
aaccucagcaaccug

SEQ ID NO: 2127078 - RNA, 21 nt, Human
aaccuccuguuagcuguuauu

SEQ ID NO: 2127079 - RNA, 14 nt, Human
aaccuccugggcua

SEQ ID NO: 2127080 - RNA, 17 nt, Human
aaccuccgccucuuggg

SEQ ID NO: 2127081 - RNA, 15 nt, Human
aaccucaaagugacu

SEQ ID NO: 2127082 - RNA, 21 nt, Human
aaccucacccgaggcugccca

SEQ ID NO: 2127083 - RNA, 19 nt, Human
aaccucacgcaccucccau

SEQ ID NO: 2127084 - RNA, 22 nt, Human
aaccucacgcaccucccauccu

SEQ ID NO: 2127085 - RNA, 18 nt, Human
aaccacaucuugcucugc

SEQ ID NO: 2127086 - RNA, 15 nt, Human
aaccaauguuuaaaa

SEQ ID NO: 2127087 - RNA, 22 nt, Human
aaccaauguuuaaaaaaguuua

SEQ ID NO: 2127088 - RNA, 21 nt, Human
aaccaaaagaacaagaauuuc

SEQ ID NO: 2127089 - RNA, 15 nt, Human
aaccaauauuuguag

SEQ ID NO: 2127090 - RNA, 14 nt, Human
aaccaaucaagaua

SEQ ID NO: 2127091 - RNA, 15 nt, Human
aaccaaucaagauaa

SEQ ID NO: 2127092 - RNA, 19 nt, Human
aaccaaucaagauaaagga

SEQ ID NO: 2127093 - RNA, 22 nt, Human
aaccacaucuugcucugcugac

SEQ ID NO: 2127094 - RNA, 20 nt, Human
aaccacaucuugcucugcug

SEQ ID NO: 2127095 - RNA, 22 nt, Human
gucucccuauaaugcuggagcg

SEQ ID NO: 2127096 - RNA, 14 nt, Human
gucuccccucugcu

SEQ ID NO: 2127097 - RNA, 15 nt, Human
gucuccccucugcug

SEQ ID NO: 2127098 - RNA, 16 nt, Human
gucuccccucugcugg

SEQ ID NO: 2127099 - RNA, 17 nt, Human
gucuccccucugcuggc

SEQ ID NO: 2127100 - RNA, 19 nt, Human
gucuccccucugcuggccg

SEQ ID NO: 2127101 - RNA, 14 nt, Human
gucuccucuuaaaa

SEQ ID NO: 2127102 - RNA, 22 nt, Human
gucuccucuuaaaaaauaaaaa

SEQ ID NO: 2127103 - RNA, 23 nt, Human
gucuccucuuaaaaaauaaaaac

SEQ ID NO: 2127104 - RNA, 19 nt, Human
gucuccucuuuguuuuguu

SEQ ID NO: 2127105 - RNA, 14 nt, Human
gucuccugcaugca

SEQ ID NO: 2127106 - RNA, 13 nt, Human
gucuccugccccc

SEQ ID NO: 2127107 - RNA, 14 nt, Human
gucuccugccccca

SEQ ID NO: 2127108 - RNA, 15 nt, Human
gucuccugcccccac

SEQ ID NO: 2127109 - RNA, 19 nt, Human
gucuccugcccccacaccu

SEQ ID NO: 2127110 - RNA, 22 nt, Human
gucuccugcccccacaccuggc

SEQ ID NO: 2127111 - RNA, 23 nt, Human
gucuccugcccccacaccuggcc

SEQ ID NO: 2127112 - RNA, 22 nt, Human
aacauuuuguggucauuaagca

SEQ ID NO: 2127113 - RNA, 18 nt, Human
gucucccaucuuaacucu

SEQ ID NO: 2127114 - RNA, 18 nt, Human
gucuccccaugugccugc

SEQ ID NO: 2127115 - RNA, 19 nt, Human
gucucccagggccuuaaaa

SEQ ID NO: 2127116 - RNA, 13 nt, Human
gucucauccccag

SEQ ID NO: 2127117 - RNA, 16 nt, Human
gucucauccccagggg

SEQ ID NO: 2127118 - RNA, 14 nt, Human
gucucauccccagg

SEQ ID NO: 2127119 - RNA, 15 nt, Human
gucucauccccaggg

SEQ ID NO: 2127120 - RNA, 15 nt, Human
gucucaguuucacuu

SEQ ID NO: 2127121 - RNA, 12 nt, Human
guccuucccucu

SEQ ID NO: 2127122 - RNA, 21 nt, Human
guccuucccucuccccaagac

SEQ ID NO: 2127123 - RNA, 14 nt, Human
guccuuccaggccc

SEQ ID NO: 2127124 - RNA, 22 nt, Human
guccuuccaggcccccaccacu

SEQ ID NO: 2127125 - RNA, 17 nt, Human
guccuucucucaccucc

SEQ ID NO: 2127126 - RNA, 18 nt, Human
guccuucucucaccuccu

SEQ ID NO: 2127127 - RNA, 19 nt, Human
guccuucucucaccuccua

SEQ ID NO: 2127128 - RNA, 19 nt, Human
gucugcugaauaauaaacu

SEQ ID NO: 2127129 - RNA, 17 nt, Human
gucugcugaauaauaaa

SEQ ID NO: 2127130 - RNA, 13 nt, Human
gucugcugcccuc

SEQ ID NO: 2127131 - RNA, 15 nt, Human
gucugcugcccucca

SEQ ID NO: 2127132 - RNA, 16 nt, Human
gucugcugcccuccau

SEQ ID NO: 2127133 - RNA, 18 nt, Human
gucugcugcccuccaucc

SEQ ID NO: 2127134 - RNA, 19 nt, Human
gucugcugcccuccauccc

SEQ ID NO: 2127135 - RNA, 18 nt, Human
aaccucucacuucacccu

SEQ ID NO: 2127136 - RNA, 14 nt, Human
aaccucuuccccag

SEQ ID NO: 2127137 - RNA, 11 nt, Human
aaccucuuccc

SEQ ID NO: 2127138 - RNA, 12 nt, Human
aaccucuucccc

SEQ ID NO: 2127139 - RNA, 15 nt, Human
gucuggcuucacaga

SEQ ID NO: 2127140 - RNA, 16 nt, Human
gucugggagaggcaga

SEQ ID NO: 2127141 - RNA, 17 nt, Human
gucugggagaggcagag

SEQ ID NO: 2127142 - RNA, 19 nt, Human
gucugggagaggcagagug

SEQ ID NO: 2127143 - RNA, 18 nt, Human
gucuucccuaccucaggc

SEQ ID NO: 2127144 - RNA, 21 nt, Human
gucuucccuaccucaggcagg

SEQ ID NO: 2127145 - RNA, 16 nt, Human
gucuucccuagggcug

SEQ ID NO: 2127146 - RNA, 17 nt, Human
gucuucccuagggcugg

SEQ ID NO: 2127147 - RNA, 18 nt, Human
gucuucccuagggcuggg

SEQ ID NO: 2127148 - RNA, 19 nt, Human
gucuucccuagggcugggu

SEQ ID NO: 2127149 - RNA, 20 nt, Human
gucuucccuagggcugggug

SEQ ID NO: 2127150 - RNA, 21 nt, Human
gucuucccuagggcugggugu

SEQ ID NO: 2127151 - RNA, 18 nt, Human
gucuuccugaaaugcagu

SEQ ID NO: 2127152 - RNA, 24 nt, Human
gucuuagacuugaaauacuacuua

SEQ ID NO: 2127153 - RNA, 18 nt, Human
gucuuagacuugaaauac

SEQ ID NO: 2127154 - RNA, 23 nt, Human
gucuuagacuugaaauacuacuu

SEQ ID NO: 2127155 - RNA, 16 nt, Human
gucuuagcagugauuu

SEQ ID NO: 2127156 - RNA, 16 nt, Human
gucuucccuaccucag

SEQ ID NO: 2127157 - RNA, 15 nt, Human
gucuuagauguauau

SEQ ID NO: 2127158 - RNA, 13 nt, Human
gucuuaauuaagu

SEQ ID NO: 2127159 - RNA, 15 nt, Human
gucuuaauuaaguaa

SEQ ID NO: 2127160 - RNA, 20 nt, Human
gucuuaauuaaguaaacuaa

SEQ ID NO: 2127161 - RNA, 19 nt, Human
gucuuagaaguggaccagg

SEQ ID NO: 2127162 - RNA, 20 nt, Human
gucuuagaaguggaccagga

SEQ ID NO: 2127163 - RNA, 22 nt, Human
gucuuagaaguggaccaggaca

SEQ ID NO: 2127164 - RNA, 23 nt, Human
gucuuagaaguggaccaggacag

SEQ ID NO: 2127165 - RNA, 22 nt, Human
gucuuucuuuggugccuuuccu

SEQ ID NO: 2127166 - RNA, 13 nt, Human
gucuuugauaaag

SEQ ID NO: 2127167 - RNA, 15 nt, Human
aaccugcucuccucu

SEQ ID NO: 2127168 - RNA, 11 nt, Human
aaccugcucuc

SEQ ID NO: 2127169 - RNA, 20 nt, Human
aaccugcucuccucuugcca

SEQ ID NO: 2127170 - RNA, 22 nt, Human
aaccugcuuucaagaccccugu

SEQ ID NO: 2127171 - RNA, 17 nt, Human
aaccuggaccaaagcug

SEQ ID NO: 2127172 - RNA, 18 nt, Human
aaccuggaccaaagcuga

SEQ ID NO: 2127173 - RNA, 11 nt, Human
aaccuggagau

SEQ ID NO: 2127174 - RNA, 17 nt, Human
aaccuggagauggggag

SEQ ID NO: 2127175 - RNA, 19 nt, Human
aacuaaucuauuggguuca

SEQ ID NO: 2127176 - RNA, 20 nt, Human
aacuaaucuauuggguucau

SEQ ID NO: 2127177 - RNA, 22 nt, Human
aacuaaucuauuggguucauua

SEQ ID NO: 2127178 - RNA, 12 nt, Human
aacuaaugaguu

SEQ ID NO: 2127179 - RNA, 13 nt, Human
aacuaaugaguuu

SEQ ID NO: 2127180 - RNA, 18 nt, Human
aacuccaguacuggagcu

SEQ ID NO: 2127181 - RNA, 19 nt, Human
aacuccaguacuggagcuu

SEQ ID NO: 2127182 - RNA, 13 nt, Human
aacucccaagaac

SEQ ID NO: 2127183 - RNA, 12 nt, Human
aacuaggaaaau

SEQ ID NO: 2127184 - RNA, 15 nt, Human
aacuaggaaaauugg

SEQ ID NO: 2127185 - RNA, 18 nt, Human
aacuagcuuggaaacugg

SEQ ID NO: 2127186 - RNA, 12 nt, Human
aacuagcuggaa

SEQ ID NO: 2127187 - RNA, 23 nt, Human
aacuagcuggaauuuuuuauucu

SEQ ID NO: 2127188 - RNA, 22 nt, Human
aacuagcuuacaugagaacaga

SEQ ID NO: 2127189 - RNA, 19 nt, Human
gugaaccaccacacccagc

SEQ ID NO: 2127190 - RNA, 15 nt, Human
aacucuaauagugcu

SEQ ID NO: 2127191 - RNA, 21 nt, Human
aacucuaauucccauuuugca

SEQ ID NO: 2127192 - RNA, 22 nt, Human
aacucuaauucccauuuugcaa

SEQ ID NO: 2127193 - RNA, 19 nt, Human
guucuuaguugcuguaugu

SEQ ID NO: 2127194 - RNA, 17 nt, Human
guucuuaguuugcaguu

SEQ ID NO: 2127195 - RNA, 14 nt, Human
guucuuacugcuug

SEQ ID NO: 2127196 - RNA, 18 nt, Human
guucuuagauaucuuuuu

SEQ ID NO: 2127197 - RNA, 14 nt, Human
guucuucaucuaag

SEQ ID NO: 2127198 - RNA, 14 nt, Human
guucuuguucuguu

SEQ ID NO: 2127199 - RNA, 16 nt, Human
guucuuguucuguuuu

SEQ ID NO: 2127200 - RNA, 18 nt, Human
guucuuguucuguuuugu

SEQ ID NO: 2127201 - RNA, 21 nt, Human
guugaggaguuuccuaaaagu

SEQ ID NO: 2127202 - RNA, 17 nt, Human
guugagggaacagacag

SEQ ID NO: 2127203 - RNA, 22 nt, Human
guugaugaucuuugcagacagg

SEQ ID NO: 2127204 - RNA, 16 nt, Human
guugagguggucugaa

SEQ ID NO: 2127205 - RNA, 21 nt, Human
guugaguucagguagcugccc

SEQ ID NO: 2127206 - RNA, 22 nt, Human
guugaguucagguagcugcccc

SEQ ID NO: 2127207 - RNA, 18 nt, Human
guugauaaauuccacugg

SEQ ID NO: 2127208 - RNA, 21 nt, Human
guugauaaauuccacuggacu

SEQ ID NO: 2127209 - RNA, 19 nt, Human
guugagggaacagacagga

SEQ ID NO: 2127210 - RNA, 22 nt, Human
guugagggaacagacaggagaa

SEQ ID NO: 2127211 - RNA, 23 nt, Human
guugagggaacagacaggagaaa

SEQ ID NO: 2127212 - RNA, 16 nt, Human
guugaggggcuccugg

SEQ ID NO: 2127213 - RNA, 17 nt, Human
guugaggggcuccugga

SEQ ID NO: 2127214 - RNA, 18 nt, Human
guugaggggcuccuggaa

SEQ ID NO: 2127215 - RNA, 20 nt, Human
guugagguggaagcccuccu

SEQ ID NO: 2127216 - RNA, 23 nt, Human
guugagguggaagcccuccuucc

SEQ ID NO: 2127217 - RNA, 23 nt, Human
guugagguggucugaauguucug

SEQ ID NO: 2127218 - RNA, 17 nt, Human
guucugguuagcucagc

SEQ ID NO: 2127219 - RNA, 21 nt, Human
guucugguuagcucagcccca

SEQ ID NO: 2127220 - RNA, 23 nt, Human
guucugguuagcucagccccagc

SEQ ID NO: 2127221 - RNA, 11 nt, Human
guucugggugg

SEQ ID NO: 2127222 - RNA, 18 nt, Human
guucugggugguugcccu

SEQ ID NO: 2127223 - RNA, 14 nt, Human
guucuggggccccu

SEQ ID NO: 2127224 - RNA, 15 nt, Human
guucuggggccccuu

SEQ ID NO: 2127225 - RNA, 17 nt, Human
guucuccucuccccucu

SEQ ID NO: 2127226 - RNA, 18 nt, Human
guucuccucuccccucua

SEQ ID NO: 2127227 - RNA, 22 nt, Human
guucccuuuccuuccaucccua

SEQ ID NO: 2127228 - RNA, 20 nt, Human
guucuacaaucuauuuauug

SEQ ID NO: 2127229 - RNA, 16 nt, Human
guucuacacucaucuu

SEQ ID NO: 2127230 - RNA, 19 nt, Human
aagcuuauuaaugcuaagg

SEQ ID NO: 2127231 - RNA, 14 nt, Human
aagcuuauuaaugc

SEQ ID NO: 2127232 - RNA, 15 nt, Human
aagcuuauuaaugcu

SEQ ID NO: 2127233 - RNA, 16 nt, Human
aagcuuauuaaugcua

SEQ ID NO: 2127234 - RNA, 17 nt, Human
aagcuuauuaaugcuaa

SEQ ID NO: 2127235 - RNA, 18 nt, Human
aagcuuauuaaugcuaag

SEQ ID NO: 2127236 - RNA, 20 nt, Human
aagcuuauuaaugcuaaggg

SEQ ID NO: 2127237 - RNA, 14 nt, Human
aagcuuauuuaauu

SEQ ID NO: 2127238 - RNA, 15 nt, Human
aagcuuccaggaaaa

SEQ ID NO: 2127239 - RNA, 16 nt, Human
aagcuuccaggaaaaa

SEQ ID NO: 2127240 - RNA, 21 nt, Human
aagcuuccaggaaaaaggaca

SEQ ID NO: 2127241 - RNA, 15 nt, Human
aagcugaagccgcca

SEQ ID NO: 2127242 - RNA, 13 nt, Human
aagcugaauacau

SEQ ID NO: 2127243 - RNA, 23 nt, Human
aagcugaauacauucugcuuuca

SEQ ID NO: 2127244 - RNA, 22 nt, Human
aagcuauucaguaauaacucua

SEQ ID NO: 2127245 - RNA, 21 nt, Human
aagcucuacugaggugcuaug

SEQ ID NO: 2127246 - RNA, 23 nt, Human
aagcuccugguauggguuucucc

SEQ ID NO: 2127247 - RNA, 19 nt, Human
aagcuccuggucuugagau

SEQ ID NO: 2127248 - RNA, 21 nt, Human
guucccagugacacuucagag

SEQ ID NO: 2127249 - RNA, 22 nt, Human
guucccagugacacuucagaga

SEQ ID NO: 2127250 - RNA, 19 nt, Human
guucccaccaggcugcuca

SEQ ID NO: 2127251 - RNA, 14 nt, Human
guucccacuuggag

SEQ ID NO: 2127252 - RNA, 20 nt, Human
guucccuacuuccugugacu

SEQ ID NO: 2127253 - RNA, 15 nt, Human
guucccucucccugu

SEQ ID NO: 2127254 - RNA, 17 nt, Human
guucccucucccuguug

SEQ ID NO: 2127255 - RNA, 18 nt, Human
guucccuuggccucagaa

SEQ ID NO: 2127256 - RNA, 19 nt, Human
guucccuuggccucagaau

SEQ ID NO: 2127257 - RNA, 19 nt, Human
guucccuuuccuuccaucc

SEQ ID NO: 2127258 - RNA, 17 nt, Human
guuccccuuugcuucau

SEQ ID NO: 2127259 - RNA, 14 nt, Human
guucccauguuaaa

SEQ ID NO: 2127260 - RNA, 11 nt, Human
aagccucugcu

SEQ ID NO: 2127261 - RNA, 14 nt, Human
aagccucugcugcc

SEQ ID NO: 2127262 - RNA, 12 nt, Human
aagccucuggcu

SEQ ID NO: 2127263 - RNA, 14 nt, Human
aagccucuggcuag

SEQ ID NO: 2127264 - RNA, 14 nt, Human
aagccugcaggagu

SEQ ID NO: 2127265 - RNA, 23 nt, Human
aagccucuggcuagaggccagcc

SEQ ID NO: 2127266 - RNA, 19 nt, Human
aagccuccuccagccgcca

SEQ ID NO: 2127267 - RNA, 20 nt, Human
guucauagggucucuucagg

SEQ ID NO: 2127268 - RNA, 22 nt, Human
guucauagggucucuucagguu

SEQ ID NO: 2127269 - RNA, 17 nt, Human
guucauagggucucuuc

SEQ ID NO: 2127270 - RNA, 18 nt, Human
guucauagggucucuuca

SEQ ID NO: 2127271 - RNA, 19 nt, Human
aagccugcuuuuuaagugu

SEQ ID NO: 2127272 - RNA, 21 nt, Human
aagccugccuaggaauuccca

SEQ ID NO: 2127273 - RNA, 23 nt, Human
aagccugccuaggaauucccagc

SEQ ID NO: 2127274 - RNA, 22 nt, Human
aagcuaggccuggccagaugca

SEQ ID NO: 2127275 - RNA, 16 nt, Human
aagcuaggccuggcca

SEQ ID NO: 2127276 - RNA, 20 nt, Human
aagcuauagacccgaggaaa

SEQ ID NO: 2127277 - RNA, 18 nt, Human
aagcuaggccuggccaga

SEQ ID NO: 2127278 - RNA, 17 nt, Human
aagcuaggccuggccag

SEQ ID NO: 2127279 - RNA, 17 nt, Human
guucagcuccagcucac

SEQ ID NO: 2127280 - RNA, 16 nt, Human
guucagcuccagcuca

SEQ ID NO: 2127281 - RNA, 18 nt, Human
guucagcuccagcucacc

SEQ ID NO: 2127282 - RNA, 20 nt, Human
guucaggggacucagcccug

SEQ ID NO: 2127283 - RNA, 14 nt, Human
guuauuucuuguuu

SEQ ID NO: 2127284 - RNA, 15 nt, Human
guuauuuaaaugagu

SEQ ID NO: 2127285 - RNA, 11 nt, Human
guuauuuaaau

SEQ ID NO: 2127286 - RNA, 13 nt, Human
guuauuuaaauga

SEQ ID NO: 2127287 - RNA, 19 nt, Human
guucaggguuggccccugc

SEQ ID NO: 2127288 - RNA, 18 nt, Human
guucaggguuggccccug

SEQ ID NO: 2127289 - RNA, 17 nt, Human
guucaggguuggccccu

SEQ ID NO: 2127290 - RNA, 19 nt, Human
guucauaacagugccauug

SEQ ID NO: 2127291 - RNA, 20 nt, Human
guucauaacagugccauugu

SEQ ID NO: 2127292 - RNA, 22 nt, Human
guucauaacagugccauugucu

SEQ ID NO: 2127293 - RNA, 23 nt, Human
guucauaacagugccauugucuu

SEQ ID NO: 2127294 - RNA, 24 nt, Human
guucauaacagugccauugucuuu

SEQ ID NO: 2127295 - RNA, 15 nt, Human
guguuucccauaauu

SEQ ID NO: 2127296 - RNA, 20 nt, Human
guguuuccuucauuucugau

SEQ ID NO: 2127297 - RNA, 12 nt, Human
guguuucccaua

SEQ ID NO: 2127298 - RNA, 11 nt, Human
guguuucuagg

SEQ ID NO: 2127299 - RNA, 15 nt, Human
guguuucuagggaaa

SEQ ID NO: 2127300 - RNA, 12 nt, Human
guguuuguguga

SEQ ID NO: 2127301 - RNA, 16 nt, Human
guguuuuaaagagaau

SEQ ID NO: 2127302 - RNA, 18 nt, Human
guguuuuaaagagaaugu

SEQ ID NO: 2127303 - RNA, 22 nt, Human
guuaaguugauggugaugaaau

SEQ ID NO: 2127304 - RNA, 22 nt, Human
guuaagucuaaauauuuccuua

SEQ ID NO: 2127305 - RNA, 17 nt, Human
guuaaggcugaggaaag

SEQ ID NO: 2127306 - RNA, 16 nt, Human
guuaaggcugaggaaa

SEQ ID NO: 2127307 - RNA, 18 nt, Human
guuaaugauagcuacugu

SEQ ID NO: 2127308 - RNA, 16 nt, Human
guuaaucuugcuuucu

SEQ ID NO: 2127309 - RNA, 17 nt, Human
guuaaugaaaaugucag

SEQ ID NO: 2127310 - RNA, 13 nt, Human
guuaaucuugcuu

SEQ ID NO: 2127311 - RNA, 21 nt, Human
guuaaucuugcuuucuuuguu

SEQ ID NO: 2127312 - RNA, 16 nt, Human
guuaaugaaaauguca

SEQ ID NO: 2127313 - RNA, 12 nt, Human
guuaaucuuagg

SEQ ID NO: 2127314 - RNA, 14 nt, Human
guuaagugguuuca

SEQ ID NO: 2127315 - RNA, 23 nt, Human
guuaaguuggcuucuguuucuag

SEQ ID NO: 2127316 - RNA, 21 nt, Human
guuaguagcauguugagccag

SEQ ID NO: 2127317 - RNA, 16 nt, Human
guuaguaucuaacaug

SEQ ID NO: 2127318 - RNA, 17 nt, Human
guuaguaucuaacaugu

SEQ ID NO: 2127319 - RNA, 13 nt, Human
guuaguagaaauu

SEQ ID NO: 2127320 - RNA, 16 nt, Human
guuaguagcauguuga

SEQ ID NO: 2127321 - RNA, 11 nt, Human
guuagggaggg

SEQ ID NO: 2127322 - RNA, 13 nt, Human
guuagggaggggu

SEQ ID NO: 2127323 - RNA, 20 nt, Human
guuagguuuaacauaaaggu

SEQ ID NO: 2127324 - RNA, 21 nt, Human
guuagguagagggaguuguca

SEQ ID NO: 2127325 - RNA, 23 nt, Human
guuagggugcucuggaagagagg

SEQ ID NO: 2127326 - RNA, 18 nt, Human
guuagguagagggaguug

SEQ ID NO: 2127327 - RNA, 21 nt, Human
guuacacacuuuuuaagaaau

SEQ ID NO: 2127328 - RNA, 21 nt, Human
guuagcucagccccagcccag

SEQ ID NO: 2127329 - RNA, 23 nt, Human
guuagcucagccccagcccagcc

SEQ ID NO: 2127330 - RNA, 20 nt, Human
guuagcucaggaggcuugga

SEQ ID NO: 2127331 - RNA, 9 nt, Human
guuacaaac

SEQ ID NO: 2127332 - RNA, 13 nt, Human
guuacaaacugca

SEQ ID NO: 2127333 - RNA, 14 nt, Human
guuacaaacugcaa

SEQ ID NO: 2127334 - RNA, 15 nt, Human
guuacaaacugcaau

SEQ ID NO: 2127335 - RNA, 16 nt, Human
guuacaaacugcaaua

SEQ ID NO: 2127336 - RNA, 19 nt, Human
guuacaaacugcaauagag

SEQ ID NO: 2127337 - RNA, 21 nt, Human
guuacaaacugcaauagagac

SEQ ID NO: 2127338 - RNA, 23 nt, Human
guuacaaacugcaauagagacug

SEQ ID NO: 2127339 - RNA, 23 nt, Human
guuucuaacacuagucugugugc

SEQ ID NO: 2127340 - RNA, 16 nt, Human
guuugccucugccucu

SEQ ID NO: 2127341 - RNA, 13 nt, Human
guuugccucugcc

SEQ ID NO: 2127342 - RNA, 15 nt, Human
guuugcacacuugug

SEQ ID NO: 2127343 - RNA, 21 nt, Human
guuugauuuuagcugcagaac

SEQ ID NO: 2127344 - RNA, 17 nt, Human
guuugcaaggaagccac

SEQ ID NO: 2127345 - RNA, 22 nt, Human
guuugcaaggaagccacagcug

SEQ ID NO: 2127346 - RNA, 13 nt, Human
guuugcaaggaag

SEQ ID NO: 2127347 - RNA, 14 nt, Human
guuugcaaggaagc

SEQ ID NO: 2127348 - RNA, 15 nt, Human
guuugcaaggaagcc

SEQ ID NO: 2127349 - RNA, 22 nt, Human
guuuggggaaugcggccgcauu

SEQ ID NO: 2127350 - RNA, 15 nt, Human
guuuggggagcagag

SEQ ID NO: 2127351 - RNA, 18 nt, Human
guuuggggaugagaaagg

SEQ ID NO: 2127352 - RNA, 23 nt, Human
guuuuacaauaaaaucuugaaaa

SEQ ID NO: 2127353 - RNA, 20 nt, Human
guuuggggagcagagacacu

SEQ ID NO: 2127354 - RNA, 13 nt, Human
guuuuagaaugau

SEQ ID NO: 2127355 - RNA, 12 nt, Human
guuuucuuccca

SEQ ID NO: 2127356 - RNA, 15 nt, Human
guuuucuucccauca

SEQ ID NO: 2127357 - RNA, 20 nt, Human
guuuucuucccaucacugga

SEQ ID NO: 2127358 - RNA, 14 nt, Human
guuuuaguugcaga

SEQ ID NO: 2127359 - RNA, 21 nt, Human
guuuuaguugcagaaacauuu

SEQ ID NO: 2127360 - RNA, 17 nt, Human
aagguaaaacaaaucag

SEQ ID NO: 2127361 - RNA, 14 nt, Human
aagguaaaauucua

SEQ ID NO: 2127362 - RNA, 15 nt, Human
aagguaaaauucuaa

SEQ ID NO: 2127363 - RNA, 16 nt, Human
aagguaaaauucuaaa

SEQ ID NO: 2127364 - RNA, 17 nt, Human
aagguaaaauucuaaau

SEQ ID NO: 2127365 - RNA, 12 nt, Human
aagguaaaauug

SEQ ID NO: 2127366 - RNA, 19 nt, Human
aaggguuuuccacccugga

SEQ ID NO: 2127367 - RNA, 21 nt, Human
aaggguuuuccacccuggaau

SEQ ID NO: 2127368 - RNA, 14 nt, Human
aagggguuucuaac

SEQ ID NO: 2127369 - RNA, 20 nt, Human
aagggguugguugaggugga

SEQ ID NO: 2127370 - RNA, 16 nt, Human
aaggguaucaggugcu

SEQ ID NO: 2127371 - RNA, 16 nt, Human
aagguaaaauugaaag

SEQ ID NO: 2127372 - RNA, 15 nt, Human
guuucaaaauaaaaa

SEQ ID NO: 2127373 - RNA, 16 nt, Human
guuucaaaauaaaaac

SEQ ID NO: 2127374 - RNA, 19 nt, Human
guuucaaaauaaaaaccaa

SEQ ID NO: 2127375 - RNA, 23 nt, Human
guuucaaaauaaaaaccaagaag

SEQ ID NO: 2127376 - RNA, 19 nt, Human
aaggcuucaauuuauugca

SEQ ID NO: 2127377 - RNA, 23 nt, Human
aaggcuucaauuuauugcacaaa

SEQ ID NO: 2127378 - RNA, 16 nt, Human
aaggcuuucagggccu

SEQ ID NO: 2127379 - RNA, 17 nt, Human
aaggcuuucagggccuc

SEQ ID NO: 2127380 - RNA, 22 nt, Human
aaggcuuucagggccuccagcc

SEQ ID NO: 2127381 - RNA, 18 nt, Human
aaggggaagcacucgugu

SEQ ID NO: 2127382 - RNA, 17 nt, Human
aaggggugccugggaac

SEQ ID NO: 2127383 - RNA, 23 nt, Human
aaggggaauguuugccucugccu

SEQ ID NO: 2127384 - RNA, 22 nt, Human
aaggggaauguuugccucugcc

SEQ ID NO: 2127385 - RNA, 13 nt, Human
guuggguggaugc

SEQ ID NO: 2127386 - RNA, 13 nt, Human
guugguaguuucu

SEQ ID NO: 2127387 - RNA, 16 nt, Human
guuggucgguggguug

SEQ ID NO: 2127388 - RNA, 19 nt, Human
guugcugucauaagaauga

SEQ ID NO: 2127389 - RNA, 14 nt, Human
guugguguguuuuu

SEQ ID NO: 2127390 - RNA, 15 nt, Human
guugguguguuuuug

SEQ ID NO: 2127391 - RNA, 15 nt, Human
guugguguugcagaa

SEQ ID NO: 2127392 - RNA, 14 nt, Human
guuguaguaaagaa

SEQ ID NO: 2127393 - RNA, 17 nt, Human
guuuaagaccagccugg

SEQ ID NO: 2127394 - RNA, 12 nt, Human
guuuaagauuua

SEQ ID NO: 2127395 - RNA, 21 nt, Human
guuuaagauuuaauuugccaa

SEQ ID NO: 2127396 - RNA, 23 nt, Human
guuuaagauuuaauuugccaaaa

SEQ ID NO: 2127397 - RNA, 23 nt, Human
guuuaagaaaaaauaacacacau

SEQ ID NO: 2127398 - RNA, 12 nt, Human
guuuaacauaaa

SEQ ID NO: 2127399 - RNA, 13 nt, Human
guuuaacauaaag

SEQ ID NO: 2127400 - RNA, 15 nt, Human
guuuaacauaaaggu

SEQ ID NO: 2127401 - RNA, 22 nt, Human
guuuaacggcacuguggccuug

SEQ ID NO: 2127402 - RNA, 19 nt, Human
guuuaaaagacacacuugu

SEQ ID NO: 2127403 - RNA, 23 nt, Human
guuuaaaagacacacuuguccac

SEQ ID NO: 2127404 - RNA, 12 nt, Human
guuuaaacugau

SEQ ID NO: 2127405 - RNA, 16 nt, Human
guuuaaacugauucau

SEQ ID NO: 2127406 - RNA, 21 nt, Human
guuuaaacugauucauaauaa

SEQ ID NO: 2127407 - RNA, 13 nt, Human
guuuauuaacaaa

SEQ ID NO: 2127408 - RNA, 18 nt, Human
guuuauuaacaaauuaug

SEQ ID NO: 2127409 - RNA, 23 nt, Human
guuuauuaacaaauuauguuaca

SEQ ID NO: 2127410 - RNA, 18 nt, Human
guuuauuuuuauauagcu

SEQ ID NO: 2127411 - RNA, 15 nt, Human
aaggcuacucaccuu

SEQ ID NO: 2127412 - RNA, 20 nt, Human
guugcccagggauuuguccu

SEQ ID NO: 2127413 - RNA, 15 nt, Human
guugcccaggcaggu

SEQ ID NO: 2127414 - RNA, 21 nt, Human
guugcccaggcuggcgugcag

SEQ ID NO: 2127415 - RNA, 19 nt, Human
guugcccaggcaggucuug

SEQ ID NO: 2127416 - RNA, 18 nt, Human
guugcccaggcaggucuu

SEQ ID NO: 2127417 - RNA, 17 nt, Human
guugcccaggcaggucu

SEQ ID NO: 2127418 - RNA, 12 nt, Human
aaggccaccugc

SEQ ID NO: 2127419 - RNA, 14 nt, Human
aaggccaccugcag

SEQ ID NO: 2127420 - RNA, 19 nt, Human
aaggccaagaggcuguucc

SEQ ID NO: 2127421 - RNA, 17 nt, Human
aaggccagaguggccug

SEQ ID NO: 2127422 - RNA, 19 nt, Human
aaggccagaguggccuggc

SEQ ID NO: 2127423 - RNA, 20 nt, Human
aaggccagaguggccuggcc

SEQ ID NO: 2127424 - RNA, 21 nt, Human
aaggccagaguggccuggcca

SEQ ID NO: 2127425 - RNA, 22 nt, Human
aaggccagaguggccuggccag

SEQ ID NO: 2127426 - RNA, 23 nt, Human
aaggccagaguggccuggccagg

SEQ ID NO: 2127427 - RNA, 15 nt, Human
aaggcuauacuuguc

SEQ ID NO: 2127428 - RNA, 16 nt, Human
aaggcucagucucagg

SEQ ID NO: 2127429 - RNA, 17 nt, Human
aaggcucagucucagga

SEQ ID NO: 2127430 - RNA, 23 nt, Human
guugaugaucuuugcagacaggc

SEQ ID NO: 2127431 - RNA, 17 nt, Human
aaggauguaaacagugc

SEQ ID NO: 2127432 - RNA, 19 nt, Human
aaggauguaaacagugccu

SEQ ID NO: 2127433 - RNA, 20 nt, Human
aaggauguaaacagugccug

SEQ ID NO: 2127434 - RNA, 23 nt, Human
aaggauguaaacagugccugcug

SEQ ID NO: 2127435 - RNA, 15 nt, Human
aaggauguacauuuc

SEQ ID NO: 2127436 - RNA, 16 nt, Human
aaggauguacauuucc

SEQ ID NO: 2127437 - RNA, 23 nt, Human
aaggaugaaugaggucccaggca

SEQ ID NO: 2127438 - RNA, 15 nt, Human
aagcaagauuucaga

SEQ ID NO: 2127439 - RNA, 17 nt, Human
aagcaagagagauguuu

SEQ ID NO: 2127440 - RNA, 14 nt, Human
aagcaauaaaugaa

SEQ ID NO: 2127441 - RNA, 16 nt, Human
aagcaauaaaugaaug

SEQ ID NO: 2127442 - RNA, 15 nt, Human
aagcaagaaagaaac

SEQ ID NO: 2127443 - RNA, 15 nt, Human
aagcaagagagaugu

SEQ ID NO: 2127444 - RNA, 18 nt, Human
aagcaagagagauguuuu

SEQ ID NO: 2127445 - RNA, 11 nt, Human
aagcaaaggug

SEQ ID NO: 2127446 - RNA, 17 nt, Human
aagcaaaggugaagaga

SEQ ID NO: 2127447 - RNA, 22 nt, Human
aagcaaagacuuuccucuuagu

SEQ ID NO: 2127448 - RNA, 16 nt, Human
aagaugccaucugugu

SEQ ID NO: 2127449 - RNA, 24 nt, Human
aagaugcccacugaggaaugauga

SEQ ID NO: 2127450 - RNA, 22 nt, Human
aagaugcucagguacagagaag

SEQ ID NO: 2127451 - RNA, 15 nt, Human
aagaugcucuuuuaa

SEQ ID NO: 2127452 - RNA, 20 nt, Human
aagauguccuccuuguucua

SEQ ID NO: 2127453 - RNA, 21 nt, Human
aagaugcugaaacaggagaga

SEQ ID NO: 2127454 - RNA, 18 nt, Human
aagagguuuuaaaaaaau

SEQ ID NO: 2127455 - RNA, 23 nt, Human
gugguuucagcaauauuuaagga

SEQ ID NO: 2127456 - RNA, 23 nt, Human
gugguuuccaaggagcugagaau

SEQ ID NO: 2127457 - RNA, 13 nt, Human
aagaucuuucagg

SEQ ID NO: 2127458 - RNA, 19 nt, Human
aagagguucucgacuggag

SEQ ID NO: 2127459 - RNA, 13 nt, Human
aagauauuauuca

SEQ ID NO: 2127460 - RNA, 21 nt, Human
guguguaugacuaaagagaga

SEQ ID NO: 2127461 - RNA, 18 nt, Human
guguguaugggugugugu

SEQ ID NO: 2127462 - RNA, 20 nt, Human
guguguaugugcgugugugc

SEQ ID NO: 2127463 - RNA, 16 nt, Human
gugugucuccugcaug

SEQ ID NO: 2127464 - RNA, 19 nt, Human
gugugucuccugcaugcag

SEQ ID NO: 2127465 - RNA, 15 nt, Human
guguugaucccaaga

SEQ ID NO: 2127466 - RNA, 13 nt, Human
guguugcagaagg

SEQ ID NO: 2127467 - RNA, 18 nt, Human
guguugcgugucgugggu

SEQ ID NO: 2127468 - RNA, 20 nt, Human
guguugcccaggcuggucuc

SEQ ID NO: 2127469 - RNA, 21 nt, Human
guguuggcuaaugaagggaaa

SEQ ID NO: 2127470 - RNA, 21 nt, Human
guguuggcuugugaucuggga

SEQ ID NO: 2127471 - RNA, 22 nt, Human
guguuggcuugugaucugggaa

SEQ ID NO: 2127472 - RNA, 19 nt, Human
guguugucagcaucuucuc

SEQ ID NO: 2127473 - RNA, 18 nt, Human
gugucuuuuuucacuaca

SEQ ID NO: 2127474 - RNA, 17 nt, Human
gugugacuacuccccca

SEQ ID NO: 2127475 - RNA, 14 nt, Human
guguguagccaagg

SEQ ID NO: 2127476 - RNA, 16 nt, Human
gugugaggagcugcug

SEQ ID NO: 2127477 - RNA, 18 nt, Human
gugugaggagcugcuggc

SEQ ID NO: 2127478 - RNA, 19 nt, Human
gugugaggagcugcuggcu

SEQ ID NO: 2127479 - RNA, 16 nt, Human
aagcaauccuccugag

SEQ ID NO: 2127480 - RNA, 18 nt, Human
aagcaauccuccugagug

SEQ ID NO: 2127481 - RNA, 13 nt, Human
aagcaauugcugc

SEQ ID NO: 2127482 - RNA, 17 nt, Human
aagcaauugcugcaucu

SEQ ID NO: 2127483 - RNA, 12 nt, Human
gugucuuccaua

SEQ ID NO: 2127484 - RNA, 13 nt, Human
gugucuuccauaa

SEQ ID NO: 2127485 - RNA, 15 nt, Human
gugucuuccauaaug

SEQ ID NO: 2127486 - RNA, 18 nt, Human
gugucuugcaauggcagc

SEQ ID NO: 2127487 - RNA, 17 nt, Human
gugucuugcaauggcag

SEQ ID NO: 2127488 - RNA, 21 nt, Human
gugucuuucuuuggugccuuu

SEQ ID NO: 2127489 - RNA, 22 nt, Human
gugucuuucuuuggugccuuuc

SEQ ID NO: 2127490 - RNA, 15 nt, Human
aagagcaagucugga

SEQ ID NO: 2127491 - RNA, 18 nt, Human
aagacuguggcugcuagc

SEQ ID NO: 2127492 - RNA, 20 nt, Human
aagagccuugguguccaccu

SEQ ID NO: 2127493 - RNA, 21 nt, Human
aagagccuugguguccaccug

SEQ ID NO: 2127494 - RNA, 22 nt, Human
aagagccuugguguccaccugg

SEQ ID NO: 2127495 - RNA, 17 nt, Human
aagagcuuuacaaaaag

SEQ ID NO: 2127496 - RNA, 18 nt, Human
aagagcuuuacaaaaaga

SEQ ID NO: 2127497 - RNA, 15 nt, Human
aagaggaacugggcc

SEQ ID NO: 2127498 - RNA, 16 nt, Human
aagaggaacugggccu

SEQ ID NO: 2127499 - RNA, 19 nt, Human
guggcccgacagccuggca

SEQ ID NO: 2127500 - RNA, 18 nt, Human
guggcccgacagccuggc

SEQ ID NO: 2127501 - RNA, 16 nt, Human
aagacuaucuaaaugu

SEQ ID NO: 2127502 - RNA, 17 nt, Human
aagacuaucuaaauguu

SEQ ID NO: 2127503 - RNA, 20 nt, Human
aagacccuuuuggguuucug

SEQ ID NO: 2127504 - RNA, 17 nt, Human
aagacccuuuuggguuu

SEQ ID NO: 2127505 - RNA, 18 nt, Human
aagaccggaagcuccugg

SEQ ID NO: 2127506 - RNA, 19 nt, Human
aagaccggaagcuccuggu

SEQ ID NO: 2127507 - RNA, 17 nt, Human
aagacuguacaaaguag

SEQ ID NO: 2127508 - RNA, 12 nt, Human
aagacuguggcu

SEQ ID NO: 2127509 - RNA, 15 nt, Human
aagacuguggcugcu

SEQ ID NO: 2127510 - RNA, 18 nt, Human
aagacuaucuaaauguug

SEQ ID NO: 2127511 - RNA, 20 nt, Human
aagaccuucuccccauucug

SEQ ID NO: 2127512 - RNA, 21 nt, Human
aagaccuucuccaaaugagau

SEQ ID NO: 2127513 - RNA, 17 nt, Human
guggggugaggaccacu

SEQ ID NO: 2127514 - RNA, 22 nt, Human
guggguaagacuaaaucuguaa

SEQ ID NO: 2127515 - RNA, 15 nt, Human
guggguacagagagg

SEQ ID NO: 2127516 - RNA, 15 nt, Human
gugggagucaucuca

SEQ ID NO: 2127517 - RNA, 17 nt, Human
gugggauaucccuaugc

SEQ ID NO: 2127518 - RNA, 14 nt, Human
gugggggcagaggg

SEQ ID NO: 2127519 - RNA, 17 nt, Human
gugggggcagagggcag

SEQ ID NO: 2127520 - RNA, 18 nt, Human
gugggggcagagggcaga

SEQ ID NO: 2127521 - RNA, 20 nt, Human
gugggggaucacagccucug

SEQ ID NO: 2127522 - RNA, 22 nt, Human
gugggggcagagggcagaggcu

SEQ ID NO: 2127523 - RNA, 12 nt, Human
gugguggcucug

SEQ ID NO: 2127524 - RNA, 15 nt, Human
gugguggcucugaga

SEQ ID NO: 2127525 - RNA, 18 nt, Human
guggugggacagggaccc

SEQ ID NO: 2127526 - RNA, 13 nt, Human
gugggucuucagg

SEQ ID NO: 2127527 - RNA, 19 nt, Human
guggguggaaccaggaacc

SEQ ID NO: 2127528 - RNA, 17 nt, Human
gugggucuucagggggc

SEQ ID NO: 2127529 - RNA, 21 nt, Human
gugggucuucagggggccagg

SEQ ID NO: 2127530 - RNA, 13 nt, Human
gugggugaaagaa

SEQ ID NO: 2127531 - RNA, 18 nt, Human
gugggugaaagaaaucau

SEQ ID NO: 2127532 - RNA, 20 nt, Human
gugggugaaagaaaucaugu

SEQ ID NO: 2127533 - RNA, 21 nt, Human
gugggugaaagaaaucauguu

SEQ ID NO: 2127534 - RNA, 23 nt, Human
gugggaggaucucuugagccugg

SEQ ID NO: 2127535 - RNA, 14 nt, Human
gugggacuguacac

SEQ ID NO: 2127536 - RNA, 15 nt, Human
gugggacuguacaca

SEQ ID NO: 2127537 - RNA, 22 nt, Human
gugggacuguacacacuuuauu

SEQ ID NO: 2127538 - RNA, 13 nt, Human
guggcccuggccu

SEQ ID NO: 2127539 - RNA, 16 nt, Human
guggcccuggccugcu

SEQ ID NO: 2127540 - RNA, 17 nt, Human
guggcccuggccugcug

SEQ ID NO: 2127541 - RNA, 18 nt, Human
guggcccuggccugcugg

SEQ ID NO: 2127542 - RNA, 19 nt, Human
guggcccuggccugcuggg

SEQ ID NO: 2127543 - RNA, 21 nt, Human
guggcuaaaggucccaaggca

SEQ ID NO: 2127544 - RNA, 23 nt, Human
guggcuaaaggucccaaggcaag

SEQ ID NO: 2127545 - RNA, 13 nt, Human
guggcggugccug

SEQ ID NO: 2127546 - RNA, 14 nt, Human
guggcggugccugg

SEQ ID NO: 2127547 - RNA, 17 nt, Human
guggcggugccugggug

SEQ ID NO: 2127548 - RNA, 15 nt, Human
gugggacagagucug

SEQ ID NO: 2127549 - RNA, 19 nt, Human
guggaaguaguggagcccc

SEQ ID NO: 2127550 - RNA, 20 nt, Human
gugcugggauuacaggugug

SEQ ID NO: 2127551 - RNA, 22 nt, Human
gugcugggauuacaagcgugag

SEQ ID NO: 2127552 - RNA, 21 nt, Human
gugcugggauuacaagcguga

SEQ ID NO: 2127553 - RNA, 15 nt, Human
gugcugggagggaua

SEQ ID NO: 2127554 - RNA, 18 nt, Human
gugcuggcugcccagacc

SEQ ID NO: 2127555 - RNA, 15 nt, Human
gugcuggcugcccag

SEQ ID NO: 2127556 - RNA, 12 nt, Human
gugcuauguucu

SEQ ID NO: 2127557 - RNA, 19 nt, Human
gugcuauggauggcuucua

SEQ ID NO: 2127558 - RNA, 13 nt, Human
gugcuaugaauuu

SEQ ID NO: 2127559 - RNA, 21 nt, Human
guggaugccugguggcagcug

SEQ ID NO: 2127560 - RNA, 22 nt, Human
guggacccagggaugacauguc

SEQ ID NO: 2127561 - RNA, 13 nt, Human
guggaccaggaca

SEQ ID NO: 2127562 - RNA, 14 nt, Human
guggaccaggacag

SEQ ID NO: 2127563 - RNA, 18 nt, Human
guggaccaggacaggacc

SEQ ID NO: 2127564 - RNA, 16 nt, Human
guggacaguccuggga

SEQ ID NO: 2127565 - RNA, 14 nt, Human
guggacaguccugg

SEQ ID NO: 2127566 - RNA, 15 nt, Human
guggacaguccuggg

SEQ ID NO: 2127567 - RNA, 22 nt, Human
guggacacagcucuucuccagg

SEQ ID NO: 2127568 - RNA, 18 nt, Human
guggacacagcucuucuc

SEQ ID NO: 2127569 - RNA, 23 nt, Human
guggacacagcucuucuccaggc

SEQ ID NO: 2127570 - RNA, 13 nt, Human
guggacaguccug

SEQ ID NO: 2127571 - RNA, 13 nt, Human
guggaauauaaag

SEQ ID NO: 2127572 - RNA, 18 nt, Human
guggaauauaaggaaagc

SEQ ID NO: 2127573 - RNA, 19 nt, Human
guggcaccagcagccugga

SEQ ID NO: 2127574 - RNA, 18 nt, Human
guggcaccagcagccugg

SEQ ID NO: 2127575 - RNA, 12 nt, Human
guggcagcccug

SEQ ID NO: 2127576 - RNA, 13 nt, Human
guggcagcccugu

SEQ ID NO: 2127577 - RNA, 15 nt, Human
aagaaucccuguuca

SEQ ID NO: 2127578 - RNA, 21 nt, Human
aagaaucccuguucauuguaa

SEQ ID NO: 2127579 - RNA, 23 nt, Human
aagaaucgaugggggaugcuuca

SEQ ID NO: 2127580 - RNA, 14 nt, Human
guggcagcccugua

SEQ ID NO: 2127581 - RNA, 22 nt, Human
aagaaucauuauuuauuaaauu

SEQ ID NO: 2127582 - RNA, 22 nt, Human
aagaaucauuguaaacauuagu

SEQ ID NO: 2127583 - RNA, 23 nt, Human
aagaaucauuguaaacauuaguu

SEQ ID NO: 2127584 - RNA, 15 nt, Human
aagaaugcugguuuu

SEQ ID NO: 2127585 - RNA, 18 nt, Human
aagaaugcugguuuuccu

SEQ ID NO: 2127586 - RNA, 19 nt, Human
aagaaugcugguuuuccua

SEQ ID NO: 2127587 - RNA, 15 nt, Human
aagaaugucagaaaa

SEQ ID NO: 2127588 - RNA, 23 nt, Human
aagaaugucagaaaaacaauaag

SEQ ID NO: 2127589 - RNA, 17 nt, Human
aagaaugucgauuaaaa

SEQ ID NO: 2127590 - RNA, 18 nt, Human
aagaaugucgauuaaaau

SEQ ID NO: 2127591 - RNA, 16 nt, Human
aagaauugaagcagga

SEQ ID NO: 2127592 - RNA, 22 nt, Human
aagaaugcugguuuuccuaaau

SEQ ID NO: 2127593 - RNA, 12 nt, Human
aagacaacauua

SEQ ID NO: 2127594 - RNA, 16 nt, Human
aagacaaauucuguuu

SEQ ID NO: 2127595 - RNA, 18 nt, Human
aagacaaauucuguuucu

SEQ ID NO: 2127596 - RNA, 13 nt, Human
aagacccugucuc

SEQ ID NO: 2127597 - RNA, 14 nt, Human
aagacaaaaauacu

SEQ ID NO: 2127598 - RNA, 15 nt, Human
aagacaaaaauacuc

SEQ ID NO: 2127599 - RNA, 16 nt, Human
aagacaaaaauacucu

SEQ ID NO: 2127600 - RNA, 18 nt, Human
aagacaaaaauacucuaa

SEQ ID NO: 2127601 - RNA, 21 nt, Human
aagacaaaaauacucuaauuc

SEQ ID NO: 2127602 - RNA, 22 nt, Human
aagacaaaaauacucuaauucu

SEQ ID NO: 2127603 - RNA, 15 nt, Human
aagaauuucaauuug

SEQ ID NO: 2127604 - RNA, 19 nt, Human
aagaauugaacccaggagg

SEQ ID NO: 2127605 - RNA, 20 nt, Human
aagaauugaacccaggaggu

SEQ ID NO: 2127606 - RNA, 13 nt, Human
gugccucugccug

SEQ ID NO: 2127607 - RNA, 12 nt, Human
gugccucuggga

SEQ ID NO: 2127608 - RNA, 13 nt, Human
gugccucugggac

SEQ ID NO: 2127609 - RNA, 15 nt, Human
gugccucugccuguc

SEQ ID NO: 2127610 - RNA, 22 nt, Human
gugccguuacucuccaaccugg

SEQ ID NO: 2127611 - RNA, 15 nt, Human
gugccguuacucucc

SEQ ID NO: 2127612 - RNA, 18 nt, Human
gugccguuacucuccaac

SEQ ID NO: 2127613 - RNA, 21 nt, Human
gugccguuacucuccaaccug

SEQ ID NO: 2127614 - RNA, 18 nt, Human
gugccuauagucccagcu

SEQ ID NO: 2127615 - RNA, 21 nt, Human
gugaaccaccacacccagccc

SEQ ID NO: 2127616 - RNA, 14 nt, Human
aagaaaaaaauaau

SEQ ID NO: 2127617 - RNA, 20 nt, Human
aagaaaaaaauaauuuuaug

SEQ ID NO: 2127618 - RNA, 23 nt, Human
aagaaaaaaauaauuuuaugaac

SEQ ID NO: 2127619 - RNA, 24 nt, Human
aagaaaaaaauaauuuuaugaacu

SEQ ID NO: 2127620 - RNA, 16 nt, Human
aagaaaaaaaauaaca

SEQ ID NO: 2127621 - RNA, 18 nt, Human
aagaaaaaaaauaacaca

SEQ ID NO: 2127622 - RNA, 20 nt, Human
aagaaaaaaaauaacacaga

SEQ ID NO: 2127623 - RNA, 12 nt, Human
aacuuuaauaug

SEQ ID NO: 2127624 - RNA, 14 nt, Human
aacuuuaauaugua

SEQ ID NO: 2127625 - RNA, 15 nt, Human
aacuuuaauauguau

SEQ ID NO: 2127626 - RNA, 16 nt, Human
aacuuuaauauguauu

SEQ ID NO: 2127627 - RNA, 19 nt, Human
aacuuuaauauguauuuua

SEQ ID NO: 2127628 - RNA, 12 nt, Human
aacuugucuuaa

SEQ ID NO: 2127629 - RNA, 13 nt, Human
aacuugucuuaaa

SEQ ID NO: 2127630 - RNA, 17 nt, Human
aacuugucuuaaauaaa

SEQ ID NO: 2127631 - RNA, 19 nt, Human
aacuuggggaacaagggug

SEQ ID NO: 2127632 - RNA, 12 nt, Human
aacuugggaacu

SEQ ID NO: 2127633 - RNA, 13 nt, Human
aacuuggggaaca

SEQ ID NO: 2127634 - RNA, 21 nt, Human
gugccucuggaggccucuggg

SEQ ID NO: 2127635 - RNA, 22 nt, Human
gugccucuggaggccucugggc

SEQ ID NO: 2127636 - RNA, 13 nt, Human
aagaauacagaaa

SEQ ID NO: 2127637 - RNA, 16 nt, Human
aagaaguguccgagaa

SEQ ID NO: 2127638 - RNA, 18 nt, Human
aagaaguguccgagaacu

SEQ ID NO: 2127639 - RNA, 19 nt, Human
aagaaguguccgagaacua

SEQ ID NO: 2127640 - RNA, 18 nt, Human
aagaauacaaacauauuu

SEQ ID NO: 2127641 - RNA, 22 nt, Human
aagaauacaaacauauuuguua

SEQ ID NO: 2127642 - RNA, 14 nt, Human
aagaauacagaaag

SEQ ID NO: 2127643 - RNA, 19 nt, Human
aagaaggcagcagguggca

SEQ ID NO: 2127644 - RNA, 19 nt, Human
aagaagugaccaaggagga

SEQ ID NO: 2127645 - RNA, 20 nt, Human
aagaagugaccaaggaggag

SEQ ID NO: 2127646 - RNA, 22 nt, Human
aagaagugaccaaggaggaguu

SEQ ID NO: 2127647 - RNA, 19 nt, Human
aagaaggaaaugaauuucu

SEQ ID NO: 2127648 - RNA, 20 nt, Human
aagaaggaaaugaauuucuc

SEQ ID NO: 2127649 - RNA, 16 nt, Human
aagaaggaagacuuua

SEQ ID NO: 2127650 - RNA, 11 nt, Human
aagaaggaagu

SEQ ID NO: 2127651 - RNA, 17 nt, Human
aagaaggaaaaggcagg

SEQ ID NO: 2127652 - RNA, 13 nt, Human
aagaaaucauguu

SEQ ID NO: 2127653 - RNA, 14 nt, Human
aagaaaucauguua

SEQ ID NO: 2127654 - RNA, 15 nt, Human
aagaaaucauguuau

SEQ ID NO: 2127655 - RNA, 21 nt, Human
aagaaaucauguuaugauaaa

SEQ ID NO: 2127656 - RNA, 12 nt, Human
aagaaaucaugu

SEQ ID NO: 2127657 - RNA, 15 nt, Human
aagaaagaaggaagu

SEQ ID NO: 2127658 - RNA, 13 nt, Human
aagaaagaaggaa

SEQ ID NO: 2127659 - RNA, 14 nt, Human
aagaaagaaggaag

SEQ ID NO: 2127660 - RNA, 20 nt, Human
aagaaagacuaucuaaaugu

SEQ ID NO: 2127661 - RNA, 22 nt, Human
aagaaagacuaucuaaauguug

SEQ ID NO: 2127662 - RNA, 16 nt, Human
aagaaacucaccccca

SEQ ID NO: 2127663 - RNA, 14 nt, Human
aacuugguuauaca

SEQ ID NO: 2127664 - RNA, 15 nt, Human
aagaaaaaagaaugu

SEQ ID NO: 2127665 - RNA, 15 nt, Human
uacacauuuuucaga

SEQ ID NO: 2127666 - RNA, 17 nt, Human
uacacauuuuucagaua

SEQ ID NO: 2127667 - RNA, 15 nt, Human
aauggaggaauauga

SEQ ID NO: 2127668 - RNA, 21 nt, Human
uacacauuuuucagauauaaa

SEQ ID NO: 2127669 - RNA, 19 nt, Human
uacacauuuuucagauaua

SEQ ID NO: 2127670 - RNA, 19 nt, Human
uacaccauguuugagcuca

SEQ ID NO: 2127671 - RNA, 20 nt, Human
uacaccagagauaauaugag

SEQ ID NO: 2127672 - RNA, 19 nt, Human
uacaccagagauaauauga

SEQ ID NO: 2127673 - RNA, 15 nt, Human
uacaggccucacaca

SEQ ID NO: 2127674 - RNA, 18 nt, Human
uacagaggccaugggccu

SEQ ID NO: 2127675 - RNA, 15 nt, Human
uacaggcauagaguu

SEQ ID NO: 2127676 - RNA, 17 nt, Human
uacacuccagccugagc

SEQ ID NO: 2127677 - RNA, 18 nt, Human
uacacuccagccugagca

SEQ ID NO: 2127678 - RNA, 15 nt, Human
uacacuccagccuga

SEQ ID NO: 2127679 - RNA, 16 nt, Human
uacacuccagccugag

SEQ ID NO: 2127680 - RNA, 24 nt, Human
uacaccauguuugagcucagaccc

SEQ ID NO: 2127681 - RNA, 19 nt, Human
uacaccauuaucuuggaaa

SEQ ID NO: 2127682 - RNA, 20 nt, Human
uacacuaaggguguaaguaa

SEQ ID NO: 2127683 - RNA, 14 nt, Human
aaugugacucaaga

SEQ ID NO: 2127684 - RNA, 14 nt, Human
aauguggcuccugg

SEQ ID NO: 2127685 - RNA, 21 nt, Human
aaugugggaagaaacaaaccc

SEQ ID NO: 2127686 - RNA, 18 nt, Human
aaugugggagcagcgguu

SEQ ID NO: 2127687 - RNA, 14 nt, Human
aauguacugcauau

SEQ ID NO: 2127688 - RNA, 18 nt, Human
aauguacugcauaugaaa

SEQ ID NO: 2127689 - RNA, 16 nt, Human
aauguauucuaucucu

SEQ ID NO: 2127690 - RNA, 21 nt, Human
aauguauucuaucucucuuua

SEQ ID NO: 2127691 - RNA, 18 nt, Human
aauguauugaacuuggaa

SEQ ID NO: 2127692 - RNA, 19 nt, Human
aauguauugaacuuggaaa

SEQ ID NO: 2127693 - RNA, 22 nt, Human
aauguauuauucugcagcauga

SEQ ID NO: 2127694 - RNA, 13 nt, Human
aauguauucaaau

SEQ ID NO: 2127695 - RNA, 18 nt, Human
aauguauuauucugcagc

SEQ ID NO: 2127696 - RNA, 12 nt, Human
aauguaugugua

SEQ ID NO: 2127697 - RNA, 14 nt, Human
aauguauguguaag

SEQ ID NO: 2127698 - RNA, 15 nt, Human
uacaguaucucaggg

SEQ ID NO: 2127699 - RNA, 16 nt, Human
uacaguagugagaaga

SEQ ID NO: 2127700 - RNA, 18 nt, Human
uacaguagugagaagaau

SEQ ID NO: 2127701 - RNA, 20 nt, Human
uacaguagugagaagaauau

SEQ ID NO: 2127702 - RNA, 21 nt, Human
uacaguagugagaagaauauu

SEQ ID NO: 2127703 - RNA, 15 nt, Human
uacaguacaggcagc

SEQ ID NO: 2127704 - RNA, 23 nt, Human
uacauauuaggaaaauauggguu

SEQ ID NO: 2127705 - RNA, 15 nt, Human
uacauauucuuuaaa

SEQ ID NO: 2127706 - RNA, 17 nt, Human
uacauauuugagacuag

SEQ ID NO: 2127707 - RNA, 19 nt, Human
uacauauuugcauauguau

SEQ ID NO: 2127708 - RNA, 12 nt, Human
aauguacugcau

SEQ ID NO: 2127709 - RNA, 21 nt, Human
uacauauuugcauauguauga

SEQ ID NO: 2127710 - RNA, 18 nt, Human
uacauauuaggaaaauau

SEQ ID NO: 2127711 - RNA, 19 nt, Human
uacauauuaggaaaauaug

SEQ ID NO: 2127712 - RNA, 14 nt, Human
uacauauucuuuaa

SEQ ID NO: 2127713 - RNA, 15 nt, Human
uacauaggcagcacu

SEQ ID NO: 2127714 - RNA, 17 nt, Human
uacauaguguaggcuuu

SEQ ID NO: 2127715 - RNA, 22 nt, Human
uacauaguguaggcuuuacuua

SEQ ID NO: 2127716 - RNA, 23 nt, Human
uacauaguguaggcuuuacuuag

SEQ ID NO: 2127717 - RNA, 20 nt, Human
uacaaguagggguugugggu

SEQ ID NO: 2127718 - RNA, 17 nt, Human
uacaaguauucugccuu

SEQ ID NO: 2127719 - RNA, 13 nt, Human
aaugcauaaaaug

SEQ ID NO: 2127720 - RNA, 17 nt, Human
aaugcagugaauuguga

SEQ ID NO: 2127721 - RNA, 14 nt, Human
uacaaggcaacaua

SEQ ID NO: 2127722 - RNA, 18 nt, Human
uacaagggucuagggaga

SEQ ID NO: 2127723 - RNA, 13 nt, Human
uacaaaagaugua

SEQ ID NO: 2127724 - RNA, 18 nt, Human
uacaaaauaaaguuacau

SEQ ID NO: 2127725 - RNA, 19 nt, Human
uacaaaauaaaguuacauu

SEQ ID NO: 2127726 - RNA, 20 nt, Human
uacaaaauaaaguuacauug

SEQ ID NO: 2127727 - RNA, 19 nt, Human
uacaaaauuugaaauuuag

SEQ ID NO: 2127728 - RNA, 16 nt, Human
aaugcauaaaauguua

SEQ ID NO: 2127729 - RNA, 18 nt, Human
aaugcauauccugagcca

SEQ ID NO: 2127730 - RNA, 23 nt, Human
aaugccaacuuguccuuuuguac

SEQ ID NO: 2127731 - RNA, 13 nt, Human
aaugccaaucucu

SEQ ID NO: 2127732 - RNA, 15 nt, Human
aauggaagauuugcc

SEQ ID NO: 2127733 - RNA, 21 nt, Human
aauggaagauuugcccauuua

SEQ ID NO: 2127734 - RNA, 23 nt, Human
aauggaagauuugcccauuuaca

SEQ ID NO: 2127735 - RNA, 18 nt, Human
aauggaagguuuguauau

SEQ ID NO: 2127736 - RNA, 20 nt, Human
aauggaagguuuguauauug

SEQ ID NO: 2127737 - RNA, 14 nt, Human
aauggaaaaugauu

SEQ ID NO: 2127738 - RNA, 19 nt, Human
aauggaaaacagacucagg

SEQ ID NO: 2127739 - RNA, 18 nt, Human
aauggacaaaauccauga

SEQ ID NO: 2127740 - RNA, 15 nt, Human
uaauuauuguuuaua

SEQ ID NO: 2127741 - RNA, 22 nt, Human
uaauuauuguuuauauuuucaa

SEQ ID NO: 2127742 - RNA, 22 nt, Human
aaugagcucgcauuugucaaug

SEQ ID NO: 2127743 - RNA, 14 nt, Human
uaauuauuuuaauu

SEQ ID NO: 2127744 - RNA, 15 nt, Human
uaauuauuuuaauua

SEQ ID NO: 2127745 - RNA, 18 nt, Human
uaauuauuuuaauuaggu

SEQ ID NO: 2127746 - RNA, 20 nt, Human
uaauuauuuuaauuagguua

SEQ ID NO: 2127747 - RNA, 15 nt, Human
uaauucauguuucuu

SEQ ID NO: 2127748 - RNA, 16 nt, Human
uaauucccauuuugca

SEQ ID NO: 2127749 - RNA, 16 nt, Human
uaauuccauaugcugu

SEQ ID NO: 2127750 - RNA, 21 nt, Human
uaauuguuuuuuaucuuuucu

SEQ ID NO: 2127751 - RNA, 22 nt, Human
uaauuguuuuuuaucuuuucua

SEQ ID NO: 2127752 - RNA, 23 nt, Human
uaauuuaucuugucucugggcuu

SEQ ID NO: 2127753 - RNA, 14 nt, Human
uaauuuaugaguuu

SEQ ID NO: 2127754 - RNA, 18 nt, Human
uaauuuauaguuuauaca

SEQ ID NO: 2127755 - RNA, 19 nt, Human
uacaaaaccugauguuaaa

SEQ ID NO: 2127756 - RNA, 13 nt, Human
uacaaaaauuccu

SEQ ID NO: 2127757 - RNA, 16 nt, Human
uacaaaagaagaugaa

SEQ ID NO: 2127758 - RNA, 18 nt, Human
uacaaaagggacaugaaa

SEQ ID NO: 2127759 - RNA, 11 nt, Human
uacaaaauaaa

SEQ ID NO: 2127760 - RNA, 20 nt, Human
uacaaaaagcauaaaaauua

SEQ ID NO: 2127761 - RNA, 15 nt, Human
uacaaaaagcauaaa

SEQ ID NO: 2127762 - RNA, 12 nt, Human
uaauuuauuuau

SEQ ID NO: 2127763 - RNA, 14 nt, Human
uaauuuauuuauua

SEQ ID NO: 2127764 - RNA, 17 nt, Human
uaauuuauuuauuaaga

SEQ ID NO: 2127765 - RNA, 19 nt, Human
uaauuuauuuauuaagaug

SEQ ID NO: 2127766 - RNA, 18 nt, Human
uaauuuauuuauuaagau

SEQ ID NO: 2127767 - RNA, 20 nt, Human
uaauuuaugaguuuuugaua

SEQ ID NO: 2127768 - RNA, 20 nt, Human
uaauuuauuguuuuuccuug

SEQ ID NO: 2127769 - RNA, 21 nt, Human
uaauagcgucauaacuagaac

SEQ ID NO: 2127770 - RNA, 18 nt, Human
uaauaggaaaaacggaag

SEQ ID NO: 2127771 - RNA, 21 nt, Human
uaauagugcuuaaaaaucauu

SEQ ID NO: 2127772 - RNA, 23 nt, Human
uaaucaaauuuguaggguuucua

SEQ ID NO: 2127773 - RNA, 17 nt, Human
uaaucaacugaaagugu

SEQ ID NO: 2127774 - RNA, 18 nt, Human
uaaucaacugaaaguguu

SEQ ID NO: 2127775 - RNA, 20 nt, Human
aaucuucaguuuuaucuuua

SEQ ID NO: 2127776 - RNA, 22 nt, Human
aaucuucaguuuuaucuuuaau

SEQ ID NO: 2127777 - RNA, 17 nt, Human
uaaucauccaaugcuca

SEQ ID NO: 2127778 - RNA, 14 nt, Human
uaaugaaagacugu

SEQ ID NO: 2127779 - RNA, 17 nt, Human
uaaugaaagacuguaca

SEQ ID NO: 2127780 - RNA, 18 nt, Human
uaaugaaagacuguacaa

SEQ ID NO: 2127781 - RNA, 19 nt, Human
uaaugaaagacuguacaaa

SEQ ID NO: 2127782 - RNA, 15 nt, Human
uaaugacagagccag

SEQ ID NO: 2127783 - RNA, 22 nt, Human
uaaugaaagacuguacaaagua

SEQ ID NO: 2127784 - RNA, 23 nt, Human
uaaugaaagacuguacaaaguag

SEQ ID NO: 2127785 - RNA, 21 nt, Human
uaaugaauuuuuaugauauuc

SEQ ID NO: 2127786 - RNA, 16 nt, Human
uaaugaauuuuuauga

SEQ ID NO: 2127787 - RNA, 14 nt, Human
aaugacauguguca

SEQ ID NO: 2127788 - RNA, 21 nt, Human
aaugacaugugucaagcugcu

SEQ ID NO: 2127789 - RNA, 23 nt, Human
aaugacaugugucaagcugcuug

SEQ ID NO: 2127790 - RNA, 13 nt, Human
aaugacaucuuca

SEQ ID NO: 2127791 - RNA, 16 nt, Human
aaugacagagccagug

SEQ ID NO: 2127792 - RNA, 18 nt, Human
aaugacaucuucaaagcu

SEQ ID NO: 2127793 - RNA, 23 nt, Human
aaugaaaaugucagaaaccaguu

SEQ ID NO: 2127794 - RNA, 12 nt, Human
aaugaaaauguc

SEQ ID NO: 2127795 - RNA, 13 nt, Human
aaugaaaauguca

SEQ ID NO: 2127796 - RNA, 14 nt, Human
aaugaaaaugucag

SEQ ID NO: 2127797 - RNA, 20 nt, Human
aaugaaaaugucagaaacca

SEQ ID NO: 2127798 - RNA, 14 nt, Human
aaugaccaauauua

SEQ ID NO: 2127799 - RNA, 19 nt, Human
aaugagacccucguggccu

SEQ ID NO: 2127800 - RNA, 15 nt, Human
aaugagccuggcaag

SEQ ID NO: 2127801 - RNA, 16 nt, Human
uaaugaguuucuuuua

SEQ ID NO: 2127802 - RNA, 18 nt, Human
uaaugguguaaccugaga

SEQ ID NO: 2127803 - RNA, 15 nt, Human
uaaugguuugaauau

SEQ ID NO: 2127804 - RNA, 14 nt, Human
aaucuuguuuccaa

SEQ ID NO: 2127805 - RNA, 19 nt, Human
aaugaaaaauuuaagcauu

SEQ ID NO: 2127806 - RNA, 22 nt, Human
aaugaaaaauuuaagcauuguu

SEQ ID NO: 2127807 - RNA, 21 nt, Human
aaugaaaaauuuaagcauugu

SEQ ID NO: 2127808 - RNA, 17 nt, Human
uaauaaaaguacauguu

SEQ ID NO: 2127809 - RNA, 12 nt, Human
uaauaaaauauc

SEQ ID NO: 2127810 - RNA, 15 nt, Human
uaauaaaauaucauu

SEQ ID NO: 2127811 - RNA, 16 nt, Human
uaauaaaauaucauuc

SEQ ID NO: 2127812 - RNA, 17 nt, Human
uaauaaaauaucauuca

SEQ ID NO: 2127813 - RNA, 18 nt, Human
uaauaaaauaucauucag

SEQ ID NO: 2127814 - RNA, 13 nt, Human
uaauaaaacaucu

SEQ ID NO: 2127815 - RNA, 20 nt, Human
uaauaaaauaucauucagca

SEQ ID NO: 2127816 - RNA, 21 nt, Human
uaauaaaauaucauucagcaa

SEQ ID NO: 2127817 - RNA, 13 nt, Human
aaucauguuauga

SEQ ID NO: 2127818 - RNA, 22 nt, Human
aaucauguuaugauaaaaaauu

SEQ ID NO: 2127819 - RNA, 23 nt, Human
aaucauguuaugauaaaaaauuu

SEQ ID NO: 2127820 - RNA, 21 nt, Human
aaucauggcuaagcuuaaaaa

SEQ ID NO: 2127821 - RNA, 15 nt, Human
aaucaugguuuuucu

SEQ ID NO: 2127822 - RNA, 14 nt, Human
aaucauguacauuu

SEQ ID NO: 2127823 - RNA, 16 nt, Human
aaucauguacauuucu

SEQ ID NO: 2127824 - RNA, 19 nt, Human
aaucauguacauuucugaa

SEQ ID NO: 2127825 - RNA, 15 nt, Human
aaucauccaaugcuc

SEQ ID NO: 2127826 - RNA, 17 nt, Human
uaaguuauuucuuguuu

SEQ ID NO: 2127827 - RNA, 20 nt, Human
uaaguuauuucuuguuuguu

SEQ ID NO: 2127828 - RNA, 14 nt, Human
uaaguaucagaaag

SEQ ID NO: 2127829 - RNA, 14 nt, Human
uaaguauguuauuu

SEQ ID NO: 2127830 - RNA, 15 nt, Human
aaucagaucuuuauu

SEQ ID NO: 2127831 - RNA, 15 nt, Human
aaucagaucauuuca

SEQ ID NO: 2127832 - RNA, 14 nt, Human
aaucagaucauuuc

SEQ ID NO: 2127833 - RNA, 20 nt, Human
aaucagacccuaccccacca

SEQ ID NO: 2127834 - RNA, 14 nt, Human
aaucagauuuuccu

SEQ ID NO: 2127835 - RNA, 15 nt, Human
aaucagauuuuccug

SEQ ID NO: 2127836 - RNA, 18 nt, Human
aaucagauuuuccugugg

SEQ ID NO: 2127837 - RNA, 14 nt, Human
uaaguacuguguac

SEQ ID NO: 2127838 - RNA, 20 nt, Human
aaucuguccaaaggaggcug

SEQ ID NO: 2127839 - RNA, 21 nt, Human
aaucuguccaaaggaggcugg

SEQ ID NO: 2127840 - RNA, 15 nt, Human
aaucucaaauaacua

SEQ ID NO: 2127841 - RNA, 12 nt, Human
aaucuagaagaa

SEQ ID NO: 2127842 - RNA, 13 nt, Human
aaucuagaagaaa

SEQ ID NO: 2127843 - RNA, 14 nt, Human
aaucuagaagaaau

SEQ ID NO: 2127844 - RNA, 15 nt, Human
aaucuagaagaaaug

SEQ ID NO: 2127845 - RNA, 16 nt, Human
aaucuagaagaaauga

SEQ ID NO: 2127846 - RNA, 17 nt, Human
aaucuagaagaaaugaa

SEQ ID NO: 2127847 - RNA, 18 nt, Human
aaucuagaagaaaugaaa

SEQ ID NO: 2127848 - RNA, 19 nt, Human
aaucuagaagaaaugaaau

SEQ ID NO: 2127849 - RNA, 20 nt, Human
aaucuagaagaaaugaaauu

SEQ ID NO: 2127850 - RNA, 21 nt, Human
aaucuagaagaaaugaaauuu

SEQ ID NO: 2127851 - RNA, 22 nt, Human
aaucuagaagaaaugaaauuuu

SEQ ID NO: 2127852 - RNA, 14 nt, Human
aaucuaacaaugga

SEQ ID NO: 2127853 - RNA, 16 nt, Human
aaucuaacaauggaag

SEQ ID NO: 2127854 - RNA, 14 nt, Human
aauccuucuaaucu

SEQ ID NO: 2127855 - RNA, 12 nt, Human
aaucauugcuua

SEQ ID NO: 2127856 - RNA, 20 nt, Human
aaucauuguaaacauuaguu

SEQ ID NO: 2127857 - RNA, 16 nt, Human
aauccuagcugugugc

SEQ ID NO: 2127858 - RNA, 16 nt, Human
aauccuaacacauuau

SEQ ID NO: 2127859 - RNA, 17 nt, Human
aauccuaaguuaccuuu

SEQ ID NO: 2127860 - RNA, 16 nt, Human
aauccuaccaaccucu

SEQ ID NO: 2127861 - RNA, 18 nt, Human
aauccuaccaaccucuga

SEQ ID NO: 2127862 - RNA, 15 nt, Human
aauccucacugggug

SEQ ID NO: 2127863 - RNA, 16 nt, Human
aauccucacugggugg

SEQ ID NO: 2127864 - RNA, 20 nt, Human
aauccuguugaaaagccaug

SEQ ID NO: 2127865 - RNA, 22 nt, Human
aauccuguugaaaagccauguu

SEQ ID NO: 2127866 - RNA, 13 nt, Human
aauauuguacagu

SEQ ID NO: 2127867 - RNA, 14 nt, Human
aauauuguuccuaa

SEQ ID NO: 2127868 - RNA, 15 nt, Human
aauauuguuccuaag

SEQ ID NO: 2127869 - RNA, 18 nt, Human
aauauuguuccuaaguuc

SEQ ID NO: 2127870 - RNA, 20 nt, Human
aauauuguuccuaaguucuu

SEQ ID NO: 2127871 - RNA, 23 nt, Human
aauauuguuccuaaguucuuaga

SEQ ID NO: 2127872 - RNA, 24 nt, Human
aauauuguuccuaaguucuuagau

SEQ ID NO: 2127873 - RNA, 13 nt, Human
aauauuguuucua

SEQ ID NO: 2127874 - RNA, 19 nt, Human
aauauuuccuuaaacugug

SEQ ID NO: 2127875 - RNA, 20 nt, Human
aauauuuaaaauuuauugcu

SEQ ID NO: 2127876 - RNA, 19 nt, Human
aauauuuuaccacugcugu

SEQ ID NO: 2127877 - RNA, 21 nt, Human
aauauuuuaccacugcuguga

SEQ ID NO: 2127878 - RNA, 13 nt, Human
aauauuuuauuca

SEQ ID NO: 2127879 - RNA, 14 nt, Human
aauauuuuauucaa

SEQ ID NO: 2127880 - RNA, 15 nt, Human
aauauuuuauucaag

SEQ ID NO: 2127881 - RNA, 17 nt, Human
aauauuuuauucaaggu

SEQ ID NO: 2127882 - RNA, 20 nt, Human
aauauuuuauucaagguaaa

SEQ ID NO: 2127883 - RNA, 21 nt, Human
aauauuuccuuaaacugugug

SEQ ID NO: 2127884 - RNA, 13 nt, Human
aauauuuuaagca

SEQ ID NO: 2127885 - RNA, 14 nt, Human
aauauuuuaagcau

SEQ ID NO: 2127886 - RNA, 15 nt, Human
aauauuuuaagcauu

SEQ ID NO: 2127887 - RNA, 21 nt, Human
aauauuuuaagcauuacucuu

SEQ ID NO: 2127888 - RNA, 23 nt, Human
aauauuuuaagcauuacucuugu

SEQ ID NO: 2127889 - RNA, 21 nt, Human
aauauuuuccaugaaaaugca

SEQ ID NO: 2127890 - RNA, 14 nt, Human
aaucacuuccauag

SEQ ID NO: 2127891 - RNA, 18 nt, Human
aauaugauuaguaaagaa

SEQ ID NO: 2127892 - RNA, 19 nt, Human
aauaugauuaguaaagaaa

SEQ ID NO: 2127893 - RNA, 20 nt, Human
aauaugauuaguaaagaaau

SEQ ID NO: 2127894 - RNA, 22 nt, Human
aauaugauuaguaaagaaauga

SEQ ID NO: 2127895 - RNA, 19 nt, Human
aauaugacggaagaacaua

SEQ ID NO: 2127896 - RNA, 17 nt, Human
aauaugauauugcauau

SEQ ID NO: 2127897 - RNA, 18 nt, Human
aauauugauaugcuuaua

SEQ ID NO: 2127898 - RNA, 17 nt, Human
aauauugauaugcuuau

SEQ ID NO: 2127899 - RNA, 18 nt, Human
aauaugcacacagugcuu

SEQ ID NO: 2127900 - RNA, 16 nt, Human
aauaucugaaaaugua

SEQ ID NO: 2127901 - RNA, 17 nt, Human
aauaucugaaaauguau

SEQ ID NO: 2127902 - RNA, 18 nt, Human
aauaucugaaaauguaug

SEQ ID NO: 2127903 - RNA, 19 nt, Human
aauaucugaaaauguaugu

SEQ ID NO: 2127904 - RNA, 23 nt, Human
aauaucgaucagaugacuagaaa

SEQ ID NO: 2127905 - RNA, 20 nt, Human
aauaucugaaaauguaugug

SEQ ID NO: 2127906 - RNA, 13 nt, Human
aauaucugcugua

SEQ ID NO: 2127907 - RNA, 14 nt, Human
aauaucugcuguau

SEQ ID NO: 2127908 - RNA, 16 nt, Human
aauaucugcuguaugu

SEQ ID NO: 2127909 - RNA, 19 nt, Human
aauaugaacggugagcauu

SEQ ID NO: 2127910 - RNA, 18 nt, Human
aauaugaauacagggcau

SEQ ID NO: 2127911 - RNA, 16 nt, Human
aauaugacagcugucc

SEQ ID NO: 2127912 - RNA, 22 nt, Human
aauaugacagcugucccuguca

SEQ ID NO: 2127913 - RNA, 17 nt, Human
aauaugacggaagaaca

SEQ ID NO: 2127914 - RNA, 21 nt, Human
aauaugacggaagaacauaga

SEQ ID NO: 2127915 - RNA, 16 nt, Human
aauaugagaaucagau

SEQ ID NO: 2127916 - RNA, 21 nt, Human
uaagaaugcugguuuuccuaa

SEQ ID NO: 2127917 - RNA, 23 nt, Human
uaagaaugcugguuuuccuaaau

SEQ ID NO: 2127918 - RNA, 22 nt, Human
uaagaaugcugguuuuccuaaa

SEQ ID NO: 2127919 - RNA, 12 nt, Human
uaagaauguucu

SEQ ID NO: 2127920 - RNA, 16 nt, Human
uaagaccggaagcucc

SEQ ID NO: 2127921 - RNA, 23 nt, Human
uaagaccggaagcuccugguaug

SEQ ID NO: 2127922 - RNA, 19 nt, Human
uaagaccaccucaaauuua

SEQ ID NO: 2127923 - RNA, 22 nt, Human
uaagaccaccucaaauuuaaag

SEQ ID NO: 2127924 - RNA, 13 nt, Human
uaagaccagccug

SEQ ID NO: 2127925 - RNA, 14 nt, Human
uaagaccagccugg

SEQ ID NO: 2127926 - RNA, 15 nt, Human
uaagaaugcugguuu

SEQ ID NO: 2127927 - RNA, 21 nt, Human
uaagaaucauuguaaacauua

SEQ ID NO: 2127928 - RNA, 23 nt, Human
uaacuaaucuauuggguucauua

SEQ ID NO: 2127929 - RNA, 19 nt, Human
uaacuaaucuauuggguuc

SEQ ID NO: 2127930 - RNA, 22 nt, Human
uaacuaaucuauuggguucauu

SEQ ID NO: 2127931 - RNA, 14 nt, Human
uaacuaaauuaaca

SEQ ID NO: 2127932 - RNA, 16 nt, Human
uaacuaaauuaacauu

SEQ ID NO: 2127933 - RNA, 12 nt, Human
uaacuacugugu

SEQ ID NO: 2127934 - RNA, 14 nt, Human
uaacuacuguguuc

SEQ ID NO: 2127935 - RNA, 15 nt, Human
uaacuacuguguucc

SEQ ID NO: 2127936 - RNA, 16 nt, Human
uaacuacuguguuccu

SEQ ID NO: 2127937 - RNA, 17 nt, Human
uaacuacuguguuccug

SEQ ID NO: 2127938 - RNA, 12 nt, Human
aauauauguaug

SEQ ID NO: 2127939 - RNA, 13 nt, Human
aauauauguaugu

SEQ ID NO: 2127940 - RNA, 14 nt, Human
aauauauguaugua

SEQ ID NO: 2127941 - RNA, 19 nt, Human
aauauauguauguaaaaau

SEQ ID NO: 2127942 - RNA, 18 nt, Human
aauaguauuuaugaaaug

SEQ ID NO: 2127943 - RNA, 13 nt, Human
aauaguauuuaug

SEQ ID NO: 2127944 - RNA, 13 nt, Human
aauauauuauaau

SEQ ID NO: 2127945 - RNA, 16 nt, Human
aauauauuauaaucuu

SEQ ID NO: 2127946 - RNA, 23 nt, Human
aauauauguuuuaaauauagaau

SEQ ID NO: 2127947 - RNA, 13 nt, Human
aauaucauuuauu

SEQ ID NO: 2127948 - RNA, 13 nt, Human
aauaucauucagc

SEQ ID NO: 2127949 - RNA, 14 nt, Human
aauaucauucagca

SEQ ID NO: 2127950 - RNA, 15 nt, Human
aauaucauucagcaa

SEQ ID NO: 2127951 - RNA, 16 nt, Human
aauaucauucagcaac

SEQ ID NO: 2127952 - RNA, 23 nt, Human
aauaucauuuauuuuuuacauua

SEQ ID NO: 2127953 - RNA, 13 nt, Human
aauaucaaucauu

SEQ ID NO: 2127954 - RNA, 14 nt, Human
aauaucaaucauuu

SEQ ID NO: 2127955 - RNA, 16 nt, Human
aauaucaaucauuuuc

SEQ ID NO: 2127956 - RNA, 14 nt, Human
uaacuaaaagguau

SEQ ID NO: 2127957 - RNA, 12 nt, Human
uaaccuggugcu

SEQ ID NO: 2127958 - RNA, 15 nt, Human
uaaccuggugcugga

SEQ ID NO: 2127959 - RNA, 18 nt, Human
uaaccuggugcuggauau

SEQ ID NO: 2127960 - RNA, 19 nt, Human
uaaccuggugcuggauauu

SEQ ID NO: 2127961 - RNA, 22 nt, Human
uaaccuggugcuggauauuuuc

SEQ ID NO: 2127962 - RNA, 23 nt, Human
uaaccuggugcuggauauuuuca

SEQ ID NO: 2127963 - RNA, 19 nt, Human
uaaccuguacuucaaguua

SEQ ID NO: 2127964 - RNA, 15 nt, Human
uaacuaaaagguaug

SEQ ID NO: 2127965 - RNA, 11 nt, Human
uaaccuccuuu

SEQ ID NO: 2127966 - RNA, 17 nt, Human
uaaccucuuuucugcau

SEQ ID NO: 2127967 - RNA, 18 nt, Human
uaaccugagauggcccuc

SEQ ID NO: 2127968 - RNA, 22 nt, Human
uaaccugagauggcccucuggu

SEQ ID NO: 2127969 - RNA, 18 nt, Human
uaacauggaagggaagaa

SEQ ID NO: 2127970 - RNA, 19 nt, Human
uaacauaauuuguacauau

SEQ ID NO: 2127971 - RNA, 16 nt, Human
uaacauaauuuguaca

SEQ ID NO: 2127972 - RNA, 22 nt, Human
aauaguaaaagauaacaagauc

SEQ ID NO: 2127973 - RNA, 13 nt, Human
aauaguaauguuu

SEQ ID NO: 2127974 - RNA, 13 nt, Human
aauaggcaaaggg

SEQ ID NO: 2127975 - RNA, 21 nt, Human
aauagcuuuacccucaggcau

SEQ ID NO: 2127976 - RNA, 22 nt, Human
aauagcuauauccauguacugu

SEQ ID NO: 2127977 - RNA, 20 nt, Human
aauagcucccagauuucagu

SEQ ID NO: 2127978 - RNA, 23 nt, Human
aauagcuauauccauguacugua

SEQ ID NO: 2127979 - RNA, 15 nt, Human
aauagacaguauauu

SEQ ID NO: 2127980 - RNA, 20 nt, Human
aauagacaguauauuuauag

SEQ ID NO: 2127981 - RNA, 19 nt, Human
aauagaguugggacaauug

SEQ ID NO: 2127982 - RNA, 14 nt, Human
uaaauuuuuccuua

SEQ ID NO: 2127983 - RNA, 15 nt, Human
uaaauuaaauaaaau

SEQ ID NO: 2127984 - RNA, 16 nt, Human
uaaauuaaauaaaaua

SEQ ID NO: 2127985 - RNA, 13 nt, Human
uaaauuaaauaua

SEQ ID NO: 2127986 - RNA, 14 nt, Human
uaaauuaaauauau

SEQ ID NO: 2127987 - RNA, 21 nt, Human
uaaauuaaauauauguaugua

SEQ ID NO: 2127988 - RNA, 14 nt, Human
aauagcugggacua

SEQ ID NO: 2127989 - RNA, 13 nt, Human
aauagcugggacu

SEQ ID NO: 2127990 - RNA, 20 nt, Human
aauagccugccucuucucua

SEQ ID NO: 2127991 - RNA, 22 nt, Human
aauagccacuuaccuucaauaa

SEQ ID NO: 2127992 - RNA, 23 nt, Human
aauagccacugcauaccaaccug

SEQ ID NO: 2127993 - RNA, 20 nt, Human
aauagccacuuaccuucaau

SEQ ID NO: 2127994 - RNA, 16 nt, Human
aauagaugcugacugu

SEQ ID NO: 2127995 - RNA, 20 nt, Human
aauagcaugucacuaaagca

SEQ ID NO: 2127996 - RNA, 12 nt, Human
aauaacuuuuuu

SEQ ID NO: 2127997 - RNA, 21 nt, Human
aauaagagaagcuacuuuguu

SEQ ID NO: 2127998 - RNA, 13 nt, Human
aauaagagauuug

SEQ ID NO: 2127999 - RNA, 16 nt, Human
aauaagauacaucaca

SEQ ID NO: 2128000 - RNA, 14 nt, Human
aauaauucuuugau

SEQ ID NO: 2128001 - RNA, 15 nt, Human
aauaauucuuugauu

SEQ ID NO: 2128002 - RNA, 20 nt, Human
aauaauugauuucaagaccu

SEQ ID NO: 2128003 - RNA, 21 nt, Human
aauaauuuuaggcacccaucc

SEQ ID NO: 2128004 - RNA, 22 nt, Human
aauaauuucccaauuaggaagu

SEQ ID NO: 2128005 - RNA, 14 nt, Human
aauaauuuuaugaa

SEQ ID NO: 2128006 - RNA, 22 nt, Human
aauaauuuuaugaacugcaugu

SEQ ID NO: 2128007 - RNA, 23 nt, Human
aauaauuuuaugaacugcaugua

SEQ ID NO: 2128008 - RNA, 20 nt, Human
aauacaaaaauuagccgggc

SEQ ID NO: 2128009 - RNA, 22 nt, Human
aauaauuuuucacuucaaaaca

SEQ ID NO: 2128010 - RNA, 21 nt, Human
aauacaaaaaauuagccgggc

SEQ ID NO: 2128011 - RNA, 11 nt, Human
aauacaaacaa

SEQ ID NO: 2128012 - RNA, 21 nt, Human
aauacaaacauauuuguuaaa

SEQ ID NO: 2128013 - RNA, 17 nt, Human
aauacaaacauauuugu

SEQ ID NO: 2128014 - RNA, 20 nt, Human
aauacaaacauauuuguuaa

SEQ ID NO: 2128015 - RNA, 18 nt, Human
aauacaacuuaaauaaua

SEQ ID NO: 2128016 - RNA, 12 nt, Human
uaaauaaauaca

SEQ ID NO: 2128017 - RNA, 22 nt, Human
uaaauaccucaaccuaugguau

SEQ ID NO: 2128018 - RNA, 13 nt, Human
uaaauaacuuuuu

SEQ ID NO: 2128019 - RNA, 11 nt, Human
uaaauaagaga

SEQ ID NO: 2128020 - RNA, 13 nt, Human
uaaauaagagauu

SEQ ID NO: 2128021 - RNA, 15 nt, Human
uaaauaagagauuug

SEQ ID NO: 2128022 - RNA, 18 nt, Human
uaaauagaguauaugcac

SEQ ID NO: 2128023 - RNA, 17 nt, Human
uaaauagaccauuaauc

SEQ ID NO: 2128024 - RNA, 16 nt, Human
uaaaucuguaagcucu

SEQ ID NO: 2128025 - RNA, 18 nt, Human
uaaaucuguaagcucuuu

SEQ ID NO: 2128026 - RNA, 17 nt, Human
uaaaucuguucaaggaa

SEQ ID NO: 2128027 - RNA, 16 nt, Human
uaaaucuccuauuuuu

SEQ ID NO: 2128028 - RNA, 17 nt, Human
uaaaucuccuauuuuuu

SEQ ID NO: 2128029 - RNA, 10 nt, Human
uaaaugcaua

SEQ ID NO: 2128030 - RNA, 22 nt, Human
uaaaugcagcgaaccaauauuu

SEQ ID NO: 2128031 - RNA, 20 nt, Human
uaaaugcauauccugagcca

SEQ ID NO: 2128032 - RNA, 21 nt, Human
uaaaugcauauccugagccau

SEQ ID NO: 2128033 - RNA, 14 nt, Human
uaaaugcaauaugu

SEQ ID NO: 2128034 - RNA, 15 nt, Human
uaaaugcaauaugua

SEQ ID NO: 2128035 - RNA, 18 nt, Human
uaaaugcaauauguauua

SEQ ID NO: 2128036 - RNA, 15 nt, Human
uaaauguugaaagau

SEQ ID NO: 2128037 - RNA, 20 nt, Human
uaaauguugaaagaucaaaa

SEQ ID NO: 2128038 - RNA, 12 nt, Human
uaaauuaaacaa

SEQ ID NO: 2128039 - RNA, 13 nt, Human
uaaauuaaacaau

SEQ ID NO: 2128040 - RNA, 14 nt, Human
uaaauuaaacaauu

SEQ ID NO: 2128041 - RNA, 15 nt, Human
uaaauuaaacaauuu

SEQ ID NO: 2128042 - RNA, 16 nt, Human
uaaauuaaacaauuua

SEQ ID NO: 2128043 - RNA, 22 nt, Human
uaaauuaaacaauuuauuuuau

SEQ ID NO: 2128044 - RNA, 15 nt, Human
aaguuuuguaaauuu

SEQ ID NO: 2128045 - RNA, 14 nt, Human
uaaaguauuccacc

SEQ ID NO: 2128046 - RNA, 15 nt, Human
uaaaguauuccaccu

SEQ ID NO: 2128047 - RNA, 20 nt, Human
uaaaguauuccaccuuaaau

SEQ ID NO: 2128048 - RNA, 21 nt, Human
uaaaguauuccaccuuaaauu

SEQ ID NO: 2128049 - RNA, 23 nt, Human
uaaaguauuccaccuuaaauuaa

SEQ ID NO: 2128050 - RNA, 11 nt, Human
aauaaaaaggc

SEQ ID NO: 2128051 - RNA, 13 nt, Human
aauaaaaaggcac

SEQ ID NO: 2128052 - RNA, 18 nt, Human
aauaaaaaggcaccuaua

SEQ ID NO: 2128053 - RNA, 19 nt, Human
aauaaaacauuuucacaca

SEQ ID NO: 2128054 - RNA, 17 nt, Human
aauaaaacauuuucaca

SEQ ID NO: 2128055 - RNA, 12 nt, Human
aauaaaaccuuu

SEQ ID NO: 2128056 - RNA, 13 nt, Human
aauaaaaccuuuc

SEQ ID NO: 2128057 - RNA, 14 nt, Human
aauaaaaccuuuca

SEQ ID NO: 2128058 - RNA, 19 nt, Human
uaaagguuauuuucuccug

SEQ ID NO: 2128059 - RNA, 20 nt, Human
uaaagguugacaauaaaugu

SEQ ID NO: 2128060 - RNA, 21 nt, Human
uaaaguagauuagaucuuuua

SEQ ID NO: 2128061 - RNA, 17 nt, Human
uaaaguauauauuuauu

SEQ ID NO: 2128062 - RNA, 19 nt, Human
uaaaguauauauagaaucu

SEQ ID NO: 2128063 - RNA, 14 nt, Human
uaaaguauauauuu

SEQ ID NO: 2128064 - RNA, 17 nt, Human
guuuucuuuugccauga

SEQ ID NO: 2128065 - RNA, 12 nt, Human
guuuucuuccuu

SEQ ID NO: 2128066 - RNA, 19 nt, Human
guuuucuuccuuguaaauu

SEQ ID NO: 2128067 - RNA, 17 nt, Human
guuuugaacuaauaaaa

SEQ ID NO: 2128068 - RNA, 22 nt, Human
guuuugaacuaauaaaagcaua

SEQ ID NO: 2128069 - RNA, 21 nt, Human
uaaagguggugaggcaauaaa

SEQ ID NO: 2128070 - RNA, 17 nt, Human
uaaaggugguaugugug

SEQ ID NO: 2128071 - RNA, 21 nt, Human
uaaaggugguaugugugugua

SEQ ID NO: 2128072 - RNA, 22 nt, Human
uaaaggugguauguguguguau

SEQ ID NO: 2128073 - RNA, 23 nt, Human
uaaaggugguauguguguguaug

SEQ ID NO: 2128074 - RNA, 20 nt, Human
uaaagguggugaggcaauaa

SEQ ID NO: 2128075 - RNA, 20 nt, Human
uaaaggugaaaaaagcuuuu

SEQ ID NO: 2128076 - RNA, 14 nt, Human
uaaaggggggaggg

SEQ ID NO: 2128077 - RNA, 15 nt, Human
uaaaggggggagggg

SEQ ID NO: 2128078 - RNA, 23 nt, Human
guuuugaacuaauaaaagcauaa

SEQ ID NO: 2128079 - RNA, 14 nt, Human
aauaaauguaccug

SEQ ID NO: 2128080 - RNA, 20 nt, Human
aauaaaugugaaauucuguc

SEQ ID NO: 2128081 - RNA, 20 nt, Human
aauaaauugcuccuugacau

SEQ ID NO: 2128082 - RNA, 16 nt, Human
aauaaauugcuccuug

SEQ ID NO: 2128083 - RNA, 20 nt, Human
aauaaauugcaugcugcuuu

SEQ ID NO: 2128084 - RNA, 21 nt, Human
aauaaauugcaugcugcuuua

SEQ ID NO: 2128085 - RNA, 21 nt, Human
aauaaauguaucuuauucaca

SEQ ID NO: 2128086 - RNA, 20 nt, Human
aauaaauguaucuuauucac

SEQ ID NO: 2128087 - RNA, 13 nt, Human
aauaaaugucauu

SEQ ID NO: 2128088 - RNA, 17 nt, Human
aauaaaugucauuaaaa

SEQ ID NO: 2128089 - RNA, 23 nt, Human
aauaaccaacccuucccugaaaa

SEQ ID NO: 2128090 - RNA, 19 nt, Human
aauaacucuguggcauuau

SEQ ID NO: 2128091 - RNA, 18 nt, Human
aauaaccucaaagugacu

SEQ ID NO: 2128092 - RNA, 22 nt, Human
aauaaccacuuaaaaaaugucc

SEQ ID NO: 2128093 - RNA, 16 nt, Human
aauaaccccaaaauga

SEQ ID NO: 2128094 - RNA, 17 nt, Human
aauaaccccaaaaugaa

SEQ ID NO: 2128095 - RNA, 22 nt, Human
aauaaccccauucuuugcuuga

SEQ ID NO: 2128096 - RNA, 14 nt, Human
aauaaccacuuaaa

SEQ ID NO: 2128097 - RNA, 21 nt, Human
aauaaccacuuaaaaaauguc

SEQ ID NO: 2128098 - RNA, 12 nt, Human
aauaacacacau

SEQ ID NO: 2128099 - RNA, 20 nt, Human
aauaacacacauauaaacau

SEQ ID NO: 2128100 - RNA, 23 nt, Human
aauaaaaccuuucaaauuucaca

SEQ ID NO: 2128101 - RNA, 11 nt, Human
aauaaaguauu

SEQ ID NO: 2128102 - RNA, 15 nt, Human
aauaaaguauuccac

SEQ ID NO: 2128103 - RNA, 19 nt, Human
aauaaaguauuccaccuua

SEQ ID NO: 2128104 - RNA, 20 nt, Human
aauaaaguauuccaccuuaa

SEQ ID NO: 2128105 - RNA, 14 nt, Human
aauaaaguaucuac

SEQ ID NO: 2128106 - RNA, 15 nt, Human
aauaaaguaucuaca

SEQ ID NO: 2128107 - RNA, 16 nt, Human
aauaaaguaucuacau

SEQ ID NO: 2128108 - RNA, 15 nt, Human
aauaaaaccuuucaa

SEQ ID NO: 2128109 - RNA, 16 nt, Human
aauaaaaccuuucaaa

SEQ ID NO: 2128110 - RNA, 21 nt, Human
aauaaaaccuuucaaauuuca

SEQ ID NO: 2128111 - RNA, 22 nt, Human
aauaaaaccuuucaaauuucac

SEQ ID NO: 2128112 - RNA, 16 nt, Human
aauaaaucauaaaacu

SEQ ID NO: 2128113 - RNA, 14 nt, Human
aauaaauauuuaug

SEQ ID NO: 2128114 - RNA, 15 nt, Human
aauaaaucauguuaa

SEQ ID NO: 2128115 - RNA, 20 nt, Human
aauaaaucugguagaaaaau

SEQ ID NO: 2128116 - RNA, 17 nt, Human
aauaaaugcaauaugua

SEQ ID NO: 2128117 - RNA, 19 nt, Human
aauaaaugcaauauguauu

SEQ ID NO: 2128118 - RNA, 19 nt, Human
aauaaaguucugaguguuu

SEQ ID NO: 2128119 - RNA, 13 nt, Human
aauaaaguguuuu

SEQ ID NO: 2128120 - RNA, 15 nt, Human
aauaaaguguuuuca

SEQ ID NO: 2128121 - RNA, 16 nt, Human
aauaaaguguuuucag

SEQ ID NO: 2128122 - RNA, 17 nt, Human
aauaaaguguuuucaga

SEQ ID NO: 2128123 - RNA, 18 nt, Human
aauaaaguguuuucagag

SEQ ID NO: 2128124 - RNA, 19 nt, Human
aauaaaguguuuucagagc

SEQ ID NO: 2128125 - RNA, 13 nt, Human
uacuuuuuccugg

SEQ ID NO: 2128126 - RNA, 23 nt, Human
uacuuuguugcaaguacugcugu

SEQ ID NO: 2128127 - RNA, 19 nt, Human
uacuuuguuuuuaaaugau

SEQ ID NO: 2128128 - RNA, 18 nt, Human
uacuuuuuucuuauuuaa

SEQ ID NO: 2128129 - RNA, 14 nt, Human
uacuuuuuucuuau

SEQ ID NO: 2128130 - RNA, 20 nt, Human
aauuugcacuuucaggaaca

SEQ ID NO: 2128131 - RNA, 13 nt, Human
aauuuguguaaua

SEQ ID NO: 2128132 - RNA, 16 nt, Human
aauuuguguaauaaag

SEQ ID NO: 2128133 - RNA, 17 nt, Human
aauuuguguaauaaagu

SEQ ID NO: 2128134 - RNA, 19 nt, Human
aauuuguguaauaaagugu

SEQ ID NO: 2128135 - RNA, 20 nt, Human
aauuuguguaauaaaguguu

SEQ ID NO: 2128136 - RNA, 22 nt, Human
aauuuguguaauaaaguguuuu

SEQ ID NO: 2128137 - RNA, 16 nt, Human
aauuuguuauaaugaa

SEQ ID NO: 2128138 - RNA, 22 nt, Human
aauuuguaaaaacagcauugcu

SEQ ID NO: 2128139 - RNA, 23 nt, Human
aauuuguaaaaacagcauugcuu

SEQ ID NO: 2128140 - RNA, 24 nt, Human
aauuuguaaaaacagcauugcuuu

SEQ ID NO: 2128141 - RNA, 17 nt, Human
aauuugguucuaggccg

SEQ ID NO: 2128142 - RNA, 22 nt, Human
aauuugguucuaauagaacuca

SEQ ID NO: 2128143 - RNA, 16 nt, Human
aauuugguucuaauag

SEQ ID NO: 2128144 - RNA, 16 nt, Human
aauuugccaaaauaau

SEQ ID NO: 2128145 - RNA, 18 nt, Human
aauuugccaaaauaaugu

SEQ ID NO: 2128146 - RNA, 20 nt, Human
aauuugccaaaauaaugucu

SEQ ID NO: 2128147 - RNA, 21 nt, Human
aauuugccaaaauaaugucuu

SEQ ID NO: 2128148 - RNA, 14 nt, Human
aauuuuuacagaau

SEQ ID NO: 2128149 - RNA, 16 nt, Human
aauuuuuacagaauug

SEQ ID NO: 2128150 - RNA, 13 nt, Human
aauuuuugaaaag

SEQ ID NO: 2128151 - RNA, 18 nt, Human
aauuuuuggauugacagu

SEQ ID NO: 2128152 - RNA, 19 nt, Human
aauuuuuggauugacagua

SEQ ID NO: 2128153 - RNA, 21 nt, Human
aauuuuuggauugacaguaac

SEQ ID NO: 2128154 - RNA, 22 nt, Human
aauuuuuggauugacaguaacu

SEQ ID NO: 2128155 - RNA, 23 nt, Human
aauuuuuggauugacaguaacuu

SEQ ID NO: 2128156 - RNA, 13 nt, Human
aauuuuuaauguu

SEQ ID NO: 2128157 - RNA, 13 nt, Human
aauuuuuaagcaa

SEQ ID NO: 2128158 - RNA, 20 nt, Human
aauuuuuaaauguaaaacau

SEQ ID NO: 2128159 - RNA, 22 nt, Human
aauuuuuaaaguauauauuuau

SEQ ID NO: 2128160 - RNA, 13 nt, Human
aauuuuuaaagua

SEQ ID NO: 2128161 - RNA, 19 nt, Human
aauuuuuaaaguauauauu

SEQ ID NO: 2128162 - RNA, 20 nt, Human
aauuuuuaaaguauauauuu

SEQ ID NO: 2128163 - RNA, 18 nt, Human
uagauccacacacagagg

SEQ ID NO: 2128164 - RNA, 22 nt, Human
uagaucgaugauaugaccagaa

SEQ ID NO: 2128165 - RNA, 15 nt, Human
uagaugcccugcuag

SEQ ID NO: 2128166 - RNA, 16 nt, Human
uagaugccugaacuug

SEQ ID NO: 2128167 - RNA, 12 nt, Human
acaaauaugcaa

SEQ ID NO: 2128168 - RNA, 21 nt, Human
acaaauagucggauuagaaau

SEQ ID NO: 2128169 - RNA, 19 nt, Human
acaaauaugcaaaagguuc

SEQ ID NO: 2128170 - RNA, 11 nt, Human
acaaauaugca

SEQ ID NO: 2128171 - RNA, 16 nt, Human
uagauccacacacaga

SEQ ID NO: 2128172 - RNA, 14 nt, Human
acaaaacuuuucua

SEQ ID NO: 2128173 - RNA, 18 nt, Human
acaaagcccuuccauguc

SEQ ID NO: 2128174 - RNA, 16 nt, Human
acaaagccagaagcug

SEQ ID NO: 2128175 - RNA, 20 nt, Human
acaaagccagaagcugagca

SEQ ID NO: 2128176 - RNA, 17 nt, Human
acaaagccaacagucaa

SEQ ID NO: 2128177 - RNA, 11 nt, Human
acaaagccaga

SEQ ID NO: 2128178 - RNA, 11 nt, Human
acaaaagaugu

SEQ ID NO: 2128179 - RNA, 21 nt, Human
acaaaagauguauccuuccaa

SEQ ID NO: 2128180 - RNA, 19 nt, Human
acaaagccaaacucugcca

SEQ ID NO: 2128181 - RNA, 14 nt, Human
acaaaguggaagga

SEQ ID NO: 2128182 - RNA, 15 nt, Human
acaaaguggaaggaa

SEQ ID NO: 2128183 - RNA, 16 nt, Human
acaaaguggaaggaaa

SEQ ID NO: 2128184 - RNA, 17 nt, Human
acaaaguggaaggaaag

SEQ ID NO: 2128185 - RNA, 18 nt, Human
acaaaguggaaggaaaga

SEQ ID NO: 2128186 - RNA, 19 nt, Human
acaaaguggaaggaaagau

SEQ ID NO: 2128187 - RNA, 23 nt, Human
acaaaguggaaggaaagaugcuc

SEQ ID NO: 2128188 - RNA, 14 nt, Human
acaaaguguauuca

SEQ ID NO: 2128189 - RNA, 23 nt, Human
acaaaguguauuuuauaaaauua

SEQ ID NO: 2128190 - RNA, 14 nt, Human
acaaagucuccagc

SEQ ID NO: 2128191 - RNA, 15 nt, Human
acaaagucuccagcc

SEQ ID NO: 2128192 - RNA, 18 nt, Human
acaaaggaauggaggcuc

SEQ ID NO: 2128193 - RNA, 11 nt, Human
acaaaggaaaa

SEQ ID NO: 2128194 - RNA, 13 nt, Human
acaaaggaaaaag

SEQ ID NO: 2128195 - RNA, 13 nt, Human
acaaagcugcuaa

SEQ ID NO: 2128196 - RNA, 16 nt, Human
acaaagcugcuaaauc

SEQ ID NO: 2128197 - RNA, 17 nt, Human
acaaagcugcuaaaucu

SEQ ID NO: 2128198 - RNA, 23 nt, Human
acaaagcugcuaaaucuccuauu

SEQ ID NO: 2128199 - RNA, 18 nt, Human
acaagauucccagagaca

SEQ ID NO: 2128200 - RNA, 21 nt, Human
acaagauucccagagacagga

SEQ ID NO: 2128201 - RNA, 14 nt, Human
acaagauucccaga

SEQ ID NO: 2128202 - RNA, 15 nt, Human
acaagaucuuucagg

SEQ ID NO: 2128203 - RNA, 16 nt, Human
acaagaucuuucagga

SEQ ID NO: 2128204 - RNA, 20 nt, Human
acaagaucuuucaggaaaga

SEQ ID NO: 2128205 - RNA, 15 nt, Human
acaagauucccagag

SEQ ID NO: 2128206 - RNA, 16 nt, Human
acaagauucccagaga

SEQ ID NO: 2128207 - RNA, 17 nt, Human
acaagauucccagagac

SEQ ID NO: 2128208 - RNA, 16 nt, Human
acaagccccaggcagg

SEQ ID NO: 2128209 - RNA, 17 nt, Human
acaagccccaggcaggc

SEQ ID NO: 2128210 - RNA, 17 nt, Human
acaagcgugagccacug

SEQ ID NO: 2128211 - RNA, 19 nt, Human
acaagccccaggcaggcug

SEQ ID NO: 2128212 - RNA, 13 nt, Human
acaagaucuuuca

SEQ ID NO: 2128213 - RNA, 14 nt, Human
acaagaucuuucag

SEQ ID NO: 2128214 - RNA, 16 nt, Human
acaagagcgaaacucc

SEQ ID NO: 2128215 - RNA, 17 nt, Human
acaagagcgaaacuccg

SEQ ID NO: 2128216 - RNA, 12 nt, Human
acaagagugauu

SEQ ID NO: 2128217 - RNA, 22 nt, Human
acaagagugauucuugcugcua

SEQ ID NO: 2128218 - RNA, 17 nt, Human
acaagauaagcuuccag

SEQ ID NO: 2128219 - RNA, 22 nt, Human
uagcaagugaauuuuucucuaa

SEQ ID NO: 2128220 - RNA, 16 nt, Human
uagcaaggcaugaugu

SEQ ID NO: 2128221 - RNA, 18 nt, Human
uagcaagugaauuuuucu

SEQ ID NO: 2128222 - RNA, 18 nt, Human
uagcaagacacaucccua

SEQ ID NO: 2128223 - RNA, 20 nt, Human
uagcaagauugcuuaaaaua

SEQ ID NO: 2128224 - RNA, 24 nt, Human
uagcaagauugcuuaaaauagcaa

SEQ ID NO: 2128225 - RNA, 12 nt, Human
uagcaagacaca

SEQ ID NO: 2128226 - RNA, 17 nt, Human
uagcaagacacaucccu

SEQ ID NO: 2128227 - RNA, 22 nt, Human
acaaaugcugcgcccuucccca

SEQ ID NO: 2128228 - RNA, 16 nt, Human
acaaauggaggccugu

SEQ ID NO: 2128229 - RNA, 18 nt, Human
acaaauugcuugaaagaa

SEQ ID NO: 2128230 - RNA, 16 nt, Human
acaaauuggagcaggg

SEQ ID NO: 2128231 - RNA, 14 nt, Human
acaaauuuaaaaca

SEQ ID NO: 2128232 - RNA, 15 nt, Human
acaaauuuaaaacaa

SEQ ID NO: 2128233 - RNA, 16 nt, Human
acaaauuuaaaacaaa

SEQ ID NO: 2128234 - RNA, 18 nt, Human
acaaauuuaaaacaaaca

SEQ ID NO: 2128235 - RNA, 13 nt, Human
acaaauguaugau

SEQ ID NO: 2128236 - RNA, 12 nt, Human
acaaauucuguu

SEQ ID NO: 2128237 - RNA, 15 nt, Human
acaaauucuguuucu

SEQ ID NO: 2128238 - RNA, 16 nt, Human
acaaauucuguuucuu

SEQ ID NO: 2128239 - RNA, 14 nt, Human
acaacagcugccug

SEQ ID NO: 2128240 - RNA, 14 nt, Human
acaacauguauaau

SEQ ID NO: 2128241 - RNA, 22 nt, Human
uagccuugcccggauucuggga

SEQ ID NO: 2128242 - RNA, 14 nt, Human
uagcuagaaguggg

SEQ ID NO: 2128243 - RNA, 19 nt, Human
uagcuagaagugggccagg

SEQ ID NO: 2128244 - RNA, 23 nt, Human
uagcuacaggaagcaccccaugc

SEQ ID NO: 2128245 - RNA, 16 nt, Human
uagcuaugugaccuug

SEQ ID NO: 2128246 - RNA, 20 nt, Human
uagcuagaagugggccagga

SEQ ID NO: 2128247 - RNA, 16 nt, Human
uagcucaggugucccu

SEQ ID NO: 2128248 - RNA, 17 nt, Human
uagcuuacaugagaaca

SEQ ID NO: 2128249 - RNA, 18 nt, Human
uagcuuacaugagaacag

SEQ ID NO: 2128250 - RNA, 19 nt, Human
uagcuuacaugagaacaga

SEQ ID NO: 2128251 - RNA, 15 nt, Human
uagcuuagaccucag

SEQ ID NO: 2128252 - RNA, 11 nt, Human
uagcuauuuuu

SEQ ID NO: 2128253 - RNA, 16 nt, Human
uagcuauuuuuaugga

SEQ ID NO: 2128254 - RNA, 17 nt, Human
uagcuauuuuuauggaa

SEQ ID NO: 2128255 - RNA, 19 nt, Human
uagcuauuuuuauggaauu

SEQ ID NO: 2128256 - RNA, 14 nt, Human
uagcucagccccag

SEQ ID NO: 2128257 - RNA, 17 nt, Human
uagcucagccccagccc

SEQ ID NO: 2128258 - RNA, 18 nt, Human
uagcucagccccagccca

SEQ ID NO: 2128259 - RNA, 19 nt, Human
uagcucagccccagcccag

SEQ ID NO: 2128260 - RNA, 20 nt, Human
uagcucagccccagcccagc

SEQ ID NO: 2128261 - RNA, 18 nt, Human
acaauaggugcuuauucu

SEQ ID NO: 2128262 - RNA, 19 nt, Human
acaauagcuuuacccucag

SEQ ID NO: 2128263 - RNA, 20 nt, Human
acaauagcuuuacccucagg

SEQ ID NO: 2128264 - RNA, 15 nt, Human
acaaguuguguuuga

SEQ ID NO: 2128265 - RNA, 21 nt, Human
acaaguuuucauaagcacacu

SEQ ID NO: 2128266 - RNA, 15 nt, Human
acaauaugaauacag

SEQ ID NO: 2128267 - RNA, 21 nt, Human
acaauaugaauacagggcaug

SEQ ID NO: 2128268 - RNA, 20 nt, Human
acaaucuauuuauuggacau

SEQ ID NO: 2128269 - RNA, 17 nt, Human
acaaguugcgacggaga

SEQ ID NO: 2128270 - RNA, 22 nt, Human
acaaguugcgacggagagaaaa

SEQ ID NO: 2128271 - RNA, 14 nt, Human
acaaguuguguuug

SEQ ID NO: 2128272 - RNA, 16 nt, Human
acaagcuccuggucuu

SEQ ID NO: 2128273 - RNA, 21 nt, Human
aauugacuuauuuauauaaau

SEQ ID NO: 2128274 - RNA, 18 nt, Human
aauugacuucgacuguga

SEQ ID NO: 2128275 - RNA, 20 nt, Human
aauugagaagcguauguuuu

SEQ ID NO: 2128276 - RNA, 22 nt, Human
aauugagagaauggaaaacaga

SEQ ID NO: 2128277 - RNA, 18 nt, Human
uacuguacagauugcugc

SEQ ID NO: 2128278 - RNA, 19 nt, Human
uacuguacagauugcugcu

SEQ ID NO: 2128279 - RNA, 21 nt, Human
aauugcaauuuuaacacacau

SEQ ID NO: 2128280 - RNA, 16 nt, Human
aauugcaugcugcuuu

SEQ ID NO: 2128281 - RNA, 17 nt, Human
aauugcaugcugcuuua

SEQ ID NO: 2128282 - RNA, 18 nt, Human
aauugcaugcugcuuuaa

SEQ ID NO: 2128283 - RNA, 21 nt, Human
aauugcaugcugcuuuaauug

SEQ ID NO: 2128284 - RNA, 22 nt, Human
aauugcaugcugcuuuaauugu

SEQ ID NO: 2128285 - RNA, 22 nt, Human
aauugcauggguuuuguaggua

SEQ ID NO: 2128286 - RNA, 19 nt, Human
aauugcuuacucauuaaaa

SEQ ID NO: 2128287 - RNA, 15 nt, Human
aauugauuucaagac

SEQ ID NO: 2128288 - RNA, 19 nt, Human
aauugauuucccuucuucu

SEQ ID NO: 2128289 - RNA, 14 nt, Human
uacugacuuucuca

SEQ ID NO: 2128290 - RNA, 20 nt, Human
uacugaaagguuacccugua

SEQ ID NO: 2128291 - RNA, 18 nt, Human
uacucuccaaccuggaca

SEQ ID NO: 2128292 - RNA, 14 nt, Human
uacucuccaaccug

SEQ ID NO: 2128293 - RNA, 16 nt, Human
uacucuccaaccugga

SEQ ID NO: 2128294 - RNA, 22 nt, Human
uacucuuugagauagaagaacu

SEQ ID NO: 2128295 - RNA, 14 nt, Human
uacucuuuuuguuu

SEQ ID NO: 2128296 - RNA, 17 nt, Human
uacucuuugagauagaa

SEQ ID NO: 2128297 - RNA, 16 nt, Human
uacgucugacaggcaa

SEQ ID NO: 2128298 - RNA, 15 nt, Human
uacuagaugucuuua

SEQ ID NO: 2128299 - RNA, 19 nt, Human
uacuagaugucuuuaggca

SEQ ID NO: 2128300 - RNA, 14 nt, Human
uacuagaugucuuu

SEQ ID NO: 2128301 - RNA, 18 nt, Human
uacuaaaaauacaaacaa

SEQ ID NO: 2128302 - RNA, 15 nt, Human
uacuaaaaauacaaa

SEQ ID NO: 2128303 - RNA, 18 nt, Human
uacuaggcaguuagagau

SEQ ID NO: 2128304 - RNA, 15 nt, Human
uacuagggaccuggg

SEQ ID NO: 2128305 - RNA, 22 nt, Human
uacucuacccucuuagaaaaac

SEQ ID NO: 2128306 - RNA, 14 nt, Human
uacuauuuuacuuc

SEQ ID NO: 2128307 - RNA, 19 nt, Human
uacuauuuuacuucuagag

SEQ ID NO: 2128308 - RNA, 18 nt, Human
uacuauuuuacuucuaga

SEQ ID NO: 2128309 - RNA, 15 nt, Human
uacgucugacaggca

SEQ ID NO: 2128310 - RNA, 15 nt, Human
uacgcucuccuuucu

SEQ ID NO: 2128311 - RNA, 19 nt, Human
uacgcucuccuuucuuucu

SEQ ID NO: 2128312 - RNA, 21 nt, Human
uacgcucuccuuucuuucuaa

SEQ ID NO: 2128313 - RNA, 24 nt, Human
uacgcuccaucgcugucaucucag

SEQ ID NO: 2128314 - RNA, 13 nt, Human
uacgcucuccuuu

SEQ ID NO: 2128315 - RNA, 22 nt, Human
aauugaaucacugcucacacug

SEQ ID NO: 2128316 - RNA, 15 nt, Human
aauugaaucacugcu

SEQ ID NO: 2128317 - RNA, 13 nt, Human
aauugaauuuaac

SEQ ID NO: 2128318 - RNA, 14 nt, Human
aauugaauuuaaca

SEQ ID NO: 2128319 - RNA, 15 nt, Human
aauugaauuuaacaa

SEQ ID NO: 2128320 - RNA, 16 nt, Human
aauugaauuuaacaau

SEQ ID NO: 2128321 - RNA, 21 nt, Human
aauugaauuuaacaaugcgaa

SEQ ID NO: 2128322 - RNA, 20 nt, Human
aauugaauuuucaagcaucu

SEQ ID NO: 2128323 - RNA, 21 nt, Human
aauugaauuuucaagcaucuc

SEQ ID NO: 2128324 - RNA, 19 nt, Human
aauguguaucggaugcuuu

SEQ ID NO: 2128325 - RNA, 15 nt, Human
aauuuauacaauauc

SEQ ID NO: 2128326 - RNA, 12 nt, Human
aauuuauaauuu

SEQ ID NO: 2128327 - RNA, 13 nt, Human
aauuuauaauuuu

SEQ ID NO: 2128328 - RNA, 15 nt, Human
aauuuauaauuuuaa

SEQ ID NO: 2128329 - RNA, 16 nt, Human
aauuuauaauuuuaag

SEQ ID NO: 2128330 - RNA, 16 nt, Human
aauuuauauguaucca

SEQ ID NO: 2128331 - RNA, 17 nt, Human
aauuuaucacacuucug

SEQ ID NO: 2128332 - RNA, 17 nt, Human
aauuuauacaauaucau

SEQ ID NO: 2128333 - RNA, 15 nt, Human
aauuuauaguuuaua

SEQ ID NO: 2128334 - RNA, 16 nt, Human
aauuuauaguuuauac

SEQ ID NO: 2128335 - RNA, 17 nt, Human
aauuuauaguuuauaca

SEQ ID NO: 2128336 - RNA, 20 nt, Human
aauuucuugguaagaagccg

SEQ ID NO: 2128337 - RNA, 18 nt, Human
aauuucuucucaaagggu

SEQ ID NO: 2128338 - RNA, 17 nt, Human
aauuucuugguaagaag

SEQ ID NO: 2128339 - RNA, 15 nt, Human
aauuuacauacucug

SEQ ID NO: 2128340 - RNA, 15 nt, Human
aauuggagcagggac

SEQ ID NO: 2128341 - RNA, 21 nt, Human
aauuuaagcauuguuugcuua

SEQ ID NO: 2128342 - RNA, 23 nt, Human
aauuuaagcauuguuugcuuauu

SEQ ID NO: 2128343 - RNA, 11 nt, Human
aauuuaagcau

SEQ ID NO: 2128344 - RNA, 12 nt, Human
aauuuaagcauu

SEQ ID NO: 2128345 - RNA, 13 nt, Human
aauuuaagcauug

SEQ ID NO: 2128346 - RNA, 14 nt, Human
aauuuaagcauugu

SEQ ID NO: 2128347 - RNA, 15 nt, Human
aauuuaagcauuguu

SEQ ID NO: 2128348 - RNA, 16 nt, Human
aauuuaagcauuguuu

SEQ ID NO: 2128349 - RNA, 13 nt, Human
aauuuaacaaugc

SEQ ID NO: 2128350 - RNA, 15 nt, Human
aauuuaacaaugcga

SEQ ID NO: 2128351 - RNA, 16 nt, Human
aauuuaacaaugcgaa

SEQ ID NO: 2128352 - RNA, 17 nt, Human
aauuuaacaaugcgaau

SEQ ID NO: 2128353 - RNA, 18 nt, Human
aauuggaccauccuauuu

SEQ ID NO: 2128354 - RNA, 14 nt, Human
aauugaggucugcu

SEQ ID NO: 2128355 - RNA, 16 nt, Human
aauugcuuguuugcuu

SEQ ID NO: 2128356 - RNA, 19 nt, Human
aauugcuuguuugcuucaa

SEQ ID NO: 2128357 - RNA, 15 nt, Human
aauugcuugaaagaa

SEQ ID NO: 2128358 - RNA, 17 nt, Human
aauugcuugaaagaaaa

SEQ ID NO: 2128359 - RNA, 22 nt, Human
aauugcuugaaagaaaauaugc

SEQ ID NO: 2128360 - RNA, 22 nt, Human
uacuuagcuuaucaauuuguca

SEQ ID NO: 2128361 - RNA, 21 nt, Human
uacuuauauuuuuaauaaaag

SEQ ID NO: 2128362 - RNA, 12 nt, Human
uacuuauucauu

SEQ ID NO: 2128363 - RNA, 13 nt, Human
uacuuauucauug

SEQ ID NO: 2128364 - RNA, 14 nt, Human
uacuuauucauugu

SEQ ID NO: 2128365 - RNA, 15 nt, Human
uacuuauucauugug

SEQ ID NO: 2128366 - RNA, 13 nt, Human
uacuuauuccaga

SEQ ID NO: 2128367 - RNA, 23 nt, Human
uacuucccauuuuggaaguuuuc

SEQ ID NO: 2128368 - RNA, 18 nt, Human
uacuucuccacccugcuc

SEQ ID NO: 2128369 - RNA, 13 nt, Human
uacuucuccaccc

SEQ ID NO: 2128370 - RNA, 23 nt, Human
uacuuccugugacuucagcucug

SEQ ID NO: 2128371 - RNA, 19 nt, Human
uacuuccuaucaagccagu

SEQ ID NO: 2128372 - RNA, 12 nt, Human
uacuuccugccu

SEQ ID NO: 2128373 - RNA, 22 nt, Human
uacuuccugccuggucuccugc

SEQ ID NO: 2128374 - RNA, 15 nt, Human
uacuucugcuacaua

SEQ ID NO: 2128375 - RNA, 20 nt, Human
uacuucuccacccugcucuc

SEQ ID NO: 2128376 - RNA, 21 nt, Human
uacuucuagagauaguacaua

SEQ ID NO: 2128377 - RNA, 16 nt, Human
uacuucuuauacauuu

SEQ ID NO: 2128378 - RNA, 14 nt, Human
uacuucuuauacau

SEQ ID NO: 2128379 - RNA, 15 nt, Human
uacuucuuauacauu

SEQ ID NO: 2128380 - RNA, 11 nt, Human
uacuuugucag

SEQ ID NO: 2128381 - RNA, 23 nt, Human
uacuuugauauuuucaacgcagc

SEQ ID NO: 2128382 - RNA, 20 nt, Human
uacuuuguccuuuuuguuau

SEQ ID NO: 2128383 - RNA, 18 nt, Human
uacuucuucauucaauac

SEQ ID NO: 2128384 - RNA, 20 nt, Human
acagauguaaaagacuuuuu

SEQ ID NO: 2128385 - RNA, 16 nt, Human
acagauggauuugccu

SEQ ID NO: 2128386 - RNA, 17 nt, Human
acagauggauuugccug

SEQ ID NO: 2128387 - RNA, 12 nt, Human
acagaugccucc

SEQ ID NO: 2128388 - RNA, 21 nt, Human
acagaugccccagagcuguuu

SEQ ID NO: 2128389 - RNA, 22 nt, Human
acagaugccccagagcuguuua

SEQ ID NO: 2128390 - RNA, 15 nt, Human
acagcaaaaccauug

SEQ ID NO: 2128391 - RNA, 20 nt, Human
acagcaaaaccauugcuuca

SEQ ID NO: 2128392 - RNA, 21 nt, Human
acagcaaaaccauugcuucac

SEQ ID NO: 2128393 - RNA, 22 nt, Human
acagcaaaaccauugcuucacu

SEQ ID NO: 2128394 - RNA, 18 nt, Human
acagcaaaacuccaucuc

SEQ ID NO: 2128395 - RNA, 12 nt, Human
acagauguugaa

SEQ ID NO: 2128396 - RNA, 20 nt, Human
acagauagauauaugcucug

SEQ ID NO: 2128397 - RNA, 22 nt, Human
acagauacuggaaguuuugcau

SEQ ID NO: 2128398 - RNA, 21 nt, Human
acagauacuggaaguuuugca

SEQ ID NO: 2128399 - RNA, 16 nt, Human
acagauaggccuucuu

SEQ ID NO: 2128400 - RNA, 13 nt, Human
acagaugccccag

SEQ ID NO: 2128401 - RNA, 14 nt, Human
acagaugccccaga

SEQ ID NO: 2128402 - RNA, 16 nt, Human
acagaugccccagagc

SEQ ID NO: 2128403 - RNA, 17 nt, Human
acagaugccccagagcu

SEQ ID NO: 2128404 - RNA, 18 nt, Human
acagaugccccagagcug

SEQ ID NO: 2128405 - RNA, 19 nt, Human
acagaugccccagagcugu

SEQ ID NO: 2128406 - RNA, 14 nt, Human
acagaggaagagca

SEQ ID NO: 2128407 - RNA, 16 nt, Human
acagaggaagagcagg

SEQ ID NO: 2128408 - RNA, 21 nt, Human
acagauaagcaagagagaugu

SEQ ID NO: 2128409 - RNA, 23 nt, Human
uaugaaagauggcugugccucug

SEQ ID NO: 2128410 - RNA, 22 nt, Human
uaugaaagauggcugugccucu

SEQ ID NO: 2128411 - RNA, 20 nt, Human
uaugaaagauggcugugccu

SEQ ID NO: 2128412 - RNA, 21 nt, Human
uaucuugguguguuaagaguu

SEQ ID NO: 2128413 - RNA, 22 nt, Human
uaucuuguuuuuccacuacugc

SEQ ID NO: 2128414 - RNA, 22 nt, Human
acagccgaguggauagaugccc

SEQ ID NO: 2128415 - RNA, 20 nt, Human
uaucucugucuaccaucucc

SEQ ID NO: 2128416 - RNA, 22 nt, Human
acagccgcagccucccucugac

SEQ ID NO: 2128417 - RNA, 20 nt, Human
acagccgcagccucccucug

SEQ ID NO: 2128418 - RNA, 13 nt, Human
acagccgcagccu

SEQ ID NO: 2128419 - RNA, 17 nt, Human
uaucuugucucugggcu

SEQ ID NO: 2128420 - RNA, 14 nt, Human
uaucuuguuuuucc

SEQ ID NO: 2128421 - RNA, 18 nt, Human
uaucuuguuuuuccacua

SEQ ID NO: 2128422 - RNA, 15 nt, Human
uaucuugucucuggg

SEQ ID NO: 2128423 - RNA, 10 nt, Human
acagcaaauu

SEQ ID NO: 2128424 - RNA, 18 nt, Human
acagcaaauuuauaauuu

SEQ ID NO: 2128425 - RNA, 19 nt, Human
acagcaaauuuauaauuuu

SEQ ID NO: 2128426 - RNA, 20 nt, Human
acagcaaauuuauaauuuua

SEQ ID NO: 2128427 - RNA, 22 nt, Human
acagcaaauuuauaauuuuaag

SEQ ID NO: 2128428 - RNA, 14 nt, Human
acagagcugggaug

SEQ ID NO: 2128429 - RNA, 16 nt, Human
acagagcugacaaaau

SEQ ID NO: 2128430 - RNA, 18 nt, Human
acagagcugacaaaauuu

SEQ ID NO: 2128431 - RNA, 20 nt, Human
acagagcugacaaaauuuug

SEQ ID NO: 2128432 - RNA, 10 nt, Human
acagagcugg

SEQ ID NO: 2128433 - RNA, 18 nt, Human
acagagcugggauguuuc

SEQ ID NO: 2128434 - RNA, 21 nt, Human
acagagcugggauguuucugu

SEQ ID NO: 2128435 - RNA, 21 nt, Human
acagagcugguugggaagaca

SEQ ID NO: 2128436 - RNA, 21 nt, Human
acagagcaagugagacccugu

SEQ ID NO: 2128437 - RNA, 15 nt, Human
acagagcaagacucu

SEQ ID NO: 2128438 - RNA, 11 nt, Human
acagagccagu

SEQ ID NO: 2128439 - RNA, 16 nt, Human
uauccuaucucuccaa

SEQ ID NO: 2128440 - RNA, 14 nt, Human
uaucucacagcaca

SEQ ID NO: 2128441 - RNA, 16 nt, Human
uaucucacagcacacu

SEQ ID NO: 2128442 - RNA, 13 nt, Human
uaucucagggccu

SEQ ID NO: 2128443 - RNA, 15 nt, Human
uaucucagggccugg

SEQ ID NO: 2128444 - RNA, 18 nt, Human
uauauuuauauaauuaug

SEQ ID NO: 2128445 - RNA, 24 nt, Human
uauauuuauaacucaucauaaaau

SEQ ID NO: 2128446 - RNA, 18 nt, Human
uauauuuaaguauucaag

SEQ ID NO: 2128447 - RNA, 22 nt, Human
uauauuuaaguauucaagaaag

SEQ ID NO: 2128448 - RNA, 22 nt, Human
uauauuuauaacucaucauaaa

SEQ ID NO: 2128449 - RNA, 23 nt, Human
uauauuuauaacucaucauaaaa

SEQ ID NO: 2128450 - RNA, 20 nt, Human
acacucugaauuccaaguag

SEQ ID NO: 2128451 - RNA, 21 nt, Human
acacugaaauauacacacagc

SEQ ID NO: 2128452 - RNA, 20 nt, Human
acacugaaauauacacacag

SEQ ID NO: 2128453 - RNA, 18 nt, Human
acacugaaauauacacac

SEQ ID NO: 2128454 - RNA, 17 nt, Human
acacugaaauauacaca

SEQ ID NO: 2128455 - RNA, 14 nt, Human
acacuguucugaaa

SEQ ID NO: 2128456 - RNA, 21 nt, Human
acacugaagcucuugaagaca

SEQ ID NO: 2128457 - RNA, 19 nt, Human
acacuguuagaacacuauu

SEQ ID NO: 2128458 - RNA, 20 nt, Human
acacuguuagaacacuauuu

SEQ ID NO: 2128459 - RNA, 21 nt, Human
acacuguuagaacacuauuuu

SEQ ID NO: 2128460 - RNA, 22 nt, Human
acacuguuagaacacuauuuuc

SEQ ID NO: 2128461 - RNA, 22 nt, Human
acacugaaauauacacacagca

SEQ ID NO: 2128462 - RNA, 14 nt, Human
acacugaaaugccu

SEQ ID NO: 2128463 - RNA, 15 nt, Human
acacugaaaugccuu

SEQ ID NO: 2128464 - RNA, 20 nt, Human
acacuguucugaaagugacu

SEQ ID NO: 2128465 - RNA, 20 nt, Human
acacucucaaagcaaauaau

SEQ ID NO: 2128466 - RNA, 11 nt, Human
acacucuccug

SEQ ID NO: 2128467 - RNA, 12 nt, Human
acacucuccugg

SEQ ID NO: 2128468 - RNA, 13 nt, Human
acacucuccuggg

SEQ ID NO: 2128469 - RNA, 14 nt, Human
acacucuccugggc

SEQ ID NO: 2128470 - RNA, 15 nt, Human
acacucuccugggcc

SEQ ID NO: 2128471 - RNA, 16 nt, Human
acacucuccugggccc

SEQ ID NO: 2128472 - RNA, 17 nt, Human
acacucuccugggcccc

SEQ ID NO: 2128473 - RNA, 19 nt, Human
acacucuccugggccccuc

SEQ ID NO: 2128474 - RNA, 20 nt, Human
acacucuccugggccccucc

SEQ ID NO: 2128475 - RNA, 21 nt, Human
acacucuccugggccccuccc

SEQ ID NO: 2128476 - RNA, 22 nt, Human
acacucuccugggccccucccu

SEQ ID NO: 2128477 - RNA, 12 nt, Human
acacuccagccu

SEQ ID NO: 2128478 - RNA, 14 nt, Human
acacuccagccuga

SEQ ID NO: 2128479 - RNA, 15 nt, Human
acacuccagccugag

SEQ ID NO: 2128480 - RNA, 16 nt, Human
acacuccagccugagc

SEQ ID NO: 2128481 - RNA, 17 nt, Human
acacuccagccugagca

SEQ ID NO: 2128482 - RNA, 16 nt, Human
uauaacuagcuagaag

SEQ ID NO: 2128483 - RNA, 10 nt, Human
uauaaggacu

SEQ ID NO: 2128484 - RNA, 11 nt, Human
uauaaggacug

SEQ ID NO: 2128485 - RNA, 12 nt, Human
uauaaggacugc

SEQ ID NO: 2128486 - RNA, 13 nt, Human
uauaaggacugca

SEQ ID NO: 2128487 - RNA, 14 nt, Human
uauaaggacugcau

SEQ ID NO: 2128488 - RNA, 15 nt, Human
uauaaggacugcaug

SEQ ID NO: 2128489 - RNA, 21 nt, Human
uauaaggacugcaugguaauu

SEQ ID NO: 2128490 - RNA, 20 nt, Human
acacucagcacccccuucuc

SEQ ID NO: 2128491 - RNA, 22 nt, Human
acacucagcacccccuucucug

SEQ ID NO: 2128492 - RNA, 18 nt, Human
acacucaccucuaaaaca

SEQ ID NO: 2128493 - RNA, 19 nt, Human
acacucaccucuaaaacag

SEQ ID NO: 2128494 - RNA, 19 nt, Human
uauauuccauauauuagca

SEQ ID NO: 2128495 - RNA, 21 nt, Human
uauauuccauauauuagcauu

SEQ ID NO: 2128496 - RNA, 14 nt, Human
uauauucauauauu

SEQ ID NO: 2128497 - RNA, 12 nt, Human
acagaaagagag

SEQ ID NO: 2128498 - RNA, 16 nt, Human
acagaaagagagcacu

SEQ ID NO: 2128499 - RNA, 17 nt, Human
acagaaagagagcacug

SEQ ID NO: 2128500 - RNA, 18 nt, Human
acagaaagagagcacuga

SEQ ID NO: 2128501 - RNA, 14 nt, Human
uauauuuaaaagaa

SEQ ID NO: 2128502 - RNA, 17 nt, Human
acagacacaggcccggc

SEQ ID NO: 2128503 - RNA, 22 nt, Human
acagacacaggcccggcuccag

SEQ ID NO: 2128504 - RNA, 18 nt, Human
acagacacaggcccggcu

SEQ ID NO: 2128505 - RNA, 22 nt, Human
acagacuggaagcacagcuuca

SEQ ID NO: 2128506 - RNA, 22 nt, Human
uauauuaucaugcaaaugcugu

SEQ ID NO: 2128507 - RNA, 21 nt, Human
acagacuggaagcacagcuuc

SEQ ID NO: 2128508 - RNA, 19 nt, Human
acagacuggaagcacagcu

SEQ ID NO: 2128509 - RNA, 17 nt, Human
acagacuggaagcacag

SEQ ID NO: 2128510 - RNA, 13 nt, Human
acacuugugugug

SEQ ID NO: 2128511 - RNA, 16 nt, Human
acacuugugugugggc

SEQ ID NO: 2128512 - RNA, 18 nt, Human
acacuugugugugggcug

SEQ ID NO: 2128513 - RNA, 22 nt, Human
acacuugugugugggcugugag

SEQ ID NO: 2128514 - RNA, 19 nt, Human
acacuuguuccagcucuuu

SEQ ID NO: 2128515 - RNA, 20 nt, Human
acacuuguuccagcucuuug

SEQ ID NO: 2128516 - RNA, 17 nt, Human
acacuuguccacauagg

SEQ ID NO: 2128517 - RNA, 14 nt, Human
acacuuaacagaug

SEQ ID NO: 2128518 - RNA, 13 nt, Human
acacuuaacagau

SEQ ID NO: 2128519 - RNA, 11 nt, Human
acacuuaacag

SEQ ID NO: 2128520 - RNA, 21 nt, Human
acacuguuuacaagaaaaaau

SEQ ID NO: 2128521 - RNA, 23 nt, Human
acacuguuuacaagaaaaaauga

SEQ ID NO: 2128522 - RNA, 23 nt, Human
acacuugugugugggcugugagu

SEQ ID NO: 2128523 - RNA, 13 nt, Human
acacuuuauuuac

SEQ ID NO: 2128524 - RNA, 22 nt, Human
acacuuuggaaguuuguguucu

SEQ ID NO: 2128525 - RNA, 11 nt, Human
acagaaagaga

SEQ ID NO: 2128526 - RNA, 20 nt, Human
acacuuuucaugugugauuu

SEQ ID NO: 2128527 - RNA, 10 nt, Human
uaguuuuugu

SEQ ID NO: 2128528 - RNA, 17 nt, Human
uaguuuuuguaauuuau

SEQ ID NO: 2128529 - RNA, 17 nt, Human
uaguuuuucuucaacau

SEQ ID NO: 2128530 - RNA, 15 nt, Human
uaguuuugucaaacu

SEQ ID NO: 2128531 - RNA, 18 nt, Human
uaguuuuuaccuaccaca

SEQ ID NO: 2128532 - RNA, 13 nt, Human
uaguuuugucaaa

SEQ ID NO: 2128533 - RNA, 23 nt, Human
acacagcuuuuaguacccaccug

SEQ ID NO: 2128534 - RNA, 15 nt, Human
uaguucagacacuuu

SEQ ID NO: 2128535 - RNA, 19 nt, Human
uaguucagacacuuuggaa

SEQ ID NO: 2128536 - RNA, 18 nt, Human
uaguucagguaacaggca

SEQ ID NO: 2128537 - RNA, 14 nt, Human
uauaaaagacugac

SEQ ID NO: 2128538 - RNA, 17 nt, Human
uauaaaacaggucaaua

SEQ ID NO: 2128539 - RNA, 13 nt, Human
acacccagcccac

SEQ ID NO: 2128540 - RNA, 12 nt, Human
acacccagccca

SEQ ID NO: 2128541 - RNA, 21 nt, Human
acacauugugucacaucauga

SEQ ID NO: 2128542 - RNA, 17 nt, Human
acacauucaauaagcau

SEQ ID NO: 2128543 - RNA, 16 nt, Human
acacauucaauaagca

SEQ ID NO: 2128544 - RNA, 23 nt, Human
acacauuaucgggagcagugucu

SEQ ID NO: 2128545 - RNA, 20 nt, Human
acacauuaucgggagcagug

SEQ ID NO: 2128546 - RNA, 15 nt, Human
uauaaaauuaagcaa

SEQ ID NO: 2128547 - RNA, 18 nt, Human
acacaugcugaacaucac

SEQ ID NO: 2128548 - RNA, 16 nt, Human
uauaaaauuaaagaaa

SEQ ID NO: 2128549 - RNA, 18 nt, Human
uauaaaauuaaagaaaau

SEQ ID NO: 2128550 - RNA, 22 nt, Human
uauaaaaugguguuuucaugua

SEQ ID NO: 2128551 - RNA, 16 nt, Human
acaccucccugaacca

SEQ ID NO: 2128552 - RNA, 22 nt, Human
acaccucccugaaccaucccug

SEQ ID NO: 2128553 - RNA, 13 nt, Human
acaccucccugaa

SEQ ID NO: 2128554 - RNA, 23 nt, Human
acaccccuccccugcccuagagc

SEQ ID NO: 2128555 - RNA, 18 nt, Human
acacccccaccuccugca

SEQ ID NO: 2128556 - RNA, 16 nt, Human
acaccccuccccugcc

SEQ ID NO: 2128557 - RNA, 18 nt, Human
acaccucugcacaagcug

SEQ ID NO: 2128558 - RNA, 16 nt, Human
acaccuugacagggca

SEQ ID NO: 2128559 - RNA, 15 nt, Human
acaccuugacagggc

SEQ ID NO: 2128560 - RNA, 14 nt, Human
acaccuugacaggg

SEQ ID NO: 2128561 - RNA, 19 nt, Human
acaccucugcacaagcugc

SEQ ID NO: 2128562 - RNA, 18 nt, Human
acaccucguuagggaaga

SEQ ID NO: 2128563 - RNA, 21 nt, Human
acaccucguuagggaagagaa

SEQ ID NO: 2128564 - RNA, 22 nt, Human
acaccucguuagggaagagaaa

SEQ ID NO: 2128565 - RNA, 11 nt, Human
acaccugcacc

SEQ ID NO: 2128566 - RNA, 12 nt, Human
acaccugcaccu

SEQ ID NO: 2128567 - RNA, 14 nt, Human
acaccugcaccucc

SEQ ID NO: 2128568 - RNA, 15 nt, Human
acaccugcaccuccc

SEQ ID NO: 2128569 - RNA, 16 nt, Human
acaccugcaccucccc

SEQ ID NO: 2128570 - RNA, 18 nt, Human
acaccugcaccucccccc

SEQ ID NO: 2128571 - RNA, 19 nt, Human
acaccugcaccucccccca

SEQ ID NO: 2128572 - RNA, 24 nt, Human
acaccugcaccuccccccacugca

SEQ ID NO: 2128573 - RNA, 19 nt, Human
acacuaaccacgcuggacc

SEQ ID NO: 2128574 - RNA, 17 nt, Human
acacuaaccacgcugga

SEQ ID NO: 2128575 - RNA, 16 nt, Human
acacuaaccacgcugg

SEQ ID NO: 2128576 - RNA, 22 nt, Human
acacuaguaccuucagauccua

SEQ ID NO: 2128577 - RNA, 15 nt, Human
uauaaccccagcucc

SEQ ID NO: 2128578 - RNA, 14 nt, Human
uauaacuaguccuu

SEQ ID NO: 2128579 - RNA, 19 nt, Human
uauaacuauguugauaaaa

SEQ ID NO: 2128580 - RNA, 16 nt, Human
uauaaggaaagcaaua

SEQ ID NO: 2128581 - RNA, 18 nt, Human
uauaacuaguccuuuacu

SEQ ID NO: 2128582 - RNA, 22 nt, Human
uauaaggaaagcaauaaaugaa

SEQ ID NO: 2128583 - RNA, 23 nt, Human
uauaaggaaagcaauaaaugaau

SEQ ID NO: 2128584 - RNA, 22 nt, Human
acacuagcuaauaucaauagaa

SEQ ID NO: 2128585 - RNA, 13 nt, Human
acacuagccucuc

SEQ ID NO: 2128586 - RNA, 15 nt, Human
acacuagccucucca

SEQ ID NO: 2128587 - RNA, 19 nt, Human
acacagucuuggcucacug

SEQ ID NO: 2128588 - RNA, 13 nt, Human
acacaguauuuuc

SEQ ID NO: 2128589 - RNA, 14 nt, Human
acacaggaggagaa

SEQ ID NO: 2128590 - RNA, 23 nt, Human
acacagucucacccagacuccag

SEQ ID NO: 2128591 - RNA, 11 nt, Human
acacagugagu

SEQ ID NO: 2128592 - RNA, 16 nt, Human
acacaggauagauaac

SEQ ID NO: 2128593 - RNA, 20 nt, Human
acacaggauagauaacucuu

SEQ ID NO: 2128594 - RNA, 23 nt, Human
acacaggauagauaacucuuugg

SEQ ID NO: 2128595 - RNA, 15 nt, Human
acacaggcaacugag

SEQ ID NO: 2128596 - RNA, 16 nt, Human
acacaggcaacugagg

SEQ ID NO: 2128597 - RNA, 19 nt, Human
acacaggcaacugaggcag

SEQ ID NO: 2128598 - RNA, 20 nt, Human
acacaggcaacugaggcaga

SEQ ID NO: 2128599 - RNA, 15 nt, Human
acacacugaggcagg

SEQ ID NO: 2128600 - RNA, 16 nt, Human
acacacugaggcaggg

SEQ ID NO: 2128601 - RNA, 19 nt, Human
acacagcugcagagacaga

SEQ ID NO: 2128602 - RNA, 18 nt, Human
acacacugaggcagggaa

SEQ ID NO: 2128603 - RNA, 13 nt, Human
acacagugagucg

SEQ ID NO: 2128604 - RNA, 21 nt, Human
uagguuggcaaaaaggcagga

SEQ ID NO: 2128605 - RNA, 13 nt, Human
uagguuuaacaua

SEQ ID NO: 2128606 - RNA, 15 nt, Human
uagguuuaacauaaa

SEQ ID NO: 2128607 - RNA, 16 nt, Human
uagguuuaacauaaag

SEQ ID NO: 2128608 - RNA, 17 nt, Human
uagguuuaacauaaagg

SEQ ID NO: 2128609 - RNA, 18 nt, Human
uagguuuaacauaaaggu

SEQ ID NO: 2128610 - RNA, 16 nt, Human
uaguaagaaaacauca

SEQ ID NO: 2128611 - RNA, 17 nt, Human
uaguacuccuuaagaac

SEQ ID NO: 2128612 - RNA, 19 nt, Human
uaguacuccuuaagaacac

SEQ ID NO: 2128613 - RNA, 21 nt, Human
uaguacuccugcaaaauuuua

SEQ ID NO: 2128614 - RNA, 17 nt, Human
uaguacuccugcaaaau

SEQ ID NO: 2128615 - RNA, 19 nt, Human
uaguacuccugcaaaauuu

SEQ ID NO: 2128616 - RNA, 20 nt, Human
uaguacuccugcaaaauuuu

SEQ ID NO: 2128617 - RNA, 15 nt, Human
uaguagaaauuuuac

SEQ ID NO: 2128618 - RNA, 19 nt, Human
uaguagaaauuuuacaaua

SEQ ID NO: 2128619 - RNA, 20 nt, Human
uaguagaaauuuuacaauag

SEQ ID NO: 2128620 - RNA, 13 nt, Human
uaguagagacagg

SEQ ID NO: 2128621 - RNA, 14 nt, Human
uagucuauuagcca

SEQ ID NO: 2128622 - RNA, 17 nt, Human
uagucuaaccaaaugca

SEQ ID NO: 2128623 - RNA, 18 nt, Human
uagucuaaccaaaugcau

SEQ ID NO: 2128624 - RNA, 19 nt, Human
uagucuaaccaaaugcauc

SEQ ID NO: 2128625 - RNA, 12 nt, Human
uagucucaggac

SEQ ID NO: 2128626 - RNA, 15 nt, Human
uagucuucaagcaga

SEQ ID NO: 2128627 - RNA, 17 nt, Human
uagucuucaagcagauu

SEQ ID NO: 2128628 - RNA, 23 nt, Human
uagucugugugggacuguacaca

SEQ ID NO: 2128629 - RNA, 12 nt, Human
uagucuucucau

SEQ ID NO: 2128630 - RNA, 14 nt, Human
uagucuucucauag

SEQ ID NO: 2128631 - RNA, 18 nt, Human
uagucuucucauagcauu

SEQ ID NO: 2128632 - RNA, 12 nt, Human
uagucuuucaca

SEQ ID NO: 2128633 - RNA, 19 nt, Human
uagucuucucauagcauua

SEQ ID NO: 2128634 - RNA, 16 nt, Human
acaaugcgaaugguag

SEQ ID NO: 2128635 - RNA, 19 nt, Human
acaaugcgaaugguagucu

SEQ ID NO: 2128636 - RNA, 21 nt, Human
acaaugcgaaugguagucuaa

SEQ ID NO: 2128637 - RNA, 14 nt, Human
uagcuuaucaauuu

SEQ ID NO: 2128638 - RNA, 18 nt, Human
uagcuuaucaauuuguca

SEQ ID NO: 2128639 - RNA, 19 nt, Human
uagcuuaucaauuugucau

SEQ ID NO: 2128640 - RNA, 20 nt, Human
uagcuuaucaauuugucauu

SEQ ID NO: 2128641 - RNA, 20 nt, Human
uagcuuagaccucagccugu

SEQ ID NO: 2128642 - RNA, 23 nt, Human
uagcuuagaccucagccugugcu

SEQ ID NO: 2128643 - RNA, 16 nt, Human
uagcuuagaccucagc

SEQ ID NO: 2128644 - RNA, 17 nt, Human
uagcuuagaccucagcc

SEQ ID NO: 2128645 - RNA, 18 nt, Human
uagcuuagaccucagccu

SEQ ID NO: 2128646 - RNA, 19 nt, Human
uagcuuagaccucagccug

SEQ ID NO: 2128647 - RNA, 14 nt, Human
acacacacauacac

SEQ ID NO: 2128648 - RNA, 12 nt, Human
acacacacagcu

SEQ ID NO: 2128649 - RNA, 13 nt, Human
acacacacagcuu

SEQ ID NO: 2128650 - RNA, 11 nt, Human
acacacacagg

SEQ ID NO: 2128651 - RNA, 14 nt, Human
acacacacaggagg

SEQ ID NO: 2128652 - RNA, 12 nt, Human
acacacagcucu

SEQ ID NO: 2128653 - RNA, 11 nt, Human
acacacagcuc

SEQ ID NO: 2128654 - RNA, 21 nt, Human
acacacauauaaacaucacac

SEQ ID NO: 2128655 - RNA, 12 nt, Human
acacacauaaag

SEQ ID NO: 2128656 - RNA, 18 nt, Human
acacacauaaaggauaaa

SEQ ID NO: 2128657 - RNA, 17 nt, Human
acacacaggcaacugag

SEQ ID NO: 2128658 - RNA, 19 nt, Human
acacacagcucuguccugg

SEQ ID NO: 2128659 - RNA, 13 nt, Human
acacacaggagga

SEQ ID NO: 2128660 - RNA, 18 nt, Human
acacaccaggcugugggc

SEQ ID NO: 2128661 - RNA, 24 nt, Human
acacaccuguagucccagcuacuc

SEQ ID NO: 2128662 - RNA, 23 nt, Human
acacacgcacacacacacacagg

SEQ ID NO: 2128663 - RNA, 15 nt, Human
acacaccacacauac

SEQ ID NO: 2128664 - RNA, 12 nt, Human
acacaccaggcu

SEQ ID NO: 2128665 - RNA, 16 nt, Human
acacaccaggcugugg

SEQ ID NO: 2128666 - RNA, 22 nt, Human
acacaccaggcugugggccuca

SEQ ID NO: 2128667 - RNA, 11 nt, Human
acacacacagc

SEQ ID NO: 2128668 - RNA, 18 nt, Human
accaauauuguacaguuu

SEQ ID NO: 2128669 - RNA, 18 nt, Human
accaacaucccauugccc

SEQ ID NO: 2128670 - RNA, 19 nt, Human
accaauauuguacaguuuu

SEQ ID NO: 2128671 - RNA, 15 nt, Human
accaauauuguacag

SEQ ID NO: 2128672 - RNA, 14 nt, Human
accaauauuguaca

SEQ ID NO: 2128673 - RNA, 16 nt, Human
accaauauuguacagu

SEQ ID NO: 2128674 - RNA, 17 nt, Human
accaauauuguacaguu

SEQ ID NO: 2128675 - RNA, 15 nt, Human
accaauguucucucu

SEQ ID NO: 2128676 - RNA, 11 nt, Human
accaauauuug

SEQ ID NO: 2128677 - RNA, 13 nt, Human
accaauauuugua

SEQ ID NO: 2128678 - RNA, 16 nt, Human
accaauauuuguagaa

SEQ ID NO: 2128679 - RNA, 19 nt, Human
accaaucaagauaaaggac

SEQ ID NO: 2128680 - RNA, 20 nt, Human
accaaucaagauaaaggaca

SEQ ID NO: 2128681 - RNA, 15 nt, Human
ucaagugaaaaagga

SEQ ID NO: 2128682 - RNA, 15 nt, Human
ucaagucaccuccuu

SEQ ID NO: 2128683 - RNA, 14 nt, Human
ucaagucagcucuu

SEQ ID NO: 2128684 - RNA, 15 nt, Human
ucaagugaaucuaaa

SEQ ID NO: 2128685 - RNA, 19 nt, Human
ucaagugaaucuaaaagcu

SEQ ID NO: 2128686 - RNA, 23 nt, Human
ucaagugaaaaaggaggaagaga

SEQ ID NO: 2128687 - RNA, 14 nt, Human
accacaaaaaugaa

SEQ ID NO: 2128688 - RNA, 16 nt, Human
accaauucaacccuuu

SEQ ID NO: 2128689 - RNA, 16 nt, Human
accaauguuuaaaaaa

SEQ ID NO: 2128690 - RNA, 16 nt, Human
accacaccgcagaagc

SEQ ID NO: 2128691 - RNA, 15 nt, Human
accacaccucccuga

SEQ ID NO: 2128692 - RNA, 16 nt, Human
ucaauuccucugggaa

SEQ ID NO: 2128693 - RNA, 13 nt, Human
ucaauuccugggc

SEQ ID NO: 2128694 - RNA, 17 nt, Human
ucaauuccugggcccca

SEQ ID NO: 2128695 - RNA, 15 nt, Human
ucaauuccucuggga

SEQ ID NO: 2128696 - RNA, 22 nt, Human
accacaccucccugaaccaucc

SEQ ID NO: 2128697 - RNA, 14 nt, Human
ucaauuuucuuuaa

SEQ ID NO: 2128698 - RNA, 16 nt, Human
accacaccucccugaa

SEQ ID NO: 2128699 - RNA, 13 nt, Human
ucacaguuccucg

SEQ ID NO: 2128700 - RNA, 14 nt, Human
ucacaguuccucgc

SEQ ID NO: 2128701 - RNA, 16 nt, Human
ucacaguuccucgccc

SEQ ID NO: 2128702 - RNA, 17 nt, Human
ucacaguuccucgcccu

SEQ ID NO: 2128703 - RNA, 18 nt, Human
ucacaguuccucgcccug

SEQ ID NO: 2128704 - RNA, 19 nt, Human
ucacaguuccucgcccugg

SEQ ID NO: 2128705 - RNA, 20 nt, Human
ucacaguuccucgcccuggg

SEQ ID NO: 2128706 - RNA, 21 nt, Human
ucacaguuccucgcccugggu

SEQ ID NO: 2128707 - RNA, 22 nt, Human
ucacaguuccucgcccuggguc

SEQ ID NO: 2128708 - RNA, 18 nt, Human
ucacauccuguguuucua

SEQ ID NO: 2128709 - RNA, 19 nt, Human
ucacauccuguguuucuag

SEQ ID NO: 2128710 - RNA, 17 nt, Human
ucacauccuguguuucu

SEQ ID NO: 2128711 - RNA, 15 nt, Human
ucacauaucugucau

SEQ ID NO: 2128712 - RNA, 12 nt, Human
ucacauaucugu

SEQ ID NO: 2128713 - RNA, 20 nt, Human
ucacaaauccuaaaagaagc

SEQ ID NO: 2128714 - RNA, 23 nt, Human
ucacaaaugauauuaaaaauugg

SEQ ID NO: 2128715 - RNA, 16 nt, Human
ucacaacaaccugguc

SEQ ID NO: 2128716 - RNA, 19 nt, Human
ucacaccuguaaucccaac

SEQ ID NO: 2128717 - RNA, 22 nt, Human
ucacacgucuggcuucacagau

SEQ ID NO: 2128718 - RNA, 17 nt, Human
ucacaguguugcccagg

SEQ ID NO: 2128719 - RNA, 11 nt, Human
ucacaguguuu

SEQ ID NO: 2128720 - RNA, 14 nt, Human
ucacaguguuucga

SEQ ID NO: 2128721 - RNA, 20 nt, Human
ucacaucuuucacacuucca

SEQ ID NO: 2128722 - RNA, 22 nt, Human
ucacaucuuucacacuuccacc

SEQ ID NO: 2128723 - RNA, 14 nt, Human
ucacaucuuucaca

SEQ ID NO: 2128724 - RNA, 17 nt, Human
ucacaucuuucacacuu

SEQ ID NO: 2128725 - RNA, 22 nt, Human
ucaccaggaauguuaaagucag

SEQ ID NO: 2128726 - RNA, 23 nt, Human
ucaccaguguguggcuuucagag

SEQ ID NO: 2128727 - RNA, 14 nt, Human
ucaccaucucaggc

SEQ ID NO: 2128728 - RNA, 18 nt, Human
ucaccaguguguggcuuu

SEQ ID NO: 2128729 - RNA, 17 nt, Human
ucacccaugaagacagg

SEQ ID NO: 2128730 - RNA, 15 nt, Human
ucaccaucucaggcc

SEQ ID NO: 2128731 - RNA, 16 nt, Human
ucaccaucucaggcca

SEQ ID NO: 2128732 - RNA, 12 nt, Human
ucaccccauccc

SEQ ID NO: 2128733 - RNA, 13 nt, Human
ucaccccauccca

SEQ ID NO: 2128734 - RNA, 13 nt, Human
ucaccccacccuu

SEQ ID NO: 2128735 - RNA, 12 nt, Human
ucaccccacccu

SEQ ID NO: 2128736 - RNA, 20 nt, Human
ucacuauguugcccaggcag

SEQ ID NO: 2128737 - RNA, 19 nt, Human
ucacuauguugcccaggca

SEQ ID NO: 2128738 - RNA, 17 nt, Human
ucacuauguugcccagg

SEQ ID NO: 2128739 - RNA, 18 nt, Human
ucacuauguugcccaggc

SEQ ID NO: 2128740 - RNA, 21 nt, Human
ucacuccaggaaggggcugga

SEQ ID NO: 2128741 - RNA, 23 nt, Human
ucacuccaggaaggggcuggacu

SEQ ID NO: 2128742 - RNA, 16 nt, Human
ucacuccccuccuuuc

SEQ ID NO: 2128743 - RNA, 17 nt, Human
ucacuccccuccuuucc

SEQ ID NO: 2128744 - RNA, 14 nt, Human
ucacucccagucca

SEQ ID NO: 2128745 - RNA, 16 nt, Human
ucacucccuucuccuu

SEQ ID NO: 2128746 - RNA, 18 nt, Human
ucacucccuucuccuuga

SEQ ID NO: 2128747 - RNA, 20 nt, Human
ucacucccuucuccuugaua

SEQ ID NO: 2128748 - RNA, 23 nt, Human
ucacucccuucuccuugauaaca

SEQ ID NO: 2128749 - RNA, 14 nt, Human
ucacuccggugugc

SEQ ID NO: 2128750 - RNA, 17 nt, Human
ucacuccggugugccug

SEQ ID NO: 2128751 - RNA, 19 nt, Human
ucacuccggugugccugca

SEQ ID NO: 2128752 - RNA, 20 nt, Human
ucacuccggugugccugcag

SEQ ID NO: 2128753 - RNA, 21 nt, Human
ucacuccggugugccugcagc

SEQ ID NO: 2128754 - RNA, 22 nt, Human
ucacuccggugugccugcagcc

SEQ ID NO: 2128755 - RNA, 23 nt, Human
ucacuccggugugccugcagccc

SEQ ID NO: 2128756 - RNA, 19 nt, Human
ucacuacucacagucucuu

SEQ ID NO: 2128757 - RNA, 21 nt, Human
ucacuacucacagucucuuua

SEQ ID NO: 2128758 - RNA, 22 nt, Human
ucacuacucacagucucuuuaa

SEQ ID NO: 2128759 - RNA, 20 nt, Human
ucaccuguuuuuaagcuguu

SEQ ID NO: 2128760 - RNA, 19 nt, Human
ucaccuguuuuuaagcugu

SEQ ID NO: 2128761 - RNA, 18 nt, Human
ucaccuguuuuuaagcug

SEQ ID NO: 2128762 - RNA, 23 nt, Human
ucaccugcccagaucccagaagg

SEQ ID NO: 2128763 - RNA, 22 nt, Human
ucaccuguuuuuaagcuguuuc

SEQ ID NO: 2128764 - RNA, 21 nt, Human
ucaccuguuuuuaagcuguuu

SEQ ID NO: 2128765 - RNA, 15 nt, Human
ucaccuuaggcaggg

SEQ ID NO: 2128766 - RNA, 18 nt, Human
ucaccuuaggcagggaag

SEQ ID NO: 2128767 - RNA, 20 nt, Human
ucaccuuaggcagggaagug

SEQ ID NO: 2128768 - RNA, 21 nt, Human
accagccuccaugcugccucc

SEQ ID NO: 2128769 - RNA, 20 nt, Human
accagccuccaugcugccuc

SEQ ID NO: 2128770 - RNA, 19 nt, Human
accagccuccaugcugccu

SEQ ID NO: 2128771 - RNA, 14 nt, Human
accagccuccaugc

SEQ ID NO: 2128772 - RNA, 17 nt, Human
accagagcccaccuugg

SEQ ID NO: 2128773 - RNA, 18 nt, Human
accaggcuugccugcagg

SEQ ID NO: 2128774 - RNA, 19 nt, Human
accaggcugcucagggcug

SEQ ID NO: 2128775 - RNA, 23 nt, Human
accaggcgagagacuuguggccu

SEQ ID NO: 2128776 - RNA, 20 nt, Human
accagccuccguauuucaga

SEQ ID NO: 2128777 - RNA, 23 nt, Human
accagccucucuugguuuccuuc

SEQ ID NO: 2128778 - RNA, 16 nt, Human
ucaccugaagacucau

SEQ ID NO: 2128779 - RNA, 18 nt, Human
ucaccucuggacuggcua

SEQ ID NO: 2128780 - RNA, 19 nt, Human
ucaccucuggacuggcuag

SEQ ID NO: 2128781 - RNA, 12 nt, Human
ucaccucugccu

SEQ ID NO: 2128782 - RNA, 13 nt, Human
ucaccucugccuc

SEQ ID NO: 2128783 - RNA, 14 nt, Human
ucaccucugccuca

SEQ ID NO: 2128784 - RNA, 15 nt, Human
ucaccucugccucaa

SEQ ID NO: 2128785 - RNA, 20 nt, Human
ucaccucuaaaacaguccuu

SEQ ID NO: 2128786 - RNA, 19 nt, Human
accaggcuugccugcaggc

SEQ ID NO: 2128787 - RNA, 23 nt, Human
ucaccucuuaugcacaccuccca

SEQ ID NO: 2128788 - RNA, 11 nt, Human
accagacaggu

SEQ ID NO: 2128789 - RNA, 14 nt, Human
accagacaccuuga

SEQ ID NO: 2128790 - RNA, 19 nt, Human
accagacgguucaccagcc

SEQ ID NO: 2128791 - RNA, 20 nt, Human
accagacgguucaccagccu

SEQ ID NO: 2128792 - RNA, 16 nt, Human
accagagcccaccuug

SEQ ID NO: 2128793 - RNA, 14 nt, Human
accagagcccaccu

SEQ ID NO: 2128794 - RNA, 12 nt, Human
accagagcccac

SEQ ID NO: 2128795 - RNA, 23 nt, Human
accagacuacuugggagcaccgc

SEQ ID NO: 2128796 - RNA, 21 nt, Human
accagacuacuugggagcacc

SEQ ID NO: 2128797 - RNA, 16 nt, Human
accagaaaucaaaaag

SEQ ID NO: 2128798 - RNA, 15 nt, Human
accagaagcaacaga

SEQ ID NO: 2128799 - RNA, 14 nt, Human
accagaagccaaag

SEQ ID NO: 2128800 - RNA, 14 nt, Human
accagaagggaaac

SEQ ID NO: 2128801 - RNA, 16 nt, Human
accagaagggaaacag

SEQ ID NO: 2128802 - RNA, 17 nt, Human
accacugcacuccagcc

SEQ ID NO: 2128803 - RNA, 20 nt, Human
accacugcacuccagccugg

SEQ ID NO: 2128804 - RNA, 19 nt, Human
accacugcugugaacaagu

SEQ ID NO: 2128805 - RNA, 21 nt, Human
accacugcacuccagccuggg

SEQ ID NO: 2128806 - RNA, 18 nt, Human
accacugcacuccagccu

SEQ ID NO: 2128807 - RNA, 17 nt, Human
accacuucauucuugaa

SEQ ID NO: 2128808 - RNA, 13 nt, Human
accacuucauucu

SEQ ID NO: 2128809 - RNA, 15 nt, Human
accacuucuuuuaua

SEQ ID NO: 2128810 - RNA, 16 nt, Human
accacuucuuuuauaa

SEQ ID NO: 2128811 - RNA, 17 nt, Human
accacuucuuuuauaac

SEQ ID NO: 2128812 - RNA, 19 nt, Human
accacuguaaaaugaaauu

SEQ ID NO: 2128813 - RNA, 20 nt, Human
accacuguaaaaugaaauua

SEQ ID NO: 2128814 - RNA, 17 nt, Human
ucagaaucucucuucuu

SEQ ID NO: 2128815 - RNA, 17 nt, Human
ucagaaucugaauguaa

SEQ ID NO: 2128816 - RNA, 18 nt, Human
ucagaaucugaauguaau

SEQ ID NO: 2128817 - RNA, 22 nt, Human
ucagaaucugaauguaauuugu

SEQ ID NO: 2128818 - RNA, 14 nt, Human
ucagaaucuuuccu

SEQ ID NO: 2128819 - RNA, 15 nt, Human
ucagaaucuuuccuu

SEQ ID NO: 2128820 - RNA, 21 nt, Human
ucagaaucuuuccuuccucuc

SEQ ID NO: 2128821 - RNA, 18 nt, Human
ucagaaucucaaauaacu

SEQ ID NO: 2128822 - RNA, 19 nt, Human
ucagaaucucaaauaacua

SEQ ID NO: 2128823 - RNA, 18 nt, Human
ucagagccugcaguuauu

SEQ ID NO: 2128824 - RNA, 15 nt, Human
ucagagccugcaguu

SEQ ID NO: 2128825 - RNA, 14 nt, Human
ucagagccugcagu

SEQ ID NO: 2128826 - RNA, 13 nt, Human
ucagagccugcag

SEQ ID NO: 2128827 - RNA, 12 nt, Human
ucagagccugca

SEQ ID NO: 2128828 - RNA, 19 nt, Human
ucagaaggagaaggaagga

SEQ ID NO: 2128829 - RNA, 23 nt, Human
ucagaaggagaaggaaggagacu

SEQ ID NO: 2128830 - RNA, 12 nt, Human
ucagaaggagaa

SEQ ID NO: 2128831 - RNA, 13 nt, Human
ucagaaggagaag

SEQ ID NO: 2128832 - RNA, 14 nt, Human
ucagaaggagaagg

SEQ ID NO: 2128833 - RNA, 16 nt, Human
ucagaaggagaaggaa

SEQ ID NO: 2128834 - RNA, 18 nt, Human
ucagaaggagaaggaagg

SEQ ID NO: 2128835 - RNA, 19 nt, Human
ucagaaguuucucagcucc

SEQ ID NO: 2128836 - RNA, 14 nt, Human
ucagaagacacuga

SEQ ID NO: 2128837 - RNA, 16 nt, Human
ucagaagccuauugua

SEQ ID NO: 2128838 - RNA, 20 nt, Human
ucagaagccuauuguaaaua

SEQ ID NO: 2128839 - RNA, 22 nt, Human
ucagaagccuauuguaaauaca

SEQ ID NO: 2128840 - RNA, 13 nt, Human
ucagaagccugag

SEQ ID NO: 2128841 - RNA, 15 nt, Human
ucagaagccugaggc

SEQ ID NO: 2128842 - RNA, 20 nt, Human
ucagaagccugaggcuggga

SEQ ID NO: 2128843 - RNA, 21 nt, Human
acccagccccuugagaaaccu

SEQ ID NO: 2128844 - RNA, 20 nt, Human
acccagccccuugagaaacc

SEQ ID NO: 2128845 - RNA, 17 nt, Human
acccagccccuugagaa

SEQ ID NO: 2128846 - RNA, 16 nt, Human
acccagccccuugaga

SEQ ID NO: 2128847 - RNA, 19 nt, Human
acccagcccauucucucuc

SEQ ID NO: 2128848 - RNA, 22 nt, Human
acccagcccauucucucuccug

SEQ ID NO: 2128849 - RNA, 23 nt, Human
acccagcccauucucucuccugu

SEQ ID NO: 2128850 - RNA, 14 nt, Human
accauguacauagc

SEQ ID NO: 2128851 - RNA, 13 nt, Human
accauguaaaaca

SEQ ID NO: 2128852 - RNA, 14 nt, Human
accauguaaaacaa

SEQ ID NO: 2128853 - RNA, 15 nt, Human
accauguaaaacaaa

SEQ ID NO: 2128854 - RNA, 17 nt, Human
accauguaaaacaaaaa

SEQ ID NO: 2128855 - RNA, 20 nt, Human
accauguaaaacaaaaaaca

SEQ ID NO: 2128856 - RNA, 21 nt, Human
accauguaaaacaaaaaacaa

SEQ ID NO: 2128857 - RNA, 22 nt, Human
accauguaaaacaaaaaacaau

SEQ ID NO: 2128858 - RNA, 23 nt, Human
ucacucuuauugcccacgcugga

SEQ ID NO: 2128859 - RNA, 21 nt, Human
ucacucuuauugcccacgcug

SEQ ID NO: 2128860 - RNA, 15 nt, Human
ucacuccuaccuggu

SEQ ID NO: 2128861 - RNA, 12 nt, Human
accauugcugcu

SEQ ID NO: 2128862 - RNA, 16 nt, Human
accauugcugcuccuu

SEQ ID NO: 2128863 - RNA, 23 nt, Human
accauugcugcuccuuagcugcc

SEQ ID NO: 2128864 - RNA, 11 nt, Human
accauugcuuc

SEQ ID NO: 2128865 - RNA, 13 nt, Human
accauugcuucac

SEQ ID NO: 2128866 - RNA, 15 nt, Human
accauugcuucacua

SEQ ID NO: 2128867 - RNA, 16 nt, Human
accauugcuucacuac

SEQ ID NO: 2128868 - RNA, 20 nt, Human
accauugcuucacuacccau

SEQ ID NO: 2128869 - RNA, 21 nt, Human
accauugcuucacuacccauc

SEQ ID NO: 2128870 - RNA, 20 nt, Human
accauucaggaaccuggacc

SEQ ID NO: 2128871 - RNA, 18 nt, Human
accauuaugaagaagaga

SEQ ID NO: 2128872 - RNA, 21 nt, Human
accauguuugagcucagaccc

SEQ ID NO: 2128873 - RNA, 11 nt, Human
acccacugcuu

SEQ ID NO: 2128874 - RNA, 15 nt, Human
acccacugcucuggu

SEQ ID NO: 2128875 - RNA, 14 nt, Human
acccacugcucugg

SEQ ID NO: 2128876 - RNA, 13 nt, Human
acccacugcucug

SEQ ID NO: 2128877 - RNA, 14 nt, Human
acccagcccauucu

SEQ ID NO: 2128878 - RNA, 17 nt, Human
acccagagaggaaucag

SEQ ID NO: 2128879 - RNA, 13 nt, Human
accauuuguaaua

SEQ ID NO: 2128880 - RNA, 14 nt, Human
accauuuguaauaa

SEQ ID NO: 2128881 - RNA, 15 nt, Human
accauuuguaauaaa

SEQ ID NO: 2128882 - RNA, 16 nt, Human
accauuuguaauaaag

SEQ ID NO: 2128883 - RNA, 18 nt, Human
accauuuguaauaaagua

SEQ ID NO: 2128884 - RNA, 19 nt, Human
accauuuguaauaaaguau

SEQ ID NO: 2128885 - RNA, 21 nt, Human
accauuuguaauaaaguauau

SEQ ID NO: 2128886 - RNA, 19 nt, Human
accauugucucagagcagg

SEQ ID NO: 2128887 - RNA, 18 nt, Human
accauugucucagagcag

SEQ ID NO: 2128888 - RNA, 15 nt, Human
accauugucucagag

SEQ ID NO: 2128889 - RNA, 14 nt, Human
accauugucucaga

SEQ ID NO: 2128890 - RNA, 11 nt, Human
acccacugcuc

SEQ ID NO: 2128891 - RNA, 10 nt, Human
acccacugcu

SEQ ID NO: 2128892 - RNA, 16 nt, Human
acccccaaauuuucuu

SEQ ID NO: 2128893 - RNA, 15 nt, Human
acccccacaccucag

SEQ ID NO: 2128894 - RNA, 17 nt, Human
acccccacaccucaguu

SEQ ID NO: 2128895 - RNA, 16 nt, Human
acccccaaggggcagu

SEQ ID NO: 2128896 - RNA, 21 nt, Human
accccaccuuuauuccuucau

SEQ ID NO: 2128897 - RNA, 16 nt, Human
accccacucacagaga

SEQ ID NO: 2128898 - RNA, 18 nt, Human
accccacucacagagaca

SEQ ID NO: 2128899 - RNA, 19 nt, Human
accccacccuuccccuccu

SEQ ID NO: 2128900 - RNA, 13 nt, Human
accccacccuucc

SEQ ID NO: 2128901 - RNA, 24 nt, Human
acccagcgagcccugguggcagug

SEQ ID NO: 2128902 - RNA, 17 nt, Human
acccaggaguguggcca

SEQ ID NO: 2128903 - RNA, 19 nt, Human
acccaggcuggagugcagu

SEQ ID NO: 2128904 - RNA, 23 nt, Human
ucagccaaauguaauugaauaaa

SEQ ID NO: 2128905 - RNA, 20 nt, Human
ucagccagugaccaaccuuu

SEQ ID NO: 2128906 - RNA, 23 nt, Human
ucagccaugaggaguugcuguuu

SEQ ID NO: 2128907 - RNA, 19 nt, Human
ucagccaggagcugggcag

SEQ ID NO: 2128908 - RNA, 14 nt, Human
ucagccaaauguaa

SEQ ID NO: 2128909 - RNA, 18 nt, Human
ucagcauucuuagccugu

SEQ ID NO: 2128910 - RNA, 20 nt, Human
ucagcauucuuagccugugg

SEQ ID NO: 2128911 - RNA, 21 nt, Human
ucagcauucuuagccuguggc

SEQ ID NO: 2128912 - RNA, 16 nt, Human
ucagccaaauguaauu

SEQ ID NO: 2128913 - RNA, 22 nt, Human
ucagccaaauguaauugaauaa

SEQ ID NO: 2128914 - RNA, 17 nt, Human
ucagccaaccuuacuua

SEQ ID NO: 2128915 - RNA, 22 nt, Human
ucagccaaccuuacuuacagca

SEQ ID NO: 2128916 - RNA, 21 nt, Human
ucagccaacgaguaauuuauu

SEQ ID NO: 2128917 - RNA, 21 nt, Human
ucagagccuccuuucuggcuu

SEQ ID NO: 2128918 - RNA, 19 nt, Human
ucagccuacaggccucaca

SEQ ID NO: 2128919 - RNA, 18 nt, Human
ucagccuagccgaccuca

SEQ ID NO: 2128920 - RNA, 19 nt, Human
ucagccuagccgaccucag

SEQ ID NO: 2128921 - RNA, 20 nt, Human
ucagccuagccgaccucagc

SEQ ID NO: 2128922 - RNA, 21 nt, Human
ucagccuagccgaccucagcc

SEQ ID NO: 2128923 - RNA, 22 nt, Human
ucagccuagccgaccucagccu

SEQ ID NO: 2128924 - RNA, 23 nt, Human
acccagcgagcccugguggcagu

SEQ ID NO: 2128925 - RNA, 19 nt, Human
acccagcgagcccuggugg

SEQ ID NO: 2128926 - RNA, 23 nt, Human
ucagccguguaaccauggaccca

SEQ ID NO: 2128927 - RNA, 14 nt, Human
ucagcccacccccc

SEQ ID NO: 2128928 - RNA, 21 nt, Human
ucagcccugggccccaccacc

SEQ ID NO: 2128929 - RNA, 22 nt, Human
ucagcccugggccccaccaccu

SEQ ID NO: 2128930 - RNA, 23 nt, Human
ucagcccugggccccaccaccua

SEQ ID NO: 2128931 - RNA, 12 nt, Human
ucagcccacccc

SEQ ID NO: 2128932 - RNA, 13 nt, Human
ucagcccaccccc

SEQ ID NO: 2128933 - RNA, 21 nt, Human
ucagccaugaggaguugcugu

SEQ ID NO: 2128934 - RNA, 20 nt, Human
ucagcuuuuugucuuuucug

SEQ ID NO: 2128935 - RNA, 14 nt, Human
ucagcuucuuaaua

SEQ ID NO: 2128936 - RNA, 15 nt, Human
ucagcuugcugcccu

SEQ ID NO: 2128937 - RNA, 20 nt, Human
ucaggaaaacugacagagga

SEQ ID NO: 2128938 - RNA, 21 nt, Human
ucaggaaaacugacagaggag

SEQ ID NO: 2128939 - RNA, 22 nt, Human
ucaggaaaacugacagaggagg

SEQ ID NO: 2128940 - RNA, 14 nt, Human
ucaggaaagacgga

SEQ ID NO: 2128941 - RNA, 20 nt, Human
ucagcuauuuacugccaaag

SEQ ID NO: 2128942 - RNA, 19 nt, Human
ucagcuauuuacugccaaa

SEQ ID NO: 2128943 - RNA, 17 nt, Human
ucagcuagcaaaagaag

SEQ ID NO: 2128944 - RNA, 22 nt, Human
ucagcuagcaaaagaaguaaca

SEQ ID NO: 2128945 - RNA, 14 nt, Human
ucagcggggacagc

SEQ ID NO: 2128946 - RNA, 20 nt, Human
ucagcuuguaaauagcucag

SEQ ID NO: 2128947 - RNA, 13 nt, Human
ucagcuucuuaau

SEQ ID NO: 2128948 - RNA, 19 nt, Human
accccuguggagcccgcac

SEQ ID NO: 2128949 - RNA, 13 nt, Human
accccuguggagc

SEQ ID NO: 2128950 - RNA, 18 nt, Human
accccuguggagcccgca

SEQ ID NO: 2128951 - RNA, 15 nt, Human
accccuucgcuccug

SEQ ID NO: 2128952 - RNA, 14 nt, Human
accccuucgcuccu

SEQ ID NO: 2128953 - RNA, 16 nt, Human
accccuucgcuccugu

SEQ ID NO: 2128954 - RNA, 22 nt, Human
ucagccuuggauaaugcuguug

SEQ ID NO: 2128955 - RNA, 12 nt, Human
acccccacccca

SEQ ID NO: 2128956 - RNA, 14 nt, Human
acccccaccccaca

SEQ ID NO: 2128957 - RNA, 12 nt, Human
accccccucauu

SEQ ID NO: 2128958 - RNA, 12 nt, Human
accccccugggc

SEQ ID NO: 2128959 - RNA, 15 nt, Human
accccccugggcuga

SEQ ID NO: 2128960 - RNA, 15 nt, Human
acccccaccccacac

SEQ ID NO: 2128961 - RNA, 15 nt, Human
ucaagacuuccagag

SEQ ID NO: 2128962 - RNA, 22 nt, Human
ucaagacccuuuuggguuucug

SEQ ID NO: 2128963 - RNA, 16 nt, Human
ucaagaccuucucccc

SEQ ID NO: 2128964 - RNA, 13 nt, Human
ucaagaccagccu

SEQ ID NO: 2128965 - RNA, 15 nt, Human
ucaagaccagccugg

SEQ ID NO: 2128966 - RNA, 16 nt, Human
ucaagaccagccuggc

SEQ ID NO: 2128967 - RNA, 16 nt, Human
ucaagaccccugucuu

SEQ ID NO: 2128968 - RNA, 23 nt, Human
ucaagaagaagauggauuggugu

SEQ ID NO: 2128969 - RNA, 17 nt, Human
ucaagaaagccagucuu

SEQ ID NO: 2128970 - RNA, 18 nt, Human
ucaagaaagccagucuua

SEQ ID NO: 2128971 - RNA, 20 nt, Human
ucaagaaagccagucuuaac

SEQ ID NO: 2128972 - RNA, 14 nt, Human
ucaacaucaauguu

SEQ ID NO: 2128973 - RNA, 15 nt, Human
ucaacaucaauguuc

SEQ ID NO: 2128974 - RNA, 16 nt, Human
ucaacaucaauguuca

SEQ ID NO: 2128975 - RNA, 17 nt, Human
ucaacaucaauguucau

SEQ ID NO: 2128976 - RNA, 18 nt, Human
ucaacaucaauguucauu

SEQ ID NO: 2128977 - RNA, 19 nt, Human
ucaacaucaauguucauug

SEQ ID NO: 2128978 - RNA, 20 nt, Human
ucaacaucaauguucauugu

SEQ ID NO: 2128979 - RNA, 23 nt, Human
ucaacaucaauguucauuguaau

SEQ ID NO: 2128980 - RNA, 15 nt, Human
ucaacauguuacuga

SEQ ID NO: 2128981 - RNA, 19 nt, Human
ucaacauguuacugaccag

SEQ ID NO: 2128982 - RNA, 21 nt, Human
ucaacaucaauguucauugua

SEQ ID NO: 2128983 - RNA, 15 nt, Human
ucaacaucuuuuaca

SEQ ID NO: 2128984 - RNA, 22 nt, Human
ucaacauguuacugaccagcaa

SEQ ID NO: 2128985 - RNA, 20 nt, Human
ucaacauguuacugaccagc

SEQ ID NO: 2128986 - RNA, 21 nt, Human
ucaacauguuacugaccagca

SEQ ID NO: 2128987 - RNA, 17 nt, Human
ucaagaugucagacugg

SEQ ID NO: 2128988 - RNA, 16 nt, Human
ucaagggggacugucu

SEQ ID NO: 2128989 - RNA, 14 nt, Human
ucaagggcuguagg

SEQ ID NO: 2128990 - RNA, 18 nt, Human
ucaagaugucagacuggc

SEQ ID NO: 2128991 - RNA, 20 nt, Human
ucaagauguccuccuuguuc

SEQ ID NO: 2128992 - RNA, 15 nt, Human
ucaaggucguuuuuu

SEQ ID NO: 2128993 - RNA, 15 nt, Human
ucaagguaaaauucu

SEQ ID NO: 2128994 - RNA, 16 nt, Human
ucaagguaaaauucua

SEQ ID NO: 2128995 - RNA, 17 nt, Human
ucaagguaaaauucuaa

SEQ ID NO: 2128996 - RNA, 18 nt, Human
ucaagguaaaauucuaaa

SEQ ID NO: 2128997 - RNA, 20 nt, Human
ucaagguaaaauucuaaaua

SEQ ID NO: 2128998 - RNA, 15 nt, Human
ucaaguauccuuguu

SEQ ID NO: 2128999 - RNA, 15 nt, Human
ucaaguauuggcaaa

SEQ ID NO: 2129000 - RNA, 16 nt, Human
ucaaguauuggcaaag

SEQ ID NO: 2129001 - RNA, 22 nt, Human
acauuagcaguuugcuuuguau

SEQ ID NO: 2129002 - RNA, 18 nt, Human
acauuagcaguuugcuuu

SEQ ID NO: 2129003 - RNA, 19 nt, Human
acauuaggcauugagacuu

SEQ ID NO: 2129004 - RNA, 22 nt, Human
acauuaacaguuuuccaugaaa

SEQ ID NO: 2129005 - RNA, 16 nt, Human
acauuaacaguuuucc

SEQ ID NO: 2129006 - RNA, 17 nt, Human
acauuaacaguuuucca

SEQ ID NO: 2129007 - RNA, 18 nt, Human
acauuaacaguuuuccau

SEQ ID NO: 2129008 - RNA, 20 nt, Human
acauuaacaguuuuccauga

SEQ ID NO: 2129009 - RNA, 18 nt, Human
acauuaguucuauuucua

SEQ ID NO: 2129010 - RNA, 19 nt, Human
acauuaguucuauuucuau

SEQ ID NO: 2129011 - RNA, 22 nt, Human
acauucaagauuaaacugagug

SEQ ID NO: 2129012 - RNA, 23 nt, Human
acauucaagauuaaacugaguga

SEQ ID NO: 2129013 - RNA, 15 nt, Human
acauucaauaagcau

SEQ ID NO: 2129014 - RNA, 12 nt, Human
acauucaauguu

SEQ ID NO: 2129015 - RNA, 16 nt, Human
acauucagaacaccaa

SEQ ID NO: 2129016 - RNA, 23 nt, Human
acauucaauaagcaucaaacucu

SEQ ID NO: 2129017 - RNA, 15 nt, Human
acaugucccuacacc

SEQ ID NO: 2129018 - RNA, 11 nt, Human
acauuaacagu

SEQ ID NO: 2129019 - RNA, 12 nt, Human
acauuaacaguu

SEQ ID NO: 2129020 - RNA, 21 nt, Human
acaugcugaacaucacagcuu

SEQ ID NO: 2129021 - RNA, 14 nt, Human
acaugcugaacauc

SEQ ID NO: 2129022 - RNA, 18 nt, Human
acaugcuggacaggucug

SEQ ID NO: 2129023 - RNA, 22 nt, Human
acaugcuggacaggucugggag

SEQ ID NO: 2129024 - RNA, 12 nt, Human
ucaacagagaag

SEQ ID NO: 2129025 - RNA, 17 nt, Human
ucaacagagaaggcagg

SEQ ID NO: 2129026 - RNA, 19 nt, Human
ucaacagagaaggcaggaa

SEQ ID NO: 2129027 - RNA, 22 nt, Human
ucaacagagaaggcaggaaugu

SEQ ID NO: 2129028 - RNA, 14 nt, Human
ucaacagggcagca

SEQ ID NO: 2129029 - RNA, 23 nt, Human
ucaaauuuguaggguuucuaggu

SEQ ID NO: 2129030 - RNA, 20 nt, Human
ucaaauuuguaggguuucua

SEQ ID NO: 2129031 - RNA, 23 nt, Human
ucaacacuuaaggguuuuagaaa

SEQ ID NO: 2129032 - RNA, 18 nt, Human
acauucugcuuucaucuu

SEQ ID NO: 2129033 - RNA, 14 nt, Human
acauucuguaaaau

SEQ ID NO: 2129034 - RNA, 16 nt, Human
acauucugccaggccc

SEQ ID NO: 2129035 - RNA, 12 nt, Human
acauucugcuuu

SEQ ID NO: 2129036 - RNA, 17 nt, Human
ucaaagcugaagccgcc

SEQ ID NO: 2129037 - RNA, 19 nt, Human
ucaaaggcacagugaaggc

SEQ ID NO: 2129038 - RNA, 20 nt, Human
ucaaagcuugaagaucguua

SEQ ID NO: 2129039 - RNA, 17 nt, Human
ucaaagcuuccauucca

SEQ ID NO: 2129040 - RNA, 21 nt, Human
ucaaagcuuccauuccacauc

SEQ ID NO: 2129041 - RNA, 14 nt, Human
ucaaagcuugaaga

SEQ ID NO: 2129042 - RNA, 18 nt, Human
ucaaagccaaguuuauau

SEQ ID NO: 2129043 - RNA, 14 nt, Human
ucaaacaaagccag

SEQ ID NO: 2129044 - RNA, 15 nt, Human
ucaaacaaagccaga

SEQ ID NO: 2129045 - RNA, 16 nt, Human
ucaaacaaagccagaa

SEQ ID NO: 2129046 - RNA, 17 nt, Human
ucaaacaaagccagaag

SEQ ID NO: 2129047 - RNA, 21 nt, Human
ucaaacaaagccagaagcuga

SEQ ID NO: 2129048 - RNA, 13 nt, Human
ucaaauacaucuu

SEQ ID NO: 2129049 - RNA, 18 nt, Human
ucaaauaacuaaaaggua

SEQ ID NO: 2129050 - RNA, 21 nt, Human
acaugcuaccugaucccacuc

SEQ ID NO: 2129051 - RNA, 15 nt, Human
acaugaucuucuuua

SEQ ID NO: 2129052 - RNA, 17 nt, Human
acaugaucuucuuuaua

SEQ ID NO: 2129053 - RNA, 15 nt, Human
ucaaaauauguucuu

SEQ ID NO: 2129054 - RNA, 13 nt, Human
ucaaaauaaaaac

SEQ ID NO: 2129055 - RNA, 20 nt, Human
ucaaaauaaaaaccaagaag

SEQ ID NO: 2129056 - RNA, 14 nt, Human
ucaaaauaaauuga

SEQ ID NO: 2129057 - RNA, 16 nt, Human
ucaaaauaaauugaaa

SEQ ID NO: 2129058 - RNA, 18 nt, Human
ucaaaagcaaaugagauc

SEQ ID NO: 2129059 - RNA, 14 nt, Human
ucaaaaguugaaau

SEQ ID NO: 2129060 - RNA, 15 nt, Human
ucaaaaguugaaauu

SEQ ID NO: 2129061 - RNA, 16 nt, Human
ucaaaaguugaaauua

SEQ ID NO: 2129062 - RNA, 15 nt, Human
ucaaaaugacagcca

SEQ ID NO: 2129063 - RNA, 14 nt, Human
ucaaaaugucugua

SEQ ID NO: 2129064 - RNA, 19 nt, Human
ucaaaagaaucagaaacag

SEQ ID NO: 2129065 - RNA, 19 nt, Human
uauuuuuauauagcuugaa

SEQ ID NO: 2129066 - RNA, 23 nt, Human
uauuuuuauauagcuugaaacau

SEQ ID NO: 2129067 - RNA, 15 nt, Human
uauuuuuauacagua

SEQ ID NO: 2129068 - RNA, 13 nt, Human
uauuuuuagaugg

SEQ ID NO: 2129069 - RNA, 20 nt, Human
uauuuuuagaugguuacacu

SEQ ID NO: 2129070 - RNA, 22 nt, Human
uauuuuuagaugguuacacugu

SEQ ID NO: 2129071 - RNA, 23 nt, Human
uauuuuuagaugguuacacuguu

SEQ ID NO: 2129072 - RNA, 16 nt, Human
acaucucauccaucaa

SEQ ID NO: 2129073 - RNA, 17 nt, Human
uauuuuuaauuaaauaa

SEQ ID NO: 2129074 - RNA, 21 nt, Human
acauagcuuacaagccagcug

SEQ ID NO: 2129075 - RNA, 15 nt, Human
acauagaugucccuu

SEQ ID NO: 2129076 - RNA, 17 nt, Human
acauagauucaccugua

SEQ ID NO: 2129077 - RNA, 19 nt, Human
acauagauucaccuguaaa

SEQ ID NO: 2129078 - RNA, 20 nt, Human
acauagauucaccuguaaaa

SEQ ID NO: 2129079 - RNA, 22 nt, Human
acauagauucaccuguaaaacu

SEQ ID NO: 2129080 - RNA, 16 nt, Human
acauagacuagagaaa

SEQ ID NO: 2129081 - RNA, 17 nt, Human
acauagacuagagaaac

SEQ ID NO: 2129082 - RNA, 13 nt, Human
acauagauguccc

SEQ ID NO: 2129083 - RNA, 20 nt, Human
acauauaaacaucacacaca

SEQ ID NO: 2129084 - RNA, 17 nt, Human
acauaguguaggcuuua

SEQ ID NO: 2129085 - RNA, 19 nt, Human
acauaguguaggcuuuacu

SEQ ID NO: 2129086 - RNA, 23 nt, Human
acauaguguaggcuuuacuuagc

SEQ ID NO: 2129087 - RNA, 16 nt, Human
acauauaauauauguu

SEQ ID NO: 2129088 - RNA, 21 nt, Human
acauagugaugguuccccugu

SEQ ID NO: 2129089 - RNA, 16 nt, Human
acauagugaugguucc

SEQ ID NO: 2129090 - RNA, 16 nt, Human
acauagugaaaguuua

SEQ ID NO: 2129091 - RNA, 22 nt, Human
acauagcuugauaaagggccaa

SEQ ID NO: 2129092 - RNA, 13 nt, Human
acauaugugaaua

SEQ ID NO: 2129093 - RNA, 13 nt, Human
acauauguaaaau

SEQ ID NO: 2129094 - RNA, 14 nt, Human
acauauguaaaaua

SEQ ID NO: 2129095 - RNA, 18 nt, Human
acauauuaggaaaauaug

SEQ ID NO: 2129096 - RNA, 14 nt, Human
acauauuaugucuu

SEQ ID NO: 2129097 - RNA, 15 nt, Human
acauauauacacaca

SEQ ID NO: 2129098 - RNA, 20 nt, Human
acauauauauauuuuuuaau

SEQ ID NO: 2129099 - RNA, 15 nt, Human
acauaugaaauuuaa

SEQ ID NO: 2129100 - RNA, 18 nt, Human
acauaugaaauuuaauau

SEQ ID NO: 2129101 - RNA, 15 nt, Human
acauaugaaaauaca

SEQ ID NO: 2129102 - RNA, 16 nt, Human
acaucaacaucuuggu

SEQ ID NO: 2129103 - RNA, 18 nt, Human
acaucaacaucuugguca

SEQ ID NO: 2129104 - RNA, 14 nt, Human
acaucaagcacaga

SEQ ID NO: 2129105 - RNA, 18 nt, Human
acaucaagcacagaagga

SEQ ID NO: 2129106 - RNA, 13 nt, Human
acaucaauguuca

SEQ ID NO: 2129107 - RNA, 20 nt, Human
acaucaauguucauuguaau

SEQ ID NO: 2129108 - RNA, 17 nt, Human
acaucaauguucauugu

SEQ ID NO: 2129109 - RNA, 18 nt, Human
acaucaauguucauugua

SEQ ID NO: 2129110 - RNA, 14 nt, Human
acaucaauguucau

SEQ ID NO: 2129111 - RNA, 15 nt, Human
acaucaauguucauu

SEQ ID NO: 2129112 - RNA, 16 nt, Human
acaucaauguucauug

SEQ ID NO: 2129113 - RNA, 20 nt, Human
acauauuuguuaaauauuua

SEQ ID NO: 2129114 - RNA, 14 nt, Human
acauauuuguuaaa

SEQ ID NO: 2129115 - RNA, 19 nt, Human
acauauuuguuaaauauuu

SEQ ID NO: 2129116 - RNA, 20 nt, Human
acauauucauuuggaaauaa

SEQ ID NO: 2129117 - RNA, 12 nt, Human
acauauucauuu

SEQ ID NO: 2129118 - RNA, 13 nt, Human
acaucacacacac

SEQ ID NO: 2129119 - RNA, 20 nt, Human
acauaugcuuuaagaaucga

SEQ ID NO: 2129120 - RNA, 13 nt, Human
acaucacaggaca

SEQ ID NO: 2129121 - RNA, 14 nt, Human
acaucuuaguauuu

SEQ ID NO: 2129122 - RNA, 18 nt, Human
acaucuuaguauuugcau

SEQ ID NO: 2129123 - RNA, 16 nt, Human
acaucuguuuuaaauu

SEQ ID NO: 2129124 - RNA, 17 nt, Human
acaucuguuuuaaauuu

SEQ ID NO: 2129125 - RNA, 23 nt, Human
acaucuucccuagaggguuccug

SEQ ID NO: 2129126 - RNA, 16 nt, Human
acaucuucagcaaaua

SEQ ID NO: 2129127 - RNA, 13 nt, Human
acaucuucaaagc

SEQ ID NO: 2129128 - RNA, 11 nt, Human
acaucuuccac

SEQ ID NO: 2129129 - RNA, 15 nt, Human
acaucuuccacaggu

SEQ ID NO: 2129130 - RNA, 23 nt, Human
acaucuuccacaggucucagaau

SEQ ID NO: 2129131 - RNA, 14 nt, Human
acaucuugcucugc

SEQ ID NO: 2129132 - RNA, 13 nt, Human
acaucuugcucug

SEQ ID NO: 2129133 - RNA, 21 nt, Human
acaucuccuccauacucagga

SEQ ID NO: 2129134 - RNA, 20 nt, Human
acaucucuuugaugucauau

SEQ ID NO: 2129135 - RNA, 13 nt, Human
acaucugaaagcc

SEQ ID NO: 2129136 - RNA, 22 nt, Human
acaucuggaaaauaaaaggucu

SEQ ID NO: 2129137 - RNA, 19 nt, Human
acaucuugcucugcugaca

SEQ ID NO: 2129138 - RNA, 18 nt, Human
acaucuugcucugcugac

SEQ ID NO: 2129139 - RNA, 21 nt, Human
acaucuugcucugcugacaga

SEQ ID NO: 2129140 - RNA, 21 nt, Human
uauuugggguugcaucagaaa

SEQ ID NO: 2129141 - RNA, 22 nt, Human
uauuugggguugcaucagaaau

SEQ ID NO: 2129142 - RNA, 17 nt, Human
uauuugguacuguauuu

SEQ ID NO: 2129143 - RNA, 15 nt, Human
acaguuuuuauugcu

SEQ ID NO: 2129144 - RNA, 19 nt, Human
acaguuuuccuaaauguau

SEQ ID NO: 2129145 - RNA, 20 nt, Human
acaguuuuccuaaauguaua

SEQ ID NO: 2129146 - RNA, 14 nt, Human
acaguuuuccuucu

SEQ ID NO: 2129147 - RNA, 22 nt, Human
acaguuuuccuucucaucugug

SEQ ID NO: 2129148 - RNA, 13 nt, Human
acaguuuuaaaga

SEQ ID NO: 2129149 - RNA, 14 nt, Human
acaguuuuaaagaa

SEQ ID NO: 2129150 - RNA, 19 nt, Human
acaguuuuaaagaaucauu

SEQ ID NO: 2129151 - RNA, 21 nt, Human
acaguuuuaaagaaucauuau

SEQ ID NO: 2129152 - RNA, 12 nt, Human
acaguuuuccau

SEQ ID NO: 2129153 - RNA, 14 nt, Human
acaguuuuccauga

SEQ ID NO: 2129154 - RNA, 15 nt, Human
acaguuuuccaugaa

SEQ ID NO: 2129155 - RNA, 16 nt, Human
acaguuuuccaugaaa

SEQ ID NO: 2129156 - RNA, 17 nt, Human
acaguuuuccaugaaaa

SEQ ID NO: 2129157 - RNA, 18 nt, Human
acaguuuuccaugaaaac

SEQ ID NO: 2129158 - RNA, 19 nt, Human
acaguuuuccaugaaaacg

SEQ ID NO: 2129159 - RNA, 21 nt, Human
acaguuuuccaugaaaacguu

SEQ ID NO: 2129160 - RNA, 23 nt, Human
acaguuuuccaugaaaacguuuu

SEQ ID NO: 2129161 - RNA, 15 nt, Human
acauaccagcuuaga

SEQ ID NO: 2129162 - RNA, 14 nt, Human
acauacucugcuua

SEQ ID NO: 2129163 - RNA, 12 nt, Human
acauacuucagc

SEQ ID NO: 2129164 - RNA, 24 nt, Human
acauacuccuuccaucaaauagaa

SEQ ID NO: 2129165 - RNA, 12 nt, Human
acauacugcugu

SEQ ID NO: 2129166 - RNA, 15 nt, Human
uauuucgaaagcugc

SEQ ID NO: 2129167 - RNA, 15 nt, Human
uauuuccuuaaacug

SEQ ID NO: 2129168 - RNA, 19 nt, Human
uauuuccuuaaacugugug

SEQ ID NO: 2129169 - RNA, 18 nt, Human
uauuucccucucauuuug

SEQ ID NO: 2129170 - RNA, 23 nt, Human
uauuuccuauauuguuuucagug

SEQ ID NO: 2129171 - RNA, 22 nt, Human
uauuucccucaccuuucccauc

SEQ ID NO: 2129172 - RNA, 20 nt, Human
uaugaagaaaaaauacauuu

SEQ ID NO: 2129173 - RNA, 13 nt, Human
uaugaagaaaaaa

SEQ ID NO: 2129174 - RNA, 15 nt, Human
uaugaagaaaaaaua

SEQ ID NO: 2129175 - RNA, 16 nt, Human
uaugaagaaaaaauac

SEQ ID NO: 2129176 - RNA, 15 nt, Human
uaugaagaagagagu

SEQ ID NO: 2129177 - RNA, 21 nt, Human
uaugaagcuaccucaaacuuc

SEQ ID NO: 2129178 - RNA, 20 nt, Human
acaguugaaaaacagcugag

SEQ ID NO: 2129179 - RNA, 15 nt, Human
acaguugcugucaua

SEQ ID NO: 2129180 - RNA, 21 nt, Human
acaguugcugucauaagaaug

SEQ ID NO: 2129181 - RNA, 22 nt, Human
acaguugcugucauaagaauga

SEQ ID NO: 2129182 - RNA, 15 nt, Human
acaguugaaaaacag

SEQ ID NO: 2129183 - RNA, 16 nt, Human
acaguugaaaaacagc

SEQ ID NO: 2129184 - RNA, 22 nt, Human
acaguucuuuuguuguaaagag

SEQ ID NO: 2129185 - RNA, 20 nt, Human
acaguugggaaaauaugucc

SEQ ID NO: 2129186 - RNA, 19 nt, Human
acaguuucuuuuuucuuac

SEQ ID NO: 2129187 - RNA, 19 nt, Human
uccaaguccacaguggaac

SEQ ID NO: 2129188 - RNA, 18 nt, Human
uccaaggguacuaaggaa

SEQ ID NO: 2129189 - RNA, 21 nt, Human
uccaagcuggucccacucagu

SEQ ID NO: 2129190 - RNA, 14 nt, Human
uccaauccucacug

SEQ ID NO: 2129191 - RNA, 15 nt, Human
uccaauccucacugg

SEQ ID NO: 2129192 - RNA, 16 nt, Human
uccaauccucacuggg

SEQ ID NO: 2129193 - RNA, 17 nt, Human
uccaauccucacugggu

SEQ ID NO: 2129194 - RNA, 18 nt, Human
uccaauccucacugggug

SEQ ID NO: 2129195 - RNA, 22 nt, Human
uccaauccuggcucuguggcuu

SEQ ID NO: 2129196 - RNA, 18 nt, Human
uccaaucccaccaacccu

SEQ ID NO: 2129197 - RNA, 20 nt, Human
uccaagcuggucccacucag

SEQ ID NO: 2129198 - RNA, 16 nt, Human
uccaagcuggucccac

SEQ ID NO: 2129199 - RNA, 15 nt, Human
uccaacuucauuuga

SEQ ID NO: 2129200 - RNA, 15 nt, Human
accugaaaauguuag

SEQ ID NO: 2129201 - RNA, 12 nt, Human
uccaacugcugc

SEQ ID NO: 2129202 - RNA, 16 nt, Human
uccaacugcugcccca

SEQ ID NO: 2129203 - RNA, 12 nt, Human
uccaacuccagu

SEQ ID NO: 2129204 - RNA, 21 nt, Human
uccaacuccaguacuggagcu

SEQ ID NO: 2129205 - RNA, 24 nt, Human
uccaacucuucccccucucccagu

SEQ ID NO: 2129206 - RNA, 11 nt, Human
uccaacuccag

SEQ ID NO: 2129207 - RNA, 18 nt, Human
uccaaccuaaccccuuuc

SEQ ID NO: 2129208 - RNA, 20 nt, Human
uccaaccuaaccccuuuccu

SEQ ID NO: 2129209 - RNA, 21 nt, Human
uccaaccuaaccccuuuccug

SEQ ID NO: 2129210 - RNA, 23 nt, Human
uccaaccuaaccccuuuccugcg

SEQ ID NO: 2129211 - RNA, 14 nt, Human
uccaaccuggacaa

SEQ ID NO: 2129212 - RNA, 17 nt, Human
uccaaccuggacaacaa

SEQ ID NO: 2129213 - RNA, 18 nt, Human
accugccacuaggcuggg

SEQ ID NO: 2129214 - RNA, 19 nt, Human
accugccacuaggcugggu

SEQ ID NO: 2129215 - RNA, 21 nt, Human
accugccacuaggcugggugc

SEQ ID NO: 2129216 - RNA, 22 nt, Human
accugccacuaggcugggugcc

SEQ ID NO: 2129217 - RNA, 14 nt, Human
accugccagccugg

SEQ ID NO: 2129218 - RNA, 15 nt, Human
accugccagccuggc

SEQ ID NO: 2129219 - RNA, 16 nt, Human
accugccagccuggcu

SEQ ID NO: 2129220 - RNA, 18 nt, Human
accugccagccuggcuuc

SEQ ID NO: 2129221 - RNA, 21 nt, Human
accugccagccuggcuucugg

SEQ ID NO: 2129222 - RNA, 15 nt, Human
uccaacccaugauga

SEQ ID NO: 2129223 - RNA, 17 nt, Human
uccaaccccccaccugc

SEQ ID NO: 2129224 - RNA, 22 nt, Human
uccaacccaugaugagcuccuc

SEQ ID NO: 2129225 - RNA, 16 nt, Human
uccaacccgaggcccg

SEQ ID NO: 2129226 - RNA, 15 nt, Human
uccacccaggagccc

SEQ ID NO: 2129227 - RNA, 14 nt, Human
uccacccaggagcc

SEQ ID NO: 2129228 - RNA, 12 nt, Human
uccacccaggag

SEQ ID NO: 2129229 - RNA, 12 nt, Human
uccacccagccc

SEQ ID NO: 2129230 - RNA, 19 nt, Human
uccacccaccucagccucc

SEQ ID NO: 2129231 - RNA, 18 nt, Human
uccacccaccucagccuc

SEQ ID NO: 2129232 - RNA, 17 nt, Human
uccacccaccucagccu

SEQ ID NO: 2129233 - RNA, 14 nt, Human
uccaaucuuguuuc

SEQ ID NO: 2129234 - RNA, 17 nt, Human
uccaaucuuguuuccaa

SEQ ID NO: 2129235 - RNA, 18 nt, Human
uccaaucuuguuuccaaa

SEQ ID NO: 2129236 - RNA, 13 nt, Human
uccacccagccca

SEQ ID NO: 2129237 - RNA, 14 nt, Human
uccacccagcccau

SEQ ID NO: 2129238 - RNA, 15 nt, Human
uccacccagcccauu

SEQ ID NO: 2129239 - RNA, 17 nt, Human
uccacccagcccauucu

SEQ ID NO: 2129240 - RNA, 17 nt, Human
accuggguucccuuucc

SEQ ID NO: 2129241 - RNA, 22 nt, Human
accuggguucccuuuccuucca

SEQ ID NO: 2129242 - RNA, 21 nt, Human
accuggucacaggacucugcc

SEQ ID NO: 2129243 - RNA, 20 nt, Human
accuguuuuuaagcuguuuc

SEQ ID NO: 2129244 - RNA, 19 nt, Human
accuguuuuuaagcuguuu

SEQ ID NO: 2129245 - RNA, 18 nt, Human
accuguuuuuaagcuguu

SEQ ID NO: 2129246 - RNA, 16 nt, Human
accuguuuuuaagcug

SEQ ID NO: 2129247 - RNA, 12 nt, Human
accuuaaauuaa

SEQ ID NO: 2129248 - RNA, 13 nt, Human
accuuaaauuaaa

SEQ ID NO: 2129249 - RNA, 14 nt, Human
accuuaaauuaaac

SEQ ID NO: 2129250 - RNA, 16 nt, Human
accuuaaauuaaacaa

SEQ ID NO: 2129251 - RNA, 17 nt, Human
accuuaaauuaaacaau

SEQ ID NO: 2129252 - RNA, 19 nt, Human
accuuaaauuaaacaauuu

SEQ ID NO: 2129253 - RNA, 21 nt, Human
accuuaaauuaaacaauuuau

SEQ ID NO: 2129254 - RNA, 22 nt, Human
accuuaaauuaaacaauuuauu

SEQ ID NO: 2129255 - RNA, 17 nt, Human
uccacucaggucuguuu

SEQ ID NO: 2129256 - RNA, 19 nt, Human
uccaccuucccaugcccug

SEQ ID NO: 2129257 - RNA, 18 nt, Human
uccaccuucccaugcccu

SEQ ID NO: 2129258 - RNA, 16 nt, Human
uccaccuucccaugcc

SEQ ID NO: 2129259 - RNA, 23 nt, Human
accuucaauaaaguaucuacaug

SEQ ID NO: 2129260 - RNA, 13 nt, Human
accuucaauaaag

SEQ ID NO: 2129261 - RNA, 14 nt, Human
accuucaauaaagu

SEQ ID NO: 2129262 - RNA, 15 nt, Human
accuucaauaaagua

SEQ ID NO: 2129263 - RNA, 17 nt, Human
accuucaauaaaguauc

SEQ ID NO: 2129264 - RNA, 19 nt, Human
accuucaauaaaguaucua

SEQ ID NO: 2129265 - RNA, 20 nt, Human
accuucaauaaaguaucuac

SEQ ID NO: 2129266 - RNA, 16 nt, Human
accuucaauuccuggg

SEQ ID NO: 2129267 - RNA, 12 nt, Human
accuucaauaaa

SEQ ID NO: 2129268 - RNA, 13 nt, Human
accuucaaagcug

SEQ ID NO: 2129269 - RNA, 14 nt, Human
accuucaaagcuga

SEQ ID NO: 2129270 - RNA, 11 nt, Human
accuuaucuua

SEQ ID NO: 2129271 - RNA, 18 nt, Human
accuuauuguacguuuaa

SEQ ID NO: 2129272 - RNA, 22 nt, Human
accuuauuguaccucucuuaua

SEQ ID NO: 2129273 - RNA, 20 nt, Human
accuuauuguaccucucuua

SEQ ID NO: 2129274 - RNA, 18 nt, Human
accuuauuguaccucucu

SEQ ID NO: 2129275 - RNA, 17 nt, Human
accuuauuguaccucuc

SEQ ID NO: 2129276 - RNA, 14 nt, Human
accuuauuguaccu

SEQ ID NO: 2129277 - RNA, 23 nt, Human
accuuaucugugcgugaaacaca

SEQ ID NO: 2129278 - RNA, 14 nt, Human
uccagagacuggga

SEQ ID NO: 2129279 - RNA, 19 nt, Human
uccagagagagaagugccc

SEQ ID NO: 2129280 - RNA, 18 nt, Human
uccagacccggcugcgug

SEQ ID NO: 2129281 - RNA, 15 nt, Human
uccagacccggcugc

SEQ ID NO: 2129282 - RNA, 19 nt, Human
uccagacccggcugcgugg

SEQ ID NO: 2129283 - RNA, 19 nt, Human
uccagacaaaccagaagca

SEQ ID NO: 2129284 - RNA, 24 nt, Human
uccagacaaaccagaagcaacaga

SEQ ID NO: 2129285 - RNA, 10 nt, Human
uccacuggac

SEQ ID NO: 2129286 - RNA, 12 nt, Human
uccacuggacuu

SEQ ID NO: 2129287 - RNA, 16 nt, Human
uccacuggacuugagc

SEQ ID NO: 2129288 - RNA, 22 nt, Human
uccacugccuucgauacaccgg

SEQ ID NO: 2129289 - RNA, 15 nt, Human
uccacugccuucgau

SEQ ID NO: 2129290 - RNA, 13 nt, Human
uccacugccuucg

SEQ ID NO: 2129291 - RNA, 12 nt, Human
uccacugcccuc

SEQ ID NO: 2129292 - RNA, 15 nt, Human
uccacugcccucugu

SEQ ID NO: 2129293 - RNA, 14 nt, Human
uccagacccggcug

SEQ ID NO: 2129294 - RNA, 17 nt, Human
uccacuggacuugagcu

SEQ ID NO: 2129295 - RNA, 14 nt, Human
uccagggaagcugg

SEQ ID NO: 2129296 - RNA, 16 nt, Human
uccagggaagcuggcc

SEQ ID NO: 2129297 - RNA, 12 nt, Human
uccagggaagcu

SEQ ID NO: 2129298 - RNA, 20 nt, Human
uccaggcugucuuucacuga

SEQ ID NO: 2129299 - RNA, 21 nt, Human
uccaggcuguaucccaugagc

SEQ ID NO: 2129300 - RNA, 12 nt, Human
acgaggaagccc

SEQ ID NO: 2129301 - RNA, 19 nt, Human
acgagacccuacaggagag

SEQ ID NO: 2129302 - RNA, 20 nt, Human
acgagacccuacaggagagg

SEQ ID NO: 2129303 - RNA, 17 nt, Human
uccagggaagcuggccg

SEQ ID NO: 2129304 - RNA, 18 nt, Human
uccagggaagcuggccga

SEQ ID NO: 2129305 - RNA, 17 nt, Human
acgagauaaugugaacu

SEQ ID NO: 2129306 - RNA, 19 nt, Human
acgagaucaagagaucaag

SEQ ID NO: 2129307 - RNA, 15 nt, Human
uccagagaguggcuc

SEQ ID NO: 2129308 - RNA, 21 nt, Human
uccagagagagaagugccccu

SEQ ID NO: 2129309 - RNA, 23 nt, Human
uccagagagagaagugccccugc

SEQ ID NO: 2129310 - RNA, 17 nt, Human
uccagagaguggcuccu

SEQ ID NO: 2129311 - RNA, 16 nt, Human
uccagagaguggcucc

SEQ ID NO: 2129312 - RNA, 14 nt, Human
uccaggcuguaucc

SEQ ID NO: 2129313 - RNA, 21 nt, Human
uccaggccaucagaggccuag

SEQ ID NO: 2129314 - RNA, 21 nt, Human
uccaggccccaaaaccacagc

SEQ ID NO: 2129315 - RNA, 15 nt, Human
accuacaguguacag

SEQ ID NO: 2129316 - RNA, 13 nt, Human
accuacagaauac

SEQ ID NO: 2129317 - RNA, 22 nt, Human
accuacagaauacuagccagag

SEQ ID NO: 2129318 - RNA, 22 nt, Human
accuacaccauuaucuuggaaa

SEQ ID NO: 2129319 - RNA, 19 nt, Human
accuaauuagagcagauga

SEQ ID NO: 2129320 - RNA, 19 nt, Human
accuaauguuuaugagcca

SEQ ID NO: 2129321 - RNA, 20 nt, Human
accuaauguuuaugagccag

SEQ ID NO: 2129322 - RNA, 15 nt, Human
accuaauuagagcag

SEQ ID NO: 2129323 - RNA, 16 nt, Human
accuaauuagagcaga

SEQ ID NO: 2129324 - RNA, 17 nt, Human
accuaaccccuuuccug

SEQ ID NO: 2129325 - RNA, 12 nt, Human
accuaauguuua

SEQ ID NO: 2129326 - RNA, 16 nt, Human
accuacaguguacagu

SEQ ID NO: 2129327 - RNA, 17 nt, Human
accuacaguguacaguc

SEQ ID NO: 2129328 - RNA, 18 nt, Human
accuacaguguacagucu

SEQ ID NO: 2129329 - RNA, 20 nt, Human
accuacaguguacagucuug

SEQ ID NO: 2129330 - RNA, 15 nt, Human
accuaccacaguguc

SEQ ID NO: 2129331 - RNA, 16 nt, Human
accuaccacagugucu

SEQ ID NO: 2129332 - RNA, 17 nt, Human
accuaccacagugucug

SEQ ID NO: 2129333 - RNA, 19 nt, Human
accuaccacagugucugua

SEQ ID NO: 2129334 - RNA, 15 nt, Human
accuaguagucauuu

SEQ ID NO: 2129335 - RNA, 23 nt, Human
accucaaacuuccagucagguag

SEQ ID NO: 2129336 - RNA, 15 nt, Human
accuauaaaacaggu

SEQ ID NO: 2129337 - RNA, 18 nt, Human
accuauaaaacaggucaa

SEQ ID NO: 2129338 - RNA, 18 nt, Human
ucaggaaauauauaugug

SEQ ID NO: 2129339 - RNA, 19 nt, Human
ucaggaaauauauaugugu

SEQ ID NO: 2129340 - RNA, 20 nt, Human
ucaggaaauauauaugugug

SEQ ID NO: 2129341 - RNA, 21 nt, Human
ucaggaaauauauaugugugu

SEQ ID NO: 2129342 - RNA, 13 nt, Human
ucaggaacacucu

SEQ ID NO: 2129343 - RNA, 13 nt, Human
ucaggaacagaag

SEQ ID NO: 2129344 - RNA, 14 nt, Human
ucaggaacagaagg

SEQ ID NO: 2129345 - RNA, 16 nt, Human
ucaggaacagaaggau

SEQ ID NO: 2129346 - RNA, 15 nt, Human
accuaaccccuuucc

SEQ ID NO: 2129347 - RNA, 16 nt, Human
accuaaccccuuuccu

SEQ ID NO: 2129348 - RNA, 11 nt, Human
accuaacauuc

SEQ ID NO: 2129349 - RNA, 12 nt, Human
accuaacauucg

SEQ ID NO: 2129350 - RNA, 19 nt, Human
accuaacauucgaucucau

SEQ ID NO: 2129351 - RNA, 20 nt, Human
accuaaauaaacacauagau

SEQ ID NO: 2129352 - RNA, 21 nt, Human
accuaaaaggaaaucucaccc

SEQ ID NO: 2129353 - RNA, 22 nt, Human
accuaaaaggaaaucucacccc

SEQ ID NO: 2129354 - RNA, 18 nt, Human
ucaggaacagcuauggga

SEQ ID NO: 2129355 - RNA, 15 nt, Human
accgcgucuggugac

SEQ ID NO: 2129356 - RNA, 13 nt, Human
accgcuccccagc

SEQ ID NO: 2129357 - RNA, 14 nt, Human
accgcuccccagcc

SEQ ID NO: 2129358 - RNA, 12 nt, Human
accuccugccuc

SEQ ID NO: 2129359 - RNA, 13 nt, Human
accuccugccucg

SEQ ID NO: 2129360 - RNA, 12 nt, Human
accucaaauuua

SEQ ID NO: 2129361 - RNA, 15 nt, Human
accucaaauuuaaag

SEQ ID NO: 2129362 - RNA, 21 nt, Human
accucaacccccauuucuauu

SEQ ID NO: 2129363 - RNA, 19 nt, Human
accucaacccccauuucua

SEQ ID NO: 2129364 - RNA, 15 nt, Human
accucaaccuguaaa

SEQ ID NO: 2129365 - RNA, 16 nt, Human
accucaaccuguaaau

SEQ ID NO: 2129366 - RNA, 17 nt, Human
accucaaccuguaaauu

SEQ ID NO: 2129367 - RNA, 18 nt, Human
accucaaccuguaaauua

SEQ ID NO: 2129368 - RNA, 19 nt, Human
accucaaccuguaaauuau

SEQ ID NO: 2129369 - RNA, 21 nt, Human
accucaaccuguaaauuauuu

SEQ ID NO: 2129370 - RNA, 23 nt, Human
accucaaccuguaaauuauuuua

SEQ ID NO: 2129371 - RNA, 16 nt, Human
accucaaccugugaug

SEQ ID NO: 2129372 - RNA, 22 nt, Human
accucaacccccauuucuauuu

SEQ ID NO: 2129373 - RNA, 14 nt, Human
accucccugaacca

SEQ ID NO: 2129374 - RNA, 15 nt, Human
accucccugaaccau

SEQ ID NO: 2129375 - RNA, 20 nt, Human
accucccugaaccaucccug

SEQ ID NO: 2129376 - RNA, 23 nt, Human
accuccugccucgaacuggcugc

SEQ ID NO: 2129377 - RNA, 20 nt, Human
ucauccccaggggucccagc

SEQ ID NO: 2129378 - RNA, 21 nt, Human
ucauccccaggggucccagcc

SEQ ID NO: 2129379 - RNA, 14 nt, Human
ucaucccauugucu

SEQ ID NO: 2129380 - RNA, 15 nt, Human
ucaucccauugucuu

SEQ ID NO: 2129381 - RNA, 14 nt, Human
ucauccccaccuug

SEQ ID NO: 2129382 - RNA, 12 nt, Human
ucauccccaggg

SEQ ID NO: 2129383 - RNA, 14 nt, Human
ucauccgaggcagg

SEQ ID NO: 2129384 - RNA, 15 nt, Human
ucauccgaggcaggg

SEQ ID NO: 2129385 - RNA, 21 nt, Human
ucaucccuaugggauucagug

SEQ ID NO: 2129386 - RNA, 15 nt, Human
ucauccuaagcuauu

SEQ ID NO: 2129387 - RNA, 19 nt, Human
ucauccggcagccuggaug

SEQ ID NO: 2129388 - RNA, 15 nt, Human
ucauccggcagccug

SEQ ID NO: 2129389 - RNA, 17 nt, Human
ucauccggcagccugga

SEQ ID NO: 2129390 - RNA, 12 nt, Human
ucauccugcagg

SEQ ID NO: 2129391 - RNA, 13 nt, Human
ucauccugcaggc

SEQ ID NO: 2129392 - RNA, 13 nt, Human
ucaugaagcccaa

SEQ ID NO: 2129393 - RNA, 18 nt, Human
ucaucuauuucugagaag

SEQ ID NO: 2129394 - RNA, 11 nt, Human
ucaucuauuuc

SEQ ID NO: 2129395 - RNA, 14 nt, Human
ucaucuauuucuga

SEQ ID NO: 2129396 - RNA, 15 nt, Human
ucaucuauuucugag

SEQ ID NO: 2129397 - RNA, 16 nt, Human
ucaucuauuucugaga

SEQ ID NO: 2129398 - RNA, 17 nt, Human
ucaucuauuucugagaa

SEQ ID NO: 2129399 - RNA, 12 nt, Human
ucauucuucugu

SEQ ID NO: 2129400 - RNA, 18 nt, Human
ucauucuugaaagcugug

SEQ ID NO: 2129401 - RNA, 17 nt, Human
ucauucuugaaagcugu

SEQ ID NO: 2129402 - RNA, 16 nt, Human
ucaugaucuugugaca

SEQ ID NO: 2129403 - RNA, 17 nt, Human
ucaugaucuugugacau

SEQ ID NO: 2129404 - RNA, 18 nt, Human
ucaugaucuugugacaua

SEQ ID NO: 2129405 - RNA, 13 nt, Human
ucaugaucucccu

SEQ ID NO: 2129406 - RNA, 14 nt, Human
ucaugaucucccug

SEQ ID NO: 2129407 - RNA, 15 nt, Human
ucaugaucucccugc

SEQ ID NO: 2129408 - RNA, 16 nt, Human
ucaugaucucccugcc

SEQ ID NO: 2129409 - RNA, 17 nt, Human
ucaugaucucccugccg

SEQ ID NO: 2129410 - RNA, 18 nt, Human
ucaugaucucccugccgc

SEQ ID NO: 2129411 - RNA, 19 nt, Human
ucaugaucucccugccgcc

SEQ ID NO: 2129412 - RNA, 22 nt, Human
ucaugaucucccugccgccuca

SEQ ID NO: 2129413 - RNA, 13 nt, Human
ucaugauuagcaa

SEQ ID NO: 2129414 - RNA, 16 nt, Human
ucaugauuagcaaguu

SEQ ID NO: 2129415 - RNA, 14 nt, Human
ucaugauuagcaag

SEQ ID NO: 2129416 - RNA, 13 nt, Human
ucauuaccacagg

SEQ ID NO: 2129417 - RNA, 13 nt, Human
accuccugggcua

SEQ ID NO: 2129418 - RNA, 19 nt, Human
accucggugccuuccucuu

SEQ ID NO: 2129419 - RNA, 18 nt, Human
accuccuuuacccucauc

SEQ ID NO: 2129420 - RNA, 19 nt, Human
accuccuuuacccucaucu

SEQ ID NO: 2129421 - RNA, 18 nt, Human
accucuaaaacaguccuu

SEQ ID NO: 2129422 - RNA, 20 nt, Human
accucguccucccccugcca

SEQ ID NO: 2129423 - RNA, 21 nt, Human
accucguccucccccugccag

SEQ ID NO: 2129424 - RNA, 14 nt, Human
accucgugcuuuaa

SEQ ID NO: 2129425 - RNA, 17 nt, Human
accucgugcuuuaagug

SEQ ID NO: 2129426 - RNA, 23 nt, Human
accucguuagggaagagaaacag

SEQ ID NO: 2129427 - RNA, 14 nt, Human
accucguccucccc

SEQ ID NO: 2129428 - RNA, 15 nt, Human
accucguccuccccc

SEQ ID NO: 2129429 - RNA, 18 nt, Human
accucguccucccccugc

SEQ ID NO: 2129430 - RNA, 17 nt, Human
ucauugccuuaacugga

SEQ ID NO: 2129431 - RNA, 23 nt, Human
ucauugccuuaacuggagcccca

SEQ ID NO: 2129432 - RNA, 20 nt, Human
ucauugccuuaacuggagcc

SEQ ID NO: 2129433 - RNA, 18 nt, Human
ucauccuuagcaacagcc

SEQ ID NO: 2129434 - RNA, 18 nt, Human
ucauugauugucagcuac

SEQ ID NO: 2129435 - RNA, 13 nt, Human
ucauugccagugu

SEQ ID NO: 2129436 - RNA, 15 nt, Human
ucauugccagugucu

SEQ ID NO: 2129437 - RNA, 16 nt, Human
ucauugccagugucuu

SEQ ID NO: 2129438 - RNA, 17 nt, Human
ucauugccagugucuuu

SEQ ID NO: 2129439 - RNA, 18 nt, Human
ucauugccagugucuuuc

SEQ ID NO: 2129440 - RNA, 20 nt, Human
ucauugccagugucuuucuu

SEQ ID NO: 2129441 - RNA, 21 nt, Human
ucauugccagugucuuucuuu

SEQ ID NO: 2129442 - RNA, 22 nt, Human
ucauugccagugucuuucuuug

SEQ ID NO: 2129443 - RNA, 23 nt, Human
ucauugccagugucuuucuuugg

SEQ ID NO: 2129444 - RNA, 14 nt, Human
ucauugaaguauuu

SEQ ID NO: 2129445 - RNA, 22 nt, Human
accugcaccuccccccacugca

SEQ ID NO: 2129446 - RNA, 21 nt, Human
accugcaccuccccccacugc

SEQ ID NO: 2129447 - RNA, 15 nt, Human
accugcaggccaaga

SEQ ID NO: 2129448 - RNA, 19 nt, Human
accugcaggccaagagcag

SEQ ID NO: 2129449 - RNA, 21 nt, Human
accugcauccguaguucccug

SEQ ID NO: 2129450 - RNA, 22 nt, Human
accugcauccguaguucccuga

SEQ ID NO: 2129451 - RNA, 19 nt, Human
accugcauccguaguuccc

SEQ ID NO: 2129452 - RNA, 13 nt, Human
accugaggaagcg

SEQ ID NO: 2129453 - RNA, 15 nt, Human
accugagcuccccac

SEQ ID NO: 2129454 - RNA, 12 nt, Human
accugagcugcc

SEQ ID NO: 2129455 - RNA, 18 nt, Human
accugagcugccauccag

SEQ ID NO: 2129456 - RNA, 13 nt, Human
accugagcuuugg

SEQ ID NO: 2129457 - RNA, 14 nt, Human
accugagcuuugga

SEQ ID NO: 2129458 - RNA, 23 nt, Human
accugagcuuuggacgcacacag

SEQ ID NO: 2129459 - RNA, 14 nt, Human
accugagcucccca

SEQ ID NO: 2129460 - RNA, 16 nt, Human
accugagauggcccuc

SEQ ID NO: 2129461 - RNA, 21 nt, Human
accugagauggcccucuggua

SEQ ID NO: 2129462 - RNA, 20 nt, Human
accugacuauugaaguugca

SEQ ID NO: 2129463 - RNA, 17 nt, Human
accugacucaggcauca

SEQ ID NO: 2129464 - RNA, 12 nt, Human
accugaaaagau

SEQ ID NO: 2129465 - RNA, 22 nt, Human
accugaaaagauguugugucuu

SEQ ID NO: 2129466 - RNA, 22 nt, Human
accucuuugaaagaaggaagac

SEQ ID NO: 2129467 - RNA, 17 nt, Human
accucuuuuagucauuu

SEQ ID NO: 2129468 - RNA, 21 nt, Human
accucuuuuagucauuuugcu

SEQ ID NO: 2129469 - RNA, 18 nt, Human
accucuuuucugcaucau

SEQ ID NO: 2129470 - RNA, 22 nt, Human
accucguccucccccugccagu

SEQ ID NO: 2129471 - RNA, 12 nt, Human
acuaaccacgcu

SEQ ID NO: 2129472 - RNA, 12 nt, Human
acuaacauuaua

SEQ ID NO: 2129473 - RNA, 17 nt, Human
acuaacaggauauuuaa

SEQ ID NO: 2129474 - RNA, 17 nt, Human
acuaacagauaagcaag

SEQ ID NO: 2129475 - RNA, 12 nt, Human
acguuggacuuu

SEQ ID NO: 2129476 - RNA, 19 nt, Human
acguuggacuuuucguuaa

SEQ ID NO: 2129477 - RNA, 21 nt, Human
acguuggacuuuucguuaaca

SEQ ID NO: 2129478 - RNA, 23 nt, Human
acguuggacuuuucguuaacauu

SEQ ID NO: 2129479 - RNA, 21 nt, Human
acguuccuuacugcagaauag

SEQ ID NO: 2129480 - RNA, 11 nt, Human
acuacaggcac

SEQ ID NO: 2129481 - RNA, 22 nt, Human
acuacaauuuaaagcaaaggag

SEQ ID NO: 2129482 - RNA, 18 nt, Human
acuacagacauuaaauaa

SEQ ID NO: 2129483 - RNA, 17 nt, Human
acuacaauuuaaagcaa

SEQ ID NO: 2129484 - RNA, 15 nt, Human
acuacaggcacccac

SEQ ID NO: 2129485 - RNA, 12 nt, Human
ucccagccaccc

SEQ ID NO: 2129486 - RNA, 13 nt, Human
ucccagccacccc

SEQ ID NO: 2129487 - RNA, 14 nt, Human
ucccagccaccccg

SEQ ID NO: 2129488 - RNA, 20 nt, Human
ucccagccaccccgggcucu

SEQ ID NO: 2129489 - RNA, 24 nt, Human
ucccagccaccccgggcucucugc

SEQ ID NO: 2129490 - RNA, 17 nt, Human
ucccagcugugcucugg

SEQ ID NO: 2129491 - RNA, 22 nt, Human
ucccagcucucccucuggcccu

SEQ ID NO: 2129492 - RNA, 23 nt, Human
ucccagcucucccucuggcccug

SEQ ID NO: 2129493 - RNA, 17 nt, Human
ucccagcugaaauacug

SEQ ID NO: 2129494 - RNA, 15 nt, Human
ucccagcccaaagcu

SEQ ID NO: 2129495 - RNA, 20 nt, Human
ucccagauuucagucuuuuc

SEQ ID NO: 2129496 - RNA, 14 nt, Human
ucccagcucucccu

SEQ ID NO: 2129497 - RNA, 16 nt, Human
ucccagcucucccucu

SEQ ID NO: 2129498 - RNA, 18 nt, Human
ucccagcucucccucugg

SEQ ID NO: 2129499 - RNA, 19 nt, Human
ucccagcucucccucuggc

SEQ ID NO: 2129500 - RNA, 21 nt, Human
ucccagcucucccucuggccc

SEQ ID NO: 2129501 - RNA, 19 nt, Human
ucccagcacuuugggaggc

SEQ ID NO: 2129502 - RNA, 21 nt, Human
ucccagcacuuugggaggcca

SEQ ID NO: 2129503 - RNA, 23 nt, Human
ucccagcacuuugggaggccaag

SEQ ID NO: 2129504 - RNA, 21 nt, Human
ucccagcacuuugggaggccg

SEQ ID NO: 2129505 - RNA, 18 nt, Human
ucccagcacuuugggagg

SEQ ID NO: 2129506 - RNA, 16 nt, Human
ucccagcacuuuggga

SEQ ID NO: 2129507 - RNA, 13 nt, Human
uccccaccaguga

SEQ ID NO: 2129508 - RNA, 21 nt, Human
uccccaccagugaaugaaagu

SEQ ID NO: 2129509 - RNA, 15 nt, Human
uccccaccaccccag

SEQ ID NO: 2129510 - RNA, 13 nt, Human
ucccaucccaucc

SEQ ID NO: 2129511 - RNA, 14 nt, Human
ucccaucccauccc

SEQ ID NO: 2129512 - RNA, 15 nt, Human
ucccaucccauccca

SEQ ID NO: 2129513 - RNA, 16 nt, Human
ucccaucccaucccau

SEQ ID NO: 2129514 - RNA, 17 nt, Human
ucccaucccaucccauc

SEQ ID NO: 2129515 - RNA, 19 nt, Human
ucccaucccaucccauccc

SEQ ID NO: 2129516 - RNA, 20 nt, Human
ucccaucccaucccauccca

SEQ ID NO: 2129517 - RNA, 18 nt, Human
ucccaucccaucccgcuc

SEQ ID NO: 2129518 - RNA, 22 nt, Human
ucccaucacuggagcaccaggc

SEQ ID NO: 2129519 - RNA, 14 nt, Human
ucccaucacuggag

SEQ ID NO: 2129520 - RNA, 22 nt, Human
ucccaucccagcugaaauacug

SEQ ID NO: 2129521 - RNA, 16 nt, Human
ucccaucccagcugaa

SEQ ID NO: 2129522 - RNA, 15 nt, Human
ucccaucccgcucuu

SEQ ID NO: 2129523 - RNA, 18 nt, Human
ucccaucccgcucuuuuc

SEQ ID NO: 2129524 - RNA, 19 nt, Human
ucccaucccgcucuuuucc

SEQ ID NO: 2129525 - RNA, 20 nt, Human
ucccaucccgcucuuuuccu

SEQ ID NO: 2129526 - RNA, 14 nt, Human
ucccagcugucugu

SEQ ID NO: 2129527 - RNA, 22 nt, Human
ucccagcugucugugucagccu

SEQ ID NO: 2129528 - RNA, 13 nt, Human
ucccagcugcccc

SEQ ID NO: 2129529 - RNA, 14 nt, Human
ucccagcugccccu

SEQ ID NO: 2129530 - RNA, 16 nt, Human
ucccagcugccccucc

SEQ ID NO: 2129531 - RNA, 17 nt, Human
ucccagcugccccuccc

SEQ ID NO: 2129532 - RNA, 19 nt, Human
ucccagcugccccucccug

SEQ ID NO: 2129533 - RNA, 22 nt, Human
ucccagcugccccucccugcca

SEQ ID NO: 2129534 - RNA, 14 nt, Human
ucccaucaaaacuc

SEQ ID NO: 2129535 - RNA, 20 nt, Human
ucccaguccaaauguccucc

SEQ ID NO: 2129536 - RNA, 21 nt, Human
ucccccaacccccaccccaca

SEQ ID NO: 2129537 - RNA, 12 nt, Human
acuacauuuuaa

SEQ ID NO: 2129538 - RNA, 14 nt, Human
acuacauuuuaaca

SEQ ID NO: 2129539 - RNA, 15 nt, Human
acuacauuuuaacau

SEQ ID NO: 2129540 - RNA, 16 nt, Human
acuacauuuuaacaug

SEQ ID NO: 2129541 - RNA, 13 nt, Human
ucccccaaagugg

SEQ ID NO: 2129542 - RNA, 14 nt, Human
ucccccaaccccca

SEQ ID NO: 2129543 - RNA, 15 nt, Human
ucccccaacccccac

SEQ ID NO: 2129544 - RNA, 16 nt, Human
ucccccaacccccacc

SEQ ID NO: 2129545 - RNA, 17 nt, Human
ucccccaacccccaccc

SEQ ID NO: 2129546 - RNA, 19 nt, Human
ucccccaacccccacccca

SEQ ID NO: 2129547 - RNA, 20 nt, Human
ucccccaacccccaccccac

SEQ ID NO: 2129548 - RNA, 20 nt, Human
uccccaugugccugcaccag

SEQ ID NO: 2129549 - RNA, 22 nt, Human
uccccaugugccugcaccagga

SEQ ID NO: 2129550 - RNA, 19 nt, Human
uccccauuagagucagccu

SEQ ID NO: 2129551 - RNA, 21 nt, Human
uccccauuagagucagccuuc

SEQ ID NO: 2129552 - RNA, 23 nt, Human
uccccauggcaugggggccucag

SEQ ID NO: 2129553 - RNA, 16 nt, Human
acgguucaccagccuc

SEQ ID NO: 2129554 - RNA, 19 nt, Human
acgguucaccagccucucu

SEQ ID NO: 2129555 - RNA, 16 nt, Human
acgggcaguagcugug

SEQ ID NO: 2129556 - RNA, 14 nt, Human
acgggcugcccugc

SEQ ID NO: 2129557 - RNA, 16 nt, Human
ucccaccccacccccu

SEQ ID NO: 2129558 - RNA, 18 nt, Human
ucccaccccacccccuuc

SEQ ID NO: 2129559 - RNA, 20 nt, Human
ucccaccccacccccuucag

SEQ ID NO: 2129560 - RNA, 22 nt, Human
ucccaccccacccccuucagug

SEQ ID NO: 2129561 - RNA, 12 nt, Human
ucccaccccacc

SEQ ID NO: 2129562 - RNA, 13 nt, Human
ucccaccccaccc

SEQ ID NO: 2129563 - RNA, 16 nt, Human
ucccacaaaggagagc

SEQ ID NO: 2129564 - RNA, 18 nt, Human
ucccaauagcacuuucau

SEQ ID NO: 2129565 - RNA, 20 nt, Human
ucccaauagcacuuucauug

SEQ ID NO: 2129566 - RNA, 23 nt, Human
ucccaauagcacuuucauugcca

SEQ ID NO: 2129567 - RNA, 17 nt, Human
ucccaagugccagucuu

SEQ ID NO: 2129568 - RNA, 13 nt, Human
ucccacacccugg

SEQ ID NO: 2129569 - RNA, 22 nt, Human
ucccacacugcuaggugggcca

SEQ ID NO: 2129570 - RNA, 20 nt, Human
acgugggcggcagagaggac

SEQ ID NO: 2129571 - RNA, 19 nt, Human
acgugggcaaacaggcagu

SEQ ID NO: 2129572 - RNA, 15 nt, Human
acgugggcggcagag

SEQ ID NO: 2129573 - RNA, 22 nt, Human
acguaguguagauuuguuuugu

SEQ ID NO: 2129574 - RNA, 22 nt, Human
acgugggucuucagggggccag

SEQ ID NO: 2129575 - RNA, 18 nt, Human
acguguacuacaauuuaa

SEQ ID NO: 2129576 - RNA, 14 nt, Human
acguggggcagcac

SEQ ID NO: 2129577 - RNA, 15 nt, Human
acguggggcagcaca

SEQ ID NO: 2129578 - RNA, 19 nt, Human
acguggggcagcacagaga

SEQ ID NO: 2129579 - RNA, 20 nt, Human
acguggggcagcacagagag

SEQ ID NO: 2129580 - RNA, 11 nt, Human
acgugugugac

SEQ ID NO: 2129581 - RNA, 16 nt, Human
acgugugugacucaga

SEQ ID NO: 2129582 - RNA, 14 nt, Human
acguucaccccucc

SEQ ID NO: 2129583 - RNA, 16 nt, Human
acguucaccccuccac

SEQ ID NO: 2129584 - RNA, 16 nt, Human
acguuccuuacugcag

SEQ ID NO: 2129585 - RNA, 18 nt, Human
acguuccuuacugcagaa

SEQ ID NO: 2129586 - RNA, 19 nt, Human
acguuccuuacugcagaau

SEQ ID NO: 2129587 - RNA, 20 nt, Human
acguuccuuacugcagaaua

SEQ ID NO: 2129588 - RNA, 14 nt, Human
acguucggggcaug

SEQ ID NO: 2129589 - RNA, 16 nt, Human
acgugggcaaacaggc

SEQ ID NO: 2129590 - RNA, 21 nt, Human
acgugggaguucagcugcuuc

SEQ ID NO: 2129591 - RNA, 23 nt, Human
acgugggaguucagcugcuucuc

SEQ ID NO: 2129592 - RNA, 15 nt, Human
acguggcuucugaug

SEQ ID NO: 2129593 - RNA, 20 nt, Human
acguggcuucugaugaaucu

SEQ ID NO: 2129594 - RNA, 23 nt, Human
acguggcuucugaugaaucuugc

SEQ ID NO: 2129595 - RNA, 16 nt, Human
acguauugguccagcu

SEQ ID NO: 2129596 - RNA, 20 nt, Human
acguauguuuuuguguauuu

SEQ ID NO: 2129597 - RNA, 18 nt, Human
acguacuuagcagcuauc

SEQ ID NO: 2129598 - RNA, 20 nt, Human
acguacugcagccuccagag

SEQ ID NO: 2129599 - RNA, 14 nt, Human
acguacucugguua

SEQ ID NO: 2129600 - RNA, 16 nt, Human
acguacuuagcagcua

SEQ ID NO: 2129601 - RNA, 21 nt, Human
ucccaaacuaagcuaugugaa

SEQ ID NO: 2129602 - RNA, 15 nt, Human
acgguuuuacugcag

SEQ ID NO: 2129603 - RNA, 17 nt, Human
acgguuuuacugcagcu

SEQ ID NO: 2129604 - RNA, 13 nt, Human
ucccaaagagcug

SEQ ID NO: 2129605 - RNA, 15 nt, Human
ucccaaagagcugcc

SEQ ID NO: 2129606 - RNA, 16 nt, Human
ucccaaagagcugccu

SEQ ID NO: 2129607 - RNA, 18 nt, Human
uccauuccuggagcccga

SEQ ID NO: 2129608 - RNA, 23 nt, Human
ucccaaaaguaucgggggcuggg

SEQ ID NO: 2129609 - RNA, 14 nt, Human
uccauuuaguucuu

SEQ ID NO: 2129610 - RNA, 20 nt, Human
uccauuuaguucuuuguuau

SEQ ID NO: 2129611 - RNA, 20 nt, Human
uccauuucgccccucauuua

SEQ ID NO: 2129612 - RNA, 21 nt, Human
uccauuucaucuauuucugag

SEQ ID NO: 2129613 - RNA, 23 nt, Human
uccauuucaucuauuucugagaa

SEQ ID NO: 2129614 - RNA, 12 nt, Human
uccauuucucuc

SEQ ID NO: 2129615 - RNA, 16 nt, Human
uccauuucucucucca

SEQ ID NO: 2129616 - RNA, 18 nt, Human
uccauuucucucuccagu

SEQ ID NO: 2129617 - RNA, 14 nt, Human
ucccaaagugcugg

SEQ ID NO: 2129618 - RNA, 13 nt, Human
ucccaaagugcug

SEQ ID NO: 2129619 - RNA, 12 nt, Human
uccaucuccuug

SEQ ID NO: 2129620 - RNA, 14 nt, Human
uccaucucgccacc

SEQ ID NO: 2129621 - RNA, 23 nt, Human
uccaucucgccaccccuccuucc

SEQ ID NO: 2129622 - RNA, 16 nt, Human
uccaucucgccacccc

SEQ ID NO: 2129623 - RNA, 12 nt, Human
uccauuccucag

SEQ ID NO: 2129624 - RNA, 13 nt, Human
uccauuccucagg

SEQ ID NO: 2129625 - RNA, 14 nt, Human
uccauuccucaggg

SEQ ID NO: 2129626 - RNA, 15 nt, Human
uccauuccucaggga

SEQ ID NO: 2129627 - RNA, 16 nt, Human
uccaugaaaaugcaac

SEQ ID NO: 2129628 - RNA, 15 nt, Human
uccaugaaaaugcaa

SEQ ID NO: 2129629 - RNA, 23 nt, Human
uccauuuaauggggugcaccugu

SEQ ID NO: 2129630 - RNA, 22 nt, Human
uccccucaaggacaaagucucc

SEQ ID NO: 2129631 - RNA, 23 nt, Human
uccccucaaggacaaagucucca

SEQ ID NO: 2129632 - RNA, 24 nt, Human
uccccucaaggacaaagucuccag

SEQ ID NO: 2129633 - RNA, 14 nt, Human
uccccucccuccuc

SEQ ID NO: 2129634 - RNA, 16 nt, Human
uccccucccuccucug

SEQ ID NO: 2129635 - RNA, 13 nt, Human
uccccucccuggc

SEQ ID NO: 2129636 - RNA, 13 nt, Human
uccccuaaugccu

SEQ ID NO: 2129637 - RNA, 15 nt, Human
acucaccauguaaaa

SEQ ID NO: 2129638 - RNA, 12 nt, Human
acucacccaagc

SEQ ID NO: 2129639 - RNA, 19 nt, Human
uccccuauggggauggucc

SEQ ID NO: 2129640 - RNA, 18 nt, Human
uccccuauccacccagcc

SEQ ID NO: 2129641 - RNA, 20 nt, Human
uccccuauccacccagccca

SEQ ID NO: 2129642 - RNA, 21 nt, Human
uccccuauccacccagcccau

SEQ ID NO: 2129643 - RNA, 15 nt, Human
uccccuauccaccca

SEQ ID NO: 2129644 - RNA, 16 nt, Human
uccccuauccacccag

SEQ ID NO: 2129645 - RNA, 17 nt, Human
uccccuauccacccagc

SEQ ID NO: 2129646 - RNA, 21 nt, Human
acucacauuuauucugcucac

SEQ ID NO: 2129647 - RNA, 17 nt, Human
acuacucagggaaugaa

SEQ ID NO: 2129648 - RNA, 15 nt, Human
acuacucagggaaug

SEQ ID NO: 2129649 - RNA, 17 nt, Human
acuacucccccaggugg

SEQ ID NO: 2129650 - RNA, 17 nt, Human
ucccgaguagcugggac

SEQ ID NO: 2129651 - RNA, 16 nt, Human
ucccgaguagcuggga

SEQ ID NO: 2129652 - RNA, 18 nt, Human
ucccgaguagcugggacu

SEQ ID NO: 2129653 - RNA, 17 nt, Human
uccccuuuuauugcugc

SEQ ID NO: 2129654 - RNA, 15 nt, Human
ucccgaguagcuggg

SEQ ID NO: 2129655 - RNA, 20 nt, Human
ucccgaauagcugggacuac

SEQ ID NO: 2129656 - RNA, 16 nt, Human
uccccuuucgcccaca

SEQ ID NO: 2129657 - RNA, 19 nt, Human
uccccuuucgcccacaguc

SEQ ID NO: 2129658 - RNA, 24 nt, Human
uccccuuugcuucauucaagucag

SEQ ID NO: 2129659 - RNA, 20 nt, Human
uccccuugcccagggcucag

SEQ ID NO: 2129660 - RNA, 22 nt, Human
uccccuugcccagggcucagcc

SEQ ID NO: 2129661 - RNA, 24 nt, Human
uccccuugcccagggcucagccug

SEQ ID NO: 2129662 - RNA, 20 nt, Human
acuacccaucgguguccauu

SEQ ID NO: 2129663 - RNA, 23 nt, Human
uccccuccuugccuccuguguaa

SEQ ID NO: 2129664 - RNA, 17 nt, Human
uccccucuauuuagcau

SEQ ID NO: 2129665 - RNA, 15 nt, Human
uccccucccuggcuc

SEQ ID NO: 2129666 - RNA, 16 nt, Human
uccccucccuggcucc

SEQ ID NO: 2129667 - RNA, 19 nt, Human
uccccucccuggcucccau

SEQ ID NO: 2129668 - RNA, 21 nt, Human
uccccucccuggcucccauga

SEQ ID NO: 2129669 - RNA, 22 nt, Human
uccccuccuugccuccugugua

SEQ ID NO: 2129670 - RNA, 16 nt, Human
ucccugacucucugug

SEQ ID NO: 2129671 - RNA, 20 nt, Human
ucccugacucucugugaccu

SEQ ID NO: 2129672 - RNA, 17 nt, Human
ucccugacucucuguga

SEQ ID NO: 2129673 - RNA, 18 nt, Human
ucccugacucucugugac

SEQ ID NO: 2129674 - RNA, 20 nt, Human
ucccugaggcuggacuccag

SEQ ID NO: 2129675 - RNA, 14 nt, Human
ucccugagucacca

SEQ ID NO: 2129676 - RNA, 15 nt, Human
ucccugagucaccag

SEQ ID NO: 2129677 - RNA, 16 nt, Human
ucccugagucaccagg

SEQ ID NO: 2129678 - RNA, 12 nt, Human
ucccugauguac

SEQ ID NO: 2129679 - RNA, 16 nt, Human
ucccugauguacaguu

SEQ ID NO: 2129680 - RNA, 17 nt, Human
ucccugagucaccagga

SEQ ID NO: 2129681 - RNA, 21 nt, Human
ucccugagucaccaggaaugu

SEQ ID NO: 2129682 - RNA, 13 nt, Human
acucaccugcugg

SEQ ID NO: 2129683 - RNA, 16 nt, Human
acucaccugcuggccc

SEQ ID NO: 2129684 - RNA, 17 nt, Human
acucaccugcuggcccc

SEQ ID NO: 2129685 - RNA, 18 nt, Human
acucaccugcuggccccu

SEQ ID NO: 2129686 - RNA, 19 nt, Human
acucaccugcuggccccuc

SEQ ID NO: 2129687 - RNA, 20 nt, Human
acucaccugcuggccccuca

SEQ ID NO: 2129688 - RNA, 14 nt, Human
acucaccuugaaca

SEQ ID NO: 2129689 - RNA, 21 nt, Human
acucaccuugaacaccacgcu

SEQ ID NO: 2129690 - RNA, 23 nt, Human
acucacgauaaauaaucggccca

SEQ ID NO: 2129691 - RNA, 15 nt, Human
acucacuggcagccc

SEQ ID NO: 2129692 - RNA, 17 nt, Human
acucacuggcagcccca

SEQ ID NO: 2129693 - RNA, 18 nt, Human
acucacuggcagccccag

SEQ ID NO: 2129694 - RNA, 20 nt, Human
acucacuggcagccccagca

SEQ ID NO: 2129695 - RNA, 21 nt, Human
acucacuggcagccccagcac

SEQ ID NO: 2129696 - RNA, 15 nt, Human
acucacucaaguuca

SEQ ID NO: 2129697 - RNA, 19 nt, Human
acucacucaaguucaagga

SEQ ID NO: 2129698 - RNA, 18 nt, Human
ucccuccacguucacccc

SEQ ID NO: 2129699 - RNA, 19 nt, Human
ucccuccacguucaccccu

SEQ ID NO: 2129700 - RNA, 20 nt, Human
ucccuccacguucaccccuc

SEQ ID NO: 2129701 - RNA, 23 nt, Human
ucccuccacuccuuccugccacc

SEQ ID NO: 2129702 - RNA, 21 nt, Human
ucccucuuucccucccuuccu

SEQ ID NO: 2129703 - RNA, 18 nt, Human
ucccucuuucccucccuu

SEQ ID NO: 2129704 - RNA, 20 nt, Human
ucccucuuucccucccuucc

SEQ ID NO: 2129705 - RNA, 14 nt, Human
ucccucuuucccuc

SEQ ID NO: 2129706 - RNA, 14 nt, Human
ucccuuuucuugac

SEQ ID NO: 2129707 - RNA, 20 nt, Human
ucccuuuuuauaucccauuu

SEQ ID NO: 2129708 - RNA, 13 nt, Human
ucccuuucuuggc

SEQ ID NO: 2129709 - RNA, 13 nt, Human
ucccuuuuacaua

SEQ ID NO: 2129710 - RNA, 16 nt, Human
ucccuuucuuggccag

SEQ ID NO: 2129711 - RNA, 17 nt, Human
ucccuuucuuggccagu

SEQ ID NO: 2129712 - RNA, 17 nt, Human
ucccuuuuacauacugc

SEQ ID NO: 2129713 - RNA, 19 nt, Human
ucccuuuuacauacugcug

SEQ ID NO: 2129714 - RNA, 20 nt, Human
ucccuuuuacauacugcugu

SEQ ID NO: 2129715 - RNA, 21 nt, Human
ucccuuucuuggccaguuauc

SEQ ID NO: 2129716 - RNA, 17 nt, Human
uccggucccugucccag

SEQ ID NO: 2129717 - RNA, 15 nt, Human
uccuaaaugcaguga

SEQ ID NO: 2129718 - RNA, 19 nt, Human
uccuaaaugcagugaauug

SEQ ID NO: 2129719 - RNA, 12 nt, Human
uccuaaauguau

SEQ ID NO: 2129720 - RNA, 16 nt, Human
uccuaacacagcaugu

SEQ ID NO: 2129721 - RNA, 16 nt, Human
uccuagaaauucccca

SEQ ID NO: 2129722 - RNA, 12 nt, Human
ucccugucccag

SEQ ID NO: 2129723 - RNA, 12 nt, Human
ucccuguccacc

SEQ ID NO: 2129724 - RNA, 13 nt, Human
ucccuguccaccc

SEQ ID NO: 2129725 - RNA, 14 nt, Human
ucccuguccacccc

SEQ ID NO: 2129726 - RNA, 12 nt, Human
ucccuguccucc

SEQ ID NO: 2129727 - RNA, 14 nt, Human
ucccuguccuccuc

SEQ ID NO: 2129728 - RNA, 15 nt, Human
ucccuguccuccucg

SEQ ID NO: 2129729 - RNA, 18 nt, Human
ucccugggggaagcccug

SEQ ID NO: 2129730 - RNA, 19 nt, Human
ucccugggggaagcccugg

SEQ ID NO: 2129731 - RNA, 20 nt, Human
ucccugggggaagcccugga

SEQ ID NO: 2129732 - RNA, 21 nt, Human
ucccugggggaagcccuggau

SEQ ID NO: 2129733 - RNA, 21 nt, Human
ucccugguaauaaguacugug

SEQ ID NO: 2129734 - RNA, 14 nt, Human
ucccuuuccuucca

SEQ ID NO: 2129735 - RNA, 17 nt, Human
ucccuuuccuuccaucc

SEQ ID NO: 2129736 - RNA, 23 nt, Human
ucccuuuccuuccaucccuaccc

SEQ ID NO: 2129737 - RNA, 18 nt, Human
ucccuuuccuuccauccc

SEQ ID NO: 2129738 - RNA, 19 nt, Human
ucccuuuccuuccaucccu

SEQ ID NO: 2129739 - RNA, 13 nt, Human
acucauucaaaag

SEQ ID NO: 2129740 - RNA, 21 nt, Human
acucauucaaaaguugaaauu

SEQ ID NO: 2129741 - RNA, 23 nt, Human
acucauucagggauagcacugag

SEQ ID NO: 2129742 - RNA, 15 nt, Human
acucauucuucugua

SEQ ID NO: 2129743 - RNA, 14 nt, Human
acucagaaacauca

SEQ ID NO: 2129744 - RNA, 15 nt, Human
acucagaaacaucag

SEQ ID NO: 2129745 - RNA, 13 nt, Human
acuccucugucca

SEQ ID NO: 2129746 - RNA, 14 nt, Human
acuccucuguccag

SEQ ID NO: 2129747 - RNA, 12 nt, Human
acuccagcccau

SEQ ID NO: 2129748 - RNA, 13 nt, Human
acuccagccugag

SEQ ID NO: 2129749 - RNA, 14 nt, Human
acuccagccugagc

SEQ ID NO: 2129750 - RNA, 12 nt, Human
acuccagccugg

SEQ ID NO: 2129751 - RNA, 15 nt, Human
acuccagccugagca

SEQ ID NO: 2129752 - RNA, 19 nt, Human
acuccagccugagcaacag

SEQ ID NO: 2129753 - RNA, 20 nt, Human
acuccagccugagcaacaga

SEQ ID NO: 2129754 - RNA, 19 nt, Human
acuccagccuggcgacaga

SEQ ID NO: 2129755 - RNA, 13 nt, Human
acuccagccuggg

SEQ ID NO: 2129756 - RNA, 14 nt, Human
acuccagccugggc

SEQ ID NO: 2129757 - RNA, 21 nt, Human
uccuuuaauuuuuuacuauuu

SEQ ID NO: 2129758 - RNA, 15 nt, Human
uccuuuacccucauc

SEQ ID NO: 2129759 - RNA, 16 nt, Human
uccuuuacccucaucu

SEQ ID NO: 2129760 - RNA, 17 nt, Human
uccuuuacccucaucug

SEQ ID NO: 2129761 - RNA, 19 nt, Human
uccuuuagcgcccaguugg

SEQ ID NO: 2129762 - RNA, 15 nt, Human
uccuuuagcgcccag

SEQ ID NO: 2129763 - RNA, 17 nt, Human
uccuuuaaauccuucca

SEQ ID NO: 2129764 - RNA, 15 nt, Human
uccuuguauuuaaau

SEQ ID NO: 2129765 - RNA, 16 nt, Human
uccuugucuuggcagc

SEQ ID NO: 2129766 - RNA, 21 nt, Human
uccuugucuuggcagccuacu

SEQ ID NO: 2129767 - RNA, 16 nt, Human
uccuuguggcacauuu

SEQ ID NO: 2129768 - RNA, 12 nt, Human
uccuucucccuu

SEQ ID NO: 2129769 - RNA, 20 nt, Human
uccuucucucaccuccuaaa

SEQ ID NO: 2129770 - RNA, 19 nt, Human
uccuuccuugcuguccuag

SEQ ID NO: 2129771 - RNA, 23 nt, Human
uccuucuaaucugcuaugcuuga

SEQ ID NO: 2129772 - RNA, 14 nt, Human
uccuucuacuuaca

SEQ ID NO: 2129773 - RNA, 16 nt, Human
uccuuccuugaccagc

SEQ ID NO: 2129774 - RNA, 15 nt, Human
uccuuccaccaaguu

SEQ ID NO: 2129775 - RNA, 13 nt, Human
uccuuccaggccc

SEQ ID NO: 2129776 - RNA, 14 nt, Human
uccuuccuucccug

SEQ ID NO: 2129777 - RNA, 15 nt, Human
uccuuccuucccugg

SEQ ID NO: 2129778 - RNA, 16 nt, Human
uccuuccuucccuggc

SEQ ID NO: 2129779 - RNA, 15 nt, Human
uccuuccaucaaaua

SEQ ID NO: 2129780 - RNA, 16 nt, Human
uccuuccaggccccca

SEQ ID NO: 2129781 - RNA, 21 nt, Human
uccuuccaggcccccaccacu

SEQ ID NO: 2129782 - RNA, 16 nt, Human
uccuuccaucccuacc

SEQ ID NO: 2129783 - RNA, 17 nt, Human
uccuuccaucccuaccc

SEQ ID NO: 2129784 - RNA, 13 nt, Human
uccuuccaugaaa

SEQ ID NO: 2129785 - RNA, 16 nt, Human
uccuuccacggacuca

SEQ ID NO: 2129786 - RNA, 21 nt, Human
acuggccccuagaaucagccu

SEQ ID NO: 2129787 - RNA, 14 nt, Human
acuggcccucuucu

SEQ ID NO: 2129788 - RNA, 15 nt, Human
acuggcccucuucuu

SEQ ID NO: 2129789 - RNA, 16 nt, Human
acuggcccucuucuua

SEQ ID NO: 2129790 - RNA, 17 nt, Human
acuggcccucuucuuac

SEQ ID NO: 2129791 - RNA, 13 nt, Human
ucgagaccagccu

SEQ ID NO: 2129792 - RNA, 18 nt, Human
ucgagaccaaccugacca

SEQ ID NO: 2129793 - RNA, 17 nt, Human
ucgagaccagccuggcc

SEQ ID NO: 2129794 - RNA, 16 nt, Human
ucgagaccagccuggc

SEQ ID NO: 2129795 - RNA, 14 nt, Human
ucgagaccagccug

SEQ ID NO: 2129796 - RNA, 15 nt, Human
ucgagaccagccugg

SEQ ID NO: 2129797 - RNA, 18 nt, Human
ucgagaccagccuggcca

SEQ ID NO: 2129798 - RNA, 19 nt, Human
ucgagaccagccuggccaa

SEQ ID NO: 2129799 - RNA, 15 nt, Human
uccuuucuuucuaac

SEQ ID NO: 2129800 - RNA, 13 nt, Human
uccuuucuggcuu

SEQ ID NO: 2129801 - RNA, 18 nt, Human
ucgaagcucagcccaccc

SEQ ID NO: 2129802 - RNA, 19 nt, Human
ucgaagcucagcccacccc

SEQ ID NO: 2129803 - RNA, 14 nt, Human
uccuuucucagccg

SEQ ID NO: 2129804 - RNA, 23 nt, Human
uccuuucucagccgcuucugacu

SEQ ID NO: 2129805 - RNA, 23 nt, Human
uccuuuagcgcccaguugggugg

SEQ ID NO: 2129806 - RNA, 22 nt, Human
uccuuuagcgcccaguugggug

SEQ ID NO: 2129807 - RNA, 19 nt, Human
ucgagcuauauuuaaguau

SEQ ID NO: 2129808 - RNA, 17 nt, Human
ucgaggaaccagagcca

SEQ ID NO: 2129809 - RNA, 18 nt, Human
ucgcucaaucaagaaaau

SEQ ID NO: 2129810 - RNA, 18 nt, Human
ucgcuccaccuugcagcu

SEQ ID NO: 2129811 - RNA, 17 nt, Human
acuggcugucaguauga

SEQ ID NO: 2129812 - RNA, 21 nt, Human
acuggcugucaguaugacauu

SEQ ID NO: 2129813 - RNA, 16 nt, Human
acuggcuguccuuucc

SEQ ID NO: 2129814 - RNA, 13 nt, Human
acuggcugugggc

SEQ ID NO: 2129815 - RNA, 16 nt, Human
acuggcugugggcucc

SEQ ID NO: 2129816 - RNA, 17 nt, Human
acuggcugugggcuccc

SEQ ID NO: 2129817 - RNA, 19 nt, Human
acuggcugugggcucccuu

SEQ ID NO: 2129818 - RNA, 20 nt, Human
acuggcugugggcucccuuc

SEQ ID NO: 2129819 - RNA, 21 nt, Human
acuggcugugggcucccuucc

SEQ ID NO: 2129820 - RNA, 22 nt, Human
acuggcugugggcucccuuccu

SEQ ID NO: 2129821 - RNA, 16 nt, Human
acuggcuuugucccac

SEQ ID NO: 2129822 - RNA, 19 nt, Human
acuggcuuugucccacagc

SEQ ID NO: 2129823 - RNA, 20 nt, Human
acuggcuuugucccacagcu

SEQ ID NO: 2129824 - RNA, 21 nt, Human
acuggcuuugucccacagcuu

SEQ ID NO: 2129825 - RNA, 22 nt, Human
acuggcuuugucccacagcuug

SEQ ID NO: 2129826 - RNA, 17 nt, Human
acuggaugcagaaacag

SEQ ID NO: 2129827 - RNA, 18 nt, Human
acuggaugcagaaacagu

SEQ ID NO: 2129828 - RNA, 18 nt, Human
acuggauacugcccgggg

SEQ ID NO: 2129829 - RNA, 18 nt, Human
acugcuuuuaacuucuga

SEQ ID NO: 2129830 - RNA, 20 nt, Human
acugcuuuuaacuucugaua

SEQ ID NO: 2129831 - RNA, 14 nt, Human
acugcuuuuggucu

SEQ ID NO: 2129832 - RNA, 18 nt, Human
acugcuuguguuuuuaac

SEQ ID NO: 2129833 - RNA, 16 nt, Human
acugcuuguguuuuua

SEQ ID NO: 2129834 - RNA, 17 nt, Human
acugcucuaagcacacg

SEQ ID NO: 2129835 - RNA, 19 nt, Human
acugcucuaagcacacgga

SEQ ID NO: 2129836 - RNA, 15 nt, Human
acugcuggcugccuu

SEQ ID NO: 2129837 - RNA, 14 nt, Human
acugcuggcugccu

SEQ ID NO: 2129838 - RNA, 13 nt, Human
acugcugggacug

SEQ ID NO: 2129839 - RNA, 18 nt, Human
acugcugggacuggccag

SEQ ID NO: 2129840 - RNA, 19 nt, Human
acugcugggacuggccagg

SEQ ID NO: 2129841 - RNA, 22 nt, Human
acugcuguaaauaaaugcuuua

SEQ ID NO: 2129842 - RNA, 16 nt, Human
acugcugugaacaagu

SEQ ID NO: 2129843 - RNA, 23 nt, Human
acugcugugaacaagugaacaca

SEQ ID NO: 2129844 - RNA, 23 nt, Human
acugcuacaaauacucuuaggaa

SEQ ID NO: 2129845 - RNA, 14 nt, Human
acugccuuaaaacu

SEQ ID NO: 2129846 - RNA, 14 nt, Human
acugccugggcucc

SEQ ID NO: 2129847 - RNA, 15 nt, Human
acugccuuaaaacuu

SEQ ID NO: 2129848 - RNA, 16 nt, Human
acugccuuaaaacuuu

SEQ ID NO: 2129849 - RNA, 15 nt, Human
acugccucuuccucc

SEQ ID NO: 2129850 - RNA, 14 nt, Human
acugccucuuccuc

SEQ ID NO: 2129851 - RNA, 16 nt, Human
acugccucucccuggc

SEQ ID NO: 2129852 - RNA, 17 nt, Human
acugccucucccuggcc

SEQ ID NO: 2129853 - RNA, 18 nt, Human
acugccucucccuggccc

SEQ ID NO: 2129854 - RNA, 19 nt, Human
acugccucucccuggcccu

SEQ ID NO: 2129855 - RNA, 9 nt, Human
acugccugc

SEQ ID NO: 2129856 - RNA, 12 nt, Human
acugccugccca

SEQ ID NO: 2129857 - RNA, 13 nt, Human
acugccugcccac

SEQ ID NO: 2129858 - RNA, 14 nt, Human
acugccugcccacc

SEQ ID NO: 2129859 - RNA, 16 nt, Human
acugccugcccacccg

SEQ ID NO: 2129860 - RNA, 19 nt, Human
acugccugcccacccgugg

SEQ ID NO: 2129861 - RNA, 22 nt, Human
acugccugcccacccguggaga

SEQ ID NO: 2129862 - RNA, 23 nt, Human
acugccugcccacccguggagau

SEQ ID NO: 2129863 - RNA, 16 nt, Human
acugcauuagaaauua

SEQ ID NO: 2129864 - RNA, 14 nt, Human
acugcauggaccua

SEQ ID NO: 2129865 - RNA, 17 nt, Human
acugcauggaccuaaca

SEQ ID NO: 2129866 - RNA, 20 nt, Human
acugcauggaccuaacauuc

SEQ ID NO: 2129867 - RNA, 21 nt, Human
acugcauggaccuaacauucg

SEQ ID NO: 2129868 - RNA, 16 nt, Human
acugcaugguaauuua

SEQ ID NO: 2129869 - RNA, 17 nt, Human
acugcaugguaauuuau

SEQ ID NO: 2129870 - RNA, 14 nt, Human
acugcauguauaaa

SEQ ID NO: 2129871 - RNA, 15 nt, Human
acugcauguauaaau

SEQ ID NO: 2129872 - RNA, 20 nt, Human
acugcauguauaaaugaagu

SEQ ID NO: 2129873 - RNA, 18 nt, Human
uccuacuuuacauaugcu

SEQ ID NO: 2129874 - RNA, 15 nt, Human
acugcauugagaacu

SEQ ID NO: 2129875 - RNA, 22 nt, Human
uccuagagaaaacuugaauuca

SEQ ID NO: 2129876 - RNA, 17 nt, Human
uccuacuuuuccuuccc

SEQ ID NO: 2129877 - RNA, 21 nt, Human
uccuagaaauuccccacccug

SEQ ID NO: 2129878 - RNA, 22 nt, Human
uccuagaaauuccccacccuga

SEQ ID NO: 2129879 - RNA, 16 nt, Human
acugcauaugaaagga

SEQ ID NO: 2129880 - RNA, 22 nt, Human
acugcauaccaaccugggcaau

SEQ ID NO: 2129881 - RNA, 15 nt, Human
ucuaaaauccugcuu

SEQ ID NO: 2129882 - RNA, 22 nt, Human
ucuaaggaagaucacuuugcuc

SEQ ID NO: 2129883 - RNA, 18 nt, Human
ucuaagccuuuccauaag

SEQ ID NO: 2129884 - RNA, 21 nt, Human
acuguucucuauuagacuuua

SEQ ID NO: 2129885 - RNA, 15 nt, Human
ucuaccaacuggaag

SEQ ID NO: 2129886 - RNA, 16 nt, Human
ucuaccaacuggaagc

SEQ ID NO: 2129887 - RNA, 20 nt, Human
ucuaccaacuggaagcacag

SEQ ID NO: 2129888 - RNA, 12 nt, Human
ucuaccaucucc

SEQ ID NO: 2129889 - RNA, 15 nt, Human
ucuaccaucucccuc

SEQ ID NO: 2129890 - RNA, 17 nt, Human
ucuaccauuuucugguu

SEQ ID NO: 2129891 - RNA, 12 nt, Human
ucuacccagccc

SEQ ID NO: 2129892 - RNA, 20 nt, Human
ucuaccauuuucugguucuu

SEQ ID NO: 2129893 - RNA, 14 nt, Human
acuguuagaacacu

SEQ ID NO: 2129894 - RNA, 15 nt, Human
acuguuagaacacua

SEQ ID NO: 2129895 - RNA, 16 nt, Human
acuguuagaacacuau

SEQ ID NO: 2129896 - RNA, 17 nt, Human
acuguuagaacacuauu

SEQ ID NO: 2129897 - RNA, 18 nt, Human
acuguuagaacacuauuu

SEQ ID NO: 2129898 - RNA, 19 nt, Human
acuguuagaacacuauuuu

SEQ ID NO: 2129899 - RNA, 23 nt, Human
acuguuagaacacuauuuucaga

SEQ ID NO: 2129900 - RNA, 13 nt, Human
acuuaauaaauuc

SEQ ID NO: 2129901 - RNA, 17 nt, Human
acuuaauaaauucagau

SEQ ID NO: 2129902 - RNA, 18 nt, Human
acuguugcccaggcuggc

SEQ ID NO: 2129903 - RNA, 17 nt, Human
acuguugcccaggcugg

SEQ ID NO: 2129904 - RNA, 14 nt, Human
acuguugcccaggc

SEQ ID NO: 2129905 - RNA, 13 nt, Human
acuguugcccagg

SEQ ID NO: 2129906 - RNA, 12 nt, Human
acuguugcccag

SEQ ID NO: 2129907 - RNA, 16 nt, Human
acuuagaaauugcauu

SEQ ID NO: 2129908 - RNA, 20 nt, Human
acuuagugcggacaaguuuu

SEQ ID NO: 2129909 - RNA, 14 nt, Human
acuucagcucuguu

SEQ ID NO: 2129910 - RNA, 15 nt, Human
acuuaccuucaauaa

SEQ ID NO: 2129911 - RNA, 16 nt, Human
acuuaccuucaauaaa

SEQ ID NO: 2129912 - RNA, 17 nt, Human
acuuaccuagauuuaca

SEQ ID NO: 2129913 - RNA, 17 nt, Human
acuuaccuucaauaaag

SEQ ID NO: 2129914 - RNA, 19 nt, Human
acuuaccuucaauaaagua

SEQ ID NO: 2129915 - RNA, 20 nt, Human
acuuaccuucaauaaaguau

SEQ ID NO: 2129916 - RNA, 16 nt, Human
acuuaccauaugugcu

SEQ ID NO: 2129917 - RNA, 21 nt, Human
ucgguaaguugaauggccugc

SEQ ID NO: 2129918 - RNA, 14 nt, Human
ucgggggcuggggc

SEQ ID NO: 2129919 - RNA, 16 nt, Human
ucggggggacagcucc

SEQ ID NO: 2129920 - RNA, 12 nt, Human
ucgggcucagcu

SEQ ID NO: 2129921 - RNA, 15 nt, Human
ucgggcucagcucug

SEQ ID NO: 2129922 - RNA, 16 nt, Human
ucgggcucagcucugg

SEQ ID NO: 2129923 - RNA, 17 nt, Human
ucgggcucagcucuggc

SEQ ID NO: 2129924 - RNA, 15 nt, Human
ucgggaacaguguuu

SEQ ID NO: 2129925 - RNA, 19 nt, Human
acuguguggacugugaugc

SEQ ID NO: 2129926 - RNA, 19 nt, Human
acugugugcagacucaaua

SEQ ID NO: 2129927 - RNA, 17 nt, Human
acuguguggacugugau

SEQ ID NO: 2129928 - RNA, 18 nt, Human
acuguguggacugugaug

SEQ ID NO: 2129929 - RNA, 21 nt, Human
ucggcuccuggacucauugcu

SEQ ID NO: 2129930 - RNA, 17 nt, Human
ucgggaggucgaggcag

SEQ ID NO: 2129931 - RNA, 14 nt, Human
ucgggaacaguguu

SEQ ID NO: 2129932 - RNA, 19 nt, Human
ucgggaggucgaggcagga

SEQ ID NO: 2129933 - RNA, 21 nt, Human
ucgggaggucgaggcaggagg

SEQ ID NO: 2129934 - RNA, 14 nt, Human
ucgguccugucucc

SEQ ID NO: 2129935 - RNA, 18 nt, Human
ucgguccugucuccccuc

SEQ ID NO: 2129936 - RNA, 15 nt, Human
ucgguguccauuuau

SEQ ID NO: 2129937 - RNA, 22 nt, Human
ucgguguccauuuauagaauaa

SEQ ID NO: 2129938 - RNA, 17 nt, Human
ucguuugaaucacagua

SEQ ID NO: 2129939 - RNA, 17 nt, Human
ucguuuuuuucauucca

SEQ ID NO: 2129940 - RNA, 18 nt, Human
ucuaaaaaacagaggcca

SEQ ID NO: 2129941 - RNA, 14 nt, Human
ucuaaaaacaccaa

SEQ ID NO: 2129942 - RNA, 10 nt, Human
ucguuuguuu

SEQ ID NO: 2129943 - RNA, 13 nt, Human
ucguuuguuuguu

SEQ ID NO: 2129944 - RNA, 14 nt, Human
ucguuuguuuguuu

SEQ ID NO: 2129945 - RNA, 13 nt, Human
ucuaaaaugaguu

SEQ ID NO: 2129946 - RNA, 14 nt, Human
acuguggaaaaaua

SEQ ID NO: 2129947 - RNA, 15 nt, Human
acuguggaaaaauau

SEQ ID NO: 2129948 - RNA, 17 nt, Human
acuguggaaaaauauuu

SEQ ID NO: 2129949 - RNA, 19 nt, Human
acuguggaaaaauauuuaa

SEQ ID NO: 2129950 - RNA, 17 nt, Human
acuguccuacccacccu

SEQ ID NO: 2129951 - RNA, 23 nt, Human
acuguccuacccacccuccuuuc

SEQ ID NO: 2129952 - RNA, 18 nt, Human
acuguccuacccacccuc

SEQ ID NO: 2129953 - RNA, 19 nt, Human
acugggaagauaggcucug

SEQ ID NO: 2129954 - RNA, 22 nt, Human
acugggaagauaggcucugcac

SEQ ID NO: 2129955 - RNA, 23 nt, Human
acugggaagauaggcucugcaca

SEQ ID NO: 2129956 - RNA, 15 nt, Human
acugucacuguuucu

SEQ ID NO: 2129957 - RNA, 16 nt, Human
acugucacuguuucuc

SEQ ID NO: 2129958 - RNA, 20 nt, Human
acugucacuguuucucugcu

SEQ ID NO: 2129959 - RNA, 21 nt, Human
acugucacuguuucucugcug

SEQ ID NO: 2129960 - RNA, 12 nt, Human
acuguguaacug

SEQ ID NO: 2129961 - RNA, 13 nt, Human
acuguguaacugc

SEQ ID NO: 2129962 - RNA, 17 nt, Human
acuguguaacugcccaa

SEQ ID NO: 2129963 - RNA, 14 nt, Human
acuguguaacugcc

SEQ ID NO: 2129964 - RNA, 15 nt, Human
acuguguaacugccc

SEQ ID NO: 2129965 - RNA, 16 nt, Human
acuguguauguacaua

SEQ ID NO: 2129966 - RNA, 18 nt, Human
acuguguauguacauaua

SEQ ID NO: 2129967 - RNA, 20 nt, Human
acuguguauguacauauaua

SEQ ID NO: 2129968 - RNA, 18 nt, Human
acugugucccucucucug

SEQ ID NO: 2129969 - RNA, 19 nt, Human
acugugucccucucucugg

SEQ ID NO: 2129970 - RNA, 21 nt, Human
acugugucccucucucuggaa

SEQ ID NO: 2129971 - RNA, 22 nt, Human
acugugucccucucucuggaaa

SEQ ID NO: 2129972 - RNA, 17 nt, Human
agaaacaggguguuguc

SEQ ID NO: 2129973 - RNA, 13 nt, Human
agaaacaguuaac

SEQ ID NO: 2129974 - RNA, 18 nt, Human
agaaaccuuauuguaccu

SEQ ID NO: 2129975 - RNA, 16 nt, Human
agaaaccuuauuguac

SEQ ID NO: 2129976 - RNA, 20 nt, Human
agaaacaguuaacuuucaga

SEQ ID NO: 2129977 - RNA, 19 nt, Human
agaaacagagacaggccca

SEQ ID NO: 2129978 - RNA, 15 nt, Human
agaaacagagacagg

SEQ ID NO: 2129979 - RNA, 11 nt, Human
agaaacagauu

SEQ ID NO: 2129980 - RNA, 11 nt, Human
agaaacacuga

SEQ ID NO: 2129981 - RNA, 14 nt, Human
agaaacagagacag

SEQ ID NO: 2129982 - RNA, 23 nt, Human
agaaacucacccccaaggggcag

SEQ ID NO: 2129983 - RNA, 15 nt, Human
agaaacucaccccca

SEQ ID NO: 2129984 - RNA, 22 nt, Human
agaaacucacccccaaggggca

SEQ ID NO: 2129985 - RNA, 16 nt, Human
agaaacuuaucuuaca

SEQ ID NO: 2129986 - RNA, 18 nt, Human
agaaacuuaucuuacaaa

SEQ ID NO: 2129987 - RNA, 22 nt, Human
agaaacuuaucuuacaaagugu

SEQ ID NO: 2129988 - RNA, 20 nt, Human
agaaaccuuauuguaccucu

SEQ ID NO: 2129989 - RNA, 14 nt, Human
agaaaaaggagcuu

SEQ ID NO: 2129990 - RNA, 21 nt, Human
agaaaagaaucccuguucauu

SEQ ID NO: 2129991 - RNA, 17 nt, Human
agaaaagacaugaauau

SEQ ID NO: 2129992 - RNA, 19 nt, Human
agaaacaccuagaucagaa

SEQ ID NO: 2129993 - RNA, 20 nt, Human
agaaacaccuagaucagaac

SEQ ID NO: 2129994 - RNA, 20 nt, Human
agaaaaagcaauaaccucaa

SEQ ID NO: 2129995 - RNA, 21 nt, Human
ucucuuuaaugucacaggcag

SEQ ID NO: 2129996 - RNA, 20 nt, Human
ucucuuuaaugucacaggca

SEQ ID NO: 2129997 - RNA, 13 nt, Human
agaaaaagaaaaa

SEQ ID NO: 2129998 - RNA, 17 nt, Human
ucucuuuaaucuucagu

SEQ ID NO: 2129999 - RNA, 20 nt, Human
ucucuuuaaucuucaguuuu

SEQ ID NO: 2130000 - RNA, 15 nt, Human
ucucuuuaacucagg

SEQ ID NO: 2130001 - RNA, 17 nt, Human
ucucuuuaacucaggac

SEQ ID NO: 2130002 - RNA, 20 nt, Human
ucucuuuaacucaggacucc

SEQ ID NO: 2130003 - RNA, 23 nt, Human
ucucuuuaacucaggacuccagc

SEQ ID NO: 2130004 - RNA, 18 nt, Human
ucucuuggcuggcuuccu

SEQ ID NO: 2130005 - RNA, 16 nt, Human
ucucuuuaaucuucag

SEQ ID NO: 2130006 - RNA, 22 nt, Human
ucucuugccuaaguauuccuuu

SEQ ID NO: 2130007 - RNA, 13 nt, Human
ucucuugagggag

SEQ ID NO: 2130008 - RNA, 22 nt, Human
ucucuugagggagcuuagccaa

SEQ ID NO: 2130009 - RNA, 18 nt, Human
ucucuugagccugggagg

SEQ ID NO: 2130010 - RNA, 18 nt, Human
ucucuugaggccaggagu

SEQ ID NO: 2130011 - RNA, 17 nt, Human
ucucuugagccugggag

SEQ ID NO: 2130012 - RNA, 11 nt, Human
ucucugcuuca

SEQ ID NO: 2130013 - RNA, 14 nt, Human
ucucugcuucagcu

SEQ ID NO: 2130014 - RNA, 11 nt, Human
ucucugcugua

SEQ ID NO: 2130015 - RNA, 16 nt, Human
ucucuggaaaggagga

SEQ ID NO: 2130016 - RNA, 13 nt, Human
ucucugcugaagg

SEQ ID NO: 2130017 - RNA, 12 nt, Human
ucucugcuggcc

SEQ ID NO: 2130018 - RNA, 14 nt, Human
ucucugcuggccca

SEQ ID NO: 2130019 - RNA, 15 nt, Human
ucucugcuggcccag

SEQ ID NO: 2130020 - RNA, 16 nt, Human
ucucugcuggcccagc

SEQ ID NO: 2130021 - RNA, 19 nt, Human
ucucugcuggcccagccaa

SEQ ID NO: 2130022 - RNA, 19 nt, Human
ucucuggcccuucuugccu

SEQ ID NO: 2130023 - RNA, 11 nt, Human
ucucuccuccu

SEQ ID NO: 2130024 - RNA, 20 nt, Human
ucucucccucccuuugaaau

SEQ ID NO: 2130025 - RNA, 14 nt, Human
ucucuccucagacu

SEQ ID NO: 2130026 - RNA, 16 nt, Human
ucucuccucagacugc

SEQ ID NO: 2130027 - RNA, 16 nt, Human
acuuguuagaaaugca

SEQ ID NO: 2130028 - RNA, 15 nt, Human
acuuucucuuguaaa

SEQ ID NO: 2130029 - RNA, 18 nt, Human
ucugaagucacugcacag

SEQ ID NO: 2130030 - RNA, 16 nt, Human
ucugaagucacugcac

SEQ ID NO: 2130031 - RNA, 15 nt, Human
ucugaagucacugca

SEQ ID NO: 2130032 - RNA, 12 nt, Human
ucugacacacag

SEQ ID NO: 2130033 - RNA, 16 nt, Human
ucugaccugcaggcca

SEQ ID NO: 2130034 - RNA, 17 nt, Human
ucugaccugcaggccaa

SEQ ID NO: 2130035 - RNA, 19 nt, Human
ucugaccugcaggccaaga

SEQ ID NO: 2130036 - RNA, 21 nt, Human
ucugaccugcaggccaagagc

SEQ ID NO: 2130037 - RNA, 13 nt, Human
ucugacacaaaaa

SEQ ID NO: 2130038 - RNA, 14 nt, Human
ucugacacaaaaaa

SEQ ID NO: 2130039 - RNA, 22 nt, Human
ucugaagaguggguuucacaag

SEQ ID NO: 2130040 - RNA, 12 nt, Human
ucugaagcagau

SEQ ID NO: 2130041 - RNA, 17 nt, Human
ucugaagucacaucaca

SEQ ID NO: 2130042 - RNA, 20 nt, Human
ucugaagucacaucacagga

SEQ ID NO: 2130043 - RNA, 22 nt, Human
ucugaagucacaucacaggaca

SEQ ID NO: 2130044 - RNA, 23 nt, Human
ucugaagucacaucacaggacac

SEQ ID NO: 2130045 - RNA, 23 nt, Human
agaaacuugugaaguggaaaugu

SEQ ID NO: 2130046 - RNA, 13 nt, Human
agaaacuugugaa

SEQ ID NO: 2130047 - RNA, 11 nt, Human
agaaaucaugu

SEQ ID NO: 2130048 - RNA, 12 nt, Human
agaaaucauguu

SEQ ID NO: 2130049 - RNA, 13 nt, Human
agaaaucauguua

SEQ ID NO: 2130050 - RNA, 14 nt, Human
agaaaucauguuau

SEQ ID NO: 2130051 - RNA, 17 nt, Human
agaaaucauguuaugau

SEQ ID NO: 2130052 - RNA, 18 nt, Human
agaaaucauguuaugaua

SEQ ID NO: 2130053 - RNA, 21 nt, Human
agaaaucauguuaugauaaaa

SEQ ID NO: 2130054 - RNA, 21 nt, Human
agaaaucccccuuucucuaau

SEQ ID NO: 2130055 - RNA, 14 nt, Human
agaaauauaauuga

SEQ ID NO: 2130056 - RNA, 19 nt, Human
agaaauaucugaaaaugua

SEQ ID NO: 2130057 - RNA, 20 nt, Human
agaaauaucugaaaauguau

SEQ ID NO: 2130058 - RNA, 18 nt, Human
ucugauucccaagcucug

SEQ ID NO: 2130059 - RNA, 23 nt, Human
ucugaugcaagcaagaaacacug

SEQ ID NO: 2130060 - RNA, 14 nt, Human
ucugauguaaauga

SEQ ID NO: 2130061 - RNA, 15 nt, Human
ucugauguaaaugaa

SEQ ID NO: 2130062 - RNA, 16 nt, Human
ucugauguaaaugaag

SEQ ID NO: 2130063 - RNA, 18 nt, Human
ucugauguaaaugaagua

SEQ ID NO: 2130064 - RNA, 19 nt, Human
ucugauguaaaugaaguaa

SEQ ID NO: 2130065 - RNA, 14 nt, Human
ucugaguuuaccau

SEQ ID NO: 2130066 - RNA, 15 nt, Human
ucugaguuuaccauu

SEQ ID NO: 2130067 - RNA, 20 nt, Human
ucugaguuuaccauuuguaa

SEQ ID NO: 2130068 - RNA, 21 nt, Human
ucugaguuuaccauuuguaau

SEQ ID NO: 2130069 - RNA, 22 nt, Human
ucugaguuuaccauuuguaaua

SEQ ID NO: 2130070 - RNA, 24 nt, Human
ucugaguguuuuuacuacaguugu

SEQ ID NO: 2130071 - RNA, 14 nt, Human
agaaauucccugga

SEQ ID NO: 2130072 - RNA, 17 nt, Human
agaaauucccuggacca

SEQ ID NO: 2130073 - RNA, 18 nt, Human
agaaauucccuggaccag

SEQ ID NO: 2130074 - RNA, 22 nt, Human
agaaauucccuggaccagaugc

SEQ ID NO: 2130075 - RNA, 23 nt, Human
agaaauucccuggaccagaugcu

SEQ ID NO: 2130076 - RNA, 24 nt, Human
agaaauucccuggaccagaugcug

SEQ ID NO: 2130077 - RNA, 19 nt, Human
ucugcaggaugauuguaca

SEQ ID NO: 2130078 - RNA, 16 nt, Human
ucugcagcaugaccug

SEQ ID NO: 2130079 - RNA, 20 nt, Human
ucugcagcaugaccugugac

SEQ ID NO: 2130080 - RNA, 14 nt, Human
ucugcagccagccc

SEQ ID NO: 2130081 - RNA, 15 nt, Human
ucugcagccagccca

SEQ ID NO: 2130082 - RNA, 16 nt, Human
ucugcagccagcccag

SEQ ID NO: 2130083 - RNA, 18 nt, Human
ucugcagccagcccagcc

SEQ ID NO: 2130084 - RNA, 19 nt, Human
ucugcagccagcccagccc

SEQ ID NO: 2130085 - RNA, 22 nt, Human
acuucgggaggucgaggcagga

SEQ ID NO: 2130086 - RNA, 15 nt, Human
acuuccugugacuuc

SEQ ID NO: 2130087 - RNA, 17 nt, Human
acuuccuguccagagag

SEQ ID NO: 2130088 - RNA, 12 nt, Human
ucucacucuguc

SEQ ID NO: 2130089 - RNA, 16 nt, Human
ucucacuauguugccc

SEQ ID NO: 2130090 - RNA, 15 nt, Human
acuucuaaaugaagu

SEQ ID NO: 2130091 - RNA, 16 nt, Human
acuucuaaaugaagug

SEQ ID NO: 2130092 - RNA, 20 nt, Human
acuucguuuugguuaaguug

SEQ ID NO: 2130093 - RNA, 23 nt, Human
acuucguuuugguuaaguuggcu

SEQ ID NO: 2130094 - RNA, 14 nt, Human
acuucgacugugac

SEQ ID NO: 2130095 - RNA, 17 nt, Human
acuucuaaaugcauauc

SEQ ID NO: 2130096 - RNA, 17 nt, Human
acuucuaauugccaugu

SEQ ID NO: 2130097 - RNA, 14 nt, Human
acuucuaauugcca

SEQ ID NO: 2130098 - RNA, 23 nt, Human
acuucuacuucugcccuugccaa

SEQ ID NO: 2130099 - RNA, 14 nt, Human
acuucuccacccug

SEQ ID NO: 2130100 - RNA, 20 nt, Human
ucuauuucugagaagguccu

SEQ ID NO: 2130101 - RNA, 12 nt, Human
ucuauuucugag

SEQ ID NO: 2130102 - RNA, 13 nt, Human
ucuauuucugaga

SEQ ID NO: 2130103 - RNA, 15 nt, Human
ucuauuucugagaag

SEQ ID NO: 2130104 - RNA, 14 nt, Human
acuucaggcucuuc

SEQ ID NO: 2130105 - RNA, 11 nt, Human
acuucagcuga

SEQ ID NO: 2130106 - RNA, 16 nt, Human
acuucagcugacuuuu

SEQ ID NO: 2130107 - RNA, 20 nt, Human
ucucacgggcaguagcugug

SEQ ID NO: 2130108 - RNA, 18 nt, Human
ucucacagcacacucagc

SEQ ID NO: 2130109 - RNA, 20 nt, Human
ucucacagcacacucagcac

SEQ ID NO: 2130110 - RNA, 16 nt, Human
acuucuccacccugcu

SEQ ID NO: 2130111 - RNA, 15 nt, Human
acuucuccacccugc

SEQ ID NO: 2130112 - RNA, 16 nt, Human
acuugaaugugucacu

SEQ ID NO: 2130113 - RNA, 12 nt, Human
acuugagcaugu

SEQ ID NO: 2130114 - RNA, 21 nt, Human
acuugagcgugaaucuguauc

SEQ ID NO: 2130115 - RNA, 18 nt, Human
acuuguggacacagcucu

SEQ ID NO: 2130116 - RNA, 17 nt, Human
acuuguggacacagcuc

SEQ ID NO: 2130117 - RNA, 16 nt, Human
acuuguggacacagcu

SEQ ID NO: 2130118 - RNA, 19 nt, Human
acuuggagccccagugcca

SEQ ID NO: 2130119 - RNA, 14 nt, Human
acuuggccucugga

SEQ ID NO: 2130120 - RNA, 16 nt, Human
ucuccaggcuguaucc

SEQ ID NO: 2130121 - RNA, 17 nt, Human
ucuccaucagcuguaag

SEQ ID NO: 2130122 - RNA, 15 nt, Human
ucuccauauguuaca

SEQ ID NO: 2130123 - RNA, 17 nt, Human
ucuccaucagaggacac

SEQ ID NO: 2130124 - RNA, 13 nt, Human
ucuccaucagcug

SEQ ID NO: 2130125 - RNA, 15 nt, Human
ucuccagugcaccug

SEQ ID NO: 2130126 - RNA, 15 nt, Human
ucuccaguuuucagu

SEQ ID NO: 2130127 - RNA, 14 nt, Human
ucuccauauguuac

SEQ ID NO: 2130128 - RNA, 11 nt, Human
ucuccaaagcu

SEQ ID NO: 2130129 - RNA, 12 nt, Human
ucuccaaagcuu

SEQ ID NO: 2130130 - RNA, 21 nt, Human
ucuccaaagcuuuccuggaga

SEQ ID NO: 2130131 - RNA, 12 nt, Human
ucuccaaaugag

SEQ ID NO: 2130132 - RNA, 24 nt, Human
ucuccaaaugagaucuaagccuuu

SEQ ID NO: 2130133 - RNA, 15 nt, Human
ucuccaaccuggaca

SEQ ID NO: 2130134 - RNA, 19 nt, Human
ucucagggccuggucguuu

SEQ ID NO: 2130135 - RNA, 16 nt, Human
ucucagggaagcccag

SEQ ID NO: 2130136 - RNA, 17 nt, Human
ucucagggaagcccagc

SEQ ID NO: 2130137 - RNA, 18 nt, Human
ucucagggaagcccagcu

SEQ ID NO: 2130138 - RNA, 19 nt, Human
ucucagggaagcccagcuc

SEQ ID NO: 2130139 - RNA, 20 nt, Human
ucucagggaagcccagcucc

SEQ ID NO: 2130140 - RNA, 21 nt, Human
ucucagggaagcccagcucca

SEQ ID NO: 2130141 - RNA, 22 nt, Human
ucucagggaagcccagcuccag

SEQ ID NO: 2130142 - RNA, 23 nt, Human
ucucagggaagcccagcuccagg

SEQ ID NO: 2130143 - RNA, 14 nt, Human
ucucagggccuggu

SEQ ID NO: 2130144 - RNA, 15 nt, Human
ucucagggccugguc

SEQ ID NO: 2130145 - RNA, 15 nt, Human
acuugaggaaaccag

SEQ ID NO: 2130146 - RNA, 12 nt, Human
ucucauucagua

SEQ ID NO: 2130147 - RNA, 13 nt, Human
ucucauucaguau

SEQ ID NO: 2130148 - RNA, 17 nt, Human
ucucauucaguauuaaa

SEQ ID NO: 2130149 - RNA, 13 nt, Human
ucucauuccccag

SEQ ID NO: 2130150 - RNA, 14 nt, Human
ucucauuccccagg

SEQ ID NO: 2130151 - RNA, 16 nt, Human
ucucauuccccaggug

SEQ ID NO: 2130152 - RNA, 12 nt, Human
ucucagggccug

SEQ ID NO: 2130153 - RNA, 13 nt, Human
ucucagggccugg

SEQ ID NO: 2130154 - RNA, 14 nt, Human
ucucaggcucugcc

SEQ ID NO: 2130155 - RNA, 15 nt, Human
ucucaggcucugccc

SEQ ID NO: 2130156 - RNA, 17 nt, Human
ucucaggcucugcccug

SEQ ID NO: 2130157 - RNA, 19 nt, Human
ucucaggcucugcccugcc

SEQ ID NO: 2130158 - RNA, 20 nt, Human
ucucaggcucugcccugccc

SEQ ID NO: 2130159 - RNA, 12 nt, Human
ucucagccuccc

SEQ ID NO: 2130160 - RNA, 13 nt, Human
ucucagccuccca

SEQ ID NO: 2130161 - RNA, 14 nt, Human
ucuccuccugccca

SEQ ID NO: 2130162 - RNA, 16 nt, Human
ucuccuccugcccacc

SEQ ID NO: 2130163 - RNA, 16 nt, Human
ucuccucgcaagcugg

SEQ ID NO: 2130164 - RNA, 13 nt, Human
ucuccucuccccu

SEQ ID NO: 2130165 - RNA, 12 nt, Human
ucuccuauuuuu

SEQ ID NO: 2130166 - RNA, 13 nt, Human
ucuccuauuuuuu

SEQ ID NO: 2130167 - RNA, 20 nt, Human
ucuccuauuuuuuuaaaauc

SEQ ID NO: 2130168 - RNA, 16 nt, Human
ucuccucuccccucua

SEQ ID NO: 2130169 - RNA, 15 nt, Human
acuuguuccagcucu

SEQ ID NO: 2130170 - RNA, 16 nt, Human
acuuguuccagcucuu

SEQ ID NO: 2130171 - RNA, 15 nt, Human
acuuuaaaauaaaau

SEQ ID NO: 2130172 - RNA, 21 nt, Human
acuuguucaaaauauguucuu

SEQ ID NO: 2130173 - RNA, 17 nt, Human
acuuguuccagcucuuu

SEQ ID NO: 2130174 - RNA, 13 nt, Human
acuuuaauaugua

SEQ ID NO: 2130175 - RNA, 16 nt, Human
acuuuaauauguauuu

SEQ ID NO: 2130176 - RNA, 22 nt, Human
acuuuaauauguauuuuaugua

SEQ ID NO: 2130177 - RNA, 16 nt, Human
ucuccauguuugaugu

SEQ ID NO: 2130178 - RNA, 17 nt, Human
ucuccaucuggcagggu

SEQ ID NO: 2130179 - RNA, 19 nt, Human
ucucccacuagacaagucc

SEQ ID NO: 2130180 - RNA, 17 nt, Human
ucuccuagacugacccu

SEQ ID NO: 2130181 - RNA, 23 nt, Human
ucuccuagacugacccugaucag

SEQ ID NO: 2130182 - RNA, 22 nt, Human
ucuccccacacuaaccuggguu

SEQ ID NO: 2130183 - RNA, 11 nt, Human
ucuccccacac

SEQ ID NO: 2130184 - RNA, 13 nt, Human
ucuccccacacua

SEQ ID NO: 2130185 - RNA, 10 nt, Human
ucuccccaca

SEQ ID NO: 2130186 - RNA, 15 nt, Human
ucucccaucuuaacu

SEQ ID NO: 2130187 - RNA, 21 nt, Human
ucucccaucuuaacucuuugc

SEQ ID NO: 2130188 - RNA, 13 nt, Human
ucucccaguuguc

SEQ ID NO: 2130189 - RNA, 17 nt, Human
ucucccagcucuagaca

SEQ ID NO: 2130190 - RNA, 17 nt, Human
ucuccagucuuccaccu

SEQ ID NO: 2130191 - RNA, 11 nt, Human
ucucccaguug

SEQ ID NO: 2130192 - RNA, 16 nt, Human
agaaauuuccacucag

SEQ ID NO: 2130193 - RNA, 22 nt, Human
agaaauuuccacucaggucugu

SEQ ID NO: 2130194 - RNA, 23 nt, Human
agaaccccaggguccuguagccc

SEQ ID NO: 2130195 - RNA, 20 nt, Human
agaacccuggugaggaagcu

SEQ ID NO: 2130196 - RNA, 22 nt, Human
agaacccuggugaggaagcucc

SEQ ID NO: 2130197 - RNA, 15 nt, Human
agaauguuguauuca

SEQ ID NO: 2130198 - RNA, 19 nt, Human
agaauguugaauacuuaua

SEQ ID NO: 2130199 - RNA, 19 nt, Human
agaauguuguauucaguga

SEQ ID NO: 2130200 - RNA, 18 nt, Human
agaauguuguauucagug

SEQ ID NO: 2130201 - RNA, 21 nt, Human
agaauguguuuaaacuugguu

SEQ ID NO: 2130202 - RNA, 14 nt, Human
agaauguucucaau

SEQ ID NO: 2130203 - RNA, 19 nt, Human
agaauguuauagugaauua

SEQ ID NO: 2130204 - RNA, 22 nt, Human
agaauguuauagugaauuaucc

SEQ ID NO: 2130205 - RNA, 18 nt, Human
agaaugugcucaugcauu

SEQ ID NO: 2130206 - RNA, 21 nt, Human
ucugggguucagccccuccuc

SEQ ID NO: 2130207 - RNA, 22 nt, Human
ucugggguucagccccuccucu

SEQ ID NO: 2130208 - RNA, 16 nt, Human
ucugggguucagcccc

SEQ ID NO: 2130209 - RNA, 17 nt, Human
ucugggguucagccccu

SEQ ID NO: 2130210 - RNA, 18 nt, Human
ucugggguucagccccuc

SEQ ID NO: 2130211 - RNA, 19 nt, Human
ucugggguucagccccucc

SEQ ID NO: 2130212 - RNA, 23 nt, Human
ucugggguucagccccuccucug

SEQ ID NO: 2130213 - RNA, 13 nt, Human
ucuggguucuggg

SEQ ID NO: 2130214 - RNA, 15 nt, Human
ucuggguucugggug

SEQ ID NO: 2130215 - RNA, 16 nt, Human
ucuggguucugggugg

SEQ ID NO: 2130216 - RNA, 21 nt, Human
ucugggcuuggggcuuccuaa

SEQ ID NO: 2130217 - RNA, 22 nt, Human
ucugggcuuugauuccaucucc

SEQ ID NO: 2130218 - RNA, 19 nt, Human
ucugggcuuggggcuuccu

SEQ ID NO: 2130219 - RNA, 13 nt, Human
ucugggggucagg

SEQ ID NO: 2130220 - RNA, 20 nt, Human
agaauuauaauuaguuccuc

SEQ ID NO: 2130221 - RNA, 15 nt, Human
agaauucccagcugu

SEQ ID NO: 2130222 - RNA, 20 nt, Human
agaauucucagaaucucaaa

SEQ ID NO: 2130223 - RNA, 19 nt, Human
agaauuccuacaauauaua

SEQ ID NO: 2130224 - RNA, 19 nt, Human
agaauucuccaaaacaauu

SEQ ID NO: 2130225 - RNA, 17 nt, Human
ucugggcugcuacccag

SEQ ID NO: 2130226 - RNA, 22 nt, Human
ucugggcugcuacccagaaauc

SEQ ID NO: 2130227 - RNA, 18 nt, Human
ucuguacgucugacaggc

SEQ ID NO: 2130228 - RNA, 20 nt, Human
ucugguaggaauagcauguc

SEQ ID NO: 2130229 - RNA, 13 nt, Human
ucugguagacaca

SEQ ID NO: 2130230 - RNA, 20 nt, Human
ucugguagacacaggauaga

SEQ ID NO: 2130231 - RNA, 16 nt, Human
ucugguagauagaaau

SEQ ID NO: 2130232 - RNA, 18 nt, Human
ucugguagauagaaauaa

SEQ ID NO: 2130233 - RNA, 20 nt, Human
ucugguagauuuuuaacgaa

SEQ ID NO: 2130234 - RNA, 21 nt, Human
ucuguaucggagacagugauc

SEQ ID NO: 2130235 - RNA, 18 nt, Human
ucuguaucggagacagug

SEQ ID NO: 2130236 - RNA, 19 nt, Human
ucuguaucggagacaguga

SEQ ID NO: 2130237 - RNA, 23 nt, Human
ucuguauuuaugugugaggagcu

SEQ ID NO: 2130238 - RNA, 13 nt, Human
ucuguccagggcc

SEQ ID NO: 2130239 - RNA, 17 nt, Human
ucuguccagggcccuga

SEQ ID NO: 2130240 - RNA, 19 nt, Human
ucuguccagggcccugagc

SEQ ID NO: 2130241 - RNA, 20 nt, Human
ucuguccagggcccugagcu

SEQ ID NO: 2130242 - RNA, 15 nt, Human
ucuguggccuuguuc

SEQ ID NO: 2130243 - RNA, 22 nt, Human
ucuguggccuuguucucucuau

SEQ ID NO: 2130244 - RNA, 14 nt, Human
ucugugccccaugc

SEQ ID NO: 2130245 - RNA, 15 nt, Human
ucugugccccaugcc

SEQ ID NO: 2130246 - RNA, 17 nt, Human
ucugugccccaugccug

SEQ ID NO: 2130247 - RNA, 12 nt, Human
ucugugcccagc

SEQ ID NO: 2130248 - RNA, 13 nt, Human
ucugugcccagcu

SEQ ID NO: 2130249 - RNA, 14 nt, Human
ucugugcccagcuc

SEQ ID NO: 2130250 - RNA, 16 nt, Human
ucugugcccagcucag

SEQ ID NO: 2130251 - RNA, 19 nt, Human
ucugugcccagcucagucu

SEQ ID NO: 2130252 - RNA, 14 nt, Human
ucuuacaaacaugu

SEQ ID NO: 2130253 - RNA, 23 nt, Human
ucuuaauuuaaucuuuuuuaugu

SEQ ID NO: 2130254 - RNA, 12 nt, Human
agacagugaucu

SEQ ID NO: 2130255 - RNA, 15 nt, Human
agacagugaucucca

SEQ ID NO: 2130256 - RNA, 17 nt, Human
agacagugaucuccaua

SEQ ID NO: 2130257 - RNA, 18 nt, Human
agacagugaucuccauau

SEQ ID NO: 2130258 - RNA, 20 nt, Human
agacagugaucuccauaugu

SEQ ID NO: 2130259 - RNA, 21 nt, Human
agacagugaucuccauauguu

SEQ ID NO: 2130260 - RNA, 22 nt, Human
agacagugccuauacugccucu

SEQ ID NO: 2130261 - RNA, 20 nt, Human
agacagucaaggaguggcuu

SEQ ID NO: 2130262 - RNA, 17 nt, Human
agacagucaaggagugg

SEQ ID NO: 2130263 - RNA, 13 nt, Human
ucuuacaaagugu

SEQ ID NO: 2130264 - RNA, 16 nt, Human
ucuuacaaaguguauu

SEQ ID NO: 2130265 - RNA, 20 nt, Human
ucuuacaaaguguauuuuau

SEQ ID NO: 2130266 - RNA, 15 nt, Human
ucuuacccuucugug

SEQ ID NO: 2130267 - RNA, 16 nt, Human
ucuuacccuucugugc

SEQ ID NO: 2130268 - RNA, 18 nt, Human
ucuuacccuucugugccc

SEQ ID NO: 2130269 - RNA, 20 nt, Human
ucuuacccuucugugcccag

SEQ ID NO: 2130270 - RNA, 21 nt, Human
ucuuacccuucugugcccagc

SEQ ID NO: 2130271 - RNA, 22 nt, Human
ucuuacccuucugugcccagcu

SEQ ID NO: 2130272 - RNA, 15 nt, Human
ucuuacauguuuucu

SEQ ID NO: 2130273 - RNA, 14 nt, Human
ucuuacauguuuuc

SEQ ID NO: 2130274 - RNA, 17 nt, Human
ucuuacuauuaagcagu

SEQ ID NO: 2130275 - RNA, 21 nt, Human
ucuuacuauuaagcaguaaaa

SEQ ID NO: 2130276 - RNA, 23 nt, Human
ucuuacuauuaagcaguaaaaac

SEQ ID NO: 2130277 - RNA, 20 nt, Human
ucuuacuuauuaucuucagg

SEQ ID NO: 2130278 - RNA, 12 nt, Human
ucuuacugcuug

SEQ ID NO: 2130279 - RNA, 13 nt, Human
ucuuacugaaggu

SEQ ID NO: 2130280 - RNA, 23 nt, Human
ucuuacugaagguaaaauugaaa

SEQ ID NO: 2130281 - RNA, 17 nt, Human
ucuuauguaccucuuuu

SEQ ID NO: 2130282 - RNA, 18 nt, Human
ucuuauguaccucuuuua

SEQ ID NO: 2130283 - RNA, 18 nt, Human
ucuuauguaugugaaagu

SEQ ID NO: 2130284 - RNA, 12 nt, Human
ucuuagauguau

SEQ ID NO: 2130285 - RNA, 17 nt, Human
agacacaggcccggcuc

SEQ ID NO: 2130286 - RNA, 11 nt, Human
agacacacaca

SEQ ID NO: 2130287 - RNA, 17 nt, Human
agacacacgcacacaca

SEQ ID NO: 2130288 - RNA, 18 nt, Human
agacacacgcacacacac

SEQ ID NO: 2130289 - RNA, 22 nt, Human
agacacaggcccggcuccaggc

SEQ ID NO: 2130290 - RNA, 21 nt, Human
agacacaggcccggcuccagg

SEQ ID NO: 2130291 - RNA, 20 nt, Human
agacacaggcccggcuccag

SEQ ID NO: 2130292 - RNA, 19 nt, Human
agacacaggcccggcucca

SEQ ID NO: 2130293 - RNA, 17 nt, Human
agaauucucuuauccaa

SEQ ID NO: 2130294 - RNA, 13 nt, Human
agaauucugcuac

SEQ ID NO: 2130295 - RNA, 20 nt, Human
agaauucugcuaccucacug

SEQ ID NO: 2130296 - RNA, 22 nt, Human
agaauucugcuaccucacuggg

SEQ ID NO: 2130297 - RNA, 22 nt, Human
agacaccuugacagggcacacc

SEQ ID NO: 2130298 - RNA, 19 nt, Human
agacaccuugacagggcac

SEQ ID NO: 2130299 - RNA, 23 nt, Human
agacacaggcccggcuccaggcu

SEQ ID NO: 2130300 - RNA, 13 nt, Human
agacacacuuguc

SEQ ID NO: 2130301 - RNA, 14 nt, Human
agacacagaacaca

SEQ ID NO: 2130302 - RNA, 16 nt, Human
agacacagaacacaga

SEQ ID NO: 2130303 - RNA, 15 nt, Human
agacacuuuggaagu

SEQ ID NO: 2130304 - RNA, 23 nt, Human
agacacuuuggaaguuuguguuc

SEQ ID NO: 2130305 - RNA, 15 nt, Human
agacuuccagagccu

SEQ ID NO: 2130306 - RNA, 17 nt, Human
agacuucauuuuuccua

SEQ ID NO: 2130307 - RNA, 19 nt, Human
agacuuaguauauuuucuu

SEQ ID NO: 2130308 - RNA, 22 nt, Human
agacuuaguauauuuucuuuuc

SEQ ID NO: 2130309 - RNA, 18 nt, Human
agacuuaguauauuuucu

SEQ ID NO: 2130310 - RNA, 15 nt, Human
agacuucccugaaug

SEQ ID NO: 2130311 - RNA, 19 nt, Human
agacuucccugaauguauu

SEQ ID NO: 2130312 - RNA, 14 nt, Human
agacuucccagcuu

SEQ ID NO: 2130313 - RNA, 15 nt, Human
agacuucccagcuuc

SEQ ID NO: 2130314 - RNA, 18 nt, Human
agacuucccagcuucugc

SEQ ID NO: 2130315 - RNA, 14 nt, Human
agacugucucaaga

SEQ ID NO: 2130316 - RNA, 22 nt, Human
agacuguagauugcuucuguag

SEQ ID NO: 2130317 - RNA, 23 nt, Human
agacuguagauugcuucuguagu

SEQ ID NO: 2130318 - RNA, 21 nt, Human
agacugucagcuuccaaacau

SEQ ID NO: 2130319 - RNA, 23 nt, Human
agacuguuuuucagggagguggc

SEQ ID NO: 2130320 - RNA, 21 nt, Human
agacugggugaggauaacaca

SEQ ID NO: 2130321 - RNA, 15 nt, Human
agacuguacaaagua

SEQ ID NO: 2130322 - RNA, 16 nt, Human
agacuguacaaaguag

SEQ ID NO: 2130323 - RNA, 17 nt, Human
agagacagacuugagaa

SEQ ID NO: 2130324 - RNA, 18 nt, Human
agagacagacuugagaac

SEQ ID NO: 2130325 - RNA, 19 nt, Human
agagacagacuugagaacu

SEQ ID NO: 2130326 - RNA, 13 nt, Human
agagacagagagg

SEQ ID NO: 2130327 - RNA, 14 nt, Human
agagacaagaagca

SEQ ID NO: 2130328 - RNA, 16 nt, Human
agagacaagaagcaaa

SEQ ID NO: 2130329 - RNA, 15 nt, Human
agagacaagacuucg

SEQ ID NO: 2130330 - RNA, 13 nt, Human
agagaaaaaagaa

SEQ ID NO: 2130331 - RNA, 17 nt, Human
agagaaaaaagaagugu

SEQ ID NO: 2130332 - RNA, 17 nt, Human
agagaauguagauauug

SEQ ID NO: 2130333 - RNA, 16 nt, Human
agagaaugucugaucu

SEQ ID NO: 2130334 - RNA, 13 nt, Human
agagaauguuaua

SEQ ID NO: 2130335 - RNA, 18 nt, Human
agagaauguuauagugaa

SEQ ID NO: 2130336 - RNA, 20 nt, Human
agagaauguuauagugaauu

SEQ ID NO: 2130337 - RNA, 21 nt, Human
agagaauguuauagugaauua

SEQ ID NO: 2130338 - RNA, 22 nt, Human
agagaauguuauagugaauuau

SEQ ID NO: 2130339 - RNA, 19 nt, Human
agagaauuguuugaacccg

SEQ ID NO: 2130340 - RNA, 22 nt, Human
agacuugguguccuuucccucc

SEQ ID NO: 2130341 - RNA, 23 nt, Human
agacuugguguccuuucccucca

SEQ ID NO: 2130342 - RNA, 19 nt, Human
agacuugguguccuuuccc

SEQ ID NO: 2130343 - RNA, 18 nt, Human
agacuuguaugaaagaug

SEQ ID NO: 2130344 - RNA, 14 nt, Human
agacuuuaaagaau

SEQ ID NO: 2130345 - RNA, 12 nt, Human
agacuuuagaaa

SEQ ID NO: 2130346 - RNA, 16 nt, Human
agacuuuagaaauaaa

SEQ ID NO: 2130347 - RNA, 17 nt, Human
agacuuuagaaauaaau

SEQ ID NO: 2130348 - RNA, 18 nt, Human
agacuuuagaaauaaaug

SEQ ID NO: 2130349 - RNA, 18 nt, Human
agacuuuccccauacucu

SEQ ID NO: 2130350 - RNA, 13 nt, Human
agacuuuucuuug

SEQ ID NO: 2130351 - RNA, 19 nt, Human
agacuuuuuuuaaauagua

SEQ ID NO: 2130352 - RNA, 12 nt, Human
agacuuuuuggu

SEQ ID NO: 2130353 - RNA, 13 nt, Human
agacuuuuuggug

SEQ ID NO: 2130354 - RNA, 19 nt, Human
agacuuuuugguggaugua

SEQ ID NO: 2130355 - RNA, 20 nt, Human
agacuuuuugguggauguaa

SEQ ID NO: 2130356 - RNA, 23 nt, Human
agacuuuuugguggauguaaaua

SEQ ID NO: 2130357 - RNA, 21 nt, Human
agagaaaaaaaguuugccaga

SEQ ID NO: 2130358 - RNA, 22 nt, Human
agagaaaaaauauuuuccugcc

SEQ ID NO: 2130359 - RNA, 22 nt, Human
ucuuucugcagaaacagaaagg

SEQ ID NO: 2130360 - RNA, 16 nt, Human
ucuuucuggccugccu

SEQ ID NO: 2130361 - RNA, 18 nt, Human
ucuuucuggccugccuuc

SEQ ID NO: 2130362 - RNA, 23 nt, Human
ucuuucuggccugccuucguuaa

SEQ ID NO: 2130363 - RNA, 14 nt, Human
ucuuucuuccucug

SEQ ID NO: 2130364 - RNA, 20 nt, Human
ucuuuauaauucuacuuuga

SEQ ID NO: 2130365 - RNA, 13 nt, Human
ucuuucugcuuug

SEQ ID NO: 2130366 - RNA, 16 nt, Human
ucuuucuuccucugcu

SEQ ID NO: 2130367 - RNA, 15 nt, Human
ucuuucuuccucugc

SEQ ID NO: 2130368 - RNA, 17 nt, Human
ucuuucuuccucugcug

SEQ ID NO: 2130369 - RNA, 15 nt, Human
ucuuuaguuuuugug

SEQ ID NO: 2130370 - RNA, 22 nt, Human
ucuuuaaugucacaggcagguc

SEQ ID NO: 2130371 - RNA, 20 nt, Human
ucuuuaaugucacaggcagg

SEQ ID NO: 2130372 - RNA, 20 nt, Human
ucuuguaagagcuauacagu

SEQ ID NO: 2130373 - RNA, 11 nt, Human
ucuuguaagau

SEQ ID NO: 2130374 - RNA, 13 nt, Human
ucuuguaagauuu

SEQ ID NO: 2130375 - RNA, 16 nt, Human
ucuuguaagauuuuga

SEQ ID NO: 2130376 - RNA, 17 nt, Human
ucuuguaagauuuugaa

SEQ ID NO: 2130377 - RNA, 18 nt, Human
ucuuguaagauuuugaaa

SEQ ID NO: 2130378 - RNA, 19 nt, Human
ucuuguaagauuuugaaaa

SEQ ID NO: 2130379 - RNA, 15 nt, Human
ucuuguaagcaaaag

SEQ ID NO: 2130380 - RNA, 15 nt, Human
ucuugguuuccuucc

SEQ ID NO: 2130381 - RNA, 14 nt, Human
agaccuagggagga

SEQ ID NO: 2130382 - RNA, 15 nt, Human
agaccuagggaggac

SEQ ID NO: 2130383 - RNA, 16 nt, Human
agaccuauuugacaua

SEQ ID NO: 2130384 - RNA, 11 nt, Human
agaccucagcc

SEQ ID NO: 2130385 - RNA, 19 nt, Human
agaccuagggaggaccuua

SEQ ID NO: 2130386 - RNA, 12 nt, Human
agaccucagcca

SEQ ID NO: 2130387 - RNA, 14 nt, Human
agaccucagccaug

SEQ ID NO: 2130388 - RNA, 12 nt, Human
agaccucagccu

SEQ ID NO: 2130389 - RNA, 13 nt, Human
agaccucagccug

SEQ ID NO: 2130390 - RNA, 14 nt, Human
agaccucagccugu

SEQ ID NO: 2130391 - RNA, 15 nt, Human
agaccucagccugug

SEQ ID NO: 2130392 - RNA, 16 nt, Human
agaccucagccugugc

SEQ ID NO: 2130393 - RNA, 17 nt, Human
agaccucagccugugcu

SEQ ID NO: 2130394 - RNA, 19 nt, Human
agaccucagccugugcugc

SEQ ID NO: 2130395 - RNA, 20 nt, Human
agaccucagccugugcugcc

SEQ ID NO: 2130396 - RNA, 18 nt, Human
agaccucagccaugagga

SEQ ID NO: 2130397 - RNA, 18 nt, Human
agaccucugugcacuuau

SEQ ID NO: 2130398 - RNA, 19 nt, Human
agaccucuauauuugcucu

SEQ ID NO: 2130399 - RNA, 16 nt, Human
agacccuaccccacca

SEQ ID NO: 2130400 - RNA, 18 nt, Human
agacccuaccccaccacg

SEQ ID NO: 2130401 - RNA, 17 nt, Human
agacccuuuuggguuuc

SEQ ID NO: 2130402 - RNA, 19 nt, Human
agacccuuuuggguuucug

SEQ ID NO: 2130403 - RNA, 12 nt, Human
agaccggaagcu

SEQ ID NO: 2130404 - RNA, 16 nt, Human
agaccggaagcuccug

SEQ ID NO: 2130405 - RNA, 18 nt, Human
agaccggaagcuccuggu

SEQ ID NO: 2130406 - RNA, 18 nt, Human
agaccgucgggggcugag

SEQ ID NO: 2130407 - RNA, 23 nt, Human
agaccgucgggggcugaggggca

SEQ ID NO: 2130408 - RNA, 17 nt, Human
agaccaaaaugacaaug

SEQ ID NO: 2130409 - RNA, 18 nt, Human
agaccaaaaugacaauga

SEQ ID NO: 2130410 - RNA, 14 nt, Human
agaccccuggcuuu

SEQ ID NO: 2130411 - RNA, 15 nt, Human
agaccccuggcuuuu

SEQ ID NO: 2130412 - RNA, 21 nt, Human
agaccccuggcuuuucacugc

SEQ ID NO: 2130413 - RNA, 17 nt, Human
agacccuaaaucugagg

SEQ ID NO: 2130414 - RNA, 13 nt, Human
agaccccugucuc

SEQ ID NO: 2130415 - RNA, 14 nt, Human
agaccccugucucc

SEQ ID NO: 2130416 - RNA, 13 nt, Human
agaccccugucuu

SEQ ID NO: 2130417 - RNA, 23 nt, Human
agaccccugucuuugcugagagc

SEQ ID NO: 2130418 - RNA, 15 nt, Human
agacccgaggaaacu

SEQ ID NO: 2130419 - RNA, 14 nt, Human
agacccggcugcgu

SEQ ID NO: 2130420 - RNA, 14 nt, Human
agacuauuugcuua

SEQ ID NO: 2130421 - RNA, 16 nt, Human
agacuauugacaucag

SEQ ID NO: 2130422 - RNA, 20 nt, Human
agacuauugacaucagcauc

SEQ ID NO: 2130423 - RNA, 12 nt, Human
agacucaccucu

SEQ ID NO: 2130424 - RNA, 14 nt, Human
agacucaccucugc

SEQ ID NO: 2130425 - RNA, 16 nt, Human
agacucaccucugccu

SEQ ID NO: 2130426 - RNA, 22 nt, Human
agacucagguuguaguaaagaa

SEQ ID NO: 2130427 - RNA, 23 nt, Human
agacucagguuguaguaaagaaa

SEQ ID NO: 2130428 - RNA, 20 nt, Human
agaccugcugagggaccagc

SEQ ID NO: 2130429 - RNA, 15 nt, Human
agacucauucuucug

SEQ ID NO: 2130430 - RNA, 15 nt, Human
agacucaccucugcc

SEQ ID NO: 2130431 - RNA, 12 nt, Human
agacucaguguu

SEQ ID NO: 2130432 - RNA, 13 nt, Human
agacucaguguuc

SEQ ID NO: 2130433 - RNA, 12 nt, Human
agacucaguuug

SEQ ID NO: 2130434 - RNA, 18 nt, Human
agacucauacagaaggug

SEQ ID NO: 2130435 - RNA, 15 nt, Human
agacucaguuuguca

SEQ ID NO: 2130436 - RNA, 16 nt, Human
agacucaguuugucag

SEQ ID NO: 2130437 - RNA, 17 nt, Human
agacucaguuugucaga

SEQ ID NO: 2130438 - RNA, 21 nt, Human
agacucaguuugucagacuuu

SEQ ID NO: 2130439 - RNA, 21 nt, Human
ucuugaguuuuguuuuaaaau

SEQ ID NO: 2130440 - RNA, 14 nt, Human
ucuucuucagaaga

SEQ ID NO: 2130441 - RNA, 14 nt, Human
ucuucuuccaggua

SEQ ID NO: 2130442 - RNA, 16 nt, Human
ucuucuucagaagaca

SEQ ID NO: 2130443 - RNA, 23 nt, Human
ucuucuguacgucugacaggcaa

SEQ ID NO: 2130444 - RNA, 15 nt, Human
ucuucuuacaugcau

SEQ ID NO: 2130445 - RNA, 20 nt, Human
ucuucuguacgucugacagg

SEQ ID NO: 2130446 - RNA, 14 nt, Human
ucuucuucuucaga

SEQ ID NO: 2130447 - RNA, 22 nt, Human
agacauacuccuuccaucaaau

SEQ ID NO: 2130448 - RNA, 15 nt, Human
ucuucuucuucagaa

SEQ ID NO: 2130449 - RNA, 14 nt, Human
agacaugaauauga

SEQ ID NO: 2130450 - RNA, 17 nt, Human
agacaugaauaugauua

SEQ ID NO: 2130451 - RNA, 17 nt, Human
agacaugaaugcacacu

SEQ ID NO: 2130452 - RNA, 22 nt, Human
agacauuuguaaauguaaaacu

SEQ ID NO: 2130453 - RNA, 16 nt, Human
agacauggcuugccac

SEQ ID NO: 2130454 - RNA, 22 nt, Human
agacauggcuugccacagcucu

SEQ ID NO: 2130455 - RNA, 12 nt, Human
agacauggggag

SEQ ID NO: 2130456 - RNA, 18 nt, Human
ucuucugccggcccuggg

SEQ ID NO: 2130457 - RNA, 19 nt, Human
ucuucugccggcccugggg

SEQ ID NO: 2130458 - RNA, 11 nt, Human
ucuucugcucc

SEQ ID NO: 2130459 - RNA, 12 nt, Human
ucuucugcucca

SEQ ID NO: 2130460 - RNA, 13 nt, Human
ucuucugcuccac

SEQ ID NO: 2130461 - RNA, 22 nt, Human
ucuucugcuucagccucccgag

SEQ ID NO: 2130462 - RNA, 22 nt, Human
ucuucuguacgucugacaggca

SEQ ID NO: 2130463 - RNA, 21 nt, Human
ucuucuguacgucugacaggc

SEQ ID NO: 2130464 - RNA, 17 nt, Human
ucuuauuuaaugaaaga

SEQ ID NO: 2130465 - RNA, 17 nt, Human
ucuuauucaguaaaaaa

SEQ ID NO: 2130466 - RNA, 18 nt, Human
ucuuauucaguaaaaaac

SEQ ID NO: 2130467 - RNA, 15 nt, Human
ucuuauucucacucc

SEQ ID NO: 2130468 - RNA, 13 nt, Human
ucuuauuuauuau

SEQ ID NO: 2130469 - RNA, 17 nt, Human
ugaccaauauuguacag

SEQ ID NO: 2130470 - RNA, 18 nt, Human
ugaccaauauuguacagu

SEQ ID NO: 2130471 - RNA, 23 nt, Human
ugaccaauauuauacuaagaaaa

SEQ ID NO: 2130472 - RNA, 19 nt, Human
ugaccaauauuguacaguu

SEQ ID NO: 2130473 - RNA, 21 nt, Human
ugaccaauauuguacaguuuu

SEQ ID NO: 2130474 - RNA, 18 nt, Human
ugaccaaugauggucacc

SEQ ID NO: 2130475 - RNA, 22 nt, Human
ugacauuguagagcuucuggca

SEQ ID NO: 2130476 - RNA, 21 nt, Human
ugacauuguuggccaaagcca

SEQ ID NO: 2130477 - RNA, 20 nt, Human
ugacauuguuggccaaagcc

SEQ ID NO: 2130478 - RNA, 12 nt, Human
agaucaugaaga

SEQ ID NO: 2130479 - RNA, 18 nt, Human
agaucauagauuucugau

SEQ ID NO: 2130480 - RNA, 19 nt, Human
agaucauagauuucugauu

SEQ ID NO: 2130481 - RNA, 20 nt, Human
agaucauagauuucugauuu

SEQ ID NO: 2130482 - RNA, 21 nt, Human
agaucauagauuucugauuuu

SEQ ID NO: 2130483 - RNA, 23 nt, Human
agaucauagauuucugauuuuau

SEQ ID NO: 2130484 - RNA, 13 nt, Human
agaucagccuggg

SEQ ID NO: 2130485 - RNA, 15 nt, Human
agaucagccugggca

SEQ ID NO: 2130486 - RNA, 20 nt, Human
ugacagggcacaccgggcac

SEQ ID NO: 2130487 - RNA, 21 nt, Human
ugacagugccugggaauguau

SEQ ID NO: 2130488 - RNA, 16 nt, Human
ugacagggcacaccgg

SEQ ID NO: 2130489 - RNA, 11 nt, Human
ugacagggcac

SEQ ID NO: 2130490 - RNA, 21 nt, Human
ugacacacagcucuguccugg

SEQ ID NO: 2130491 - RNA, 22 nt, Human
ugacagccucccacccccaucu

SEQ ID NO: 2130492 - RNA, 17 nt, Human
ugacagccucccacccc

SEQ ID NO: 2130493 - RNA, 19 nt, Human
ugacagccucccaccccca

SEQ ID NO: 2130494 - RNA, 20 nt, Human
ugacaggcaaugcuggcugu

SEQ ID NO: 2130495 - RNA, 16 nt, Human
ugacagcugucccugu

SEQ ID NO: 2130496 - RNA, 17 nt, Human
ugacagcugucccuguc

SEQ ID NO: 2130497 - RNA, 18 nt, Human
ugacagcugucccuguca

SEQ ID NO: 2130498 - RNA, 20 nt, Human
ugacagcugucccugucacc

SEQ ID NO: 2130499 - RNA, 21 nt, Human
ugacagcugucccugucacca

SEQ ID NO: 2130500 - RNA, 12 nt, Human
ugacagcugucc

SEQ ID NO: 2130501 - RNA, 14 nt, Human
ugacagcugucccu

SEQ ID NO: 2130502 - RNA, 13 nt, Human
agaugccucccug

SEQ ID NO: 2130503 - RNA, 19 nt, Human
agaugccucccugacccug

SEQ ID NO: 2130504 - RNA, 21 nt, Human
agaugccucccugacccugca

SEQ ID NO: 2130505 - RNA, 22 nt, Human
agaugccucccugacccugcag

SEQ ID NO: 2130506 - RNA, 23 nt, Human
agaugccucccugacccugcaga

SEQ ID NO: 2130507 - RNA, 15 nt, Human
agaugcaccagcccu

SEQ ID NO: 2130508 - RNA, 14 nt, Human
agaugcaccagccc

SEQ ID NO: 2130509 - RNA, 21 nt, Human
agaucccagaaggaccuccug

SEQ ID NO: 2130510 - RNA, 13 nt, Human
ugacccacugcuu

SEQ ID NO: 2130511 - RNA, 12 nt, Human
ugacccacugcu

SEQ ID NO: 2130512 - RNA, 13 nt, Human
ugacccacagccu

SEQ ID NO: 2130513 - RNA, 14 nt, Human
ugacccacagccuc

SEQ ID NO: 2130514 - RNA, 15 nt, Human
ugacccacagccucu

SEQ ID NO: 2130515 - RNA, 19 nt, Human
ugacccacagccucugccu

SEQ ID NO: 2130516 - RNA, 20 nt, Human
ugacccacagccucugccug

SEQ ID NO: 2130517 - RNA, 14 nt, Human
ugaccauuuauaau

SEQ ID NO: 2130518 - RNA, 23 nt, Human
ugaccauuuauaauguuaguaga

SEQ ID NO: 2130519 - RNA, 14 nt, Human
ugacccaauuaagu

SEQ ID NO: 2130520 - RNA, 15 nt, Human
agaugcuucucacug

SEQ ID NO: 2130521 - RNA, 15 nt, Human
agauguucacccaac

SEQ ID NO: 2130522 - RNA, 21 nt, Human
agauguggccuuccauuuaua

SEQ ID NO: 2130523 - RNA, 18 nt, Human
agaucacgccacugcacu

SEQ ID NO: 2130524 - RNA, 17 nt, Human
agaucacgccacugcac

SEQ ID NO: 2130525 - RNA, 21 nt, Human
agaucaccaguguguggcuuu

SEQ ID NO: 2130526 - RNA, 13 nt, Human
agaucacgagguc

SEQ ID NO: 2130527 - RNA, 22 nt, Human
agaucacgccacugcacuccag

SEQ ID NO: 2130528 - RNA, 11 nt, Human
ugaauuucauc

SEQ ID NO: 2130529 - RNA, 13 nt, Human
ugaauuucuaaaa

SEQ ID NO: 2130530 - RNA, 12 nt, Human
ugaauuucucua

SEQ ID NO: 2130531 - RNA, 14 nt, Human
ugaauuucucuaca

SEQ ID NO: 2130532 - RNA, 15 nt, Human
ugaauuucucuacag

SEQ ID NO: 2130533 - RNA, 23 nt, Human
ugaauuuucuuuuuaauaaaaag

SEQ ID NO: 2130534 - RNA, 22 nt, Human
ugaauuuuucucuaacucagaa

SEQ ID NO: 2130535 - RNA, 13 nt, Human
ugaauuuucaagc

SEQ ID NO: 2130536 - RNA, 18 nt, Human
ugaauuuucaagcaucuc

SEQ ID NO: 2130537 - RNA, 20 nt, Human
ugacacacagcucuguccug

SEQ ID NO: 2130538 - RNA, 21 nt, Human
ugaauuuuuuucaucuucucu

SEQ ID NO: 2130539 - RNA, 23 nt, Human
ugaauuuuuuucaucuucucugg

SEQ ID NO: 2130540 - RNA, 16 nt, Human
agaucacgccacugca

SEQ ID NO: 2130541 - RNA, 15 nt, Human
agaucacgccacugc

SEQ ID NO: 2130542 - RNA, 14 nt, Human
agaucacgccacug

SEQ ID NO: 2130543 - RNA, 16 nt, Human
agaucacauaacagaa

SEQ ID NO: 2130544 - RNA, 18 nt, Human
agaucacauaacagaaug

SEQ ID NO: 2130545 - RNA, 19 nt, Human
agaucacauaacagaaugc

SEQ ID NO: 2130546 - RNA, 20 nt, Human
agaucacauaacagaaugca

SEQ ID NO: 2130547 - RNA, 17 nt, Human
agauauggcagcgaaag

SEQ ID NO: 2130548 - RNA, 12 nt, Human
agauauuauuca

SEQ ID NO: 2130549 - RNA, 20 nt, Human
agauauuauucaccauguaa

SEQ ID NO: 2130550 - RNA, 21 nt, Human
agauauuauucaccauguaaa

SEQ ID NO: 2130551 - RNA, 12 nt, Human
agauauucaagu

SEQ ID NO: 2130552 - RNA, 18 nt, Human
agauauugugaaguacau

SEQ ID NO: 2130553 - RNA, 19 nt, Human
agauauugugaaguacaua

SEQ ID NO: 2130554 - RNA, 21 nt, Human
agauauugugaaguacauauu

SEQ ID NO: 2130555 - RNA, 18 nt, Human
agauaaagauuucuugag

SEQ ID NO: 2130556 - RNA, 12 nt, Human
agauaaaugugc

SEQ ID NO: 2130557 - RNA, 13 nt, Human
agauaaaggacag

SEQ ID NO: 2130558 - RNA, 19 nt, Human
agauacuggaaguuuugca

SEQ ID NO: 2130559 - RNA, 20 nt, Human
agauacuggaaguuuugcau

SEQ ID NO: 2130560 - RNA, 21 nt, Human
agauacuggaaguuuugcauu

SEQ ID NO: 2130561 - RNA, 20 nt, Human
agauacgacuuuauuuucug

SEQ ID NO: 2130562 - RNA, 13 nt, Human
agauaaauuauaa

SEQ ID NO: 2130563 - RNA, 21 nt, Human
agauaacaagaucuuucagga

SEQ ID NO: 2130564 - RNA, 18 nt, Human
agauaacaagaucuuuca

SEQ ID NO: 2130565 - RNA, 19 nt, Human
agauacgacuuuauuuucu

SEQ ID NO: 2130566 - RNA, 12 nt, Human
agaguccuauuu

SEQ ID NO: 2130567 - RNA, 13 nt, Human
agaguccucacuc

SEQ ID NO: 2130568 - RNA, 14 nt, Human
agaguccucacucc

SEQ ID NO: 2130569 - RNA, 14 nt, Human
agagucuugcagug

SEQ ID NO: 2130570 - RNA, 18 nt, Human
agagucuugcagugauua

SEQ ID NO: 2130571 - RNA, 22 nt, Human
agagucuuuguaaguaaacugc

SEQ ID NO: 2130572 - RNA, 12 nt, Human
agagucugucuc

SEQ ID NO: 2130573 - RNA, 19 nt, Human
agaguugggacaauugcuu

SEQ ID NO: 2130574 - RNA, 19 nt, Human
agaguugugcacauggcuu

SEQ ID NO: 2130575 - RNA, 14 nt, Human
agaguuguguuguu

SEQ ID NO: 2130576 - RNA, 17 nt, Human
agaguuguguuguucuu

SEQ ID NO: 2130577 - RNA, 18 nt, Human
agaguuguguuguucuuu

SEQ ID NO: 2130578 - RNA, 21 nt, Human
agaguuguguuguucuuuucc

SEQ ID NO: 2130579 - RNA, 20 nt, Human
ugaaugguuuucaaaauaaa

SEQ ID NO: 2130580 - RNA, 20 nt, Human
ugaaugguauggaacucucu

SEQ ID NO: 2130581 - RNA, 17 nt, Human
ugaauggguccauuuug

SEQ ID NO: 2130582 - RNA, 13 nt, Human
ugaaugguaugga

SEQ ID NO: 2130583 - RNA, 14 nt, Human
agaguccaggcccc

SEQ ID NO: 2130584 - RNA, 15 nt, Human
agaguccaggcccca

SEQ ID NO: 2130585 - RNA, 16 nt, Human
agaguccaggccccaa

SEQ ID NO: 2130586 - RNA, 19 nt, Human
agagucaucuccaucagcu

SEQ ID NO: 2130587 - RNA, 21 nt, Human
agagucaucuccaucagcugu

SEQ ID NO: 2130588 - RNA, 13 nt, Human
agagucaucucca

SEQ ID NO: 2130589 - RNA, 14 nt, Human
agagucaucuccau

SEQ ID NO: 2130590 - RNA, 18 nt, Human
agagucaucuccaucagc

SEQ ID NO: 2130591 - RNA, 18 nt, Human
agagucagccuucccccu

SEQ ID NO: 2130592 - RNA, 14 nt, Human
ugaaugugucacua

SEQ ID NO: 2130593 - RNA, 16 nt, Human
agagucagcagaacug

SEQ ID NO: 2130594 - RNA, 12 nt, Human
ugaacuccuggc

SEQ ID NO: 2130595 - RNA, 15 nt, Human
ugaacuccuggccuc

SEQ ID NO: 2130596 - RNA, 14 nt, Human
ugaacuccuggccu

SEQ ID NO: 2130597 - RNA, 22 nt, Human
ugaacaaccucggcuccuggac

SEQ ID NO: 2130598 - RNA, 19 nt, Human
ugaacuagcuggaauuuuu

SEQ ID NO: 2130599 - RNA, 22 nt, Human
ugaaccgaugagaaauaaaguu

SEQ ID NO: 2130600 - RNA, 12 nt, Human
ugaaccugcccu

SEQ ID NO: 2130601 - RNA, 15 nt, Human
ugaaauuuuuauuaa

SEQ ID NO: 2130602 - RNA, 20 nt, Human
agagcuguucccaaauuuuc

SEQ ID NO: 2130603 - RNA, 19 nt, Human
agagcuguuuauggccuca

SEQ ID NO: 2130604 - RNA, 20 nt, Human
agagcuguuuauggccucag

SEQ ID NO: 2130605 - RNA, 21 nt, Human
agagcuguuuauggccucagc

SEQ ID NO: 2130606 - RNA, 18 nt, Human
agagcugccuaagaggca

SEQ ID NO: 2130607 - RNA, 21 nt, Human
agagcugccuaagaggcaaug

SEQ ID NO: 2130608 - RNA, 14 nt, Human
agagcugccucucg

SEQ ID NO: 2130609 - RNA, 17 nt, Human
agagcuggaccaguggu

SEQ ID NO: 2130610 - RNA, 15 nt, Human
ugaagaaaaaauaca

SEQ ID NO: 2130611 - RNA, 17 nt, Human
ugaagaaaaaauacauu

SEQ ID NO: 2130612 - RNA, 18 nt, Human
ugaagaaaaaauacauuu

SEQ ID NO: 2130613 - RNA, 19 nt, Human
ugaagaaaaaauacauuuu

SEQ ID NO: 2130614 - RNA, 15 nt, Human
ugaagaaaagugggc

SEQ ID NO: 2130615 - RNA, 18 nt, Human
ugaagaaaagugggccag

SEQ ID NO: 2130616 - RNA, 24 nt, Human
agaggcagccccauucugccugcc

SEQ ID NO: 2130617 - RNA, 14 nt, Human
agaggcagagugcc

SEQ ID NO: 2130618 - RNA, 19 nt, Human
agaggcagagugccccacc

SEQ ID NO: 2130619 - RNA, 21 nt, Human
agaggcagagugccccaccug

SEQ ID NO: 2130620 - RNA, 22 nt, Human
agaggcagagugccccaccugc

SEQ ID NO: 2130621 - RNA, 19 nt, Human
agaggcagccccauucugc

SEQ ID NO: 2130622 - RNA, 13 nt, Human
agaggcagcccca

SEQ ID NO: 2130623 - RNA, 17 nt, Human
agaggaaaaaaaugacu

SEQ ID NO: 2130624 - RNA, 16 nt, Human
agaggaaaaaaaugac

SEQ ID NO: 2130625 - RNA, 22 nt, Human
agagcuuucuucccgaacccca

SEQ ID NO: 2130626 - RNA, 15 nt, Human
agagcuuuacaaaaa

SEQ ID NO: 2130627 - RNA, 16 nt, Human
agagcuuuacaaaaag

SEQ ID NO: 2130628 - RNA, 17 nt, Human
agagcuuuacaaaaaga

SEQ ID NO: 2130629 - RNA, 22 nt, Human
agagcuuucuguccuuuuggca

SEQ ID NO: 2130630 - RNA, 23 nt, Human
agagcuuucuguccuuuuggcac

SEQ ID NO: 2130631 - RNA, 13 nt, Human
agaggcagggucu

SEQ ID NO: 2130632 - RNA, 10 nt, Human
agaggcaggg

SEQ ID NO: 2130633 - RNA, 14 nt, Human
agaggccauggcag

SEQ ID NO: 2130634 - RNA, 13 nt, Human
agaggcagggagg

SEQ ID NO: 2130635 - RNA, 17 nt, Human
agaggcagggaggggac

SEQ ID NO: 2130636 - RNA, 15 nt, Human
agaggccauggcaga

SEQ ID NO: 2130637 - RNA, 16 nt, Human
agaggccauggcagaa

SEQ ID NO: 2130638 - RNA, 20 nt, Human
agaggccauggcagaauaau

SEQ ID NO: 2130639 - RNA, 23 nt, Human
agaggccauggcagaauaaucuu

SEQ ID NO: 2130640 - RNA, 19 nt, Human
agaggccaugggccuccug

SEQ ID NO: 2130641 - RNA, 13 nt, Human
agaggcugaaaga

SEQ ID NO: 2130642 - RNA, 19 nt, Human
agaggcugaaagaggccaa

SEQ ID NO: 2130643 - RNA, 13 nt, Human
agaggcugaggac

SEQ ID NO: 2130644 - RNA, 16 nt, Human
agaggucaagcccagg

SEQ ID NO: 2130645 - RNA, 18 nt, Human
agaggucaagcccaggag

SEQ ID NO: 2130646 - RNA, 20 nt, Human
agaggucaagcccaggagga

SEQ ID NO: 2130647 - RNA, 13 nt, Human
agaggcugaggca

SEQ ID NO: 2130648 - RNA, 16 nt, Human
agagguagggcugcca

SEQ ID NO: 2130649 - RNA, 12 nt, Human
agaggucuuuuu

SEQ ID NO: 2130650 - RNA, 14 nt, Human
agagguugucugug

SEQ ID NO: 2130651 - RNA, 16 nt, Human
agaggucuuuuuuaaa

SEQ ID NO: 2130652 - RNA, 17 nt, Human
agagguucauuucaaau

SEQ ID NO: 2130653 - RNA, 18 nt, Human
ugaagcaaaucagaaacu

SEQ ID NO: 2130654 - RNA, 14 nt, Human
ugaagcaaaucaga

SEQ ID NO: 2130655 - RNA, 15 nt, Human
ugaagcaaaucagaa

SEQ ID NO: 2130656 - RNA, 17 nt, Human
agagguuuuaugauauu

SEQ ID NO: 2130657 - RNA, 17 nt, Human
ugaaaguuugcacugua

SEQ ID NO: 2130658 - RNA, 18 nt, Human
ugaaaguuuucagaaccu

SEQ ID NO: 2130659 - RNA, 20 nt, Human
ugaaaguuuucagaaccucu

SEQ ID NO: 2130660 - RNA, 18 nt, Human
ugaaagucuugugacuag

SEQ ID NO: 2130661 - RNA, 20 nt, Human
ugaaagucuugugacuagug

SEQ ID NO: 2130662 - RNA, 21 nt, Human
ugaaagucuugugacuagugc

SEQ ID NO: 2130663 - RNA, 22 nt, Human
ugaaagucuugugacuagugcu

SEQ ID NO: 2130664 - RNA, 23 nt, Human
ugaaagucuugugacuagugcug

SEQ ID NO: 2130665 - RNA, 11 nt, Human
ugaaagugacu

SEQ ID NO: 2130666 - RNA, 12 nt, Human
agagcgaggcug

SEQ ID NO: 2130667 - RNA, 14 nt, Human
agagcgaggcugag

SEQ ID NO: 2130668 - RNA, 23 nt, Human
agagcgaggcugagccuacagau

SEQ ID NO: 2130669 - RNA, 17 nt, Human
agagcgagagucugucu

SEQ ID NO: 2130670 - RNA, 22 nt, Human
agagccuugguguccaccuggc

SEQ ID NO: 2130671 - RNA, 23 nt, Human
agagccuugguguccaccuggcc

SEQ ID NO: 2130672 - RNA, 14 nt, Human
agagcgccugcccc

SEQ ID NO: 2130673 - RNA, 15 nt, Human
agagcgccugccccu

SEQ ID NO: 2130674 - RNA, 20 nt, Human
agagcgccugccccucccag

SEQ ID NO: 2130675 - RNA, 21 nt, Human
agagcgccugccccucccaga

SEQ ID NO: 2130676 - RNA, 23 nt, Human
agagcgccugccccucccagaac

SEQ ID NO: 2130677 - RNA, 17 nt, Human
ugaaagucuugugacua

SEQ ID NO: 2130678 - RNA, 12 nt, Human
ugaaauaugcau

SEQ ID NO: 2130679 - RNA, 23 nt, Human
agagccuugguucaucaguguua

SEQ ID NO: 2130680 - RNA, 21 nt, Human
ugaaauagugguucuuggaaa

SEQ ID NO: 2130681 - RNA, 22 nt, Human
ugaaauagugguucuuggaaaa

SEQ ID NO: 2130682 - RNA, 19 nt, Human
ugaaauaguucaaagccaa

SEQ ID NO: 2130683 - RNA, 15 nt, Human
ugaaauauacacaca

SEQ ID NO: 2130684 - RNA, 17 nt, Human
ugaaauauacacacagc

SEQ ID NO: 2130685 - RNA, 16 nt, Human
ugaaauauacacacag

SEQ ID NO: 2130686 - RNA, 14 nt, Human
ugaaauaauaaauc

SEQ ID NO: 2130687 - RNA, 22 nt, Human
ugaaauugucuagcagagcagg

SEQ ID NO: 2130688 - RNA, 18 nt, Human
ugaaauuguuuaaguguu

SEQ ID NO: 2130689 - RNA, 23 nt, Human
ugaaauuguuuaaguguuguaaa

SEQ ID NO: 2130690 - RNA, 13 nt, Human
ugaaauuuuacca

SEQ ID NO: 2130691 - RNA, 14 nt, Human
ugaaauuuuaccaa

SEQ ID NO: 2130692 - RNA, 15 nt, Human
ugaaauuuuaccaag

SEQ ID NO: 2130693 - RNA, 16 nt, Human
ugaaauuuuaccaagu

SEQ ID NO: 2130694 - RNA, 17 nt, Human
ugaaauuuuaccaaguu

SEQ ID NO: 2130695 - RNA, 19 nt, Human
ugaaauuuuaccaaguuau

SEQ ID NO: 2130696 - RNA, 13 nt, Human
agagacaggaaaa

SEQ ID NO: 2130697 - RNA, 22 nt, Human
ucuuuggacucuccccucuuau

SEQ ID NO: 2130698 - RNA, 21 nt, Human
agagacaggaaaauccucugg

SEQ ID NO: 2130699 - RNA, 17 nt, Human
agagcacuguauacccc

SEQ ID NO: 2130700 - RNA, 14 nt, Human
agagcaagucugga

SEQ ID NO: 2130701 - RNA, 14 nt, Human
agagcacacuguag

SEQ ID NO: 2130702 - RNA, 15 nt, Human
agagcaagcuuuuuu

SEQ ID NO: 2130703 - RNA, 17 nt, Human
agagcaagcuuuuuuau

SEQ ID NO: 2130704 - RNA, 18 nt, Human
agagcaagcuuuuuuauu

SEQ ID NO: 2130705 - RNA, 23 nt, Human
agagcaagauccugucuuuaagg

SEQ ID NO: 2130706 - RNA, 11 nt, Human
agagccuugcg

SEQ ID NO: 2130707 - RNA, 21 nt, Human
agagccuugcggaagguucua

SEQ ID NO: 2130708 - RNA, 17 nt, Human
agagccuugguguccac

SEQ ID NO: 2130709 - RNA, 19 nt, Human
agagccuugguguccaccu

SEQ ID NO: 2130710 - RNA, 20 nt, Human
agagccuugguguccaccug

SEQ ID NO: 2130711 - RNA, 21 nt, Human
agagccuugguguccaccugg

SEQ ID NO: 2130712 - RNA, 23 nt, Human
agagccaauggaguagaccccug

SEQ ID NO: 2130713 - RNA, 12 nt, Human
agagcaggcaca

SEQ ID NO: 2130714 - RNA, 13 nt, Human
agagcaggcacau

SEQ ID NO: 2130715 - RNA, 18 nt, Human
agagcaggcacauggagg

SEQ ID NO: 2130716 - RNA, 19 nt, Human
agagcaggcacauggagga

SEQ ID NO: 2130717 - RNA, 20 nt, Human
agagcaggcacauggaggag

SEQ ID NO: 2130718 - RNA, 18 nt, Human
agagcaggugcuggcucu

SEQ ID NO: 2130719 - RNA, 13 nt, Human
agagcagggcaag

SEQ ID NO: 2130720 - RNA, 14 nt, Human
agagcagaggcagc

SEQ ID NO: 2130721 - RNA, 16 nt, Human
agcauuugucaacaaa

SEQ ID NO: 2130722 - RNA, 20 nt, Human
agcauuuaguccaaugucuu

SEQ ID NO: 2130723 - RNA, 13 nt, Human
agcauuuauguuu

SEQ ID NO: 2130724 - RNA, 15 nt, Human
agcauuuacuuugaa

SEQ ID NO: 2130725 - RNA, 17 nt, Human
agcauuuacuuugaauu

SEQ ID NO: 2130726 - RNA, 21 nt, Human
agcauuuaguccaaugucuuu

SEQ ID NO: 2130727 - RNA, 23 nt, Human
agcauuuuagcaauuuauacaau

SEQ ID NO: 2130728 - RNA, 18 nt, Human
agccaaacccaugaggca

SEQ ID NO: 2130729 - RNA, 19 nt, Human
agccaaacccaugaggcaa

SEQ ID NO: 2130730 - RNA, 14 nt, Human
agccaaacccuguc

SEQ ID NO: 2130731 - RNA, 15 nt, Human
agccaaacccugucu

SEQ ID NO: 2130732 - RNA, 15 nt, Human
agcauuuugcuaaau

SEQ ID NO: 2130733 - RNA, 22 nt, Human
agcauuuugcuaaaugugaaug

SEQ ID NO: 2130734 - RNA, 17 nt, Human
agcauucuuagccugug

SEQ ID NO: 2130735 - RNA, 18 nt, Human
agcauucuuagccugugg

SEQ ID NO: 2130736 - RNA, 19 nt, Human
agcauucuuagccuguggc

SEQ ID NO: 2130737 - RNA, 20 nt, Human
agcauucuuagccuguggca

SEQ ID NO: 2130738 - RNA, 23 nt, Human
agcauucuuagccuguggcagua

SEQ ID NO: 2130739 - RNA, 16 nt, Human
agcauucuugucacaa

SEQ ID NO: 2130740 - RNA, 19 nt, Human
agcauucuugucacaauaa

SEQ ID NO: 2130741 - RNA, 20 nt, Human
agcauucuugucacaauaaa

SEQ ID NO: 2130742 - RNA, 21 nt, Human
agcauucuugucacaauaaau

SEQ ID NO: 2130743 - RNA, 22 nt, Human
agcauucuugucacaauaaaug

SEQ ID NO: 2130744 - RNA, 22 nt, Human
agcauucucacuccuaccuggu

SEQ ID NO: 2130745 - RNA, 21 nt, Human
agcauuguuugcuuauuguuc

SEQ ID NO: 2130746 - RNA, 22 nt, Human
agcauuguuugcuuauuguucc

SEQ ID NO: 2130747 - RNA, 23 nt, Human
agcauuguuugcuuauuguucca

SEQ ID NO: 2130748 - RNA, 20 nt, Human
agcauucucacuccuaccug

SEQ ID NO: 2130749 - RNA, 18 nt, Human
agcauucucacuccuacc

SEQ ID NO: 2130750 - RNA, 13 nt, Human
agcauguaauggu

SEQ ID NO: 2130751 - RNA, 15 nt, Human
agcauggugcaugcc

SEQ ID NO: 2130752 - RNA, 16 nt, Human
agcauggugcaugccg

SEQ ID NO: 2130753 - RNA, 17 nt, Human
agcauggugcaugccgc

SEQ ID NO: 2130754 - RNA, 15 nt, Human
agcauuacucuugua

SEQ ID NO: 2130755 - RNA, 16 nt, Human
agcauuacucuuguaa

SEQ ID NO: 2130756 - RNA, 17 nt, Human
agcauuacucuuguaag

SEQ ID NO: 2130757 - RNA, 18 nt, Human
agcauuacucuuguaaga

SEQ ID NO: 2130758 - RNA, 19 nt, Human
agcauuacucuuguaagau

SEQ ID NO: 2130759 - RNA, 20 nt, Human
agcauuacucuuguaagauu

SEQ ID NO: 2130760 - RNA, 21 nt, Human
agcauuacucuuguaagauuu

SEQ ID NO: 2130761 - RNA, 19 nt, Human
agcauuaugauguggguca

SEQ ID NO: 2130762 - RNA, 22 nt, Human
agcauucaauuuauucaagaaa

SEQ ID NO: 2130763 - RNA, 23 nt, Human
agcauucaauuuauucaagaaaa

SEQ ID NO: 2130764 - RNA, 14 nt, Human
ugaucacggcucac

SEQ ID NO: 2130765 - RNA, 13 nt, Human
ugaucacggcuca

SEQ ID NO: 2130766 - RNA, 15 nt, Human
ugaucacggcucacu

SEQ ID NO: 2130767 - RNA, 18 nt, Human
ugaucacggcucacugca

SEQ ID NO: 2130768 - RNA, 18 nt, Human
ugauacccauagcuucca

SEQ ID NO: 2130769 - RNA, 21 nt, Human
ugauacccauagcuuccauga

SEQ ID NO: 2130770 - RNA, 14 nt, Human
ugaucaauuaaaug

SEQ ID NO: 2130771 - RNA, 15 nt, Human
ugaucaauuaaaugu

SEQ ID NO: 2130772 - RNA, 16 nt, Human
ugaucaauuaaaugua

SEQ ID NO: 2130773 - RNA, 17 nt, Human
ugaucaauuaaauguag

SEQ ID NO: 2130774 - RNA, 21 nt, Human
ugaucaauaaaaugugauuuu

SEQ ID NO: 2130775 - RNA, 15 nt, Human
agcauccucaguucc

SEQ ID NO: 2130776 - RNA, 16 nt, Human
agcauccucaguuccu

SEQ ID NO: 2130777 - RNA, 24 nt, Human
agcauccauguguggacucaaguc

SEQ ID NO: 2130778 - RNA, 21 nt, Human
agcaucauuauuugcagagac

SEQ ID NO: 2130779 - RNA, 20 nt, Human
agcaucaccucaggccaggu

SEQ ID NO: 2130780 - RNA, 17 nt, Human
agcaucacuugggauua

SEQ ID NO: 2130781 - RNA, 18 nt, Human
agcaucaccuagaaacuu

SEQ ID NO: 2130782 - RNA, 13 nt, Human
agcaucaccucag

SEQ ID NO: 2130783 - RNA, 14 nt, Human
agcaucaccucagg

SEQ ID NO: 2130784 - RNA, 15 nt, Human
agcaucaccucaggc

SEQ ID NO: 2130785 - RNA, 16 nt, Human
agcaucaccucaggcc

SEQ ID NO: 2130786 - RNA, 19 nt, Human
agcaucaccucaggccagg

SEQ ID NO: 2130787 - RNA, 21 nt, Human
ugaugaucuuugcagacaggc

SEQ ID NO: 2130788 - RNA, 22 nt, Human
ugauggcaccacugcacuccag

SEQ ID NO: 2130789 - RNA, 22 nt, Human
ugaugggcaacccccagccugc

SEQ ID NO: 2130790 - RNA, 21 nt, Human
ugaugggcaacccccagccug

SEQ ID NO: 2130791 - RNA, 20 nt, Human
ugaugaucuuugcagacagg

SEQ ID NO: 2130792 - RNA, 19 nt, Human
ugaugaucuuugcagacag

SEQ ID NO: 2130793 - RNA, 18 nt, Human
ugaugaaauguaaauacu

SEQ ID NO: 2130794 - RNA, 11 nt, Human
ugaugaaagcu

SEQ ID NO: 2130795 - RNA, 13 nt, Human
ugaugaaagcuga

SEQ ID NO: 2130796 - RNA, 15 nt, Human
ugaugaaagcugauu

SEQ ID NO: 2130797 - RNA, 19 nt, Human
ugaugaaagcugauuacug

SEQ ID NO: 2130798 - RNA, 23 nt, Human
ugaugaaaugaggucagagccug

SEQ ID NO: 2130799 - RNA, 22 nt, Human
ugaugaaaugaggucagagccu

SEQ ID NO: 2130800 - RNA, 16 nt, Human
agccacggccaggcca

SEQ ID NO: 2130801 - RNA, 20 nt, Human
ugauuaaccacuucagcuga

SEQ ID NO: 2130802 - RNA, 14 nt, Human
ugauggggaaggag

SEQ ID NO: 2130803 - RNA, 15 nt, Human
ugauggucagacaca

SEQ ID NO: 2130804 - RNA, 14 nt, Human
ugauggucagaggg

SEQ ID NO: 2130805 - RNA, 15 nt, Human
ugauggucagagggc

SEQ ID NO: 2130806 - RNA, 17 nt, Human
ugauggggaaggaggcu

SEQ ID NO: 2130807 - RNA, 19 nt, Human
ugaucccaagugccagucu

SEQ ID NO: 2130808 - RNA, 18 nt, Human
agccaccccagaaauggu

SEQ ID NO: 2130809 - RNA, 14 nt, Human
agccaccccgggcu

SEQ ID NO: 2130810 - RNA, 20 nt, Human
agccaccccagaaaugguga

SEQ ID NO: 2130811 - RNA, 19 nt, Human
agccaccccgggcucucug

SEQ ID NO: 2130812 - RNA, 20 nt, Human
agccaccccgggcucucugc

SEQ ID NO: 2130813 - RNA, 21 nt, Human
agccaccccgggcucucugcu

SEQ ID NO: 2130814 - RNA, 23 nt, Human
agccaccccgggcucucugcugu

SEQ ID NO: 2130815 - RNA, 20 nt, Human
ugauccucccaccucagccu

SEQ ID NO: 2130816 - RNA, 19 nt, Human
ugauccucccaccucagcc

SEQ ID NO: 2130817 - RNA, 17 nt, Human
ugaucguucuuucuagc

SEQ ID NO: 2130818 - RNA, 22 nt, Human
ugaucgugcuaaauuuucagua

SEQ ID NO: 2130819 - RNA, 22 nt, Human
ugauccguuccauugcaagcuu

SEQ ID NO: 2130820 - RNA, 18 nt, Human
ugauccucccaccucagc

SEQ ID NO: 2130821 - RNA, 12 nt, Human
ugaucccagcac

SEQ ID NO: 2130822 - RNA, 13 nt, Human
ugaucccagcacu

SEQ ID NO: 2130823 - RNA, 17 nt, Human
agccaccacguccagcu

SEQ ID NO: 2130824 - RNA, 23 nt, Human
agccaccaugcccagcucagagg

SEQ ID NO: 2130825 - RNA, 21 nt, Human
agccacacugugggacucuuc

SEQ ID NO: 2130826 - RNA, 13 nt, Human
agccacagcuggu

SEQ ID NO: 2130827 - RNA, 12 nt, Human
agccacagccca

SEQ ID NO: 2130828 - RNA, 13 nt, Human
agccacagcccag

SEQ ID NO: 2130829 - RNA, 16 nt, Human
agccacagcccaggcc

SEQ ID NO: 2130830 - RNA, 17 nt, Human
agccacagcccaggccu

SEQ ID NO: 2130831 - RNA, 18 nt, Human
agccacagcccaggccuc

SEQ ID NO: 2130832 - RNA, 19 nt, Human
agccacagcccaggccucc

SEQ ID NO: 2130833 - RNA, 21 nt, Human
agccacagcccaggccuccag

SEQ ID NO: 2130834 - RNA, 16 nt, Human
agccaaacccugucug

SEQ ID NO: 2130835 - RNA, 18 nt, Human
ugaguggaugauguuucg

SEQ ID NO: 2130836 - RNA, 19 nt, Human
ugaguggggagacaccuca

SEQ ID NO: 2130837 - RNA, 20 nt, Human
ugaguggggagacaccucag

SEQ ID NO: 2130838 - RNA, 21 nt, Human
ugaguggggagacaccucaga

SEQ ID NO: 2130839 - RNA, 22 nt, Human
ugaguggggagacaccucagag

SEQ ID NO: 2130840 - RNA, 23 nt, Human
ugaguggggagacaccucagagc

SEQ ID NO: 2130841 - RNA, 18 nt, Human
ugagucaccaagcccagu

SEQ ID NO: 2130842 - RNA, 13 nt, Human
ugagucaccagga

SEQ ID NO: 2130843 - RNA, 16 nt, Human
ugagucacccaugaag

SEQ ID NO: 2130844 - RNA, 21 nt, Human
ugagucaugaucucccugccg

SEQ ID NO: 2130845 - RNA, 20 nt, Human
ugagucaugaucucccugcc

SEQ ID NO: 2130846 - RNA, 22 nt, Human
ugagucaugaucucccugccgc

SEQ ID NO: 2130847 - RNA, 17 nt, Human
ugagugaucccauuucu

SEQ ID NO: 2130848 - RNA, 15 nt, Human
ugagugauccuccaa

SEQ ID NO: 2130849 - RNA, 20 nt, Human
ugagugauccuccaacuuca

SEQ ID NO: 2130850 - RNA, 18 nt, Human
ugaguucauacccuguua

SEQ ID NO: 2130851 - RNA, 22 nt, Human
ugaguguuuuuacuacaguugu

SEQ ID NO: 2130852 - RNA, 15 nt, Human
ugaguuacuuccuau

SEQ ID NO: 2130853 - RNA, 14 nt, Human
ugaguguggcuccc

SEQ ID NO: 2130854 - RNA, 16 nt, Human
ugaguguggcuccccu

SEQ ID NO: 2130855 - RNA, 17 nt, Human
ugaguguggcuccccuc

SEQ ID NO: 2130856 - RNA, 18 nt, Human
ugaguguggcuccccucu

SEQ ID NO: 2130857 - RNA, 17 nt, Human
ugaguguguccaagugu

SEQ ID NO: 2130858 - RNA, 21 nt, Human
ugagugggggaucacagccuc

SEQ ID NO: 2130859 - RNA, 19 nt, Human
agcaguccugccucagccu

SEQ ID NO: 2130860 - RNA, 22 nt, Human
agcaguccugccucagccuccg

SEQ ID NO: 2130861 - RNA, 15 nt, Human
agcaguuugaaauug

SEQ ID NO: 2130862 - RNA, 14 nt, Human
agcaguuugcuuug

SEQ ID NO: 2130863 - RNA, 20 nt, Human
agcaguuugguuucuagcau

SEQ ID NO: 2130864 - RNA, 19 nt, Human
agcauaaaaauuagccaag

SEQ ID NO: 2130865 - RNA, 23 nt, Human
agcaguuugguuucuagcaugaa

SEQ ID NO: 2130866 - RNA, 22 nt, Human
agcaguuugguuucuagcauga

SEQ ID NO: 2130867 - RNA, 21 nt, Human
agcaguagaaauaauaugcau

SEQ ID NO: 2130868 - RNA, 22 nt, Human
agcaguagaaauaauaugcauu

SEQ ID NO: 2130869 - RNA, 20 nt, Human
agcagguugaggggcuccug

SEQ ID NO: 2130870 - RNA, 21 nt, Human
agcagguugaggggcuccugg

SEQ ID NO: 2130871 - RNA, 22 nt, Human
agcagguugaggggcuccugga

SEQ ID NO: 2130872 - RNA, 17 nt, Human
agcaguaacugacaacu

SEQ ID NO: 2130873 - RNA, 15 nt, Human
agcaguaaaaacugu

SEQ ID NO: 2130874 - RNA, 17 nt, Human
agcagguuuuucuccuc

SEQ ID NO: 2130875 - RNA, 14 nt, Human
ugaguaagagcugg

SEQ ID NO: 2130876 - RNA, 16 nt, Human
ugaguaagagcuggug

SEQ ID NO: 2130877 - RNA, 17 nt, Human
ugaguaagagcuggugu

SEQ ID NO: 2130878 - RNA, 18 nt, Human
ugaguaagagcugguguc

SEQ ID NO: 2130879 - RNA, 21 nt, Human
ugaguaagagcuggugucuga

SEQ ID NO: 2130880 - RNA, 23 nt, Human
ugaguaagagcuggugucugauu

SEQ ID NO: 2130881 - RNA, 23 nt, Human
agcagucacuuuuccugugcugu

SEQ ID NO: 2130882 - RNA, 23 nt, Human
agcauaaaaauuagccaagugug

SEQ ID NO: 2130883 - RNA, 13 nt, Human
agcauacauuuau

SEQ ID NO: 2130884 - RNA, 14 nt, Human
agcauacauuuaua

SEQ ID NO: 2130885 - RNA, 20 nt, Human
agcauacauuuauaauguuu

SEQ ID NO: 2130886 - RNA, 13 nt, Human
agcaggcccaccu

SEQ ID NO: 2130887 - RNA, 14 nt, Human
agcaggcccaccua

SEQ ID NO: 2130888 - RNA, 17 nt, Human
agcaggcccaccuaccu

SEQ ID NO: 2130889 - RNA, 23 nt, Human
agcaggcccaccuaccuucaaag

SEQ ID NO: 2130890 - RNA, 15 nt, Human
agcaggccuguugcu

SEQ ID NO: 2130891 - RNA, 16 nt, Human
agcaggccuguugcuu

SEQ ID NO: 2130892 - RNA, 18 nt, Human
agcaggccuguugcuuuu

SEQ ID NO: 2130893 - RNA, 21 nt, Human
agcaggccuuuugauauuaaa

SEQ ID NO: 2130894 - RNA, 16 nt, Human
agcaggcacauggagg

SEQ ID NO: 2130895 - RNA, 21 nt, Human
agcaggauaguugcuccgccu

SEQ ID NO: 2130896 - RNA, 14 nt, Human
agcaggcacaugga

SEQ ID NO: 2130897 - RNA, 19 nt, Human
agcaggcacauggaggagc

SEQ ID NO: 2130898 - RNA, 22 nt, Human
agcaggauaguugcuccgccuc

SEQ ID NO: 2130899 - RNA, 23 nt, Human
agcaggacugaauuguccccagu

SEQ ID NO: 2130900 - RNA, 15 nt, Human
agcaggaagcucaga

SEQ ID NO: 2130901 - RNA, 16 nt, Human
agcagcagggagggcu

SEQ ID NO: 2130902 - RNA, 18 nt, Human
agcagcacuuauaaauca

SEQ ID NO: 2130903 - RNA, 18 nt, Human
agcagcaucugcuaauaa

SEQ ID NO: 2130904 - RNA, 20 nt, Human
agcaggaagcugugagagca

SEQ ID NO: 2130905 - RNA, 12 nt, Human
agcaggaagcuc

SEQ ID NO: 2130906 - RNA, 14 nt, Human
agcaggaagcucag

SEQ ID NO: 2130907 - RNA, 20 nt, Human
agcagccaagcuccuuggga

SEQ ID NO: 2130908 - RNA, 21 nt, Human
agcagccaagcuccuugggag

SEQ ID NO: 2130909 - RNA, 22 nt, Human
agcagccaagcuccuugggagg

SEQ ID NO: 2130910 - RNA, 23 nt, Human
ugacccagccccuugagaaaccu

SEQ ID NO: 2130911 - RNA, 14 nt, Human
agcagcacuuauaa

SEQ ID NO: 2130912 - RNA, 15 nt, Human
agcagcacuuauaaa

SEQ ID NO: 2130913 - RNA, 21 nt, Human
ugacccagccccuugagaaac

SEQ ID NO: 2130914 - RNA, 19 nt, Human
ugacccagccccuugagaa

SEQ ID NO: 2130915 - RNA, 18 nt, Human
ugacccagccccuugaga

SEQ ID NO: 2130916 - RNA, 15 nt, Human
agcagggcucagcgg

SEQ ID NO: 2130917 - RNA, 14 nt, Human
agcagggcucagcg

SEQ ID NO: 2130918 - RNA, 13 nt, Human
agcagggcucagc

SEQ ID NO: 2130919 - RNA, 20 nt, Human
agcagggagggcuucugcca

SEQ ID NO: 2130920 - RNA, 22 nt, Human
agcagggcucagcggggacagc

SEQ ID NO: 2130921 - RNA, 18 nt, Human
agcaggguagucugguuu

SEQ ID NO: 2130922 - RNA, 21 nt, Human
agcaggguagucugguuucua

SEQ ID NO: 2130923 - RNA, 14 nt, Human
agcagguaccacug

SEQ ID NO: 2130924 - RNA, 13 nt, Human
agcagguggggag

SEQ ID NO: 2130925 - RNA, 14 nt, Human
agcagguggggagg

SEQ ID NO: 2130926 - RNA, 15 nt, Human
agcagggaaacagcu

SEQ ID NO: 2130927 - RNA, 14 nt, Human
agcagggaaacagc

SEQ ID NO: 2130928 - RNA, 13 nt, Human
agcagggaaacag

SEQ ID NO: 2130929 - RNA, 17 nt, Human
agcccugggccccacca

SEQ ID NO: 2130930 - RNA, 19 nt, Human
agcccugggccccaccacc

SEQ ID NO: 2130931 - RNA, 23 nt, Human
agcccugggccccaccaccuagg

SEQ ID NO: 2130932 - RNA, 16 nt, Human
agcccugggccccacc

SEQ ID NO: 2130933 - RNA, 21 nt, Human
agcccugggccccaccaccua

SEQ ID NO: 2130934 - RNA, 13 nt, Human
ugcacaugugugc

SEQ ID NO: 2130935 - RNA, 10 nt, Human
ugcaccagga

SEQ ID NO: 2130936 - RNA, 12 nt, Human
ugcaccaggaga

SEQ ID NO: 2130937 - RNA, 13 nt, Human
ugcaccaggagac

SEQ ID NO: 2130938 - RNA, 14 nt, Human
ugcaccaggagaca

SEQ ID NO: 2130939 - RNA, 15 nt, Human
ugcaccaggagacag

SEQ ID NO: 2130940 - RNA, 14 nt, Human
ugcaccccaagucc

SEQ ID NO: 2130941 - RNA, 14 nt, Human
ugcaccccccuggg

SEQ ID NO: 2130942 - RNA, 15 nt, Human
ugcaccccccugggc

SEQ ID NO: 2130943 - RNA, 16 nt, Human
ugcaccccccugggcu

SEQ ID NO: 2130944 - RNA, 13 nt, Human
ugcaccagcccuu

SEQ ID NO: 2130945 - RNA, 21 nt, Human
ugcaccacugcacuccagccu

SEQ ID NO: 2130946 - RNA, 15 nt, Human
ugcaccacugcacuc

SEQ ID NO: 2130947 - RNA, 19 nt, Human
ugcacaugugugcgugugc

SEQ ID NO: 2130948 - RNA, 20 nt, Human
ugcacuccagccugggcaac

SEQ ID NO: 2130949 - RNA, 18 nt, Human
ugcacuccagccugggcg

SEQ ID NO: 2130950 - RNA, 16 nt, Human
ugcacuccagccuggg

SEQ ID NO: 2130951 - RNA, 14 nt, Human
ugcacuccaaucug

SEQ ID NO: 2130952 - RNA, 12 nt, Human
ugcacuccagcc

SEQ ID NO: 2130953 - RNA, 13 nt, Human
ugcacuccagccu

SEQ ID NO: 2130954 - RNA, 17 nt, Human
ugcacuccagccugggc

SEQ ID NO: 2130955 - RNA, 20 nt, Human
ugcaccgccggccagcuggg

SEQ ID NO: 2130956 - RNA, 18 nt, Human
ugcacuccagccugggca

SEQ ID NO: 2130957 - RNA, 15 nt, Human
ugcacuccagccugg

SEQ ID NO: 2130958 - RNA, 14 nt, Human
ugcacuccagccug

SEQ ID NO: 2130959 - RNA, 12 nt, Human
agccccuccucu

SEQ ID NO: 2130960 - RNA, 13 nt, Human
agccccuccucug

SEQ ID NO: 2130961 - RNA, 14 nt, Human
agccccuccucugc

SEQ ID NO: 2130962 - RNA, 15 nt, Human
agccccuccucugcc

SEQ ID NO: 2130963 - RNA, 16 nt, Human
agccccuccucugcca

SEQ ID NO: 2130964 - RNA, 17 nt, Human
agccccuccucugccac

SEQ ID NO: 2130965 - RNA, 18 nt, Human
agccccuccucugccacc

SEQ ID NO: 2130966 - RNA, 23 nt, Human
agccccucccaccacagcaggug

SEQ ID NO: 2130967 - RNA, 11 nt, Human
agccccuccuc

SEQ ID NO: 2130968 - RNA, 23 nt, Human
agccccuccucugccaccucccc

SEQ ID NO: 2130969 - RNA, 19 nt, Human
agccccuccucugccaccu

SEQ ID NO: 2130970 - RNA, 20 nt, Human
agccccuccucugccaccuc

SEQ ID NO: 2130971 - RNA, 21 nt, Human
agccccuccucugccaccucc

SEQ ID NO: 2130972 - RNA, 22 nt, Human
agccccuccucugccaccuccc

SEQ ID NO: 2130973 - RNA, 14 nt, Human
agccccgaggccuu

SEQ ID NO: 2130974 - RNA, 15 nt, Human
agccccgcgccuccu

SEQ ID NO: 2130975 - RNA, 18 nt, Human
agccccgcgccuccuucc

SEQ ID NO: 2130976 - RNA, 18 nt, Human
agcccaggccuccagcuc

SEQ ID NO: 2130977 - RNA, 19 nt, Human
agcccaggccuccagcuca

SEQ ID NO: 2130978 - RNA, 22 nt, Human
agcccaggccuccagcucagca

SEQ ID NO: 2130979 - RNA, 23 nt, Human
agcccugaguuucaaguauccuu

SEQ ID NO: 2130980 - RNA, 21 nt, Human
agcccugauugcgcaaaacug

SEQ ID NO: 2130981 - RNA, 20 nt, Human
ugcaaauucccagauuugaa

SEQ ID NO: 2130982 - RNA, 12 nt, Human
ugcaacacacag

SEQ ID NO: 2130983 - RNA, 13 nt, Human
ugcaacacacaga

SEQ ID NO: 2130984 - RNA, 14 nt, Human
ugcaacacacagac

SEQ ID NO: 2130985 - RNA, 13 nt, Human
ugcaacaacaugu

SEQ ID NO: 2130986 - RNA, 15 nt, Human
ugcaacaacauguau

SEQ ID NO: 2130987 - RNA, 13 nt, Human
ugcaacaggcugg

SEQ ID NO: 2130988 - RNA, 15 nt, Human
ugcaacacacagaca

SEQ ID NO: 2130989 - RNA, 13 nt, Human
ugcaacagacaag

SEQ ID NO: 2130990 - RNA, 15 nt, Human
ugcaaaugcuguauu

SEQ ID NO: 2130991 - RNA, 22 nt, Human
ugcaaauggugguuguuucuuc

SEQ ID NO: 2130992 - RNA, 24 nt, Human
ugcaaauggugguuguuucuucca

SEQ ID NO: 2130993 - RNA, 14 nt, Human
ugcaaauagaaaac

SEQ ID NO: 2130994 - RNA, 15 nt, Human
ugcaaauagaaaaca

SEQ ID NO: 2130995 - RNA, 17 nt, Human
ugcaaauagaaaacagg

SEQ ID NO: 2130996 - RNA, 19 nt, Human
ugcaaggaagccacagcug

SEQ ID NO: 2130997 - RNA, 20 nt, Human
ugcaaggaagccacagcugg

SEQ ID NO: 2130998 - RNA, 12 nt, Human
ugcaaggaagga

SEQ ID NO: 2130999 - RNA, 15 nt, Human
ugcaaggaaggaaag

SEQ ID NO: 2131000 - RNA, 16 nt, Human
ugcaaggaaggaaaga

SEQ ID NO: 2131001 - RNA, 19 nt, Human
ugcaaggaaggaaagaaag

SEQ ID NO: 2131002 - RNA, 13 nt, Human
ugcaaggaccagg

SEQ ID NO: 2131003 - RNA, 14 nt, Human
ugcaaggaccagga

SEQ ID NO: 2131004 - RNA, 15 nt, Human
ugcaaggaccaggac

SEQ ID NO: 2131005 - RNA, 23 nt, Human
ugcaagagccuugguguccaccu

SEQ ID NO: 2131006 - RNA, 14 nt, Human
ugcaagagccuugg

SEQ ID NO: 2131007 - RNA, 23 nt, Human
ugcaagagggagcacgugacugu

SEQ ID NO: 2131008 - RNA, 18 nt, Human
ugcaaggggaaaaucuca

SEQ ID NO: 2131009 - RNA, 15 nt, Human
ugcaaguacugcugu

SEQ ID NO: 2131010 - RNA, 19 nt, Human
ugcaaguacugcuguaaau

SEQ ID NO: 2131011 - RNA, 19 nt, Human
ugcaaguguguaugugcgu

SEQ ID NO: 2131012 - RNA, 22 nt, Human
ugcaaguguguaugugcgugug

SEQ ID NO: 2131013 - RNA, 13 nt, Human
ugcaaggcaaaga

SEQ ID NO: 2131014 - RNA, 11 nt, Human
ugcaaggcacu

SEQ ID NO: 2131015 - RNA, 17 nt, Human
ugcaaggaccaggacuc

SEQ ID NO: 2131016 - RNA, 17 nt, Human
ugcaaggcacuguacua

SEQ ID NO: 2131017 - RNA, 23 nt, Human
ugcaaggccgcuguucacccaca

SEQ ID NO: 2131018 - RNA, 24 nt, Human
ugcaaggccgcuguucacccacag

SEQ ID NO: 2131019 - RNA, 14 nt, Human
ugcaauauguauua

SEQ ID NO: 2131020 - RNA, 18 nt, Human
ugcaagugugugcaugug

SEQ ID NO: 2131021 - RNA, 23 nt, Human
ugcaagugugugcaugugugcga

SEQ ID NO: 2131022 - RNA, 13 nt, Human
ugcaagugugugc

SEQ ID NO: 2131023 - RNA, 14 nt, Human
ugcaagugugugca

SEQ ID NO: 2131024 - RNA, 21 nt, Human
ugcaagugugugcacaugugu

SEQ ID NO: 2131025 - RNA, 23 nt, Human
ugcaagugugugcacaugugugc

SEQ ID NO: 2131026 - RNA, 14 nt, Human
ugauuuccaaagag

SEQ ID NO: 2131027 - RNA, 22 nt, Human
ugauuuaucugagucaacuccu

SEQ ID NO: 2131028 - RNA, 16 nt, Human
ugauuuaucacacaaa

SEQ ID NO: 2131029 - RNA, 18 nt, Human
ugauuuaucacacaaagc

SEQ ID NO: 2131030 - RNA, 18 nt, Human
ugauuaaggucucucuuu

SEQ ID NO: 2131031 - RNA, 20 nt, Human
ugauuaaggucucucuuugg

SEQ ID NO: 2131032 - RNA, 22 nt, Human
ugauuaaggucucucuuuggac

SEQ ID NO: 2131033 - RNA, 18 nt, Human
agccacggccaggccaga

SEQ ID NO: 2131034 - RNA, 17 nt, Human
agccacggccaggccag

SEQ ID NO: 2131035 - RNA, 21 nt, Human
ugauuuccccuccaagguaug

SEQ ID NO: 2131036 - RNA, 18 nt, Human
ugauuuccaaagagaaaa

SEQ ID NO: 2131037 - RNA, 12 nt, Human
ugauuuggaaaa

SEQ ID NO: 2131038 - RNA, 23 nt, Human
ugcaaaguucccuacuuccugug

SEQ ID NO: 2131039 - RNA, 21 nt, Human
ugcaaaggguaucaggugcug

SEQ ID NO: 2131040 - RNA, 12 nt, Human
ugcaaaggacug

SEQ ID NO: 2131041 - RNA, 12 nt, Human
ugcaaagauuug

SEQ ID NO: 2131042 - RNA, 12 nt, Human
ugcaaagaaaau

SEQ ID NO: 2131043 - RNA, 16 nt, Human
ugcaaagaaaaucaga

SEQ ID NO: 2131044 - RNA, 13 nt, Human
ugcaaagaggcaa

SEQ ID NO: 2131045 - RNA, 15 nt, Human
ugcaaagaggcaaga

SEQ ID NO: 2131046 - RNA, 19 nt, Human
ugcaaagaggcaagaggcu

SEQ ID NO: 2131047 - RNA, 17 nt, Human
agccugugccucuggga

SEQ ID NO: 2131048 - RNA, 18 nt, Human
agccugugccucugggac

SEQ ID NO: 2131049 - RNA, 19 nt, Human
agccugugccucugggacu

SEQ ID NO: 2131050 - RNA, 15 nt, Human
agccuguaaucccag

SEQ ID NO: 2131051 - RNA, 16 nt, Human
agccuguaaucccagc

SEQ ID NO: 2131052 - RNA, 17 nt, Human
agccuguaaucccagcu

SEQ ID NO: 2131053 - RNA, 18 nt, Human
agccuguaaucccagcua

SEQ ID NO: 2131054 - RNA, 17 nt, Human
agccugaggcugagacu

SEQ ID NO: 2131055 - RNA, 11 nt, Human
agccugaggcu

SEQ ID NO: 2131056 - RNA, 15 nt, Human
ugcauggaccuaaca

SEQ ID NO: 2131057 - RNA, 17 nt, Human
ugcauggaccuaacauu

SEQ ID NO: 2131058 - RNA, 18 nt, Human
ugcauggaccuaacauuc

SEQ ID NO: 2131059 - RNA, 20 nt, Human
ugcauggaccuaacauucga

SEQ ID NO: 2131060 - RNA, 21 nt, Human
ugcauggaccuaacauucgau

SEQ ID NO: 2131061 - RNA, 15 nt, Human
ugcauggcagcaggc

SEQ ID NO: 2131062 - RNA, 22 nt, Human
ugcauggcagcaggccuguugc

SEQ ID NO: 2131063 - RNA, 22 nt, Human
agccuuagaagucacacaguau

SEQ ID NO: 2131064 - RNA, 20 nt, Human
agccuuagaagucacacagu

SEQ ID NO: 2131065 - RNA, 23 nt, Human
agccuugggaacaugcgugugac

SEQ ID NO: 2131066 - RNA, 19 nt, Human
agccuuggauaaugcuguu

SEQ ID NO: 2131067 - RNA, 20 nt, Human
agccuuggauaaugcuguug

SEQ ID NO: 2131068 - RNA, 22 nt, Human
agccuuggauaaugcuguugcc

SEQ ID NO: 2131069 - RNA, 23 nt, Human
agccuuggauaaugcuguugccu

SEQ ID NO: 2131070 - RNA, 16 nt, Human
agccuuggauguauau

SEQ ID NO: 2131071 - RNA, 19 nt, Human
agccuugcggaagguucua

SEQ ID NO: 2131072 - RNA, 12 nt, Human
ugccagugucuu

SEQ ID NO: 2131073 - RNA, 13 nt, Human
ugccagugucuuu

SEQ ID NO: 2131074 - RNA, 14 nt, Human
ugccagugucuuuc

SEQ ID NO: 2131075 - RNA, 15 nt, Human
ugccagugucuuucu

SEQ ID NO: 2131076 - RNA, 16 nt, Human
ugccagugucuuucuu

SEQ ID NO: 2131077 - RNA, 20 nt, Human
ugccagugucuuucuuuggu

SEQ ID NO: 2131078 - RNA, 17 nt, Human
ugccagcucagucccau

SEQ ID NO: 2131079 - RNA, 20 nt, Human
ugccagugccuuaccuccug

SEQ ID NO: 2131080 - RNA, 21 nt, Human
ugccagugccuuaccuccugc

SEQ ID NO: 2131081 - RNA, 22 nt, Human
ugccagugccuuaccuccugcc

SEQ ID NO: 2131082 - RNA, 23 nt, Human
ugccagugccuuaccuccugccc

SEQ ID NO: 2131083 - RNA, 16 nt, Human
ugccagccuggcuucu

SEQ ID NO: 2131084 - RNA, 17 nt, Human
ugccagccuggcuucug

SEQ ID NO: 2131085 - RNA, 18 nt, Human
ugccagccuggcuucugg

SEQ ID NO: 2131086 - RNA, 20 nt, Human
ugccagccuggcuucuggag

SEQ ID NO: 2131087 - RNA, 21 nt, Human
ugccagccuggcuucuggagc

SEQ ID NO: 2131088 - RNA, 22 nt, Human
ugccagccuggcuucuggagcc

SEQ ID NO: 2131089 - RNA, 23 nt, Human
ugccagccuggcuucuggagccc

SEQ ID NO: 2131090 - RNA, 23 nt, Human
ugccagccagcagccagcucuca

SEQ ID NO: 2131091 - RNA, 12 nt, Human
ugccagccuggc

SEQ ID NO: 2131092 - RNA, 15 nt, Human
ugccagccuggcuuc

SEQ ID NO: 2131093 - RNA, 16 nt, Human
ugccagccagcagcca

SEQ ID NO: 2131094 - RNA, 17 nt, Human
ugccagccagcagccag

SEQ ID NO: 2131095 - RNA, 22 nt, Human
ugccagccagcagccagcucuc

SEQ ID NO: 2131096 - RNA, 12 nt, Human
ugccacagcucu

SEQ ID NO: 2131097 - RNA, 22 nt, Human
agcgccuaguggggucucccuc

SEQ ID NO: 2131098 - RNA, 21 nt, Human
agcgccuaguggggucucccu

SEQ ID NO: 2131099 - RNA, 19 nt, Human
ugccaagcacagugccugc

SEQ ID NO: 2131100 - RNA, 20 nt, Human
ugccaaugaggucugaaaug

SEQ ID NO: 2131101 - RNA, 22 nt, Human
ugccaaggccagaguggccugg

SEQ ID NO: 2131102 - RNA, 21 nt, Human
ugccaaugaggucugaaaugg

SEQ ID NO: 2131103 - RNA, 16 nt, Human
ugccaaggccagagug

SEQ ID NO: 2131104 - RNA, 20 nt, Human
ugccaaggccagaguggccu

SEQ ID NO: 2131105 - RNA, 21 nt, Human
ugccaaggccagaguggccug

SEQ ID NO: 2131106 - RNA, 18 nt, Human
ugccaagccccauccugc

SEQ ID NO: 2131107 - RNA, 13 nt, Human
ugcagggccucca

SEQ ID NO: 2131108 - RNA, 14 nt, Human
ugcagggccuccau

SEQ ID NO: 2131109 - RNA, 22 nt, Human
ugcaggggcaaacaccugcuga

SEQ ID NO: 2131110 - RNA, 20 nt, Human
agccucuccggcagaaggga

SEQ ID NO: 2131111 - RNA, 20 nt, Human
agccucuuaaagcugccugu

SEQ ID NO: 2131112 - RNA, 22 nt, Human
agccucuuaaagcugccuguag

SEQ ID NO: 2131113 - RNA, 23 nt, Human
agccucuuaaagcugccuguagu

SEQ ID NO: 2131114 - RNA, 21 nt, Human
ugcagacaggcaagcaccucc

SEQ ID NO: 2131115 - RNA, 13 nt, Human
ugcagacaggcaa

SEQ ID NO: 2131116 - RNA, 12 nt, Human
ugcagacaggca

SEQ ID NO: 2131117 - RNA, 23 nt, Human
agccucuccaggaaugccuccuc

SEQ ID NO: 2131118 - RNA, 14 nt, Human
agccucucaucccc

SEQ ID NO: 2131119 - RNA, 12 nt, Human
agccucuccagg

SEQ ID NO: 2131120 - RNA, 14 nt, Human
agccucuccaggaa

SEQ ID NO: 2131121 - RNA, 20 nt, Human
agccucgccgucugugaauu

SEQ ID NO: 2131122 - RNA, 21 nt, Human
agccuccuguguagcugggau

SEQ ID NO: 2131123 - RNA, 16 nt, Human
agccuccuuucuggcu

SEQ ID NO: 2131124 - RNA, 15 nt, Human
agccucgaacuccug

SEQ ID NO: 2131125 - RNA, 16 nt, Human
agccucgaacuccugg

SEQ ID NO: 2131126 - RNA, 17 nt, Human
agccucgaacuccuggg

SEQ ID NO: 2131127 - RNA, 19 nt, Human
agccucgaacuccugggcu

SEQ ID NO: 2131128 - RNA, 21 nt, Human
agccucgaacuccugggcuca

SEQ ID NO: 2131129 - RNA, 21 nt, Human
ugcagucagucaugauggcac

SEQ ID NO: 2131130 - RNA, 17 nt, Human
ugcauagagccacguau

SEQ ID NO: 2131131 - RNA, 13 nt, Human
ugcauagaaggag

SEQ ID NO: 2131132 - RNA, 17 nt, Human
ugcauagaaggaggaga

SEQ ID NO: 2131133 - RNA, 18 nt, Human
ugcauagaaggaggagag

SEQ ID NO: 2131134 - RNA, 13 nt, Human
ugcagucaucuug

SEQ ID NO: 2131135 - RNA, 15 nt, Human
ugcaucucagcccac

SEQ ID NO: 2131136 - RNA, 14 nt, Human
ugcaucucagccca

SEQ ID NO: 2131137 - RNA, 13 nt, Human
ugcaucucagccc

SEQ ID NO: 2131138 - RNA, 21 nt, Human
ugcaucucacuggaugcaaag

SEQ ID NO: 2131139 - RNA, 16 nt, Human
ugcaucuacucaggcc

SEQ ID NO: 2131140 - RNA, 19 nt, Human
ugcauagagccacguaugu

SEQ ID NO: 2131141 - RNA, 17 nt, Human
ugcaucguuucaucuuc

SEQ ID NO: 2131142 - RNA, 22 nt, Human
ugcaucuuacugaagguaaaau

SEQ ID NO: 2131143 - RNA, 14 nt, Human
ugcaucuuacugaa

SEQ ID NO: 2131144 - RNA, 17 nt, Human
ugcaucuuacugaaggu

SEQ ID NO: 2131145 - RNA, 18 nt, Human
ugcaucuuacugaaggua

SEQ ID NO: 2131146 - RNA, 19 nt, Human
ugcaugaagguuucugaaa

SEQ ID NO: 2131147 - RNA, 21 nt, Human
ugcaugaagguuucugaaaau

SEQ ID NO: 2131148 - RNA, 13 nt, Human
ugcaugaagguuu

SEQ ID NO: 2131149 - RNA, 18 nt, Human
ugcaugaagguuucugaa

SEQ ID NO: 2131150 - RNA, 14 nt, Human
ugcaugccgcugca

SEQ ID NO: 2131151 - RNA, 13 nt, Human
ugcaugcugcuuu

SEQ ID NO: 2131152 - RNA, 15 nt, Human
ugcaugcugcuuuaa

SEQ ID NO: 2131153 - RNA, 17 nt, Human
ugcaugcugcuuuaauu

SEQ ID NO: 2131154 - RNA, 20 nt, Human
ugcaugcugcuuuaauugug

SEQ ID NO: 2131155 - RNA, 16 nt, Human
ugcaugcucucugcag

SEQ ID NO: 2131156 - RNA, 17 nt, Human
ugcaugcucucugcagc

SEQ ID NO: 2131157 - RNA, 18 nt, Human
ugcaugcucucugcagcc

SEQ ID NO: 2131158 - RNA, 19 nt, Human
ugcaugcucucugcagcca

SEQ ID NO: 2131159 - RNA, 21 nt, Human
aggaccuguggccaaguucuu

SEQ ID NO: 2131160 - RNA, 15 nt, Human
aggaccuuaucugug

SEQ ID NO: 2131161 - RNA, 16 nt, Human
aggaccuuaucugugc

SEQ ID NO: 2131162 - RNA, 14 nt, Human
aggacaaggcuaga

SEQ ID NO: 2131163 - RNA, 17 nt, Human
aggacaacgaggaagcc

SEQ ID NO: 2131164 - RNA, 18 nt, Human
aggacaacgaggaagccc

SEQ ID NO: 2131165 - RNA, 14 nt, Human
aggacaacgaggaa

SEQ ID NO: 2131166 - RNA, 23 nt, Human
aggaauucccagcccaaagcugu

SEQ ID NO: 2131167 - RNA, 22 nt, Human
aggaauucuaggcaucccaggg

SEQ ID NO: 2131168 - RNA, 16 nt, Human
aggacaacgaggaagc

SEQ ID NO: 2131169 - RNA, 23 nt, Human
aggacucccuccucaccucugga

SEQ ID NO: 2131170 - RNA, 18 nt, Human
aggacucccuccucaccu

SEQ ID NO: 2131171 - RNA, 19 nt, Human
aggacucccuccucaccuc

SEQ ID NO: 2131172 - RNA, 13 nt, Human
aggacucugaggc

SEQ ID NO: 2131173 - RNA, 14 nt, Human
aggacucugaggcu

SEQ ID NO: 2131174 - RNA, 17 nt, Human
aggacucugaggcucuu

SEQ ID NO: 2131175 - RNA, 15 nt, Human
aggacucugcccaga

SEQ ID NO: 2131176 - RNA, 18 nt, Human
aggacucugcccagacca

SEQ ID NO: 2131177 - RNA, 11 nt, Human
aggacuccagc

SEQ ID NO: 2131178 - RNA, 12 nt, Human
aggacuccagcc

SEQ ID NO: 2131179 - RNA, 12 nt, Human
aggacucccucc

SEQ ID NO: 2131180 - RNA, 13 nt, Human
aggacucccuccu

SEQ ID NO: 2131181 - RNA, 14 nt, Human
aggacucccuccuc

SEQ ID NO: 2131182 - RNA, 15 nt, Human
aggacucccuccuca

SEQ ID NO: 2131183 - RNA, 16 nt, Human
aggacucccuccucac

SEQ ID NO: 2131184 - RNA, 17 nt, Human
aggacucccuccucacc

SEQ ID NO: 2131185 - RNA, 14 nt, Human
aggacgugggcggc

SEQ ID NO: 2131186 - RNA, 20 nt, Human
aggacgugggcggcagagag

SEQ ID NO: 2131187 - RNA, 20 nt, Human
aggagauggaaguugcagug

SEQ ID NO: 2131188 - RNA, 16 nt, Human
aggagaaaugcaucca

SEQ ID NO: 2131189 - RNA, 16 nt, Human
aggacuugaaagcauc

SEQ ID NO: 2131190 - RNA, 19 nt, Human
aggacuugaaagcauccau

SEQ ID NO: 2131191 - RNA, 13 nt, Human
aggacuugcccuc

SEQ ID NO: 2131192 - RNA, 21 nt, Human
aggacuugaaagcauccaugu

SEQ ID NO: 2131193 - RNA, 12 nt, Human
aggagaaaugca

SEQ ID NO: 2131194 - RNA, 22 nt, Human
aggagauccagggcaaggccau

SEQ ID NO: 2131195 - RNA, 17 nt, Human
aggagagucuugcagug

SEQ ID NO: 2131196 - RNA, 21 nt, Human
aggagagucuugcagugauua

SEQ ID NO: 2131197 - RNA, 17 nt, Human
aggagccccgaggccuu

SEQ ID NO: 2131198 - RNA, 19 nt, Human
aggacuuuucuuuguggcu

SEQ ID NO: 2131199 - RNA, 17 nt, Human
aggacuuuucuuugugg

SEQ ID NO: 2131200 - RNA, 22 nt, Human
aggacuuuucuuuguggcuucc

SEQ ID NO: 2131201 - RNA, 18 nt, Human
aggacucugccuccucuu

SEQ ID NO: 2131202 - RNA, 17 nt, Human
aggacucugccuccucu

SEQ ID NO: 2131203 - RNA, 16 nt, Human
aggacucugccuccuc

SEQ ID NO: 2131204 - RNA, 14 nt, Human
aggacucugccucc

SEQ ID NO: 2131205 - RNA, 13 nt, Human
aggacucugccuc

SEQ ID NO: 2131206 - RNA, 12 nt, Human
aggacucugccu

SEQ ID NO: 2131207 - RNA, 22 nt, Human
aggacuggcuuugucccacagc

SEQ ID NO: 2131208 - RNA, 22 nt, Human
aggacugccgaccgaggcugga

SEQ ID NO: 2131209 - RNA, 12 nt, Human
aggacugcacca

SEQ ID NO: 2131210 - RNA, 16 nt, Human
aggacugcaccauugc

SEQ ID NO: 2131211 - RNA, 19 nt, Human
aggacugcaccauugcugc

SEQ ID NO: 2131212 - RNA, 20 nt, Human
aggacugcaccauugcugcu

SEQ ID NO: 2131213 - RNA, 21 nt, Human
aggacugcaccauugcugcuc

SEQ ID NO: 2131214 - RNA, 19 nt, Human
aggacugcaugguaauuua

SEQ ID NO: 2131215 - RNA, 20 nt, Human
aggacugcaugguaauuuau

SEQ ID NO: 2131216 - RNA, 21 nt, Human
aggacugcaugguaauuuaua

SEQ ID NO: 2131217 - RNA, 18 nt, Human
aggacugccccgugcaga

SEQ ID NO: 2131218 - RNA, 21 nt, Human
aggacugccccgugcagacug

SEQ ID NO: 2131219 - RNA, 13 nt, Human
aggacugccgacc

SEQ ID NO: 2131220 - RNA, 17 nt, Human
aggacugccgaccgagg

SEQ ID NO: 2131221 - RNA, 21 nt, Human
aggacugccgaccgaggcugg

SEQ ID NO: 2131222 - RNA, 18 nt, Human
ugcuuuuggucuguguga

SEQ ID NO: 2131223 - RNA, 20 nt, Human
ugcuuuugucuaugggacuc

SEQ ID NO: 2131224 - RNA, 23 nt, Human
ugcuuuuuaauauugauaugcuu

SEQ ID NO: 2131225 - RNA, 16 nt, Human
ugcuuugggcugcccu

SEQ ID NO: 2131226 - RNA, 17 nt, Human
aggagccuauggcaucu

SEQ ID NO: 2131227 - RNA, 15 nt, Human
ugcuugagcucagga

SEQ ID NO: 2131228 - RNA, 20 nt, Human
ugcuugacauaauuucacug

SEQ ID NO: 2131229 - RNA, 15 nt, Human
ugcuuugggcugccc

SEQ ID NO: 2131230 - RNA, 14 nt, Human
ugcuuugggcugcc

SEQ ID NO: 2131231 - RNA, 16 nt, Human
ugcuugagcccaggag

SEQ ID NO: 2131232 - RNA, 13 nt, Human
ugcuugagcccag

SEQ ID NO: 2131233 - RNA, 14 nt, Human
ugcuugagcccagg

SEQ ID NO: 2131234 - RNA, 17 nt, Human
uggaaauuggaagagca

SEQ ID NO: 2131235 - RNA, 16 nt, Human
uggaaauuggaagagc

SEQ ID NO: 2131236 - RNA, 21 nt, Human
uggaaauuuguuauaaugaau

SEQ ID NO: 2131237 - RNA, 23 nt, Human
uggaaauuuguuauaaugaauga

SEQ ID NO: 2131238 - RNA, 17 nt, Human
ugcuuuuuaaguguuaa

SEQ ID NO: 2131239 - RNA, 14 nt, Human
uggaaagugaauuu

SEQ ID NO: 2131240 - RNA, 15 nt, Human
uggaaagugaauuug

SEQ ID NO: 2131241 - RNA, 16 nt, Human
uggaaagugaauuuga

SEQ ID NO: 2131242 - RNA, 17 nt, Human
uggaaagugaauuugaa

SEQ ID NO: 2131243 - RNA, 20 nt, Human
uggaaagugaauuugaauga

SEQ ID NO: 2131244 - RNA, 21 nt, Human
uggaaagugaauuugaaugaa

SEQ ID NO: 2131245 - RNA, 23 nt, Human
uggaaagugaauuugaaugaaaa

SEQ ID NO: 2131246 - RNA, 19 nt, Human
aggaugcagagucagcaga

SEQ ID NO: 2131247 - RNA, 17 nt, Human
aggauucuuccucccuc

SEQ ID NO: 2131248 - RNA, 19 nt, Human
aggauucuuccucccuccc

SEQ ID NO: 2131249 - RNA, 18 nt, Human
aggaugcagagucagcag

SEQ ID NO: 2131250 - RNA, 15 nt, Human
aggaugauuguacag

SEQ ID NO: 2131251 - RNA, 20 nt, Human
aggaugauuguacagaauca

SEQ ID NO: 2131252 - RNA, 13 nt, Human
aggaucagucuga

SEQ ID NO: 2131253 - RNA, 18 nt, Human
aggaucuuuugaacccag

SEQ ID NO: 2131254 - RNA, 13 nt, Human
aggaucuuuugaa

SEQ ID NO: 2131255 - RNA, 19 nt, Human
aggaugaaugaggucccag

SEQ ID NO: 2131256 - RNA, 20 nt, Human
aggaugaaugaggucccagg

SEQ ID NO: 2131257 - RNA, 21 nt, Human
aggaugaaugaggucccaggc

SEQ ID NO: 2131258 - RNA, 22 nt, Human
aggaugaaugaggucccaggca

SEQ ID NO: 2131259 - RNA, 19 nt, Human
uggaagcauauuguuauua

SEQ ID NO: 2131260 - RNA, 22 nt, Human
uggaagcauguaggagaaucca

SEQ ID NO: 2131261 - RNA, 12 nt, Human
uggaagcccucc

SEQ ID NO: 2131262 - RNA, 13 nt, Human
uggaagcccuccu

SEQ ID NO: 2131263 - RNA, 15 nt, Human
uggaagcccuccuuc

SEQ ID NO: 2131264 - RNA, 16 nt, Human
uggaagcccuccuucc

SEQ ID NO: 2131265 - RNA, 17 nt, Human
uggaagcccuccuucca

SEQ ID NO: 2131266 - RNA, 17 nt, Human
uggaagcauguaggaga

SEQ ID NO: 2131267 - RNA, 19 nt, Human
uggaagcauguaggagaau

SEQ ID NO: 2131268 - RNA, 19 nt, Human
uggaagcccuccuuccacg

SEQ ID NO: 2131269 - RNA, 16 nt, Human
aggaggagagggaaaa

SEQ ID NO: 2131270 - RNA, 16 nt, Human
aggaggcugaggcaga

SEQ ID NO: 2131271 - RNA, 17 nt, Human
aggaggcugaggcagaa

SEQ ID NO: 2131272 - RNA, 17 nt, Human
aggaggcugaggcagga

SEQ ID NO: 2131273 - RNA, 19 nt, Human
aggaggcugaggcaggagg

SEQ ID NO: 2131274 - RNA, 13 nt, Human
aggaggcugaggg

SEQ ID NO: 2131275 - RNA, 13 nt, Human
aggaggcuggcuu

SEQ ID NO: 2131276 - RNA, 13 nt, Human
aggaggcugaggu

SEQ ID NO: 2131277 - RNA, 12 nt, Human
aggaggcuggag

SEQ ID NO: 2131278 - RNA, 16 nt, Human
aggaggcuggaggaag

SEQ ID NO: 2131279 - RNA, 18 nt, Human
aggaggcuggaggaaggg

SEQ ID NO: 2131280 - RNA, 21 nt, Human
aggaggcuggaggaagggggg

SEQ ID NO: 2131281 - RNA, 13 nt, Human
aggaggcuggcag

SEQ ID NO: 2131282 - RNA, 16 nt, Human
aggaggcuggcaggua

SEQ ID NO: 2131283 - RNA, 17 nt, Human
uggagugcaaugacaca

SEQ ID NO: 2131284 - RNA, 14 nt, Human
uggagugcagugag

SEQ ID NO: 2131285 - RNA, 17 nt, Human
uggagguuaaggcugag

SEQ ID NO: 2131286 - RNA, 19 nt, Human
uggagguuaaggcugagga

SEQ ID NO: 2131287 - RNA, 16 nt, Human
uggagguggggcaugg

SEQ ID NO: 2131288 - RNA, 16 nt, Human
aggcauuugcugaaua

SEQ ID NO: 2131289 - RNA, 20 nt, Human
aggcauuugcugaauacaga

SEQ ID NO: 2131290 - RNA, 19 nt, Human
uggaguguguauuguuccc

SEQ ID NO: 2131291 - RNA, 15 nt, Human
uggaguguguauugu

SEQ ID NO: 2131292 - RNA, 20 nt, Human
uggaguguguauuguuccca

SEQ ID NO: 2131293 - RNA, 13 nt, Human
uggaguggaugcc

SEQ ID NO: 2131294 - RNA, 17 nt, Human
uggaguggaugccucag

SEQ ID NO: 2131295 - RNA, 23 nt, Human
uggaugccugguggcagcugcgg

SEQ ID NO: 2131296 - RNA, 21 nt, Human
uggaugccugguggcagcugc

SEQ ID NO: 2131297 - RNA, 22 nt, Human
uggaguugaaagaguuaagaau

SEQ ID NO: 2131298 - RNA, 23 nt, Human
uggaugcggaacccaaauuacgu

SEQ ID NO: 2131299 - RNA, 21 nt, Human
uggcacauuuccccagaccug

SEQ ID NO: 2131300 - RNA, 13 nt, Human
uggcaccacucuc

SEQ ID NO: 2131301 - RNA, 18 nt, Human
uggcaccacugcacucca

SEQ ID NO: 2131302 - RNA, 19 nt, Human
uggcaccacugcacuccag

SEQ ID NO: 2131303 - RNA, 21 nt, Human
uggcaccacugcacuccagcc

SEQ ID NO: 2131304 - RNA, 12 nt, Human
uggauucucaga

SEQ ID NO: 2131305 - RNA, 13 nt, Human
uggauucucagau

SEQ ID NO: 2131306 - RNA, 14 nt, Human
uggauucucagaua

SEQ ID NO: 2131307 - RNA, 15 nt, Human
uggauucucagauau

SEQ ID NO: 2131308 - RNA, 16 nt, Human
uggauucucagauauu

SEQ ID NO: 2131309 - RNA, 17 nt, Human
uggauugacaguaacuu

SEQ ID NO: 2131310 - RNA, 20 nt, Human
uggauugacaguaacuuggu

SEQ ID NO: 2131311 - RNA, 21 nt, Human
uggauugacaguaacuugguu

SEQ ID NO: 2131312 - RNA, 19 nt, Human
uggauucucagauauuuau

SEQ ID NO: 2131313 - RNA, 15 nt, Human
aggccccaggaagcc

SEQ ID NO: 2131314 - RNA, 16 nt, Human
aggccccaggaagccg

SEQ ID NO: 2131315 - RNA, 13 nt, Human
aggcccccaagcc

SEQ ID NO: 2131316 - RNA, 22 nt, Human
aggcccaaauuaucaagcuaau

SEQ ID NO: 2131317 - RNA, 23 nt, Human
aggcccaaauuaucaagcuaaua

SEQ ID NO: 2131318 - RNA, 12 nt, Human
aggcccaagaga

SEQ ID NO: 2131319 - RNA, 20 nt, Human
aggcccaagagaugaagagu

SEQ ID NO: 2131320 - RNA, 22 nt, Human
aggcccaccuaccuucaaagcu

SEQ ID NO: 2131321 - RNA, 23 nt, Human
aggcccaccuaccuucaaagcug

SEQ ID NO: 2131322 - RNA, 19 nt, Human
aggcccgcaugcggcccag

SEQ ID NO: 2131323 - RNA, 13 nt, Human
aggcccggcucca

SEQ ID NO: 2131324 - RNA, 20 nt, Human
uggcacccggccccugcugg

SEQ ID NO: 2131325 - RNA, 19 nt, Human
uggcacccggccccugcug

SEQ ID NO: 2131326 - RNA, 18 nt, Human
uggcacccggccccugcu

SEQ ID NO: 2131327 - RNA, 11 nt, Human
aggccaccugc

SEQ ID NO: 2131328 - RNA, 12 nt, Human
aggccaccugca

SEQ ID NO: 2131329 - RNA, 14 nt, Human
aggccaccugcagg

SEQ ID NO: 2131330 - RNA, 13 nt, Human
aggccaccugccc

SEQ ID NO: 2131331 - RNA, 13 nt, Human
aggccagccuggc

SEQ ID NO: 2131332 - RNA, 18 nt, Human
aggccaccugcccccuuc

SEQ ID NO: 2131333 - RNA, 19 nt, Human
aggccaccugcccccuucu

SEQ ID NO: 2131334 - RNA, 14 nt, Human
aggccaccugcccc

SEQ ID NO: 2131335 - RNA, 15 nt, Human
aggccaccugccccc

SEQ ID NO: 2131336 - RNA, 16 nt, Human
aggccaccugcccccu

SEQ ID NO: 2131337 - RNA, 17 nt, Human
aggccaccugcccccuu

SEQ ID NO: 2131338 - RNA, 21 nt, Human
aggcccaaauuaucaagcuaa

SEQ ID NO: 2131339 - RNA, 17 nt, Human
aggcaagcaccuccugc

SEQ ID NO: 2131340 - RNA, 17 nt, Human
uggagccaauggagacu

SEQ ID NO: 2131341 - RNA, 17 nt, Human
uggagccaaggguucag

SEQ ID NO: 2131342 - RNA, 17 nt, Human
uggagccaccuguccca

SEQ ID NO: 2131343 - RNA, 22 nt, Human
uggagccaccugucccaccuca

SEQ ID NO: 2131344 - RNA, 15 nt, Human
uggagccacucuguu

SEQ ID NO: 2131345 - RNA, 16 nt, Human
uggagccacucuguuc

SEQ ID NO: 2131346 - RNA, 19 nt, Human
uggagcagggacagaucau

SEQ ID NO: 2131347 - RNA, 19 nt, Human
aggcaagcaccuccugccu

SEQ ID NO: 2131348 - RNA, 18 nt, Human
aggcaagcaccuccugcc

SEQ ID NO: 2131349 - RNA, 20 nt, Human
aggcaagcaccuccugccuc

SEQ ID NO: 2131350 - RNA, 17 nt, Human
aggauugcuacuguccu

SEQ ID NO: 2131351 - RNA, 15 nt, Human
aggauugcuacuguc

SEQ ID NO: 2131352 - RNA, 18 nt, Human
aggauugcuacuguccua

SEQ ID NO: 2131353 - RNA, 17 nt, Human
uggacuuaaccggaguu

SEQ ID NO: 2131354 - RNA, 21 nt, Human
uggagcacucugaguuuacca

SEQ ID NO: 2131355 - RNA, 22 nt, Human
uggagcacucugaguuuaccau

SEQ ID NO: 2131356 - RNA, 17 nt, Human
uggagcaccaggcacga

SEQ ID NO: 2131357 - RNA, 18 nt, Human
uggagcacaaaagccucu

SEQ ID NO: 2131358 - RNA, 20 nt, Human
uggacuucuuuuacucauga

SEQ ID NO: 2131359 - RNA, 14 nt, Human
uggagaaacccugu

SEQ ID NO: 2131360 - RNA, 16 nt, Human
uggagaaacccugucu

SEQ ID NO: 2131361 - RNA, 17 nt, Human
uggagaaacccuugaaa

SEQ ID NO: 2131362 - RNA, 17 nt, Human
uggagaaacuguagucu

SEQ ID NO: 2131363 - RNA, 22 nt, Human
uggagaaacuguagucucagga

SEQ ID NO: 2131364 - RNA, 13 nt, Human
aggcauaggccug

SEQ ID NO: 2131365 - RNA, 14 nt, Human
aggcauaggccugg

SEQ ID NO: 2131366 - RNA, 15 nt, Human
aggcauaggccuggg

SEQ ID NO: 2131367 - RNA, 16 nt, Human
aggcauaggccugggu

SEQ ID NO: 2131368 - RNA, 15 nt, Human
aggcauuuaggaacu

SEQ ID NO: 2131369 - RNA, 22 nt, Human
aggcaggucuugaacuccuggc

SEQ ID NO: 2131370 - RNA, 20 nt, Human
aggcagggucaggagagggg

SEQ ID NO: 2131371 - RNA, 23 nt, Human
aggcagggucaggagaggggcag

SEQ ID NO: 2131372 - RNA, 12 nt, Human
aggcagggucuc

SEQ ID NO: 2131373 - RNA, 14 nt, Human
aggcagggucagga

SEQ ID NO: 2131374 - RNA, 17 nt, Human
aggcagggucaggagag

SEQ ID NO: 2131375 - RNA, 19 nt, Human
aggcagggucaggagaggg

SEQ ID NO: 2131376 - RNA, 21 nt, Human
aggcaggugccccucucucca

SEQ ID NO: 2131377 - RNA, 16 nt, Human
aggcaggugacaguga

SEQ ID NO: 2131378 - RNA, 17 nt, Human
aggcaggugacagugag

SEQ ID NO: 2131379 - RNA, 18 nt, Human
aggcaggugacagugagg

SEQ ID NO: 2131380 - RNA, 17 nt, Human
aggcaggugggauggau

SEQ ID NO: 2131381 - RNA, 13 nt, Human
aggcaggggcgga

SEQ ID NO: 2131382 - RNA, 21 nt, Human
aggcagggccuugcccagaga

SEQ ID NO: 2131383 - RNA, 23 nt, Human
aggcagggccuugcccagagaug

SEQ ID NO: 2131384 - RNA, 22 nt, Human
aggcagggaaaggcucugaaag

SEQ ID NO: 2131385 - RNA, 22 nt, Human
aggcagggccuugcccagagau

SEQ ID NO: 2131386 - RNA, 20 nt, Human
aggcacagccggggccugcc

SEQ ID NO: 2131387 - RNA, 21 nt, Human
aggcacagccggggccugccu

SEQ ID NO: 2131388 - RNA, 14 nt, Human
aggcacacagcugc

SEQ ID NO: 2131389 - RNA, 18 nt, Human
aggcacacagcugcagag

SEQ ID NO: 2131390 - RNA, 23 nt, Human
aggcacacagcugcagagacaga

SEQ ID NO: 2131391 - RNA, 12 nt, Human
aggcacacuucu

SEQ ID NO: 2131392 - RNA, 15 nt, Human
aggcacacuucuucu

SEQ ID NO: 2131393 - RNA, 16 nt, Human
aggcacacuucuucuu

SEQ ID NO: 2131394 - RNA, 20 nt, Human
aggcacacuucuucuugguc

SEQ ID NO: 2131395 - RNA, 20 nt, Human
aggcagcuuuuucucuccca

SEQ ID NO: 2131396 - RNA, 20 nt, Human
aggcaggaagggcaggaagg

SEQ ID NO: 2131397 - RNA, 16 nt, Human
aggcaggaagggcagg

SEQ ID NO: 2131398 - RNA, 17 nt, Human
aggcaggaagggcagga

SEQ ID NO: 2131399 - RNA, 13 nt, Human
agcuguuuaugca

SEQ ID NO: 2131400 - RNA, 17 nt, Human
agcuguuuauggccuca

SEQ ID NO: 2131401 - RNA, 18 nt, Human
agcuguuuauggccucag

SEQ ID NO: 2131402 - RNA, 19 nt, Human
agcuguuuauggccucagc

SEQ ID NO: 2131403 - RNA, 20 nt, Human
agcuguuuauggccucagcu

SEQ ID NO: 2131404 - RNA, 21 nt, Human
agcuguuuauggccucagcug

SEQ ID NO: 2131405 - RNA, 23 nt, Human
ugcuacaugacgacaaagcugcu

SEQ ID NO: 2131406 - RNA, 24 nt, Human
ugcuacaugacgacaaagcugcua

SEQ ID NO: 2131407 - RNA, 20 nt, Human
ugcuaaucggguugucacuc

SEQ ID NO: 2131408 - RNA, 17 nt, Human
ugcuaaucuucagggca

SEQ ID NO: 2131409 - RNA, 14 nt, Human
ugcggucaaggcca

SEQ ID NO: 2131410 - RNA, 12 nt, Human
ugcuaauaaaac

SEQ ID NO: 2131411 - RNA, 15 nt, Human
ugcgguccacccagg

SEQ ID NO: 2131412 - RNA, 14 nt, Human
ugcgguccacccag

SEQ ID NO: 2131413 - RNA, 15 nt, Human
agcuuacaagccagc

SEQ ID NO: 2131414 - RNA, 17 nt, Human
agcuuacaagccagcug

SEQ ID NO: 2131415 - RNA, 19 nt, Human
agcuuacaagccagcugga

SEQ ID NO: 2131416 - RNA, 22 nt, Human
agcuugaggguugggcuggugu

SEQ ID NO: 2131417 - RNA, 18 nt, Human
agcuugauaaagggccaa

SEQ ID NO: 2131418 - RNA, 16 nt, Human
agcuuguuauuuauaa

SEQ ID NO: 2131419 - RNA, 23 nt, Human
agcuuguccaacccgaggcccgc

SEQ ID NO: 2131420 - RNA, 22 nt, Human
agcuugucuaugguacaaaaau

SEQ ID NO: 2131421 - RNA, 19 nt, Human
agcuugcucuucaguggga

SEQ ID NO: 2131422 - RNA, 22 nt, Human
agcuugcucuucagugggagaa

SEQ ID NO: 2131423 - RNA, 16 nt, Human
agcuugcugcacccca

SEQ ID NO: 2131424 - RNA, 20 nt, Human
agcuugcugcaccccaaguc

SEQ ID NO: 2131425 - RNA, 16 nt, Human
agcuugcugcccuagg

SEQ ID NO: 2131426 - RNA, 22 nt, Human
agcuuguccaacccgaggcccg

SEQ ID NO: 2131427 - RNA, 23 nt, Human
agcuugcguuagaaugaggagga

SEQ ID NO: 2131428 - RNA, 14 nt, Human
agcuugcucuucag

SEQ ID NO: 2131429 - RNA, 14 nt, Human
aggaaaagcugcug

SEQ ID NO: 2131430 - RNA, 13 nt, Human
aggaaaagaaaag

SEQ ID NO: 2131431 - RNA, 14 nt, Human
agcuuuggacgcac

SEQ ID NO: 2131432 - RNA, 19 nt, Human
agcuuuggacgcacacagc

SEQ ID NO: 2131433 - RNA, 20 nt, Human
agcuuuggacgcacacagcu

SEQ ID NO: 2131434 - RNA, 21 nt, Human
agcuuuggacgcacacagcuu

SEQ ID NO: 2131435 - RNA, 16 nt, Human
agcuuuggaaacagga

SEQ ID NO: 2131436 - RNA, 12 nt, Human
agcuuuggacac

SEQ ID NO: 2131437 - RNA, 14 nt, Human
agcuuuggacacac

SEQ ID NO: 2131438 - RNA, 19 nt, Human
agcuuuggacacacacagc

SEQ ID NO: 2131439 - RNA, 20 nt, Human
agcuuuggacacacacagcu

SEQ ID NO: 2131440 - RNA, 21 nt, Human
agcuuuggacacacacagcuu

SEQ ID NO: 2131441 - RNA, 23 nt, Human
agcuuuggacacacacagcuucu

SEQ ID NO: 2131442 - RNA, 20 nt, Human
agcuuugcuucucucucuaa

SEQ ID NO: 2131443 - RNA, 19 nt, Human
agcuuugauuuagauugag

SEQ ID NO: 2131444 - RNA, 14 nt, Human
aggaagcagccaag

SEQ ID NO: 2131445 - RNA, 13 nt, Human
aggaagcaacgaa

SEQ ID NO: 2131446 - RNA, 19 nt, Human
aggaagcaacgaagggaaa

SEQ ID NO: 2131447 - RNA, 15 nt, Human
aggaagccacagcug

SEQ ID NO: 2131448 - RNA, 16 nt, Human
aggaagccacagcugg

SEQ ID NO: 2131449 - RNA, 18 nt, Human
aggaagccacagcuggug

SEQ ID NO: 2131450 - RNA, 14 nt, Human
aggaaggaugagca

SEQ ID NO: 2131451 - RNA, 17 nt, Human
aggaaggaugagcauuu

SEQ ID NO: 2131452 - RNA, 15 nt, Human
aggaaugucuuuggu

SEQ ID NO: 2131453 - RNA, 14 nt, Human
aggaauguuaaagu

SEQ ID NO: 2131454 - RNA, 18 nt, Human
aggaauguagcugguuuc

SEQ ID NO: 2131455 - RNA, 23 nt, Human
aggaauuaaguuagggaauggca

SEQ ID NO: 2131456 - RNA, 22 nt, Human
aggaauguuaaagucaguggga

SEQ ID NO: 2131457 - RNA, 22 nt, Human
aggaauucccagcccaaagcug

SEQ ID NO: 2131458 - RNA, 17 nt, Human
aggaaauaaaaaagucu

SEQ ID NO: 2131459 - RNA, 18 nt, Human
aggaaauaaaaaagucuc

SEQ ID NO: 2131460 - RNA, 20 nt, Human
aggaaauaaaaaagucucua

SEQ ID NO: 2131461 - RNA, 21 nt, Human
aggaaauaaaaaagucucuau

SEQ ID NO: 2131462 - RNA, 22 nt, Human
aggaaauaaaaaagucucuauu

SEQ ID NO: 2131463 - RNA, 14 nt, Human
aggaaauaaaaccu

SEQ ID NO: 2131464 - RNA, 17 nt, Human
aggaaauaaaaccuuuc

SEQ ID NO: 2131465 - RNA, 18 nt, Human
aggaaagugauaugcauu

SEQ ID NO: 2131466 - RNA, 16 nt, Human
aggaaauaaaaccuuu

SEQ ID NO: 2131467 - RNA, 18 nt, Human
aggaagaucacuuugcuc

SEQ ID NO: 2131468 - RNA, 20 nt, Human
aggaagaucacuuugcucug

SEQ ID NO: 2131469 - RNA, 21 nt, Human
aggaagaucacuuugcucuga

SEQ ID NO: 2131470 - RNA, 14 nt, Human
aggaagaucaggcc

SEQ ID NO: 2131471 - RNA, 13 nt, Human
aggaaagggaagg

SEQ ID NO: 2131472 - RNA, 15 nt, Human
ugcugagagacccaa

SEQ ID NO: 2131473 - RNA, 17 nt, Human
ugcugagagacccaagg

SEQ ID NO: 2131474 - RNA, 18 nt, Human
ugcugagagacccaagga

SEQ ID NO: 2131475 - RNA, 21 nt, Human
ugcugagagacccaaggagga

SEQ ID NO: 2131476 - RNA, 22 nt, Human
ugcugagagacccaaggaggaa

SEQ ID NO: 2131477 - RNA, 17 nt, Human
ugcucuuaugccauuug

SEQ ID NO: 2131478 - RNA, 16 nt, Human
ugcucugcugacagac

SEQ ID NO: 2131479 - RNA, 15 nt, Human
ugcucugcugacaga

SEQ ID NO: 2131480 - RNA, 14 nt, Human
ugcucugcugacag

SEQ ID NO: 2131481 - RNA, 13 nt, Human
ugcucuucagugg

SEQ ID NO: 2131482 - RNA, 18 nt, Human
ugcucugaacacgaagcu

SEQ ID NO: 2131483 - RNA, 17 nt, Human
ugcucucugcagccagc

SEQ ID NO: 2131484 - RNA, 20 nt, Human
ugcucucugcagccagccca

SEQ ID NO: 2131485 - RNA, 21 nt, Human
ugcucucugcagccagcccag

SEQ ID NO: 2131486 - RNA, 14 nt, Human
ugcucucuacccag

SEQ ID NO: 2131487 - RNA, 16 nt, Human
ugcucucuacccagcc

SEQ ID NO: 2131488 - RNA, 17 nt, Human
ugcucucuacccagccc

SEQ ID NO: 2131489 - RNA, 18 nt, Human
ugcucucuacccagccca

SEQ ID NO: 2131490 - RNA, 19 nt, Human
ugcucucuacccagcccau

SEQ ID NO: 2131491 - RNA, 20 nt, Human
ugcucucuacccagcccauc

SEQ ID NO: 2131492 - RNA, 22 nt, Human
ugcucucuacccagcccaucuu

SEQ ID NO: 2131493 - RNA, 13 nt, Human
ugcucucugcagc

SEQ ID NO: 2131494 - RNA, 14 nt, Human
ugcucucugcagcc

SEQ ID NO: 2131495 - RNA, 15 nt, Human
ugcucucugcagcca

SEQ ID NO: 2131496 - RNA, 20 nt, Human
ugcuccagcuguucagcugg

SEQ ID NO: 2131497 - RNA, 21 nt, Human
ugcuccagcuguucagcuggu

SEQ ID NO: 2131498 - RNA, 16 nt, Human
aggaaaagcugcugac

SEQ ID NO: 2131499 - RNA, 12 nt, Human
aggaaaauugga

SEQ ID NO: 2131500 - RNA, 13 nt, Human
aggaaaauuucac

SEQ ID NO: 2131501 - RNA, 16 nt, Human
ugcuauggauggcuuc

SEQ ID NO: 2131502 - RNA, 12 nt, Human
ugcuauggggac

SEQ ID NO: 2131503 - RNA, 12 nt, Human
ugcuauggggag

SEQ ID NO: 2131504 - RNA, 18 nt, Human
ugcuauggggagaaaaga

SEQ ID NO: 2131505 - RNA, 19 nt, Human
ugcuauggggagaaaagac

SEQ ID NO: 2131506 - RNA, 13 nt, Human
ugcuaugaaugau

SEQ ID NO: 2131507 - RNA, 14 nt, Human
ugcucaagaaacaa

SEQ ID NO: 2131508 - RNA, 12 nt, Human
ugcuauuuuacu

SEQ ID NO: 2131509 - RNA, 15 nt, Human
ugcuauuuuacuguc

SEQ ID NO: 2131510 - RNA, 17 nt, Human
ugcuauuuuacugucuu

SEQ ID NO: 2131511 - RNA, 18 nt, Human
ugcuauuuuacugucuua

SEQ ID NO: 2131512 - RNA, 19 nt, Human
ugcuauuuuacugucuuaa

SEQ ID NO: 2131513 - RNA, 15 nt, Human
ugcucaaaaaaugag

SEQ ID NO: 2131514 - RNA, 15 nt, Human
agcuccaguccugcu

SEQ ID NO: 2131515 - RNA, 17 nt, Human
agcuccaguccugcucu

SEQ ID NO: 2131516 - RNA, 14 nt, Human
agcuccaguggaag

SEQ ID NO: 2131517 - RNA, 19 nt, Human
agcuccaguggaagaagaa

SEQ ID NO: 2131518 - RNA, 20 nt, Human
agcuccaguggaagaagaaa

SEQ ID NO: 2131519 - RNA, 23 nt, Human
agcuccaguggaagaagaaaaca

SEQ ID NO: 2131520 - RNA, 15 nt, Human
agcuccuucuguccu

SEQ ID NO: 2131521 - RNA, 16 nt, Human
agcuccaucuccacuc

SEQ ID NO: 2131522 - RNA, 15 nt, Human
agcuccaucuccacu

SEQ ID NO: 2131523 - RNA, 13 nt, Human
agcuccaucucca

SEQ ID NO: 2131524 - RNA, 13 nt, Human
agcuccaguucga

SEQ ID NO: 2131525 - RNA, 21 nt, Human
agcuccuucuguccuacucug

SEQ ID NO: 2131526 - RNA, 16 nt, Human
agcuccuucuguccua

SEQ ID NO: 2131527 - RNA, 22 nt, Human
agcuccuugggaggccccacug

SEQ ID NO: 2131528 - RNA, 12 nt, Human
agcucgguggac

SEQ ID NO: 2131529 - RNA, 14 nt, Human
agcucgguggaccc

SEQ ID NO: 2131530 - RNA, 15 nt, Human
agcucgguggaccca

SEQ ID NO: 2131531 - RNA, 16 nt, Human
agcucgguggacccag

SEQ ID NO: 2131532 - RNA, 17 nt, Human
agcucgguggacccagg

SEQ ID NO: 2131533 - RNA, 18 nt, Human
agcucgguggacccaggg

SEQ ID NO: 2131534 - RNA, 19 nt, Human
agcucgguggacccaggga

SEQ ID NO: 2131535 - RNA, 20 nt, Human
agcucgguggacccagggau

SEQ ID NO: 2131536 - RNA, 14 nt, Human
agcucuguccuggg

SEQ ID NO: 2131537 - RNA, 21 nt, Human
agcucugaagucacaucacag

SEQ ID NO: 2131538 - RNA, 23 nt, Human
agcucugaagucacaucacagga

SEQ ID NO: 2131539 - RNA, 12 nt, Human
agcucuggcuuc

SEQ ID NO: 2131540 - RNA, 20 nt, Human
agcucuggcuuccagaaaac

SEQ ID NO: 2131541 - RNA, 15 nt, Human
ugcccuuaaaucaua

SEQ ID NO: 2131542 - RNA, 14 nt, Human
ugccgacacgcucc

SEQ ID NO: 2131543 - RNA, 15 nt, Human
ugccgaccagagccc

SEQ ID NO: 2131544 - RNA, 21 nt, Human
ugccgaccagagccccacacg

SEQ ID NO: 2131545 - RNA, 22 nt, Human
ugccgaccagagccccacacgg

SEQ ID NO: 2131546 - RNA, 15 nt, Human
ugccgaccgaggcug

SEQ ID NO: 2131547 - RNA, 16 nt, Human
ugccgaccgaggcugg

SEQ ID NO: 2131548 - RNA, 22 nt, Human
ugccgaccgaggcuggagcugg

SEQ ID NO: 2131549 - RNA, 23 nt, Human
ugccgaccgaggcuggagcuggc

SEQ ID NO: 2131550 - RNA, 14 nt, Human
ugccgaccucgucc

SEQ ID NO: 2131551 - RNA, 15 nt, Human
ugccgaccucguccu

SEQ ID NO: 2131552 - RNA, 17 nt, Human
ugccgaccucguccucc

SEQ ID NO: 2131553 - RNA, 21 nt, Human
ugccgaccucguccucccccu

SEQ ID NO: 2131554 - RNA, 13 nt, Human
ugccucagccucc

SEQ ID NO: 2131555 - RNA, 12 nt, Human
ugccucagccuc

SEQ ID NO: 2131556 - RNA, 18 nt, Human
ugccgcaccccagagugu

SEQ ID NO: 2131557 - RNA, 22 nt, Human
ugccgaccucguccucccccug

SEQ ID NO: 2131558 - RNA, 12 nt, Human
ugccgcacccca

SEQ ID NO: 2131559 - RNA, 13 nt, Human
ugccgcaccccag

SEQ ID NO: 2131560 - RNA, 15 nt, Human
ugccgcaccccagag

SEQ ID NO: 2131561 - RNA, 23 nt, Human
agcucuguccugggagugagcug

SEQ ID NO: 2131562 - RNA, 20 nt, Human
agcugauuuuaacaauaacu

SEQ ID NO: 2131563 - RNA, 21 nt, Human
agcucuguccugggagugagc

SEQ ID NO: 2131564 - RNA, 16 nt, Human
agcucuguccugggag

SEQ ID NO: 2131565 - RNA, 21 nt, Human
agcugcaagugacaucucuuu

SEQ ID NO: 2131566 - RNA, 15 nt, Human
agcugcaagugacau

SEQ ID NO: 2131567 - RNA, 18 nt, Human
agcugcaagugacaucuc

SEQ ID NO: 2131568 - RNA, 11 nt, Human
agcugcagaac

SEQ ID NO: 2131569 - RNA, 15 nt, Human
agcugcagagacaga

SEQ ID NO: 2131570 - RNA, 17 nt, Human
agcugcagagacagaga

SEQ ID NO: 2131571 - RNA, 18 nt, Human
agcugcagagacagagag

SEQ ID NO: 2131572 - RNA, 19 nt, Human
agcugcagagacagagagg

SEQ ID NO: 2131573 - RNA, 17 nt, Human
agcugccauccagggau

SEQ ID NO: 2131574 - RNA, 14 nt, Human
agcugccccuggcu

SEQ ID NO: 2131575 - RNA, 13 nt, Human
agcugccccuccc

SEQ ID NO: 2131576 - RNA, 16 nt, Human
agcugccccucccugc

SEQ ID NO: 2131577 - RNA, 17 nt, Human
agcugccccucccugcc

SEQ ID NO: 2131578 - RNA, 18 nt, Human
agcugcccccgcucaugg

SEQ ID NO: 2131579 - RNA, 19 nt, Human
agcugcccccgcucauggg

SEQ ID NO: 2131580 - RNA, 14 nt, Human
ugccuguucccauu

SEQ ID NO: 2131581 - RNA, 19 nt, Human
agcuguuacugucuucagu

SEQ ID NO: 2131582 - RNA, 19 nt, Human
ugccugugccacccaccag

SEQ ID NO: 2131583 - RNA, 20 nt, Human
ugccugugccacccaccagg

SEQ ID NO: 2131584 - RNA, 19 nt, Human
agcuguuauuucuauuuuu

SEQ ID NO: 2131585 - RNA, 23 nt, Human
agcugugugaaauaccagugugg

SEQ ID NO: 2131586 - RNA, 20 nt, Human
ugccugugcacggccagcug

SEQ ID NO: 2131587 - RNA, 21 nt, Human
ugccugugcacggccagcugc

SEQ ID NO: 2131588 - RNA, 14 nt, Human
ugccugugccaccc

SEQ ID NO: 2131589 - RNA, 16 nt, Human
ugccugugccacccac

SEQ ID NO: 2131590 - RNA, 14 nt, Human
ugccuuaccuccug

SEQ ID NO: 2131591 - RNA, 15 nt, Human
ugccuuaccuccugc

SEQ ID NO: 2131592 - RNA, 16 nt, Human
ugccuuaccuccugcc

SEQ ID NO: 2131593 - RNA, 17 nt, Human
ugccuuaccuccugccc

SEQ ID NO: 2131594 - RNA, 18 nt, Human
ugccuuaccuccugccca

SEQ ID NO: 2131595 - RNA, 16 nt, Human
ugccuugggcugcucc

SEQ ID NO: 2131596 - RNA, 17 nt, Human
ugccuugggcugcuccu

SEQ ID NO: 2131597 - RNA, 19 nt, Human
ugccuugggcugcuccuca

SEQ ID NO: 2131598 - RNA, 16 nt, Human
ugccuuaacuggagcc

SEQ ID NO: 2131599 - RNA, 16 nt, Human
agcugggacuacaggu

SEQ ID NO: 2131600 - RNA, 23 nt, Human
agcugggacuacaggcacccacc

SEQ ID NO: 2131601 - RNA, 20 nt, Human
agcugggacuacaggcaccc

SEQ ID NO: 2131602 - RNA, 20 nt, Human
agcuggguaaucgauggggg

SEQ ID NO: 2131603 - RNA, 18 nt, Human
agcugugcucuggacagg

SEQ ID NO: 2131604 - RNA, 17 nt, Human
agcugugcucuggacag

SEQ ID NO: 2131605 - RNA, 15 nt, Human
agcugugguuuucuu

SEQ ID NO: 2131606 - RNA, 22 nt, Human
agcugugguuuucuuuugccau

SEQ ID NO: 2131607 - RNA, 15 nt, Human
agcuguguccuugca

SEQ ID NO: 2131608 - RNA, 18 nt, Human
agcuguguccuugcaccu

SEQ ID NO: 2131609 - RNA, 20 nt, Human
agcuguguccuugcaccugc

SEQ ID NO: 2131610 - RNA, 21 nt, Human
agcuguggguacagagagguc

SEQ ID NO: 2131611 - RNA, 18 nt, Human
agcuguuacugucuucag

SEQ ID NO: 2131612 - RNA, 14 nt, Human
agcuguuacugucu

SEQ ID NO: 2131613 - RNA, 21 nt, Human
agcuguguccuugcaccugca

SEQ ID NO: 2131614 - RNA, 24 nt, Human
agcuguguccuugcaccugcaucc

SEQ ID NO: 2131615 - RNA, 13 nt, Human
agcugugugaaau

SEQ ID NO: 2131616 - RNA, 14 nt, Human
agcugugugaaaua

SEQ ID NO: 2131617 - RNA, 16 nt, Human
agcugccuguucagcu

SEQ ID NO: 2131618 - RNA, 14 nt, Human
agcugccuguucag

SEQ ID NO: 2131619 - RNA, 18 nt, Human
agcugccuguucagcucc

SEQ ID NO: 2131620 - RNA, 20 nt, Human
ugccuggaagagcagcccua

SEQ ID NO: 2131621 - RNA, 19 nt, Human
ugccuggaagagcagcccu

SEQ ID NO: 2131622 - RNA, 15 nt, Human
ugccuggacaaaccc

SEQ ID NO: 2131623 - RNA, 14 nt, Human
agcugcuggcuugc

SEQ ID NO: 2131624 - RNA, 17 nt, Human
agcugcuggcuugcagu

SEQ ID NO: 2131625 - RNA, 18 nt, Human
agcuggcgucugucuuca

SEQ ID NO: 2131626 - RNA, 15 nt, Human
agcuggcgucugucu

SEQ ID NO: 2131627 - RNA, 22 nt, Human
agcugcuuggaccucgugcuuu

SEQ ID NO: 2131628 - RNA, 23 nt, Human
agcugcuuggaccucgugcuuua

SEQ ID NO: 2131629 - RNA, 23 nt, Human
agcuggccgaggguccuggcucc

SEQ ID NO: 2131630 - RNA, 17 nt, Human
ugccucugccucugaca

SEQ ID NO: 2131631 - RNA, 20 nt, Human
ugccucugccucugacacac

SEQ ID NO: 2131632 - RNA, 18 nt, Human
ugccucugccucugacac

SEQ ID NO: 2131633 - RNA, 14 nt, Human
ugccucagccuccc

SEQ ID NO: 2131634 - RNA, 13 nt, Human
agcugcagugagc

SEQ ID NO: 2131635 - RNA, 23 nt, Human
ugccugcccaggccccugccacc

SEQ ID NO: 2131636 - RNA, 22 nt, Human
ugccugcccaggccccugccac

SEQ ID NO: 2131637 - RNA, 20 nt, Human
ugccugcccaggccccugcc

SEQ ID NO: 2131638 - RNA, 12 nt, Human
ugccucugccug

SEQ ID NO: 2131639 - RNA, 18 nt, Human
ugccuggaagagcagccc

SEQ ID NO: 2131640 - RNA, 18 nt, Human
uguaugucucgugguagg

SEQ ID NO: 2131641 - RNA, 17 nt, Human
uguaugugcgugugugc

SEQ ID NO: 2131642 - RNA, 16 nt, Human
uguaugugccauuuau

SEQ ID NO: 2131643 - RNA, 14 nt, Human
uguauguguguaug

SEQ ID NO: 2131644 - RNA, 17 nt, Human
uguauccaguacauuua

SEQ ID NO: 2131645 - RNA, 17 nt, Human
uguaucauuugaacaac

SEQ ID NO: 2131646 - RNA, 15 nt, Human
uguaucaaacuagug

SEQ ID NO: 2131647 - RNA, 18 nt, Human
uguaucaacccagaaaca

SEQ ID NO: 2131648 - RNA, 21 nt, Human
uguaucaggaaauauauaugu

SEQ ID NO: 2131649 - RNA, 17 nt, Human
uguaucaaugaguaaca

SEQ ID NO: 2131650 - RNA, 14 nt, Human
aguagaauugauuu

SEQ ID NO: 2131651 - RNA, 14 nt, Human
uguauguuugcaca

SEQ ID NO: 2131652 - RNA, 16 nt, Human
uguauguuugcacacu

SEQ ID NO: 2131653 - RNA, 22 nt, Human
uguauguuugcacacuugugug

SEQ ID NO: 2131654 - RNA, 14 nt, Human
uguauguugugaag

SEQ ID NO: 2131655 - RNA, 19 nt, Human
uguauguugugaagauguu

SEQ ID NO: 2131656 - RNA, 22 nt, Human
uguauguugugaagauguuugc

SEQ ID NO: 2131657 - RNA, 23 nt, Human
uguauguugugaagauguuugca

SEQ ID NO: 2131658 - RNA, 14 nt, Human
uguauguuuacacu

SEQ ID NO: 2131659 - RNA, 17 nt, Human
uguauguuuacacuguc

SEQ ID NO: 2131660 - RNA, 18 nt, Human
uguauguuuacacuguca

SEQ ID NO: 2131661 - RNA, 20 nt, Human
uguauguuuacacugucaaa

SEQ ID NO: 2131662 - RNA, 19 nt, Human
uguauuccaguuuguuuau

SEQ ID NO: 2131663 - RNA, 18 nt, Human
uguauucccaccccugga

SEQ ID NO: 2131664 - RNA, 17 nt, Human
uguauucccaguuacuu

SEQ ID NO: 2131665 - RNA, 21 nt, Human
uguauuaauauucauuguaua

SEQ ID NO: 2131666 - RNA, 23 nt, Human
ugucaaaaaugucuuggguaggc

SEQ ID NO: 2131667 - RNA, 16 nt, Human
ugucaaacaaagccag

SEQ ID NO: 2131668 - RNA, 17 nt, Human
ugucaaacaaagccaga

SEQ ID NO: 2131669 - RNA, 21 nt, Human
ugucaaacaaagccagaagcu

SEQ ID NO: 2131670 - RNA, 22 nt, Human
ugucaaacaaagccagaagcug

SEQ ID NO: 2131671 - RNA, 16 nt, Human
ugucaaacuguagaaa

SEQ ID NO: 2131672 - RNA, 13 nt, Human
ugucaaggugcug

SEQ ID NO: 2131673 - RNA, 16 nt, Human
ugucaaggugcuguug

SEQ ID NO: 2131674 - RNA, 16 nt, Human
ugucaagucucugcug

SEQ ID NO: 2131675 - RNA, 18 nt, Human
aguauuacuucugcuaca

SEQ ID NO: 2131676 - RNA, 17 nt, Human
aguaugguggcuggguu

SEQ ID NO: 2131677 - RNA, 15 nt, Human
aguauuacuucugcu

SEQ ID NO: 2131678 - RNA, 13 nt, Human
aguagucagacug

SEQ ID NO: 2131679 - RNA, 16 nt, Human
aguaugguggcugggu

SEQ ID NO: 2131680 - RNA, 15 nt, Human
aguaugguggcuggg

SEQ ID NO: 2131681 - RNA, 13 nt, Human
aguagggucaggc

SEQ ID NO: 2131682 - RNA, 13 nt, Human
aguaggugcuuga

SEQ ID NO: 2131683 - RNA, 19 nt, Human
ugucaagucucugcuggcc

SEQ ID NO: 2131684 - RNA, 17 nt, Human
ugucaagucucugcugg

SEQ ID NO: 2131685 - RNA, 18 nt, Human
ugucaagucucugcuggc

SEQ ID NO: 2131686 - RNA, 23 nt, Human
agucacacagugagucgaggaca

SEQ ID NO: 2131687 - RNA, 15 nt, Human
agucacacagugagu

SEQ ID NO: 2131688 - RNA, 23 nt, Human
agucacacaguauuacuucugcu

SEQ ID NO: 2131689 - RNA, 14 nt, Human
aguaugguggcugg

SEQ ID NO: 2131690 - RNA, 23 nt, Human
uguagaaaagggaacugaacauu

SEQ ID NO: 2131691 - RNA, 21 nt, Human
uguagaaaugaugauguggaa

SEQ ID NO: 2131692 - RNA, 18 nt, Human
uguagagccagggucuca

SEQ ID NO: 2131693 - RNA, 16 nt, Human
uguagagccagggucu

SEQ ID NO: 2131694 - RNA, 10 nt, Human
agguuuguga

SEQ ID NO: 2131695 - RNA, 22 nt, Human
agguuugugagagcgaggcuga

SEQ ID NO: 2131696 - RNA, 14 nt, Human
uguagagcuucugg

SEQ ID NO: 2131697 - RNA, 18 nt, Human
uguagaaaagggaacuga

SEQ ID NO: 2131698 - RNA, 19 nt, Human
uguagaaaagggaacugaa

SEQ ID NO: 2131699 - RNA, 20 nt, Human
uguagaaaagggaacugaac

SEQ ID NO: 2131700 - RNA, 21 nt, Human
uguagaaaagggaacugaaca

SEQ ID NO: 2131701 - RNA, 14 nt, Human
aguaaaacuugcug

SEQ ID NO: 2131702 - RNA, 20 nt, Human
agguuuuuggaauuaugucu

SEQ ID NO: 2131703 - RNA, 15 nt, Human
agguuuuaugauauu

SEQ ID NO: 2131704 - RNA, 23 nt, Human
agguuuuaugauauuuuuuuaag

SEQ ID NO: 2131705 - RNA, 14 nt, Human
aguacauguuaaac

SEQ ID NO: 2131706 - RNA, 23 nt, Human
aguacagguaaggugagggaaua

SEQ ID NO: 2131707 - RNA, 22 nt, Human
aguaauuaucgggaacaguguu

SEQ ID NO: 2131708 - RNA, 20 nt, Human
aguaauuaucgggaacagug

SEQ ID NO: 2131709 - RNA, 21 nt, Human
aguacagguaaggugagggaa

SEQ ID NO: 2131710 - RNA, 18 nt, Human
aguacauauuaggaaaau

SEQ ID NO: 2131711 - RNA, 19 nt, Human
aguacagugguucuacaau

SEQ ID NO: 2131712 - RNA, 21 nt, Human
aguacagugguucuacaaucu

SEQ ID NO: 2131713 - RNA, 22 nt, Human
aguacagugguucuacaaucua

SEQ ID NO: 2131714 - RNA, 22 nt, Human
aguacauaaaggugguaugugu

SEQ ID NO: 2131715 - RNA, 17 nt, Human
aguacauauuaggaaaa

SEQ ID NO: 2131716 - RNA, 13 nt, Human
aguaauuaucggg

SEQ ID NO: 2131717 - RNA, 21 nt, Human
aguagaagucuuagauguaua

SEQ ID NO: 2131718 - RNA, 19 nt, Human
aguagaagucuuagaugua

SEQ ID NO: 2131719 - RNA, 20 nt, Human
aguagaagucuuagauguau

SEQ ID NO: 2131720 - RNA, 12 nt, Human
aguacccaccug

SEQ ID NO: 2131721 - RNA, 13 nt, Human
aguacccaccuga

SEQ ID NO: 2131722 - RNA, 15 nt, Human
aguacccaccugagc

SEQ ID NO: 2131723 - RNA, 16 nt, Human
aguacccaccugagcu

SEQ ID NO: 2131724 - RNA, 17 nt, Human
aguacccaccugagcuu

SEQ ID NO: 2131725 - RNA, 22 nt, Human
aguacccaccugagcuuuggac

SEQ ID NO: 2131726 - RNA, 17 nt, Human
uguaggcuuuacuuagc

SEQ ID NO: 2131727 - RNA, 20 nt, Human
uguaggcuuuacuuagcuua

SEQ ID NO: 2131728 - RNA, 15 nt, Human
uguaguauaaagaaa

SEQ ID NO: 2131729 - RNA, 11 nt, Human
aguagagacag

SEQ ID NO: 2131730 - RNA, 13 nt, Human
aguagaccccugg

SEQ ID NO: 2131731 - RNA, 16 nt, Human
aguagaccccuggcug

SEQ ID NO: 2131732 - RNA, 17 nt, Human
aguagccgagagccugc

SEQ ID NO: 2131733 - RNA, 18 nt, Human
aguagccgagagccugcu

SEQ ID NO: 2131734 - RNA, 19 nt, Human
aguagccgagagccugcuc

SEQ ID NO: 2131735 - RNA, 22 nt, Human
aguagccccaacccaaaccugg

SEQ ID NO: 2131736 - RNA, 23 nt, Human
aguagccccaacccaaaccugga

SEQ ID NO: 2131737 - RNA, 15 nt, Human
aguagccgagagccu

SEQ ID NO: 2131738 - RNA, 16 nt, Human
aguagccgagagccug

SEQ ID NO: 2131739 - RNA, 19 nt, Human
ugguuuccucauuccugaa

SEQ ID NO: 2131740 - RNA, 12 nt, Human
ugguuauacaug

SEQ ID NO: 2131741 - RNA, 13 nt, Human
ugguuauacauga

SEQ ID NO: 2131742 - RNA, 17 nt, Human
ugguuauacaugacacu

SEQ ID NO: 2131743 - RNA, 19 nt, Human
ugguuauacaugacacuga

SEQ ID NO: 2131744 - RNA, 21 nt, Human
ugguuauacaugacacugaaa

SEQ ID NO: 2131745 - RNA, 14 nt, Human
ugguuauggagagg

SEQ ID NO: 2131746 - RNA, 14 nt, Human
ugguuuucaaaaua

SEQ ID NO: 2131747 - RNA, 15 nt, Human
ugguuuucaaaauaa

SEQ ID NO: 2131748 - RNA, 17 nt, Human
ugguuuucaaaauaaaa

SEQ ID NO: 2131749 - RNA, 16 nt, Human
uguaaaguguaaaucc

SEQ ID NO: 2131750 - RNA, 17 nt, Human
uguaaaguguaaauccu

SEQ ID NO: 2131751 - RNA, 19 nt, Human
uguaaauaaccccauucuu

SEQ ID NO: 2131752 - RNA, 21 nt, Human
uguaaauaaccccauucuuug

SEQ ID NO: 2131753 - RNA, 23 nt, Human
uguaaauaaccccauucuuugcu

SEQ ID NO: 2131754 - RNA, 12 nt, Human
uguaaauaagag

SEQ ID NO: 2131755 - RNA, 15 nt, Human
uguaaauaagagauu

SEQ ID NO: 2131756 - RNA, 21 nt, Human
uguaaauacuguuuuuaacaa

SEQ ID NO: 2131757 - RNA, 16 nt, Human
uguaaauagcucaggu

SEQ ID NO: 2131758 - RNA, 15 nt, Human
uguaaauagcucagg

SEQ ID NO: 2131759 - RNA, 20 nt, Human
aggugugcucugaucaucca

SEQ ID NO: 2131760 - RNA, 15 nt, Human
aggugugcucugauc

SEQ ID NO: 2131761 - RNA, 17 nt, Human
aggugugaaccaccaca

SEQ ID NO: 2131762 - RNA, 14 nt, Human
agguggggguuggc

SEQ ID NO: 2131763 - RNA, 18 nt, Human
agguggggguuggcuggg

SEQ ID NO: 2131764 - RNA, 20 nt, Human
agguggggguuggcugggua

SEQ ID NO: 2131765 - RNA, 19 nt, Human
agguucugguuagcucagc

SEQ ID NO: 2131766 - RNA, 20 nt, Human
agguucugguuagcucagcc

SEQ ID NO: 2131767 - RNA, 21 nt, Human
agguucugguuagcucagccc

SEQ ID NO: 2131768 - RNA, 22 nt, Human
agguucugguuagcucagcccc

SEQ ID NO: 2131769 - RNA, 16 nt, Human
agguucuuacugcuug

SEQ ID NO: 2131770 - RNA, 17 nt, Human
agguucuuagugucacu

SEQ ID NO: 2131771 - RNA, 14 nt, Human
agguucuuacugcu

SEQ ID NO: 2131772 - RNA, 14 nt, Human
agguuuaagcuguu

SEQ ID NO: 2131773 - RNA, 21 nt, Human
aggugcaucuggggaacuaga

SEQ ID NO: 2131774 - RNA, 23 nt, Human
aggugcaucuggggaacuagagg

SEQ ID NO: 2131775 - RNA, 20 nt, Human
aggugauccacccaccucag

SEQ ID NO: 2131776 - RNA, 14 nt, Human
aggugauccaccca

SEQ ID NO: 2131777 - RNA, 17 nt, Human
aggugccccucucucca

SEQ ID NO: 2131778 - RNA, 17 nt, Human
aggugccccaaaaugca

SEQ ID NO: 2131779 - RNA, 20 nt, Human
aggugcccacauguguccau

SEQ ID NO: 2131780 - RNA, 23 nt, Human
agguggggcagcuugaggguugg

SEQ ID NO: 2131781 - RNA, 16 nt, Human
agguggggcagcuuga

SEQ ID NO: 2131782 - RNA, 11 nt, Human
aggugccugug

SEQ ID NO: 2131783 - RNA, 17 nt, Human
aggugccugugaggcag

SEQ ID NO: 2131784 - RNA, 23 nt, Human
aggugggauaucccuaugcugcc

SEQ ID NO: 2131785 - RNA, 19 nt, Human
aggugcccuuggaggccag

SEQ ID NO: 2131786 - RNA, 20 nt, Human
aggugcccuuggaggccagc

SEQ ID NO: 2131787 - RNA, 21 nt, Human
aggugcccuuggaggccagcc

SEQ ID NO: 2131788 - RNA, 22 nt, Human
aggugcccuuggaggccagcca

SEQ ID NO: 2131789 - RNA, 21 nt, Human
uggugccucuggaggccucug

SEQ ID NO: 2131790 - RNA, 18 nt, Human
uggugcugccacacuuca

SEQ ID NO: 2131791 - RNA, 19 nt, Human
uggugcugcugcugcugug

SEQ ID NO: 2131792 - RNA, 12 nt, Human
uggugcuggaua

SEQ ID NO: 2131793 - RNA, 17 nt, Human
uggugcuggauauuuuc

SEQ ID NO: 2131794 - RNA, 21 nt, Human
uggugcuggauauuuucaaau

SEQ ID NO: 2131795 - RNA, 18 nt, Human
uggugcuggauauuuuca

SEQ ID NO: 2131796 - RNA, 13 nt, Human
uggugcugccaca

SEQ ID NO: 2131797 - RNA, 14 nt, Human
uggugcucauuuca

SEQ ID NO: 2131798 - RNA, 17 nt, Human
uggugcgaucuggguuc

SEQ ID NO: 2131799 - RNA, 18 nt, Human
uggugcgggcacaauaaa

SEQ ID NO: 2131800 - RNA, 19 nt, Human
uggugcgggcacaauaaau

SEQ ID NO: 2131801 - RNA, 16 nt, Human
uggugcgaucuggguu

SEQ ID NO: 2131802 - RNA, 13 nt, Human
uggugccuuuccu

SEQ ID NO: 2131803 - RNA, 15 nt, Human
uggugccuuuccugu

SEQ ID NO: 2131804 - RNA, 19 nt, Human
uggugccuuuccuguucag

SEQ ID NO: 2131805 - RNA, 20 nt, Human
uggugccuuuccuguucagc

SEQ ID NO: 2131806 - RNA, 22 nt, Human
uggugccuuuccuguucagcau

SEQ ID NO: 2131807 - RNA, 20 nt, Human
uggugcgaucauggcucacu

SEQ ID NO: 2131808 - RNA, 16 nt, Human
ugguggacaguccugg

SEQ ID NO: 2131809 - RNA, 17 nt, Human
ugguggacaguccuggg

SEQ ID NO: 2131810 - RNA, 18 nt, Human
ugguggacaguccuggga

SEQ ID NO: 2131811 - RNA, 14 nt, Human
ugguggauguaaau

SEQ ID NO: 2131812 - RNA, 15 nt, Human
ugguggauguaaaua

SEQ ID NO: 2131813 - RNA, 12 nt, Human
ugguggcagugg

SEQ ID NO: 2131814 - RNA, 15 nt, Human
ugguggcagcugcgg

SEQ ID NO: 2131815 - RNA, 13 nt, Human
ugguggcagcugc

SEQ ID NO: 2131816 - RNA, 14 nt, Human
ugguggcagcugcg

SEQ ID NO: 2131817 - RNA, 13 nt, Human
ugguuagcucagc

SEQ ID NO: 2131818 - RNA, 15 nt, Human
ugguuagcucagccc

SEQ ID NO: 2131819 - RNA, 16 nt, Human
ugguuagcucagcccc

SEQ ID NO: 2131820 - RNA, 18 nt, Human
ugguuagcucagccccag

SEQ ID NO: 2131821 - RNA, 19 nt, Human
ugguuagcucagccccagc

SEQ ID NO: 2131822 - RNA, 20 nt, Human
ugguuagcucagccccagcc

SEQ ID NO: 2131823 - RNA, 21 nt, Human
ugguuagcucagccccagccc

SEQ ID NO: 2131824 - RNA, 22 nt, Human
ugguuagcucagccccagccca

SEQ ID NO: 2131825 - RNA, 23 nt, Human
ugguuagcucagccccagcccag

SEQ ID NO: 2131826 - RNA, 13 nt, Human
ugguuaaugccau

SEQ ID NO: 2131827 - RNA, 13 nt, Human
ugguuacacuguu

SEQ ID NO: 2131828 - RNA, 14 nt, Human
ugguuacacuguua

SEQ ID NO: 2131829 - RNA, 21 nt, Human
ugguuacacuguuagaacacu

SEQ ID NO: 2131830 - RNA, 22 nt, Human
ugguuacacuguuagaacacua

SEQ ID NO: 2131831 - RNA, 23 nt, Human
ugguuacacuguuagaacacuau

SEQ ID NO: 2131832 - RNA, 21 nt, Human
ugguggcagugcagcaaccag

SEQ ID NO: 2131833 - RNA, 15 nt, Human
uggugugaaagucag

SEQ ID NO: 2131834 - RNA, 18 nt, Human
aggucagagccugcaguu

SEQ ID NO: 2131835 - RNA, 17 nt, Human
aggucagagccugcagu

SEQ ID NO: 2131836 - RNA, 15 nt, Human
aggucagagccugca

SEQ ID NO: 2131837 - RNA, 14 nt, Human
aggucagagccugc

SEQ ID NO: 2131838 - RNA, 13 nt, Human
aggucagagccug

SEQ ID NO: 2131839 - RNA, 16 nt, Human
uggucagauuugaacu

SEQ ID NO: 2131840 - RNA, 15 nt, Human
uggucagauuugaac

SEQ ID NO: 2131841 - RNA, 13 nt, Human
uggucacugccau

SEQ ID NO: 2131842 - RNA, 14 nt, Human
uggucacugccaug

SEQ ID NO: 2131843 - RNA, 22 nt, Human
uggucacugccauggaggcaca

SEQ ID NO: 2131844 - RNA, 16 nt, Human
aggucuugaacuccug

SEQ ID NO: 2131845 - RNA, 22 nt, Human
uggucagacacaaacaaacaag

SEQ ID NO: 2131846 - RNA, 21 nt, Human
uggucagaguaagcugcuuuu

SEQ ID NO: 2131847 - RNA, 16 nt, Human
aggucagcuugcugcc

SEQ ID NO: 2131848 - RNA, 18 nt, Human
aggucagcuugcugcccu

SEQ ID NO: 2131849 - RNA, 15 nt, Human
aggucaggaguuccu

SEQ ID NO: 2131850 - RNA, 19 nt, Human
aggucaggaguuagaggcc

SEQ ID NO: 2131851 - RNA, 21 nt, Human
aggucaggaguuagaggccag

SEQ ID NO: 2131852 - RNA, 16 nt, Human
aggucaggaguuccua

SEQ ID NO: 2131853 - RNA, 20 nt, Human
aggucaggaguuccuaacca

SEQ ID NO: 2131854 - RNA, 15 nt, Human
aggugacagagugag

SEQ ID NO: 2131855 - RNA, 13 nt, Human
aggugacagagug

SEQ ID NO: 2131856 - RNA, 17 nt, Human
aggucuugaacuccugg

SEQ ID NO: 2131857 - RNA, 18 nt, Human
aggucuugaacuccuggc

SEQ ID NO: 2131858 - RNA, 13 nt, Human
aggugaccccagg

SEQ ID NO: 2131859 - RNA, 18 nt, Human
aggugacagugagguccu

SEQ ID NO: 2131860 - RNA, 21 nt, Human
aggugacagugagguccuggg

SEQ ID NO: 2131861 - RNA, 22 nt, Human
aggugacagagugagacucugu

SEQ ID NO: 2131862 - RNA, 13 nt, Human
aggugagggaagc

SEQ ID NO: 2131863 - RNA, 21 nt, Human
aggugagaagcagaggaagga

SEQ ID NO: 2131864 - RNA, 23 nt, Human
aggugagaagcagaggaaggaga

SEQ ID NO: 2131865 - RNA, 16 nt, Human
aggugagaagcagagg

SEQ ID NO: 2131866 - RNA, 16 nt, Human
aggugaccuucuggga

SEQ ID NO: 2131867 - RNA, 19 nt, Human
ugggagacacccaaagggu

SEQ ID NO: 2131868 - RNA, 18 nt, Human
ugggagacugcugaguca

SEQ ID NO: 2131869 - RNA, 14 nt, Human
ugggagagcccagc

SEQ ID NO: 2131870 - RNA, 18 nt, Human
ugggagagcccagccauu

SEQ ID NO: 2131871 - RNA, 18 nt, Human
ugggaggaucucuugagc

SEQ ID NO: 2131872 - RNA, 20 nt, Human
ugggacucaaugcacugaca

SEQ ID NO: 2131873 - RNA, 15 nt, Human
ugggacuaaaugccc

SEQ ID NO: 2131874 - RNA, 18 nt, Human
ugggacuaaaugcccugc

SEQ ID NO: 2131875 - RNA, 18 nt, Human
ugggacugcugcuucuua

SEQ ID NO: 2131876 - RNA, 12 nt, Human
ugggacuggagu

SEQ ID NO: 2131877 - RNA, 13 nt, Human
ugggacuggaguc

SEQ ID NO: 2131878 - RNA, 18 nt, Human
ugggacuggagucccugu

SEQ ID NO: 2131879 - RNA, 23 nt, Human
ugggacuggccagguuucugccc

SEQ ID NO: 2131880 - RNA, 14 nt, Human
ugggagaaccucag

SEQ ID NO: 2131881 - RNA, 15 nt, Human
ugggagaaccucagg

SEQ ID NO: 2131882 - RNA, 22 nt, Human
ugggagaagggggucaaagcaa

SEQ ID NO: 2131883 - RNA, 23 nt, Human
ugggagaagggggucaaagcaag

SEQ ID NO: 2131884 - RNA, 22 nt, Human
ugggagaaccucaggcuuccuu

SEQ ID NO: 2131885 - RNA, 23 nt, Human
ugggagaaccucaggcuuccuug

SEQ ID NO: 2131886 - RNA, 21 nt, Human
ugggagaauucuuacauguuu

SEQ ID NO: 2131887 - RNA, 22 nt, Human
ugggagaauucuuacauguuuu

SEQ ID NO: 2131888 - RNA, 13 nt, Human
agggagcugggac

SEQ ID NO: 2131889 - RNA, 13 nt, Human
agggagcacuggg

SEQ ID NO: 2131890 - RNA, 15 nt, Human
agggagagccagcuc

SEQ ID NO: 2131891 - RNA, 14 nt, Human
agggagagcggggc

SEQ ID NO: 2131892 - RNA, 16 nt, Human
agggagagcggggcag

SEQ ID NO: 2131893 - RNA, 10 nt, Human
agggacagag

SEQ ID NO: 2131894 - RNA, 18 nt, Human
agggacagagacaccugc

SEQ ID NO: 2131895 - RNA, 19 nt, Human
agggacagagacaccugca

SEQ ID NO: 2131896 - RNA, 20 nt, Human
agggacagagacaccugcac

SEQ ID NO: 2131897 - RNA, 16 nt, Human
ugggacuacaggcacc

SEQ ID NO: 2131898 - RNA, 15 nt, Human
ugggacuacaggcac

SEQ ID NO: 2131899 - RNA, 14 nt, Human
ugggacuacaggca

SEQ ID NO: 2131900 - RNA, 21 nt, Human
agggaggaaucgaggaaccag

SEQ ID NO: 2131901 - RNA, 22 nt, Human
agggaggaaucgaggaaccaga

SEQ ID NO: 2131902 - RNA, 23 nt, Human
agggaggaaucgaggaaccagag

SEQ ID NO: 2131903 - RNA, 16 nt, Human
agggaagcuggccgag

SEQ ID NO: 2131904 - RNA, 16 nt, Human
agggaagaucuaacau

SEQ ID NO: 2131905 - RNA, 13 nt, Human
agggaagcuggcc

SEQ ID NO: 2131906 - RNA, 12 nt, Human
agggaagcccag

SEQ ID NO: 2131907 - RNA, 13 nt, Human
agggaagcccagc

SEQ ID NO: 2131908 - RNA, 14 nt, Human
agggaagcccagcu

SEQ ID NO: 2131909 - RNA, 18 nt, Human
agggaagcccagcuccag

SEQ ID NO: 2131910 - RNA, 23 nt, Human
agggaagcccagcuccagggcca

SEQ ID NO: 2131911 - RNA, 24 nt, Human
agggaagcccagcuccagggccag

SEQ ID NO: 2131912 - RNA, 16 nt, Human
agggaagccugaaaaa

SEQ ID NO: 2131913 - RNA, 14 nt, Human
agggaagagugcau

SEQ ID NO: 2131914 - RNA, 13 nt, Human
agggaagagaaac

SEQ ID NO: 2131915 - RNA, 14 nt, Human
agggaagagaaaca

SEQ ID NO: 2131916 - RNA, 15 nt, Human
agggaagagaaacag

SEQ ID NO: 2131917 - RNA, 13 nt, Human
agggaacagacag

SEQ ID NO: 2131918 - RNA, 14 nt, Human
agggaacagacagg

SEQ ID NO: 2131919 - RNA, 15 nt, Human
agggaacagacagga

SEQ ID NO: 2131920 - RNA, 21 nt, Human
agggaacagacaggagaaaug

SEQ ID NO: 2131921 - RNA, 14 nt, Human
agggaacaggaaaa

SEQ ID NO: 2131922 - RNA, 17 nt, Human
agggaacagacaggaga

SEQ ID NO: 2131923 - RNA, 18 nt, Human
agggaacagacaggagaa

SEQ ID NO: 2131924 - RNA, 19 nt, Human
agggaacagacaggagaaa

SEQ ID NO: 2131925 - RNA, 20 nt, Human
agggaacagacaggagaaau

SEQ ID NO: 2131926 - RNA, 16 nt, Human
agggaagaaaagagcu

SEQ ID NO: 2131927 - RNA, 19 nt, Human
agggaacgggguccuucaa

SEQ ID NO: 2131928 - RNA, 15 nt, Human
aggcccggggcuggc

SEQ ID NO: 2131929 - RNA, 20 nt, Human
aggcccggcuccaggcuccu

SEQ ID NO: 2131930 - RNA, 18 nt, Human
aggcccggcuccaggcuc

SEQ ID NO: 2131931 - RNA, 21 nt, Human
aggcccggcuccaggcuccuu

SEQ ID NO: 2131932 - RNA, 13 nt, Human
aggcccggggcug

SEQ ID NO: 2131933 - RNA, 14 nt, Human
aggcccggggcugg

SEQ ID NO: 2131934 - RNA, 15 nt, Human
aggcccguccggcag

SEQ ID NO: 2131935 - RNA, 21 nt, Human
agggaaggggaggcagccggc

SEQ ID NO: 2131936 - RNA, 20 nt, Human
agggaaggggaggcagccgg

SEQ ID NO: 2131937 - RNA, 16 nt, Human
agggaaggccaccugc

SEQ ID NO: 2131938 - RNA, 17 nt, Human
agggaaggccaccugca

SEQ ID NO: 2131939 - RNA, 16 nt, Human
agggaaggccccacag

SEQ ID NO: 2131940 - RNA, 15 nt, Human
agggaauggcacagc

SEQ ID NO: 2131941 - RNA, 15 nt, Human
agggaauuucaggaa

SEQ ID NO: 2131942 - RNA, 16 nt, Human
agggaauugcagagua

SEQ ID NO: 2131943 - RNA, 14 nt, Human
agggaauucucuug

SEQ ID NO: 2131944 - RNA, 15 nt, Human
agggaauucucuugg

SEQ ID NO: 2131945 - RNA, 18 nt, Human
agggaauugaggucugcu

SEQ ID NO: 2131946 - RNA, 19 nt, Human
agggacaaauuuaaaacaa

SEQ ID NO: 2131947 - RNA, 20 nt, Human
agggacaaauuuaaaacaaa

SEQ ID NO: 2131948 - RNA, 15 nt, Human
agggaaguccccagg

SEQ ID NO: 2131949 - RNA, 13 nt, Human
agggaaguuuugu

SEQ ID NO: 2131950 - RNA, 21 nt, Human
agggaaugaaggugucagaau

SEQ ID NO: 2131951 - RNA, 18 nt, Human
agggcaugcauuuugcag

SEQ ID NO: 2131952 - RNA, 15 nt, Human
agggccacgugccag

SEQ ID NO: 2131953 - RNA, 16 nt, Human
agggccacgugccagg

SEQ ID NO: 2131954 - RNA, 17 nt, Human
agggcaugcgcacaagg

SEQ ID NO: 2131955 - RNA, 21 nt, Human
agggcaugcgcacaaggcuga

SEQ ID NO: 2131956 - RNA, 23 nt, Human
agggcaggaaggagagccugcug

SEQ ID NO: 2131957 - RNA, 19 nt, Human
agggcaggaaggagagccu

SEQ ID NO: 2131958 - RNA, 21 nt, Human
agggcaggaaggagagccugc

SEQ ID NO: 2131959 - RNA, 16 nt, Human
agggcaggaaggagag

SEQ ID NO: 2131960 - RNA, 18 nt, Human
agggcaggaaggagagcc

SEQ ID NO: 2131961 - RNA, 12 nt, Human
agggcaucuccu

SEQ ID NO: 2131962 - RNA, 21 nt, Human
agggcaucuccugugcauggg

SEQ ID NO: 2131963 - RNA, 23 nt, Human
agggcaucuccugugcaugggug

SEQ ID NO: 2131964 - RNA, 13 nt, Human
agggcaucuccug

SEQ ID NO: 2131965 - RNA, 14 nt, Human
agggcaucuccugu

SEQ ID NO: 2131966 - RNA, 16 nt, Human
agggcaucuccugugc

SEQ ID NO: 2131967 - RNA, 14 nt, Human
agggcacugguggc

SEQ ID NO: 2131968 - RNA, 16 nt, Human
agggcacugcugcugc

SEQ ID NO: 2131969 - RNA, 16 nt, Human
agggcacugguggccc

SEQ ID NO: 2131970 - RNA, 16 nt, Human
agggcccugagcucgg

SEQ ID NO: 2131971 - RNA, 13 nt, Human
agggcccuaccug

SEQ ID NO: 2131972 - RNA, 12 nt, Human
agggcccugcag

SEQ ID NO: 2131973 - RNA, 13 nt, Human
agggcccugcaga

SEQ ID NO: 2131974 - RNA, 12 nt, Human
agggcucagccu

SEQ ID NO: 2131975 - RNA, 13 nt, Human
agggcucagccug

SEQ ID NO: 2131976 - RNA, 23 nt, Human
agggcucagcggggacagcuccu

SEQ ID NO: 2131977 - RNA, 22 nt, Human
agggcucagcggggacagcucc

SEQ ID NO: 2131978 - RNA, 20 nt, Human
agggcucagcggggacagcu

SEQ ID NO: 2131979 - RNA, 19 nt, Human
agggcucagcggggacagc

SEQ ID NO: 2131980 - RNA, 15 nt, Human
agggcccacuuguau

SEQ ID NO: 2131981 - RNA, 23 nt, Human
agggcccacuuguauccucuggu

SEQ ID NO: 2131982 - RNA, 15 nt, Human
agggccaugaacuuu

SEQ ID NO: 2131983 - RNA, 19 nt, Human
agggccaguccugccuggc

SEQ ID NO: 2131984 - RNA, 21 nt, Human
agggccaguccugccuggcca

SEQ ID NO: 2131985 - RNA, 22 nt, Human
agggccaguccugccuggccag

SEQ ID NO: 2131986 - RNA, 23 nt, Human
agggccaguccugccuggccagg

SEQ ID NO: 2131987 - RNA, 18 nt, Human
agggccacgugccaggcc

SEQ ID NO: 2131988 - RNA, 19 nt, Human
agggccacgugccaggccc

SEQ ID NO: 2131989 - RNA, 20 nt, Human
agggccacgugccaggcccg

SEQ ID NO: 2131990 - RNA, 14 nt, Human
agggccacucugcc

SEQ ID NO: 2131991 - RNA, 15 nt, Human
agggccacucugccu

SEQ ID NO: 2131992 - RNA, 18 nt, Human
agggccacucugccucug

SEQ ID NO: 2131993 - RNA, 20 nt, Human
agggcaccaagcccacaggu

SEQ ID NO: 2131994 - RNA, 14 nt, Human
ugggccccucugac

SEQ ID NO: 2131995 - RNA, 14 nt, Human
ugggccaguguggg

SEQ ID NO: 2131996 - RNA, 11 nt, Human
ugggccccucc

SEQ ID NO: 2131997 - RNA, 13 nt, Human
ugggccccucccu

SEQ ID NO: 2131998 - RNA, 14 nt, Human
ugggccccucccua

SEQ ID NO: 2131999 - RNA, 16 nt, Human
ugggccccucccuacc

SEQ ID NO: 2132000 - RNA, 18 nt, Human
ugggccccucccuaccuc

SEQ ID NO: 2132001 - RNA, 19 nt, Human
ugggccccucccuaccuca

SEQ ID NO: 2132002 - RNA, 20 nt, Human
ugggccccucccuaccucaa

SEQ ID NO: 2132003 - RNA, 16 nt, Human
ugggcacuggauuagu

SEQ ID NO: 2132004 - RNA, 18 nt, Human
ugggcagaaggccaagag

SEQ ID NO: 2132005 - RNA, 17 nt, Human
ugggcagaaggccaaga

SEQ ID NO: 2132006 - RNA, 16 nt, Human
ugggcagaaggccaag

SEQ ID NO: 2132007 - RNA, 15 nt, Human
ugggcagaaggccaa

SEQ ID NO: 2132008 - RNA, 20 nt, Human
ugggaggaucucuugagccu

SEQ ID NO: 2132009 - RNA, 21 nt, Human
ugggaggaucucuugagccug

SEQ ID NO: 2132010 - RNA, 22 nt, Human
ugggaggaucucuugagccugg

SEQ ID NO: 2132011 - RNA, 19 nt, Human
ugggaggccaaggugggag

SEQ ID NO: 2132012 - RNA, 20 nt, Human
ugggaggccaaggugggagg

SEQ ID NO: 2132013 - RNA, 20 nt, Human
ugggaggcagagguugcagu

SEQ ID NO: 2132014 - RNA, 14 nt, Human
ugggaggccaagga

SEQ ID NO: 2132015 - RNA, 16 nt, Human
ugggaggccccacugg

SEQ ID NO: 2132016 - RNA, 19 nt, Human
ugggcacgcugugggcagg

SEQ ID NO: 2132017 - RNA, 21 nt, Human
ugggcacgcugugggcaggug

SEQ ID NO: 2132018 - RNA, 20 nt, Human
ugggaggccccacuggggaa

SEQ ID NO: 2132019 - RNA, 19 nt, Human
ugggcaccuauaauaccag

SEQ ID NO: 2132020 - RNA, 15 nt, Human
ugggcaccuggggag

SEQ ID NO: 2132021 - RNA, 18 nt, Human
ugggaggccccacugggg

SEQ ID NO: 2132022 - RNA, 17 nt, Human
ugggcaccuggggagug

SEQ ID NO: 2132023 - RNA, 19 nt, Human
ugggcaccuggggaguggg

SEQ ID NO: 2132024 - RNA, 20 nt, Human
ugggcaccuggggaguggga

SEQ ID NO: 2132025 - RNA, 16 nt, Human
ugggguccuggggccu

SEQ ID NO: 2132026 - RNA, 21 nt, Human
uggggucucacaguguugccc

SEQ ID NO: 2132027 - RNA, 23 nt, Human
uggggucucacaguguugcccag

SEQ ID NO: 2132028 - RNA, 13 nt, Human
uggggucucccuc

SEQ ID NO: 2132029 - RNA, 19 nt, Human
uggggucucccucuccugc

SEQ ID NO: 2132030 - RNA, 21 nt, Human
uggggucucccucuccugccu

SEQ ID NO: 2132031 - RNA, 22 nt, Human
uggggucucccucuccugccua

SEQ ID NO: 2132032 - RNA, 19 nt, Human
ugggguacccacugcucug

SEQ ID NO: 2132033 - RNA, 18 nt, Human
ugggguacccacugcucu

SEQ ID NO: 2132034 - RNA, 17 nt, Human
ugggguacccacugcuc

SEQ ID NO: 2132035 - RNA, 19 nt, Human
uggggcugcuccuccaggg

SEQ ID NO: 2132036 - RNA, 21 nt, Human
uggggcugcuccuccagggcc

SEQ ID NO: 2132037 - RNA, 14 nt, Human
uggggcugcuccuc

SEQ ID NO: 2132038 - RNA, 15 nt, Human
uggggcugcuccucc

SEQ ID NO: 2132039 - RNA, 16 nt, Human
uggggcugcuccucca

SEQ ID NO: 2132040 - RNA, 17 nt, Human
uggggcugcuccuccag

SEQ ID NO: 2132041 - RNA, 13 nt, Human
uggggugggagag

SEQ ID NO: 2132042 - RNA, 15 nt, Human
uggggugggagaggu

SEQ ID NO: 2132043 - RNA, 14 nt, Human
uggggugaggacca

SEQ ID NO: 2132044 - RNA, 17 nt, Human
uggggugaggaccacuc

SEQ ID NO: 2132045 - RNA, 19 nt, Human
uggggugcccuccacugcc

SEQ ID NO: 2132046 - RNA, 23 nt, Human
aggggaaaccaguguagccuugc

SEQ ID NO: 2132047 - RNA, 20 nt, Human
aggggaaaccaguguagccu

SEQ ID NO: 2132048 - RNA, 21 nt, Human
aggggaaaccaguguagccuu

SEQ ID NO: 2132049 - RNA, 14 nt, Human
aggggaacagacug

SEQ ID NO: 2132050 - RNA, 18 nt, Human
aggggaaaaucagccugc

SEQ ID NO: 2132051 - RNA, 22 nt, Human
aggggaaaaucagccugcucca

SEQ ID NO: 2132052 - RNA, 17 nt, Human
aggggaagcacucgugu

SEQ ID NO: 2132053 - RNA, 13 nt, Human
aggggaauguuug

SEQ ID NO: 2132054 - RNA, 17 nt, Human
aggggaauaauagaaga

SEQ ID NO: 2132055 - RNA, 18 nt, Human
aggggaauaauagaagaa

SEQ ID NO: 2132056 - RNA, 19 nt, Human
aggggaauaauagaagaac

SEQ ID NO: 2132057 - RNA, 11 nt, Human
aggggaauauu

SEQ ID NO: 2132058 - RNA, 16 nt, Human
aggggaauauuuuauu

SEQ ID NO: 2132059 - RNA, 19 nt, Human
aggggaauauuuuauucaa

SEQ ID NO: 2132060 - RNA, 22 nt, Human
aggggaauauuuuauucaaggu

SEQ ID NO: 2132061 - RNA, 23 nt, Human
aggggaauauuuuauucaaggua

SEQ ID NO: 2132062 - RNA, 21 nt, Human
uggggccccuuuuuacucccc

SEQ ID NO: 2132063 - RNA, 22 nt, Human
uggggccccuuuuuacuccccu

SEQ ID NO: 2132064 - RNA, 19 nt, Human
uggggaggggcggcaggag

SEQ ID NO: 2132065 - RNA, 14 nt, Human
agggcucagccugg

SEQ ID NO: 2132066 - RNA, 15 nt, Human
agggcucagccuggu

SEQ ID NO: 2132067 - RNA, 23 nt, Human
agggcucuaaaaaaagccccaaa

SEQ ID NO: 2132068 - RNA, 15 nt, Human
agggcucuaaaaaaa

SEQ ID NO: 2132069 - RNA, 15 nt, Human
agggcucugauauuc

SEQ ID NO: 2132070 - RNA, 22 nt, Human
agggcucugauauuccaugaau

SEQ ID NO: 2132071 - RNA, 20 nt, Human
agggcugacacguccacccc

SEQ ID NO: 2132072 - RNA, 17 nt, Human
agggcucugauauucca

SEQ ID NO: 2132073 - RNA, 21 nt, Human
agggcucugauauuccaugaa

SEQ ID NO: 2132074 - RNA, 22 nt, Human
uggggagccaacagaagcuucc

SEQ ID NO: 2132075 - RNA, 16 nt, Human
uggggagccaacagaa

SEQ ID NO: 2132076 - RNA, 23 nt, Human
uggggagacauaaccacugcuuc

SEQ ID NO: 2132077 - RNA, 20 nt, Human
uggggagaucggggccagag

SEQ ID NO: 2132078 - RNA, 23 nt, Human
uggggagaucggggccagaggca

SEQ ID NO: 2132079 - RNA, 15 nt, Human
uggggagcagagaca

SEQ ID NO: 2132080 - RNA, 17 nt, Human
uggggagcagagacacu

SEQ ID NO: 2132081 - RNA, 12 nt, Human
aggggguuacaa

SEQ ID NO: 2132082 - RNA, 14 nt, Human
aggggguuacaaac

SEQ ID NO: 2132083 - RNA, 19 nt, Human
aggggguuacaaacugcaa

SEQ ID NO: 2132084 - RNA, 20 nt, Human
aggggguuacaaacugcaau

SEQ ID NO: 2132085 - RNA, 16 nt, Human
aggggguuugggggcu

SEQ ID NO: 2132086 - RNA, 22 nt, Human
aggggguuugggggcuugcaag

SEQ ID NO: 2132087 - RNA, 21 nt, Human
aggggucaaguuauuaauuuc

SEQ ID NO: 2132088 - RNA, 15 nt, Human
aggggucaaguuauu

SEQ ID NO: 2132089 - RNA, 16 nt, Human
agggucucacucuguc

SEQ ID NO: 2132090 - RNA, 14 nt, Human
aggguaaggugccu

SEQ ID NO: 2132091 - RNA, 15 nt, Human
agggucucacucugu

SEQ ID NO: 2132092 - RNA, 14 nt, Human
agggucucacucug

SEQ ID NO: 2132093 - RNA, 22 nt, Human
agggguuuucgaagcucagccc

SEQ ID NO: 2132094 - RNA, 21 nt, Human
agggguuuucgaagcucagcc

SEQ ID NO: 2132095 - RNA, 14 nt, Human
aggguaaauuauuc

SEQ ID NO: 2132096 - RNA, 15 nt, Human
aggguaaauuauuca

SEQ ID NO: 2132097 - RNA, 17 nt, Human
aggguaaauuauucagu

SEQ ID NO: 2132098 - RNA, 21 nt, Human
agggguggaggagagccuggu

SEQ ID NO: 2132099 - RNA, 19 nt, Human
agggguugguugaggugga

SEQ ID NO: 2132100 - RNA, 23 nt, Human
agggguugguugagguggaagcc

SEQ ID NO: 2132101 - RNA, 20 nt, Human
agggguugguugagguggaa

SEQ ID NO: 2132102 - RNA, 15 nt, Human
agggguuucuaacac

SEQ ID NO: 2132103 - RNA, 21 nt, Human
aggggaauguuugccucugcc

SEQ ID NO: 2132104 - RNA, 20 nt, Human
aggggaauguuugccucugc

SEQ ID NO: 2132105 - RNA, 19 nt, Human
aggggaauguuugccucug

SEQ ID NO: 2132106 - RNA, 17 nt, Human
agggggcaucuggccuu

SEQ ID NO: 2132107 - RNA, 10 nt, Human
agggggccac

SEQ ID NO: 2132108 - RNA, 15 nt, Human
agggggccaccuccc

SEQ ID NO: 2132109 - RNA, 22 nt, Human
aggggcugcugaccuccacagc

SEQ ID NO: 2132110 - RNA, 19 nt, Human
agggggccaccuccccagg

SEQ ID NO: 2132111 - RNA, 15 nt, Human
agggggccaggugca

SEQ ID NO: 2132112 - RNA, 11 nt, Human
aggggcucugc

SEQ ID NO: 2132113 - RNA, 16 nt, Human
aggggagcucugucug

SEQ ID NO: 2132114 - RNA, 17 nt, Human
aggggagcucugucugu

SEQ ID NO: 2132115 - RNA, 13 nt, Human
aggggcuccugga

SEQ ID NO: 2132116 - RNA, 14 nt, Human
aggggcuccuggaa

SEQ ID NO: 2132117 - RNA, 23 nt, Human
aggggcuccuggaaaggcucagu

SEQ ID NO: 2132118 - RNA, 16 nt, Human
aggguggugaccucug

SEQ ID NO: 2132119 - RNA, 17 nt, Human
agggugggauggaggag

SEQ ID NO: 2132120 - RNA, 18 nt, Human
agggugggauggaggaga

SEQ ID NO: 2132121 - RNA, 13 nt, Human
agggucuggagaa

SEQ ID NO: 2132122 - RNA, 14 nt, Human
agggucuggagaag

SEQ ID NO: 2132123 - RNA, 19 nt, Human
agggucuggagaagcagug

SEQ ID NO: 2132124 - RNA, 15 nt, Human
agggucuggagaagc

SEQ ID NO: 2132125 - RNA, 15 nt, Human
agggucuucccuacc

SEQ ID NO: 2132126 - RNA, 17 nt, Human
agggucuucccuaccuc

SEQ ID NO: 2132127 - RNA, 18 nt, Human
uggguccucacaucuuuc

SEQ ID NO: 2132128 - RNA, 17 nt, Human
ugggucccccacgugac

SEQ ID NO: 2132129 - RNA, 15 nt, Human
ugggugcccacagcc

SEQ ID NO: 2132130 - RNA, 16 nt, Human
ugggugcccacagccc

SEQ ID NO: 2132131 - RNA, 18 nt, Human
ugggugcccacagcccgc

SEQ ID NO: 2132132 - RNA, 23 nt, Human
ugggugcccacagcccgcaugca

SEQ ID NO: 2132133 - RNA, 23 nt, Human
ugggugccccccuugccagacau

SEQ ID NO: 2132134 - RNA, 23 nt, Human
ugggugaccaguugcacuuggcc

SEQ ID NO: 2132135 - RNA, 17 nt, Human
ugggugacagagcaaga

SEQ ID NO: 2132136 - RNA, 14 nt, Human
ugggugacagagca

SEQ ID NO: 2132137 - RNA, 15 nt, Human
ugggugaagggagag

SEQ ID NO: 2132138 - RNA, 20 nt, Human
ugguagaauuggagaguaaa

SEQ ID NO: 2132139 - RNA, 20 nt, Human
ugguagagugugccugaagu

SEQ ID NO: 2132140 - RNA, 22 nt, Human
ugguaagaagccgggaacagac

SEQ ID NO: 2132141 - RNA, 14 nt, Human
ugguaagagaaugu

SEQ ID NO: 2132142 - RNA, 16 nt, Human
ugguaagagaauguua

SEQ ID NO: 2132143 - RNA, 23 nt, Human
ugguaagagaauguuauagugaa

SEQ ID NO: 2132144 - RNA, 13 nt, Human
ugguaaagauauu

SEQ ID NO: 2132145 - RNA, 17 nt, Human
ugguaaagauauuauuc

SEQ ID NO: 2132146 - RNA, 18 nt, Human
ugguaaagauauuauuca

SEQ ID NO: 2132147 - RNA, 22 nt, Human
ugguaaagauauuauucaccau

SEQ ID NO: 2132148 - RNA, 21 nt, Human
ugguaaauuaguauuuauuua

SEQ ID NO: 2132149 - RNA, 17 nt, Human
uggguggcaccagcagc

SEQ ID NO: 2132150 - RNA, 20 nt, Human
uggguggcaccagcagccug

SEQ ID NO: 2132151 - RNA, 21 nt, Human
uggguggcaccagcagccugg

SEQ ID NO: 2132152 - RNA, 13 nt, Human
uuaauaaagacag

SEQ ID NO: 2132153 - RNA, 14 nt, Human
uuaauaaagacagg

SEQ ID NO: 2132154 - RNA, 22 nt, Human
uuaauaaagacgauuugucagu

SEQ ID NO: 2132155 - RNA, 14 nt, Human
uuaaguaucagaaa

SEQ ID NO: 2132156 - RNA, 18 nt, Human
uuaauaacauaacaaaua

SEQ ID NO: 2132157 - RNA, 23 nt, Human
uuaaugaaagacuguacaaagua

SEQ ID NO: 2132158 - RNA, 20 nt, Human
uuaaugaaagacuguacaaa

SEQ ID NO: 2132159 - RNA, 17 nt, Human
uuaaguuggcuucuguu

SEQ ID NO: 2132160 - RNA, 18 nt, Human
uuaaguuggcuucuguuu

SEQ ID NO: 2132161 - RNA, 21 nt, Human
uuaaguuggcuucuguuucua

SEQ ID NO: 2132162 - RNA, 22 nt, Human
uuaaguuggcuucuguuucuag

SEQ ID NO: 2132163 - RNA, 23 nt, Human
uuaaguuggcuucuguuucuagu

SEQ ID NO: 2132164 - RNA, 15 nt, Human
uuaauucauguuucu

SEQ ID NO: 2132165 - RNA, 14 nt, Human
uuaauucauguuuc

SEQ ID NO: 2132166 - RNA, 22 nt, Human
auaaaauucuauuacaguaugu

SEQ ID NO: 2132167 - RNA, 19 nt, Human
uuaauuuuuuugagacaga

SEQ ID NO: 2132168 - RNA, 15 nt, Human
uuacaaaaagacacu

SEQ ID NO: 2132169 - RNA, 13 nt, Human
auaaaauuaagaa

SEQ ID NO: 2132170 - RNA, 16 nt, Human
auaaaauuaagaaugu

SEQ ID NO: 2132171 - RNA, 15 nt, Human
auaaaauuaaagaaa

SEQ ID NO: 2132172 - RNA, 17 nt, Human
auaaaauuaaagaaaau

SEQ ID NO: 2132173 - RNA, 18 nt, Human
auaaaauuaaagaaaaua

SEQ ID NO: 2132174 - RNA, 21 nt, Human
auaaaauuaaagaaaauaaaa

SEQ ID NO: 2132175 - RNA, 13 nt, Human
auaaaauuaugcc

SEQ ID NO: 2132176 - RNA, 13 nt, Human
uuacaaaagaugu

SEQ ID NO: 2132177 - RNA, 14 nt, Human
uuacaaaagaugua

SEQ ID NO: 2132178 - RNA, 18 nt, Human
uuacaaaagauguauccu

SEQ ID NO: 2132179 - RNA, 16 nt, Human
auaaaauuaaagcuga

SEQ ID NO: 2132180 - RNA, 22 nt, Human
uuaaguuacacauuuuucagau

SEQ ID NO: 2132181 - RNA, 18 nt, Human
uuaaguuagggaauggca

SEQ ID NO: 2132182 - RNA, 19 nt, Human
uuaaguguacuaauuaaca

SEQ ID NO: 2132183 - RNA, 21 nt, Human
uuaaguguuguaaauauuuau

SEQ ID NO: 2132184 - RNA, 16 nt, Human
uuaagugcuuuguaau

SEQ ID NO: 2132185 - RNA, 16 nt, Human
uuaagugaugaacauu

SEQ ID NO: 2132186 - RNA, 17 nt, Human
uuaaguacuauguauca

SEQ ID NO: 2132187 - RNA, 13 nt, Human
uuaagaggcaggg

SEQ ID NO: 2132188 - RNA, 16 nt, Human
uuaagaggcagggucu

SEQ ID NO: 2132189 - RNA, 15 nt, Human
uuaagaggcaggguc

SEQ ID NO: 2132190 - RNA, 13 nt, Human
uuaaguaaacuaa

SEQ ID NO: 2132191 - RNA, 19 nt, Human
uuaaguaaacuaaugaguu

SEQ ID NO: 2132192 - RNA, 15 nt, Human
auaaaaguacauguu

SEQ ID NO: 2132193 - RNA, 21 nt, Human
auaaaaguacauguuaaacuu

SEQ ID NO: 2132194 - RNA, 13 nt, Human
auaaaagugauca

SEQ ID NO: 2132195 - RNA, 17 nt, Human
auaaaagugaucaauaa

SEQ ID NO: 2132196 - RNA, 18 nt, Human
auaaaagugaucaauaaa

SEQ ID NO: 2132197 - RNA, 22 nt, Human
auaaaagugaucaauaaaaugu

SEQ ID NO: 2132198 - RNA, 16 nt, Human
auaaaaggucuaugcu

SEQ ID NO: 2132199 - RNA, 18 nt, Human
aguuucagguguuuaguu

SEQ ID NO: 2132200 - RNA, 13 nt, Human
auaaaauaaagua

SEQ ID NO: 2132201 - RNA, 14 nt, Human
auaaaauaaaguau

SEQ ID NO: 2132202 - RNA, 16 nt, Human
auaaaaguugcaaagg

SEQ ID NO: 2132203 - RNA, 16 nt, Human
auaaaauaaaguauau

SEQ ID NO: 2132204 - RNA, 21 nt, Human
auaaaaugguguuuucaugua

SEQ ID NO: 2132205 - RNA, 22 nt, Human
auaaaaugguguuuucauguaa

SEQ ID NO: 2132206 - RNA, 13 nt, Human
auaaaaugugauu

SEQ ID NO: 2132207 - RNA, 20 nt, Human
auaaaaugugauuuuucuga

SEQ ID NO: 2132208 - RNA, 18 nt, Human
auaaaaucauguacauuu

SEQ ID NO: 2132209 - RNA, 20 nt, Human
auaaaaucauguacauuucu

SEQ ID NO: 2132210 - RNA, 19 nt, Human
auaacuagaacugaauuuu

SEQ ID NO: 2132211 - RNA, 13 nt, Human
auaacuacugugu

SEQ ID NO: 2132212 - RNA, 15 nt, Human
auaacuacuguguuc

SEQ ID NO: 2132213 - RNA, 22 nt, Human
auaaauguauucaaauaccaau

SEQ ID NO: 2132214 - RNA, 21 nt, Human
auaacuaacaaccaaagacua

SEQ ID NO: 2132215 - RNA, 17 nt, Human
auaaaugucauuaaaau

SEQ ID NO: 2132216 - RNA, 16 nt, Human
auaacuaaaagguaug

SEQ ID NO: 2132217 - RNA, 18 nt, Human
auaaauguaucuuauuca

SEQ ID NO: 2132218 - RNA, 15 nt, Human
auaaauguaucuuau

SEQ ID NO: 2132219 - RNA, 16 nt, Human
auaaaugaaguuuaua

SEQ ID NO: 2132220 - RNA, 17 nt, Human
auaaaugaaguuuauac

SEQ ID NO: 2132221 - RNA, 18 nt, Human
auaaaugaaguuuauaca

SEQ ID NO: 2132222 - RNA, 21 nt, Human
auaaaugaaguuuauacagua

SEQ ID NO: 2132223 - RNA, 22 nt, Human
auaaaugaaguuuauacaguac

SEQ ID NO: 2132224 - RNA, 11 nt, Human
auaaaugaaug

SEQ ID NO: 2132225 - RNA, 13 nt, Human
uuacagcugccug

SEQ ID NO: 2132226 - RNA, 16 nt, Human
auaacuaguguugcuu

SEQ ID NO: 2132227 - RNA, 17 nt, Human
uuacagccucacuugaa

SEQ ID NO: 2132228 - RNA, 19 nt, Human
auaacuacuguguuccugg

SEQ ID NO: 2132229 - RNA, 16 nt, Human
auaacuacuguguucc

SEQ ID NO: 2132230 - RNA, 18 nt, Human
auaacuacuguguuccug

SEQ ID NO: 2132231 - RNA, 14 nt, Human
uuacagcugccugc

SEQ ID NO: 2132232 - RNA, 12 nt, Human
auaaauaacuuu

SEQ ID NO: 2132233 - RNA, 14 nt, Human
auaaauaacuuuuu

SEQ ID NO: 2132234 - RNA, 18 nt, Human
auaaaguuggugacagau

SEQ ID NO: 2132235 - RNA, 21 nt, Human
auaaauaaucggcccacagcu

SEQ ID NO: 2132236 - RNA, 13 nt, Human
auaaaguguuuuc

SEQ ID NO: 2132237 - RNA, 15 nt, Human
auaaaguguuuucag

SEQ ID NO: 2132238 - RNA, 16 nt, Human
auaaaguguuuucaga

SEQ ID NO: 2132239 - RNA, 17 nt, Human
auaaaguguuuucagag

SEQ ID NO: 2132240 - RNA, 18 nt, Human
auaaaguguuuucagagc

SEQ ID NO: 2132241 - RNA, 14 nt, Human
auaaacacauagau

SEQ ID NO: 2132242 - RNA, 15 nt, Human
auaaacacauagauu

SEQ ID NO: 2132243 - RNA, 20 nt, Human
auaaacacauagauucaccu

SEQ ID NO: 2132244 - RNA, 23 nt, Human
auaaacacauagauucaccugua

SEQ ID NO: 2132245 - RNA, 24 nt, Human
auaaacacauagauucaccuguaa

SEQ ID NO: 2132246 - RNA, 22 nt, Human
auaaaguugaagcuaagauuua

SEQ ID NO: 2132247 - RNA, 21 nt, Human
auaaaguucugaguguuuuua

SEQ ID NO: 2132248 - RNA, 17 nt, Human
auaaaguuggugacaga

SEQ ID NO: 2132249 - RNA, 16 nt, Human
auaaaguuggugacag

SEQ ID NO: 2132250 - RNA, 11 nt, Human
auaaauagcua

SEQ ID NO: 2132251 - RNA, 20 nt, Human
uuacauaagauaaaugugcu

SEQ ID NO: 2132252 - RNA, 14 nt, Human
uuacauacugcugu

SEQ ID NO: 2132253 - RNA, 18 nt, Human
uuacaucaaggcuucaaa

SEQ ID NO: 2132254 - RNA, 16 nt, Human
uuacauaguguaggcu

SEQ ID NO: 2132255 - RNA, 20 nt, Human
uuacauaguguaggcuuuac

SEQ ID NO: 2132256 - RNA, 21 nt, Human
uuacauaguguaggcuuuacu

SEQ ID NO: 2132257 - RNA, 22 nt, Human
uuacauauuugcauauguauga

SEQ ID NO: 2132258 - RNA, 17 nt, Human
uuacauccuuguggcac

SEQ ID NO: 2132259 - RNA, 21 nt, Human
uuacauccuuguggcacauuu

SEQ ID NO: 2132260 - RNA, 14 nt, Human
uuacaucuguuuua

SEQ ID NO: 2132261 - RNA, 18 nt, Human
uuacaucuguuuuaaauu

SEQ ID NO: 2132262 - RNA, 13 nt, Human
uuaccugugaaau

SEQ ID NO: 2132263 - RNA, 21 nt, Human
uuacucaaaguuaaccuaccu

SEQ ID NO: 2132264 - RNA, 19 nt, Human
uuacuauuuuacuucuaga

SEQ ID NO: 2132265 - RNA, 14 nt, Human
uuacuauuaagcag

SEQ ID NO: 2132266 - RNA, 19 nt, Human
uuacuauuaagcaguaaaa

SEQ ID NO: 2132267 - RNA, 23 nt, Human
uuacuauuaagcaguaaaaacug

SEQ ID NO: 2132268 - RNA, 19 nt, Human
uuacugagcuucucuguga

SEQ ID NO: 2132269 - RNA, 13 nt, Human
uuacugaucaugc

SEQ ID NO: 2132270 - RNA, 14 nt, Human
uuacugaucaugca

SEQ ID NO: 2132271 - RNA, 15 nt, Human
uuacugaucaugcau

SEQ ID NO: 2132272 - RNA, 16 nt, Human
uuacugaucaugcauu

SEQ ID NO: 2132273 - RNA, 17 nt, Human
uuacugaucaugcauug

SEQ ID NO: 2132274 - RNA, 18 nt, Human
uuacugaucaugcauugu

SEQ ID NO: 2132275 - RNA, 21 nt, Human
uuacugaucaugcauuguuga

SEQ ID NO: 2132276 - RNA, 12 nt, Human
uuacucagcccu

SEQ ID NO: 2132277 - RNA, 13 nt, Human
uuacugagcuucu

SEQ ID NO: 2132278 - RNA, 12 nt, Human
uuacugaccagc

SEQ ID NO: 2132279 - RNA, 18 nt, Human
uuacugagcuucucugug

SEQ ID NO: 2132280 - RNA, 17 nt, Human
uuacugagcuucucugu

SEQ ID NO: 2132281 - RNA, 16 nt, Human
uuacugagcuucucug

SEQ ID NO: 2132282 - RNA, 14 nt, Human
uuacugagcuucuc

SEQ ID NO: 2132283 - RNA, 14 nt, Human
uuagacaaaucuaa

SEQ ID NO: 2132284 - RNA, 22 nt, Human
uuagacaaaucuaagggaaaaa

SEQ ID NO: 2132285 - RNA, 11 nt, Human
uuagacagagu

SEQ ID NO: 2132286 - RNA, 13 nt, Human
uuagaaccuuucu

SEQ ID NO: 2132287 - RNA, 11 nt, Human
uuagaaauaua

SEQ ID NO: 2132288 - RNA, 17 nt, Human
uuagaaauaaagcaucu

SEQ ID NO: 2132289 - RNA, 22 nt, Human
uuagaaauaaagcaucucauuu

SEQ ID NO: 2132290 - RNA, 19 nt, Human
uuagaaauaaauguaccug

SEQ ID NO: 2132291 - RNA, 13 nt, Human
uuagaaauagaca

SEQ ID NO: 2132292 - RNA, 15 nt, Human
uuagaaauagacagu

SEQ ID NO: 2132293 - RNA, 12 nt, Human
uuagaaauauaa

SEQ ID NO: 2132294 - RNA, 14 nt, Human
uuagaaauauaauu

SEQ ID NO: 2132295 - RNA, 19 nt, Human
uuacugaucaugcauuguu

SEQ ID NO: 2132296 - RNA, 22 nt, Human
uuacugcagccuuugccucccc

SEQ ID NO: 2132297 - RNA, 20 nt, Human
aguucuuaguugcuguaugu

SEQ ID NO: 2132298 - RNA, 21 nt, Human
aguucuuaguugcuguauguc

SEQ ID NO: 2132299 - RNA, 22 nt, Human
aguucuuaaggauugugauauu

SEQ ID NO: 2132300 - RNA, 14 nt, Human
aguucuuagauauc

SEQ ID NO: 2132301 - RNA, 15 nt, Human
aguucuuagauaucu

SEQ ID NO: 2132302 - RNA, 18 nt, Human
aguucuuagauaucuuuu

SEQ ID NO: 2132303 - RNA, 21 nt, Human
aguucuuagauaucuuuuuau

SEQ ID NO: 2132304 - RNA, 20 nt, Human
aguugcacuuggccucugga

SEQ ID NO: 2132305 - RNA, 11 nt, Human
aguugcagaaa

SEQ ID NO: 2132306 - RNA, 16 nt, Human
aguugcagacucaguu

SEQ ID NO: 2132307 - RNA, 17 nt, Human
aguugcagacucaguuu

SEQ ID NO: 2132308 - RNA, 18 nt, Human
aguugcagacucaguuug

SEQ ID NO: 2132309 - RNA, 22 nt, Human
aguugcagacucaguuugucag

SEQ ID NO: 2132310 - RNA, 16 nt, Human
aguugcagauucauuu

SEQ ID NO: 2132311 - RNA, 20 nt, Human
aguugcgacggagagaaaaa

SEQ ID NO: 2132312 - RNA, 21 nt, Human
aguugcgacggagagaaaaaa

SEQ ID NO: 2132313 - RNA, 22 nt, Human
aguugcgacggagagaaaaaag

SEQ ID NO: 2132314 - RNA, 23 nt, Human
aguugcagacucaguuugucaga

SEQ ID NO: 2132315 - RNA, 16 nt, Human
aguuggcuaggacccc

SEQ ID NO: 2132316 - RNA, 16 nt, Human
aguuggccagagagcc

SEQ ID NO: 2132317 - RNA, 21 nt, Human
aguugcuccgccucugcuggc

SEQ ID NO: 2132318 - RNA, 17 nt, Human
aguuggguggaugccug

SEQ ID NO: 2132319 - RNA, 13 nt, Human
aguuggcuucuaa

SEQ ID NO: 2132320 - RNA, 23 nt, Human
aguugggaacuucagauggaccu

SEQ ID NO: 2132321 - RNA, 21 nt, Human
aguuggguggaugccuggugg

SEQ ID NO: 2132322 - RNA, 15 nt, Human
aguuggcuucuguuu

SEQ ID NO: 2132323 - RNA, 19 nt, Human
aguuggcuucuguuucuag

SEQ ID NO: 2132324 - RNA, 22 nt, Human
aguuggcuucuguuucuaguug

SEQ ID NO: 2132325 - RNA, 13 nt, Human
aguugguguguuu

SEQ ID NO: 2132326 - RNA, 23 nt, Human
aguugguguguuuuugggauguc

SEQ ID NO: 2132327 - RNA, 13 nt, Human
aguuggugacaga

SEQ ID NO: 2132328 - RNA, 19 nt, Human
aguuguuuucagacucaga

SEQ ID NO: 2132329 - RNA, 15 nt, Human
uuaaauuucuaccgc

SEQ ID NO: 2132330 - RNA, 20 nt, Human
uuaaauucuuuuuuaaauuu

SEQ ID NO: 2132331 - RNA, 22 nt, Human
uuaaauucuuuuuuaaauuuuc

SEQ ID NO: 2132332 - RNA, 19 nt, Human
uuaacaaacccucguuucu

SEQ ID NO: 2132333 - RNA, 23 nt, Human
uuaacaaacccucguuucugauu

SEQ ID NO: 2132334 - RNA, 16 nt, Human
uuaaauuuuaauuuau

SEQ ID NO: 2132335 - RNA, 15 nt, Human
uuaaauuuuaauuua

SEQ ID NO: 2132336 - RNA, 18 nt, Human
aguuucagagaaguucug

SEQ ID NO: 2132337 - RNA, 12 nt, Human
aguuucagagaa

SEQ ID NO: 2132338 - RNA, 15 nt, Human
aguuucacugacuua

SEQ ID NO: 2132339 - RNA, 17 nt, Human
aguuucaauucagugcu

SEQ ID NO: 2132340 - RNA, 11 nt, Human
uuaacauaaag

SEQ ID NO: 2132341 - RNA, 21 nt, Human
uuaacauaaagguuauuuucu

SEQ ID NO: 2132342 - RNA, 17 nt, Human
uuaacaguuuuccauga

SEQ ID NO: 2132343 - RNA, 19 nt, Human
uuaacaguuuuccaugaaa

SEQ ID NO: 2132344 - RNA, 20 nt, Human
uuaacaguuuuccaugaaaa

SEQ ID NO: 2132345 - RNA, 21 nt, Human
uuaacaguuuuccaugaaaac

SEQ ID NO: 2132346 - RNA, 13 nt, Human
uuaacaguuuucc

SEQ ID NO: 2132347 - RNA, 14 nt, Human
uuaacaguuuucca

SEQ ID NO: 2132348 - RNA, 16 nt, Human
uuaacaguuuuccaug

SEQ ID NO: 2132349 - RNA, 21 nt, Human
uuaaaggggcagaaaaacucu

SEQ ID NO: 2132350 - RNA, 21 nt, Human
uuaaauaaaugucauuaaaau

SEQ ID NO: 2132351 - RNA, 18 nt, Human
uuaaauaaaugucauuaa

SEQ ID NO: 2132352 - RNA, 20 nt, Human
uuaaauaaaugucauuaaaa

SEQ ID NO: 2132353 - RNA, 15 nt, Human
uuaaaauuuauugcu

SEQ ID NO: 2132354 - RNA, 17 nt, Human
uuaaaggcuaccuuauu

SEQ ID NO: 2132355 - RNA, 15 nt, Human
uuaaaggcuguggua

SEQ ID NO: 2132356 - RNA, 16 nt, Human
uuaaaaaauuuuugaa

SEQ ID NO: 2132357 - RNA, 17 nt, Human
uuaaaaaauuuuugaaa

SEQ ID NO: 2132358 - RNA, 13 nt, Human
uuaaaaaaugucc

SEQ ID NO: 2132359 - RNA, 16 nt, Human
uuaaaaaauguccaug

SEQ ID NO: 2132360 - RNA, 15 nt, Human
aguuuauacaguaca

SEQ ID NO: 2132361 - RNA, 14 nt, Human
aguuuauacaguuu

SEQ ID NO: 2132362 - RNA, 22 nt, Human
aguuuauacaguuuuaaagaau

SEQ ID NO: 2132363 - RNA, 20 nt, Human
aguuuagugugauaaaggca

SEQ ID NO: 2132364 - RNA, 17 nt, Human
aguuuaagaccagccug

SEQ ID NO: 2132365 - RNA, 23 nt, Human
uuaaaaagggcagggcaucuccu

SEQ ID NO: 2132366 - RNA, 13 nt, Human
uuaaaauuuauau

SEQ ID NO: 2132367 - RNA, 12 nt, Human
uuaaaauuuauu

SEQ ID NO: 2132368 - RNA, 16 nt, Human
aguucuuaguugcugu

SEQ ID NO: 2132369 - RNA, 12 nt, Human
aguucugggugc

SEQ ID NO: 2132370 - RNA, 19 nt, Human
aguucugggugcucccuac

SEQ ID NO: 2132371 - RNA, 17 nt, Human
aguucugggugcucccu

SEQ ID NO: 2132372 - RNA, 20 nt, Human
uguuuugauguuuguggccu

SEQ ID NO: 2132373 - RNA, 14 nt, Human
aguucugaguguuu

SEQ ID NO: 2132374 - RNA, 15 nt, Human
aguucugaguguuuu

SEQ ID NO: 2132375 - RNA, 15 nt, Human
aguucugcaaauaga

SEQ ID NO: 2132376 - RNA, 16 nt, Human
aguucugcaaauagaa

SEQ ID NO: 2132377 - RNA, 18 nt, Human
aguucugcaaauagaaaa

SEQ ID NO: 2132378 - RNA, 20 nt, Human
aguucugcaaauagaaaaca

SEQ ID NO: 2132379 - RNA, 22 nt, Human
aguucugaguguuuuuacuaca

SEQ ID NO: 2132380 - RNA, 16 nt, Human
uguuugcaauaucgau

SEQ ID NO: 2132381 - RNA, 18 nt, Human
uguuugcaauaucgauca

SEQ ID NO: 2132382 - RNA, 15 nt, Human
uguuugcuuauuguu

SEQ ID NO: 2132383 - RNA, 16 nt, Human
uguuugcuuauuguuc

SEQ ID NO: 2132384 - RNA, 18 nt, Human
uguuugcuuauuguucca

SEQ ID NO: 2132385 - RNA, 15 nt, Human
uguuugcuucaacug

SEQ ID NO: 2132386 - RNA, 20 nt, Human
uguuugcuuauuguuccaag

SEQ ID NO: 2132387 - RNA, 21 nt, Human
uguuugcuuauuguuccaaga

SEQ ID NO: 2132388 - RNA, 23 nt, Human
uguuugcuuauuguuccaagaca

SEQ ID NO: 2132389 - RNA, 12 nt, Human
uguuuucccuga

SEQ ID NO: 2132390 - RNA, 15 nt, Human
uguuuucauaauaaa

SEQ ID NO: 2132391 - RNA, 19 nt, Human
uguuuucauguaaauaaau

SEQ ID NO: 2132392 - RNA, 20 nt, Human
uguuuucauguaaauaaaua

SEQ ID NO: 2132393 - RNA, 16 nt, Human
uguuuucccugaccuc

SEQ ID NO: 2132394 - RNA, 18 nt, Human
uguuucuuccaaagcaca

SEQ ID NO: 2132395 - RNA, 17 nt, Human
uguuucuuccaaagcac

SEQ ID NO: 2132396 - RNA, 19 nt, Human
uguuucuuccaaagcacau

SEQ ID NO: 2132397 - RNA, 22 nt, Human
uguuuauuuauaagcagauuua

SEQ ID NO: 2132398 - RNA, 23 nt, Human
uguuuauuuauaagcagauuuaa

SEQ ID NO: 2132399 - RNA, 15 nt, Human
uguuuauuuaucagu

SEQ ID NO: 2132400 - RNA, 14 nt, Human
uguuugagcucaga

SEQ ID NO: 2132401 - RNA, 23 nt, Human
uguuugagcucagacccccacuc

SEQ ID NO: 2132402 - RNA, 16 nt, Human
uguuugaaaauauuau

SEQ ID NO: 2132403 - RNA, 19 nt, Human
uguuugaaaauauuaucuu

SEQ ID NO: 2132404 - RNA, 22 nt, Human
uguuugaaaauauuaucuuugu

SEQ ID NO: 2132405 - RNA, 13 nt, Human
uguuugagcucag

SEQ ID NO: 2132406 - RNA, 22 nt, Human
uguuugacaaagaaacccaagu

SEQ ID NO: 2132407 - RNA, 21 nt, Human
uguuugacaaagaaacccaag

SEQ ID NO: 2132408 - RNA, 13 nt, Human
uguuuauuaacaa

SEQ ID NO: 2132409 - RNA, 14 nt, Human
uguuuauuaacaaa

SEQ ID NO: 2132410 - RNA, 16 nt, Human
uguuuauuaacaaauu

SEQ ID NO: 2132411 - RNA, 19 nt, Human
uguuuauuaacaaauuaug

SEQ ID NO: 2132412 - RNA, 14 nt, Human
uguuuaucagcagu

SEQ ID NO: 2132413 - RNA, 19 nt, Human
uguuuaucagcaguuguua

SEQ ID NO: 2132414 - RNA, 15 nt, Human
uguuuauacagcuca

SEQ ID NO: 2132415 - RNA, 15 nt, Human
uguuuauauuuucaa

SEQ ID NO: 2132416 - RNA, 14 nt, Human
uguuuaguugcaga

SEQ ID NO: 2132417 - RNA, 14 nt, Human
uguugcucagaagu

SEQ ID NO: 2132418 - RNA, 23 nt, Human
uguugcucagcaaggggcucugc

SEQ ID NO: 2132419 - RNA, 19 nt, Human
uguugcucaaaaaaugagc

SEQ ID NO: 2132420 - RNA, 19 nt, Human
uguugcccaggcaggucuu

SEQ ID NO: 2132421 - RNA, 17 nt, Human
aguggaaguaguggagc

SEQ ID NO: 2132422 - RNA, 20 nt, Human
aguggacaccaggagucccu

SEQ ID NO: 2132423 - RNA, 22 nt, Human
aguggacaccaggagucccugg

SEQ ID NO: 2132424 - RNA, 20 nt, Human
aguggaccaggacaggacca

SEQ ID NO: 2132425 - RNA, 16 nt, Human
aguggaccaggacagg

SEQ ID NO: 2132426 - RNA, 19 nt, Human
aguggaccaggacaggacc

SEQ ID NO: 2132427 - RNA, 13 nt, Human
aguggaccaggac

SEQ ID NO: 2132428 - RNA, 14 nt, Human
aguggaccaggaca

SEQ ID NO: 2132429 - RNA, 15 nt, Human
aguggaccaggacag

SEQ ID NO: 2132430 - RNA, 17 nt, Human
aguggugcgaucugggu

SEQ ID NO: 2132431 - RNA, 22 nt, Human
agugguggcagugcagcaacca

SEQ ID NO: 2132432 - RNA, 14 nt, Human
agugguggcucuga

SEQ ID NO: 2132433 - RNA, 15 nt, Human
agugguggcucugag

SEQ ID NO: 2132434 - RNA, 16 nt, Human
agugguggcucugaga

SEQ ID NO: 2132435 - RNA, 16 nt, Human
agugugcacgaguggg

SEQ ID NO: 2132436 - RNA, 19 nt, Human
agugugcacgagugggaag

SEQ ID NO: 2132437 - RNA, 22 nt, Human
agugugcacgagugggaaggac

SEQ ID NO: 2132438 - RNA, 15 nt, Human
aguguguauuguucc

SEQ ID NO: 2132439 - RNA, 16 nt, Human
aguguguauuguuccc

SEQ ID NO: 2132440 - RNA, 14 nt, Human
aguguaaauccuuu

SEQ ID NO: 2132441 - RNA, 21 nt, Human
aguguaaauccuuuuucuuua

SEQ ID NO: 2132442 - RNA, 13 nt, Human
aguguaacaagaa

SEQ ID NO: 2132443 - RNA, 15 nt, Human
aguguaacaagaaag

SEQ ID NO: 2132444 - RNA, 16 nt, Human
aguguaacaagaaagg

SEQ ID NO: 2132445 - RNA, 17 nt, Human
aguguaacaagaaagga

SEQ ID NO: 2132446 - RNA, 19 nt, Human
aguguaacaagaaaggaga

SEQ ID NO: 2132447 - RNA, 20 nt, Human
aguguaacaagaaaggagag

SEQ ID NO: 2132448 - RNA, 13 nt, Human
aguguaacagcug

SEQ ID NO: 2132449 - RNA, 14 nt, Human
aguguaacagcuga

SEQ ID NO: 2132450 - RNA, 15 nt, Human
aguguaacagcugag

SEQ ID NO: 2132451 - RNA, 16 nt, Human
aguguaacagcugagg

SEQ ID NO: 2132452 - RNA, 17 nt, Human
aguguaacagcugaggu

SEQ ID NO: 2132453 - RNA, 16 nt, Human
aguguacuaauuaaca

SEQ ID NO: 2132454 - RNA, 23 nt, Human
aguguacuaauuaacauauaaua

SEQ ID NO: 2132455 - RNA, 17 nt, Human
agugguguuuuaaagag

SEQ ID NO: 2132456 - RNA, 18 nt, Human
uguuauagguuguuggau

SEQ ID NO: 2132457 - RNA, 20 nt, Human
uguuccacaaguuaaauaaa

SEQ ID NO: 2132458 - RNA, 19 nt, Human
aguguguauuguucccagu

SEQ ID NO: 2132459 - RNA, 21 nt, Human
aguguguauuguucccaguga

SEQ ID NO: 2132460 - RNA, 18 nt, Human
aguguguccaagugugug

SEQ ID NO: 2132461 - RNA, 21 nt, Human
aguguguccaagugugugugc

SEQ ID NO: 2132462 - RNA, 17 nt, Human
agugugugcaaguaugu

SEQ ID NO: 2132463 - RNA, 13 nt, Human
agugugucuccug

SEQ ID NO: 2132464 - RNA, 14 nt, Human
agugugucuccugc

SEQ ID NO: 2132465 - RNA, 15 nt, Human
agugugucuccugca

SEQ ID NO: 2132466 - RNA, 19 nt, Human
agugugucuccugcaugca

SEQ ID NO: 2132467 - RNA, 18 nt, Human
agugugugcacaugugug

SEQ ID NO: 2132468 - RNA, 19 nt, Human
agugugugcacaugugugc

SEQ ID NO: 2132469 - RNA, 20 nt, Human
agugugugcacaugugugcg

SEQ ID NO: 2132470 - RNA, 16 nt, Human
uguucugggacacagu

SEQ ID NO: 2132471 - RNA, 15 nt, Human
uguuccuaaguucuu

SEQ ID NO: 2132472 - RNA, 18 nt, Human
uguuccuaaguucuuaga

SEQ ID NO: 2132473 - RNA, 20 nt, Human
uguuccuaaguucuuagaua

SEQ ID NO: 2132474 - RNA, 22 nt, Human
uguucccagugacacuucagag

SEQ ID NO: 2132475 - RNA, 14 nt, Human
uguuccagcucuuu

SEQ ID NO: 2132476 - RNA, 21 nt, Human
uguucccaccaggcugcucag

SEQ ID NO: 2132477 - RNA, 20 nt, Human
uguucccaccaggcugcuca

SEQ ID NO: 2132478 - RNA, 18 nt, Human
uguugcccaggcaggucu

SEQ ID NO: 2132479 - RNA, 17 nt, Human
uguugcccaggcagguc

SEQ ID NO: 2132480 - RNA, 16 nt, Human
uguugcccaggcaggu

SEQ ID NO: 2132481 - RNA, 15 nt, Human
uguugcccaggcagg

SEQ ID NO: 2132482 - RNA, 12 nt, Human
uguugcccaggc

SEQ ID NO: 2132483 - RNA, 13 nt, Human
uguugcccaggca

SEQ ID NO: 2132484 - RNA, 19 nt, Human
uguugcaaguacugcugua

SEQ ID NO: 2132485 - RNA, 17 nt, Human
uguugcaaguacugcug

SEQ ID NO: 2132486 - RNA, 15 nt, Human
uguucuguuuguuaa

SEQ ID NO: 2132487 - RNA, 16 nt, Human
uguucuguuuguuaaa

SEQ ID NO: 2132488 - RNA, 17 nt, Human
uguucuguuuguuaaaa

SEQ ID NO: 2132489 - RNA, 20 nt, Human
uguucuguuuguuaaaacug

SEQ ID NO: 2132490 - RNA, 21 nt, Human
uguucuguuuguuaaaacugg

SEQ ID NO: 2132491 - RNA, 13 nt, Human
uguucuguuuugu

SEQ ID NO: 2132492 - RNA, 23 nt, Human
agugcugaagcuuauuaaugcua

SEQ ID NO: 2132493 - RNA, 21 nt, Human
agugcugaagcuuauuaaugc

SEQ ID NO: 2132494 - RNA, 22 nt, Human
agugcugaagcuuauuaaugcu

SEQ ID NO: 2132495 - RNA, 12 nt, Human
agugcugaagcu

SEQ ID NO: 2132496 - RNA, 13 nt, Human
agugcugaagcuu

SEQ ID NO: 2132497 - RNA, 15 nt, Human
agugcugaagcuuau

SEQ ID NO: 2132498 - RNA, 16 nt, Human
agugcugaagcuuauu

SEQ ID NO: 2132499 - RNA, 21 nt, Human
agugcugggauuacaggugug

SEQ ID NO: 2132500 - RNA, 12 nt, Human
agugcuguaaaa

SEQ ID NO: 2132501 - RNA, 20 nt, Human
agugcugggauuacaggugu

SEQ ID NO: 2132502 - RNA, 18 nt, Human
uguguaacugcccaaagc

SEQ ID NO: 2132503 - RNA, 21 nt, Human
uguguaacugcccaaagcagc

SEQ ID NO: 2132504 - RNA, 14 nt, Human
agugcuguggccug

SEQ ID NO: 2132505 - RNA, 16 nt, Human
agugcuguggccuggg

SEQ ID NO: 2132506 - RNA, 17 nt, Human
agugcuguggccugggc

SEQ ID NO: 2132507 - RNA, 18 nt, Human
agugcuguggccugggca

SEQ ID NO: 2132508 - RNA, 20 nt, Human
agugcuguggccugggcaag

SEQ ID NO: 2132509 - RNA, 14 nt, Human
uguguguguauguu

SEQ ID NO: 2132510 - RNA, 19 nt, Human
ugugugugggcugugagug

SEQ ID NO: 2132511 - RNA, 14 nt, Human
uguguguguaugcu

SEQ ID NO: 2132512 - RNA, 13 nt, Human
uguguguguaugu

SEQ ID NO: 2132513 - RNA, 16 nt, Human
ugugucuuguguuuuu

SEQ ID NO: 2132514 - RNA, 21 nt, Human
ugugucuugcaauggcagccu

SEQ ID NO: 2132515 - RNA, 14 nt, Human
uguguaagagaaug

SEQ ID NO: 2132516 - RNA, 18 nt, Human
uguguaagagaauguuga

SEQ ID NO: 2132517 - RNA, 19 nt, Human
uguguaagagaauguugaa

SEQ ID NO: 2132518 - RNA, 14 nt, Human
uguguaauaaagug

SEQ ID NO: 2132519 - RNA, 15 nt, Human
uguguaauaaagugu

SEQ ID NO: 2132520 - RNA, 17 nt, Human
uguguaauaaaguguuu

SEQ ID NO: 2132521 - RNA, 18 nt, Human
uguguaauaaaguguuuu

SEQ ID NO: 2132522 - RNA, 19 nt, Human
uguguaauaaaguguuuuc

SEQ ID NO: 2132523 - RNA, 20 nt, Human
uguguaauaaaguguuuuca

SEQ ID NO: 2132524 - RNA, 21 nt, Human
uguguaauaaaguguuuucag

SEQ ID NO: 2132525 - RNA, 22 nt, Human
uguguaauaaaguguuuucaga

SEQ ID NO: 2132526 - RNA, 23 nt, Human
uguguaauaaaguguuuucagag

SEQ ID NO: 2132527 - RNA, 16 nt, Human
uguuaaauauuuacau

SEQ ID NO: 2132528 - RNA, 24 nt, Human
uguuaaaucccauucauaacuuuc

SEQ ID NO: 2132529 - RNA, 12 nt, Human
uguguuaagagu

SEQ ID NO: 2132530 - RNA, 17 nt, Human
uguguucugauuagaaa

SEQ ID NO: 2132531 - RNA, 16 nt, Human
uguguguuugugcuga

SEQ ID NO: 2132532 - RNA, 15 nt, Human
uguguguuugugcug

SEQ ID NO: 2132533 - RNA, 11 nt, Human
uguguuccugg

SEQ ID NO: 2132534 - RNA, 10 nt, Human
uguguuccug

SEQ ID NO: 2132535 - RNA, 15 nt, Human
uguguuccuggcaau

SEQ ID NO: 2132536 - RNA, 16 nt, Human
uguguuccuggcaaua

SEQ ID NO: 2132537 - RNA, 24 nt, Human
uguguuccuggcaauaguguguuc

SEQ ID NO: 2132538 - RNA, 15 nt, Human
uguguucguucuugu

SEQ ID NO: 2132539 - RNA, 17 nt, Human
uguguucguucuuguuc

SEQ ID NO: 2132540 - RNA, 18 nt, Human
uguguucuguuuguuaaa

SEQ ID NO: 2132541 - RNA, 19 nt, Human
uguguucuguuuguuaaaa

SEQ ID NO: 2132542 - RNA, 21 nt, Human
uguguucuguuuguuaaaacu

SEQ ID NO: 2132543 - RNA, 15 nt, Human
ugucuuguguuucuu

SEQ ID NO: 2132544 - RNA, 21 nt, Human
ugugaaagucagaugcccaga

SEQ ID NO: 2132545 - RNA, 14 nt, Human
ugugaaaugaaaac

SEQ ID NO: 2132546 - RNA, 21 nt, Human
ugugaaauaguucaaagccaa

SEQ ID NO: 2132547 - RNA, 22 nt, Human
ugugaaagucagaugcccagag

SEQ ID NO: 2132548 - RNA, 14 nt, Human
ugugaaaugcuggc

SEQ ID NO: 2132549 - RNA, 17 nt, Human
ugucuugguacuugcug

SEQ ID NO: 2132550 - RNA, 15 nt, Human
ugucuuguaagcaaa

SEQ ID NO: 2132551 - RNA, 20 nt, Human
ugucagaccuauuugacaua

SEQ ID NO: 2132552 - RNA, 12 nt, Human
ugucagacuuua

SEQ ID NO: 2132553 - RNA, 13 nt, Human
ugucagacuggcu

SEQ ID NO: 2132554 - RNA, 14 nt, Human
ugucagacuuuaaa

SEQ ID NO: 2132555 - RNA, 23 nt, Human
ugucagacuuuaaagaauaauau

SEQ ID NO: 2132556 - RNA, 11 nt, Human
ugucagagcug

SEQ ID NO: 2132557 - RNA, 20 nt, Human
agucacccggcccccaugca

SEQ ID NO: 2132558 - RNA, 13 nt, Human
agucaccuuuuaa

SEQ ID NO: 2132559 - RNA, 14 nt, Human
agucaccuuuuaaa

SEQ ID NO: 2132560 - RNA, 16 nt, Human
agucaccuuuuaaauc

SEQ ID NO: 2132561 - RNA, 19 nt, Human
agucaccuuuuaaauccug

SEQ ID NO: 2132562 - RNA, 20 nt, Human
agucaccuuuuaaauccugu

SEQ ID NO: 2132563 - RNA, 21 nt, Human
agucaccuuuuaaauccuguu

SEQ ID NO: 2132564 - RNA, 19 nt, Human
ugucagaaaaacaauaaga

SEQ ID NO: 2132565 - RNA, 22 nt, Human
ugucagaaaaacaauaagagcg

SEQ ID NO: 2132566 - RNA, 16 nt, Human
ugucagaaaccaguua

SEQ ID NO: 2132567 - RNA, 21 nt, Human
ugucagaaaccaguuauguga

SEQ ID NO: 2132568 - RNA, 14 nt, Human
ugugacuagugcug

SEQ ID NO: 2132569 - RNA, 15 nt, Human
ugugacuagugcuga

SEQ ID NO: 2132570 - RNA, 16 nt, Human
ugugacuagugcugaa

SEQ ID NO: 2132571 - RNA, 17 nt, Human
ugugacuagugcugaag

SEQ ID NO: 2132572 - RNA, 19 nt, Human
ugugacuagugcugaagcu

SEQ ID NO: 2132573 - RNA, 20 nt, Human
ugugacuagugcugaagcuu

SEQ ID NO: 2132574 - RNA, 22 nt, Human
ugugacuagugcugaagcuuau

SEQ ID NO: 2132575 - RNA, 23 nt, Human
ugugacuagugcugaagcuuauu

SEQ ID NO: 2132576 - RNA, 14 nt, Human
ugugaagagaacca

SEQ ID NO: 2132577 - RNA, 17 nt, Human
ugugacccucaauucau

SEQ ID NO: 2132578 - RNA, 20 nt, Human
ugugaacuuggggaacaagg

SEQ ID NO: 2132579 - RNA, 21 nt, Human
ugugaaccaccacacccagcc

SEQ ID NO: 2132580 - RNA, 20 nt, Human
ugugaaccaccacacccagc

SEQ ID NO: 2132581 - RNA, 19 nt, Human
ugugaaccaccacacccag

SEQ ID NO: 2132582 - RNA, 22 nt, Human
agucuuguauuaaguuguuaau

SEQ ID NO: 2132583 - RNA, 15 nt, Human
agucuuggcucacug

SEQ ID NO: 2132584 - RNA, 16 nt, Human
agucuuguauuaaguu

SEQ ID NO: 2132585 - RNA, 18 nt, Human
agucuuguauuaaguugu

SEQ ID NO: 2132586 - RNA, 22 nt, Human
agucuuuguaaguaaacugccc

SEQ ID NO: 2132587 - RNA, 23 nt, Human
agucuuuguaaguaaacugcccu

SEQ ID NO: 2132588 - RNA, 16 nt, Human
agucuucaagggcugc

SEQ ID NO: 2132589 - RNA, 20 nt, Human
agucuucaagggcugcuuca

SEQ ID NO: 2132590 - RNA, 23 nt, Human
agucuucaagcagauuggagaaa

SEQ ID NO: 2132591 - RNA, 17 nt, Human
agucucuucuccacugg

SEQ ID NO: 2132592 - RNA, 12 nt, Human
agucucuucaga

SEQ ID NO: 2132593 - RNA, 18 nt, Human
agucucuucuccacugga

SEQ ID NO: 2132594 - RNA, 16 nt, Human
agucucuucuccacug

SEQ ID NO: 2132595 - RNA, 15 nt, Human
agucucuucuccacu

SEQ ID NO: 2132596 - RNA, 15 nt, Human
agucuuccaccugga

SEQ ID NO: 2132597 - RNA, 16 nt, Human
agucuuccaccuggaa

SEQ ID NO: 2132598 - RNA, 17 nt, Human
agucuuccaccuggaag

SEQ ID NO: 2132599 - RNA, 16 nt, Human
agucuugcagugauua

SEQ ID NO: 2132600 - RNA, 19 nt, Human
agucuugcagugauuaagg

SEQ ID NO: 2132601 - RNA, 16 nt, Human
agucuugcuguggucu

SEQ ID NO: 2132602 - RNA, 20 nt, Human
agucuugcuguggucucuuu

SEQ ID NO: 2132603 - RNA, 21 nt, Human
agucuugcuguggucucuuug

SEQ ID NO: 2132604 - RNA, 23 nt, Human
agucuugcuguggucucuuugug

SEQ ID NO: 2132605 - RNA, 17 nt, Human
ugugagagcgaggcuga

SEQ ID NO: 2132606 - RNA, 13 nt, Human
agucucaggagca

SEQ ID NO: 2132607 - RNA, 17 nt, Human
agucucaggagcauggg

SEQ ID NO: 2132608 - RNA, 14 nt, Human
agucucuucuccac

SEQ ID NO: 2132609 - RNA, 13 nt, Human
agucucuucucca

SEQ ID NO: 2132610 - RNA, 15 nt, Human
agucucucuuacccu

SEQ ID NO: 2132611 - RNA, 19 nt, Human
agucucucuuacccuucug

SEQ ID NO: 2132612 - RNA, 12 nt, Human
agucucuauuua

SEQ ID NO: 2132613 - RNA, 15 nt, Human
agucucuauuuaaau

SEQ ID NO: 2132614 - RNA, 18 nt, Human
agucucuauuuaaauucu

SEQ ID NO: 2132615 - RNA, 20 nt, Human
agucucuauuuaaauucuuu

SEQ ID NO: 2132616 - RNA, 21 nt, Human
agucucuauuuaaauucuuuu

SEQ ID NO: 2132617 - RNA, 22 nt, Human
agucucuauuuaaauucuuuuu

SEQ ID NO: 2132618 - RNA, 18 nt, Human
uguggccaaguucuuagu

SEQ ID NO: 2132619 - RNA, 24 nt, Human
uguggccaaaggagggucaggaag

SEQ ID NO: 2132620 - RNA, 16 nt, Human
uguggccaaaggaggg

SEQ ID NO: 2132621 - RNA, 17 nt, Human
uguggcaucuuugccuu

SEQ ID NO: 2132622 - RNA, 21 nt, Human
uguggcaucuuugccuugggc

SEQ ID NO: 2132623 - RNA, 15 nt, Human
agugagucgaggaca

SEQ ID NO: 2132624 - RNA, 20 nt, Human
agugagggcuugucauuacc

SEQ ID NO: 2132625 - RNA, 13 nt, Human
agugagggucaga

SEQ ID NO: 2132626 - RNA, 15 nt, Human
agugagggucagaga

SEQ ID NO: 2132627 - RNA, 16 nt, Human
agugagggucagagag

SEQ ID NO: 2132628 - RNA, 22 nt, Human
agugagggucagagaggaguca

SEQ ID NO: 2132629 - RNA, 23 nt, Human
agugagggucagagaggagucag

SEQ ID NO: 2132630 - RNA, 16 nt, Human
agugagguccuggggg

SEQ ID NO: 2132631 - RNA, 17 nt, Human
agugagguccugggggc

SEQ ID NO: 2132632 - RNA, 18 nt, Human
agugagguccugggggcc

SEQ ID NO: 2132633 - RNA, 21 nt, Human
uguggagguacacucuuauag

SEQ ID NO: 2132634 - RNA, 16 nt, Human
uguggcagcugucuca

SEQ ID NO: 2132635 - RNA, 18 nt, Human
uguggcaguaaagagaaa

SEQ ID NO: 2132636 - RNA, 19 nt, Human
uguggcaguaaagagaaac

SEQ ID NO: 2132637 - RNA, 20 nt, Human
uguggcaguaaagagaaacu

SEQ ID NO: 2132638 - RNA, 21 nt, Human
uguggcaguaaagagaaacuu

SEQ ID NO: 2132639 - RNA, 22 nt, Human
uguggcaguaaagagaaacuuu

SEQ ID NO: 2132640 - RNA, 12 nt, Human
ugugcccaguua

SEQ ID NO: 2132641 - RNA, 21 nt, Human
ugugcccaguuaaucuugcuu

SEQ ID NO: 2132642 - RNA, 12 nt, Human
ugugcccagcuc

SEQ ID NO: 2132643 - RNA, 13 nt, Human
ugugcccagcuca

SEQ ID NO: 2132644 - RNA, 14 nt, Human
ugugcccagcucag

SEQ ID NO: 2132645 - RNA, 15 nt, Human
ugugcccagcucagu

SEQ ID NO: 2132646 - RNA, 16 nt, Human
ugugcccagcucaguc

SEQ ID NO: 2132647 - RNA, 22 nt, Human
ugugcccaguuaaucuugcuuu

SEQ ID NO: 2132648 - RNA, 14 nt, Human
ugugccccaugccu

SEQ ID NO: 2132649 - RNA, 16 nt, Human
ugugcccccagacgca

SEQ ID NO: 2132650 - RNA, 22 nt, Human
ugugcccccagacgcacguggg

SEQ ID NO: 2132651 - RNA, 23 nt, Human
ugugccccaugccuguccagccu

SEQ ID NO: 2132652 - RNA, 15 nt, Human
ugugccccaugccug

SEQ ID NO: 2132653 - RNA, 19 nt, Human
ugugccccaugccugucca

SEQ ID NO: 2132654 - RNA, 21 nt, Human
ugugcccccauguaagcaccc

SEQ ID NO: 2132655 - RNA, 20 nt, Human
ugugccagguuuuuggucug

SEQ ID NO: 2132656 - RNA, 16 nt, Human
ugugccaugugccagg

SEQ ID NO: 2132657 - RNA, 12 nt, Human
ugugccaugugc

SEQ ID NO: 2132658 - RNA, 22 nt, Human
ugugcauuuuugugaaaugaaa

SEQ ID NO: 2132659 - RNA, 21 nt, Human
ugugcauuuuugugaaaugaa

SEQ ID NO: 2132660 - RNA, 16 nt, Human
ugugccacccaccagg

SEQ ID NO: 2132661 - RNA, 20 nt, Human
ugugccacccaccagggcga

SEQ ID NO: 2132662 - RNA, 13 nt, Human
ugugaucugggaa

SEQ ID NO: 2132663 - RNA, 18 nt, Human
ugugaucccaagugccag

SEQ ID NO: 2132664 - RNA, 23 nt, Human
ugugaucccaagugccagucuug

SEQ ID NO: 2132665 - RNA, 18 nt, Human
ugugaucuugcucuaucu

SEQ ID NO: 2132666 - RNA, 14 nt, Human
ugugauugugccua

SEQ ID NO: 2132667 - RNA, 20 nt, Human
auauuuguauuuaaaugaaa

SEQ ID NO: 2132668 - RNA, 12 nt, Human
auauuuguagaa

SEQ ID NO: 2132669 - RNA, 20 nt, Human
auauuugucgauauuuccau

SEQ ID NO: 2132670 - RNA, 13 nt, Human
auauuuguuaaau

SEQ ID NO: 2132671 - RNA, 21 nt, Human
auauuuguuaaauauuuacau

SEQ ID NO: 2132672 - RNA, 22 nt, Human
auauuuguuaaauauuuacaua

SEQ ID NO: 2132673 - RNA, 16 nt, Human
auauugcauaugcaua

SEQ ID NO: 2132674 - RNA, 12 nt, Human
auauugcaauga

SEQ ID NO: 2132675 - RNA, 20 nt, Human
auauuguuuucaguguacau

SEQ ID NO: 2132676 - RNA, 13 nt, Human
auauuguuccuaa

SEQ ID NO: 2132677 - RNA, 14 nt, Human
auauuguuccuaag

SEQ ID NO: 2132678 - RNA, 18 nt, Human
auauuguuccuaaguucu

SEQ ID NO: 2132679 - RNA, 19 nt, Human
auauuguuccuaaguucuu

SEQ ID NO: 2132680 - RNA, 20 nt, Human
auauuguuauuauauaauua

SEQ ID NO: 2132681 - RNA, 15 nt, Human
auauuuaaaagaaag

SEQ ID NO: 2132682 - RNA, 15 nt, Human
auauuucgaaagcug

SEQ ID NO: 2132683 - RNA, 13 nt, Human
auauugaugugug

SEQ ID NO: 2132684 - RNA, 13 nt, Human
auauucuuucaau

SEQ ID NO: 2132685 - RNA, 15 nt, Human
auauucuuucaauaa

SEQ ID NO: 2132686 - RNA, 23 nt, Human
auauucuuauguaugugaaaguu

SEQ ID NO: 2132687 - RNA, 12 nt, Human
auauucuuucaa

SEQ ID NO: 2132688 - RNA, 16 nt, Human
auauucuguuggccag

SEQ ID NO: 2132689 - RNA, 13 nt, Human
auauucucuuugg

SEQ ID NO: 2132690 - RNA, 22 nt, Human
auauucucuuugguguacaaaa

SEQ ID NO: 2132691 - RNA, 17 nt, Human
auauucuggcugauaaa

SEQ ID NO: 2132692 - RNA, 14 nt, Human
auauucuuauguau

SEQ ID NO: 2132693 - RNA, 21 nt, Human
auauuccugcagccuggaggc

SEQ ID NO: 2132694 - RNA, 22 nt, Human
auauucucacgggcaguagcug

SEQ ID NO: 2132695 - RNA, 15 nt, Human
auauuccugaaugaa

SEQ ID NO: 2132696 - RNA, 17 nt, Human
auauuccugaaugaaau

SEQ ID NO: 2132697 - RNA, 18 nt, Human
auauuccugaaugaaaua

SEQ ID NO: 2132698 - RNA, 22 nt, Human
auauuccugaaugaaauaucag

SEQ ID NO: 2132699 - RNA, 23 nt, Human
auauuccugaaugaaauaucaga

SEQ ID NO: 2132700 - RNA, 15 nt, Human
auauuccaugaaugu

SEQ ID NO: 2132701 - RNA, 16 nt, Human
auauuccaugaaugua

SEQ ID NO: 2132702 - RNA, 19 nt, Human
auauuccaugaauguauca

SEQ ID NO: 2132703 - RNA, 18 nt, Human
auauuccccuaucucuag

SEQ ID NO: 2132704 - RNA, 13 nt, Human
auauucauuucaa

SEQ ID NO: 2132705 - RNA, 13 nt, Human
auauucauuugga

SEQ ID NO: 2132706 - RNA, 15 nt, Human
auauucauuuggaaa

SEQ ID NO: 2132707 - RNA, 12 nt, Human
auauuccauagu

SEQ ID NO: 2132708 - RNA, 16 nt, Human
auauuccauaguauau

SEQ ID NO: 2132709 - RNA, 17 nt, Human
auauuccauaguauauu

SEQ ID NO: 2132710 - RNA, 20 nt, Human
auauuccauaguauauuaaa

SEQ ID NO: 2132711 - RNA, 22 nt, Human
auauuccauaguauauuaaaaa

SEQ ID NO: 2132712 - RNA, 23 nt, Human
auauuccauaguauauuaaaaau

SEQ ID NO: 2132713 - RNA, 18 nt, Human
auauuccauauauuagca

SEQ ID NO: 2132714 - RNA, 23 nt, Human
auauucauuguauaaaaauagaa

SEQ ID NO: 2132715 - RNA, 24 nt, Human
auauuaagaaagacuaucuaaaug

SEQ ID NO: 2132716 - RNA, 22 nt, Human
auauuaaggaagacaaugugaa

SEQ ID NO: 2132717 - RNA, 23 nt, Human
auauuaaauauguuagcaaagag

SEQ ID NO: 2132718 - RNA, 12 nt, Human
uucauguuucuu

SEQ ID NO: 2132719 - RNA, 13 nt, Human
uucauguuucuua

SEQ ID NO: 2132720 - RNA, 18 nt, Human
auauguuuuaagaggcag

SEQ ID NO: 2132721 - RNA, 17 nt, Human
auauguuuuaaauauag

SEQ ID NO: 2132722 - RNA, 22 nt, Human
auauguuuuaaauauagaauuu

SEQ ID NO: 2132723 - RNA, 14 nt, Human
uucauguaaauaaa

SEQ ID NO: 2132724 - RNA, 20 nt, Human
auauguuuuaagaggcaggg

SEQ ID NO: 2132725 - RNA, 14 nt, Human
aucacguaaagcua

SEQ ID NO: 2132726 - RNA, 21 nt, Human
aucacguaaagcuagaaauga

SEQ ID NO: 2132727 - RNA, 13 nt, Human
aucacuaacauua

SEQ ID NO: 2132728 - RNA, 14 nt, Human
aucacuaacauuau

SEQ ID NO: 2132729 - RNA, 16 nt, Human
aucacuaacauuauau

SEQ ID NO: 2132730 - RNA, 18 nt, Human
aucacuaacauuauauug

SEQ ID NO: 2132731 - RNA, 21 nt, Human
aucacuaacauuauauugcaa

SEQ ID NO: 2132732 - RNA, 22 nt, Human
aucacggcucacugcagccuca

SEQ ID NO: 2132733 - RNA, 20 nt, Human
uuccuuuuaaaacacuucca

SEQ ID NO: 2132734 - RNA, 22 nt, Human
uuccuuuuaaaacacuuccaua

SEQ ID NO: 2132735 - RNA, 21 nt, Human
uuccuuuuaaaacacuuccau

SEQ ID NO: 2132736 - RNA, 20 nt, Human
uuccuuuuagccuaguucau

SEQ ID NO: 2132737 - RNA, 21 nt, Human
uuccuuuguuuuuuuuuccug

SEQ ID NO: 2132738 - RNA, 22 nt, Human
aucacuggcaaugaaaaauucu

SEQ ID NO: 2132739 - RNA, 23 nt, Human
aucacuggcaaugaaaaauucuc

SEQ ID NO: 2132740 - RNA, 18 nt, Human
aucacuggcaaugaaaaa

SEQ ID NO: 2132741 - RNA, 18 nt, Human
aucaagaugucagacugg

SEQ ID NO: 2132742 - RNA, 13 nt, Human
aucaaucaaaccc

SEQ ID NO: 2132743 - RNA, 15 nt, Human
aucaagaaaguguug

SEQ ID NO: 2132744 - RNA, 15 nt, Human
aucaagauaaaggac

SEQ ID NO: 2132745 - RNA, 16 nt, Human
aucaagauaaaggaca

SEQ ID NO: 2132746 - RNA, 17 nt, Human
aucaagauaaaggacag

SEQ ID NO: 2132747 - RNA, 18 nt, Human
aucaagauaaaggacagu

SEQ ID NO: 2132748 - RNA, 22 nt, Human
aucaagaugagagaacuggagg

SEQ ID NO: 2132749 - RNA, 20 nt, Human
uuccuguucuuaagacguga

SEQ ID NO: 2132750 - RNA, 14 nt, Human
uuccuguucagcau

SEQ ID NO: 2132751 - RNA, 15 nt, Human
uuccuguucagcauu

SEQ ID NO: 2132752 - RNA, 17 nt, Human
uuccuguucagcauucu

SEQ ID NO: 2132753 - RNA, 21 nt, Human
uuccuguucagcauucuuagc

SEQ ID NO: 2132754 - RNA, 15 nt, Human
uuccuucagcuucca

SEQ ID NO: 2132755 - RNA, 20 nt, Human
auauuuucaacgcagcccug

SEQ ID NO: 2132756 - RNA, 19 nt, Human
auauuuucaacgcagcccu

SEQ ID NO: 2132757 - RNA, 22 nt, Human
uuccuucagugcaucugggaag

SEQ ID NO: 2132758 - RNA, 16 nt, Human
auauuuucaauucaaa

SEQ ID NO: 2132759 - RNA, 21 nt, Human
auauuuucaauucaaaaaugu

SEQ ID NO: 2132760 - RNA, 23 nt, Human
auauuuucaauucaaaaauguac

SEQ ID NO: 2132761 - RNA, 11 nt, Human
uuccucuuucc

SEQ ID NO: 2132762 - RNA, 15 nt, Human
uuccuggggugcccu

SEQ ID NO: 2132763 - RNA, 20 nt, Human
uuccuggggugcccuccacu

SEQ ID NO: 2132764 - RNA, 21 nt, Human
uuccuggggugcccuccacug

SEQ ID NO: 2132765 - RNA, 22 nt, Human
uuccuggggugcccuccacugc

SEQ ID NO: 2132766 - RNA, 14 nt, Human
auauuuuauaauuu

SEQ ID NO: 2132767 - RNA, 15 nt, Human
auauuuuaugugaga

SEQ ID NO: 2132768 - RNA, 12 nt, Human
auauuuuauuca

SEQ ID NO: 2132769 - RNA, 16 nt, Human
auauuuuauucaaggu

SEQ ID NO: 2132770 - RNA, 19 nt, Human
auauuuuauucaagguaaa

SEQ ID NO: 2132771 - RNA, 20 nt, Human
auauuuuaugugagagaaag

SEQ ID NO: 2132772 - RNA, 19 nt, Human
auauuuucaaaguacauaa

SEQ ID NO: 2132773 - RNA, 17 nt, Human
auauuuucaaauuguau

SEQ ID NO: 2132774 - RNA, 24 nt, Human
auauuuucaaauuguaucuagugc

SEQ ID NO: 2132775 - RNA, 14 nt, Human
uuccuaaguucuua

SEQ ID NO: 2132776 - RNA, 17 nt, Human
uuccuaaguucuuagau

SEQ ID NO: 2132777 - RNA, 18 nt, Human
uuccuaaguucuuagaua

SEQ ID NO: 2132778 - RNA, 14 nt, Human
uuccucgcccuggg

SEQ ID NO: 2132779 - RNA, 19 nt, Human
uuccucuagugcccuccac

SEQ ID NO: 2132780 - RNA, 23 nt, Human
uuccucuagugcccuccacagcc

SEQ ID NO: 2132781 - RNA, 13 nt, Human
uuccucuucccca

SEQ ID NO: 2132782 - RNA, 12 nt, Human
uuccucugggaa

SEQ ID NO: 2132783 - RNA, 21 nt, Human
uucuaggucaaggccuguccc

SEQ ID NO: 2132784 - RNA, 15 nt, Human
uucuagggaaaugaa

SEQ ID NO: 2132785 - RNA, 17 nt, Human
uucuaguugaggaguuu

SEQ ID NO: 2132786 - RNA, 20 nt, Human
uucuaguugaggaguuuccu

SEQ ID NO: 2132787 - RNA, 13 nt, Human
uucuaggccuggg

SEQ ID NO: 2132788 - RNA, 17 nt, Human
uuccuuuuguguacagu

SEQ ID NO: 2132789 - RNA, 15 nt, Human
uuccuuuuguguaca

SEQ ID NO: 2132790 - RNA, 14 nt, Human
uuccuuuucuuguu

SEQ ID NO: 2132791 - RNA, 22 nt, Human
uuccuuuucuuguuuaucagca

SEQ ID NO: 2132792 - RNA, 18 nt, Human
uuccuuuucuaacucucc

SEQ ID NO: 2132793 - RNA, 18 nt, Human
uucucaagccgcauccca

SEQ ID NO: 2132794 - RNA, 23 nt, Human
uucucaagccgcaucccagacuu

SEQ ID NO: 2132795 - RNA, 15 nt, Human
uucucaagcccugca

SEQ ID NO: 2132796 - RNA, 14 nt, Human
uucucaagcccugc

SEQ ID NO: 2132797 - RNA, 13 nt, Human
uucuaguuuuguc

SEQ ID NO: 2132798 - RNA, 23 nt, Human
uucucagaaucucaaauaacuaa

SEQ ID NO: 2132799 - RNA, 22 nt, Human
uucucagucaguaauugccaaa

SEQ ID NO: 2132800 - RNA, 19 nt, Human
uucucagaaucucaaauaa

SEQ ID NO: 2132801 - RNA, 22 nt, Human
uucucagaaucucaaauaacua

SEQ ID NO: 2132802 - RNA, 14 nt, Human
aucagaaaguaauu

SEQ ID NO: 2132803 - RNA, 22 nt, Human
aucagaaaguaauuucuucuca

SEQ ID NO: 2132804 - RNA, 13 nt, Human
uucucauagcauu

SEQ ID NO: 2132805 - RNA, 14 nt, Human
uucucauagcauua

SEQ ID NO: 2132806 - RNA, 17 nt, Human
uucucauagcauuaacu

SEQ ID NO: 2132807 - RNA, 18 nt, Human
uucucauagcauuaacua

SEQ ID NO: 2132808 - RNA, 21 nt, Human
uucucauagcauuaacuaauc

SEQ ID NO: 2132809 - RNA, 22 nt, Human
uucucauagcauuaacuaaucu

SEQ ID NO: 2132810 - RNA, 16 nt, Human
uucucauagccccggu

SEQ ID NO: 2132811 - RNA, 17 nt, Human
uucucauagccccggug

SEQ ID NO: 2132812 - RNA, 11 nt, Human
aucagaaaugu

SEQ ID NO: 2132813 - RNA, 23 nt, Human
aucagaaaugucuggagaauaau

SEQ ID NO: 2132814 - RNA, 13 nt, Human
aucagaacagcag

SEQ ID NO: 2132815 - RNA, 14 nt, Human
aucagaacagcaga

SEQ ID NO: 2132816 - RNA, 14 nt, Human
aucagaggacaccu

SEQ ID NO: 2132817 - RNA, 17 nt, Human
aucagaagccuauugua

SEQ ID NO: 2132818 - RNA, 18 nt, Human
aucagaagccuauuguaa

SEQ ID NO: 2132819 - RNA, 23 nt, Human
aucagaagccuauuguaaauaca

SEQ ID NO: 2132820 - RNA, 12 nt, Human
aucagaaggaga

SEQ ID NO: 2132821 - RNA, 22 nt, Human
aucagaucauuucaaaacucau

SEQ ID NO: 2132822 - RNA, 23 nt, Human
aucagaugacuagaaagugaaua

SEQ ID NO: 2132823 - RNA, 18 nt, Human
aucagaucauuucaaaac

SEQ ID NO: 2132824 - RNA, 19 nt, Human
aucagugguuauuuaggga

SEQ ID NO: 2132825 - RNA, 22 nt, Human
aucaguggcauggcuccagucu

SEQ ID NO: 2132826 - RNA, 14 nt, Human
aucaguccuuugau

SEQ ID NO: 2132827 - RNA, 21 nt, Human
aucaguccucuuucaaaggua

SEQ ID NO: 2132828 - RNA, 12 nt, Human
aucauucagcaa

SEQ ID NO: 2132829 - RNA, 13 nt, Human
aucauucagcaac

SEQ ID NO: 2132830 - RNA, 23 nt, Human
aucauaguggcuuaaaacaacac

SEQ ID NO: 2132831 - RNA, 17 nt, Human
aucauagauuucugauu

SEQ ID NO: 2132832 - RNA, 18 nt, Human
aucauagauuucugauuu

SEQ ID NO: 2132833 - RNA, 19 nt, Human
aucauagauuucugauuuu

SEQ ID NO: 2132834 - RNA, 20 nt, Human
aucauagauuucugauuuua

SEQ ID NO: 2132835 - RNA, 23 nt, Human
aucauagauuucugauuuuaugu

SEQ ID NO: 2132836 - RNA, 12 nt, Human
aucauaguacag

SEQ ID NO: 2132837 - RNA, 17 nt, Human
aucauguuaugauaaaa

SEQ ID NO: 2132838 - RNA, 18 nt, Human
aucauguuaugauaaaaa

SEQ ID NO: 2132839 - RNA, 20 nt, Human
aucauguuaugauaaaaaau

SEQ ID NO: 2132840 - RNA, 22 nt, Human
aucauguuaugauaaaaaauuu

SEQ ID NO: 2132841 - RNA, 17 nt, Human
aucauuugaacaacuag

SEQ ID NO: 2132842 - RNA, 15 nt, Human
aucauuucuugggcc

SEQ ID NO: 2132843 - RNA, 18 nt, Human
aucauuucuugggcccuc

SEQ ID NO: 2132844 - RNA, 19 nt, Human
aucauuucuugggcccucc

SEQ ID NO: 2132845 - RNA, 22 nt, Human
aucauuucuugggcccuccuga

SEQ ID NO: 2132846 - RNA, 16 nt, Human
auccagguucagcuug

SEQ ID NO: 2132847 - RNA, 15 nt, Human
auccagguucagcuu

SEQ ID NO: 2132848 - RNA, 12 nt, Human
auccauguacug

SEQ ID NO: 2132849 - RNA, 14 nt, Human
auccauguacugua

SEQ ID NO: 2132850 - RNA, 18 nt, Human
auccauguacuguaguuu

SEQ ID NO: 2132851 - RNA, 22 nt, Human
auccauguacuguaguuuuucu

SEQ ID NO: 2132852 - RNA, 20 nt, Human
auccauguacuguaguuuuu

SEQ ID NO: 2132853 - RNA, 18 nt, Human
auccauguuaguuuuuac

SEQ ID NO: 2132854 - RNA, 22 nt, Human
auccauuccucagggacagaga

SEQ ID NO: 2132855 - RNA, 14 nt, Human
auccauuccucagg

SEQ ID NO: 2132856 - RNA, 18 nt, Human
auccauuccucagggaca

SEQ ID NO: 2132857 - RNA, 19 nt, Human
auccauguuaguuuuuacu

SEQ ID NO: 2132858 - RNA, 20 nt, Human
auccauguuaguuuuuacuu

SEQ ID NO: 2132859 - RNA, 12 nt, Human
aucccuguucau

SEQ ID NO: 2132860 - RNA, 13 nt, Human
aucccuguucauu

SEQ ID NO: 2132861 - RNA, 14 nt, Human
aucccuguucauug

SEQ ID NO: 2132862 - RNA, 16 nt, Human
aucccuguucauugua

SEQ ID NO: 2132863 - RNA, 17 nt, Human
aucccuguucauuguaa

SEQ ID NO: 2132864 - RNA, 16 nt, Human
aucccugggcauugcu

SEQ ID NO: 2132865 - RNA, 17 nt, Human
aucccugggcauugcuu

SEQ ID NO: 2132866 - RNA, 18 nt, Human
aucccugggcauugcuuu

SEQ ID NO: 2132867 - RNA, 12 nt, Human
aucccaggggac

SEQ ID NO: 2132868 - RNA, 19 nt, Human
aucccaggggaccacaccu

SEQ ID NO: 2132869 - RNA, 20 nt, Human
aucccaggggaccacaccuc

SEQ ID NO: 2132870 - RNA, 23 nt, Human
aucccaggggaccacaccucccu

SEQ ID NO: 2132871 - RNA, 20 nt, Human
uucucugugaacgauuuaga

SEQ ID NO: 2132872 - RNA, 12 nt, Human
uucucugugaac

SEQ ID NO: 2132873 - RNA, 19 nt, Human
uucugaaaauuaacacugc

SEQ ID NO: 2132874 - RNA, 16 nt, Human
uucugaaaauuccaga

SEQ ID NO: 2132875 - RNA, 13 nt, Human
uucugaaacuaau

SEQ ID NO: 2132876 - RNA, 17 nt, Human
uucugaaacuaaugaaa

SEQ ID NO: 2132877 - RNA, 18 nt, Human
uucugaaacuaaugaaag

SEQ ID NO: 2132878 - RNA, 15 nt, Human
uucucuuaauuuaau

SEQ ID NO: 2132879 - RNA, 14 nt, Human
uucugccacauaaa

SEQ ID NO: 2132880 - RNA, 15 nt, Human
uucugccacauaaaa

SEQ ID NO: 2132881 - RNA, 14 nt, Human
uucugaaauauuuu

SEQ ID NO: 2132882 - RNA, 22 nt, Human
uucugggacacaguucaauucu

SEQ ID NO: 2132883 - RNA, 11 nt, Human
uucugggacac

SEQ ID NO: 2132884 - RNA, 10 nt, Human
uucugggaca

SEQ ID NO: 2132885 - RNA, 16 nt, Human
uucugccgugugcccu

SEQ ID NO: 2132886 - RNA, 17 nt, Human
uucugccggcccugggg

SEQ ID NO: 2132887 - RNA, 18 nt, Human
uucugccggcccuggggc

SEQ ID NO: 2132888 - RNA, 17 nt, Human
uucuguaccaaaguguu

SEQ ID NO: 2132889 - RNA, 20 nt, Human
uucugcaucaucuguagaua

SEQ ID NO: 2132890 - RNA, 17 nt, Human
uucuggguucugggugg

SEQ ID NO: 2132891 - RNA, 18 nt, Human
uucugggugguugcccuu

SEQ ID NO: 2132892 - RNA, 16 nt, Human
uucugggaggaagcag

SEQ ID NO: 2132893 - RNA, 22 nt, Human
uucugggagacacccaaagggu

SEQ ID NO: 2132894 - RNA, 22 nt, Human
uucugguaggaauagcauguca

SEQ ID NO: 2132895 - RNA, 14 nt, Human
uucuggucucucua

SEQ ID NO: 2132896 - RNA, 20 nt, Human
uucugguaggaauagcaugu

SEQ ID NO: 2132897 - RNA, 19 nt, Human
uucugguagauagaaauaa

SEQ ID NO: 2132898 - RNA, 17 nt, Human
uucugguagauagaaau

SEQ ID NO: 2132899 - RNA, 18 nt, Human
uucugguagauagaaaua

SEQ ID NO: 2132900 - RNA, 20 nt, Human
auagcgucauaacuagaacu

SEQ ID NO: 2132901 - RNA, 18 nt, Human
auagcgucauaacuagaa

SEQ ID NO: 2132902 - RNA, 16 nt, Human
auagcgaggcucuaac

SEQ ID NO: 2132903 - RNA, 13 nt, Human
auagcguuggaau

SEQ ID NO: 2132904 - RNA, 20 nt, Human
auagcguuggaauuaaaaca

SEQ ID NO: 2132905 - RNA, 21 nt, Human
auagcguuggaauuaaaacaa

SEQ ID NO: 2132906 - RNA, 22 nt, Human
auagcguuggaauuaaaacaau

SEQ ID NO: 2132907 - RNA, 12 nt, Human
auaagagauuug

SEQ ID NO: 2132908 - RNA, 16 nt, Human
auaacuucaagcaaac

SEQ ID NO: 2132909 - RNA, 16 nt, Human
auaagaguuggcuggu

SEQ ID NO: 2132910 - RNA, 18 nt, Human
auagccugccucuucucu

SEQ ID NO: 2132911 - RNA, 13 nt, Human
auaagauaaaugu

SEQ ID NO: 2132912 - RNA, 17 nt, Human
auaagauaaaugugcug

SEQ ID NO: 2132913 - RNA, 16 nt, Human
auagcuacaggaagca

SEQ ID NO: 2132914 - RNA, 19 nt, Human
auagcucaggugucccugc

SEQ ID NO: 2132915 - RNA, 14 nt, Human
auagcuauauccau

SEQ ID NO: 2132916 - RNA, 16 nt, Human
auagcuauauccaugu

SEQ ID NO: 2132917 - RNA, 17 nt, Human
auagcuauauccaugua

SEQ ID NO: 2132918 - RNA, 19 nt, Human
auagcuauauccauguacu

SEQ ID NO: 2132919 - RNA, 20 nt, Human
auagcuauauccauguacug

SEQ ID NO: 2132920 - RNA, 22 nt, Human
auagcuauauccauguacugua

SEQ ID NO: 2132921 - RNA, 23 nt, Human
auagcuauauccauguacuguag

SEQ ID NO: 2132922 - RNA, 15 nt, Human
auagcuacaggaagc

SEQ ID NO: 2132923 - RNA, 22 nt, Human
auagcucaggugucccugcacu

SEQ ID NO: 2132924 - RNA, 20 nt, Human
auagcuccccgcuucugccu

SEQ ID NO: 2132925 - RNA, 20 nt, Human
auagcuauuuuuauggaauu

SEQ ID NO: 2132926 - RNA, 13 nt, Human
auagcucaguuua

SEQ ID NO: 2132927 - RNA, 12 nt, Human
auagcuauuuuu

SEQ ID NO: 2132928 - RNA, 18 nt, Human
auagcuauuuuuauggaa

SEQ ID NO: 2132929 - RNA, 21 nt, Human
auagcucaggugucccugcac

SEQ ID NO: 2132930 - RNA, 20 nt, Human
auagcucaggugucccugca

SEQ ID NO: 2132931 - RNA, 12 nt, Human
auagcugggacu

SEQ ID NO: 2132932 - RNA, 17 nt, Human
auagcugagauuccugg

SEQ ID NO: 2132933 - RNA, 21 nt, Human
auagcugagauuccugguucg

SEQ ID NO: 2132934 - RNA, 23 nt, Human
auagcuccccgcuucugccugca

SEQ ID NO: 2132935 - RNA, 22 nt, Human
auagcucaguuuauccaaggug

SEQ ID NO: 2132936 - RNA, 14 nt, Human
uuauuuaucaguga

SEQ ID NO: 2132937 - RNA, 18 nt, Human
uuauuuaucagugacaga

SEQ ID NO: 2132938 - RNA, 13 nt, Human
uuauuuauuaaga

SEQ ID NO: 2132939 - RNA, 14 nt, Human
uuauuuauuaagau

SEQ ID NO: 2132940 - RNA, 15 nt, Human
uuauuuauuaagaug

SEQ ID NO: 2132941 - RNA, 15 nt, Human
uuauuuauuuaugga

SEQ ID NO: 2132942 - RNA, 23 nt, Human
uuauuucaaaauauacauucaaa

SEQ ID NO: 2132943 - RNA, 11 nt, Human
uuauuucagaa

SEQ ID NO: 2132944 - RNA, 15 nt, Human
uuauuucagaaaugu

SEQ ID NO: 2132945 - RNA, 17 nt, Human
uuauuucagaaauguac

SEQ ID NO: 2132946 - RNA, 22 nt, Human
uuauuuacugagcuucucugug

SEQ ID NO: 2132947 - RNA, 16 nt, Human
uuauuuaauguuaugu

SEQ ID NO: 2132948 - RNA, 14 nt, Human
uuauuuaauuaaaa

SEQ ID NO: 2132949 - RNA, 21 nt, Human
uuauuuacugagcuucucugu

SEQ ID NO: 2132950 - RNA, 17 nt, Human
uuauuuacugagcuucu

SEQ ID NO: 2132951 - RNA, 16 nt, Human
uuauuuaguuccuuga

SEQ ID NO: 2132952 - RNA, 17 nt, Human
uuauuuagggaacugcu

SEQ ID NO: 2132953 - RNA, 18 nt, Human
uuauuuagggaacugcuu

SEQ ID NO: 2132954 - RNA, 21 nt, Human
uuauuuagggaacugcuugac

SEQ ID NO: 2132955 - RNA, 17 nt, Human
auagcugggacuacagg

SEQ ID NO: 2132956 - RNA, 20 nt, Human
uuauuguguuuuuaauuuau

SEQ ID NO: 2132957 - RNA, 13 nt, Human
uuauuguuccaag

SEQ ID NO: 2132958 - RNA, 16 nt, Human
uuauuguuccaagaca

SEQ ID NO: 2132959 - RNA, 18 nt, Human
uuauuuaaugaaagacug

SEQ ID NO: 2132960 - RNA, 22 nt, Human
uuauuuaaugaaagacuguaca

SEQ ID NO: 2132961 - RNA, 12 nt, Human
uuauuuaaauga

SEQ ID NO: 2132962 - RNA, 14 nt, Human
uuauuuaaauuuua

SEQ ID NO: 2132963 - RNA, 23 nt, Human
uuauuguuccaagacauugucaa

SEQ ID NO: 2132964 - RNA, 17 nt, Human
uuauuguuccaagacau

SEQ ID NO: 2132965 - RNA, 18 nt, Human
uuauuguuccaagacauu

SEQ ID NO: 2132966 - RNA, 19 nt, Human
uuauuguuccaagacauug

SEQ ID NO: 2132967 - RNA, 22 nt, Human
uuauuguuccaagacauuguca

SEQ ID NO: 2132968 - RNA, 20 nt, Human
uucaagugauucuccugccu

SEQ ID NO: 2132969 - RNA, 22 nt, Human
uucaagugcaugcucucugcag

SEQ ID NO: 2132970 - RNA, 17 nt, Human
uucaaguuaaauuuuau

SEQ ID NO: 2132971 - RNA, 16 nt, Human
uucaaguuagcucagg

SEQ ID NO: 2132972 - RNA, 13 nt, Human
uucaaguuaaagu

SEQ ID NO: 2132973 - RNA, 17 nt, Human
uucaaguuagcucagga

SEQ ID NO: 2132974 - RNA, 15 nt, Human
uucaagguaaaauuc

SEQ ID NO: 2132975 - RNA, 16 nt, Human
uucaagguaaaauucu

SEQ ID NO: 2132976 - RNA, 18 nt, Human
uucaagguaaaauucuaa

SEQ ID NO: 2132977 - RNA, 19 nt, Human
uucaagguaaaauucuaaa

SEQ ID NO: 2132978 - RNA, 16 nt, Human
uucaagggcugcuuca

SEQ ID NO: 2132979 - RNA, 19 nt, Human
uucaagaaaaguaagcccu

SEQ ID NO: 2132980 - RNA, 21 nt, Human
uucaagaaagccagucuuaac

SEQ ID NO: 2132981 - RNA, 22 nt, Human
uucaagaaagccagucuuaaca

SEQ ID NO: 2132982 - RNA, 16 nt, Human
uucaaaauauguucuu

SEQ ID NO: 2132983 - RNA, 14 nt, Human
uucaaaaugucugu

SEQ ID NO: 2132984 - RNA, 18 nt, Human
uucaaaaugucuguagcu

SEQ ID NO: 2132985 - RNA, 22 nt, Human
uucaaaccaguauacaagauaa

SEQ ID NO: 2132986 - RNA, 11 nt, Human
uucaaaaaugu

SEQ ID NO: 2132987 - RNA, 16 nt, Human
uucaaaaauguacaaa

SEQ ID NO: 2132988 - RNA, 17 nt, Human
uucaaaaauguacaaaa

SEQ ID NO: 2132989 - RNA, 21 nt, Human
uucaaaaauguacaaaauaaa

SEQ ID NO: 2132990 - RNA, 13 nt, Human
uucaaaaauuugg

SEQ ID NO: 2132991 - RNA, 17 nt, Human
uucaaaaauuuggaauu

SEQ ID NO: 2132992 - RNA, 21 nt, Human
uucaaaaagucuacgcucucc

SEQ ID NO: 2132993 - RNA, 22 nt, Human
auagcuuacaagccagcuggag

SEQ ID NO: 2132994 - RNA, 14 nt, Human
auagcuugaaacau

SEQ ID NO: 2132995 - RNA, 10 nt, Human
auagcuuuau

SEQ ID NO: 2132996 - RNA, 18 nt, Human
auagcuuuauuuuuuaag

SEQ ID NO: 2132997 - RNA, 19 nt, Human
auagcuuuauuuuuuaagu

SEQ ID NO: 2132998 - RNA, 21 nt, Human
auagcuuuauuuuuuaaguau

SEQ ID NO: 2132999 - RNA, 19 nt, Human
uucacauccuguguuucua

SEQ ID NO: 2133000 - RNA, 22 nt, Human
auagcuuuauuuuuuaaguauu

SEQ ID NO: 2133001 - RNA, 23 nt, Human
auagcuuuauuuuuuaaguauuu

SEQ ID NO: 2133002 - RNA, 22 nt, Human
auaggccaaacuggcaaacuuc

SEQ ID NO: 2133003 - RNA, 12 nt, Human
uucaccauguaa

SEQ ID NO: 2133004 - RNA, 16 nt, Human
uucaccauguaaaaca

SEQ ID NO: 2133005 - RNA, 17 nt, Human
uucaccauguaaaacaa

SEQ ID NO: 2133006 - RNA, 20 nt, Human
uucaccauguaaaacaaaaa

SEQ ID NO: 2133007 - RNA, 21 nt, Human
uucaccauguaaaacaaaaaa

SEQ ID NO: 2133008 - RNA, 22 nt, Human
uucaccauguaaaacaaaaaac

SEQ ID NO: 2133009 - RNA, 23 nt, Human
uucaccauguaaaacaaaaaaca

SEQ ID NO: 2133010 - RNA, 22 nt, Human
uucaccacaugugcacaugcac

SEQ ID NO: 2133011 - RNA, 18 nt, Human
uucacauccuguguuucu

SEQ ID NO: 2133012 - RNA, 18 nt, Human
uucacaguaccaucugaa

SEQ ID NO: 2133013 - RNA, 12 nt, Human
uucacaguguuu

SEQ ID NO: 2133014 - RNA, 19 nt, Human
uucacauaaaauagauuuu

SEQ ID NO: 2133015 - RNA, 22 nt, Human
uucacaguguuucgacagcuga

SEQ ID NO: 2133016 - RNA, 17 nt, Human
uucacauagaugucccu

SEQ ID NO: 2133017 - RNA, 15 nt, Human
uucacagcucugugu

SEQ ID NO: 2133018 - RNA, 23 nt, Human
uucacagcucuguguugccaugu

SEQ ID NO: 2133019 - RNA, 13 nt, Human
uucaauaaaguau

SEQ ID NO: 2133020 - RNA, 12 nt, Human
uucaauaaagua

SEQ ID NO: 2133021 - RNA, 14 nt, Human
uucaauaaaguauc

SEQ ID NO: 2133022 - RNA, 19 nt, Human
uucaauaaaguaucuacau

SEQ ID NO: 2133023 - RNA, 23 nt, Human
uucagcaccuacaguguacaguc

SEQ ID NO: 2133024 - RNA, 22 nt, Human
uucagcaccuacaguguacagu

SEQ ID NO: 2133025 - RNA, 18 nt, Human
uucagcaauauuuaagga

SEQ ID NO: 2133026 - RNA, 21 nt, Human
uucagcaauauuuaaggagau

SEQ ID NO: 2133027 - RNA, 16 nt, Human
uucagcaccacccuag

SEQ ID NO: 2133028 - RNA, 17 nt, Human
uucagccaggagcuggg

SEQ ID NO: 2133029 - RNA, 13 nt, Human
uucagccccuccu

SEQ ID NO: 2133030 - RNA, 13 nt, Human
uucagccaggagc

SEQ ID NO: 2133031 - RNA, 12 nt, Human
uucagccaggag

SEQ ID NO: 2133032 - RNA, 15 nt, Human
uucagcccucagaau

SEQ ID NO: 2133033 - RNA, 14 nt, Human
uucagccccuccuc

SEQ ID NO: 2133034 - RNA, 15 nt, Human
uucagccccuccucu

SEQ ID NO: 2133035 - RNA, 16 nt, Human
uucagccccuccucug

SEQ ID NO: 2133036 - RNA, 17 nt, Human
uucagccccuccucugc

SEQ ID NO: 2133037 - RNA, 18 nt, Human
uucagccccuccucugcc

SEQ ID NO: 2133038 - RNA, 19 nt, Human
uucagccccuccucugcca

SEQ ID NO: 2133039 - RNA, 20 nt, Human
uucagccccuccucugccac

SEQ ID NO: 2133040 - RNA, 23 nt, Human
uucagccccuccucugccaccuc

SEQ ID NO: 2133041 - RNA, 14 nt, Human
uucagaugcuuuag

SEQ ID NO: 2133042 - RNA, 13 nt, Human
uucagauccuacc

SEQ ID NO: 2133043 - RNA, 14 nt, Human
uucagauccuaccc

SEQ ID NO: 2133044 - RNA, 15 nt, Human
uucagauccuacccc

SEQ ID NO: 2133045 - RNA, 15 nt, Human
uucagaugcuucugg

SEQ ID NO: 2133046 - RNA, 19 nt, Human
uucagaugcuucugggaga

SEQ ID NO: 2133047 - RNA, 17 nt, Human
uucagaucagugcuuga

SEQ ID NO: 2133048 - RNA, 15 nt, Human
uucagacacuuugga

SEQ ID NO: 2133049 - RNA, 16 nt, Human
uucagacacuuuggaa

SEQ ID NO: 2133050 - RNA, 13 nt, Human
uucagaaucugaa

SEQ ID NO: 2133051 - RNA, 15 nt, Human
uucagaaucugaaug

SEQ ID NO: 2133052 - RNA, 17 nt, Human
uucagaaucugaaugua

SEQ ID NO: 2133053 - RNA, 18 nt, Human
uucagaaucugaauguaa

SEQ ID NO: 2133054 - RNA, 21 nt, Human
uucagaaucugaauguaauuu

SEQ ID NO: 2133055 - RNA, 23 nt, Human
uucagaaucugaauguaauuugu

SEQ ID NO: 2133056 - RNA, 13 nt, Human
uucacuggcccaa

SEQ ID NO: 2133057 - RNA, 15 nt, Human
uucagaaagaagugg

SEQ ID NO: 2133058 - RNA, 12 nt, Human
uucagaagagau

SEQ ID NO: 2133059 - RNA, 19 nt, Human
uucacugcuggcugccuua

SEQ ID NO: 2133060 - RNA, 18 nt, Human
uucacugcuggcugccuu

SEQ ID NO: 2133061 - RNA, 17 nt, Human
uucacugcuggcugccu

SEQ ID NO: 2133062 - RNA, 16 nt, Human
uucacugcuggcugcc

SEQ ID NO: 2133063 - RNA, 15 nt, Human
uucacugcuggcugc

SEQ ID NO: 2133064 - RNA, 13 nt, Human
uucacugcuggcu

SEQ ID NO: 2133065 - RNA, 13 nt, Human
auauauagaaucu

SEQ ID NO: 2133066 - RNA, 14 nt, Human
auauauacauauau

SEQ ID NO: 2133067 - RNA, 14 nt, Human
auauauacauaaca

SEQ ID NO: 2133068 - RNA, 17 nt, Human
auauaaauuuuuuuugu

SEQ ID NO: 2133069 - RNA, 22 nt, Human
auauaaauuuuuuuuguuucau

SEQ ID NO: 2133070 - RNA, 18 nt, Human
auauaaagaccuauaaau

SEQ ID NO: 2133071 - RNA, 23 nt, Human
auauaaggaaagcaauaaaugaa

SEQ ID NO: 2133072 - RNA, 15 nt, Human
auauaggaauuaaga

SEQ ID NO: 2133073 - RNA, 16 nt, Human
auauaguuuacuauuu

SEQ ID NO: 2133074 - RNA, 17 nt, Human
auauaguaccuuugcuc

SEQ ID NO: 2133075 - RNA, 21 nt, Human
auauauacacacacaaagaga

SEQ ID NO: 2133076 - RNA, 19 nt, Human
auagucaauguuucuuuua

SEQ ID NO: 2133077 - RNA, 14 nt, Human
auagucacaagagc

SEQ ID NO: 2133078 - RNA, 21 nt, Human
auagggucucuucagguucuu

SEQ ID NO: 2133079 - RNA, 22 nt, Human
auagggccuggucccugggagg

SEQ ID NO: 2133080 - RNA, 16 nt, Human
auagggucucuucagg

SEQ ID NO: 2133081 - RNA, 15 nt, Human
auagucaccuuuuaa

SEQ ID NO: 2133082 - RNA, 16 nt, Human
auagucaccuuuuaaa

SEQ ID NO: 2133083 - RNA, 23 nt, Human
auagucaccuuuuaaauccuguu

SEQ ID NO: 2133084 - RNA, 13 nt, Human
auauaaacacuau

SEQ ID NO: 2133085 - RNA, 15 nt, Human
auauaaacacuauau

SEQ ID NO: 2133086 - RNA, 13 nt, Human
auauaaagagaaa

SEQ ID NO: 2133087 - RNA, 15 nt, Human
auauaaagagaaaau

SEQ ID NO: 2133088 - RNA, 17 nt, Human
auauaaagagaaaauug

SEQ ID NO: 2133089 - RNA, 19 nt, Human
auaugcacacagugcuuuc

SEQ ID NO: 2133090 - RNA, 16 nt, Human
auauguauuaauauuc

SEQ ID NO: 2133091 - RNA, 16 nt, Human
auauguauguguguau

SEQ ID NO: 2133092 - RNA, 15 nt, Human
auauguaugugugua

SEQ ID NO: 2133093 - RNA, 14 nt, Human
auauguaugguuuu

SEQ ID NO: 2133094 - RNA, 13 nt, Human
auauguauguaaa

SEQ ID NO: 2133095 - RNA, 15 nt, Human
auauguauguaaaaa

SEQ ID NO: 2133096 - RNA, 18 nt, Human
auauguauccaguacauu

SEQ ID NO: 2133097 - RNA, 19 nt, Human
auauguauccaguacauuu

SEQ ID NO: 2133098 - RNA, 22 nt, Human
auauguauccaguacauuuaau

SEQ ID NO: 2133099 - RNA, 14 nt, Human
auaugucaagccau

SEQ ID NO: 2133100 - RNA, 13 nt, Human
auauguauuuuau

SEQ ID NO: 2133101 - RNA, 17 nt, Human
auauguauuuuauguau

SEQ ID NO: 2133102 - RNA, 18 nt, Human
auauguauuuuauguaug

SEQ ID NO: 2133103 - RNA, 19 nt, Human
auauguauuuuauguaugu

SEQ ID NO: 2133104 - RNA, 22 nt, Human
auauguauuuuauguauguuua

SEQ ID NO: 2133105 - RNA, 14 nt, Human
auaugucagggcgu

SEQ ID NO: 2133106 - RNA, 22 nt, Human
auaucugaaaauguauguguaa

SEQ ID NO: 2133107 - RNA, 20 nt, Human
auaucuaucuuauauaguuu

SEQ ID NO: 2133108 - RNA, 21 nt, Human
auaucuaucuuauauaguuua

SEQ ID NO: 2133109 - RNA, 15 nt, Human
auaucuaucagagua

SEQ ID NO: 2133110 - RNA, 13 nt, Human
auaucuaucuuau

SEQ ID NO: 2133111 - RNA, 14 nt, Human
auaucuaucuuaua

SEQ ID NO: 2133112 - RNA, 12 nt, Human
auaucuucacaa

SEQ ID NO: 2133113 - RNA, 16 nt, Human
auaucuguuuuacugc

SEQ ID NO: 2133114 - RNA, 20 nt, Human
auaucuguuuuacugcuuuu

SEQ ID NO: 2133115 - RNA, 13 nt, Human
auaucugcuguau

SEQ ID NO: 2133116 - RNA, 15 nt, Human
auaucugcuguaugu

SEQ ID NO: 2133117 - RNA, 16 nt, Human
auaucugcuguauguc

SEQ ID NO: 2133118 - RNA, 20 nt, Human
auaugauuuaaaucagccgu

SEQ ID NO: 2133119 - RNA, 15 nt, Human
auaucuugaaaugaa

SEQ ID NO: 2133120 - RNA, 19 nt, Human
auaucuucugauuuguccc

SEQ ID NO: 2133121 - RNA, 20 nt, Human
auaucuaauuauuuugcagu

SEQ ID NO: 2133122 - RNA, 18 nt, Human
uucauccaauccucacug

SEQ ID NO: 2133123 - RNA, 20 nt, Human
uucauccaauccucacuggg

SEQ ID NO: 2133124 - RNA, 21 nt, Human
uucauccaauccucacugggu

SEQ ID NO: 2133125 - RNA, 22 nt, Human
uucauccaauccucacugggug

SEQ ID NO: 2133126 - RNA, 16 nt, Human
uucauccaauccucac

SEQ ID NO: 2133127 - RNA, 18 nt, Human
uucaucauccuaagcuau

SEQ ID NO: 2133128 - RNA, 21 nt, Human
uucaucauccuaagcuauuca

SEQ ID NO: 2133129 - RNA, 18 nt, Human
uucagggcagggcucuga

SEQ ID NO: 2133130 - RNA, 13 nt, Human
uucagggccucca

SEQ ID NO: 2133131 - RNA, 16 nt, Human
uucaggggacucagcc

SEQ ID NO: 2133132 - RNA, 17 nt, Human
uucaggggacucagccc

SEQ ID NO: 2133133 - RNA, 19 nt, Human
uucaggggacucagcccug

SEQ ID NO: 2133134 - RNA, 20 nt, Human
uucaggggacucagcccuga

SEQ ID NO: 2133135 - RNA, 20 nt, Human
uucagccuagccgaccucag

SEQ ID NO: 2133136 - RNA, 21 nt, Human
uucagccuagccgaccucagc

SEQ ID NO: 2133137 - RNA, 22 nt, Human
uucagccuagccgaccucagcc

SEQ ID NO: 2133138 - RNA, 23 nt, Human
uucagccuagccgaccucagccu

SEQ ID NO: 2133139 - RNA, 14 nt, Human
uucaguaauaacuc

SEQ ID NO: 2133140 - RNA, 13 nt, Human
uucagggggccag

SEQ ID NO: 2133141 - RNA, 21 nt, Human
uucaggggagucccgucagga

SEQ ID NO: 2133142 - RNA, 23 nt, Human
uucaggggacucagcccugaggu

SEQ ID NO: 2133143 - RNA, 13 nt, Human
uucagggucauag

SEQ ID NO: 2133144 - RNA, 22 nt, Human
uucagggggccaggugcacaga

SEQ ID NO: 2133145 - RNA, 14 nt, Human
uucauagauuuccu

SEQ ID NO: 2133146 - RNA, 20 nt, Human
uucauagcugguuccugcua

SEQ ID NO: 2133147 - RNA, 22 nt, Human
uucauagcugguuccugcuaga

SEQ ID NO: 2133148 - RNA, 13 nt, Human
uucauaggagaca

SEQ ID NO: 2133149 - RNA, 16 nt, Human
uucauaggagacacau

SEQ ID NO: 2133150 - RNA, 19 nt, Human
uucauagggucucuucagg

SEQ ID NO: 2133151 - RNA, 16 nt, Human
uucauauuuacuucuu

SEQ ID NO: 2133152 - RNA, 21 nt, Human
uucauauuuacuucuuauaca

SEQ ID NO: 2133153 - RNA, 16 nt, Human
uucaguauaauuuaac

SEQ ID NO: 2133154 - RNA, 20 nt, Human
uucaguauaauuuaacuuca

SEQ ID NO: 2133155 - RNA, 23 nt, Human
uucaguauaauuuaacuucagag

SEQ ID NO: 2133156 - RNA, 14 nt, Human
uuguaaauuucucu

SEQ ID NO: 2133157 - RNA, 16 nt, Human
uuguaacaagaaaaca

SEQ ID NO: 2133158 - RNA, 17 nt, Human
uuguaacaagaaaacau

SEQ ID NO: 2133159 - RNA, 17 nt, Human
uuguaagagcuauacag

SEQ ID NO: 2133160 - RNA, 18 nt, Human
uuguaagagcuauacagu

SEQ ID NO: 2133161 - RNA, 21 nt, Human
uuguaagagcuauacaguuuu

SEQ ID NO: 2133162 - RNA, 18 nt, Human
uuguaauaaaguauauaa

SEQ ID NO: 2133163 - RNA, 19 nt, Human
uuguaauaaaguauauaau

SEQ ID NO: 2133164 - RNA, 20 nt, Human
uuguaauaaaguauauaauu

SEQ ID NO: 2133165 - RNA, 11 nt, Human
uuguaagauuu

SEQ ID NO: 2133166 - RNA, 14 nt, Human
uuguaagauuuuga

SEQ ID NO: 2133167 - RNA, 15 nt, Human
uuguaagauuuugaa

SEQ ID NO: 2133168 - RNA, 16 nt, Human
uuguaagauuuugaaa

SEQ ID NO: 2133169 - RNA, 17 nt, Human
uuguaagauuuugaaaa

SEQ ID NO: 2133170 - RNA, 19 nt, Human
uuguaagauuuugaaaacu

SEQ ID NO: 2133171 - RNA, 12 nt, Human
uuguaauuuucu

SEQ ID NO: 2133172 - RNA, 13 nt, Human
uuguaauuuucuu

SEQ ID NO: 2133173 - RNA, 15 nt, Human
uuguaauuuucuuga

SEQ ID NO: 2133174 - RNA, 16 nt, Human
uuguaauuuucuugau

SEQ ID NO: 2133175 - RNA, 19 nt, Human
uuguaauuuucuugaugac

SEQ ID NO: 2133176 - RNA, 22 nt, Human
uuguaauuuucuugaugacugg

SEQ ID NO: 2133177 - RNA, 23 nt, Human
uuguaauuuucuugaugacugga

SEQ ID NO: 2133178 - RNA, 15 nt, Human
uuguaaucguuaugu

SEQ ID NO: 2133179 - RNA, 20 nt, Human
uuguaaucguuaugugugua

SEQ ID NO: 2133180 - RNA, 23 nt, Human
uuggguagaaagagauacagagg

SEQ ID NO: 2133181 - RNA, 14 nt, Human
uuggguaggcggga

SEQ ID NO: 2133182 - RNA, 21 nt, Human
uuggguauccugcccaguguu

SEQ ID NO: 2133183 - RNA, 20 nt, Human
uugggugcaagagggagcac

SEQ ID NO: 2133184 - RNA, 19 nt, Human
uugguuuuaauugaaggaa

SEQ ID NO: 2133185 - RNA, 20 nt, Human
uugguuuuaauugaaggaaa

SEQ ID NO: 2133186 - RNA, 22 nt, Human
uugguuuuaauugaaggaaaga

SEQ ID NO: 2133187 - RNA, 13 nt, Human
uugguguugacau

SEQ ID NO: 2133188 - RNA, 23 nt, Human
uugguguguuuuugggaugucuu

SEQ ID NO: 2133189 - RNA, 18 nt, Human
uugguggcucacgccugu

SEQ ID NO: 2133190 - RNA, 14 nt, Human
uugguggauguaaa

SEQ ID NO: 2133191 - RNA, 15 nt, Human
uugguggauguaaau

SEQ ID NO: 2133192 - RNA, 16 nt, Human
uugguggauguaaaua

SEQ ID NO: 2133193 - RNA, 21 nt, Human
uugguggcagauuuuacaaaa

SEQ ID NO: 2133194 - RNA, 12 nt, Human
uuggugguuuuu

SEQ ID NO: 2133195 - RNA, 16 nt, Human
augaaagugagacuuu

SEQ ID NO: 2133196 - RNA, 18 nt, Human
augaaagucuugugacua

SEQ ID NO: 2133197 - RNA, 19 nt, Human
augaaagucuugugacuag

SEQ ID NO: 2133198 - RNA, 19 nt, Human
augaaauaaaucauguuaa

SEQ ID NO: 2133199 - RNA, 17 nt, Human
augaaauaaaugcccca

SEQ ID NO: 2133200 - RNA, 20 nt, Human
augaaagucuugugacuagu

SEQ ID NO: 2133201 - RNA, 15 nt, Human
uuggaggccagccag

SEQ ID NO: 2133202 - RNA, 19 nt, Human
uuggaggaccaaaaaaaua

SEQ ID NO: 2133203 - RNA, 21 nt, Human
augaaauuuaauauagcuauu

SEQ ID NO: 2133204 - RNA, 14 nt, Human
augaaauuuuacca

SEQ ID NO: 2133205 - RNA, 15 nt, Human
augaaauuuuaccaa

SEQ ID NO: 2133206 - RNA, 16 nt, Human
augaaauuuuaccaag

SEQ ID NO: 2133207 - RNA, 18 nt, Human
augaaauuuuaccaaguu

SEQ ID NO: 2133208 - RNA, 20 nt, Human
augaaauuuuaccaaguuau

SEQ ID NO: 2133209 - RNA, 21 nt, Human
augaaauuuuaccaaguuaua

SEQ ID NO: 2133210 - RNA, 15 nt, Human
augaaauaugcaucu

SEQ ID NO: 2133211 - RNA, 13 nt, Human
augaaauaugcau

SEQ ID NO: 2133212 - RNA, 13 nt, Human
augaaauaucaga

SEQ ID NO: 2133213 - RNA, 19 nt, Human
augaaauaucagacuagug

SEQ ID NO: 2133214 - RNA, 18 nt, Human
augaacacaucagcuagc

SEQ ID NO: 2133215 - RNA, 22 nt, Human
augaaccacaucuugcucugcu

SEQ ID NO: 2133216 - RNA, 23 nt, Human
augaaccacaucuugcucugcug

SEQ ID NO: 2133217 - RNA, 15 nt, Human
augaagcaaacacau

SEQ ID NO: 2133218 - RNA, 17 nt, Human
augaaugaaacauuuug

SEQ ID NO: 2133219 - RNA, 15 nt, Human
augaauguaucagga

SEQ ID NO: 2133220 - RNA, 16 nt, Human
augaauguaucaggaa

SEQ ID NO: 2133221 - RNA, 21 nt, Human
augaagaaaagugggccagug

SEQ ID NO: 2133222 - RNA, 22 nt, Human
augaagaaaagugggccagugu

SEQ ID NO: 2133223 - RNA, 14 nt, Human
augaagcaaacaca

SEQ ID NO: 2133224 - RNA, 12 nt, Human
augaagauuauu

SEQ ID NO: 2133225 - RNA, 20 nt, Human
augaagauuauuuuuuauga

SEQ ID NO: 2133226 - RNA, 21 nt, Human
augaagaugucuaauaguuau

SEQ ID NO: 2133227 - RNA, 22 nt, Human
augaagauguuucaaaaaaucu

SEQ ID NO: 2133228 - RNA, 15 nt, Human
augaagaaaaaauac

SEQ ID NO: 2133229 - RNA, 17 nt, Human
augaagaaaaaauacau

SEQ ID NO: 2133230 - RNA, 19 nt, Human
augaagaaaaaauacauuu

SEQ ID NO: 2133231 - RNA, 20 nt, Human
augaagaaaaaauacauuuu

SEQ ID NO: 2133232 - RNA, 22 nt, Human
augaagaaaaaauacauuuuau

SEQ ID NO: 2133233 - RNA, 19 nt, Human
augaagaaaagugggccag

SEQ ID NO: 2133234 - RNA, 12 nt, Human
aucuuaacucuu

SEQ ID NO: 2133235 - RNA, 13 nt, Human
aucuuaacucuuu

SEQ ID NO: 2133236 - RNA, 14 nt, Human
aucuuaacucuuug

SEQ ID NO: 2133237 - RNA, 15 nt, Human
aucuuaacucuuugc

SEQ ID NO: 2133238 - RNA, 23 nt, Human
aucuuaacucuuugccuuugcca

SEQ ID NO: 2133239 - RNA, 19 nt, Human
aucuuaaaguguguuucua

SEQ ID NO: 2133240 - RNA, 14 nt, Human
aucuugcucugcug

SEQ ID NO: 2133241 - RNA, 14 nt, Human
aucuuggacugaca

SEQ ID NO: 2133242 - RNA, 16 nt, Human
aucuuggacugacauu

SEQ ID NO: 2133243 - RNA, 19 nt, Human
aucuuggacugacauuuag

SEQ ID NO: 2133244 - RNA, 21 nt, Human
aucuuggacugacauuuagcg

SEQ ID NO: 2133245 - RNA, 16 nt, Human
aucuugcucugcugac

SEQ ID NO: 2133246 - RNA, 15 nt, Human
aucuugcucugcuga

SEQ ID NO: 2133247 - RNA, 12 nt, Human
aucuuggcaggg

SEQ ID NO: 2133248 - RNA, 14 nt, Human
aucuuguuuccaaa

SEQ ID NO: 2133249 - RNA, 22 nt, Human
aucugucauuugagcagggcuc

SEQ ID NO: 2133250 - RNA, 17 nt, Human
aucugucauuugagcag

SEQ ID NO: 2133251 - RNA, 12 nt, Human
aucugucauuug

SEQ ID NO: 2133252 - RNA, 17 nt, Human
uugcccggauucuggga

SEQ ID NO: 2133253 - RNA, 13 nt, Human
uugccccugagac

SEQ ID NO: 2133254 - RNA, 12 nt, Human
uugccccccacc

SEQ ID NO: 2133255 - RNA, 13 nt, Human
uugccccccaccc

SEQ ID NO: 2133256 - RNA, 16 nt, Human
uugccccccaccccag

SEQ ID NO: 2133257 - RNA, 19 nt, Human
uugccccccaccccagccu

SEQ ID NO: 2133258 - RNA, 19 nt, Human
uugcccggauucugggagg

SEQ ID NO: 2133259 - RNA, 15 nt, Human
uugcccuagaugagc

SEQ ID NO: 2133260 - RNA, 21 nt, Human
aucugugcccagagaugggac

SEQ ID NO: 2133261 - RNA, 16 nt, Human
aucugugcgugaaaca

SEQ ID NO: 2133262 - RNA, 17 nt, Human
aucugugcgugaaacac

SEQ ID NO: 2133263 - RNA, 18 nt, Human
aucugugcgugaaacaca

SEQ ID NO: 2133264 - RNA, 19 nt, Human
aucugugcgugaaacacac

SEQ ID NO: 2133265 - RNA, 12 nt, Human
aucugugcccca

SEQ ID NO: 2133266 - RNA, 13 nt, Human
aucugugccccau

SEQ ID NO: 2133267 - RNA, 15 nt, Human
aucugugccccaugc

SEQ ID NO: 2133268 - RNA, 23 nt, Human
aucugugccccaugccuguccag

SEQ ID NO: 2133269 - RNA, 22 nt, Human
aucugugcaaauccuugauacu

SEQ ID NO: 2133270 - RNA, 14 nt, Human
aucugugcccagag

SEQ ID NO: 2133271 - RNA, 17 nt, Human
aucugugcccagagaug

SEQ ID NO: 2133272 - RNA, 13 nt, Human
aucuguguccugg

SEQ ID NO: 2133273 - RNA, 22 nt, Human
aucugugggcauggucaaaggc

SEQ ID NO: 2133274 - RNA, 19 nt, Human
aucugugggcauggucaaa

SEQ ID NO: 2133275 - RNA, 19 nt, Human
uuggaaaagaauacagaaa

SEQ ID NO: 2133276 - RNA, 22 nt, Human
uuggaaaagaauacagaaagau

SEQ ID NO: 2133277 - RNA, 15 nt, Human
uuggacugacauuua

SEQ ID NO: 2133278 - RNA, 18 nt, Human
uuggacucuccccucuua

SEQ ID NO: 2133279 - RNA, 14 nt, Human
uuggacugacauuu

SEQ ID NO: 2133280 - RNA, 15 nt, Human
uuggaaaauaaauca

SEQ ID NO: 2133281 - RNA, 12 nt, Human
uuggaaaauaaa

SEQ ID NO: 2133282 - RNA, 17 nt, Human
uuggaaaauaaauuauu

SEQ ID NO: 2133283 - RNA, 16 nt, Human
uugcuuuguaugcacu

SEQ ID NO: 2133284 - RNA, 14 nt, Human
uuggaaaagaauac

SEQ ID NO: 2133285 - RNA, 21 nt, Human
uuggaaaaauccagaaagaaa

SEQ ID NO: 2133286 - RNA, 18 nt, Human
uuggacuuuucguuaaca

SEQ ID NO: 2133287 - RNA, 20 nt, Human
uuggacuuuucguuaacauu

SEQ ID NO: 2133288 - RNA, 22 nt, Human
uuggacuuuucguuaacauuga

SEQ ID NO: 2133289 - RNA, 22 nt, Human
uugcucuugcagagaagccuug

SEQ ID NO: 2133290 - RNA, 14 nt, Human
uugcugaaagaucu

SEQ ID NO: 2133291 - RNA, 15 nt, Human
aucuuguuuuuccac

SEQ ID NO: 2133292 - RNA, 23 nt, Human
aucuuguuuuuccacuacugcua

SEQ ID NO: 2133293 - RNA, 19 nt, Human
uugcucuuaaguuguggag

SEQ ID NO: 2133294 - RNA, 13 nt, Human
uugcuuuguaugc

SEQ ID NO: 2133295 - RNA, 14 nt, Human
uugcuuucugaaau

SEQ ID NO: 2133296 - RNA, 15 nt, Human
uugcuuucugaaauu

SEQ ID NO: 2133297 - RNA, 15 nt, Human
uugcuucugggaagg

SEQ ID NO: 2133298 - RNA, 19 nt, Human
uugcuucugggaagggguu

SEQ ID NO: 2133299 - RNA, 12 nt, Human
uugcuucuguag

SEQ ID NO: 2133300 - RNA, 13 nt, Human
uugcuuucugaaa

SEQ ID NO: 2133301 - RNA, 21 nt, Human
uugcuuugaaacuagacuuga

SEQ ID NO: 2133302 - RNA, 21 nt, Human
uugcuucauagcugguuccug

SEQ ID NO: 2133303 - RNA, 12 nt, Human
uugcuuaugaau

SEQ ID NO: 2133304 - RNA, 15 nt, Human
uugcuuauuguucca

SEQ ID NO: 2133305 - RNA, 16 nt, Human
uugcuuauuguuccaa

SEQ ID NO: 2133306 - RNA, 18 nt, Human
uugcuuauuguuccaaga

SEQ ID NO: 2133307 - RNA, 20 nt, Human
uugcuuauuguuccaagaca

SEQ ID NO: 2133308 - RNA, 22 nt, Human
uugcuuauuguuccaagacauu

SEQ ID NO: 2133309 - RNA, 23 nt, Human
uugcuuauuguuccaagacauug

SEQ ID NO: 2133310 - RNA, 13 nt, Human
uugcuuauuuaau

SEQ ID NO: 2133311 - RNA, 16 nt, Human
uugcuuauuuaauaaa

SEQ ID NO: 2133312 - RNA, 22 nt, Human
aucucuuuguucuaaagaugga

SEQ ID NO: 2133313 - RNA, 15 nt, Human
aucucuugaggccag

SEQ ID NO: 2133314 - RNA, 22 nt, Human
aucucuuuugaauccaugcuug

SEQ ID NO: 2133315 - RNA, 21 nt, Human
aucugaagagcuauuauauaa

SEQ ID NO: 2133316 - RNA, 17 nt, Human
aucugaauaccucuuug

SEQ ID NO: 2133317 - RNA, 22 nt, Human
aucugaauaccucuuugaaaga

SEQ ID NO: 2133318 - RNA, 15 nt, Human
aucucacagcacacu

SEQ ID NO: 2133319 - RNA, 20 nt, Human
aucucacagcacacucagca

SEQ ID NO: 2133320 - RNA, 13 nt, Human
aucucaccccauc

SEQ ID NO: 2133321 - RNA, 14 nt, Human
aucucaccccaucc

SEQ ID NO: 2133322 - RNA, 16 nt, Human
aucucaccccauccca

SEQ ID NO: 2133323 - RNA, 22 nt, Human
aucucaccccaucccacacccu

SEQ ID NO: 2133324 - RNA, 23 nt, Human
aucucaccccaucccacacccug

SEQ ID NO: 2133325 - RNA, 14 nt, Human
uugcaagaaucagu

SEQ ID NO: 2133326 - RNA, 13 nt, Human
uugauguuugugg

SEQ ID NO: 2133327 - RNA, 15 nt, Human
uugauguuuguggcc

SEQ ID NO: 2133328 - RNA, 16 nt, Human
uugauguuuguggccu

SEQ ID NO: 2133329 - RNA, 17 nt, Human
uugauguuuguggccuc

SEQ ID NO: 2133330 - RNA, 18 nt, Human
uugauguuuguggccuca

SEQ ID NO: 2133331 - RNA, 19 nt, Human
uugauguuuguggccucag

SEQ ID NO: 2133332 - RNA, 13 nt, Human
aucugacugcacg

SEQ ID NO: 2133333 - RNA, 22 nt, Human
uugcaauagaaauccaauugga

SEQ ID NO: 2133334 - RNA, 19 nt, Human
uugcaauaucgaucagaug

SEQ ID NO: 2133335 - RNA, 14 nt, Human
uugcaauggcagcc

SEQ ID NO: 2133336 - RNA, 15 nt, Human
uugcaauagaaaucc

SEQ ID NO: 2133337 - RNA, 20 nt, Human
uugauguuuguggccucaga

SEQ ID NO: 2133338 - RNA, 21 nt, Human
uugcaccacugcacuccagcc

SEQ ID NO: 2133339 - RNA, 16 nt, Human
uugcauggguuuugua

SEQ ID NO: 2133340 - RNA, 17 nt, Human
uugcauggguuuuguag

SEQ ID NO: 2133341 - RNA, 20 nt, Human
uugcauggguuuuguaggua

SEQ ID NO: 2133342 - RNA, 15 nt, Human
uugcaugcugcuuua

SEQ ID NO: 2133343 - RNA, 21 nt, Human
uugcaugcugcuuuaauugug

SEQ ID NO: 2133344 - RNA, 22 nt, Human
uugcaugcugcuuuaauuguga

SEQ ID NO: 2133345 - RNA, 17 nt, Human
uugcaccuaccucacag

SEQ ID NO: 2133346 - RNA, 20 nt, Human
uugccaagaacugaaaacau

SEQ ID NO: 2133347 - RNA, 13 nt, Human
uugcaaugaagga

SEQ ID NO: 2133348 - RNA, 15 nt, Human
uugcccauuuacacu

SEQ ID NO: 2133349 - RNA, 16 nt, Human
uugcccauuuacacuu

SEQ ID NO: 2133350 - RNA, 18 nt, Human
uugcccaggcuggucuca

SEQ ID NO: 2133351 - RNA, 17 nt, Human
uugcccagggcucagcc

SEQ ID NO: 2133352 - RNA, 18 nt, Human
uugcccagggcucagccu

SEQ ID NO: 2133353 - RNA, 19 nt, Human
uugcccagggcucagccug

SEQ ID NO: 2133354 - RNA, 20 nt, Human
uugcccagggcucagccugg

SEQ ID NO: 2133355 - RNA, 23 nt, Human
uugcccaggcuggcgugcagugg

SEQ ID NO: 2133356 - RNA, 14 nt, Human
uugcccaggcuggc

SEQ ID NO: 2133357 - RNA, 12 nt, Human
uugcccaggcug

SEQ ID NO: 2133358 - RNA, 11 nt, Human
uugcccaggcu

SEQ ID NO: 2133359 - RNA, 18 nt, Human
uugcccaggcaggucuug

SEQ ID NO: 2133360 - RNA, 16 nt, Human
uugcccaggcaggucu

SEQ ID NO: 2133361 - RNA, 14 nt, Human
uugcccaggcaggu

SEQ ID NO: 2133362 - RNA, 13 nt, Human
uugcccaggcagg

SEQ ID NO: 2133363 - RNA, 15 nt, Human
uugccacaacccugu

SEQ ID NO: 2133364 - RNA, 13 nt, Human
uugccacagcucu

SEQ ID NO: 2133365 - RNA, 21 nt, Human
uugccaaugaggucugaaaug

SEQ ID NO: 2133366 - RNA, 19 nt, Human
uugccaccaacuggcccuc

SEQ ID NO: 2133367 - RNA, 21 nt, Human
uugccaccaacuggcccucuu

SEQ ID NO: 2133368 - RNA, 13 nt, Human
uugccaccaggag

SEQ ID NO: 2133369 - RNA, 14 nt, Human
uugccaccaggaga

SEQ ID NO: 2133370 - RNA, 15 nt, Human
uugccaccaggagaa

SEQ ID NO: 2133371 - RNA, 16 nt, Human
uugccaccaggagaac

SEQ ID NO: 2133372 - RNA, 12 nt, Human
uugacagggcac

SEQ ID NO: 2133373 - RNA, 10 nt, Human
uugacagggc

SEQ ID NO: 2133374 - RNA, 19 nt, Human
uugacaggauuauuggaaa

SEQ ID NO: 2133375 - RNA, 18 nt, Human
uugacaauaauuucaggu

SEQ ID NO: 2133376 - RNA, 14 nt, Human
aucccuuuucuuga

SEQ ID NO: 2133377 - RNA, 15 nt, Human
aucccuuuucuugac

SEQ ID NO: 2133378 - RNA, 15 nt, Human
uugacaauuccuaga

SEQ ID NO: 2133379 - RNA, 19 nt, Human
uugacaauuccuagauaaa

SEQ ID NO: 2133380 - RNA, 19 nt, Human
aucccuuccuuuuagccua

SEQ ID NO: 2133381 - RNA, 21 nt, Human
aucccuuccuuuuagccuagu

SEQ ID NO: 2133382 - RNA, 11 nt, Human
uugagacagag

SEQ ID NO: 2133383 - RNA, 13 nt, Human
uugagaauuuuaa

SEQ ID NO: 2133384 - RNA, 23 nt, Human
uugagaaaccuuauuguaccucu

SEQ ID NO: 2133385 - RNA, 20 nt, Human
uugagaaacaaauaauuugu

SEQ ID NO: 2133386 - RNA, 13 nt, Human
uugagacaaaaau

SEQ ID NO: 2133387 - RNA, 15 nt, Human
uugagacaaaaauua

SEQ ID NO: 2133388 - RNA, 16 nt, Human
uugagacaaaaauuau

SEQ ID NO: 2133389 - RNA, 17 nt, Human
uugagacaaaaauuauc

SEQ ID NO: 2133390 - RNA, 23 nt, Human
uugagacaaaaauuaucuauuug

SEQ ID NO: 2133391 - RNA, 12 nt, Human
uugagcagggcu

SEQ ID NO: 2133392 - RNA, 16 nt, Human
uugagcagggcucagc

SEQ ID NO: 2133393 - RNA, 22 nt, Human
uugagaaaccuuauuguaccuc

SEQ ID NO: 2133394 - RNA, 10 nt, Human
uugagaaacc

SEQ ID NO: 2133395 - RNA, 14 nt, Human
uugacauguggaaa

SEQ ID NO: 2133396 - RNA, 22 nt, Human
uugacauguggaaagugaauuu

SEQ ID NO: 2133397 - RNA, 14 nt, Human
uugaccaagaacug

SEQ ID NO: 2133398 - RNA, 15 nt, Human
uugaccaagaacugc

SEQ ID NO: 2133399 - RNA, 16 nt, Human
uugaccaagaacugca

SEQ ID NO: 2133400 - RNA, 17 nt, Human
uugaccaagaacugcau

SEQ ID NO: 2133401 - RNA, 18 nt, Human
uugaccaagaacugcaug

SEQ ID NO: 2133402 - RNA, 21 nt, Human
uugaccaagaacugcauggac

SEQ ID NO: 2133403 - RNA, 16 nt, Human
uugaccaagcaggaag

SEQ ID NO: 2133404 - RNA, 18 nt, Human
uugaccaagcaggaagcu

SEQ ID NO: 2133405 - RNA, 20 nt, Human
uugaccaagcaggaagcuca

SEQ ID NO: 2133406 - RNA, 22 nt, Human
uugaccaagcaggaagcucaga

SEQ ID NO: 2133407 - RNA, 21 nt, Human
uugaccagcagaucccagcuc

SEQ ID NO: 2133408 - RNA, 22 nt, Human
uugaccagcagaucccagcuca

SEQ ID NO: 2133409 - RNA, 21 nt, Human
uugagugcugucuccauguuu

SEQ ID NO: 2133410 - RNA, 17 nt, Human
uugaguguuuuaagaua

SEQ ID NO: 2133411 - RNA, 17 nt, Human
uugaguggaugauguuu

SEQ ID NO: 2133412 - RNA, 19 nt, Human
uugaguggaugauguuucg

SEQ ID NO: 2133413 - RNA, 13 nt, Human
uugauacuuguuu

SEQ ID NO: 2133414 - RNA, 16 nt, Human
uugauacuuguucaaa

SEQ ID NO: 2133415 - RNA, 17 nt, Human
uugauacuuguucaaaa

SEQ ID NO: 2133416 - RNA, 23 nt, Human
aucuaauauguaacaagccaccc

SEQ ID NO: 2133417 - RNA, 20 nt, Human
aucuaauauguaacaagcca

SEQ ID NO: 2133418 - RNA, 16 nt, Human
aucuaauuauuuugca

SEQ ID NO: 2133419 - RNA, 16 nt, Human
aucuaccuuuucucuu

SEQ ID NO: 2133420 - RNA, 14 nt, Human
aucuagcaaauguu

SEQ ID NO: 2133421 - RNA, 18 nt, Human
aucuagcaaauguuaugc

SEQ ID NO: 2133422 - RNA, 23 nt, Human
aucucaaauaacuaaaagguaug

SEQ ID NO: 2133423 - RNA, 14 nt, Human
aucucaaauaacua

SEQ ID NO: 2133424 - RNA, 21 nt, Human
aucucaaauaacuaaaaggua

SEQ ID NO: 2133425 - RNA, 14 nt, Human
aucucaaaaaauaa

SEQ ID NO: 2133426 - RNA, 20 nt, Human
uuuacccuucuuuucugacu

SEQ ID NO: 2133427 - RNA, 21 nt, Human
augcuacuacaaaaaaguugu

SEQ ID NO: 2133428 - RNA, 13 nt, Human
uuuacccuuggcu

SEQ ID NO: 2133429 - RNA, 19 nt, Human
uuuaccuaccacagugucu

SEQ ID NO: 2133430 - RNA, 18 nt, Human
uuuaccuaccacaguguc

SEQ ID NO: 2133431 - RNA, 17 nt, Human
augcgaaugguagucua

SEQ ID NO: 2133432 - RNA, 19 nt, Human
augcuaccaugccucucca

SEQ ID NO: 2133433 - RNA, 22 nt, Human
uuuacugccaaagggaaauauc

SEQ ID NO: 2133434 - RNA, 16 nt, Human
uuuacugucuuaauua

SEQ ID NO: 2133435 - RNA, 21 nt, Human
uuuacugucuuaauuaaguaa

SEQ ID NO: 2133436 - RNA, 12 nt, Human
uuuacugcuuuu

SEQ ID NO: 2133437 - RNA, 11 nt, Human
uuuacuuaaac

SEQ ID NO: 2133438 - RNA, 14 nt, Human
uuuacuguuuguua

SEQ ID NO: 2133439 - RNA, 16 nt, Human
uuuacugcagcuuugu

SEQ ID NO: 2133440 - RNA, 21 nt, Human
uuuacugagcuucucugugaa

SEQ ID NO: 2133441 - RNA, 18 nt, Human
uuuacugagcuucucugu

SEQ ID NO: 2133442 - RNA, 17 nt, Human
uuuacugagcuucucug

SEQ ID NO: 2133443 - RNA, 14 nt, Human
uuuacugagcuucu

SEQ ID NO: 2133444 - RNA, 18 nt, Human
uuuacuccccuugagcug

SEQ ID NO: 2133445 - RNA, 12 nt, Human
uuuacuccccuu

SEQ ID NO: 2133446 - RNA, 13 nt, Human
uuuacuccccuug

SEQ ID NO: 2133447 - RNA, 13 nt, Human
uuuacuucuuaua

SEQ ID NO: 2133448 - RNA, 14 nt, Human
uuuacuucuuauac

SEQ ID NO: 2133449 - RNA, 15 nt, Human
uuuacuucuuauaca

SEQ ID NO: 2133450 - RNA, 17 nt, Human
uuuauauguauccagua

SEQ ID NO: 2133451 - RNA, 15 nt, Human
uuuaguguaaaaaug

SEQ ID NO: 2133452 - RNA, 16 nt, Human
uuuaguguaaaaauga

SEQ ID NO: 2133453 - RNA, 17 nt, Human
uuuaguguaaaaaugag

SEQ ID NO: 2133454 - RNA, 18 nt, Human
uuuaguguaaaaaugaga

SEQ ID NO: 2133455 - RNA, 22 nt, Human
uuuaguguaaaaaugagaacau

SEQ ID NO: 2133456 - RNA, 20 nt, Human
augccccuguacuccagccu

SEQ ID NO: 2133457 - RNA, 17 nt, Human
augcccagggccacucu

SEQ ID NO: 2133458 - RNA, 17 nt, Human
augccaucugugggcac

SEQ ID NO: 2133459 - RNA, 19 nt, Human
augccaucuguguccuggu

SEQ ID NO: 2133460 - RNA, 21 nt, Human
augcccagggccacucugccu

SEQ ID NO: 2133461 - RNA, 16 nt, Human
augcccagcucagagg

SEQ ID NO: 2133462 - RNA, 18 nt, Human
augccagcucagucccau

SEQ ID NO: 2133463 - RNA, 19 nt, Human
augccagcucagucccauc

SEQ ID NO: 2133464 - RNA, 20 nt, Human
augccagagcaaagggccag

SEQ ID NO: 2133465 - RNA, 21 nt, Human
uuuaaugaaagacuguacaaa

SEQ ID NO: 2133466 - RNA, 23 nt, Human
uuuaaugaaagacuguacaaagu

SEQ ID NO: 2133467 - RNA, 16 nt, Human
uuucccuauuagagaa

SEQ ID NO: 2133468 - RNA, 20 nt, Human
uuucccuaagccaagggccu

SEQ ID NO: 2133469 - RNA, 12 nt, Human
uuucccaagcug

SEQ ID NO: 2133470 - RNA, 15 nt, Human
uuucccaauuaggaa

SEQ ID NO: 2133471 - RNA, 21 nt, Human
uuuccauugguuuaccuguga

SEQ ID NO: 2133472 - RNA, 21 nt, Human
uuuccauuauuuauauuaguu

SEQ ID NO: 2133473 - RNA, 13 nt, Human
uuuccauuauuua

SEQ ID NO: 2133474 - RNA, 19 nt, Human
uuucauggggguauuaucc

SEQ ID NO: 2133475 - RNA, 23 nt, Human
uuucaucccuaugggauucagug

SEQ ID NO: 2133476 - RNA, 20 nt, Human
uuucagaaauaugugguuuc

SEQ ID NO: 2133477 - RNA, 16 nt, Human
uuucaucuauuucuga

SEQ ID NO: 2133478 - RNA, 13 nt, Human
uuucaucuauuuc

SEQ ID NO: 2133479 - RNA, 18 nt, Human
uuucaucuauuucugaga

SEQ ID NO: 2133480 - RNA, 16 nt, Human
uuucaucucuuguaua

SEQ ID NO: 2133481 - RNA, 20 nt, Human
uuucaaaccaguauacaaga

SEQ ID NO: 2133482 - RNA, 22 nt, Human
uuucaaaccaguauacaagaua

SEQ ID NO: 2133483 - RNA, 24 nt, Human
uuucaaaccaguauacaagauaag

SEQ ID NO: 2133484 - RNA, 15 nt, Human
uuucacauuaauauu

SEQ ID NO: 2133485 - RNA, 16 nt, Human
auggaaggguuugugg

SEQ ID NO: 2133486 - RNA, 16 nt, Human
uuucagaaauaugugg

SEQ ID NO: 2133487 - RNA, 19 nt, Human
uuucacuauuuuuauuuau

SEQ ID NO: 2133488 - RNA, 21 nt, Human
uuucagaaagaaguggggaca

SEQ ID NO: 2133489 - RNA, 23 nt, Human
uuucaccuguuuuuaagcuguuu

SEQ ID NO: 2133490 - RNA, 15 nt, Human
uuucacgggagauuu

SEQ ID NO: 2133491 - RNA, 22 nt, Human
uuucaccuguuuuuaagcuguu

SEQ ID NO: 2133492 - RNA, 14 nt, Human
augcuucugggaga

SEQ ID NO: 2133493 - RNA, 17 nt, Human
auggaagauuuuaaauu

SEQ ID NO: 2133494 - RNA, 16 nt, Human
auggaagauuuuaaau

SEQ ID NO: 2133495 - RNA, 17 nt, Human
augcuucugacuucaua

SEQ ID NO: 2133496 - RNA, 16 nt, Human
augcuucucacugcca

SEQ ID NO: 2133497 - RNA, 20 nt, Human
augcuucucacugccaugcc

SEQ ID NO: 2133498 - RNA, 20 nt, Human
augcuggcuguuggcugggg

SEQ ID NO: 2133499 - RNA, 19 nt, Human
augcuggcuguuggcuggg

SEQ ID NO: 2133500 - RNA, 20 nt, Human
augcugucaacuaugauaug

SEQ ID NO: 2133501 - RNA, 22 nt, Human
augcugucaacuaugauauggu

SEQ ID NO: 2133502 - RNA, 14 nt, Human
augcuguuucagag

SEQ ID NO: 2133503 - RNA, 15 nt, Human
augcuguugccucau

SEQ ID NO: 2133504 - RNA, 16 nt, Human
augcuguugccucauc

SEQ ID NO: 2133505 - RNA, 17 nt, Human
augcuguugccucaucu

SEQ ID NO: 2133506 - RNA, 18 nt, Human
augcuguugccucaucua

SEQ ID NO: 2133507 - RNA, 14 nt, Human
augcuguugccuca

SEQ ID NO: 2133508 - RNA, 18 nt, Human
augcuggcuguuggcugg

SEQ ID NO: 2133509 - RNA, 11 nt, Human
augcuggagcg

SEQ ID NO: 2133510 - RNA, 14 nt, Human
augcuggagcggcu

SEQ ID NO: 2133511 - RNA, 19 nt, Human
augcuggaugcuccuucca

SEQ ID NO: 2133512 - RNA, 18 nt, Human
augcuggcucccagggcc

SEQ ID NO: 2133513 - RNA, 19 nt, Human
augcuggcucccagggcca

SEQ ID NO: 2133514 - RNA, 14 nt, Human
augcuccuggccca

SEQ ID NO: 2133515 - RNA, 19 nt, Human
augcucaugguccccaugg

SEQ ID NO: 2133516 - RNA, 18 nt, Human
augcuggacaggucuggg

SEQ ID NO: 2133517 - RNA, 21 nt, Human
augcuggacaggucugggaga

SEQ ID NO: 2133518 - RNA, 23 nt, Human
augcuggacaggucugggagagg

SEQ ID NO: 2133519 - RNA, 21 nt, Human
augcuggacggcauuccugcu

SEQ ID NO: 2133520 - RNA, 22 nt, Human
augcuggacggcauuccugcuu

SEQ ID NO: 2133521 - RNA, 19 nt, Human
augcuccuggcccacugca

SEQ ID NO: 2133522 - RNA, 14 nt, Human
uuuaucagaauucu

SEQ ID NO: 2133523 - RNA, 13 nt, Human
augcucacacucc

SEQ ID NO: 2133524 - RNA, 12 nt, Human
uuuaucagcagu

SEQ ID NO: 2133525 - RNA, 16 nt, Human
uuuaucagcaguuguu

SEQ ID NO: 2133526 - RNA, 22 nt, Human
uuuaucagcaguuguuauuaca

SEQ ID NO: 2133527 - RNA, 13 nt, Human
uuuaucagugaca

SEQ ID NO: 2133528 - RNA, 18 nt, Human
uuuaucagugacagaguu

SEQ ID NO: 2133529 - RNA, 21 nt, Human
uuuaucagugacagaguucac

SEQ ID NO: 2133530 - RNA, 16 nt, Human
augcucacgcucccaa

SEQ ID NO: 2133531 - RNA, 18 nt, Human
augcucagguacagagaa

SEQ ID NO: 2133532 - RNA, 19 nt, Human
augcucagguacagagaag

SEQ ID NO: 2133533 - RNA, 21 nt, Human
augcucagguacagagaagga

SEQ ID NO: 2133534 - RNA, 22 nt, Human
augcucagguacagagaaggaa

SEQ ID NO: 2133535 - RNA, 17 nt, Human
augcucccuccccugcc

SEQ ID NO: 2133536 - RNA, 18 nt, Human
augcucccuccccugccc

SEQ ID NO: 2133537 - RNA, 19 nt, Human
augcucccuccccugcccu

SEQ ID NO: 2133538 - RNA, 20 nt, Human
augcucccuccccugcccug

SEQ ID NO: 2133539 - RNA, 22 nt, Human
augcucccuccccugcccuggu

SEQ ID NO: 2133540 - RNA, 13 nt, Human
uuuaaaugaaagu

SEQ ID NO: 2133541 - RNA, 21 nt, Human
uuuaaaugaaagugagacuuu

SEQ ID NO: 2133542 - RNA, 12 nt, Human
uuuaaauccugu

SEQ ID NO: 2133543 - RNA, 17 nt, Human
uuuaaauccuguugaaa

SEQ ID NO: 2133544 - RNA, 20 nt, Human
uuuaaauccuguugaaaagc

SEQ ID NO: 2133545 - RNA, 16 nt, Human
uuuaaauauauuuuca

SEQ ID NO: 2133546 - RNA, 16 nt, Human
uuuaaauguaaaacau

SEQ ID NO: 2133547 - RNA, 15 nt, Human
augcagagucagcag

SEQ ID NO: 2133548 - RNA, 16 nt, Human
augcagagucagcaga

SEQ ID NO: 2133549 - RNA, 17 nt, Human
augcagagucagcagaa

SEQ ID NO: 2133550 - RNA, 22 nt, Human
uuuaaaaaaauacaguauucug

SEQ ID NO: 2133551 - RNA, 23 nt, Human
uuuaaaaauacagauagauauau

SEQ ID NO: 2133552 - RNA, 14 nt, Human
uuuaagaggcaggg

SEQ ID NO: 2133553 - RNA, 11 nt, Human
uuuaagcuguu

SEQ ID NO: 2133554 - RNA, 15 nt, Human
uuuaaggaagaaaaa

SEQ ID NO: 2133555 - RNA, 16 nt, Human
uuuaaggaagaaaaau

SEQ ID NO: 2133556 - RNA, 21 nt, Human
uuuaagcuguuacugucuuca

SEQ ID NO: 2133557 - RNA, 18 nt, Human
uuuaagcuguuuccauag

SEQ ID NO: 2133558 - RNA, 22 nt, Human
uuuaagcuuauuuaauuaaaaa

SEQ ID NO: 2133559 - RNA, 13 nt, Human
uuuaagcuguuuc

SEQ ID NO: 2133560 - RNA, 12 nt, Human
uuuaagcuguuu

SEQ ID NO: 2133561 - RNA, 20 nt, Human
uuuaaggagauguaagagcu

SEQ ID NO: 2133562 - RNA, 21 nt, Human
uuuaaggagauguaagagcuu

SEQ ID NO: 2133563 - RNA, 18 nt, Human
uuuaaggcuaaaacuuaa

SEQ ID NO: 2133564 - RNA, 16 nt, Human
uuuaaggcuucaauuu

SEQ ID NO: 2133565 - RNA, 22 nt, Human
uuuaaggcuucaauuuauugca

SEQ ID NO: 2133566 - RNA, 20 nt, Human
uuuaaggguuuguggaaaau

SEQ ID NO: 2133567 - RNA, 17 nt, Human
uuuaaggguuuguggaa

SEQ ID NO: 2133568 - RNA, 22 nt, Human
uuuaaggguuuguggaaaauga

SEQ ID NO: 2133569 - RNA, 16 nt, Human
uuuaaugaaagacugu

SEQ ID NO: 2133570 - RNA, 20 nt, Human
augauuuccaaagagaaaaa

SEQ ID NO: 2133571 - RNA, 20 nt, Human
augcaaacauaacaaaauca

SEQ ID NO: 2133572 - RNA, 14 nt, Human
augcaaagaggcaa

SEQ ID NO: 2133573 - RNA, 15 nt, Human
augcaaagaggcaag

SEQ ID NO: 2133574 - RNA, 23 nt, Human
augcaaaagguucacuaaagcag

SEQ ID NO: 2133575 - RNA, 22 nt, Human
augauugugcacauacuugaga

SEQ ID NO: 2133576 - RNA, 14 nt, Human
augauuuacucauu

SEQ ID NO: 2133577 - RNA, 15 nt, Human
augauuuacucauua

SEQ ID NO: 2133578 - RNA, 18 nt, Human
augauuuagagugcuguc

SEQ ID NO: 2133579 - RNA, 22 nt, Human
augcacgugugcacacacacca

SEQ ID NO: 2133580 - RNA, 16 nt, Human
augcaaagaggcaaga

SEQ ID NO: 2133581 - RNA, 22 nt, Human
uugugaugucccaacuuguaaa

SEQ ID NO: 2133582 - RNA, 18 nt, Human
uugugaugucccaacuug

SEQ ID NO: 2133583 - RNA, 14 nt, Human
uugugaucuugcuc

SEQ ID NO: 2133584 - RNA, 15 nt, Human
uugugaucuugcucu

SEQ ID NO: 2133585 - RNA, 15 nt, Human
uuguguacucuggcc

SEQ ID NO: 2133586 - RNA, 17 nt, Human
uuguguacucuggccuc

SEQ ID NO: 2133587 - RNA, 18 nt, Human
uuguguacucuggccucu

SEQ ID NO: 2133588 - RNA, 17 nt, Human
uuguguaauaaaguguu

SEQ ID NO: 2133589 - RNA, 19 nt, Human
uuguguaauaaaguguuuu

SEQ ID NO: 2133590 - RNA, 21 nt, Human
uuguguaauaaaguguuuuca

SEQ ID NO: 2133591 - RNA, 22 nt, Human
uuguguaauaaaguguuuucag

SEQ ID NO: 2133592 - RNA, 15 nt, Human
uuguguacagugugu

SEQ ID NO: 2133593 - RNA, 18 nt, Human
uugugaauugauaauaaa

SEQ ID NO: 2133594 - RNA, 13 nt, Human
uugucccacagcu

SEQ ID NO: 2133595 - RNA, 14 nt, Human
uugucccacagcuu

SEQ ID NO: 2133596 - RNA, 23 nt, Human
uugucccauuucuaaaggccucu

SEQ ID NO: 2133597 - RNA, 13 nt, Human
uuguccagcgccu

SEQ ID NO: 2133598 - RNA, 20 nt, Human
uugucccacucaagccaagc

SEQ ID NO: 2133599 - RNA, 11 nt, Human
uuguccccagu

SEQ ID NO: 2133600 - RNA, 13 nt, Human
uuguccagagaca

SEQ ID NO: 2133601 - RNA, 23 nt, Human
uugugaauauguacauaggcagc

SEQ ID NO: 2133602 - RNA, 16 nt, Human
uugugaccaaguuaua

SEQ ID NO: 2133603 - RNA, 17 nt, Human
uugugacccaauuaagu

SEQ ID NO: 2133604 - RNA, 15 nt, Human
augaguuugcccugg

SEQ ID NO: 2133605 - RNA, 22 nt, Human
augaguuugcccugguuucacu

SEQ ID NO: 2133606 - RNA, 19 nt, Human
augaguuguuuucagacuc

SEQ ID NO: 2133607 - RNA, 20 nt, Human
augaguuguuuucagacuca

SEQ ID NO: 2133608 - RNA, 22 nt, Human
augaguuguuuucagacucaga

SEQ ID NO: 2133609 - RNA, 23 nt, Human
augaguuguuuucagacucagac

SEQ ID NO: 2133610 - RNA, 21 nt, Human
uuguccaacccgaggcccgca

SEQ ID NO: 2133611 - RNA, 21 nt, Human
uugucauauaagauucauauu

SEQ ID NO: 2133612 - RNA, 13 nt, Human
uugucagagcugg

SEQ ID NO: 2133613 - RNA, 15 nt, Human
uugucagagcuggga

SEQ ID NO: 2133614 - RNA, 18 nt, Human
uugucagauaugauaugu

SEQ ID NO: 2133615 - RNA, 12 nt, Human
uugucagcuacu

SEQ ID NO: 2133616 - RNA, 12 nt, Human
uugucagacuuu

SEQ ID NO: 2133617 - RNA, 14 nt, Human
uugucagacuuuaa

SEQ ID NO: 2133618 - RNA, 18 nt, Human
uugucagacuuuaaagaa

SEQ ID NO: 2133619 - RNA, 20 nt, Human
uugucagacuuuaaagaaua

SEQ ID NO: 2133620 - RNA, 13 nt, Human
uugucacaauaaa

SEQ ID NO: 2133621 - RNA, 14 nt, Human
uugucacaauaaau

SEQ ID NO: 2133622 - RNA, 23 nt, Human
uugucacaauccuaacacauuau

SEQ ID NO: 2133623 - RNA, 17 nt, Human
uugucacacacuuuggc

SEQ ID NO: 2133624 - RNA, 18 nt, Human
augaggucagagccugca

SEQ ID NO: 2133625 - RNA, 16 nt, Human
augaggucagagccug

SEQ ID NO: 2133626 - RNA, 23 nt, Human
uuguaacauccaauaggaaugcu

SEQ ID NO: 2133627 - RNA, 15 nt, Human
augaggucagagccu

SEQ ID NO: 2133628 - RNA, 20 nt, Human
augaggucagagccugcagu

SEQ ID NO: 2133629 - RNA, 19 nt, Human
augaggucagagccugcag

SEQ ID NO: 2133630 - RNA, 22 nt, Human
augagguucaacuguugauugc

SEQ ID NO: 2133631 - RNA, 22 nt, Human
augaggucagagccugcaguua

SEQ ID NO: 2133632 - RNA, 17 nt, Human
auuaauauucauuguau

SEQ ID NO: 2133633 - RNA, 19 nt, Human
auuaauauucauuguauaa

SEQ ID NO: 2133634 - RNA, 14 nt, Human
auuaauauuuuaau

SEQ ID NO: 2133635 - RNA, 13 nt, Human
auuacugucaaua

SEQ ID NO: 2133636 - RNA, 15 nt, Human
auuacugucaauaaa

SEQ ID NO: 2133637 - RNA, 16 nt, Human
auuacugucaauaaac

SEQ ID NO: 2133638 - RNA, 17 nt, Human
auuacugucaauaaaca

SEQ ID NO: 2133639 - RNA, 13 nt, Human
auuacuucugcua

SEQ ID NO: 2133640 - RNA, 12 nt, Human
auuacuucugcu

SEQ ID NO: 2133641 - RNA, 14 nt, Human
auuacuucugcuac

SEQ ID NO: 2133642 - RNA, 13 nt, Human
auuagagaagaga

SEQ ID NO: 2133643 - RNA, 21 nt, Human
uuuugugaaguuuaauugacu

SEQ ID NO: 2133644 - RNA, 24 nt, Human
uuuugugaaaugaaaacauguaau

SEQ ID NO: 2133645 - RNA, 21 nt, Human
uuuuguggucauuaagcauug

SEQ ID NO: 2133646 - RNA, 13 nt, Human
uuuuguguacagu

SEQ ID NO: 2133647 - RNA, 16 nt, Human
uuuuggaaucuagaag

SEQ ID NO: 2133648 - RNA, 17 nt, Human
uuuuggaaucuagaaga

SEQ ID NO: 2133649 - RNA, 22 nt, Human
uuuuggaaucuagaagaaauga

SEQ ID NO: 2133650 - RNA, 18 nt, Human
uuuugcuguuuccuuuua

SEQ ID NO: 2133651 - RNA, 13 nt, Human
auuaaaacaaugu

SEQ ID NO: 2133652 - RNA, 11 nt, Human
auuaaaaucuu

SEQ ID NO: 2133653 - RNA, 12 nt, Human
auuaaaaucuua

SEQ ID NO: 2133654 - RNA, 13 nt, Human
auuaaaaucuuaa

SEQ ID NO: 2133655 - RNA, 15 nt, Human
auuaaaaucuuaaac

SEQ ID NO: 2133656 - RNA, 13 nt, Human
auuaaaaugaaua

SEQ ID NO: 2133657 - RNA, 11 nt, Human
auuaaacaauu

SEQ ID NO: 2133658 - RNA, 15 nt, Human
auuaaacaauuuauu

SEQ ID NO: 2133659 - RNA, 16 nt, Human
auuaaacaauuuauuu

SEQ ID NO: 2133660 - RNA, 17 nt, Human
auuaaacaauuuauuuu

SEQ ID NO: 2133661 - RNA, 19 nt, Human
auuaaacaauuuauuuuau

SEQ ID NO: 2133662 - RNA, 20 nt, Human
auuaaacaauuuauuuuauu

SEQ ID NO: 2133663 - RNA, 18 nt, Human
uuuuuauauagcuugaaa

SEQ ID NO: 2133664 - RNA, 16 nt, Human
uuuuuaauuuauuuau

SEQ ID NO: 2133665 - RNA, 17 nt, Human
uuuuuaauuugaugaaa

SEQ ID NO: 2133666 - RNA, 20 nt, Human
uuuuuaauuugaugaaagcu

SEQ ID NO: 2133667 - RNA, 22 nt, Human
uuuuuaauuugaugaaagcuga

SEQ ID NO: 2133668 - RNA, 16 nt, Human
uuuuguuuuaaaauua

SEQ ID NO: 2133669 - RNA, 16 nt, Human
uuuuguuuuugucuua

SEQ ID NO: 2133670 - RNA, 16 nt, Human
uuuuguuaccuuuaug

SEQ ID NO: 2133671 - RNA, 16 nt, Human
uuuuucaauauuuauu

SEQ ID NO: 2133672 - RNA, 19 nt, Human
uuuuuauuuguuugugcau

SEQ ID NO: 2133673 - RNA, 14 nt, Human
uuuuugauagcuuu

SEQ ID NO: 2133674 - RNA, 17 nt, Human
uuuuuggauugacagua

SEQ ID NO: 2133675 - RNA, 15 nt, Human
uuuuugggaugucuu

SEQ ID NO: 2133676 - RNA, 15 nt, Human
uuuuugguggaugua

SEQ ID NO: 2133677 - RNA, 17 nt, Human
uuuuugguggauguaaa

SEQ ID NO: 2133678 - RNA, 18 nt, Human
uuuuugguggauguaaau

SEQ ID NO: 2133679 - RNA, 19 nt, Human
uuuuugguggauguaaaua

SEQ ID NO: 2133680 - RNA, 15 nt, Human
auuaagccuuccaca

SEQ ID NO: 2133681 - RNA, 13 nt, Human
auuaaggaagaca

SEQ ID NO: 2133682 - RNA, 18 nt, Human
auuaaguacuauguauca

SEQ ID NO: 2133683 - RNA, 15 nt, Human
auuaaggucucucuu

SEQ ID NO: 2133684 - RNA, 16 nt, Human
auuaaggucucucuuu

SEQ ID NO: 2133685 - RNA, 17 nt, Human
auuaaggucucucuuug

SEQ ID NO: 2133686 - RNA, 19 nt, Human
auuaaggucucucuuugga

SEQ ID NO: 2133687 - RNA, 21 nt, Human
auuaaggucucucuuuggacu

SEQ ID NO: 2133688 - RNA, 16 nt, Human
auuaaggcaacugaac

SEQ ID NO: 2133689 - RNA, 19 nt, Human
auuaaggcaacugaacaaa

SEQ ID NO: 2133690 - RNA, 20 nt, Human
auuaaggcaacugaacaaaa

SEQ ID NO: 2133691 - RNA, 21 nt, Human
auuaaggcaacugaacaaaaa

SEQ ID NO: 2133692 - RNA, 19 nt, Human
auuaaguacuauguaucaa

SEQ ID NO: 2133693 - RNA, 20 nt, Human
auucaguugguaagcuucca

SEQ ID NO: 2133694 - RNA, 18 nt, Human
auuccagagaguggcucc

SEQ ID NO: 2133695 - RNA, 17 nt, Human
auucccaagcucugcuc

SEQ ID NO: 2133696 - RNA, 19 nt, Human
auucccaagcucugcuccu

SEQ ID NO: 2133697 - RNA, 18 nt, Human
auucccaagcucugcucc

SEQ ID NO: 2133698 - RNA, 18 nt, Human
auuccagagacaucagca

SEQ ID NO: 2133699 - RNA, 12 nt, Human
auucccagagac

SEQ ID NO: 2133700 - RNA, 21 nt, Human
auuccccagguggcugaccca

SEQ ID NO: 2133701 - RNA, 22 nt, Human
auuccccagguggcugacccag

SEQ ID NO: 2133702 - RNA, 20 nt, Human
auuccuaacacagcaugugu

SEQ ID NO: 2133703 - RNA, 18 nt, Human
auuccuacaaagauguuu

SEQ ID NO: 2133704 - RNA, 20 nt, Human
auucagcccauuucacaccu

SEQ ID NO: 2133705 - RNA, 14 nt, Human
auucacuugcauuu

SEQ ID NO: 2133706 - RNA, 20 nt, Human
auucacugaaguucuccuga

SEQ ID NO: 2133707 - RNA, 16 nt, Human
auucagugagggucuu

SEQ ID NO: 2133708 - RNA, 21 nt, Human
auucagugagggucuucuuac

SEQ ID NO: 2133709 - RNA, 11 nt, Human
auucaggcugc

SEQ ID NO: 2133710 - RNA, 13 nt, Human
auucaggcugcuu

SEQ ID NO: 2133711 - RNA, 16 nt, Human
auucaggcugcuuggg

SEQ ID NO: 2133712 - RNA, 17 nt, Human
auucagugcuguggccu

SEQ ID NO: 2133713 - RNA, 20 nt, Human
auucagugcuguggccuggg

SEQ ID NO: 2133714 - RNA, 14 nt, Human
auucagugcuucuu

SEQ ID NO: 2133715 - RNA, 17 nt, Human
auucagugcuucuuaaa

SEQ ID NO: 2133716 - RNA, 21 nt, Human
auucagugcuguggccugggc

SEQ ID NO: 2133717 - RNA, 22 nt, Human
auucagugcuguggccugggca

SEQ ID NO: 2133718 - RNA, 14 nt, Human
auucaguuaagaaa

SEQ ID NO: 2133719 - RNA, 15 nt, Human
auucaguuaagaaaa

SEQ ID NO: 2133720 - RNA, 16 nt, Human
auucaguuaagaaaaa

SEQ ID NO: 2133721 - RNA, 17 nt, Human
auucaguuaagaaaaaa

SEQ ID NO: 2133722 - RNA, 18 nt, Human
auucaguuaagaaaaaaa

SEQ ID NO: 2133723 - RNA, 20 nt, Human
auucaguuaagaaaaaaaua

SEQ ID NO: 2133724 - RNA, 19 nt, Human
auucagugcuucuuaaaga

SEQ ID NO: 2133725 - RNA, 15 nt, Human
auuauucaccaugua

SEQ ID NO: 2133726 - RNA, 18 nt, Human
auuauucaccauguaaaa

SEQ ID NO: 2133727 - RNA, 20 nt, Human
auuauucaccauguaaaaca

SEQ ID NO: 2133728 - RNA, 21 nt, Human
auuauucaccauguaaaacaa

SEQ ID NO: 2133729 - RNA, 22 nt, Human
auuauucaccauguaaaacaaa

SEQ ID NO: 2133730 - RNA, 16 nt, Human
auuauaucuaauuauu

SEQ ID NO: 2133731 - RNA, 15 nt, Human
auuauaacuuaaaaa

SEQ ID NO: 2133732 - RNA, 22 nt, Human
auuauaacuuaaaaaaaugaca

SEQ ID NO: 2133733 - RNA, 15 nt, Human
auuauaacuuaaaau

SEQ ID NO: 2133734 - RNA, 16 nt, Human
auuauaacuuaaaaua

SEQ ID NO: 2133735 - RNA, 19 nt, Human
auuagacuuuagaaauaaa

SEQ ID NO: 2133736 - RNA, 20 nt, Human
auuagacuuuagaaauaaau

SEQ ID NO: 2133737 - RNA, 21 nt, Human
auuauaacugaaggagaaggu

SEQ ID NO: 2133738 - RNA, 12 nt, Human
auucaaaaaugu

SEQ ID NO: 2133739 - RNA, 14 nt, Human
auucaaaaauguac

SEQ ID NO: 2133740 - RNA, 16 nt, Human
auucaaaaauguacaa

SEQ ID NO: 2133741 - RNA, 12 nt, Human
auuauuuuuaau

SEQ ID NO: 2133742 - RNA, 17 nt, Human
auuauuuuuaauaugua

SEQ ID NO: 2133743 - RNA, 14 nt, Human
auuauuuuuuauga

SEQ ID NO: 2133744 - RNA, 12 nt, Human
auuauuguuuau

SEQ ID NO: 2133745 - RNA, 19 nt, Human
auuauuguuuauauuuuca

SEQ ID NO: 2133746 - RNA, 23 nt, Human
auuauuguguguuauuuaaauga

SEQ ID NO: 2133747 - RNA, 18 nt, Human
auuauuggaauuaaccug

SEQ ID NO: 2133748 - RNA, 14 nt, Human
auuauuggaauuaa

SEQ ID NO: 2133749 - RNA, 13 nt, Human
auuauugcuguug

SEQ ID NO: 2133750 - RNA, 15 nt, Human
auuauucaguuaaga

SEQ ID NO: 2133751 - RNA, 18 nt, Human
auuauucaguuaagaaaa

SEQ ID NO: 2133752 - RNA, 12 nt, Human
auuauugcauua

SEQ ID NO: 2133753 - RNA, 23 nt, Human
auucaccuuccagugucucggag

SEQ ID NO: 2133754 - RNA, 12 nt, Human
auucaccuguaa

SEQ ID NO: 2133755 - RNA, 13 nt, Human
auucaccuguaaa

SEQ ID NO: 2133756 - RNA, 14 nt, Human
auucaccuguaaaa

SEQ ID NO: 2133757 - RNA, 15 nt, Human
auucaccuguaaaac

SEQ ID NO: 2133758 - RNA, 16 nt, Human
auucaccuguaaaacu

SEQ ID NO: 2133759 - RNA, 17 nt, Human
auucaccuguaaaacuu

SEQ ID NO: 2133760 - RNA, 18 nt, Human
auucaccuguaaaacuuu

SEQ ID NO: 2133761 - RNA, 19 nt, Human
auucaccuguaaaacuuua

SEQ ID NO: 2133762 - RNA, 19 nt, Human
auucacccagacagcuccc

SEQ ID NO: 2133763 - RNA, 19 nt, Human
auucaccauguaaaacaaa

SEQ ID NO: 2133764 - RNA, 21 nt, Human
auucaccauguaaaacaaaaa

SEQ ID NO: 2133765 - RNA, 22 nt, Human
auucaccauguaaaacaaaaaa

SEQ ID NO: 2133766 - RNA, 14 nt, Human
auucacccagacag

SEQ ID NO: 2133767 - RNA, 13 nt, Human
uuuguuucauauu

SEQ ID NO: 2133768 - RNA, 18 nt, Human
uuuguuucucccccuggg

SEQ ID NO: 2133769 - RNA, 16 nt, Human
uuuguuucugaaaauu

SEQ ID NO: 2133770 - RNA, 20 nt, Human
uuuguuuuaaggaagaaaaa

SEQ ID NO: 2133771 - RNA, 14 nt, Human
uuuguuuguuuugu

SEQ ID NO: 2133772 - RNA, 15 nt, Human
uuuguuuuaaaauua

SEQ ID NO: 2133773 - RNA, 11 nt, Human
uuuguuuguuu

SEQ ID NO: 2133774 - RNA, 15 nt, Human
uuuguuuguuugggu

SEQ ID NO: 2133775 - RNA, 23 nt, Human
uuugucuuaaaaaguggaaaaau

SEQ ID NO: 2133776 - RNA, 13 nt, Human
uuugucuuaaaaa

SEQ ID NO: 2133777 - RNA, 14 nt, Human
uuugucuuaaaaag

SEQ ID NO: 2133778 - RNA, 13 nt, Human
uuuguaagaaacc

SEQ ID NO: 2133779 - RNA, 13 nt, Human
uuuguaaguuauu

SEQ ID NO: 2133780 - RNA, 15 nt, Human
uuuguaauuuucuug

SEQ ID NO: 2133781 - RNA, 16 nt, Human
uuuguaauuuucuuga

SEQ ID NO: 2133782 - RNA, 14 nt, Human
uuuguaauaaagua

SEQ ID NO: 2133783 - RNA, 19 nt, Human
uuuguacagacguaugcuu

SEQ ID NO: 2133784 - RNA, 22 nt, Human
uuuguacagacguaugcuuauu

SEQ ID NO: 2133785 - RNA, 21 nt, Human
uuuguacaauugaacuuaaau

SEQ ID NO: 2133786 - RNA, 18 nt, Human
uuuguacagacguaugcu

SEQ ID NO: 2133787 - RNA, 14 nt, Human
uuuguagguacuuu

SEQ ID NO: 2133788 - RNA, 16 nt, Human
uuuguagguacuuuug

SEQ ID NO: 2133789 - RNA, 16 nt, Human
uuuguaggguuucuag

SEQ ID NO: 2133790 - RNA, 15 nt, Human
uuuguaggguuucua

SEQ ID NO: 2133791 - RNA, 17 nt, Human
auguccuccuuguucua

SEQ ID NO: 2133792 - RNA, 15 nt, Human
augucgccucugcau

SEQ ID NO: 2133793 - RNA, 23 nt, Human
auguccuccagaagccucuggcu

SEQ ID NO: 2133794 - RNA, 20 nt, Human
auguccuccagaagccucug

SEQ ID NO: 2133795 - RNA, 22 nt, Human
auguccuccagaagccucuggc

SEQ ID NO: 2133796 - RNA, 19 nt, Human
augugacaugcgggcuggg

SEQ ID NO: 2133797 - RNA, 18 nt, Human
augugacaauuuuguaca

SEQ ID NO: 2133798 - RNA, 20 nt, Human
augugacaauuuuguacaaa

SEQ ID NO: 2133799 - RNA, 21 nt, Human
augugacaauuuuguacaaau

SEQ ID NO: 2133800 - RNA, 14 nt, Human
augugagagaaagu

SEQ ID NO: 2133801 - RNA, 15 nt, Human
augugagagaaagug

SEQ ID NO: 2133802 - RNA, 21 nt, Human
augugauacccauagcuucca

SEQ ID NO: 2133803 - RNA, 22 nt, Human
augugaguguguguuugugcug

SEQ ID NO: 2133804 - RNA, 20 nt, Human
augugauaaggaucagaaca

SEQ ID NO: 2133805 - RNA, 16 nt, Human
augucauuaaacauga

SEQ ID NO: 2133806 - RNA, 16 nt, Human
auguccuccagaagcc

SEQ ID NO: 2133807 - RNA, 18 nt, Human
auguccuccagaagccuc

SEQ ID NO: 2133808 - RNA, 19 nt, Human
auguccuccagaagccucu

SEQ ID NO: 2133809 - RNA, 20 nt, Human
augucccuuucuuggccagu

SEQ ID NO: 2133810 - RNA, 16 nt, Human
augucccuuucuuggc

SEQ ID NO: 2133811 - RNA, 17 nt, Human
augucauuaaaauaaau

SEQ ID NO: 2133812 - RNA, 20 nt, Human
augucauuaaaauaaauaaa

SEQ ID NO: 2133813 - RNA, 14 nt, Human
augucaucccauug

SEQ ID NO: 2133814 - RNA, 19 nt, Human
auguauauuuaaaagaaag

SEQ ID NO: 2133815 - RNA, 12 nt, Human
auguaucaauga

SEQ ID NO: 2133816 - RNA, 16 nt, Human
auguauauguguucau

SEQ ID NO: 2133817 - RNA, 13 nt, Human
uuugagacagagu

SEQ ID NO: 2133818 - RNA, 13 nt, Human
uuugagacaggag

SEQ ID NO: 2133819 - RNA, 19 nt, Human
uuugagaccagccugggca

SEQ ID NO: 2133820 - RNA, 16 nt, Human
uuugagaccagccugg

SEQ ID NO: 2133821 - RNA, 15 nt, Human
uuugauccaagcugg

SEQ ID NO: 2133822 - RNA, 14 nt, Human
uuugauccaagcug

SEQ ID NO: 2133823 - RNA, 23 nt, Human
uuugagaccugaauagcucccag

SEQ ID NO: 2133824 - RNA, 16 nt, Human
uuugaugaaagcugau

SEQ ID NO: 2133825 - RNA, 15 nt, Human
uuugauuaugacugu

SEQ ID NO: 2133826 - RNA, 15 nt, Human
uuugacaacaaauua

SEQ ID NO: 2133827 - RNA, 14 nt, Human
uuucauguaaauaa

SEQ ID NO: 2133828 - RNA, 20 nt, Human
uuugacaauuccuagauaaa

SEQ ID NO: 2133829 - RNA, 19 nt, Human
uuucccuccacuccuuccu

SEQ ID NO: 2133830 - RNA, 15 nt, Human
uuucccuacucccca

SEQ ID NO: 2133831 - RNA, 23 nt, Human
uuucccucccuuccucuuuccau

SEQ ID NO: 2133832 - RNA, 13 nt, Human
uuucccugaccuc

SEQ ID NO: 2133833 - RNA, 22 nt, Human
uuucccugcuuaaugaaaagcu

SEQ ID NO: 2133834 - RNA, 15 nt, Human
uuucccuucuucugu

SEQ ID NO: 2133835 - RNA, 21 nt, Human
uuugcgcacaacuuaaaaagu

SEQ ID NO: 2133836 - RNA, 14 nt, Human
uuugcggacgggcu

SEQ ID NO: 2133837 - RNA, 21 nt, Human
uuugccuugggcugcuccuca

SEQ ID NO: 2133838 - RNA, 12 nt, Human
uuugcaaaauuu

SEQ ID NO: 2133839 - RNA, 12 nt, Human
uuugccugugcc

SEQ ID NO: 2133840 - RNA, 17 nt, Human
uuugauuuagauugagu

SEQ ID NO: 2133841 - RNA, 15 nt, Human
uuugauucugugugu

SEQ ID NO: 2133842 - RNA, 22 nt, Human
uuuggauuggaugaauuccaaa

SEQ ID NO: 2133843 - RNA, 22 nt, Human
uuugcuaacuagcuuggaaacu

SEQ ID NO: 2133844 - RNA, 23 nt, Human
uuuggauugacaguaacuugguu

SEQ ID NO: 2133845 - RNA, 22 nt, Human
uuugggguacccacugcucugg

SEQ ID NO: 2133846 - RNA, 20 nt, Human
uuugggguagcuagaggaac

SEQ ID NO: 2133847 - RNA, 21 nt, Human
uuugggguugcaucagaaaug

SEQ ID NO: 2133848 - RNA, 13 nt, Human
uuuggguaaauca

SEQ ID NO: 2133849 - RNA, 21 nt, Human
uuugggguacccacugcucug

SEQ ID NO: 2133850 - RNA, 14 nt, Human
auguauaauauuuu

SEQ ID NO: 2133851 - RNA, 23 nt, Human
auguauaauauuuuuaauuaaau

SEQ ID NO: 2133852 - RNA, 14 nt, Human
uuugggcugcccug

SEQ ID NO: 2133853 - RNA, 12 nt, Human
uuugggaugucu

SEQ ID NO: 2133854 - RNA, 14 nt, Human
uuugggaugucuua

SEQ ID NO: 2133855 - RNA, 15 nt, Human
uuugggaugucuuau

SEQ ID NO: 2133856 - RNA, 17 nt, Human
uuugggaugucuuauuu

SEQ ID NO: 2133857 - RNA, 22 nt, Human
uuugggaugucuuauuuuuaga

SEQ ID NO: 2133858 - RNA, 17 nt, Human
uuugggaggcugaggug

SEQ ID NO: 2133859 - RNA, 21 nt, Human
uuuucugcaucaucuguagau

SEQ ID NO: 2133860 - RNA, 23 nt, Human
uuuucuguugaaguuuacaauca

SEQ ID NO: 2133861 - RNA, 12 nt, Human
auguuuaagauu

SEQ ID NO: 2133862 - RNA, 13 nt, Human
auguuuaagauuu

SEQ ID NO: 2133863 - RNA, 14 nt, Human
auguuuaagauuua

SEQ ID NO: 2133864 - RNA, 21 nt, Human
auguuuaagauuuaauuugcc

SEQ ID NO: 2133865 - RNA, 15 nt, Human
auguugguauuuauc

SEQ ID NO: 2133866 - RNA, 17 nt, Human
auguugguauuuaucua

SEQ ID NO: 2133867 - RNA, 21 nt, Human
auguugguauuuaucuauugu

SEQ ID NO: 2133868 - RNA, 17 nt, Human
auguuggccaggcuggu

SEQ ID NO: 2133869 - RNA, 21 nt, Human
auguuuuucugccagggagcu

SEQ ID NO: 2133870 - RNA, 22 nt, Human
auguuuuucugccagggagcuu

SEQ ID NO: 2133871 - RNA, 16 nt, Human
auguuuuuaaauauau

SEQ ID NO: 2133872 - RNA, 17 nt, Human
auguuuuuaaauauauu

SEQ ID NO: 2133873 - RNA, 20 nt, Human
auuaaaaauuggcuaguuga

SEQ ID NO: 2133874 - RNA, 11 nt, Human
auuaaaacaau

SEQ ID NO: 2133875 - RNA, 14 nt, Human
auuaaaacaauauu

SEQ ID NO: 2133876 - RNA, 18 nt, Human
auuaaaacaauauuguuu

SEQ ID NO: 2133877 - RNA, 20 nt, Human
auuaaaacaauauuguuucu

SEQ ID NO: 2133878 - RNA, 21 nt, Human
auuaaaacaauauuguuucua

SEQ ID NO: 2133879 - RNA, 13 nt, Human
auuaaaaauggua

SEQ ID NO: 2133880 - RNA, 14 nt, Human
auuaaaaaugguaa

SEQ ID NO: 2133881 - RNA, 17 nt, Human
auuaaaaaugguaaaau

SEQ ID NO: 2133882 - RNA, 18 nt, Human
auuaaaaaugguaaaauu

SEQ ID NO: 2133883 - RNA, 19 nt, Human
auuaaaaaugguaaaauug

SEQ ID NO: 2133884 - RNA, 21 nt, Human
auuaaaaaugguaaaauugca

SEQ ID NO: 2133885 - RNA, 23 nt, Human
auuaaaaaugguaaaauugcaug

SEQ ID NO: 2133886 - RNA, 16 nt, Human
auguuuuuuauuaugc

SEQ ID NO: 2133887 - RNA, 22 nt, Human
uuuucucuugggcugagacugg

SEQ ID NO: 2133888 - RNA, 14 nt, Human
uuuucucuuucucc

SEQ ID NO: 2133889 - RNA, 22 nt, Human
uuuucucuuucuccuuagucuu

SEQ ID NO: 2133890 - RNA, 23 nt, Human
uuuucaguagggcuacaaaaccu

SEQ ID NO: 2133891 - RNA, 11 nt, Human
uuuuauugugu

SEQ ID NO: 2133892 - RNA, 13 nt, Human
uuuuccacuacug

SEQ ID NO: 2133893 - RNA, 15 nt, Human
uuuuccacuacugcu

SEQ ID NO: 2133894 - RNA, 22 nt, Human
uuuuccacaagauucccagaga

SEQ ID NO: 2133895 - RNA, 15 nt, Human
uuuuccacccuggaa

SEQ ID NO: 2133896 - RNA, 14 nt, Human
uuuucaguguacau

SEQ ID NO: 2133897 - RNA, 15 nt, Human
uuuuaguagagacag

SEQ ID NO: 2133898 - RNA, 16 nt, Human
uuuuagucauuuugcu

SEQ ID NO: 2133899 - RNA, 22 nt, Human
uuuuagacaaaucuaagggaaa

SEQ ID NO: 2133900 - RNA, 15 nt, Human
uuuuaguacccaccu

SEQ ID NO: 2133901 - RNA, 21 nt, Human
uuuuaguacccaccugagcuu

SEQ ID NO: 2133902 - RNA, 12 nt, Human
uuuuauuaaauu

SEQ ID NO: 2133903 - RNA, 12 nt, Human
uuuuauucuugu

SEQ ID NO: 2133904 - RNA, 13 nt, Human
uuuuauucuugug

SEQ ID NO: 2133905 - RNA, 18 nt, Human
uuuuauucuugugaauau

SEQ ID NO: 2133906 - RNA, 19 nt, Human
uuuuauugagaauuuuaaa

SEQ ID NO: 2133907 - RNA, 12 nt, Human
auguugaaagau

SEQ ID NO: 2133908 - RNA, 14 nt, Human
auguucaaagucaa

SEQ ID NO: 2133909 - RNA, 23 nt, Human
auguucaaagucaaauaacuccu

SEQ ID NO: 2133910 - RNA, 14 nt, Human
auguucaacuggag

SEQ ID NO: 2133911 - RNA, 22 nt, Human
auguucaacuggagacacuauu

SEQ ID NO: 2133912 - RNA, 15 nt, Human
auguugcccaggcag

SEQ ID NO: 2133913 - RNA, 14 nt, Human
auguugcccaggca

SEQ ID NO: 2133914 - RNA, 13 nt, Human
auguugcccaggc

SEQ ID NO: 2133915 - RNA, 18 nt, Human
auguugaaagaucaaaag

SEQ ID NO: 2133916 - RNA, 21 nt, Human
uuuuagacccuauugcugcuu

SEQ ID NO: 2133917 - RNA, 18 nt, Human
auguuaugcauaaaguca

SEQ ID NO: 2133918 - RNA, 13 nt, Human
auguuauugaaaa

SEQ ID NO: 2133919 - RNA, 14 nt, Human
auguuauugaaaaa

SEQ ID NO: 2133920 - RNA, 22 nt, Human
auguuauugaaaaaaauuggca

SEQ ID NO: 2133921 - RNA, 18 nt, Human
auguuauuuucuguugaa

SEQ ID NO: 2133922 - RNA, 21 nt, Human
auguuauuuucuguugaaguu

SEQ ID NO: 2133923 - RNA, 20 nt, Human
auguuacauaagauaaaugu

SEQ ID NO: 2133924 - RNA, 23 nt, Human
auguuacauaguguaggcuuuac

SEQ ID NO: 2133925 - RNA, 20 nt, Human
auguuacaucuguuuuaaau

SEQ ID NO: 2133926 - RNA, 17 nt, Human
auguuacacuaagggug

SEQ ID NO: 2133927 - RNA, 14 nt, Human
auguuacauuguuu

SEQ ID NO: 2133928 - RNA, 21 nt, Human
auguuaccuccuauaaacuua

SEQ ID NO: 2133929 - RNA, 23 nt, Human
auguuaucuugguguguuaagag

SEQ ID NO: 2133930 - RNA, 13 nt, Human
auguuaugauaaa

SEQ ID NO: 2133931 - RNA, 16 nt, Human
auguuaugauaaaaaa

SEQ ID NO: 2133932 - RNA, 20 nt, Human
auguuaugauaaaaaauuuu

SEQ ID NO: 2133933 - RNA, 21 nt, Human
auguuaugauaaaaaauuuug

SEQ ID NO: 2133934 - RNA, 22 nt, Human
auguuaugauaaaaaauuuugu

SEQ ID NO: 2133935 - RNA, 23 nt, Human
auguuaugauaaaaaauuuugua

SEQ ID NO: 2133936 - RNA, 17 nt, Human
auguuaugcauaaaguc

SEQ ID NO: 2133937 - RNA, 19 nt, Human
auguuacauaagauaaaug

SEQ ID NO: 2133938 - RNA, 23 nt, Human
auguuaaccagaauaaaguucug

SEQ ID NO: 2133939 - RNA, 18 nt, Human
auguuaaccucaguguca

SEQ ID NO: 2133940 - RNA, 21 nt, Human
auguuaaccucagugucauuu

SEQ ID NO: 2133941 - RNA, 18 nt, Human
auguuaaaucccauucau

SEQ ID NO: 2133942 - RNA, 20 nt, Human
auguuaaaucccauucauaa

SEQ ID NO: 2133943 - RNA, 18 nt, Human
auguguuugguucugggg

SEQ ID NO: 2133944 - RNA, 14 nt, Human
auguguguauaugu

SEQ ID NO: 2133945 - RNA, 12 nt, Human
auguguguauau

SEQ ID NO: 2133946 - RNA, 16 nt, Human
auguguguauauguau

SEQ ID NO: 2133947 - RNA, 17 nt, Human
auguguguauauguaug

SEQ ID NO: 2133948 - RNA, 18 nt, Human
auguguguauauguaugu

SEQ ID NO: 2133949 - RNA, 22 nt, Human
auguguguauauguaugugugu

SEQ ID NO: 2133950 - RNA, 20 nt, Human
auguguguaugggugugugu

SEQ ID NO: 2133951 - RNA, 15 nt, Human
auguggaaagugaau

SEQ ID NO: 2133952 - RNA, 16 nt, Human
auguggaaagugaauu

SEQ ID NO: 2133953 - RNA, 17 nt, Human
auguggaaagugaauuu

SEQ ID NO: 2133954 - RNA, 10 nt, Human
auguguguau

SEQ ID NO: 2133955 - RNA, 19 nt, Human
auguggaaagugaauuuga

SEQ ID NO: 2133956 - RNA, 15 nt, Human
auguguggcagauuu

SEQ ID NO: 2133957 - RNA, 18 nt, Human
augugcugugaccauuua

SEQ ID NO: 2133958 - RNA, 21 nt, Human
augugccagguuuuuggucug

SEQ ID NO: 2133959 - RNA, 23 nt, Human
uuuguuuuuuaaagucuugcugu

SEQ ID NO: 2133960 - RNA, 20 nt, Human
augugcauuuuugugaaaug

SEQ ID NO: 2133961 - RNA, 21 nt, Human
augugcauuuuugugaaauga

SEQ ID NO: 2133962 - RNA, 11 nt, Human
uuuguuuuguu

SEQ ID NO: 2133963 - RNA, 13 nt, Human
uuuguuuuuaauu

SEQ ID NO: 2133964 - RNA, 14 nt, Human
uuuguuuuuaugaa

SEQ ID NO: 2133965 - RNA, 21 nt, Human
uuuuaaaaaacugcugacugu

SEQ ID NO: 2133966 - RNA, 18 nt, Human
uuuuaaaaaacugcugac

SEQ ID NO: 2133967 - RNA, 19 nt, Human
auuuauuuuuuacauuauu

SEQ ID NO: 2133968 - RNA, 18 nt, Human
auuuauuuuuuacauuau

SEQ ID NO: 2133969 - RNA, 14 nt, Human
auuuauuuuuuaca

SEQ ID NO: 2133970 - RNA, 17 nt, Human
auuuauuuuccucccca

SEQ ID NO: 2133971 - RNA, 13 nt, Human
auuuauuuuccuc

SEQ ID NO: 2133972 - RNA, 20 nt, Human
auuuauuuuccuccccagca

SEQ ID NO: 2133973 - RNA, 12 nt, Human
auuuauuuuauu

SEQ ID NO: 2133974 - RNA, 20 nt, Human
auuuauuuuauuuuagcagu

SEQ ID NO: 2133975 - RNA, 18 nt, Human
auuuauuguauuuuagua

SEQ ID NO: 2133976 - RNA, 19 nt, Human
auuuauuguuuauuuauca

SEQ ID NO: 2133977 - RNA, 20 nt, Human
auuuauuguuuauuuaucag

SEQ ID NO: 2133978 - RNA, 21 nt, Human
auuuauuguuuauuuaucagu

SEQ ID NO: 2133979 - RNA, 22 nt, Human
auuuauuguuuauuuaucagug

SEQ ID NO: 2133980 - RNA, 14 nt, Human
auuucauuccuaac

SEQ ID NO: 2133981 - RNA, 15 nt, Human
auuuccauuauuuau

SEQ ID NO: 2133982 - RNA, 17 nt, Human
auuuccauuauuuauau

SEQ ID NO: 2133983 - RNA, 12 nt, Human
auuucaaaaauu

SEQ ID NO: 2133984 - RNA, 14 nt, Human
auuucaaaaauuug

SEQ ID NO: 2133985 - RNA, 16 nt, Human
auuucaaaaauuugga

SEQ ID NO: 2133986 - RNA, 17 nt, Human
auuucaaaaauuuggaa

SEQ ID NO: 2133987 - RNA, 19 nt, Human
auuucaaaaauuuggaauu

SEQ ID NO: 2133988 - RNA, 20 nt, Human
auuucaaaaauuuggaauuc

SEQ ID NO: 2133989 - RNA, 22 nt, Human
auuucaaaaauuuggaauucug

SEQ ID NO: 2133990 - RNA, 14 nt, Human
auuucaaaacucau

SEQ ID NO: 2133991 - RNA, 14 nt, Human
auuucuaaaaaaca

SEQ ID NO: 2133992 - RNA, 20 nt, Human
auuucuaaaaaacagaggcc

SEQ ID NO: 2133993 - RNA, 21 nt, Human
auuucgccguugaagaggaag

SEQ ID NO: 2133994 - RNA, 21 nt, Human
auuucuaaaaaacagaggcca

SEQ ID NO: 2133995 - RNA, 20 nt, Human
auuuccuauguaacugcauu

SEQ ID NO: 2133996 - RNA, 13 nt, Human
auuuauugcacaa

SEQ ID NO: 2133997 - RNA, 14 nt, Human
auuuauugcacaaa

SEQ ID NO: 2133998 - RNA, 18 nt, Human
auuuauguuguauagauu

SEQ ID NO: 2133999 - RNA, 19 nt, Human
auuuauugcuugauacuuu

SEQ ID NO: 2134000 - RNA, 20 nt, Human
auuuauugcuugauacuuuu

SEQ ID NO: 2134001 - RNA, 15 nt, Human
auuuauuaccucuga

SEQ ID NO: 2134002 - RNA, 14 nt, Human
auuuauuaccucug

SEQ ID NO: 2134003 - RNA, 17 nt, Human
auuguuuucaguguaca

SEQ ID NO: 2134004 - RNA, 14 nt, Human
auuguauaaaaaua

SEQ ID NO: 2134005 - RNA, 15 nt, Human
auuguauaaaaauag

SEQ ID NO: 2134006 - RNA, 17 nt, Human
auuguauaaaaauagaa

SEQ ID NO: 2134007 - RNA, 18 nt, Human
auuguuuucaguguacau

SEQ ID NO: 2134008 - RNA, 19 nt, Human
auuguuuucaguguacaug

SEQ ID NO: 2134009 - RNA, 16 nt, Human
auuguuuuuuaucuuu

SEQ ID NO: 2134010 - RNA, 23 nt, Human
auuguuuuuuaucuuuucuacag

SEQ ID NO: 2134011 - RNA, 14 nt, Human
auuuaaaaaaaauc

SEQ ID NO: 2134012 - RNA, 16 nt, Human
auuuaaauauuaaaua

SEQ ID NO: 2134013 - RNA, 19 nt, Human
auuuaaauguaaagacaaa

SEQ ID NO: 2134014 - RNA, 12 nt, Human
auuuacacuuuu

SEQ ID NO: 2134015 - RNA, 20 nt, Human
auuuacacuuuugagacuuu

SEQ ID NO: 2134016 - RNA, 21 nt, Human
auuuacagccucacuugaaug

SEQ ID NO: 2134017 - RNA, 14 nt, Human
auuuacauaugaaa

SEQ ID NO: 2134018 - RNA, 15 nt, Human
auuuacauaugaaau

SEQ ID NO: 2134019 - RNA, 20 nt, Human
auuuacugagcuucucugug

SEQ ID NO: 2134020 - RNA, 13 nt, Human
auuuacugagcuu

SEQ ID NO: 2134021 - RNA, 13 nt, Human
auuuacucauuau

SEQ ID NO: 2134022 - RNA, 16 nt, Human
auuuacauaugaaauu

SEQ ID NO: 2134023 - RNA, 21 nt, Human
auuuacauaugaaauuuaaua

SEQ ID NO: 2134024 - RNA, 23 nt, Human
auuuaccagccuccguauuucag

SEQ ID NO: 2134025 - RNA, 18 nt, Human
auuuauggucaacacuua

SEQ ID NO: 2134026 - RNA, 14 nt, Human
auuuauaacucauc

SEQ ID NO: 2134027 - RNA, 23 nt, Human
auuuauguaaacugcauuagaaa

SEQ ID NO: 2134028 - RNA, 13 nt, Human
auuuauaacucau

SEQ ID NO: 2134029 - RNA, 13 nt, Human
auuuaugugugag

SEQ ID NO: 2134030 - RNA, 18 nt, Human
auuuaugugugaggagcu

SEQ ID NO: 2134031 - RNA, 19 nt, Human
auuuaugugugaggagcug

SEQ ID NO: 2134032 - RNA, 22 nt, Human
auuuaugugugaggagcugcug

SEQ ID NO: 2134033 - RNA, 20 nt, Human
auuuauguagaugugcauuu

SEQ ID NO: 2134034 - RNA, 21 nt, Human
auuuauguagaugugcauuuu

SEQ ID NO: 2134035 - RNA, 12 nt, Human
auuuauguaaac

SEQ ID NO: 2134036 - RNA, 12 nt, Human
auuuauguagau

SEQ ID NO: 2134037 - RNA, 14 nt, Human
auuuauguagaugu

SEQ ID NO: 2134038 - RNA, 18 nt, Human
auuuauguagaugugcau

SEQ ID NO: 2134039 - RNA, 15 nt, Human
auuuacuuugaauuu

SEQ ID NO: 2134040 - RNA, 19 nt, Human
auuuacuucuuauacauuu

SEQ ID NO: 2134041 - RNA, 20 nt, Human
auuuacuucuuauacauuug

SEQ ID NO: 2134042 - RNA, 17 nt, Human
auuuaguucuuuguuau

SEQ ID NO: 2134043 - RNA, 12 nt, Human
auuuaguucuuu

SEQ ID NO: 2134044 - RNA, 16 nt, Human
auuuaguucuuuguua

SEQ ID NO: 2134045 - RNA, 18 nt, Human
auuuauugcuacuuccug

SEQ ID NO: 2134046 - RNA, 22 nt, Human
auuuauugcuguguaacacugu

SEQ ID NO: 2134047 - RNA, 14 nt, Human
auuuauugcuugau

SEQ ID NO: 2134048 - RNA, 18 nt, Human
auuugguucuaggccggg

SEQ ID NO: 2134049 - RNA, 15 nt, Human
auuugguucuaauag

SEQ ID NO: 2134050 - RNA, 14 nt, Human
auuuguaauaaagu

SEQ ID NO: 2134051 - RNA, 18 nt, Human
auuuguaauaaaguauau

SEQ ID NO: 2134052 - RNA, 17 nt, Human
auuuggagacucugugg

SEQ ID NO: 2134053 - RNA, 20 nt, Human
auuugauguuuacaggugga

SEQ ID NO: 2134054 - RNA, 11 nt, Human
auuuggagacu

SEQ ID NO: 2134055 - RNA, 11 nt, Human
auuugaugaaa

SEQ ID NO: 2134056 - RNA, 15 nt, Human
auuugaugaaagcug

SEQ ID NO: 2134057 - RNA, 16 nt, Human
auuugaugaaagcuga

SEQ ID NO: 2134058 - RNA, 21 nt, Human
auuugaugaaagcugauuacu

SEQ ID NO: 2134059 - RNA, 14 nt, Human
auuugaugcuaaau

SEQ ID NO: 2134060 - RNA, 13 nt, Human
auuugagacauuc

SEQ ID NO: 2134061 - RNA, 15 nt, Human
auuugagacauucca

SEQ ID NO: 2134062 - RNA, 17 nt, Human
auuugaucguuccaguu

SEQ ID NO: 2134063 - RNA, 23 nt, Human
auuugaucguuccaguucccacu

SEQ ID NO: 2134064 - RNA, 20 nt, Human
auuugauaguauugugcaua

SEQ ID NO: 2134065 - RNA, 16 nt, Human
auuugagcagggcuca

SEQ ID NO: 2134066 - RNA, 15 nt, Human
auuugagcagggcuc

SEQ ID NO: 2134067 - RNA, 21 nt, Human
auuucuugaguuuuguuuuaa

SEQ ID NO: 2134068 - RNA, 11 nt, Human
auuucuuauag

SEQ ID NO: 2134069 - RNA, 13 nt, Human
auuucuuguuugu

SEQ ID NO: 2134070 - RNA, 14 nt, Human
auuucuuguuuguu

SEQ ID NO: 2134071 - RNA, 20 nt, Human
auuucuugggcccuccugaa

SEQ ID NO: 2134072 - RNA, 20 nt, Human
auuucuugguaagaagccgg

SEQ ID NO: 2134073 - RNA, 14 nt, Human
auuucuugggcccu

SEQ ID NO: 2134074 - RNA, 16 nt, Human
auuucuugggcccucc

SEQ ID NO: 2134075 - RNA, 17 nt, Human
auuucuugggcccuccu

SEQ ID NO: 2134076 - RNA, 18 nt, Human
auuucuugggcccuccug

SEQ ID NO: 2134077 - RNA, 19 nt, Human
auuucuugguaagaagccg

SEQ ID NO: 2134078 - RNA, 20 nt, Human
auuuuaagugcuuuguaaug

SEQ ID NO: 2134079 - RNA, 23 nt, Human
auugcauuaaauauaauaugcac

SEQ ID NO: 2134080 - RNA, 15 nt, Human
auugcaugcugcuuu

SEQ ID NO: 2134081 - RNA, 16 nt, Human
auugcaugcugcuuua

SEQ ID NO: 2134082 - RNA, 17 nt, Human
auugcaugcugcuuuaa

SEQ ID NO: 2134083 - RNA, 20 nt, Human
auugcaugcugcuuuaauug

SEQ ID NO: 2134084 - RNA, 17 nt, Human
auugcauggguuuugua

SEQ ID NO: 2134085 - RNA, 19 nt, Human
auugcauggguuuuguagg

SEQ ID NO: 2134086 - RNA, 18 nt, Human
auugccuuaacuggagcc

SEQ ID NO: 2134087 - RNA, 22 nt, Human
auugccugcggucaaggccagc

SEQ ID NO: 2134088 - RNA, 16 nt, Human
auugcauauauacaua

SEQ ID NO: 2134089 - RNA, 16 nt, Human
auuggcauuaaaacuu

SEQ ID NO: 2134090 - RNA, 17 nt, Human
auuggagccaccaugcc

SEQ ID NO: 2134091 - RNA, 18 nt, Human
auuggagaguaaaaacug

SEQ ID NO: 2134092 - RNA, 19 nt, Human
auuggcuauuuaaagacaa

SEQ ID NO: 2134093 - RNA, 17 nt, Human
auuggcuaguugaaucu

SEQ ID NO: 2134094 - RNA, 15 nt, Human
auuguacguuuaaag

SEQ ID NO: 2134095 - RNA, 19 nt, Human
auuguacguuuaaagugua

SEQ ID NO: 2134096 - RNA, 13 nt, Human
auugauggggaag

SEQ ID NO: 2134097 - RNA, 14 nt, Human
auugacaaacucuc

SEQ ID NO: 2134098 - RNA, 13 nt, Human
auugacaaacucu

SEQ ID NO: 2134099 - RNA, 16 nt, Human
auugauggggaaggag

SEQ ID NO: 2134100 - RNA, 13 nt, Human
auugaugugcaaa

SEQ ID NO: 2134101 - RNA, 16 nt, Human
auugaugugcaaaaau

SEQ ID NO: 2134102 - RNA, 17 nt, Human
auugaugugcaaaaauu

SEQ ID NO: 2134103 - RNA, 18 nt, Human
auugaugugcaaaaauuu

SEQ ID NO: 2134104 - RNA, 20 nt, Human
auugaugugcaaaaauuuuu

SEQ ID NO: 2134105 - RNA, 19 nt, Human
auugcaacaggcugggcuu

SEQ ID NO: 2134106 - RNA, 12 nt, Human
auugcaccacug

SEQ ID NO: 2134107 - RNA, 18 nt, Human
auugcaacaggcugggcu

SEQ ID NO: 2134108 - RNA, 17 nt, Human
auugcaacaggcugggc

SEQ ID NO: 2134109 - RNA, 15 nt, Human
auugcacuccagccu

SEQ ID NO: 2134110 - RNA, 17 nt, Human
auugcacuccagccugg

SEQ ID NO: 2134111 - RNA, 16 nt, Human
auugcacuccagccug

SEQ ID NO: 2134112 - RNA, 18 nt, Human
auugcacuccagccuggg

SEQ ID NO: 2134113 - RNA, 19 nt, Human
auugcacuccagccugggc

SEQ ID NO: 2134114 - RNA, 14 nt, Human
auugaacccaggag

SEQ ID NO: 2134115 - RNA, 17 nt, Human
auugaaggaugcugucu

SEQ ID NO: 2134116 - RNA, 15 nt, Human
auugaacccaggagg

SEQ ID NO: 2134117 - RNA, 22 nt, Human
auugaacaaguuguuucauuga

SEQ ID NO: 2134118 - RNA, 17 nt, Human
auuccuauauaguuuau

SEQ ID NO: 2134119 - RNA, 15 nt, Human
auuccuagauaaaaa

SEQ ID NO: 2134120 - RNA, 19 nt, Human
auuccuagauaaaaagaug

SEQ ID NO: 2134121 - RNA, 21 nt, Human
auuccuagauaaaaagauggc

SEQ ID NO: 2134122 - RNA, 24 nt, Human
auuccuagaaacugacacaugcug

SEQ ID NO: 2134123 - RNA, 17 nt, Human
auuccuacaauauauau

SEQ ID NO: 2134124 - RNA, 18 nt, Human
auuccuacaauauauauu

SEQ ID NO: 2134125 - RNA, 22 nt, Human
auuccuacaauauauauucugg

SEQ ID NO: 2134126 - RNA, 13 nt, Human
auugaauuuaaca

SEQ ID NO: 2134127 - RNA, 14 nt, Human
auugaauuuaacaa

SEQ ID NO: 2134128 - RNA, 15 nt, Human
auugaauuuaacaau

SEQ ID NO: 2134129 - RNA, 16 nt, Human
auugaauuuaacaaug

SEQ ID NO: 2134130 - RNA, 13 nt, Human
auugaauuuucaa

SEQ ID NO: 2134131 - RNA, 20 nt, Human
auugaauuuucaagcaucuc

SEQ ID NO: 2134132 - RNA, 14 nt, Human
auugaaguaaugaa

SEQ ID NO: 2134133 - RNA, 15 nt, Human
auugaaguaaugaau

SEQ ID NO: 2134134 - RNA, 16 nt, Human
auugaaguaaugaauu

SEQ ID NO: 2134135 - RNA, 19 nt, Human
auugaauaaaguugaagcu

SEQ ID NO: 2134136 - RNA, 19 nt, Human
caccauguuggccaggcug

SEQ ID NO: 2134137 - RNA, 18 nt, Human
caccauguacauagcuug

SEQ ID NO: 2134138 - RNA, 15 nt, Human
caccauguaaaacaa

SEQ ID NO: 2134139 - RNA, 16 nt, Human
caccauguaaaacaaa

SEQ ID NO: 2134140 - RNA, 18 nt, Human
caccauguaaaacaaaaa

SEQ ID NO: 2134141 - RNA, 19 nt, Human
caccauguaaaacaaaaaa

SEQ ID NO: 2134142 - RNA, 21 nt, Human
caccauguaaaacaaaaaaca

SEQ ID NO: 2134143 - RNA, 12 nt, Human
caccauggccag

SEQ ID NO: 2134144 - RNA, 16 nt, Human
caccauggccagccaa

SEQ ID NO: 2134145 - RNA, 20 nt, Human
caccauggcuaaggcaccag

SEQ ID NO: 2134146 - RNA, 22 nt, Human
caccauggcuaaggcaccagcc

SEQ ID NO: 2134147 - RNA, 22 nt, Human
caccaucucaggccaccugccc

SEQ ID NO: 2134148 - RNA, 18 nt, Human
caccaucucaggccaccu

SEQ ID NO: 2134149 - RNA, 19 nt, Human
caccaucucaggccaccug

SEQ ID NO: 2134150 - RNA, 20 nt, Human
caccaucucaggccaccugc

SEQ ID NO: 2134151 - RNA, 21 nt, Human
caccaucucaggccaccugcc

SEQ ID NO: 2134152 - RNA, 13 nt, Human
caccaucucaggc

SEQ ID NO: 2134153 - RNA, 14 nt, Human
caccaucucaggcc

SEQ ID NO: 2134154 - RNA, 18 nt, Human
caccaucaugucuggcua

SEQ ID NO: 2134155 - RNA, 17 nt, Human
caccaucaugucuggcu

SEQ ID NO: 2134156 - RNA, 15 nt, Human
caccaucaugucugg

SEQ ID NO: 2134157 - RNA, 20 nt, Human
caccagugaaugaaagucuu

SEQ ID NO: 2134158 - RNA, 22 nt, Human
caccagugaaugaaagucuugu

SEQ ID NO: 2134159 - RNA, 16 nt, Human
caccagguagaacaca

SEQ ID NO: 2134160 - RNA, 14 nt, Human
caccaggucucccg

SEQ ID NO: 2134161 - RNA, 22 nt, Human
caccaggucucccgggaagcca

SEQ ID NO: 2134162 - RNA, 16 nt, Human
caccauauucagugcu

SEQ ID NO: 2134163 - RNA, 21 nt, Human
caccauauucagugcuguggc

SEQ ID NO: 2134164 - RNA, 19 nt, Human
caccaacuggcccucuucu

SEQ ID NO: 2134165 - RNA, 18 nt, Human
caccaguuccuuucaaug

SEQ ID NO: 2134166 - RNA, 23 nt, Human
caccaguguguggcuuucagagc

SEQ ID NO: 2134167 - RNA, 21 nt, Human
caccaguguguggcuuucaga

SEQ ID NO: 2134168 - RNA, 15 nt, Human
caccaguguccuccc

SEQ ID NO: 2134169 - RNA, 17 nt, Human
caccaguguccuccccu

SEQ ID NO: 2134170 - RNA, 18 nt, Human
caccaguguccuccccuc

SEQ ID NO: 2134171 - RNA, 19 nt, Human
caccaguguccuccccuca

SEQ ID NO: 2134172 - RNA, 23 nt, Human
caccaguguccuccccucaagga

SEQ ID NO: 2134173 - RNA, 15 nt, Human
caccagagcccaccu

SEQ ID NO: 2134174 - RNA, 22 nt, Human
caccacgauguggcccuggccu

SEQ ID NO: 2134175 - RNA, 22 nt, Human
caccagagcccaccuuggcuca

SEQ ID NO: 2134176 - RNA, 20 nt, Human
caccagagcccaccuuggcu

SEQ ID NO: 2134177 - RNA, 18 nt, Human
caccagagcccaccuugg

SEQ ID NO: 2134178 - RNA, 17 nt, Human
caccagagcccaccuug

SEQ ID NO: 2134179 - RNA, 19 nt, Human
caccacacccagcccacuu

SEQ ID NO: 2134180 - RNA, 13 nt, Human
caccaccuuccca

SEQ ID NO: 2134181 - RNA, 14 nt, Human
caccaccuucccag

SEQ ID NO: 2134182 - RNA, 18 nt, Human
caccacgauguggcccug

SEQ ID NO: 2134183 - RNA, 19 nt, Human
caccacgauguggcccugg

SEQ ID NO: 2134184 - RNA, 20 nt, Human
caccacgauguggcccuggc

SEQ ID NO: 2134185 - RNA, 21 nt, Human
caccacgauguggcccuggcc

SEQ ID NO: 2134186 - RNA, 15 nt, Human
caccaccuucccagc

SEQ ID NO: 2134187 - RNA, 16 nt, Human
caccaccuucccagcu

SEQ ID NO: 2134188 - RNA, 18 nt, Human
caccaccuucccagcucu

SEQ ID NO: 2134189 - RNA, 19 nt, Human
caccaccuucccagcucuc

SEQ ID NO: 2134190 - RNA, 22 nt, Human
caccaccuucccagcucucccu

SEQ ID NO: 2134191 - RNA, 21 nt, Human
caccaccuucccagcucuccc

SEQ ID NO: 2134192 - RNA, 15 nt, Human
caccacgauguggcc

SEQ ID NO: 2134193 - RNA, 19 nt, Human
caccaagacuugaaggugc

SEQ ID NO: 2134194 - RNA, 22 nt, Human
caccaagacuuguuuuaugcuc

SEQ ID NO: 2134195 - RNA, 15 nt, Human
caccaagaaagcagg

SEQ ID NO: 2134196 - RNA, 23 nt, Human
caccaaguuggaacauccuugga

SEQ ID NO: 2134197 - RNA, 22 nt, Human
caccaaguuggaacauccuugg

SEQ ID NO: 2134198 - RNA, 12 nt, Human
caccaagcccag

SEQ ID NO: 2134199 - RNA, 13 nt, Human
caccaagcccagu

SEQ ID NO: 2134200 - RNA, 13 nt, Human
caccaagcugcug

SEQ ID NO: 2134201 - RNA, 13 nt, Human
caccaagcccaca

SEQ ID NO: 2134202 - RNA, 14 nt, Human
caccaagcccacag

SEQ ID NO: 2134203 - RNA, 15 nt, Human
caccaagcccacagg

SEQ ID NO: 2134204 - RNA, 23 nt, Human
caccaagcccacaggugucccca

SEQ ID NO: 2134205 - RNA, 18 nt, Human
cacagcucuucuccaggc

SEQ ID NO: 2134206 - RNA, 19 nt, Human
cacagcccaaagaaggaaa

SEQ ID NO: 2134207 - RNA, 18 nt, Human
cacagcaauuccucaggc

SEQ ID NO: 2134208 - RNA, 16 nt, Human
cacagcaauuccucag

SEQ ID NO: 2134209 - RNA, 15 nt, Human
cacagcacacucagc

SEQ ID NO: 2134210 - RNA, 22 nt, Human
cacacggacacucaaaagcugg

SEQ ID NO: 2134211 - RNA, 19 nt, Human
cacacgucauguuucuuca

SEQ ID NO: 2134212 - RNA, 20 nt, Human
cacacgucugacccucucca

SEQ ID NO: 2134213 - RNA, 24 nt, Human
cacacgucugacccucuccacccc

SEQ ID NO: 2134214 - RNA, 21 nt, Human
cacacggaggcaucugcaccc

SEQ ID NO: 2134215 - RNA, 17 nt, Human
cacacguacuuaaauga

SEQ ID NO: 2134216 - RNA, 18 nt, Human
cacacggaggcaucugca

SEQ ID NO: 2134217 - RNA, 20 nt, Human
cacacggaggcaucugcacc

SEQ ID NO: 2134218 - RNA, 20 nt, Human
cacagcucuucuccaggcug

SEQ ID NO: 2134219 - RNA, 19 nt, Human
cacagcucuucuccaggcu

SEQ ID NO: 2134220 - RNA, 21 nt, Human
cacagcucuucuccaggcugu

SEQ ID NO: 2134221 - RNA, 16 nt, Human
cacaggacucugccuc

SEQ ID NO: 2134222 - RNA, 15 nt, Human
cacaggacucugccu

SEQ ID NO: 2134223 - RNA, 17 nt, Human
cacaggaucagucugau

SEQ ID NO: 2134224 - RNA, 14 nt, Human
cacaggcccggcuc

SEQ ID NO: 2134225 - RNA, 22 nt, Human
cacagucucuuuaaucuucagu

SEQ ID NO: 2134226 - RNA, 19 nt, Human
cacaggcagguccaggguu

SEQ ID NO: 2134227 - RNA, 20 nt, Human
cacaggcaacugaggcagac

SEQ ID NO: 2134228 - RNA, 13 nt, Human
cacaggcaacuga

SEQ ID NO: 2134229 - RNA, 19 nt, Human
cacaggauggucucugcca

SEQ ID NO: 2134230 - RNA, 20 nt, Human
cacaggauggucucugccau

SEQ ID NO: 2134231 - RNA, 14 nt, Human
cacaggcaacugag

SEQ ID NO: 2134232 - RNA, 17 nt, Human
cacaggcaacugaggca

SEQ ID NO: 2134233 - RNA, 18 nt, Human
cacaggcaacugaggcag

SEQ ID NO: 2134234 - RNA, 19 nt, Human
cacaggcaacugaggcaga

SEQ ID NO: 2134235 - RNA, 17 nt, Human
cacagugaaggcugucc

SEQ ID NO: 2134236 - RNA, 22 nt, Human
cacagugaaggcuguccuuacc

SEQ ID NO: 2134237 - RNA, 21 nt, Human
cacaugucagcaaguccuaag

SEQ ID NO: 2134238 - RNA, 14 nt, Human
cacaugcuggacag

SEQ ID NO: 2134239 - RNA, 15 nt, Human
cacaugcuggacagg

SEQ ID NO: 2134240 - RNA, 19 nt, Human
cacaugcuggacaggucug

SEQ ID NO: 2134241 - RNA, 23 nt, Human
cacaugcuggacaggucugggag

SEQ ID NO: 2134242 - RNA, 18 nt, Human
cacaugcacgugugugca

SEQ ID NO: 2134243 - RNA, 21 nt, Human
cacaugagaucuaggugagga

SEQ ID NO: 2134244 - RNA, 13 nt, Human
caccauugcugcu

SEQ ID NO: 2134245 - RNA, 17 nt, Human
caccauugcugcuccuu

SEQ ID NO: 2134246 - RNA, 14 nt, Human
cacccaaaagucaa

SEQ ID NO: 2134247 - RNA, 23 nt, Human
cacccaaaagucaaaaggugccu

SEQ ID NO: 2134248 - RNA, 15 nt, Human
cacccaaaccccggg

SEQ ID NO: 2134249 - RNA, 19 nt, Human
caccauguuugagcucaga

SEQ ID NO: 2134250 - RNA, 22 nt, Human
caccauguuugagcucagaccc

SEQ ID NO: 2134251 - RNA, 18 nt, Human
caccauguuugagcucag

SEQ ID NO: 2134252 - RNA, 23 nt, Human
caccauguuugagcucagacccc

SEQ ID NO: 2134253 - RNA, 15 nt, Human
caccauucaggaacc

SEQ ID NO: 2134254 - RNA, 22 nt, Human
caccauucaggaaccuggacca

SEQ ID NO: 2134255 - RNA, 18 nt, Human
caaagugguauagaaaug

SEQ ID NO: 2134256 - RNA, 19 nt, Human
caaagugguauagaaaugc

SEQ ID NO: 2134257 - RNA, 23 nt, Human
caaaggguaucaggugcugccau

SEQ ID NO: 2134258 - RNA, 21 nt, Human
caaaggguaucaggugcugcc

SEQ ID NO: 2134259 - RNA, 20 nt, Human
caaaggguaucaggugcugc

SEQ ID NO: 2134260 - RNA, 24 nt, Human
caaaggaauggaggcucuaauuga

SEQ ID NO: 2134261 - RNA, 23 nt, Human
caaagccccuugcucuccccugc

SEQ ID NO: 2134262 - RNA, 23 nt, Human
caaaggacuguuuuuuccugagc

SEQ ID NO: 2134263 - RNA, 17 nt, Human
caaagggaaauaucauu

SEQ ID NO: 2134264 - RNA, 15 nt, Human
caaagggaaauauca

SEQ ID NO: 2134265 - RNA, 18 nt, Human
caaagggaaauaucauuu

SEQ ID NO: 2134266 - RNA, 14 nt, Human
caaagggagagaga

SEQ ID NO: 2134267 - RNA, 22 nt, Human
caaagggagcacuggguugacu

SEQ ID NO: 2134268 - RNA, 17 nt, Human
caaauauuccagagacu

SEQ ID NO: 2134269 - RNA, 13 nt, Human
caaauauuccaga

SEQ ID NO: 2134270 - RNA, 22 nt, Human
caaaguucccuacuuccuguga

SEQ ID NO: 2134271 - RNA, 17 nt, Human
caaaguggaaggaaaga

SEQ ID NO: 2134272 - RNA, 23 nt, Human
caaaguggaaggaaagaugcuca

SEQ ID NO: 2134273 - RNA, 13 nt, Human
caaaguggcaaaa

SEQ ID NO: 2134274 - RNA, 21 nt, Human
caaaguucccuacuuccugug

SEQ ID NO: 2134275 - RNA, 15 nt, Human
caaauuggagcaggg

SEQ ID NO: 2134276 - RNA, 19 nt, Human
caaauugcuugaaagaaaa

SEQ ID NO: 2134277 - RNA, 17 nt, Human
caaauugcuugaaagaa

SEQ ID NO: 2134278 - RNA, 14 nt, Human
caaauucuguuucu

SEQ ID NO: 2134279 - RNA, 15 nt, Human
caaauucuguuucuu

SEQ ID NO: 2134280 - RNA, 19 nt, Human
caaauugagagaauggaaa

SEQ ID NO: 2134281 - RNA, 12 nt, Human
caaagggccagg

SEQ ID NO: 2134282 - RNA, 19 nt, Human
caaagcccaaagugguaua

SEQ ID NO: 2134283 - RNA, 17 nt, Human
caaagcccaaaguggua

SEQ ID NO: 2134284 - RNA, 16 nt, Human
caaagaguuaauauau

SEQ ID NO: 2134285 - RNA, 14 nt, Human
caaagacagaagcc

SEQ ID NO: 2134286 - RNA, 18 nt, Human
caaagaccaaauuccuug

SEQ ID NO: 2134287 - RNA, 16 nt, Human
caaagacuuaguauau

SEQ ID NO: 2134288 - RNA, 19 nt, Human
caaagacuuaguauauuuu

SEQ ID NO: 2134289 - RNA, 20 nt, Human
caaagacuuaguauauuuuc

SEQ ID NO: 2134290 - RNA, 14 nt, Human
caaagagguuuuaa

SEQ ID NO: 2134291 - RNA, 21 nt, Human
caaagagguuuuaaaaaaauc

SEQ ID NO: 2134292 - RNA, 20 nt, Human
caaagacaaauucuguuucu

SEQ ID NO: 2134293 - RNA, 21 nt, Human
caaagacaaauucuguuucuu

SEQ ID NO: 2134294 - RNA, 14 nt, Human
caaagaaugccuug

SEQ ID NO: 2134295 - RNA, 15 nt, Human
caaagaaugccuuga

SEQ ID NO: 2134296 - RNA, 22 nt, Human
caaagaauuucaauuuguucag

SEQ ID NO: 2134297 - RNA, 19 nt, Human
caaacuggcaaacuucaga

SEQ ID NO: 2134298 - RNA, 17 nt, Human
caaacuggcaaacuuca

SEQ ID NO: 2134299 - RNA, 19 nt, Human
caaacugccuuggcuucag

SEQ ID NO: 2134300 - RNA, 12 nt, Human
auuuuaagugcu

SEQ ID NO: 2134301 - RNA, 14 nt, Human
auuuuaagugcuuu

SEQ ID NO: 2134302 - RNA, 16 nt, Human
auuuuaagugcuuugu

SEQ ID NO: 2134303 - RNA, 17 nt, Human
auuuuaagugcuuugua

SEQ ID NO: 2134304 - RNA, 18 nt, Human
auuuuaagugcuuuguaa

SEQ ID NO: 2134305 - RNA, 23 nt, Human
caaacugccuaagcccuccgcca

SEQ ID NO: 2134306 - RNA, 18 nt, Human
caaacugccuaagcccuc

SEQ ID NO: 2134307 - RNA, 17 nt, Human
caaacugccuaagcccu

SEQ ID NO: 2134308 - RNA, 13 nt, Human
auuuuaaucuaau

SEQ ID NO: 2134309 - RNA, 11 nt, Human
caaacugcaau

SEQ ID NO: 2134310 - RNA, 13 nt, Human
caaacugcaauag

SEQ ID NO: 2134311 - RNA, 15 nt, Human
caaacugcaauagag

SEQ ID NO: 2134312 - RNA, 19 nt, Human
caaacugcaauagagacug

SEQ ID NO: 2134313 - RNA, 20 nt, Human
caaacugcaauagagacugu

SEQ ID NO: 2134314 - RNA, 21 nt, Human
auuuuaaugcaccugaauguu

SEQ ID NO: 2134315 - RNA, 14 nt, Human
auuuuaaucaaauu

SEQ ID NO: 2134316 - RNA, 21 nt, Human
auuuuaaauaaaagugaucaa

SEQ ID NO: 2134317 - RNA, 20 nt, Human
auuuuaaauaaaagugauca

SEQ ID NO: 2134318 - RNA, 22 nt, Human
auuuuaaaguuaaacauuuuua

SEQ ID NO: 2134319 - RNA, 18 nt, Human
auuuguacuacaguucuu

SEQ ID NO: 2134320 - RNA, 16 nt, Human
auuuguacauauguaa

SEQ ID NO: 2134321 - RNA, 18 nt, Human
auuuguacauauguaaaa

SEQ ID NO: 2134322 - RNA, 19 nt, Human
auuuguacauauguaaaau

SEQ ID NO: 2134323 - RNA, 21 nt, Human
auuuguacauauguaaaauaa

SEQ ID NO: 2134324 - RNA, 14 nt, Human
auuuuaagauuccu

SEQ ID NO: 2134325 - RNA, 15 nt, Human
auuuuaagauuccuu

SEQ ID NO: 2134326 - RNA, 16 nt, Human
auuuuaagauuccuuu

SEQ ID NO: 2134327 - RNA, 17 nt, Human
auuuuaagauuccuuuu

SEQ ID NO: 2134328 - RNA, 22 nt, Human
auuuuaagauuccuuuucuugu

SEQ ID NO: 2134329 - RNA, 14 nt, Human
auuuuaagcauuac

SEQ ID NO: 2134330 - RNA, 15 nt, Human
auuuuaagcauuacu

SEQ ID NO: 2134331 - RNA, 21 nt, Human
auuuuaagcauuacucuugua

SEQ ID NO: 2134332 - RNA, 23 nt, Human
auuuuaagcauuacucuuguaag

SEQ ID NO: 2134333 - RNA, 24 nt, Human
auuuuaagcauuacucuuguaaga

SEQ ID NO: 2134334 - RNA, 11 nt, Human
auuuuaaauua

SEQ ID NO: 2134335 - RNA, 13 nt, Human
auuuuaaauuaua

SEQ ID NO: 2134336 - RNA, 14 nt, Human
auuuuaaauuauaa

SEQ ID NO: 2134337 - RNA, 22 nt, Human
auuuuaaauuauaacuuaaaau

SEQ ID NO: 2134338 - RNA, 17 nt, Human
auuuuaaauuauaagga

SEQ ID NO: 2134339 - RNA, 18 nt, Human
auuuuaaauuauaaggac

SEQ ID NO: 2134340 - RNA, 19 nt, Human
auuuuaaauuauaaggacu

SEQ ID NO: 2134341 - RNA, 20 nt, Human
auuuuaaauuauaaggacug

SEQ ID NO: 2134342 - RNA, 21 nt, Human
auuuuaaauuauaaggacugc

SEQ ID NO: 2134343 - RNA, 23 nt, Human
auuuuaaauuauaaggacugcau

SEQ ID NO: 2134344 - RNA, 16 nt, Human
auuuuaaauucacaau

SEQ ID NO: 2134345 - RNA, 20 nt, Human
caacaggcugggcuucagug

SEQ ID NO: 2134346 - RNA, 14 nt, Human
caagccagcuggag

SEQ ID NO: 2134347 - RNA, 16 nt, Human
caagccaagcagccaa

SEQ ID NO: 2134348 - RNA, 19 nt, Human
caagccagggauggggcca

SEQ ID NO: 2134349 - RNA, 22 nt, Human
caagccagggauggggccacag

SEQ ID NO: 2134350 - RNA, 23 nt, Human
caagccagggauggggccacagc

SEQ ID NO: 2134351 - RNA, 24 nt, Human
caagccagggauggggccacagcc

SEQ ID NO: 2134352 - RNA, 12 nt, Human
caagcccaggag

SEQ ID NO: 2134353 - RNA, 23 nt, Human
caagcccacagguguccccagcc

SEQ ID NO: 2134354 - RNA, 13 nt, Human
caagccccaggca

SEQ ID NO: 2134355 - RNA, 15 nt, Human
caagccccaggcagg

SEQ ID NO: 2134356 - RNA, 17 nt, Human
caagccccaggcaggcu

SEQ ID NO: 2134357 - RNA, 18 nt, Human
caagccccaggcaggcug

SEQ ID NO: 2134358 - RNA, 13 nt, Human
caagccccauccu

SEQ ID NO: 2134359 - RNA, 16 nt, Human
caagccccauccugcc

SEQ ID NO: 2134360 - RNA, 18 nt, Human
caagccaacgacaaagcc

SEQ ID NO: 2134361 - RNA, 19 nt, Human
caagccaacgacaaagcca

SEQ ID NO: 2134362 - RNA, 13 nt, Human
caagccaagcagc

SEQ ID NO: 2134363 - RNA, 14 nt, Human
caagccaagcagcc

SEQ ID NO: 2134364 - RNA, 15 nt, Human
caagccaagcagcca

SEQ ID NO: 2134365 - RNA, 14 nt, Human
caagcaggaagcuc

SEQ ID NO: 2134366 - RNA, 18 nt, Human
caagcagucuacccaccu

SEQ ID NO: 2134367 - RNA, 12 nt, Human
caagcaggaagc

SEQ ID NO: 2134368 - RNA, 13 nt, Human
caagcaggaagcu

SEQ ID NO: 2134369 - RNA, 13 nt, Human
caagcaucuccug

SEQ ID NO: 2134370 - RNA, 14 nt, Human
caagcaucuccuga

SEQ ID NO: 2134371 - RNA, 15 nt, Human
caagcaucuccugag

SEQ ID NO: 2134372 - RNA, 17 nt, Human
caagcaucuccugagga

SEQ ID NO: 2134373 - RNA, 18 nt, Human
caagcaucuccugaggau

SEQ ID NO: 2134374 - RNA, 21 nt, Human
caaggcugggggaagaagcuc

SEQ ID NO: 2134375 - RNA, 17 nt, Human
caagcuuguccaacccg

SEQ ID NO: 2134376 - RNA, 13 nt, Human
caagcuucuuuua

SEQ ID NO: 2134377 - RNA, 19 nt, Human
caacuugagcauguuacug

SEQ ID NO: 2134378 - RNA, 18 nt, Human
caacuugagcauguuacu

SEQ ID NO: 2134379 - RNA, 20 nt, Human
caacuugagcauguuacuga

SEQ ID NO: 2134380 - RNA, 20 nt, Human
caacuucuuuuuauuuucuu

SEQ ID NO: 2134381 - RNA, 19 nt, Human
caacuucuacuucugcccu

SEQ ID NO: 2134382 - RNA, 14 nt, Human
caagaaaguuuccc

SEQ ID NO: 2134383 - RNA, 13 nt, Human
caagaaaguuucc

SEQ ID NO: 2134384 - RNA, 13 nt, Human
caagaccugacuc

SEQ ID NO: 2134385 - RNA, 14 nt, Human
caagaccugacuca

SEQ ID NO: 2134386 - RNA, 21 nt, Human
caagacccuuuuggguuucug

SEQ ID NO: 2134387 - RNA, 17 nt, Human
caagagggucugaggaa

SEQ ID NO: 2134388 - RNA, 16 nt, Human
caagagggucugagga

SEQ ID NO: 2134389 - RNA, 12 nt, Human
caagagggucug

SEQ ID NO: 2134390 - RNA, 12 nt, Human
caagagccuugg

SEQ ID NO: 2134391 - RNA, 18 nt, Human
caagagccuuggugucca

SEQ ID NO: 2134392 - RNA, 21 nt, Human
caagagccuugguguccaccu

SEQ ID NO: 2134393 - RNA, 13 nt, Human
caagcagccaagc

SEQ ID NO: 2134394 - RNA, 14 nt, Human
caagcagccaagcu

SEQ ID NO: 2134395 - RNA, 21 nt, Human
caagcagauuggagaaacccu

SEQ ID NO: 2134396 - RNA, 22 nt, Human
caagcagccaagcuccuuggga

SEQ ID NO: 2134397 - RNA, 15 nt, Human
caagacuuuucuuug

SEQ ID NO: 2134398 - RNA, 17 nt, Human
caagacuuuucuuugaa

SEQ ID NO: 2134399 - RNA, 18 nt, Human
caagacuuuucuuugaag

SEQ ID NO: 2134400 - RNA, 19 nt, Human
caagacuucgggaaggugu

SEQ ID NO: 2134401 - RNA, 21 nt, Human
caagacuucgggaaggugucu

SEQ ID NO: 2134402 - RNA, 17 nt, Human
caagacuugaaggugcc

SEQ ID NO: 2134403 - RNA, 18 nt, Human
caagacuugaaggugccu

SEQ ID NO: 2134404 - RNA, 21 nt, Human
caagacuugguguccuuuccc

SEQ ID NO: 2134405 - RNA, 20 nt, Human
caagagggcacugguggccc

SEQ ID NO: 2134406 - RNA, 19 nt, Human
caagagggcacugguggcc

SEQ ID NO: 2134407 - RNA, 18 nt, Human
caagagggcacugguggc

SEQ ID NO: 2134408 - RNA, 17 nt, Human
caagagggcacuggugg

SEQ ID NO: 2134409 - RNA, 20 nt, Human
caagugauucuccugccuca

SEQ ID NO: 2134410 - RNA, 13 nt, Human
caagugaaucuaa

SEQ ID NO: 2134411 - RNA, 18 nt, Human
caagugacuguaucugug

SEQ ID NO: 2134412 - RNA, 19 nt, Human
caagugacuguaucugugu

SEQ ID NO: 2134413 - RNA, 19 nt, Human
caagugcaugcucucugca

SEQ ID NO: 2134414 - RNA, 21 nt, Human
caagugacuguaucuguguag

SEQ ID NO: 2134415 - RNA, 22 nt, Human
caagugccacugcccgagcugg

SEQ ID NO: 2134416 - RNA, 23 nt, Human
caagugccacugcccgagcuggu

SEQ ID NO: 2134417 - RNA, 20 nt, Human
caagugccagucuugugucu

SEQ ID NO: 2134418 - RNA, 18 nt, Human
caagugauucuccugccu

SEQ ID NO: 2134419 - RNA, 19 nt, Human
caagugauucuccugccuc

SEQ ID NO: 2134420 - RNA, 15 nt, Human
caagugagacccugu

SEQ ID NO: 2134421 - RNA, 19 nt, Human
caagugagacccugucuca

SEQ ID NO: 2134422 - RNA, 22 nt, Human
caagugaaaaaggaggaagaga

SEQ ID NO: 2134423 - RNA, 23 nt, Human
caagugaaaaaggaggaagagaa

SEQ ID NO: 2134424 - RNA, 13 nt, Human
caagugaacacau

SEQ ID NO: 2134425 - RNA, 14 nt, Human
caagugagacccug

SEQ ID NO: 2134426 - RNA, 19 nt, Human
caagugaauuuuucucuaa

SEQ ID NO: 2134427 - RNA, 15 nt, Human
caagugacaucucuu

SEQ ID NO: 2134428 - RNA, 16 nt, Human
caagugacaucucuuu

SEQ ID NO: 2134429 - RNA, 21 nt, Human
caaggggaauguuugccucug

SEQ ID NO: 2134430 - RNA, 20 nt, Human
caagcuuugauuuagauuga

SEQ ID NO: 2134431 - RNA, 14 nt, Human
caagggcaguggag

SEQ ID NO: 2134432 - RNA, 16 nt, Human
caagggcaguggaggu

SEQ ID NO: 2134433 - RNA, 16 nt, Human
caagguagcccuggcc

SEQ ID NO: 2134434 - RNA, 21 nt, Human
caagguagcccuggccagagg

SEQ ID NO: 2134435 - RNA, 23 nt, Human
caagguagcccuggccagaggcu

SEQ ID NO: 2134436 - RNA, 23 nt, Human
caaggggaauguuugccucugcc

SEQ ID NO: 2134437 - RNA, 21 nt, Human
caaggggacccauaggaaauc

SEQ ID NO: 2134438 - RNA, 12 nt, Human
caagggccucuu

SEQ ID NO: 2134439 - RNA, 18 nt, Human
caaggggcagucuggagg

SEQ ID NO: 2134440 - RNA, 16 nt, Human
caaggggcagucugga

SEQ ID NO: 2134441 - RNA, 19 nt, Human
caaggggcagucuggaggg

SEQ ID NO: 2134442 - RNA, 20 nt, Human
caaggguucagagacucagg

SEQ ID NO: 2134443 - RNA, 13 nt, Human
caagguaaaauuc

SEQ ID NO: 2134444 - RNA, 15 nt, Human
caagguaaaauucua

SEQ ID NO: 2134445 - RNA, 16 nt, Human
caagguaaaauucuaa

SEQ ID NO: 2134446 - RNA, 17 nt, Human
caagguaaaauucuaaa

SEQ ID NO: 2134447 - RNA, 14 nt, Human
caacaguuccuuca

SEQ ID NO: 2134448 - RNA, 13 nt, Human
caaccuaaauuug

SEQ ID NO: 2134449 - RNA, 18 nt, Human
caaccuaaccccuuuccu

SEQ ID NO: 2134450 - RNA, 11 nt, Human
caaccucagca

SEQ ID NO: 2134451 - RNA, 14 nt, Human
caaccucagcaacc

SEQ ID NO: 2134452 - RNA, 14 nt, Human
caacaggcugggcu

SEQ ID NO: 2134453 - RNA, 17 nt, Human
caacaggcugggcuuca

SEQ ID NO: 2134454 - RNA, 22 nt, Human
caacugcaagucacaaaggaau

SEQ ID NO: 2134455 - RNA, 14 nt, Human
caacuggcccucuu

SEQ ID NO: 2134456 - RNA, 21 nt, Human
caacuggcccucuucuuacuu

SEQ ID NO: 2134457 - RNA, 23 nt, Human
caacuggcccucuucuuacuuga

SEQ ID NO: 2134458 - RNA, 13 nt, Human
caacugggcccaa

SEQ ID NO: 2134459 - RNA, 21 nt, Human
caacugucuccuaccucugcu

SEQ ID NO: 2134460 - RNA, 13 nt, Human
caacugaaaagac

SEQ ID NO: 2134461 - RNA, 14 nt, Human
caacugaaaagacu

SEQ ID NO: 2134462 - RNA, 22 nt, Human
caacugaaaagacucaguguuc

SEQ ID NO: 2134463 - RNA, 14 nt, Human
caacugaaaguguu

SEQ ID NO: 2134464 - RNA, 15 nt, Human
caacugaaaguguuu

SEQ ID NO: 2134465 - RNA, 19 nt, Human
caacugaaaguguuuccuu

SEQ ID NO: 2134466 - RNA, 22 nt, Human
caacugaaaguguuuccuucau

SEQ ID NO: 2134467 - RNA, 14 nt, Human
caacugaacaaaaa

SEQ ID NO: 2134468 - RNA, 15 nt, Human
caacugaacaaaaaa

SEQ ID NO: 2134469 - RNA, 16 nt, Human
caacugaacaaaaaaa

SEQ ID NO: 2134470 - RNA, 17 nt, Human
caacugaacaaaaaaau

SEQ ID NO: 2134471 - RNA, 18 nt, Human
caagccaagcagccaagc

SEQ ID NO: 2134472 - RNA, 16 nt, Human
cacaaagguauaauuu

SEQ ID NO: 2134473 - RNA, 13 nt, Human
cacaacuuaaaaa

SEQ ID NO: 2134474 - RNA, 23 nt, Human
cacaacuuaaaaagucugcauua

SEQ ID NO: 2134475 - RNA, 20 nt, Human
cacaauccuaacacauuauc

SEQ ID NO: 2134476 - RNA, 22 nt, Human
cacaauccuaacacauuaucgg

SEQ ID NO: 2134477 - RNA, 23 nt, Human
cacaauccuaacacauuaucggg

SEQ ID NO: 2134478 - RNA, 22 nt, Human
cacaagugccacugcccgagcu

SEQ ID NO: 2134479 - RNA, 17 nt, Human
cacaaggugcaaaucaa

SEQ ID NO: 2134480 - RNA, 15 nt, Human
cacaaggugggcagg

SEQ ID NO: 2134481 - RNA, 20 nt, Human
cacaaguagaugccugaacu

SEQ ID NO: 2134482 - RNA, 21 nt, Human
cacaaguagaugccugaacuu

SEQ ID NO: 2134483 - RNA, 22 nt, Human
cacaaguagaugccugaacuug

SEQ ID NO: 2134484 - RNA, 21 nt, Human
cacaaggcugaccaagagaga

SEQ ID NO: 2134485 - RNA, 12 nt, Human
cacaagugaaaa

SEQ ID NO: 2134486 - RNA, 16 nt, Human
cacaagugaaaaacau

SEQ ID NO: 2134487 - RNA, 14 nt, Human
cacaaggcugacca

SEQ ID NO: 2134488 - RNA, 18 nt, Human
cacaaggcugaccaagag

SEQ ID NO: 2134489 - RNA, 19 nt, Human
cacaaggcugaccaagaga

SEQ ID NO: 2134490 - RNA, 13 nt, Human
caaugguuugcaa

SEQ ID NO: 2134491 - RNA, 16 nt, Human
caaugguuugcaagga

SEQ ID NO: 2134492 - RNA, 17 nt, Human
caaugguuugcaaggaa

SEQ ID NO: 2134493 - RNA, 18 nt, Human
caaugguuugcaaggaag

SEQ ID NO: 2134494 - RNA, 23 nt, Human
caauuauaucaguccucuuucaa

SEQ ID NO: 2134495 - RNA, 19 nt, Human
caaugguuugcaaggaagc

SEQ ID NO: 2134496 - RNA, 20 nt, Human
caaugguuugcaaggaagcc

SEQ ID NO: 2134497 - RNA, 17 nt, Human
cacaaacgggcucagca

SEQ ID NO: 2134498 - RNA, 19 nt, Human
caauuuucuuuaaccaguc

SEQ ID NO: 2134499 - RNA, 18 nt, Human
caauuuugcaugcucgau

SEQ ID NO: 2134500 - RNA, 13 nt, Human
caauuauuuuuac

SEQ ID NO: 2134501 - RNA, 14 nt, Human
caauucaaaaaugu

SEQ ID NO: 2134502 - RNA, 15 nt, Human
caauucaaaaaugua

SEQ ID NO: 2134503 - RNA, 16 nt, Human
caauucaaaaauguac

SEQ ID NO: 2134504 - RNA, 22 nt, Human
caauuuuuacacaaaccugaaa

SEQ ID NO: 2134505 - RNA, 14 nt, Human
cacacacuuuggcu

SEQ ID NO: 2134506 - RNA, 12 nt, Human
cacacacacaca

SEQ ID NO: 2134507 - RNA, 13 nt, Human
cacacaccccaau

SEQ ID NO: 2134508 - RNA, 15 nt, Human
cacacacacaacaaa

SEQ ID NO: 2134509 - RNA, 14 nt, Human
cacacagagugguc

SEQ ID NO: 2134510 - RNA, 20 nt, Human
cacacagaguggucuuucug

SEQ ID NO: 2134511 - RNA, 21 nt, Human
cacacagaggcugccucuccc

SEQ ID NO: 2134512 - RNA, 20 nt, Human
cacacaccagagcccaccuu

SEQ ID NO: 2134513 - RNA, 16 nt, Human
cacacaccagagccca

SEQ ID NO: 2134514 - RNA, 13 nt, Human
cacacacaaagag

SEQ ID NO: 2134515 - RNA, 14 nt, Human
cacacacaaagaga

SEQ ID NO: 2134516 - RNA, 15 nt, Human
cacacacaaagagag

SEQ ID NO: 2134517 - RNA, 15 nt, Human
cacacacaacaaaaa

SEQ ID NO: 2134518 - RNA, 15 nt, Human
cacacaccagagccc

SEQ ID NO: 2134519 - RNA, 18 nt, Human
cacacaaugugucugaga

SEQ ID NO: 2134520 - RNA, 21 nt, Human
cacacaaauuaucuuaaaacu

SEQ ID NO: 2134521 - RNA, 13 nt, Human
cacacaacaaaaa

SEQ ID NO: 2134522 - RNA, 14 nt, Human
cacacaacaaaaau

SEQ ID NO: 2134523 - RNA, 15 nt, Human
cacacagcucugucc

SEQ ID NO: 2134524 - RNA, 14 nt, Human
cacacagcucuguc

SEQ ID NO: 2134525 - RNA, 13 nt, Human
cacacagcucugu

SEQ ID NO: 2134526 - RNA, 15 nt, Human
cacacagcagcaguu

SEQ ID NO: 2134527 - RNA, 22 nt, Human
cacaccagagcccaccuuggcu

SEQ ID NO: 2134528 - RNA, 21 nt, Human
cacaccagagcccaccuuggc

SEQ ID NO: 2134529 - RNA, 15 nt, Human
cacacagaguggucu

SEQ ID NO: 2134530 - RNA, 13 nt, Human
cacaccaggcugu

SEQ ID NO: 2134531 - RNA, 20 nt, Human
cacaccaggcugugggccuc

SEQ ID NO: 2134532 - RNA, 23 nt, Human
cacacgcacacacacacacagga

SEQ ID NO: 2134533 - RNA, 17 nt, Human
cacaccucccugaacca

SEQ ID NO: 2134534 - RNA, 14 nt, Human
cacaccucccugaa

SEQ ID NO: 2134535 - RNA, 16 nt, Human
cacaccucccugaacc

SEQ ID NO: 2134536 - RNA, 22 nt, Human
cacaccucaguucccuuggccu

SEQ ID NO: 2134537 - RNA, 13 nt, Human
cacaccucaguuc

SEQ ID NO: 2134538 - RNA, 17 nt, Human
cacaccucaguucccuu

SEQ ID NO: 2134539 - RNA, 18 nt, Human
cacaccucaguucccuug

SEQ ID NO: 2134540 - RNA, 20 nt, Human
cacaccucaguucccuuggc

SEQ ID NO: 2134541 - RNA, 21 nt, Human
cacaccucaguucccuuggcc

SEQ ID NO: 2134542 - RNA, 20 nt, Human
cacacccagcccacuucugc

SEQ ID NO: 2134543 - RNA, 14 nt, Human
cacacccagcccac

SEQ ID NO: 2134544 - RNA, 14 nt, Human
cacaccaggcugug

SEQ ID NO: 2134545 - RNA, 17 nt, Human
cacaccaggcugugggc

SEQ ID NO: 2134546 - RNA, 19 nt, Human
cacaccaggcugugggccu

SEQ ID NO: 2134547 - RNA, 13 nt, Human
cacacacacacaa

SEQ ID NO: 2134548 - RNA, 22 nt, Human
caauccugugugguuuagugua

SEQ ID NO: 2134549 - RNA, 13 nt, Human
caaucuauuuauu

SEQ ID NO: 2134550 - RNA, 19 nt, Human
caaucuauuuauuggacau

SEQ ID NO: 2134551 - RNA, 13 nt, Human
caauauuccugaa

SEQ ID NO: 2134552 - RNA, 21 nt, Human
caauauuccugaaugaaauau

SEQ ID NO: 2134553 - RNA, 18 nt, Human
caauccugugggugaaga

SEQ ID NO: 2134554 - RNA, 22 nt, Human
caauauuauaauuuuuuucaau

SEQ ID NO: 2134555 - RNA, 14 nt, Human
caauauuauaauuu

SEQ ID NO: 2134556 - RNA, 14 nt, Human
caauauuauacuaa

SEQ ID NO: 2134557 - RNA, 18 nt, Human
caauauuauacuaagaaa

SEQ ID NO: 2134558 - RNA, 19 nt, Human
caauauuauacuaagaaaa

SEQ ID NO: 2134559 - RNA, 21 nt, Human
caauauuauacuaagaaaaga

SEQ ID NO: 2134560 - RNA, 22 nt, Human
caauauuauacuaagaaaagau

SEQ ID NO: 2134561 - RNA, 23 nt, Human
caauauuauacuaagaaaagaua

SEQ ID NO: 2134562 - RNA, 13 nt, Human
caauauuauaauu

SEQ ID NO: 2134563 - RNA, 16 nt, Human
caagugccugcuuuua

SEQ ID NO: 2134564 - RNA, 14 nt, Human
caaugcacugacau

SEQ ID NO: 2134565 - RNA, 22 nt, Human
caaugauuguuaauuuacagcu

SEQ ID NO: 2134566 - RNA, 14 nt, Human
caaugauggucacc

SEQ ID NO: 2134567 - RNA, 15 nt, Human
caaugauuguuaauu

SEQ ID NO: 2134568 - RNA, 12 nt, Human
caaucuuguuuc

SEQ ID NO: 2134569 - RNA, 17 nt, Human
caaugaaaguuugcacu

SEQ ID NO: 2134570 - RNA, 13 nt, Human
caaugauggucac

SEQ ID NO: 2134571 - RNA, 21 nt, Human
cacacuaaccuggguucccuu

SEQ ID NO: 2134572 - RNA, 18 nt, Human
cauuuuucagauauaaaa

SEQ ID NO: 2134573 - RNA, 20 nt, Human
cauuuuucagauauaaaaga

SEQ ID NO: 2134574 - RNA, 13 nt, Human
cauuuuuccuaac

SEQ ID NO: 2134575 - RNA, 18 nt, Human
cauuuuuccuaacaggau

SEQ ID NO: 2134576 - RNA, 16 nt, Human
ccaaacagccacacug

SEQ ID NO: 2134577 - RNA, 22 nt, Human
cauuuuguggucauuaagcauu

SEQ ID NO: 2134578 - RNA, 15 nt, Human
cauuuuagacaguaa

SEQ ID NO: 2134579 - RNA, 17 nt, Human
cauuuuagacaguaagu

SEQ ID NO: 2134580 - RNA, 19 nt, Human
cauuuuagacaguaaguau

SEQ ID NO: 2134581 - RNA, 18 nt, Human
cauuugagcagggcucag

SEQ ID NO: 2134582 - RNA, 17 nt, Human
cauuugagcagggcuca

SEQ ID NO: 2134583 - RNA, 20 nt, Human
cauuugagcagggcucagcg

SEQ ID NO: 2134584 - RNA, 20 nt, Human
cauuugcuaacuagcuugga

SEQ ID NO: 2134585 - RNA, 21 nt, Human
cauuugcgaaugguuccauuc

SEQ ID NO: 2134586 - RNA, 20 nt, Human
cauuugcgcacaacuuaaaa

SEQ ID NO: 2134587 - RNA, 23 nt, Human
cauuugcgcacaacuuaaaaagu

SEQ ID NO: 2134588 - RNA, 13 nt, Human
cauuugcugaaua

SEQ ID NO: 2134589 - RNA, 21 nt, Human
cauuugaauaaagccugcuuu

SEQ ID NO: 2134590 - RNA, 20 nt, Human
cauuuccugacagaaggacu

SEQ ID NO: 2134591 - RNA, 13 nt, Human
cauuuccugacag

SEQ ID NO: 2134592 - RNA, 17 nt, Human
cauuuaggggccacuuu

SEQ ID NO: 2134593 - RNA, 17 nt, Human
cauuuccuauguaacug

SEQ ID NO: 2134594 - RNA, 19 nt, Human
cauuuccuauguaacugca

SEQ ID NO: 2134595 - RNA, 15 nt, Human
cauuguuuggcauug

SEQ ID NO: 2134596 - RNA, 22 nt, Human
cauuguuugucugucuucauag

SEQ ID NO: 2134597 - RNA, 18 nt, Human
cauuguuugucugucuuc

SEQ ID NO: 2134598 - RNA, 13 nt, Human
cauuuccuguguc

SEQ ID NO: 2134599 - RNA, 12 nt, Human
cauuuccugugu

SEQ ID NO: 2134600 - RNA, 17 nt, Human
cauuucgccccucauuu

SEQ ID NO: 2134601 - RNA, 21 nt, Human
cauuucgccccucauuuaucc

SEQ ID NO: 2134602 - RNA, 17 nt, Human
cauuucuaaaggccucu

SEQ ID NO: 2134603 - RNA, 18 nt, Human
cauuucuaaaggccucuu

SEQ ID NO: 2134604 - RNA, 23 nt, Human
cauuucuaaaggccucuuccuug

SEQ ID NO: 2134605 - RNA, 19 nt, Human
cauuucuaacucugaugua

SEQ ID NO: 2134606 - RNA, 20 nt, Human
cauuucuaacucugauguaa

SEQ ID NO: 2134607 - RNA, 23 nt, Human
cauuucuaacucugauguaaaug

SEQ ID NO: 2134608 - RNA, 18 nt, Human
cauuucuauuuauuuacu

SEQ ID NO: 2134609 - RNA, 14 nt, Human
cauuucuauuuauu

SEQ ID NO: 2134610 - RNA, 13 nt, Human
cauuucuauuuau

SEQ ID NO: 2134611 - RNA, 20 nt, Human
cauuucuagcgcauggccug

SEQ ID NO: 2134612 - RNA, 23 nt, Human
cauuucuagaacaucccugccag

SEQ ID NO: 2134613 - RNA, 17 nt, Human
cauuguuggccaaagcc

SEQ ID NO: 2134614 - RNA, 16 nt, Human
cauuguugaggugguc

SEQ ID NO: 2134615 - RNA, 21 nt, Human
cauuguugagguggucugaau

SEQ ID NO: 2134616 - RNA, 19 nt, Human
cauuguggcugucagcagg

SEQ ID NO: 2134617 - RNA, 21 nt, Human
cauuguggcugucagcaggaa

SEQ ID NO: 2134618 - RNA, 18 nt, Human
cauuguugagguggucug

SEQ ID NO: 2134619 - RNA, 17 nt, Human
cauuguuuauuaacaaa

SEQ ID NO: 2134620 - RNA, 18 nt, Human
cauuguuggccaaagcca

SEQ ID NO: 2134621 - RNA, 14 nt, Human
cauuguuugcuuau

SEQ ID NO: 2134622 - RNA, 17 nt, Human
cauuguuugcuuauugu

SEQ ID NO: 2134623 - RNA, 18 nt, Human
cauuguuugcuuauuguu

SEQ ID NO: 2134624 - RNA, 19 nt, Human
cauuguuugcuuauuguuc

SEQ ID NO: 2134625 - RNA, 20 nt, Human
cauuguuugcuuauuguucc

SEQ ID NO: 2134626 - RNA, 21 nt, Human
cauuguuugcuuauuguucca

SEQ ID NO: 2134627 - RNA, 22 nt, Human
cauuguuugcuuauuguuccaa

SEQ ID NO: 2134628 - RNA, 15 nt, Human
cauugucuuuauaug

SEQ ID NO: 2134629 - RNA, 16 nt, Human
cauugucuuuauauga

SEQ ID NO: 2134630 - RNA, 17 nt, Human
cauugucuuuauaugaa

SEQ ID NO: 2134631 - RNA, 21 nt, Human
cauugucuuuauaugaacaua

SEQ ID NO: 2134632 - RNA, 14 nt, Human
cauugucucagagc

SEQ ID NO: 2134633 - RNA, 21 nt, Human
cauuguagagcuucuggcacu

SEQ ID NO: 2134634 - RNA, 19 nt, Human
cauuguagagcuucuggca

SEQ ID NO: 2134635 - RNA, 17 nt, Human
cauuguagagcuucugg

SEQ ID NO: 2134636 - RNA, 16 nt, Human
cauuguagagcuucug

SEQ ID NO: 2134637 - RNA, 16 nt, Human
cauuguauaaaaauag

SEQ ID NO: 2134638 - RNA, 15 nt, Human
cauuguauaaaaaua

SEQ ID NO: 2134639 - RNA, 11 nt, Human
cauugcauuua

SEQ ID NO: 2134640 - RNA, 17 nt, Human
cauugccaccaggagaa

SEQ ID NO: 2134641 - RNA, 20 nt, Human
cauugccaccaggagaacca

SEQ ID NO: 2134642 - RNA, 14 nt, Human
cauugccagugucu

SEQ ID NO: 2134643 - RNA, 15 nt, Human
cauugccagugucuu

SEQ ID NO: 2134644 - RNA, 16 nt, Human
cauugccagugucuuu

SEQ ID NO: 2134645 - RNA, 17 nt, Human
cauugccagugucuuuc

SEQ ID NO: 2134646 - RNA, 18 nt, Human
cauugccagugucuuucu

SEQ ID NO: 2134647 - RNA, 19 nt, Human
cauugccagugucuuucuu

SEQ ID NO: 2134648 - RNA, 21 nt, Human
cauugccagugucuuucuuug

SEQ ID NO: 2134649 - RNA, 12 nt, Human
cauugcccuggu

SEQ ID NO: 2134650 - RNA, 15 nt, Human
cauuguagagcuucu

SEQ ID NO: 2134651 - RNA, 13 nt, Human
cauugccaccagg

SEQ ID NO: 2134652 - RNA, 14 nt, Human
cauugccaccagga

SEQ ID NO: 2134653 - RNA, 15 nt, Human
cauugccaccaggag

SEQ ID NO: 2134654 - RNA, 16 nt, Human
cauugccaccaggaga

SEQ ID NO: 2134655 - RNA, 17 nt, Human
ccaaauuuucuuuuuau

SEQ ID NO: 2134656 - RNA, 21 nt, Human
ccaaauuuuggccaaaguguu

SEQ ID NO: 2134657 - RNA, 21 nt, Human
ccaaagggugaagcuauuuau

SEQ ID NO: 2134658 - RNA, 23 nt, Human
ccaaagggugaagcuauuuaucu

SEQ ID NO: 2134659 - RNA, 20 nt, Human
ccaacacaaggugggcaggg

SEQ ID NO: 2134660 - RNA, 14 nt, Human
ccaacaagggcagu

SEQ ID NO: 2134661 - RNA, 15 nt, Human
ccaacaagggcagug

SEQ ID NO: 2134662 - RNA, 16 nt, Human
ccaacaagggcagugg

SEQ ID NO: 2134663 - RNA, 17 nt, Human
ccaacaagggcagugga

SEQ ID NO: 2134664 - RNA, 23 nt, Human
ccaacaagggcaguggaggugcu

SEQ ID NO: 2134665 - RNA, 17 nt, Human
ccaacccaaaccuggag

SEQ ID NO: 2134666 - RNA, 18 nt, Human
ccaacccaaaccuggaga

SEQ ID NO: 2134667 - RNA, 19 nt, Human
ccaacccaaaccuggagau

SEQ ID NO: 2134668 - RNA, 12 nt, Human
ccaacccaucag

SEQ ID NO: 2134669 - RNA, 14 nt, Human
ccaacccaucagaa

SEQ ID NO: 2134670 - RNA, 13 nt, Human
ccaacccccaccc

SEQ ID NO: 2134671 - RNA, 16 nt, Human
ccaacccccaccccac

SEQ ID NO: 2134672 - RNA, 17 nt, Human
ccaacccccaccccaca

SEQ ID NO: 2134673 - RNA, 18 nt, Human
ccaacccccaccccacac

SEQ ID NO: 2134674 - RNA, 19 nt, Human
ccaacccccaccccacacu

SEQ ID NO: 2134675 - RNA, 20 nt, Human
ccaacccccaccccacacuu

SEQ ID NO: 2134676 - RNA, 20 nt, Human
ccaaccaaguggcucccaca

SEQ ID NO: 2134677 - RNA, 13 nt, Human
ccaacaucaacau

SEQ ID NO: 2134678 - RNA, 15 nt, Human
ccaacaggagcuggg

SEQ ID NO: 2134679 - RNA, 23 nt, Human
ccaacaggagcugggauccuaag

SEQ ID NO: 2134680 - RNA, 19 nt, Human
ccaaagccaaagcuaggcc

SEQ ID NO: 2134681 - RNA, 17 nt, Human
ccaaagccuccuccagc

SEQ ID NO: 2134682 - RNA, 22 nt, Human
ccaaagccuccuccagccgcca

SEQ ID NO: 2134683 - RNA, 13 nt, Human
ccaaagccaccag

SEQ ID NO: 2134684 - RNA, 22 nt, Human
ccaaagccaccagacugacaaa

SEQ ID NO: 2134685 - RNA, 13 nt, Human
ccaaacucugcca

SEQ ID NO: 2134686 - RNA, 12 nt, Human
ccaaacugccua

SEQ ID NO: 2134687 - RNA, 15 nt, Human
ccaaagcuaggccug

SEQ ID NO: 2134688 - RNA, 23 nt, Human
ccaaagccccuugcucuccccug

SEQ ID NO: 2134689 - RNA, 17 nt, Human
ccaaagcuaggccuggc

SEQ ID NO: 2134690 - RNA, 16 nt, Human
ccaaagcuaggccugg

SEQ ID NO: 2134691 - RNA, 21 nt, Human
ccaaagcuaggccuggccaga

SEQ ID NO: 2134692 - RNA, 18 nt, Human
ccaaagcuaggguggccc

SEQ ID NO: 2134693 - RNA, 19 nt, Human
ccaaagcuaggguggcccu

SEQ ID NO: 2134694 - RNA, 20 nt, Human
ccaaagcugacgaggcuggg

SEQ ID NO: 2134695 - RNA, 21 nt, Human
ccaaagcugacgaggcugggc

SEQ ID NO: 2134696 - RNA, 23 nt, Human
ccaaagcuaggguggcccuugca

SEQ ID NO: 2134697 - RNA, 15 nt, Human
ccaaagccagacagc

SEQ ID NO: 2134698 - RNA, 18 nt, Human
ccaaaggaagucuaggag

SEQ ID NO: 2134699 - RNA, 21 nt, Human
ccaaagcuguuggucuguccc

SEQ ID NO: 2134700 - RNA, 14 nt, Human
ccaaaggaggaugg

SEQ ID NO: 2134701 - RNA, 12 nt, Human
ccaaaggaggcu

SEQ ID NO: 2134702 - RNA, 15 nt, Human
ccaaaggaggcuggc

SEQ ID NO: 2134703 - RNA, 16 nt, Human
ccaaaggaggcuggca

SEQ ID NO: 2134704 - RNA, 17 nt, Human
ccaaaggaggcuggcag

SEQ ID NO: 2134705 - RNA, 18 nt, Human
ccaaaggaggcuggcagg

SEQ ID NO: 2134706 - RNA, 15 nt, Human
ccaacccucagagcc

SEQ ID NO: 2134707 - RNA, 14 nt, Human
ccaacccucagagc

SEQ ID NO: 2134708 - RNA, 12 nt, Human
ccaaccccugug

SEQ ID NO: 2134709 - RNA, 15 nt, Human
ccaacccgaggcccg

SEQ ID NO: 2134710 - RNA, 15 nt, Human
ccaaccccuguggag

SEQ ID NO: 2134711 - RNA, 17 nt, Human
ccaacccgaggcccgca

SEQ ID NO: 2134712 - RNA, 18 nt, Human
ccaaccccccaccugcca

SEQ ID NO: 2134713 - RNA, 20 nt, Human
ccaagaauagaugcugacug

SEQ ID NO: 2134714 - RNA, 22 nt, Human
ccaagacagaugccccagagcu

SEQ ID NO: 2134715 - RNA, 19 nt, Human
ccaagacagaugccccaga

SEQ ID NO: 2134716 - RNA, 21 nt, Human
ccaagacagaugccccagagc

SEQ ID NO: 2134717 - RNA, 18 nt, Human
ccaagacagaugccccag

SEQ ID NO: 2134718 - RNA, 19 nt, Human
ccaagaauagaugcugacu

SEQ ID NO: 2134719 - RNA, 13 nt, Human
ccaagaaggcugg

SEQ ID NO: 2134720 - RNA, 14 nt, Human
ccaagaaggcuggg

SEQ ID NO: 2134721 - RNA, 20 nt, Human
ccaagacuugguguccuuuc

SEQ ID NO: 2134722 - RNA, 21 nt, Human
ccaagacuugguguccuuucc

SEQ ID NO: 2134723 - RNA, 19 nt, Human
ccaagacuugguguccuuu

SEQ ID NO: 2134724 - RNA, 22 nt, Human
ccaagacuugguguccuuuccc

SEQ ID NO: 2134725 - RNA, 20 nt, Human
ccaagagaaggggaagcacu

SEQ ID NO: 2134726 - RNA, 12 nt, Human
ccaagagagaaa

SEQ ID NO: 2134727 - RNA, 13 nt, Human
ccaagagagaaag

SEQ ID NO: 2134728 - RNA, 14 nt, Human
ccaagagagaaaga

SEQ ID NO: 2134729 - RNA, 21 nt, Human
ccaagaggcuguucccaccag

SEQ ID NO: 2134730 - RNA, 15 nt, Human
ccaagagagaaagaa

SEQ ID NO: 2134731 - RNA, 22 nt, Human
ccaaguccaggucgggcucagc

SEQ ID NO: 2134732 - RNA, 12 nt, Human
ccaagucccacc

SEQ ID NO: 2134733 - RNA, 23 nt, Human
ccaagucccaccgguugcuucug

SEQ ID NO: 2134734 - RNA, 14 nt, Human
ccaaguuauauaaa

SEQ ID NO: 2134735 - RNA, 20 nt, Human
ccaaguuauauaaagagaaa

SEQ ID NO: 2134736 - RNA, 22 nt, Human
ccaaguuauauaaagagaaaau

SEQ ID NO: 2134737 - RNA, 14 nt, Human
ccaaguuuauauac

SEQ ID NO: 2134738 - RNA, 22 nt, Human
ccaauaaaugugaaauucuguc

SEQ ID NO: 2134739 - RNA, 19 nt, Human
ccaauagcacuuucauugc

SEQ ID NO: 2134740 - RNA, 21 nt, Human
ccaauagcacuuucauugcca

SEQ ID NO: 2134741 - RNA, 22 nt, Human
ccaauaguuguugauuggcagg

SEQ ID NO: 2134742 - RNA, 16 nt, Human
ccaauaggaaugcuaa

SEQ ID NO: 2134743 - RNA, 20 nt, Human
ccaagucaagugaaaaagga

SEQ ID NO: 2134744 - RNA, 20 nt, Human
ccaagucagcuuugccuucc

SEQ ID NO: 2134745 - RNA, 21 nt, Human
ccaagucagcuuugccuucca

SEQ ID NO: 2134746 - RNA, 17 nt, Human
ccaaguaaauagcaaca

SEQ ID NO: 2134747 - RNA, 18 nt, Human
ccaaggugggaggauugc

SEQ ID NO: 2134748 - RNA, 13 nt, Human
ccaaggugggagg

SEQ ID NO: 2134749 - RNA, 16 nt, Human
ccaaggucuaggugga

SEQ ID NO: 2134750 - RNA, 23 nt, Human
ccaaggguauccaaguuggacug

SEQ ID NO: 2134751 - RNA, 20 nt, Human
ccaaggguucagagacucag

SEQ ID NO: 2134752 - RNA, 23 nt, Human
ccaaggguucagagacucagggc

SEQ ID NO: 2134753 - RNA, 20 nt, Human
ccaaggggcagucuggaggg

SEQ ID NO: 2134754 - RNA, 22 nt, Human
ccaaggggaauguuugccucug

SEQ ID NO: 2134755 - RNA, 15 nt, Human
ccaaggggcagucug

SEQ ID NO: 2134756 - RNA, 16 nt, Human
ccaaggggcagucugg

SEQ ID NO: 2134757 - RNA, 24 nt, Human
ccaagggaguuaggcuauucacaa

SEQ ID NO: 2134758 - RNA, 19 nt, Human
ccaaggccagaguggccug

SEQ ID NO: 2134759 - RNA, 19 nt, Human
ccaagcucacaguuccucg

SEQ ID NO: 2134760 - RNA, 22 nt, Human
ccaagcucacaguuccucgccc

SEQ ID NO: 2134761 - RNA, 15 nt, Human
ccaaggccagagugg

SEQ ID NO: 2134762 - RNA, 18 nt, Human
ccaaggccagaguggccu

SEQ ID NO: 2134763 - RNA, 13 nt, Human
ccaagccguggcu

SEQ ID NO: 2134764 - RNA, 22 nt, Human
ccaagcccacagguguccccag

SEQ ID NO: 2134765 - RNA, 22 nt, Human
ccaagccagggauggggccaca

SEQ ID NO: 2134766 - RNA, 23 nt, Human
ccaagccagggauggggccacag

SEQ ID NO: 2134767 - RNA, 14 nt, Human
ccaagccccauccu

SEQ ID NO: 2134768 - RNA, 13 nt, Human
ccaagccugacca

SEQ ID NO: 2134769 - RNA, 20 nt, Human
ccaagcgaggucaacagaga

SEQ ID NO: 2134770 - RNA, 21 nt, Human
ccaagcgaggucaacagagaa

SEQ ID NO: 2134771 - RNA, 13 nt, Human
ccaagcucacagu

SEQ ID NO: 2134772 - RNA, 17 nt, Human
ccaagcucacaguuccu

SEQ ID NO: 2134773 - RNA, 18 nt, Human
ccaagcucacaguuccuc

SEQ ID NO: 2134774 - RNA, 13 nt, Human
ccaagcauagaga

SEQ ID NO: 2134775 - RNA, 21 nt, Human
ccaagcauagagaagagucug

SEQ ID NO: 2134776 - RNA, 20 nt, Human
ccaagcaaaggugaagagac

SEQ ID NO: 2134777 - RNA, 14 nt, Human
ccaagcaaauguua

SEQ ID NO: 2134778 - RNA, 21 nt, Human
ccaagauugcgccauugcacu

SEQ ID NO: 2134779 - RNA, 20 nt, Human
ccacaguggaaccagcccag

SEQ ID NO: 2134780 - RNA, 20 nt, Human
ccacagugccuaauaauacu

SEQ ID NO: 2134781 - RNA, 22 nt, Human
ccacaucccacucacaacagcu

SEQ ID NO: 2134782 - RNA, 12 nt, Human
ccacagugucug

SEQ ID NO: 2134783 - RNA, 21 nt, Human
ccacauccccgcuggcugggg

SEQ ID NO: 2134784 - RNA, 23 nt, Human
ccacauccccgcuggcugggggc

SEQ ID NO: 2134785 - RNA, 19 nt, Human
ccacagcuuggggccaucg

SEQ ID NO: 2134786 - RNA, 19 nt, Human
ccacauccuccguccagcc

SEQ ID NO: 2134787 - RNA, 20 nt, Human
ccacauccuccguccagccg

SEQ ID NO: 2134788 - RNA, 18 nt, Human
ccacaggguucaaaaugu

SEQ ID NO: 2134789 - RNA, 22 nt, Human
ccacaggguucaaaaugucugu

SEQ ID NO: 2134790 - RNA, 20 nt, Human
ccacagggcuaagagcuagc

SEQ ID NO: 2134791 - RNA, 14 nt, Human
ccacagggcuaaga

SEQ ID NO: 2134792 - RNA, 17 nt, Human
ccacagggcuaagagcu

SEQ ID NO: 2134793 - RNA, 15 nt, Human
ccacaggugucccca

SEQ ID NO: 2134794 - RNA, 16 nt, Human
ccacagguguccccag

SEQ ID NO: 2134795 - RNA, 19 nt, Human
ccacagguguccccagccc

SEQ ID NO: 2134796 - RNA, 21 nt, Human
ccacagguguccccagcccac

SEQ ID NO: 2134797 - RNA, 22 nt, Human
ccacagguguccccagcccacu

SEQ ID NO: 2134798 - RNA, 23 nt, Human
ccacagguguuuauacagcucag

SEQ ID NO: 2134799 - RNA, 22 nt, Human
ccacagguucaugccaccaugg

SEQ ID NO: 2134800 - RNA, 16 nt, Human
ccacaugugcacaugc

SEQ ID NO: 2134801 - RNA, 17 nt, Human
ccacaucuugcucugcu

SEQ ID NO: 2134802 - RNA, 18 nt, Human
ccacaucuugcucugcug

SEQ ID NO: 2134803 - RNA, 19 nt, Human
ccacaucuugcucugcuga

SEQ ID NO: 2134804 - RNA, 20 nt, Human
ccacaucuugcucugcugac

SEQ ID NO: 2134805 - RNA, 15 nt, Human
ccaccaacccucaga

SEQ ID NO: 2134806 - RNA, 15 nt, Human
ccaccaacaucccau

SEQ ID NO: 2134807 - RNA, 12 nt, Human
ccaccaacccau

SEQ ID NO: 2134808 - RNA, 21 nt, Human
ccaccaacccaucagaaggag

SEQ ID NO: 2134809 - RNA, 15 nt, Human
ccaccaacuggcccu

SEQ ID NO: 2134810 - RNA, 16 nt, Human
ccaccaacuggcccuc

SEQ ID NO: 2134811 - RNA, 19 nt, Human
ccaccaacuggcccucuuc

SEQ ID NO: 2134812 - RNA, 17 nt, Human
ccaccaagacuuguuuu

SEQ ID NO: 2134813 - RNA, 22 nt, Human
ccaccaugcccagcucagaggg

SEQ ID NO: 2134814 - RNA, 16 nt, Human
ccaccauggccagcca

SEQ ID NO: 2134815 - RNA, 17 nt, Human
ccaccauggccagccaa

SEQ ID NO: 2134816 - RNA, 21 nt, Human
ccaccauggccagccaacuuu

SEQ ID NO: 2134817 - RNA, 17 nt, Human
ccacauguguccauccc

SEQ ID NO: 2134818 - RNA, 20 nt, Human
ccacauguguccaucccagc

SEQ ID NO: 2134819 - RNA, 16 nt, Human
ccacaggaucagucug

SEQ ID NO: 2134820 - RNA, 16 nt, Human
ccacaggcccuuccuc

SEQ ID NO: 2134821 - RNA, 15 nt, Human
ccacaggcccuuccu

SEQ ID NO: 2134822 - RNA, 22 nt, Human
ccacaggcccuuccucuccacu

SEQ ID NO: 2134823 - RNA, 19 nt, Human
ccacaggcccuuccucucc

SEQ ID NO: 2134824 - RNA, 18 nt, Human
ccacaggcccuuccucuc

SEQ ID NO: 2134825 - RNA, 17 nt, Human
ccacaggcccuuccucu

SEQ ID NO: 2134826 - RNA, 23 nt, Human
ccacaggcccuuccucuccacug

SEQ ID NO: 2134827 - RNA, 17 nt, Human
ccacagcuuccccucuc

SEQ ID NO: 2134828 - RNA, 13 nt, Human
ccacaccuggccc

SEQ ID NO: 2134829 - RNA, 14 nt, Human
ccacaccuggcccu

SEQ ID NO: 2134830 - RNA, 18 nt, Human
ccacaccuggcccugggg

SEQ ID NO: 2134831 - RNA, 20 nt, Human
ccacaccuggcccuggggcc

SEQ ID NO: 2134832 - RNA, 15 nt, Human
ccacacccucuccca

SEQ ID NO: 2134833 - RNA, 18 nt, Human
ccacacccucucccagga

SEQ ID NO: 2134834 - RNA, 16 nt, Human
ccacacuaaccugggu

SEQ ID NO: 2134835 - RNA, 22 nt, Human
ccacacuaaccuggguucccuu

SEQ ID NO: 2134836 - RNA, 23 nt, Human
ccacacuaaccuggguucccuuu

SEQ ID NO: 2134837 - RNA, 22 nt, Human
ccacacccagcccacuucugcc

SEQ ID NO: 2134838 - RNA, 21 nt, Human
ccacacccagcccacuucugc

SEQ ID NO: 2134839 - RNA, 15 nt, Human
ccacacccagcccac

SEQ ID NO: 2134840 - RNA, 20 nt, Human
ccacacccagcccacuucug

SEQ ID NO: 2134841 - RNA, 12 nt, Human
ccaauauuauaa

SEQ ID NO: 2134842 - RNA, 19 nt, Human
ccaauauccucgcucccgg

SEQ ID NO: 2134843 - RNA, 20 nt, Human
ccaauauccucgcucccggg

SEQ ID NO: 2134844 - RNA, 23 nt, Human
ccacacaucaguaauguauucua

SEQ ID NO: 2134845 - RNA, 13 nt, Human
ccaauauuauaau

SEQ ID NO: 2134846 - RNA, 13 nt, Human
ccacacagagugg

SEQ ID NO: 2134847 - RNA, 22 nt, Human
ccaccauggcuaaggcaccagc

SEQ ID NO: 2134848 - RNA, 23 nt, Human
ccaccauggcuaaggcaccagcc

SEQ ID NO: 2134849 - RNA, 14 nt, Human
ccaccaugucugcc

SEQ ID NO: 2134850 - RNA, 17 nt, Human
ccaccaugucugcccca

SEQ ID NO: 2134851 - RNA, 21 nt, Human
ccacccaggagccccgaggcc

SEQ ID NO: 2134852 - RNA, 12 nt, Human
ccacccaggagg

SEQ ID NO: 2134853 - RNA, 14 nt, Human
ccacccaggaggga

SEQ ID NO: 2134854 - RNA, 23 nt, Human
ccacccaggagccccgaggccuu

SEQ ID NO: 2134855 - RNA, 23 nt, Human
ccacccaggggaaugaucucuga

SEQ ID NO: 2134856 - RNA, 23 nt, Human
ccacccaggagggagggggcuau

SEQ ID NO: 2134857 - RNA, 17 nt, Human
ccacccaggagggaggg

SEQ ID NO: 2134858 - RNA, 18 nt, Human
ccacccaggagggagggg

SEQ ID NO: 2134859 - RNA, 11 nt, Human
ccacucagguc

SEQ ID NO: 2134860 - RNA, 16 nt, Human
ccacucaggucuguuu

SEQ ID NO: 2134861 - RNA, 20 nt, Human
ccacucaggaggcugaggca

SEQ ID NO: 2134862 - RNA, 13 nt, Human
ccacucaggccaa

SEQ ID NO: 2134863 - RNA, 20 nt, Human
ccacucaggccaacaagcca

SEQ ID NO: 2134864 - RNA, 22 nt, Human
ccacuccagaccccuggcuuuu

SEQ ID NO: 2134865 - RNA, 21 nt, Human
ccacuccagaccccuggcuuu

SEQ ID NO: 2134866 - RNA, 20 nt, Human
ccacuccagaccccuggcuu

SEQ ID NO: 2134867 - RNA, 18 nt, Human
ccacucaguccauagcag

SEQ ID NO: 2134868 - RNA, 21 nt, Human
ccacuauggucaucuuuuucu

SEQ ID NO: 2134869 - RNA, 19 nt, Human
ccacuaggacucugaggcu

SEQ ID NO: 2134870 - RNA, 20 nt, Human
ccacuaggacucugaggcuc

SEQ ID NO: 2134871 - RNA, 14 nt, Human
ccacuaggcugggu

SEQ ID NO: 2134872 - RNA, 15 nt, Human
ccacuaggcugggug

SEQ ID NO: 2134873 - RNA, 16 nt, Human
ccacuaggcugggugc

SEQ ID NO: 2134874 - RNA, 20 nt, Human
ccacuaggcugggugcccac

SEQ ID NO: 2134875 - RNA, 21 nt, Human
ccacuaggcugggugcccaca

SEQ ID NO: 2134876 - RNA, 23 nt, Human
ccacuaggcugggugcccacagc

SEQ ID NO: 2134877 - RNA, 13 nt, Human
ccacucaggaggc

SEQ ID NO: 2134878 - RNA, 20 nt, Human
ccacuacacuccagccugag

SEQ ID NO: 2134879 - RNA, 21 nt, Human
ccacuacacuccagccugagc

SEQ ID NO: 2134880 - RNA, 22 nt, Human
ccacuacacuccagccugagca

SEQ ID NO: 2134881 - RNA, 22 nt, Human
ccacuacaugcagcccaugccc

SEQ ID NO: 2134882 - RNA, 16 nt, Human
ccacuaggacucugag

SEQ ID NO: 2134883 - RNA, 18 nt, Human
ccacuaggacucugaggc

SEQ ID NO: 2134884 - RNA, 16 nt, Human
ccacgcuggagugcag

SEQ ID NO: 2134885 - RNA, 20 nt, Human
ccaccugucucagccuccca

SEQ ID NO: 2134886 - RNA, 23 nt, Human
ccaccugucucagccucccagag

SEQ ID NO: 2134887 - RNA, 12 nt, Human
ccaccugucuca

SEQ ID NO: 2134888 - RNA, 15 nt, Human
ccaccugucucagcc

SEQ ID NO: 2134889 - RNA, 16 nt, Human
ccaccugucucagccu

SEQ ID NO: 2134890 - RNA, 18 nt, Human
ccaccugucucagccucc

SEQ ID NO: 2134891 - RNA, 22 nt, Human
ccaccccagugcacccacucug

SEQ ID NO: 2134892 - RNA, 23 nt, Human
ccaccccaugucaccggauccug

SEQ ID NO: 2134893 - RNA, 15 nt, Human
ccaccugguggccuc

SEQ ID NO: 2134894 - RNA, 17 nt, Human
ccaccugguggccucug

SEQ ID NO: 2134895 - RNA, 21 nt, Human
ccaccugguuccggaauccug

SEQ ID NO: 2134896 - RNA, 19 nt, Human
ccaccugucaaacaaagcc

SEQ ID NO: 2134897 - RNA, 20 nt, Human
ccaccugucaaacaaagcca

SEQ ID NO: 2134898 - RNA, 12 nt, Human
ccaccuguccca

SEQ ID NO: 2134899 - RNA, 13 nt, Human
ccaccugucccac

SEQ ID NO: 2134900 - RNA, 14 nt, Human
ccaccugucccacc

SEQ ID NO: 2134901 - RNA, 15 nt, Human
ccaccugucccaccu

SEQ ID NO: 2134902 - RNA, 16 nt, Human
ccaccugucccaccuc

SEQ ID NO: 2134903 - RNA, 17 nt, Human
ccaccugucccaccuca

SEQ ID NO: 2134904 - RNA, 18 nt, Human
ccaccugucccaccucaa

SEQ ID NO: 2134905 - RNA, 11 nt, Human
ccaccugucuc

SEQ ID NO: 2134906 - RNA, 18 nt, Human
ccacggccaggccagagg

SEQ ID NO: 2134907 - RNA, 16 nt, Human
ccacggccaggccaga

SEQ ID NO: 2134908 - RNA, 19 nt, Human
ccacgcuggagugcaguga

SEQ ID NO: 2134909 - RNA, 18 nt, Human
ccacgcuggagugcagug

SEQ ID NO: 2134910 - RNA, 23 nt, Human
ccacggccaggccagagggagug

SEQ ID NO: 2134911 - RNA, 22 nt, Human
ccaccugucaaacaaagccaga

SEQ ID NO: 2134912 - RNA, 12 nt, Human
ccaccccacacu

SEQ ID NO: 2134913 - RNA, 14 nt, Human
ccaccccacccccu

SEQ ID NO: 2134914 - RNA, 13 nt, Human
ccaccccacacuu

SEQ ID NO: 2134915 - RNA, 12 nt, Human
ccaccccagccu

SEQ ID NO: 2134916 - RNA, 14 nt, Human
ccaccccagccuaa

SEQ ID NO: 2134917 - RNA, 13 nt, Human
ccaccccagcugc

SEQ ID NO: 2134918 - RNA, 17 nt, Human
ccaccccacccccuuca

SEQ ID NO: 2134919 - RNA, 19 nt, Human
ccaccccagaaauggugaa

SEQ ID NO: 2134920 - RNA, 18 nt, Human
ccaccccagcugcucccc

SEQ ID NO: 2134921 - RNA, 17 nt, Human
ccaccccagugcaccca

SEQ ID NO: 2134922 - RNA, 19 nt, Human
ccaccccagugcacccacu

SEQ ID NO: 2134923 - RNA, 14 nt, Human
ccacuacacuccag

SEQ ID NO: 2134924 - RNA, 18 nt, Human
ccacuacacuccagccug

SEQ ID NO: 2134925 - RNA, 19 nt, Human
ccacuacacuccagccuga

SEQ ID NO: 2134926 - RNA, 17 nt, Human
ccacguacugcagccuc

SEQ ID NO: 2134927 - RNA, 16 nt, Human
ccacguacugcagccu

SEQ ID NO: 2134928 - RNA, 13 nt, Human
ccacguacugcag

SEQ ID NO: 2134929 - RNA, 19 nt, Human
ccacuuagaaauugcauuu

SEQ ID NO: 2134930 - RNA, 13 nt, Human
ccacuuaccuuca

SEQ ID NO: 2134931 - RNA, 14 nt, Human
ccacuuaccuucaa

SEQ ID NO: 2134932 - RNA, 19 nt, Human
ccacuuaccuucaauaaag

SEQ ID NO: 2134933 - RNA, 12 nt, Human
ccacuuaccuag

SEQ ID NO: 2134934 - RNA, 21 nt, Human
ccacuuaaaaaauguccauga

SEQ ID NO: 2134935 - RNA, 14 nt, Human
ccacugcaggcccc

SEQ ID NO: 2134936 - RNA, 17 nt, Human
ccacugcaggccccgcu

SEQ ID NO: 2134937 - RNA, 17 nt, Human
ccacuuaaaaaaugucc

SEQ ID NO: 2134938 - RNA, 19 nt, Human
ccacuuaaaaaauguccau

SEQ ID NO: 2134939 - RNA, 16 nt, Human
ccacuccccaccuuca

SEQ ID NO: 2134940 - RNA, 23 nt, Human
ccacugcacuccagccuggguga

SEQ ID NO: 2134941 - RNA, 19 nt, Human
ccacugcacucuagccgga

SEQ ID NO: 2134942 - RNA, 20 nt, Human
ccacugcacucuagccggag

SEQ ID NO: 2134943 - RNA, 13 nt, Human
ccacugcaggccc

SEQ ID NO: 2134944 - RNA, 21 nt, Human
ccacuuaccuucaauaaagua

SEQ ID NO: 2134945 - RNA, 22 nt, Human
ccacuuaccuucaauaaaguau

SEQ ID NO: 2134946 - RNA, 21 nt, Human
ccacuuagaaauugcauuucc

SEQ ID NO: 2134947 - RNA, 13 nt, Human
ccacuucagcuga

SEQ ID NO: 2134948 - RNA, 14 nt, Human
ccacuucagcugac

SEQ ID NO: 2134949 - RNA, 17 nt, Human
ccagaacacacuccauc

SEQ ID NO: 2134950 - RNA, 16 nt, Human
ccagaaaucauuuuac

SEQ ID NO: 2134951 - RNA, 21 nt, Human
ccagaaauaaaguuggugaca

SEQ ID NO: 2134952 - RNA, 23 nt, Human
ccagaaauaaaguuggugacaga

SEQ ID NO: 2134953 - RNA, 21 nt, Human
ccacuucaggguucuccucuc

SEQ ID NO: 2134954 - RNA, 12 nt, Human
ccagaaagaaaa

SEQ ID NO: 2134955 - RNA, 13 nt, Human
ccacuucaauaga

SEQ ID NO: 2134956 - RNA, 14 nt, Human
ccagaaaggagacu

SEQ ID NO: 2134957 - RNA, 16 nt, Human
ccagaaaggagacuag

SEQ ID NO: 2134958 - RNA, 15 nt, Human
ccagaaaggauauuu

SEQ ID NO: 2134959 - RNA, 16 nt, Human
ccagaaaggauauuua

SEQ ID NO: 2134960 - RNA, 17 nt, Human
ccagaaaggauauuuaa

SEQ ID NO: 2134961 - RNA, 20 nt, Human
ccagaaaggauauuuaagaa

SEQ ID NO: 2134962 - RNA, 23 nt, Human
ccagaaaggauauuuaagaaaau

SEQ ID NO: 2134963 - RNA, 23 nt, Human
ccagaaguuugagaucagccugg

SEQ ID NO: 2134964 - RNA, 20 nt, Human
ccagaaguuugucaagucaa

SEQ ID NO: 2134965 - RNA, 22 nt, Human
ccagaaguuugagaucagccug

SEQ ID NO: 2134966 - RNA, 17 nt, Human
ccagaacaguuuguaca

SEQ ID NO: 2134967 - RNA, 22 nt, Human
ccagaacacacuccaucagcuu

SEQ ID NO: 2134968 - RNA, 19 nt, Human
ccagaacacacuccaucag

SEQ ID NO: 2134969 - RNA, 16 nt, Human
ccagaagccaaagacu

SEQ ID NO: 2134970 - RNA, 21 nt, Human
ccagacaccuugacagggcac

SEQ ID NO: 2134971 - RNA, 16 nt, Human
ccagaauuuaaaccua

SEQ ID NO: 2134972 - RNA, 21 nt, Human
ccagaauucccagcugucugu

SEQ ID NO: 2134973 - RNA, 21 nt, Human
ccagaaugucagauuccuuuc

SEQ ID NO: 2134974 - RNA, 22 nt, Human
ccagaaugucagauuccuuucc

SEQ ID NO: 2134975 - RNA, 23 nt, Human
ccagaaugucagauuccuuuccc

SEQ ID NO: 2134976 - RNA, 23 nt, Human
ccagaauggucuuucuaaugugu

SEQ ID NO: 2134977 - RNA, 17 nt, Human
ccagaccccuggcuuuu

SEQ ID NO: 2134978 - RNA, 12 nt, Human
ccagagcacugu

SEQ ID NO: 2134979 - RNA, 13 nt, Human
ccagagcacugua

SEQ ID NO: 2134980 - RNA, 14 nt, Human
ccagagcacuguau

SEQ ID NO: 2134981 - RNA, 16 nt, Human
ccagagcacuguauac

SEQ ID NO: 2134982 - RNA, 16 nt, Human
ccagaccccuggcuuu

SEQ ID NO: 2134983 - RNA, 15 nt, Human
ccagaccccuggcuu

SEQ ID NO: 2134984 - RNA, 24 nt, Human
ccagaccccucuggccaggaugga

SEQ ID NO: 2134985 - RNA, 14 nt, Human
ccagaccccuggcu

SEQ ID NO: 2134986 - RNA, 20 nt, Human
ccagaccccucuggccagga

SEQ ID NO: 2134987 - RNA, 21 nt, Human
ccagaccccucuggccaggau

SEQ ID NO: 2134988 - RNA, 22 nt, Human
ccagaccccucuggccaggaug

SEQ ID NO: 2134989 - RNA, 23 nt, Human
ccagaccccucuggccaggaugg

SEQ ID NO: 2134990 - RNA, 21 nt, Human
ccagacagcaacggggaggcc

SEQ ID NO: 2134991 - RNA, 19 nt, Human
ccagaccccucuggccagg

SEQ ID NO: 2134992 - RNA, 23 nt, Human
ccagacacugaccauccacucua

SEQ ID NO: 2134993 - RNA, 24 nt, Human
ccagcuggagaaauaugguacuca

SEQ ID NO: 2134994 - RNA, 13 nt, Human
ccagcuggcagca

SEQ ID NO: 2134995 - RNA, 14 nt, Human
ccagcuggcagcag

SEQ ID NO: 2134996 - RNA, 15 nt, Human
ccagcuggcagcaga

SEQ ID NO: 2134997 - RNA, 20 nt, Human
ccagcuggcagcagagugug

SEQ ID NO: 2134998 - RNA, 14 nt, Human
ccagcugcuccccu

SEQ ID NO: 2134999 - RNA, 16 nt, Human
ccagcugcuccccucc

SEQ ID NO: 2135000 - RNA, 17 nt, Human
ccagcugcuccccuccc

SEQ ID NO: 2135001 - RNA, 19 nt, Human
ccagcugcuccccucccuc

SEQ ID NO: 2135002 - RNA, 21 nt, Human
ccagcugcuccccucccuccu

SEQ ID NO: 2135003 - RNA, 12 nt, Human
ccagcugcucug

SEQ ID NO: 2135004 - RNA, 13 nt, Human
ccagcugcucugc

SEQ ID NO: 2135005 - RNA, 14 nt, Human
ccagcugcucugcc

SEQ ID NO: 2135006 - RNA, 15 nt, Human
ccagcugcucugccc

SEQ ID NO: 2135007 - RNA, 16 nt, Human
ccagcugcucugccca

SEQ ID NO: 2135008 - RNA, 17 nt, Human
ccagcugcucugcccag

SEQ ID NO: 2135009 - RNA, 18 nt, Human
ccagcugcucugcccaga

SEQ ID NO: 2135010 - RNA, 19 nt, Human
ccagcugcucugcccagag

SEQ ID NO: 2135011 - RNA, 20 nt, Human
ccagcugcucugcccagagc

SEQ ID NO: 2135012 - RNA, 21 nt, Human
ccagcugcucugcccagagcu

SEQ ID NO: 2135013 - RNA, 22 nt, Human
ccagcugcucugcccagagcug

SEQ ID NO: 2135014 - RNA, 23 nt, Human
ccagcugcucugcccagagcugg

SEQ ID NO: 2135015 - RNA, 19 nt, Human
ccagcugccgaccagagcc

SEQ ID NO: 2135016 - RNA, 20 nt, Human
ccagcugccgaccagagccc

SEQ ID NO: 2135017 - RNA, 18 nt, Human
ccagcugccgaccagagc

SEQ ID NO: 2135018 - RNA, 16 nt, Human
ccagcugccccucccu

SEQ ID NO: 2135019 - RNA, 17 nt, Human
ccagcugccccucccug

SEQ ID NO: 2135020 - RNA, 19 nt, Human
ccagcugccccucccugcc

SEQ ID NO: 2135021 - RNA, 16 nt, Human
ccagcgagcccuggug

SEQ ID NO: 2135022 - RNA, 15 nt, Human
ccagcgagcccuggu

SEQ ID NO: 2135023 - RNA, 14 nt, Human
ccagcgagcccugg

SEQ ID NO: 2135024 - RNA, 12 nt, Human
ccagcucuggcu

SEQ ID NO: 2135025 - RNA, 14 nt, Human
ccagcucuggcuuc

SEQ ID NO: 2135026 - RNA, 16 nt, Human
ccagagcccaccuugg

SEQ ID NO: 2135027 - RNA, 22 nt, Human
ccagagcccaccuuggcucaag

SEQ ID NO: 2135028 - RNA, 14 nt, Human
ccaggacaggcccg

SEQ ID NO: 2135029 - RNA, 15 nt, Human
ccaggacaggcccgg

SEQ ID NO: 2135030 - RNA, 17 nt, Human
ccaggacaggcccggcg

SEQ ID NO: 2135031 - RNA, 13 nt, Human
ccaggacaggccc

SEQ ID NO: 2135032 - RNA, 14 nt, Human
ccaggacaggacca

SEQ ID NO: 2135033 - RNA, 13 nt, Human
ccaggacaggacc

SEQ ID NO: 2135034 - RNA, 14 nt, Human
ccaggacucccucc

SEQ ID NO: 2135035 - RNA, 23 nt, Human
ccaggacucccuccucaccucug

SEQ ID NO: 2135036 - RNA, 16 nt, Human
ccaggacucccuccuc

SEQ ID NO: 2135037 - RNA, 17 nt, Human
ccaggacucccuccuca

SEQ ID NO: 2135038 - RNA, 18 nt, Human
ccaggacucccuccucac

SEQ ID NO: 2135039 - RNA, 22 nt, Human
ccaggacucccuccucaccucu

SEQ ID NO: 2135040 - RNA, 16 nt, Human
ccagcuggcagcagag

SEQ ID NO: 2135041 - RNA, 16 nt, Human
ccaggaaggggcugga

SEQ ID NO: 2135042 - RNA, 18 nt, Human
ccaggaaggggcuggacu

SEQ ID NO: 2135043 - RNA, 14 nt, Human
ccaggaagggucaa

SEQ ID NO: 2135044 - RNA, 20 nt, Human
ccaggaagccgugcccugcc

SEQ ID NO: 2135045 - RNA, 15 nt, Human
ccaggaagccgugcc

SEQ ID NO: 2135046 - RNA, 11 nt, Human
ccaggaagccg

SEQ ID NO: 2135047 - RNA, 15 nt, Human
ccaggaaugaagaua

SEQ ID NO: 2135048 - RNA, 19 nt, Human
ccaggaaugccuccucccu

SEQ ID NO: 2135049 - RNA, 20 nt, Human
ccaggaauguuaaagucagu

SEQ ID NO: 2135050 - RNA, 13 nt, Human
ccaggcauggugg

SEQ ID NO: 2135051 - RNA, 14 nt, Human
ccaggaggacugcc

SEQ ID NO: 2135052 - RNA, 15 nt, Human
ccaggagccccgagg

SEQ ID NO: 2135053 - RNA, 13 nt, Human
ccagggccacgug

SEQ ID NO: 2135054 - RNA, 17 nt, Human
ccagggccacgugccag

SEQ ID NO: 2135055 - RNA, 19 nt, Human
ccagggccacgugccaggc

SEQ ID NO: 2135056 - RNA, 21 nt, Human
ccagggccacgugccaggccc

SEQ ID NO: 2135057 - RNA, 22 nt, Human
ccagggccacgugccaggcccg

SEQ ID NO: 2135058 - RNA, 17 nt, Human
ccagggccacucugccu

SEQ ID NO: 2135059 - RNA, 19 nt, Human
ccagggccacucugccucu

SEQ ID NO: 2135060 - RNA, 20 nt, Human
ccagggccacucugccucug

SEQ ID NO: 2135061 - RNA, 17 nt, Human
ccagggaagcuggccga

SEQ ID NO: 2135062 - RNA, 18 nt, Human
ccagggaagcuggccgag

SEQ ID NO: 2135063 - RNA, 17 nt, Human
ccagggaagcugucccu

SEQ ID NO: 2135064 - RNA, 18 nt, Human
ccaggcuugccugcaggc

SEQ ID NO: 2135065 - RNA, 20 nt, Human
ccaggccccgcucauucuuu

SEQ ID NO: 2135066 - RNA, 13 nt, Human
ccaggccccugcc

SEQ ID NO: 2135067 - RNA, 16 nt, Human
ccaggccccaggaagc

SEQ ID NO: 2135068 - RNA, 17 nt, Human
ccaggccccaggaagcc

SEQ ID NO: 2135069 - RNA, 19 nt, Human
ccaggcccccaagccugca

SEQ ID NO: 2135070 - RNA, 20 nt, Human
ccaggcccccaagccugcag

SEQ ID NO: 2135071 - RNA, 19 nt, Human
ccaggcuggucucaaacuc

SEQ ID NO: 2135072 - RNA, 20 nt, Human
ccaggcuguaucccaugagc

SEQ ID NO: 2135073 - RNA, 17 nt, Human
ccaggcuugccugcagg

SEQ ID NO: 2135074 - RNA, 11 nt, Human
ccagggcucag

SEQ ID NO: 2135075 - RNA, 16 nt, Human
ccagggcucagccugg

SEQ ID NO: 2135076 - RNA, 20 nt, Human
ccagggcucagccugguggg

SEQ ID NO: 2135077 - RNA, 12 nt, Human
ccagggcucagc

SEQ ID NO: 2135078 - RNA, 13 nt, Human
ccagggcucagcc

SEQ ID NO: 2135079 - RNA, 14 nt, Human
ccagggcucagccu

SEQ ID NO: 2135080 - RNA, 15 nt, Human
ccagggcucagccug

SEQ ID NO: 2135081 - RNA, 14 nt, Human
ccaggucgggcuca

SEQ ID NO: 2135082 - RNA, 17 nt, Human
ccaggucgggcucagcu

SEQ ID NO: 2135083 - RNA, 18 nt, Human
ccaggucgggcucagcuc

SEQ ID NO: 2135084 - RNA, 20 nt, Human
ccaggucgggcucagcucug

SEQ ID NO: 2135085 - RNA, 21 nt, Human
ccaggucgggcucagcucugg

SEQ ID NO: 2135086 - RNA, 23 nt, Human
ccaggucgggcucagcucuggcu

SEQ ID NO: 2135087 - RNA, 22 nt, Human
ccaggugugguugcucacagcu

SEQ ID NO: 2135088 - RNA, 14 nt, Human
ccagguucagcuug

SEQ ID NO: 2135089 - RNA, 13 nt, Human
ccagguguuuaua

SEQ ID NO: 2135090 - RNA, 14 nt, Human
ccagugaaaacuag

SEQ ID NO: 2135091 - RNA, 15 nt, Human
ccagugaaaacuaga

SEQ ID NO: 2135092 - RNA, 12 nt, Human
ccagucuugugu

SEQ ID NO: 2135093 - RNA, 13 nt, Human
ccaggucucccgg

SEQ ID NO: 2135094 - RNA, 16 nt, Human
ccaguaccuuugucac

SEQ ID NO: 2135095 - RNA, 17 nt, Human
ccaguaccuuugucaca

SEQ ID NO: 2135096 - RNA, 16 nt, Human
ccaguacgugcuaaca

SEQ ID NO: 2135097 - RNA, 14 nt, Human
ccaguacuggagcu

SEQ ID NO: 2135098 - RNA, 17 nt, Human
ccaguauacaagauaag

SEQ ID NO: 2135099 - RNA, 14 nt, Human
ccaucuggcagggu

SEQ ID NO: 2135100 - RNA, 16 nt, Human
ccaucuggcagggugg

SEQ ID NO: 2135101 - RNA, 14 nt, Human
ccaugaacuuuguc

SEQ ID NO: 2135102 - RNA, 15 nt, Human
ccaugaacuuugucc

SEQ ID NO: 2135103 - RNA, 13 nt, Human
ccaugaagacagg

SEQ ID NO: 2135104 - RNA, 16 nt, Human
ccaugaagacaggaca

SEQ ID NO: 2135105 - RNA, 17 nt, Human
ccaugaagacaggacag

SEQ ID NO: 2135106 - RNA, 19 nt, Human
ccaugaagacaggacagug

SEQ ID NO: 2135107 - RNA, 15 nt, Human
ccaugaagccacagc

SEQ ID NO: 2135108 - RNA, 16 nt, Human
ccaugaagccacagcc

SEQ ID NO: 2135109 - RNA, 18 nt, Human
ccaugaagccacagccca

SEQ ID NO: 2135110 - RNA, 19 nt, Human
ccaugaagccacagcccag

SEQ ID NO: 2135111 - RNA, 19 nt, Human
ccaugauuaaccacuucag

SEQ ID NO: 2135112 - RNA, 21 nt, Human
ccaugauuaaccacuucagcu

SEQ ID NO: 2135113 - RNA, 21 nt, Human
ccaugcacccucauacacaga

SEQ ID NO: 2135114 - RNA, 13 nt, Human
ccaugcaaggugc

SEQ ID NO: 2135115 - RNA, 20 nt, Human
ccaugcaaggugcccacaug

SEQ ID NO: 2135116 - RNA, 14 nt, Human
ccaugauucgccca

SEQ ID NO: 2135117 - RNA, 18 nt, Human
ccaugcccagcucagagg

SEQ ID NO: 2135118 - RNA, 13 nt, Human
ccaugcccaccug

SEQ ID NO: 2135119 - RNA, 15 nt, Human
ccaugcccaccugcc

SEQ ID NO: 2135120 - RNA, 16 nt, Human
ccaugcccaccugccc

SEQ ID NO: 2135121 - RNA, 17 nt, Human
ccaugcccaccugccca

SEQ ID NO: 2135122 - RNA, 18 nt, Human
ccaugcccaccugcccau

SEQ ID NO: 2135123 - RNA, 21 nt, Human
ccaugcccaccugcccaucac

SEQ ID NO: 2135124 - RNA, 20 nt, Human
ccaugccaaagcuagggugg

SEQ ID NO: 2135125 - RNA, 19 nt, Human
ccauccacucuacccuccc

SEQ ID NO: 2135126 - RNA, 22 nt, Human
ccauccacucuacccucccacc

SEQ ID NO: 2135127 - RNA, 15 nt, Human
ccauccuccccuucc

SEQ ID NO: 2135128 - RNA, 21 nt, Human
ccauccagggaugccaucugu

SEQ ID NO: 2135129 - RNA, 17 nt, Human
ccauccuccccuucccu

SEQ ID NO: 2135130 - RNA, 18 nt, Human
ccauccuccccuucccug

SEQ ID NO: 2135131 - RNA, 21 nt, Human
ccauccuccccuucccugcaa

SEQ ID NO: 2135132 - RNA, 14 nt, Human
ccaucauaauucua

SEQ ID NO: 2135133 - RNA, 16 nt, Human
ccauccacucuacccu

SEQ ID NO: 2135134 - RNA, 19 nt, Human
ccaucagcuguaagaagag

SEQ ID NO: 2135135 - RNA, 24 nt, Human
ccaucagcuguaagaagagacugg

SEQ ID NO: 2135136 - RNA, 21 nt, Human
ccaucagcuuaggggcugcug

SEQ ID NO: 2135137 - RNA, 22 nt, Human
ccaucagaggacaccuguacug

SEQ ID NO: 2135138 - RNA, 12 nt, Human
ccaucagaggcc

SEQ ID NO: 2135139 - RNA, 18 nt, Human
ccaucuccuuucagggaa

SEQ ID NO: 2135140 - RNA, 14 nt, Human
ccaucucgccaccc

SEQ ID NO: 2135141 - RNA, 20 nt, Human
ccaucucgccaccccuccuu

SEQ ID NO: 2135142 - RNA, 22 nt, Human
ccaucucgccaccccuccuucc

SEQ ID NO: 2135143 - RNA, 23 nt, Human
ccaucucgccaccccuccuuccu

SEQ ID NO: 2135144 - RNA, 16 nt, Human
ccaucuccuugucuuu

SEQ ID NO: 2135145 - RNA, 16 nt, Human
ccaucuccuuucaggg

SEQ ID NO: 2135146 - RNA, 17 nt, Human
ccaucuccuuucaggga

SEQ ID NO: 2135147 - RNA, 14 nt, Human
ccaucucucccucc

SEQ ID NO: 2135148 - RNA, 24 nt, Human
ccaucucccucgaacccacacugc

SEQ ID NO: 2135149 - RNA, 13 nt, Human
ccaucaccagaca

SEQ ID NO: 2135150 - RNA, 20 nt, Human
ccaucacaggguugggccca

SEQ ID NO: 2135151 - RNA, 16 nt, Human
ccaucacaaacuuaaa

SEQ ID NO: 2135152 - RNA, 13 nt, Human
ccaucacaggguu

SEQ ID NO: 2135153 - RNA, 18 nt, Human
ccagucuuccaccuggaa

SEQ ID NO: 2135154 - RNA, 18 nt, Human
ccaucaaguugcacacuc

SEQ ID NO: 2135155 - RNA, 16 nt, Human
ccauaucuaaccagug

SEQ ID NO: 2135156 - RNA, 16 nt, Human
ccauacucugucuccc

SEQ ID NO: 2135157 - RNA, 17 nt, Human
ccauacucugucucccu

SEQ ID NO: 2135158 - RNA, 18 nt, Human
ccauacucugucucccua

SEQ ID NO: 2135159 - RNA, 20 nt, Human
cccaaacaaauaugcaaaag

SEQ ID NO: 2135160 - RNA, 22 nt, Human
cccaaaagucaaaaggugccug

SEQ ID NO: 2135161 - RNA, 23 nt, Human
cccaaaagucaaaaggugccugu

SEQ ID NO: 2135162 - RNA, 17 nt, Human
cccaaacaaauaugcaa

SEQ ID NO: 2135163 - RNA, 20 nt, Human
ccauuuugggguacccacug

SEQ ID NO: 2135164 - RNA, 22 nt, Human
ccauuuugggguacccacugcu

SEQ ID NO: 2135165 - RNA, 12 nt, Human
cccaaagagcug

SEQ ID NO: 2135166 - RNA, 15 nt, Human
cccaaagagcugccu

SEQ ID NO: 2135167 - RNA, 16 nt, Human
cccaaagagcugccua

SEQ ID NO: 2135168 - RNA, 12 nt, Human
cccaaagaagga

SEQ ID NO: 2135169 - RNA, 23 nt, Human
cccaaacuguugauuauuagcca

SEQ ID NO: 2135170 - RNA, 15 nt, Human
cccaaaaugaagauu

SEQ ID NO: 2135171 - RNA, 12 nt, Human
cccaaaccugga

SEQ ID NO: 2135172 - RNA, 13 nt, Human
cccaaaccuggag

SEQ ID NO: 2135173 - RNA, 15 nt, Human
cccaaaccuggagau

SEQ ID NO: 2135174 - RNA, 18 nt, Human
ccauucugccugcccagg

SEQ ID NO: 2135175 - RNA, 17 nt, Human
ccauucugccugcccag

SEQ ID NO: 2135176 - RNA, 16 nt, Human
ccauucugccugccca

SEQ ID NO: 2135177 - RNA, 20 nt, Human
ccauucugccugcccaggcc

SEQ ID NO: 2135178 - RNA, 19 nt, Human
ccauucugccugcccaggc

SEQ ID NO: 2135179 - RNA, 21 nt, Human
ccauucugccugcccaggccc

SEQ ID NO: 2135180 - RNA, 22 nt, Human
ccauggacucuacacugugaac

SEQ ID NO: 2135181 - RNA, 15 nt, Human
ccauggacucuacac

SEQ ID NO: 2135182 - RNA, 21 nt, Human
cccacaaaggagagcuagcag

SEQ ID NO: 2135183 - RNA, 21 nt, Human
cccaaauuaucaagcuaauaa

SEQ ID NO: 2135184 - RNA, 19 nt, Human
cccaaauuaucaagcuaau

SEQ ID NO: 2135185 - RNA, 20 nt, Human
cccaaauuaucaagcuaaua

SEQ ID NO: 2135186 - RNA, 18 nt, Human
cccaacacaaggugggca

SEQ ID NO: 2135187 - RNA, 12 nt, Human
cccaaggggcag

SEQ ID NO: 2135188 - RNA, 17 nt, Human
cccaauauuauaauuuu

SEQ ID NO: 2135189 - RNA, 15 nt, Human
cccaauauuauaauu

SEQ ID NO: 2135190 - RNA, 12 nt, Human
cccaauauuaua

SEQ ID NO: 2135191 - RNA, 19 nt, Human
cccaauaagauacaucaca

SEQ ID NO: 2135192 - RNA, 22 nt, Human
cccaauauccucgcucccggga

SEQ ID NO: 2135193 - RNA, 11 nt, Human
cccaauauuau

SEQ ID NO: 2135194 - RNA, 14 nt, Human
cccaauuaggaagu

SEQ ID NO: 2135195 - RNA, 15 nt, Human
cccaauuaggaagug

SEQ ID NO: 2135196 - RNA, 21 nt, Human
cccaauucuuacaaacaugug

SEQ ID NO: 2135197 - RNA, 19 nt, Human
cccaauuaggaaguguaac

SEQ ID NO: 2135198 - RNA, 14 nt, Human
cccacacaccccaa

SEQ ID NO: 2135199 - RNA, 12 nt, Human
cccacacccugg

SEQ ID NO: 2135200 - RNA, 18 nt, Human
cccagcaagugagagcug

SEQ ID NO: 2135201 - RNA, 16 nt, Human
cccagcaagugagagc

SEQ ID NO: 2135202 - RNA, 22 nt, Human
cccagauugcaacaggcugggc

SEQ ID NO: 2135203 - RNA, 21 nt, Human
cccagauugcaacaggcuggg

SEQ ID NO: 2135204 - RNA, 14 nt, Human
cccagaucccagaa

SEQ ID NO: 2135205 - RNA, 16 nt, Human
cccagaucccagaagg

SEQ ID NO: 2135206 - RNA, 18 nt, Human
cccagaucuggucccuug

SEQ ID NO: 2135207 - RNA, 19 nt, Human
cccagaucuggucccuugc

SEQ ID NO: 2135208 - RNA, 20 nt, Human
cccagaucuggucccuugca

SEQ ID NO: 2135209 - RNA, 20 nt, Human
cccagauugcaacaggcugg

SEQ ID NO: 2135210 - RNA, 16 nt, Human
cccagagugugggaag

SEQ ID NO: 2135211 - RNA, 23 nt, Human
cccagagugugggaagggagagc

SEQ ID NO: 2135212 - RNA, 14 nt, Human
cccacacuaaccug

SEQ ID NO: 2135213 - RNA, 13 nt, Human
cccacaccucagu

SEQ ID NO: 2135214 - RNA, 22 nt, Human
cccacaccucaguucccuuggc

SEQ ID NO: 2135215 - RNA, 12 nt, Human
cccacaccuggc

SEQ ID NO: 2135216 - RNA, 14 nt, Human
cccacaccuggccc

SEQ ID NO: 2135217 - RNA, 15 nt, Human
cccacaccuggcccu

SEQ ID NO: 2135218 - RNA, 16 nt, Human
cccacaccuggcccug

SEQ ID NO: 2135219 - RNA, 19 nt, Human
cccacaccuggcccugggg

SEQ ID NO: 2135220 - RNA, 22 nt, Human
cccacacggaggcaucugcacc

SEQ ID NO: 2135221 - RNA, 23 nt, Human
cccacacggaggcaucugcaccc

SEQ ID NO: 2135222 - RNA, 15 nt, Human
cccagcgagcccugg

SEQ ID NO: 2135223 - RNA, 18 nt, Human
cccagcgagcccuggugg

SEQ ID NO: 2135224 - RNA, 17 nt, Human
cccagcgagcccuggug

SEQ ID NO: 2135225 - RNA, 23 nt, Human
cccagcgagcccugguggcagug

SEQ ID NO: 2135226 - RNA, 19 nt, Human
cccagcgagcccugguggc

SEQ ID NO: 2135227 - RNA, 11 nt, Human
cccagcuccag

SEQ ID NO: 2135228 - RNA, 13 nt, Human
cccagcuccaggg

SEQ ID NO: 2135229 - RNA, 15 nt, Human
cccagcuccagggcc

SEQ ID NO: 2135230 - RNA, 16 nt, Human
cccagcuccagggcca

SEQ ID NO: 2135231 - RNA, 17 nt, Human
cccagcuccagggccag

SEQ ID NO: 2135232 - RNA, 18 nt, Human
cccagcuccagggccaga

SEQ ID NO: 2135233 - RNA, 21 nt, Human
cccagcuacucagaagccuga

SEQ ID NO: 2135234 - RNA, 22 nt, Human
cccagcuacucagaagccugag

SEQ ID NO: 2135235 - RNA, 23 nt, Human
cccagcuacucagaagccugagg

SEQ ID NO: 2135236 - RNA, 21 nt, Human
cccagcuacucaagaggcuga

SEQ ID NO: 2135237 - RNA, 18 nt, Human
cccagcucagucuucccu

SEQ ID NO: 2135238 - RNA, 15 nt, Human
cccagcucccuagga

SEQ ID NO: 2135239 - RNA, 14 nt, Human
cccagcucuagaca

SEQ ID NO: 2135240 - RNA, 23 nt, Human
cccagcucuagacaacccugcaa

SEQ ID NO: 2135241 - RNA, 15 nt, Human
cccagcggcuggugc

SEQ ID NO: 2135242 - RNA, 17 nt, Human
cccagcggcuggugcag

SEQ ID NO: 2135243 - RNA, 22 nt, Human
cccagcggcuggugcagggccu

SEQ ID NO: 2135244 - RNA, 17 nt, Human
cccagcuacucagaagc

SEQ ID NO: 2135245 - RNA, 23 nt, Human
cccagauugcaacaggcugggcu

SEQ ID NO: 2135246 - RNA, 23 nt, Human
cccagcaagugagagcugggugu

SEQ ID NO: 2135247 - RNA, 22 nt, Human
cccagcaagugagagcugggug

SEQ ID NO: 2135248 - RNA, 21 nt, Human
cccagcaagugagagcugggu

SEQ ID NO: 2135249 - RNA, 20 nt, Human
cccagcaagugagagcuggg

SEQ ID NO: 2135250 - RNA, 19 nt, Human
cccagcaagugagagcugg

SEQ ID NO: 2135251 - RNA, 12 nt, Human
cccagccugcua

SEQ ID NO: 2135252 - RNA, 16 nt, Human
cccagcccuguggaag

SEQ ID NO: 2135253 - RNA, 15 nt, Human
cccagcccuguggaa

SEQ ID NO: 2135254 - RNA, 21 nt, Human
cccagcccuuugggaggcuga

SEQ ID NO: 2135255 - RNA, 22 nt, Human
cccagcccuuugggaggcugag

SEQ ID NO: 2135256 - RNA, 16 nt, Human
cccagccccugccccu

SEQ ID NO: 2135257 - RNA, 18 nt, Human
cccagccccugccccuca

SEQ ID NO: 2135258 - RNA, 20 nt, Human
cccagccccugccccucaug

SEQ ID NO: 2135259 - RNA, 23 nt, Human
cccagccccugccccucaugcca

SEQ ID NO: 2135260 - RNA, 16 nt, Human
cccagguggcugaccc

SEQ ID NO: 2135261 - RNA, 18 nt, Human
cccagguggcugacccag

SEQ ID NO: 2135262 - RNA, 19 nt, Human
cccagguggcugacccagu

SEQ ID NO: 2135263 - RNA, 22 nt, Human
cccagguggcugacccaguccc

SEQ ID NO: 2135264 - RNA, 23 nt, Human
cccagguggcugacccagucccu

SEQ ID NO: 2135265 - RNA, 23 nt, Human
cccaguccaaauguccuccagaa

SEQ ID NO: 2135266 - RNA, 19 nt, Human
cccaguccaaauguccucc

SEQ ID NO: 2135267 - RNA, 23 nt, Human
cccaguauucuagguagugcccu

SEQ ID NO: 2135268 - RNA, 20 nt, Human
cccagucuggaaugcagugg

SEQ ID NO: 2135269 - RNA, 15 nt, Human
cccagugaaaacuag

SEQ ID NO: 2135270 - RNA, 19 nt, Human
cccagugaaaacuagagcu

SEQ ID NO: 2135271 - RNA, 12 nt, Human
cccagugacacu

SEQ ID NO: 2135272 - RNA, 13 nt, Human
cccagugacacuu

SEQ ID NO: 2135273 - RNA, 18 nt, Human
cccagugacacuucagag

SEQ ID NO: 2135274 - RNA, 13 nt, Human
cccagugcccaca

SEQ ID NO: 2135275 - RNA, 19 nt, Human
cccagugacacuucagaga

SEQ ID NO: 2135276 - RNA, 22 nt, Human
cccagugacacuucagagagcu

SEQ ID NO: 2135277 - RNA, 23 nt, Human
cccagggucuucccuaccucagg

SEQ ID NO: 2135278 - RNA, 16 nt, Human
cccagggucuucccua

SEQ ID NO: 2135279 - RNA, 18 nt, Human
cccagggucuucccuacc

SEQ ID NO: 2135280 - RNA, 15 nt, Human
cccagggucuucccu

SEQ ID NO: 2135281 - RNA, 20 nt, Human
cccaggggucccagccaccc

SEQ ID NO: 2135282 - RNA, 15 nt, Human
cccaggggucccagc

SEQ ID NO: 2135283 - RNA, 16 nt, Human
cccaggggucccagcc

SEQ ID NO: 2135284 - RNA, 18 nt, Human
cccaggggucccagccac

SEQ ID NO: 2135285 - RNA, 19 nt, Human
cccaggggucccagccacc

SEQ ID NO: 2135286 - RNA, 15 nt, Human
cccaggggagagggu

SEQ ID NO: 2135287 - RNA, 21 nt, Human
cccaggggagagggucuggag

SEQ ID NO: 2135288 - RNA, 22 nt, Human
cccaggggagagggucuggaga

SEQ ID NO: 2135289 - RNA, 23 nt, Human
cccaggggagagggucuggagaa

SEQ ID NO: 2135290 - RNA, 24 nt, Human
cccaggggagagggucuggagaag

SEQ ID NO: 2135291 - RNA, 17 nt, Human
cccaggggaccacaccu

SEQ ID NO: 2135292 - RNA, 13 nt, Human
cccaggggagagg

SEQ ID NO: 2135293 - RNA, 18 nt, Human
cccaggcgccccuucccc

SEQ ID NO: 2135294 - RNA, 16 nt, Human
cccaggccugccuguu

SEQ ID NO: 2135295 - RNA, 15 nt, Human
cccaggccugccugu

SEQ ID NO: 2135296 - RNA, 13 nt, Human
cccaggccuccag

SEQ ID NO: 2135297 - RNA, 16 nt, Human
cccaggccuccagcuc

SEQ ID NO: 2135298 - RNA, 17 nt, Human
cccaggccuccagcuca

SEQ ID NO: 2135299 - RNA, 18 nt, Human
cccaggccuccagcucag

SEQ ID NO: 2135300 - RNA, 20 nt, Human
cccaggccuccagcucagca

SEQ ID NO: 2135301 - RNA, 15 nt, Human
cccaggccguggcug

SEQ ID NO: 2135302 - RNA, 18 nt, Human
cccaggagccccgaggcc

SEQ ID NO: 2135303 - RNA, 12 nt, Human
cccagcucuccc

SEQ ID NO: 2135304 - RNA, 13 nt, Human
cccagcucucccu

SEQ ID NO: 2135305 - RNA, 14 nt, Human
cccagcucucccuc

SEQ ID NO: 2135306 - RNA, 15 nt, Human
cccagcucucccucu

SEQ ID NO: 2135307 - RNA, 16 nt, Human
cccagcucucccucug

SEQ ID NO: 2135308 - RNA, 17 nt, Human
cccagcucucccucugg

SEQ ID NO: 2135309 - RNA, 18 nt, Human
cccagcucucccucuggc

SEQ ID NO: 2135310 - RNA, 19 nt, Human
cccagcucucccucuggcc

SEQ ID NO: 2135311 - RNA, 21 nt, Human
cccagcucucccucuggcccu

SEQ ID NO: 2135312 - RNA, 21 nt, Human
cccaggagccccgaggccuuc

SEQ ID NO: 2135313 - RNA, 13 nt, Human
cccaggaggcuga

SEQ ID NO: 2135314 - RNA, 14 nt, Human
cccaggagggaggg

SEQ ID NO: 2135315 - RNA, 24 nt, Human
cccaggaguucgaggcugcaguca

SEQ ID NO: 2135316 - RNA, 18 nt, Human
cccaggagggagggggcu

SEQ ID NO: 2135317 - RNA, 23 nt, Human
cccaggagguggagguugcagug

SEQ ID NO: 2135318 - RNA, 14 nt, Human
cccaggcaggccac

SEQ ID NO: 2135319 - RNA, 13 nt, Human
cccaggcaggucu

SEQ ID NO: 2135320 - RNA, 11 nt, Human
cccaggcaggu

SEQ ID NO: 2135321 - RNA, 22 nt, Human
cccaggaguuugaggcugcagc

SEQ ID NO: 2135322 - RNA, 23 nt, Human
cccaggaguuugaggcugcagcg

SEQ ID NO: 2135323 - RNA, 22 nt, Human
cccaggccccugccacccuggg

SEQ ID NO: 2135324 - RNA, 21 nt, Human
cccaggccccugccacccugg

SEQ ID NO: 2135325 - RNA, 18 nt, Human
cccaggccccugccaccc

SEQ ID NO: 2135326 - RNA, 16 nt, Human
cccaggccccugccac

SEQ ID NO: 2135327 - RNA, 11 nt, Human
cccaggccccu

SEQ ID NO: 2135328 - RNA, 13 nt, Human
cccaggccccagg

SEQ ID NO: 2135329 - RNA, 17 nt, Human
cccaggccccaggaagc

SEQ ID NO: 2135330 - RNA, 18 nt, Human
cccaggccccaggaagcc

SEQ ID NO: 2135331 - RNA, 18 nt, Human
cccaggccaggcuccuuc

SEQ ID NO: 2135332 - RNA, 19 nt, Human
cccaggccaggcuccuucc

SEQ ID NO: 2135333 - RNA, 21 nt, Human
cccaggccaggcuccuuccug

SEQ ID NO: 2135334 - RNA, 23 nt, Human
cccaggccaggcuccuuccuguc

SEQ ID NO: 2135335 - RNA, 17 nt, Human
cccaggcaggucuugaa

SEQ ID NO: 2135336 - RNA, 13 nt, Human
cccaggcaggcug

SEQ ID NO: 2135337 - RNA, 15 nt, Human
ccccaaggagggaga

SEQ ID NO: 2135338 - RNA, 23 nt, Human
ccccaagacuugguguccuuucc

SEQ ID NO: 2135339 - RNA, 17 nt, Human
ccccacccccuccccag

SEQ ID NO: 2135340 - RNA, 23 nt, Human
ccccacccccuccccaggggaga

SEQ ID NO: 2135341 - RNA, 12 nt, Human
ccccacccccuu

SEQ ID NO: 2135342 - RNA, 17 nt, Human
ccccacccccuucagug

SEQ ID NO: 2135343 - RNA, 21 nt, Human
ccccacccccuucagugccca

SEQ ID NO: 2135344 - RNA, 13 nt, Human
cccauucugccug

SEQ ID NO: 2135345 - RNA, 17 nt, Human
cccauucucucuccugu

SEQ ID NO: 2135346 - RNA, 18 nt, Human
cccauucucucuccuguc

SEQ ID NO: 2135347 - RNA, 20 nt, Human
cccauucucucuccugucca

SEQ ID NO: 2135348 - RNA, 14 nt, Human
ccccaagaaggcug

SEQ ID NO: 2135349 - RNA, 16 nt, Human
ccccaagaaggcuggg

SEQ ID NO: 2135350 - RNA, 18 nt, Human
ccccaagaaggcuggggc

SEQ ID NO: 2135351 - RNA, 23 nt, Human
ccccaagaccucuauauuugcuc

SEQ ID NO: 2135352 - RNA, 19 nt, Human
cccauucucucuccugucc

SEQ ID NO: 2135353 - RNA, 21 nt, Human
cccauucugccuccauucuga

SEQ ID NO: 2135354 - RNA, 20 nt, Human
cccagugcccacaggaucag

SEQ ID NO: 2135355 - RNA, 15 nt, Human
cccagugcccacagg

SEQ ID NO: 2135356 - RNA, 18 nt, Human
cccagugccgagaaggaa

SEQ ID NO: 2135357 - RNA, 17 nt, Human
cccagugccgagaagga

SEQ ID NO: 2135358 - RNA, 22 nt, Human
cccagugccaagcacagugccu

SEQ ID NO: 2135359 - RNA, 14 nt, Human
cccagugcacccac

SEQ ID NO: 2135360 - RNA, 15 nt, Human
cccagugcacccacu

SEQ ID NO: 2135361 - RNA, 19 nt, Human
cccaguggccucaacccuc

SEQ ID NO: 2135362 - RNA, 21 nt, Human
cccaguggccucaacccuccc

SEQ ID NO: 2135363 - RNA, 13 nt, Human
cccaguggccuca

SEQ ID NO: 2135364 - RNA, 18 nt, Human
cccaguggccucaacccu

SEQ ID NO: 2135365 - RNA, 20 nt, Human
cccauggcaugggggccuca

SEQ ID NO: 2135366 - RNA, 14 nt, Human
cggccucccaaagu

SEQ ID NO: 2135367 - RNA, 19 nt, Human
cggccugaugcucccuccc

SEQ ID NO: 2135368 - RNA, 23 nt, Human
cggccugaugcucccuccccugc

SEQ ID NO: 2135369 - RNA, 15 nt, Human
cggccuuuggcuuca

SEQ ID NO: 2135370 - RNA, 19 nt, Human
cggccuucaacugaaaaga

SEQ ID NO: 2135371 - RNA, 17 nt, Human
cggcccccaugcaaggu

SEQ ID NO: 2135372 - RNA, 21 nt, Human
cggcaguucugggugcucccu

SEQ ID NO: 2135373 - RNA, 16 nt, Human
cggcaguucugggugc

SEQ ID NO: 2135374 - RNA, 20 nt, Human
cggcaguucugggugcuccc

SEQ ID NO: 2135375 - RNA, 17 nt, Human
cgggaggucgaggcagg

SEQ ID NO: 2135376 - RNA, 16 nt, Human
cgggaggucgaggcag

SEQ ID NO: 2135377 - RNA, 16 nt, Human
cggccuugcugggggc

SEQ ID NO: 2135378 - RNA, 20 nt, Human
cgggaggauguucugggaca

SEQ ID NO: 2135379 - RNA, 22 nt, Human
cgggaggcggagcuugcaguga

SEQ ID NO: 2135380 - RNA, 18 nt, Human
cgggaggaauuucugagu

SEQ ID NO: 2135381 - RNA, 15 nt, Human
cggcuggugcagggc

SEQ ID NO: 2135382 - RNA, 12 nt, Human
cggacgggcugu

SEQ ID NO: 2135383 - RNA, 14 nt, Human
cggauccugggugg

SEQ ID NO: 2135384 - RNA, 16 nt, Human
cggcaauuuccggcca

SEQ ID NO: 2135385 - RNA, 21 nt, Human
cgcuccugucugccagccagc

SEQ ID NO: 2135386 - RNA, 17 nt, Human
cgcuccugucugccagc

SEQ ID NO: 2135387 - RNA, 20 nt, Human
cgcuccugucugccagccag

SEQ ID NO: 2135388 - RNA, 13 nt, Human
cgcuccugugucu

SEQ ID NO: 2135389 - RNA, 16 nt, Human
cgcuccugucugccag

SEQ ID NO: 2135390 - RNA, 15 nt, Human
cggaacaagccuaaa

SEQ ID NO: 2135391 - RNA, 12 nt, Human
cggaaagcagcu

SEQ ID NO: 2135392 - RNA, 13 nt, Human
cggaaagcagcuc

SEQ ID NO: 2135393 - RNA, 17 nt, Human
cgcucuccuuucuuucu

SEQ ID NO: 2135394 - RNA, 18 nt, Human
cggacagccacggccagg

SEQ ID NO: 2135395 - RNA, 16 nt, Human
cggacagccacggcca

SEQ ID NO: 2135396 - RNA, 15 nt, Human
cggacagccacggcc

SEQ ID NO: 2135397 - RNA, 13 nt, Human
cggacaaguuuua

SEQ ID NO: 2135398 - RNA, 20 nt, Human
cggaaugaaccacaucuugc

SEQ ID NO: 2135399 - RNA, 20 nt, Human
cggaaagcagcucaaaggca

SEQ ID NO: 2135400 - RNA, 16 nt, Human
cggaacguuggacuuu

SEQ ID NO: 2135401 - RNA, 21 nt, Human
cggaauccuguccucagcuuc

SEQ ID NO: 2135402 - RNA, 20 nt, Human
cgcgugcacacaccagagcc

SEQ ID NO: 2135403 - RNA, 19 nt, Human
cgcgugcacguggagagcu

SEQ ID NO: 2135404 - RNA, 19 nt, Human
cgcgugcacacaccagagc

SEQ ID NO: 2135405 - RNA, 16 nt, Human
cgcgugcacacaccag

SEQ ID NO: 2135406 - RNA, 18 nt, Human
cgcuagaggaagcagcca

SEQ ID NO: 2135407 - RNA, 13 nt, Human
cgcccucuucccc

SEQ ID NO: 2135408 - RNA, 19 nt, Human
cgcccucuuccccucuaau

SEQ ID NO: 2135409 - RNA, 15 nt, Human
cgcccuaggccuggc

SEQ ID NO: 2135410 - RNA, 16 nt, Human
cgcccuaggccuggca

SEQ ID NO: 2135411 - RNA, 23 nt, Human
cgcccuaggccuggcauggcacc

SEQ ID NO: 2135412 - RNA, 18 nt, Human
cgcccucauuacggcucc

SEQ ID NO: 2135413 - RNA, 19 nt, Human
cgcccucauuacggcuccu

SEQ ID NO: 2135414 - RNA, 20 nt, Human
cgcccucauuacggcuccuc

SEQ ID NO: 2135415 - RNA, 22 nt, Human
cgcccucauuacggcuccucuc

SEQ ID NO: 2135416 - RNA, 23 nt, Human
cgcccccggguuuggcgggccaa

SEQ ID NO: 2135417 - RNA, 12 nt, Human
cgcccccagugu

SEQ ID NO: 2135418 - RNA, 13 nt, Human
cgcccccagugug

SEQ ID NO: 2135419 - RNA, 15 nt, Human
cgcccaggagacauc

SEQ ID NO: 2135420 - RNA, 14 nt, Human
cgccccagccucug

SEQ ID NO: 2135421 - RNA, 15 nt, Human
cgcccagcugcaccu

SEQ ID NO: 2135422 - RNA, 11 nt, Human
cgcccaggaga

SEQ ID NO: 2135423 - RNA, 23 nt, Human
cgcccagcugcaccugccagccu

SEQ ID NO: 2135424 - RNA, 18 nt, Human
cgcccagcugcaccugcc

SEQ ID NO: 2135425 - RNA, 20 nt, Human
cgcccagcugcaccugccag

SEQ ID NO: 2135426 - RNA, 12 nt, Human
cgaggacaggga

SEQ ID NO: 2135427 - RNA, 14 nt, Human
cgaggaaacucaga

SEQ ID NO: 2135428 - RNA, 22 nt, Human
cgagcuggugcauuacagagag

SEQ ID NO: 2135429 - RNA, 14 nt, Human
cgaggaaccagagc

SEQ ID NO: 2135430 - RNA, 15 nt, Human
cgaggaaccagagcc

SEQ ID NO: 2135431 - RNA, 16 nt, Human
cgaggaaccagagcca

SEQ ID NO: 2135432 - RNA, 13 nt, Human
cgaggacagggag

SEQ ID NO: 2135433 - RNA, 19 nt, Human
cgaggaaccagagccaugg

SEQ ID NO: 2135434 - RNA, 11 nt, Human
cgaggaagccc

SEQ ID NO: 2135435 - RNA, 19 nt, Human
cgaggccuucucugaagga

SEQ ID NO: 2135436 - RNA, 18 nt, Human
cgaggccuucucugaagg

SEQ ID NO: 2135437 - RNA, 20 nt, Human
cgauccaccugucucagccu

SEQ ID NO: 2135438 - RNA, 15 nt, Human
cgaggcuggagcugg

SEQ ID NO: 2135439 - RNA, 16 nt, Human
cgaggcuggagcuggc

SEQ ID NO: 2135440 - RNA, 17 nt, Human
cgagggauguggagcac

SEQ ID NO: 2135441 - RNA, 22 nt, Human
cgaggcugcccacuauggucau

SEQ ID NO: 2135442 - RNA, 13 nt, Human
cgaggcugggcca

SEQ ID NO: 2135443 - RNA, 14 nt, Human
cgaggcugggccaa

SEQ ID NO: 2135444 - RNA, 15 nt, Human
cgaggcugggccaag

SEQ ID NO: 2135445 - RNA, 16 nt, Human
cgaggcugggccaagc

SEQ ID NO: 2135446 - RNA, 17 nt, Human
cgaggcugggccaagcc

SEQ ID NO: 2135447 - RNA, 18 nt, Human
cgaggcugggccaagcca

SEQ ID NO: 2135448 - RNA, 12 nt, Human
cgagcugggggc

SEQ ID NO: 2135449 - RNA, 13 nt, Human
cgagcugggggcc

SEQ ID NO: 2135450 - RNA, 15 nt, Human
cgagcugggggccau

SEQ ID NO: 2135451 - RNA, 16 nt, Human
cgagcugggggccaug

SEQ ID NO: 2135452 - RNA, 20 nt, Human
cgagcugggggccaugagcu

SEQ ID NO: 2135453 - RNA, 23 nt, Human
cgagcugggggccaugagcucca

SEQ ID NO: 2135454 - RNA, 13 nt, Human
cgagcuggugcau

SEQ ID NO: 2135455 - RNA, 14 nt, Human
cgagcuggugcauu

SEQ ID NO: 2135456 - RNA, 15 nt, Human
cgagcuggugcauua

SEQ ID NO: 2135457 - RNA, 21 nt, Human
cgagcuggugcauuacagaga

SEQ ID NO: 2135458 - RNA, 23 nt, Human
cgagcuggugcauuacagagagg

SEQ ID NO: 2135459 - RNA, 12 nt, Human
ccuuuguaaguu

SEQ ID NO: 2135460 - RNA, 14 nt, Human
ccuuuguaaguuau

SEQ ID NO: 2135461 - RNA, 15 nt, Human
ccuuuguaaguuauu

SEQ ID NO: 2135462 - RNA, 18 nt, Human
cgcaaugugcccccagac

SEQ ID NO: 2135463 - RNA, 20 nt, Human
cgcaaugugcccccagacgc

SEQ ID NO: 2135464 - RNA, 16 nt, Human
cgcacaaggcugacca

SEQ ID NO: 2135465 - RNA, 21 nt, Human
cgcacaaggcugaccaagaga

SEQ ID NO: 2135466 - RNA, 10 nt, Human
cgcacacaca

SEQ ID NO: 2135467 - RNA, 15 nt, Human
cgcacacacacacac

SEQ ID NO: 2135468 - RNA, 13 nt, Human
cgcacacacacac

SEQ ID NO: 2135469 - RNA, 12 nt, Human
cgauuguaacuc

SEQ ID NO: 2135470 - RNA, 20 nt, Human
cgcaagccuguaaucccagc

SEQ ID NO: 2135471 - RNA, 21 nt, Human
cgcaagccuguaaucccagcu

SEQ ID NO: 2135472 - RNA, 19 nt, Human
cgauucuucugcuucagcc

SEQ ID NO: 2135473 - RNA, 13 nt, Human
cgauucuucugcu

SEQ ID NO: 2135474 - RNA, 21 nt, Human
cgauucuucugcuucagccuc

SEQ ID NO: 2135475 - RNA, 19 nt, Human
cgaucuggguucacugcaa

SEQ ID NO: 2135476 - RNA, 17 nt, Human
cgaucucuuauuuuaca

SEQ ID NO: 2135477 - RNA, 21 nt, Human
cgaugaauuuggagacucugu

SEQ ID NO: 2135478 - RNA, 22 nt, Human
cgauccaccugucucagccucc

SEQ ID NO: 2135479 - RNA, 16 nt, Human
cgaucucauucaguau

SEQ ID NO: 2135480 - RNA, 13 nt, Human
ccuuggcugcagg

SEQ ID NO: 2135481 - RNA, 12 nt, Human
ccuuggcugcag

SEQ ID NO: 2135482 - RNA, 18 nt, Human
ccuuggcucaauccucua

SEQ ID NO: 2135483 - RNA, 22 nt, Human
ccuuggcucaauccucuaagcu

SEQ ID NO: 2135484 - RNA, 17 nt, Human
ccuuggcaugccuucca

SEQ ID NO: 2135485 - RNA, 20 nt, Human
ccuuggcaugccuuccagca

SEQ ID NO: 2135486 - RNA, 21 nt, Human
ccuuggcaugccuuccagcac

SEQ ID NO: 2135487 - RNA, 16 nt, Human
ccuuucuguaccauuu

SEQ ID NO: 2135488 - RNA, 20 nt, Human
ccuuguuuugugacauuuuu

SEQ ID NO: 2135489 - RNA, 20 nt, Human
ccuuguguuuuguuuugauu

SEQ ID NO: 2135490 - RNA, 19 nt, Human
ccuuugcuuaugaauauuu

SEQ ID NO: 2135491 - RNA, 15 nt, Human
ccuuuggccauucca

SEQ ID NO: 2135492 - RNA, 21 nt, Human
ccuuugccaccaacuggcccu

SEQ ID NO: 2135493 - RNA, 14 nt, Human
ccuuugcuccaccc

SEQ ID NO: 2135494 - RNA, 19 nt, Human
ccuuugcuccaccccacuc

SEQ ID NO: 2135495 - RNA, 20 nt, Human
ccuuugcuccaccccacuca

SEQ ID NO: 2135496 - RNA, 14 nt, Human
ccuuugcucuugca

SEQ ID NO: 2135497 - RNA, 21 nt, Human
ccuuugccccaccuuuauuaa

SEQ ID NO: 2135498 - RNA, 13 nt, Human
ccuuucuuggcca

SEQ ID NO: 2135499 - RNA, 15 nt, Human
ccuuucuuggccagu

SEQ ID NO: 2135500 - RNA, 22 nt, Human
ccuuugaguuuccucaggcugc

SEQ ID NO: 2135501 - RNA, 16 nt, Human
cgucgacguagaaccu

SEQ ID NO: 2135502 - RNA, 19 nt, Human
cgucgggggcugaggggca

SEQ ID NO: 2135503 - RNA, 18 nt, Human
cgucggggggacagcucc

SEQ ID NO: 2135504 - RNA, 20 nt, Human
cguccggcaguucugggugc

SEQ ID NO: 2135505 - RNA, 13 nt, Human
cguccucccccug

SEQ ID NO: 2135506 - RNA, 15 nt, Human
cguccucccccugcc

SEQ ID NO: 2135507 - RNA, 16 nt, Human
cguccucccccugcca

SEQ ID NO: 2135508 - RNA, 17 nt, Human
cguccucccccugccag

SEQ ID NO: 2135509 - RNA, 22 nt, Human
cguccucccccugccagugccu

SEQ ID NO: 2135510 - RNA, 14 nt, Human
cgucugacaggcaa

SEQ ID NO: 2135511 - RNA, 13 nt, Human
cgucugacaggca

SEQ ID NO: 2135512 - RNA, 23 nt, Human
cgucugcuaacuuggagccccag

SEQ ID NO: 2135513 - RNA, 17 nt, Human
cgucucccaucuuaacu

SEQ ID NO: 2135514 - RNA, 18 nt, Human
cgucucccaucuuaacuc

SEQ ID NO: 2135515 - RNA, 22 nt, Human
cgucucucccucccuuugaaau

SEQ ID NO: 2135516 - RNA, 19 nt, Human
cgucuaagucaugagcuga

SEQ ID NO: 2135517 - RNA, 22 nt, Human
cgugcacacaccagagcccacc

SEQ ID NO: 2135518 - RNA, 17 nt, Human
cgugaaguauacuguau

SEQ ID NO: 2135519 - RNA, 15 nt, Human
cgugcaccuguacuc

SEQ ID NO: 2135520 - RNA, 18 nt, Human
cgugcacgcacacugucu

SEQ ID NO: 2135521 - RNA, 10 nt, Human
cgugcccucu

SEQ ID NO: 2135522 - RNA, 12 nt, Human
cgugcccucugu

SEQ ID NO: 2135523 - RNA, 17 nt, Human
cgugccguuacucucca

SEQ ID NO: 2135524 - RNA, 19 nt, Human
cgugccguuacucuccaac

SEQ ID NO: 2135525 - RNA, 21 nt, Human
cgugcacacaccagagcccac

SEQ ID NO: 2135526 - RNA, 20 nt, Human
cgugcacacaccagagccca

SEQ ID NO: 2135527 - RNA, 13 nt, Human
cgugaagcaucca

SEQ ID NO: 2135528 - RNA, 19 nt, Human
cgugaaggccgagaagcaa

SEQ ID NO: 2135529 - RNA, 12 nt, Human
cgugacaacacu

SEQ ID NO: 2135530 - RNA, 18 nt, Human
cgucugucuucacagcuc

SEQ ID NO: 2135531 - RNA, 12 nt, Human
cgugaaacacac

SEQ ID NO: 2135532 - RNA, 15 nt, Human
cgugaaacacaccag

SEQ ID NO: 2135533 - RNA, 16 nt, Human
cgugaaacacaccagg

SEQ ID NO: 2135534 - RNA, 20 nt, Human
cgugaaacacaccaggcugu

SEQ ID NO: 2135535 - RNA, 22 nt, Human
cgugaaacacaccaggcugugg

SEQ ID NO: 2135536 - RNA, 24 nt, Human
cgugaaacacaccaggcugugggc

SEQ ID NO: 2135537 - RNA, 17 nt, Human
cgucugggguucagccc

SEQ ID NO: 2135538 - RNA, 18 nt, Human
cgucugggguucagcccc

SEQ ID NO: 2135539 - RNA, 19 nt, Human
cgucugggguucagccccu

SEQ ID NO: 2135540 - RNA, 23 nt, Human
cgucugggguucagccccuccuc

SEQ ID NO: 2135541 - RNA, 14 nt, Human
cgucauaacuagaa

SEQ ID NO: 2135542 - RNA, 16 nt, Human
cgucauaacuagaacu

SEQ ID NO: 2135543 - RNA, 17 nt, Human
cgucauaacuagaacug

SEQ ID NO: 2135544 - RNA, 19 nt, Human
cgucagcuggcacugucuc

SEQ ID NO: 2135545 - RNA, 17 nt, Human
cgucaguaucaggccug

SEQ ID NO: 2135546 - RNA, 21 nt, Human
cguccagccgccauugccacc

SEQ ID NO: 2135547 - RNA, 15 nt, Human
cgucauguuccucaa

SEQ ID NO: 2135548 - RNA, 22 nt, Human
cguaguucccugaaaacccaga

SEQ ID NO: 2135549 - RNA, 22 nt, Human
cguauaugucucaggucccugc

SEQ ID NO: 2135550 - RNA, 15 nt, Human
cguauugguccagcu

SEQ ID NO: 2135551 - RNA, 17 nt, Human
cgucagaagcacccagg

SEQ ID NO: 2135552 - RNA, 20 nt, Human
cgucaccaucucaggccacc

SEQ ID NO: 2135553 - RNA, 21 nt, Human
cgucaccaucucaggccaccu

SEQ ID NO: 2135554 - RNA, 16 nt, Human
cgucaccaucucaggc

SEQ ID NO: 2135555 - RNA, 14 nt, Human
cgucaccaccucuc

SEQ ID NO: 2135556 - RNA, 18 nt, Human
cgucaccaucucaggcca

SEQ ID NO: 2135557 - RNA, 13 nt, Human
cggggccagaggc

SEQ ID NO: 2135558 - RNA, 14 nt, Human
cggggccagaggca

SEQ ID NO: 2135559 - RNA, 14 nt, Human
cggggccccagggc

SEQ ID NO: 2135560 - RNA, 19 nt, Human
cggggcagcugccagagaa

SEQ ID NO: 2135561 - RNA, 16 nt, Human
cggggcaugcuggggc

SEQ ID NO: 2135562 - RNA, 17 nt, Human
cggggcaugcuggggca

SEQ ID NO: 2135563 - RNA, 19 nt, Human
cggggcaugcuggggcaag

SEQ ID NO: 2135564 - RNA, 14 nt, Human
cggggcagcugcca

SEQ ID NO: 2135565 - RNA, 15 nt, Human
cggggccccagggcu

SEQ ID NO: 2135566 - RNA, 22 nt, Human
cguagaaucuguguagacgaag

SEQ ID NO: 2135567 - RNA, 16 nt, Human
cguagagggugcugcc

SEQ ID NO: 2135568 - RNA, 17 nt, Human
cguagagggugcugccc

SEQ ID NO: 2135569 - RNA, 14 nt, Human
cguaguucccugaa

SEQ ID NO: 2135570 - RNA, 20 nt, Human
cguaguguagauuuguuuug

SEQ ID NO: 2135571 - RNA, 21 nt, Human
cguaguguagauuuguuuugu

SEQ ID NO: 2135572 - RNA, 13 nt, Human
cguaguucccuga

SEQ ID NO: 2135573 - RNA, 17 nt, Human
cguaguagggucaggcc

SEQ ID NO: 2135574 - RNA, 19 nt, Human
cguagcuauccggacagag

SEQ ID NO: 2135575 - RNA, 20 nt, Human
cguagccaaggugggcugag

SEQ ID NO: 2135576 - RNA, 12 nt, Human
cguucucugccu

SEQ ID NO: 2135577 - RNA, 18 nt, Human
cguuccuuacugcagaau

SEQ ID NO: 2135578 - RNA, 13 nt, Human
cguucuuguucug

SEQ ID NO: 2135579 - RNA, 19 nt, Human
cguucuuguucuguuuugu

SEQ ID NO: 2135580 - RNA, 17 nt, Human
cguuucaguaauaaaac

SEQ ID NO: 2135581 - RNA, 18 nt, Human
cguuucaguaauaaaaca

SEQ ID NO: 2135582 - RNA, 20 nt, Human
cguuuccugagaagugucua

SEQ ID NO: 2135583 - RNA, 20 nt, Human
cguuuccagguguuuauagu

SEQ ID NO: 2135584 - RNA, 23 nt, Human
cguuuugugugguggcaccuccu

SEQ ID NO: 2135585 - RNA, 15 nt, Human
cguuuuggaagcucu

SEQ ID NO: 2135586 - RNA, 18 nt, Human
cgugccuucagcucuaca

SEQ ID NO: 2135587 - RNA, 16 nt, Human
cgugccuucagcucua

SEQ ID NO: 2135588 - RNA, 15 nt, Human
cgugccuucagcucu

SEQ ID NO: 2135589 - RNA, 13 nt, Human
cgugccuucagcu

SEQ ID NO: 2135590 - RNA, 22 nt, Human
cguggcuaagaguguccuagga

SEQ ID NO: 2135591 - RNA, 20 nt, Human
cguggccuuccccagccucu

SEQ ID NO: 2135592 - RNA, 14 nt, Human
cguggcugaccccc

SEQ ID NO: 2135593 - RNA, 17 nt, Human
cguggcugaccccccuc

SEQ ID NO: 2135594 - RNA, 18 nt, Human
cguggcugaccccccuca

SEQ ID NO: 2135595 - RNA, 19 nt, Human
cguggcugaccccccucag

SEQ ID NO: 2135596 - RNA, 21 nt, Human
cguggcugcccacacacccca

SEQ ID NO: 2135597 - RNA, 19 nt, Human
cguggcugcggcacccuug

SEQ ID NO: 2135598 - RNA, 11 nt, Human
cguucauuugu

SEQ ID NO: 2135599 - RNA, 12 nt, Human
cguucauuugug

SEQ ID NO: 2135600 - RNA, 13 nt, Human
cguuccaguuccc

SEQ ID NO: 2135601 - RNA, 20 nt, Human
ccuguggccaaguucuuagu

SEQ ID NO: 2135602 - RNA, 18 nt, Human
ccuguggcaucuuugccu

SEQ ID NO: 2135603 - RNA, 23 nt, Human
ccuguggcaucuuugccuugggc

SEQ ID NO: 2135604 - RNA, 23 nt, Human
ccugugcugcccgucuucagccu

SEQ ID NO: 2135605 - RNA, 16 nt, Human
ccuguggaagggacua

SEQ ID NO: 2135606 - RNA, 19 nt, Human
ccuguggaagggacuagga

SEQ ID NO: 2135607 - RNA, 20 nt, Human
ccuguggaagggacuaggag

SEQ ID NO: 2135608 - RNA, 24 nt, Human
ccuguggaagggacuaggagcacu

SEQ ID NO: 2135609 - RNA, 18 nt, Human
ccuguggcaguaaagaga

SEQ ID NO: 2135610 - RNA, 21 nt, Human
ccuguggcaguaaagagaaac

SEQ ID NO: 2135611 - RNA, 22 nt, Human
ccuguggcaguaaagagaaacu

SEQ ID NO: 2135612 - RNA, 23 nt, Human
ccuguggcaguaaagagaaacuu

SEQ ID NO: 2135613 - RNA, 20 nt, Human
ccuuaccucggugccuuccu

SEQ ID NO: 2135614 - RNA, 13 nt, Human
ccuuaccuccugc

SEQ ID NO: 2135615 - RNA, 14 nt, Human
ccuuaccuccugcc

SEQ ID NO: 2135616 - RNA, 16 nt, Human
ccuuaccuccugccca

SEQ ID NO: 2135617 - RNA, 17 nt, Human
ccuuaccuccugcccag

SEQ ID NO: 2135618 - RNA, 18 nt, Human
ccuuaccuccugcccagg

SEQ ID NO: 2135619 - RNA, 20 nt, Human
ccuuaccuccugcccaggag

SEQ ID NO: 2135620 - RNA, 14 nt, Human
ccuuaccucuuccg

SEQ ID NO: 2135621 - RNA, 19 nt, Human
ccuuacuuuguaugauauu

SEQ ID NO: 2135622 - RNA, 20 nt, Human
ccuuacuuuguaugauauuc

SEQ ID NO: 2135623 - RNA, 13 nt, Human
ccuucaacugaaa

SEQ ID NO: 2135624 - RNA, 24 nt, Human
ccuucaacugaaaagacucagugu

SEQ ID NO: 2135625 - RNA, 19 nt, Human
ccuucaagaacucugggcu

SEQ ID NO: 2135626 - RNA, 14 nt, Human
ccuucaaccauucc

SEQ ID NO: 2135627 - RNA, 16 nt, Human
ccuuauuguacguuua

SEQ ID NO: 2135628 - RNA, 12 nt, Human
ccuucaaagcug

SEQ ID NO: 2135629 - RNA, 13 nt, Human
ccuucaaagcuga

SEQ ID NO: 2135630 - RNA, 16 nt, Human
ccuuauuguaccucuc

SEQ ID NO: 2135631 - RNA, 15 nt, Human
ccuuauuguaccucu

SEQ ID NO: 2135632 - RNA, 16 nt, Human
ccuuagagacaucaaa

SEQ ID NO: 2135633 - RNA, 18 nt, Human
ccuuagaaccuuucuuac

SEQ ID NO: 2135634 - RNA, 16 nt, Human
ccuuagaaccuuucuu

SEQ ID NO: 2135635 - RNA, 15 nt, Human
ccuuagaaccuuucu

SEQ ID NO: 2135636 - RNA, 14 nt, Human
ccuuagaaccuuuc

SEQ ID NO: 2135637 - RNA, 18 nt, Human
ccuucacaccauaacuag

SEQ ID NO: 2135638 - RNA, 14 nt, Human
ccuucaauaaagua

SEQ ID NO: 2135639 - RNA, 16 nt, Human
ccuucaauaaaguauc

SEQ ID NO: 2135640 - RNA, 17 nt, Human
ccuucaaguuagcucag

SEQ ID NO: 2135641 - RNA, 19 nt, Human
ccuucaaguuagcucagga

SEQ ID NO: 2135642 - RNA, 14 nt, Human
ccuucaauuccugg

SEQ ID NO: 2135643 - RNA, 15 nt, Human
ccuucaauuccuggg

SEQ ID NO: 2135644 - RNA, 16 nt, Human
ccuucaauuccugggc

SEQ ID NO: 2135645 - RNA, 20 nt, Human
ccuucaauuccugggcccca

SEQ ID NO: 2135646 - RNA, 21 nt, Human
ccuucagucuugaauuucuaa

SEQ ID NO: 2135647 - RNA, 20 nt, Human
ccuucagucuugaauuucua

SEQ ID NO: 2135648 - RNA, 23 nt, Human
ccuucgauacaccgggccuggag

SEQ ID NO: 2135649 - RNA, 22 nt, Human
ccuucgauacaccgggccugga

SEQ ID NO: 2135650 - RNA, 20 nt, Human
ccuucgauacaccgggccug

SEQ ID NO: 2135651 - RNA, 17 nt, Human
ccuuccugccaccugcu

SEQ ID NO: 2135652 - RNA, 18 nt, Human
ccuuccugccaccugcug

SEQ ID NO: 2135653 - RNA, 15 nt, Human
ccuucgauacaccgg

SEQ ID NO: 2135654 - RNA, 14 nt, Human
ccuuccucuuucca

SEQ ID NO: 2135655 - RNA, 18 nt, Human
ccuuccacgcugucucca

SEQ ID NO: 2135656 - RNA, 19 nt, Human
ccuuccacgcugucuccag

SEQ ID NO: 2135657 - RNA, 16 nt, Human
ccuuccacggacucaa

SEQ ID NO: 2135658 - RNA, 17 nt, Human
ccuuccacggacucaag

SEQ ID NO: 2135659 - RNA, 20 nt, Human
ccuuccacggauccauguag

SEQ ID NO: 2135660 - RNA, 20 nt, Human
ccuuccacgcugucuccaga

SEQ ID NO: 2135661 - RNA, 21 nt, Human
ccuuccacggauccauguagc

SEQ ID NO: 2135662 - RNA, 23 nt, Human
ccuuccaugucgccucugcauuc

SEQ ID NO: 2135663 - RNA, 21 nt, Human
ccuuccaugucgccucugcau

SEQ ID NO: 2135664 - RNA, 20 nt, Human
ccuuccaugucgccucugca

SEQ ID NO: 2135665 - RNA, 19 nt, Human
ccuuccaugucgccucugc

SEQ ID NO: 2135666 - RNA, 16 nt, Human
ccuugaacuggguacu

SEQ ID NO: 2135667 - RNA, 14 nt, Human
ccuugaacugggua

SEQ ID NO: 2135668 - RNA, 18 nt, Human
ccuucgcuccugugucuu

SEQ ID NO: 2135669 - RNA, 15 nt, Human
ccuucgcuccugugu

SEQ ID NO: 2135670 - RNA, 14 nt, Human
ccuucgcuccugug

SEQ ID NO: 2135671 - RNA, 13 nt, Human
ccuucgcuccugu

SEQ ID NO: 2135672 - RNA, 22 nt, Human
ccuucgcguauuucaggauucu

SEQ ID NO: 2135673 - RNA, 20 nt, Human
ccuucuuucuagagagggaa

SEQ ID NO: 2135674 - RNA, 16 nt, Human
ccuucuuuuucuucuu

SEQ ID NO: 2135675 - RNA, 14 nt, Human
ccuucuuuuucuuc

SEQ ID NO: 2135676 - RNA, 17 nt, Human
ccuugacagggcacacc

SEQ ID NO: 2135677 - RNA, 15 nt, Human
ccuugacagggcaca

SEQ ID NO: 2135678 - RNA, 14 nt, Human
ccuugacagggcac

SEQ ID NO: 2135679 - RNA, 22 nt, Human
ccuugaguugauucagcucugc

SEQ ID NO: 2135680 - RNA, 23 nt, Human
ccuugaguugauucagcucugca

SEQ ID NO: 2135681 - RNA, 14 nt, Human
ccuugaucuguaua

SEQ ID NO: 2135682 - RNA, 19 nt, Human
ccuuggcaucacagggcag

SEQ ID NO: 2135683 - RNA, 15 nt, Human
ccuuggcaugccuuc

SEQ ID NO: 2135684 - RNA, 13 nt, Human
ccuugacagggca

SEQ ID NO: 2135685 - RNA, 11 nt, Human
ccuuuggcuuc

SEQ ID NO: 2135686 - RNA, 23 nt, Human
ccugucaaacaaagccagaagcu

SEQ ID NO: 2135687 - RNA, 20 nt, Human
ccugucaaacaaagccagaa

SEQ ID NO: 2135688 - RNA, 22 nt, Human
ccugucaaacaaagccagaagc

SEQ ID NO: 2135689 - RNA, 18 nt, Human
ccugucaaacaaagccag

SEQ ID NO: 2135690 - RNA, 19 nt, Human
ccugucaaacaaagccaga

SEQ ID NO: 2135691 - RNA, 13 nt, Human
ccuguagucccag

SEQ ID NO: 2135692 - RNA, 14 nt, Human
ccuguagucccagc

SEQ ID NO: 2135693 - RNA, 15 nt, Human
ccuguagucccagcu

SEQ ID NO: 2135694 - RNA, 16 nt, Human
ccuguagucccagcua

SEQ ID NO: 2135695 - RNA, 13 nt, Human
ccuguaguccuag

SEQ ID NO: 2135696 - RNA, 14 nt, Human
ccuguaguuaggaa

SEQ ID NO: 2135697 - RNA, 15 nt, Human
ccuguaguuaggaaa

SEQ ID NO: 2135698 - RNA, 23 nt, Human
ccuguaguuaggaaauaaaaccu

SEQ ID NO: 2135699 - RNA, 21 nt, Human
ccuguaguuaggaaauaaaac

SEQ ID NO: 2135700 - RNA, 22 nt, Human
ccuguaguuaggaaauaaaacc

SEQ ID NO: 2135701 - RNA, 16 nt, Human
ccuguaguuaggaaau

SEQ ID NO: 2135702 - RNA, 17 nt, Human
ccuguaguuaggaaaua

SEQ ID NO: 2135703 - RNA, 18 nt, Human
ccuguaguuaggaaauaa

SEQ ID NO: 2135704 - RNA, 19 nt, Human
ccuguaguuaggaaauaaa

SEQ ID NO: 2135705 - RNA, 21 nt, Human
ccuguagagugggagcugagu

SEQ ID NO: 2135706 - RNA, 19 nt, Human
ccuguagagugggagcuga

SEQ ID NO: 2135707 - RNA, 23 nt, Human
ccuguagagugggagcugagugg

SEQ ID NO: 2135708 - RNA, 12 nt, Human
ccuguacacuga

SEQ ID NO: 2135709 - RNA, 13 nt, Human
ccuguacucagga

SEQ ID NO: 2135710 - RNA, 14 nt, Human
ccuguacucaggag

SEQ ID NO: 2135711 - RNA, 15 nt, Human
ccuguacucaggagg

SEQ ID NO: 2135712 - RNA, 21 nt, Human
ccuguacucaggaggcugagg

SEQ ID NO: 2135713 - RNA, 22 nt, Human
ccuguacucaggaggcugaggg

SEQ ID NO: 2135714 - RNA, 13 nt, Human
ccuguacuggaga

SEQ ID NO: 2135715 - RNA, 14 nt, Human
ccuguacuggagag

SEQ ID NO: 2135716 - RNA, 23 nt, Human
ccuguacucaggaggcugagggg

SEQ ID NO: 2135717 - RNA, 15 nt, Human
ccuggugcugccaca

SEQ ID NO: 2135718 - RNA, 21 nt, Human
ccuggugcugccacacuucag

SEQ ID NO: 2135719 - RNA, 18 nt, Human
ccuggugcugccacacuu

SEQ ID NO: 2135720 - RNA, 12 nt, Human
ccuggugcugcu

SEQ ID NO: 2135721 - RNA, 17 nt, Human
ccugggcaccuggggag

SEQ ID NO: 2135722 - RNA, 13 nt, Human
ccugggcagaaag

SEQ ID NO: 2135723 - RNA, 13 nt, Human
ccuggugcugcug

SEQ ID NO: 2135724 - RNA, 13 nt, Human
ccuggugcuggau

SEQ ID NO: 2135725 - RNA, 13 nt, Human
ccugguggcagcu

SEQ ID NO: 2135726 - RNA, 12 nt, Human
ccugguggcagc

SEQ ID NO: 2135727 - RNA, 12 nt, Human
ccugguggacag

SEQ ID NO: 2135728 - RNA, 14 nt, Human
ccugguggacaguc

SEQ ID NO: 2135729 - RNA, 17 nt, Human
ccugguggacaguccug

SEQ ID NO: 2135730 - RNA, 18 nt, Human
ccugguggacaguccugg

SEQ ID NO: 2135731 - RNA, 19 nt, Human
ccugguggacaguccuggg

SEQ ID NO: 2135732 - RNA, 20 nt, Human
ccugguggacaguccuggga

SEQ ID NO: 2135733 - RNA, 15 nt, Human
ccuguaaucccagcu

SEQ ID NO: 2135734 - RNA, 16 nt, Human
ccuguaaucccagcua

SEQ ID NO: 2135735 - RNA, 18 nt, Human
ccuguaaucccagcuacu

SEQ ID NO: 2135736 - RNA, 23 nt, Human
ccuguaaucccagcuacucagga

SEQ ID NO: 2135737 - RNA, 21 nt, Human
ccuguacaaaagggacaugaa

SEQ ID NO: 2135738 - RNA, 15 nt, Human
ccuguacaauauuua

SEQ ID NO: 2135739 - RNA, 21 nt, Human
ccuguacaauauuuaaaauuu

SEQ ID NO: 2135740 - RNA, 21 nt, Human
ccuguacacugaauauuuaua

SEQ ID NO: 2135741 - RNA, 20 nt, Human
ccuguaauccuagcacuuug

SEQ ID NO: 2135742 - RNA, 23 nt, Human
ccuguaaucccagcacuuuggga

SEQ ID NO: 2135743 - RNA, 16 nt, Human
ccuguaaucccagcag

SEQ ID NO: 2135744 - RNA, 18 nt, Human
ccugugacuucagcucug

SEQ ID NO: 2135745 - RNA, 13 nt, Human
ccuguccuccucg

SEQ ID NO: 2135746 - RNA, 14 nt, Human
ccuguccuccucgg

SEQ ID NO: 2135747 - RNA, 15 nt, Human
ccuguccuccucgga

SEQ ID NO: 2135748 - RNA, 23 nt, Human
ccuguccuccucggaucaccgag

SEQ ID NO: 2135749 - RNA, 15 nt, Human
ccuguccucagcuuc

SEQ ID NO: 2135750 - RNA, 13 nt, Human
ccugugagccagu

SEQ ID NO: 2135751 - RNA, 14 nt, Human
ccugugagccaguc

SEQ ID NO: 2135752 - RNA, 15 nt, Human
ccugugagccagucu

SEQ ID NO: 2135753 - RNA, 16 nt, Human
ccugugagccagucua

SEQ ID NO: 2135754 - RNA, 23 nt, Human
ccugugagccagucuaguuccug

SEQ ID NO: 2135755 - RNA, 13 nt, Human
ccugugaggcagg

SEQ ID NO: 2135756 - RNA, 14 nt, Human
ccugugaggcaggg

SEQ ID NO: 2135757 - RNA, 22 nt, Human
ccugucccccugagaucagagu

SEQ ID NO: 2135758 - RNA, 23 nt, Human
ccugucccccugagaucagaguc

SEQ ID NO: 2135759 - RNA, 14 nt, Human
ccugucaccaagcu

SEQ ID NO: 2135760 - RNA, 19 nt, Human
ccuguccaaacugccuaag

SEQ ID NO: 2135761 - RNA, 23 nt, Human
ccuguccaaacugccuaagcccu

SEQ ID NO: 2135762 - RNA, 12 nt, Human
ccuguccaaccu

SEQ ID NO: 2135763 - RNA, 19 nt, Human
ccuguccaaccuaaccccu

SEQ ID NO: 2135764 - RNA, 23 nt, Human
ccuguccaaccuaaccccuuucc

SEQ ID NO: 2135765 - RNA, 22 nt, Human
ccuguccagccugggcagccag

SEQ ID NO: 2135766 - RNA, 22 nt, Human
ccuguccacccccgccucccuc

SEQ ID NO: 2135767 - RNA, 13 nt, Human
ccuguccagagag

SEQ ID NO: 2135768 - RNA, 12 nt, Human
ccuguccagccu

SEQ ID NO: 2135769 - RNA, 14 nt, Human
ccuguccagccugg

SEQ ID NO: 2135770 - RNA, 16 nt, Human
ccuguccagccugggc

SEQ ID NO: 2135771 - RNA, 19 nt, Human
ccugugccacccaccaggg

SEQ ID NO: 2135772 - RNA, 21 nt, Human
ccugugccacccaccagggcg

SEQ ID NO: 2135773 - RNA, 19 nt, Human
ccugugccucugggacugg

SEQ ID NO: 2135774 - RNA, 22 nt, Human
ccugugcugcccgucuucagcc

SEQ ID NO: 2135775 - RNA, 15 nt, Human
ccugugccucuggga

SEQ ID NO: 2135776 - RNA, 17 nt, Human
ccugugccucugggacu

SEQ ID NO: 2135777 - RNA, 23 nt, Human
ccugugaggugcagagugcccag

SEQ ID NO: 2135778 - RNA, 17 nt, Human
ccugugaggcaggggcg

SEQ ID NO: 2135779 - RNA, 19 nt, Human
ccugugaggugcagagugc

SEQ ID NO: 2135780 - RNA, 14 nt, Human
ccuggccaggagcu

SEQ ID NO: 2135781 - RNA, 15 nt, Human
ccuggccaggagcuc

SEQ ID NO: 2135782 - RNA, 16 nt, Human
ccuggccaggagcucu

SEQ ID NO: 2135783 - RNA, 18 nt, Human
ccuggccaggagcucuuc

SEQ ID NO: 2135784 - RNA, 19 nt, Human
ccuggccaggagcucuuca

SEQ ID NO: 2135785 - RNA, 20 nt, Human
ccuggccaggagcucuucag

SEQ ID NO: 2135786 - RNA, 21 nt, Human
ccuggccaggagcucuucagg

SEQ ID NO: 2135787 - RNA, 22 nt, Human
ccuggccaggagcucuucaggc

SEQ ID NO: 2135788 - RNA, 12 nt, Human
ccuggcccccag

SEQ ID NO: 2135789 - RNA, 14 nt, Human
ccuggcccccagcu

SEQ ID NO: 2135790 - RNA, 15 nt, Human
ccuggccccaugucu

SEQ ID NO: 2135791 - RNA, 17 nt, Human
ccuggccccaugucucu

SEQ ID NO: 2135792 - RNA, 18 nt, Human
ccuggccccaugucucuc

SEQ ID NO: 2135793 - RNA, 20 nt, Human
ccuggccccaugucucucag

SEQ ID NO: 2135794 - RNA, 21 nt, Human
ccuggccccaugucucucaga

SEQ ID NO: 2135795 - RNA, 14 nt, Human
ccuggccccauguc

SEQ ID NO: 2135796 - RNA, 14 nt, Human
ccuggccaggcaga

SEQ ID NO: 2135797 - RNA, 22 nt, Human
ccuggccaggcagaucugugcc

SEQ ID NO: 2135798 - RNA, 23 nt, Human
ccuggcuacagggcgagacucug

SEQ ID NO: 2135799 - RNA, 16 nt, Human
ccuggcucucagaagg

SEQ ID NO: 2135800 - RNA, 11 nt, Human
ccuggcucuga

SEQ ID NO: 2135801 - RNA, 20 nt, Human
ccuggcucugaccgaaacag

SEQ ID NO: 2135802 - RNA, 17 nt, Human
ccuggcucuguggcuug

SEQ ID NO: 2135803 - RNA, 20 nt, Human
ccuggcucuguggcuugcua

SEQ ID NO: 2135804 - RNA, 20 nt, Human
ccugggauguccacagaugc

SEQ ID NO: 2135805 - RNA, 22 nt, Human
ccugggauguccacagaugccu

SEQ ID NO: 2135806 - RNA, 15 nt, Human
ccugggcaccugggg

SEQ ID NO: 2135807 - RNA, 20 nt, Human
ccugggcaccuggggagugg

SEQ ID NO: 2135808 - RNA, 20 nt, Human
ccugggaggucaaggcugca

SEQ ID NO: 2135809 - RNA, 12 nt, Human
ccuggcucagcc

SEQ ID NO: 2135810 - RNA, 14 nt, Human
ccuggcagaacuga

SEQ ID NO: 2135811 - RNA, 13 nt, Human
ccuggcagaacug

SEQ ID NO: 2135812 - RNA, 19 nt, Human
ccuggcagccgugccuuca

SEQ ID NO: 2135813 - RNA, 18 nt, Human
ccuggcagccgugccuuc

SEQ ID NO: 2135814 - RNA, 12 nt, Human
ccuggcagccgu

SEQ ID NO: 2135815 - RNA, 13 nt, Human
ccuggagccccac

SEQ ID NO: 2135816 - RNA, 17 nt, Human
ccuggagccccacugcc

SEQ ID NO: 2135817 - RNA, 18 nt, Human
ccuggagccccacugccc

SEQ ID NO: 2135818 - RNA, 15 nt, Human
ccuggagauggggag

SEQ ID NO: 2135819 - RNA, 16 nt, Human
ccuggagauggggaga

SEQ ID NO: 2135820 - RNA, 17 nt, Human
ccuggacugguggcccc

SEQ ID NO: 2135821 - RNA, 22 nt, Human
ccuggacugguggccccugccu

SEQ ID NO: 2135822 - RNA, 14 nt, Human
ccuggaccaaagcu

SEQ ID NO: 2135823 - RNA, 15 nt, Human
ccuggaccaaagcug

SEQ ID NO: 2135824 - RNA, 16 nt, Human
ccuggaccaaagcuga

SEQ ID NO: 2135825 - RNA, 16 nt, Human
ccuggaccagaugcug

SEQ ID NO: 2135826 - RNA, 23 nt, Human
ccuggaaaggcucagucucagga

SEQ ID NO: 2135827 - RNA, 15 nt, Human
ccuggaaaggcucag

SEQ ID NO: 2135828 - RNA, 17 nt, Human
ccuggaaaggcucaguc

SEQ ID NO: 2135829 - RNA, 20 nt, Human
ccuggaaaggcucagucuca

SEQ ID NO: 2135830 - RNA, 21 nt, Human
ccuggaaaggcucagucucag

SEQ ID NO: 2135831 - RNA, 22 nt, Human
ccuggaaaggcucagucucagg

SEQ ID NO: 2135832 - RNA, 15 nt, Human
ccuggacucauugcu

SEQ ID NO: 2135833 - RNA, 16 nt, Human
ccuggacucauugcuu

SEQ ID NO: 2135834 - RNA, 13 nt, Human
ccuggacccugug

SEQ ID NO: 2135835 - RNA, 14 nt, Human
ccuggacccugugg

SEQ ID NO: 2135836 - RNA, 19 nt, Human
ccugcugguucaggguugg

SEQ ID NO: 2135837 - RNA, 18 nt, Human
ccugcucccccacccccu

SEQ ID NO: 2135838 - RNA, 23 nt, Human
ccugcucccccacccccucccca

SEQ ID NO: 2135839 - RNA, 14 nt, Human
ccugcucccccacc

SEQ ID NO: 2135840 - RNA, 16 nt, Human
ccugcucccccacccc

SEQ ID NO: 2135841 - RNA, 12 nt, Human
ccugcuggucaa

SEQ ID NO: 2135842 - RNA, 13 nt, Human
ccugcugguucag

SEQ ID NO: 2135843 - RNA, 21 nt, Human
ccugcuuuagaauguuuuccu

SEQ ID NO: 2135844 - RNA, 23 nt, Human
ccugcuuuagaauguuuuccuuc

SEQ ID NO: 2135845 - RNA, 15 nt, Human
ccugcuugucccugc

SEQ ID NO: 2135846 - RNA, 18 nt, Human
ccugcuugucccugccca

SEQ ID NO: 2135847 - RNA, 22 nt, Human
ccugcuuucaagaccccugucu

SEQ ID NO: 2135848 - RNA, 17 nt, Human
ccugcuuugggcugccc

SEQ ID NO: 2135849 - RNA, 18 nt, Human
ccugcuuugggcugcccu

SEQ ID NO: 2135850 - RNA, 22 nt, Human
ccugcguuuuggaagcucugaa

SEQ ID NO: 2135851 - RNA, 13 nt, Human
ccugcguggcuga

SEQ ID NO: 2135852 - RNA, 16 nt, Human
ccugcguggcugaccc

SEQ ID NO: 2135853 - RNA, 17 nt, Human
ccugcguggcugacccc

SEQ ID NO: 2135854 - RNA, 19 nt, Human
ccugcguggcugacccccc

SEQ ID NO: 2135855 - RNA, 23 nt, Human
ccugcguggcugaccccccucag

SEQ ID NO: 2135856 - RNA, 17 nt, Human
ccugcuaauuccccaga

SEQ ID NO: 2135857 - RNA, 12 nt, Human
ccugcuccagcu

SEQ ID NO: 2135858 - RNA, 13 nt, Human
ccugcuccagcug

SEQ ID NO: 2135859 - RNA, 14 nt, Human
ccugcuccagcugu

SEQ ID NO: 2135860 - RNA, 22 nt, Human
ccugcuccagcuguucagcugg

SEQ ID NO: 2135861 - RNA, 23 nt, Human
ccugcgucucauacucaccucac

SEQ ID NO: 2135862 - RNA, 13 nt, Human
ccuccugggcuaa

SEQ ID NO: 2135863 - RNA, 22 nt, Human
ccuccugugugugcgccuacag

SEQ ID NO: 2135864 - RNA, 15 nt, Human
ccuccugugugugcg

SEQ ID NO: 2135865 - RNA, 13 nt, Human
ccuccugugugug

SEQ ID NO: 2135866 - RNA, 12 nt, Human
ccuccucugcca

SEQ ID NO: 2135867 - RNA, 13 nt, Human
ccuccucugccac

SEQ ID NO: 2135868 - RNA, 14 nt, Human
ccuccucugccacc

SEQ ID NO: 2135869 - RNA, 15 nt, Human
ccuccucugccaccu

SEQ ID NO: 2135870 - RNA, 18 nt, Human
ccuccucugccaccuccc

SEQ ID NO: 2135871 - RNA, 20 nt, Human
ccuccucugccaccuccccu

SEQ ID NO: 2135872 - RNA, 12 nt, Human
ccuccugcccac

SEQ ID NO: 2135873 - RNA, 14 nt, Human
ccuccugcccaccu

SEQ ID NO: 2135874 - RNA, 17 nt, Human
ccuccugcccaccuguc

SEQ ID NO: 2135875 - RNA, 12 nt, Human
ccuccugcccag

SEQ ID NO: 2135876 - RNA, 13 nt, Human
ccuccugcccagg

SEQ ID NO: 2135877 - RNA, 21 nt, Human
ccuccucugccaccuccccua

SEQ ID NO: 2135878 - RNA, 13 nt, Human
ccuccugccucga

SEQ ID NO: 2135879 - RNA, 14 nt, Human
ccuccugcccagga

SEQ ID NO: 2135880 - RNA, 15 nt, Human
ccuccugcccaggag

SEQ ID NO: 2135881 - RNA, 16 nt, Human
ccuccugcccaggaga

SEQ ID NO: 2135882 - RNA, 19 nt, Human
ccuccugcccaggagagcc

SEQ ID NO: 2135883 - RNA, 21 nt, Human
ccuccugcccaggagagccag

SEQ ID NO: 2135884 - RNA, 23 nt, Human
ccuccugcccaggagagccagcc

SEQ ID NO: 2135885 - RNA, 13 nt, Human
ccucccggugccc

SEQ ID NO: 2135886 - RNA, 22 nt, Human
ccucagacucauacagaaggug

SEQ ID NO: 2135887 - RNA, 20 nt, Human
ccuccccuccuugccuccug

SEQ ID NO: 2135888 - RNA, 16 nt, Human
ccucccggugcccaag

SEQ ID NO: 2135889 - RNA, 13 nt, Human
ccucccuaccuca

SEQ ID NO: 2135890 - RNA, 15 nt, Human
ccucccuaccucaac

SEQ ID NO: 2135891 - RNA, 16 nt, Human
ccucccuaccucaacc

SEQ ID NO: 2135892 - RNA, 18 nt, Human
ccucccuaccucaaccug

SEQ ID NO: 2135893 - RNA, 19 nt, Human
ccucccuaccucaaccugu

SEQ ID NO: 2135894 - RNA, 22 nt, Human
ccucccuaccucaaccuguaaa

SEQ ID NO: 2135895 - RNA, 13 nt, Human
ccucccucccucu

SEQ ID NO: 2135896 - RNA, 15 nt, Human
ccucccucccucuuu

SEQ ID NO: 2135897 - RNA, 16 nt, Human
ccucccucccucuuuc

SEQ ID NO: 2135898 - RNA, 16 nt, Human
ccucccuccucugucc

SEQ ID NO: 2135899 - RNA, 20 nt, Human
ccucccugaaccaucccuga

SEQ ID NO: 2135900 - RNA, 15 nt, Human
ccucccugacccugc

SEQ ID NO: 2135901 - RNA, 17 nt, Human
ccucccugacccugcag

SEQ ID NO: 2135902 - RNA, 22 nt, Human
ccucccugacccugcagagaug

SEQ ID NO: 2135903 - RNA, 20 nt, Human
ccucccugaaaauguuuuuc

SEQ ID NO: 2135904 - RNA, 13 nt, Human
ccucccuccucug

SEQ ID NO: 2135905 - RNA, 13 nt, Human
ccucccugaacca

SEQ ID NO: 2135906 - RNA, 14 nt, Human
ccucccugauguac

SEQ ID NO: 2135907 - RNA, 18 nt, Human
ccucagggcagccugccu

SEQ ID NO: 2135908 - RNA, 19 nt, Human
ccucagggcagccugccug

SEQ ID NO: 2135909 - RNA, 20 nt, Human
ccucagggcagccugccugg

SEQ ID NO: 2135910 - RNA, 23 nt, Human
ccucagggcagccugccuggagu

SEQ ID NO: 2135911 - RNA, 14 nt, Human
ccucagcauccugg

SEQ ID NO: 2135912 - RNA, 10 nt, Human
ccucagacug

SEQ ID NO: 2135913 - RNA, 17 nt, Human
ccucagcauccuggcac

SEQ ID NO: 2135914 - RNA, 16 nt, Human
ccucagcauccuggca

SEQ ID NO: 2135915 - RNA, 19 nt, Human
ccucaggugauccacccac

SEQ ID NO: 2135916 - RNA, 17 nt, Human
ccucaggugauccaccc

SEQ ID NO: 2135917 - RNA, 22 nt, Human
ccucaggugauccacccaccuc

SEQ ID NO: 2135918 - RNA, 19 nt, Human
ccucaggucagggugagga

SEQ ID NO: 2135919 - RNA, 16 nt, Human
ccucaggugagaagca

SEQ ID NO: 2135920 - RNA, 15 nt, Human
ccucagucuggcccu

SEQ ID NO: 2135921 - RNA, 20 nt, Human
ccucaggucagggugaggau

SEQ ID NO: 2135922 - RNA, 19 nt, Human
ccucagguuugccugaggg

SEQ ID NO: 2135923 - RNA, 17 nt, Human
ccucuccugccuacuca

SEQ ID NO: 2135924 - RNA, 14 nt, Human
ccucuccugccuac

SEQ ID NO: 2135925 - RNA, 15 nt, Human
ccucuccugccuacu

SEQ ID NO: 2135926 - RNA, 16 nt, Human
ccucuccugccuacuc

SEQ ID NO: 2135927 - RNA, 16 nt, Human
ccucugacacacagcu

SEQ ID NO: 2135928 - RNA, 23 nt, Human
ccucugaaaaccaauguucucuc

SEQ ID NO: 2135929 - RNA, 20 nt, Human
ccucucuuauagaauauuua

SEQ ID NO: 2135930 - RNA, 14 nt, Human
ccucucuuccuauc

SEQ ID NO: 2135931 - RNA, 16 nt, Human
ccucucuuccuauccc

SEQ ID NO: 2135932 - RNA, 17 nt, Human
ccucucuuccuauccca

SEQ ID NO: 2135933 - RNA, 19 nt, Human
ccucucuuccuaucccauc

SEQ ID NO: 2135934 - RNA, 21 nt, Human
ccucucuuccuaucccauccc

SEQ ID NO: 2135935 - RNA, 22 nt, Human
ccucucuuccuaucccauccca

SEQ ID NO: 2135936 - RNA, 23 nt, Human
ccucucuuccuaucccaucccau

SEQ ID NO: 2135937 - RNA, 18 nt, Human
ccucucuugguuuccuuc

SEQ ID NO: 2135938 - RNA, 19 nt, Human
ccucucuugguuuccuucc

SEQ ID NO: 2135939 - RNA, 21 nt, Human
ccucucuugguuuccuuccuu

SEQ ID NO: 2135940 - RNA, 16 nt, Human
ccucuccacugccuuc

SEQ ID NO: 2135941 - RNA, 14 nt, Human
ccucuccacugccu

SEQ ID NO: 2135942 - RNA, 13 nt, Human
ccucuccacugcc

SEQ ID NO: 2135943 - RNA, 12 nt, Human
ccucuccacugc

SEQ ID NO: 2135944 - RNA, 19 nt, Human
ccucuccacugccuucgau

SEQ ID NO: 2135945 - RNA, 12 nt, Human
ccucucccauca

SEQ ID NO: 2135946 - RNA, 12 nt, Human
ccucucccaguu

SEQ ID NO: 2135947 - RNA, 13 nt, Human
ccucucccaguug

SEQ ID NO: 2135948 - RNA, 15 nt, Human
ccucucccaguuguc

SEQ ID NO: 2135949 - RNA, 14 nt, Human
ccucucacuguguc

SEQ ID NO: 2135950 - RNA, 14 nt, Human
ccucucaggcaugc

SEQ ID NO: 2135951 - RNA, 20 nt, Human
ccucucaggcaugccugugu

SEQ ID NO: 2135952 - RNA, 21 nt, Human
ccucucaggcaugccugugug

SEQ ID NO: 2135953 - RNA, 23 nt, Human
ccuccugugugugcgccuacagg

SEQ ID NO: 2135954 - RNA, 17 nt, Human
ccuccuguguagcuggg

SEQ ID NO: 2135955 - RNA, 17 nt, Human
ccucuggcccugccuuc

SEQ ID NO: 2135956 - RNA, 24 nt, Human
ccucuggcuagaggccagccccac

SEQ ID NO: 2135957 - RNA, 22 nt, Human
ccucuggcuggcuaacuggaag

SEQ ID NO: 2135958 - RNA, 23 nt, Human
ccucuggcuggcuaacuggaagc

SEQ ID NO: 2135959 - RNA, 18 nt, Human
ccucuggauugugggaau

SEQ ID NO: 2135960 - RNA, 12 nt, Human
ccucuggccagg

SEQ ID NO: 2135961 - RNA, 15 nt, Human
ccucuggccaggaug

SEQ ID NO: 2135962 - RNA, 12 nt, Human
ccucuggcccug

SEQ ID NO: 2135963 - RNA, 13 nt, Human
ccucuggcccugc

SEQ ID NO: 2135964 - RNA, 15 nt, Human
ccucuggcccugccu

SEQ ID NO: 2135965 - RNA, 18 nt, Human
ccucuggcccugccuucu

SEQ ID NO: 2135966 - RNA, 12 nt, Human
ccucuggcuaga

SEQ ID NO: 2135967 - RNA, 13 nt, Human
ccucuggcuagag

SEQ ID NO: 2135968 - RNA, 22 nt, Human
ccucuggcuagaggccagcccc

SEQ ID NO: 2135969 - RNA, 23 nt, Human
ccucuggcuagaggccagcccca

SEQ ID NO: 2135970 - RNA, 15 nt, Human
ccucugggccuccuc

SEQ ID NO: 2135971 - RNA, 17 nt, Human
ccucugggccuccucua

SEQ ID NO: 2135972 - RNA, 10 nt, Human
ccucugggcu

SEQ ID NO: 2135973 - RNA, 11 nt, Human
ccucugggcuu

SEQ ID NO: 2135974 - RNA, 19 nt, Human
ccucugguaaccucuuacu

SEQ ID NO: 2135975 - RNA, 16 nt, Human
ccucugguagacacag

SEQ ID NO: 2135976 - RNA, 12 nt, Human
ccucugggacug

SEQ ID NO: 2135977 - RNA, 16 nt, Human
ccucugggcaggaccu

SEQ ID NO: 2135978 - RNA, 18 nt, Human
ccucuggacuggcuagag

SEQ ID NO: 2135979 - RNA, 15 nt, Human
ccucuggaggccucu

SEQ ID NO: 2135980 - RNA, 16 nt, Human
ccucuggaggccucug

SEQ ID NO: 2135981 - RNA, 18 nt, Human
ccucuggaggccucuggg

SEQ ID NO: 2135982 - RNA, 19 nt, Human
ccucuggaggccucugggc

SEQ ID NO: 2135983 - RNA, 20 nt, Human
ccucuggaggccucugggcc

SEQ ID NO: 2135984 - RNA, 21 nt, Human
ccucuggaggccucugggccu

SEQ ID NO: 2135985 - RNA, 22 nt, Human
ccucuggaggccucugggccuc

SEQ ID NO: 2135986 - RNA, 14 nt, Human
ccucuggacuggcu

SEQ ID NO: 2135987 - RNA, 15 nt, Human
ccucuggacuggcua

SEQ ID NO: 2135988 - RNA, 16 nt, Human
ccucuggacuggcuag

SEQ ID NO: 2135989 - RNA, 17 nt, Human
ccucuggacuggcuaga

SEQ ID NO: 2135990 - RNA, 16 nt, Human
ccucuggaauugcuca

SEQ ID NO: 2135991 - RNA, 12 nt, Human
ccucugccaccu

SEQ ID NO: 2135992 - RNA, 11 nt, Human
ccucugccacc

SEQ ID NO: 2135993 - RNA, 18 nt, Human
ccucugacacacagcucu

SEQ ID NO: 2135994 - RNA, 17 nt, Human
ccucugacacacagcuc

SEQ ID NO: 2135995 - RNA, 11 nt, Human
ccucugcacaa

SEQ ID NO: 2135996 - RNA, 15 nt, Human
ccucugcacaagcug

SEQ ID NO: 2135997 - RNA, 20 nt, Human
ccucugcacaagcugcaccc

SEQ ID NO: 2135998 - RNA, 17 nt, Human
ccucugcacaagcugca

SEQ ID NO: 2135999 - RNA, 19 nt, Human
ccucugcacaagcugcacc

SEQ ID NO: 2136000 - RNA, 14 nt, Human
ccucuuagaaaaac

SEQ ID NO: 2136001 - RNA, 18 nt, Human
ccucuuaaauaaaccuuu

SEQ ID NO: 2136002 - RNA, 17 nt, Human
ccucuuaaauaaaccuu

SEQ ID NO: 2136003 - RNA, 23 nt, Human
ccucuuaaagcugccuguaguua

SEQ ID NO: 2136004 - RNA, 17 nt, Human
ccucuuaaaaaauaaaa

SEQ ID NO: 2136005 - RNA, 18 nt, Human
ccucuuaaaaaauaaaaa

SEQ ID NO: 2136006 - RNA, 19 nt, Human
ccucuuaaaaaauaaaaac

SEQ ID NO: 2136007 - RNA, 17 nt, Human
ccucuuaaagcugccug

SEQ ID NO: 2136008 - RNA, 19 nt, Human
ccucuuaaagcugccugua

SEQ ID NO: 2136009 - RNA, 20 nt, Human
ccucuuaaagcugccuguag

SEQ ID NO: 2136010 - RNA, 21 nt, Human
ccucuuaaagcugccuguagu

SEQ ID NO: 2136011 - RNA, 22 nt, Human
ccucuuaaagcugccuguaguu

SEQ ID NO: 2136012 - RNA, 17 nt, Human
ccucuguccaggcacug

SEQ ID NO: 2136013 - RNA, 14 nt, Human
ccucuguccagggc

SEQ ID NO: 2136014 - RNA, 15 nt, Human
ccucuguccagggcc

SEQ ID NO: 2136015 - RNA, 16 nt, Human
ccucugucauaucuuc

SEQ ID NO: 2136016 - RNA, 19 nt, Human
ccucugucauaucuucaca

SEQ ID NO: 2136017 - RNA, 23 nt, Human
ccucuguauuugaaucagccuac

SEQ ID NO: 2136018 - RNA, 18 nt, Human
ccucuguccagggcccug

SEQ ID NO: 2136019 - RNA, 20 nt, Human
ccucuguccagggcccugag

SEQ ID NO: 2136020 - RNA, 21 nt, Human
ccucuguccagggcccugagc

SEQ ID NO: 2136021 - RNA, 23 nt, Human
ccucuguccagggcccugagcuc

SEQ ID NO: 2136022 - RNA, 19 nt, Human
ccucugguucuucauuuau

SEQ ID NO: 2136023 - RNA, 13 nt, Human
ccugaaugaaaua

SEQ ID NO: 2136024 - RNA, 23 nt, Human
ccugaauguauugaacuuggaaa

SEQ ID NO: 2136025 - RNA, 17 nt, Human
ccugaagucacacagug

SEQ ID NO: 2136026 - RNA, 16 nt, Human
ccugaagucacacagu

SEQ ID NO: 2136027 - RNA, 15 nt, Human
ccugaagucacacag

SEQ ID NO: 2136028 - RNA, 21 nt, Human
ccugaagacucauucuucugu

SEQ ID NO: 2136029 - RNA, 18 nt, Human
ccugaacacuuauugcuu

SEQ ID NO: 2136030 - RNA, 19 nt, Human
ccugaacacuuauugcuuu

SEQ ID NO: 2136031 - RNA, 14 nt, Human
ccugaagaacagua

SEQ ID NO: 2136032 - RNA, 17 nt, Human
ccucuuuuagucauuuu

SEQ ID NO: 2136033 - RNA, 15 nt, Human
ccucuuuguuuuguu

SEQ ID NO: 2136034 - RNA, 19 nt, Human
ccucuuuguuuuguuuuaa

SEQ ID NO: 2136035 - RNA, 20 nt, Human
ccucuuuuuccaucauaauu

SEQ ID NO: 2136036 - RNA, 19 nt, Human
ccucuuccucccucauucc

SEQ ID NO: 2136037 - RNA, 16 nt, Human
ccucuuccucccucau

SEQ ID NO: 2136038 - RNA, 15 nt, Human
ccucuuccucccuca

SEQ ID NO: 2136039 - RNA, 18 nt, Human
ccucuuauguaccucuuu

SEQ ID NO: 2136040 - RNA, 20 nt, Human
ccucuuauguaccucuuuua

SEQ ID NO: 2136041 - RNA, 20 nt, Human
ccucuuccggagauguagca

SEQ ID NO: 2136042 - RNA, 19 nt, Human
ccucuuccggagauguagc

SEQ ID NO: 2136043 - RNA, 16 nt, Human
ccugauguuaaaauuc

SEQ ID NO: 2136044 - RNA, 17 nt, Human
ccugauguuaaaauucc

SEQ ID NO: 2136045 - RNA, 16 nt, Human
ccugaugcucccuccc

SEQ ID NO: 2136046 - RNA, 19 nt, Human
ccugaugcucccuccccug

SEQ ID NO: 2136047 - RNA, 20 nt, Human
ccugaugcucccuccccugc

SEQ ID NO: 2136048 - RNA, 23 nt, Human
ccugaugcucccuccccugcccu

SEQ ID NO: 2136049 - RNA, 14 nt, Human
ccugaugacccagg

SEQ ID NO: 2136050 - RNA, 17 nt, Human
ccugaugacccaggcug

SEQ ID NO: 2136051 - RNA, 19 nt, Human
ccugaugacccaggcugcc

SEQ ID NO: 2136052 - RNA, 21 nt, Human
ccugaugacccaggcugccug

SEQ ID NO: 2136053 - RNA, 13 nt, Human
ccugaugcucccu

SEQ ID NO: 2136054 - RNA, 14 nt, Human
ccugaugcucccuc

SEQ ID NO: 2136055 - RNA, 14 nt, Human
ccugaggcugagac

SEQ ID NO: 2136056 - RNA, 23 nt, Human
ccugaucgccaaccuuuccccca

SEQ ID NO: 2136057 - RNA, 15 nt, Human
ccccagcccugugga

SEQ ID NO: 2136058 - RNA, 13 nt, Human
ccccagcccugug

SEQ ID NO: 2136059 - RNA, 14 nt, Human
ccccagcccugugg

SEQ ID NO: 2136060 - RNA, 12 nt, Human
ccccagcccugu

SEQ ID NO: 2136061 - RNA, 19 nt, Human
ccccagccuaagaugaaga

SEQ ID NO: 2136062 - RNA, 21 nt, Human
ccccagccuaagaugaagagg

SEQ ID NO: 2136063 - RNA, 13 nt, Human
ccccagccucucu

SEQ ID NO: 2136064 - RNA, 16 nt, Human
ccccagccucucuucc

SEQ ID NO: 2136065 - RNA, 21 nt, Human
ccccacugacagccucccacc

SEQ ID NO: 2136066 - RNA, 15 nt, Human
ccccacugacagccu

SEQ ID NO: 2136067 - RNA, 13 nt, Human
ccccaccccuucc

SEQ ID NO: 2136068 - RNA, 15 nt, Human
ccccaccccuucccc

SEQ ID NO: 2136069 - RNA, 17 nt, Human
ccccaccccuuccccac

SEQ ID NO: 2136070 - RNA, 18 nt, Human
ccccaccccuuccccacu

SEQ ID NO: 2136071 - RNA, 22 nt, Human
ccccaccccuuccccacugccu

SEQ ID NO: 2136072 - RNA, 12 nt, Human
ccccacugcagg

SEQ ID NO: 2136073 - RNA, 16 nt, Human
ccccacugcaggcccc

SEQ ID NO: 2136074 - RNA, 18 nt, Human
ccccacugcaggccccgc

SEQ ID NO: 2136075 - RNA, 14 nt, Human
ccccacugcccuuc

SEQ ID NO: 2136076 - RNA, 12 nt, Human
ccccacugccug

SEQ ID NO: 2136077 - RNA, 15 nt, Human
ccccacugccugccc

SEQ ID NO: 2136078 - RNA, 16 nt, Human
ccccacugccugccca

SEQ ID NO: 2136079 - RNA, 17 nt, Human
ccccacugccugcccac

SEQ ID NO: 2136080 - RNA, 12 nt, Human
ccccacuggcug

SEQ ID NO: 2136081 - RNA, 14 nt, Human
ccccacuggcugug

SEQ ID NO: 2136082 - RNA, 20 nt, Human
ccccacuggcugugggcucc

SEQ ID NO: 2136083 - RNA, 21 nt, Human
ccccacuggcugugggcuccc

SEQ ID NO: 2136084 - RNA, 22 nt, Human
ccccacuggcugugggcucccu

SEQ ID NO: 2136085 - RNA, 23 nt, Human
ccccacuggcugugggcucccuu

SEQ ID NO: 2136086 - RNA, 14 nt, Human
ccccacuggggaaa

SEQ ID NO: 2136087 - RNA, 22 nt, Human
ccccacuggggaaauaacagcu

SEQ ID NO: 2136088 - RNA, 12 nt, Human
ccccaggaagcc

SEQ ID NO: 2136089 - RNA, 23 nt, Human
ccccaggaagccgugcccugccc

SEQ ID NO: 2136090 - RNA, 13 nt, Human
ccccagcucugcu

SEQ ID NO: 2136091 - RNA, 14 nt, Human
ccccagcucugcuu

SEQ ID NO: 2136092 - RNA, 16 nt, Human
ccccagcucugcuugc

SEQ ID NO: 2136093 - RNA, 23 nt, Human
cccccaaccaaguggcucccaca

SEQ ID NO: 2136094 - RNA, 13 nt, Human
cccccaagccugc

SEQ ID NO: 2136095 - RNA, 14 nt, Human
cccccaagccugca

SEQ ID NO: 2136096 - RNA, 11 nt, Human
ccccaggcagg

SEQ ID NO: 2136097 - RNA, 14 nt, Human
ccccaggcaggcug

SEQ ID NO: 2136098 - RNA, 18 nt, Human
ccccaggcaggcugugcg

SEQ ID NO: 2136099 - RNA, 23 nt, Human
ccccaggcaggcugugcgcugac

SEQ ID NO: 2136100 - RNA, 12 nt, Human
cccccagcccug

SEQ ID NO: 2136101 - RNA, 14 nt, Human
cccccagcccugug

SEQ ID NO: 2136102 - RNA, 13 nt, Human
cccccagcccugu

SEQ ID NO: 2136103 - RNA, 11 nt, Human
cccccagcugu

SEQ ID NO: 2136104 - RNA, 14 nt, Human
cccccagcuguggg

SEQ ID NO: 2136105 - RNA, 16 nt, Human
cccccaaggggcaguc

SEQ ID NO: 2136106 - RNA, 23 nt, Human
cccccaaggggcagucuggaggg

SEQ ID NO: 2136107 - RNA, 19 nt, Human
cccccauccuccccuuccc

SEQ ID NO: 2136108 - RNA, 16 nt, Human
cccccaggcugcugga

SEQ ID NO: 2136109 - RNA, 12 nt, Human
ccccccacucuc

SEQ ID NO: 2136110 - RNA, 12 nt, Human
ccccccacugca

SEQ ID NO: 2136111 - RNA, 18 nt, Human
ccccccagaaccuguccu

SEQ ID NO: 2136112 - RNA, 11 nt, Human
ccccccacucu

SEQ ID NO: 2136113 - RNA, 21 nt, Human
ccccgucaccaucucaggcca

SEQ ID NO: 2136114 - RNA, 14 nt, Human
ccccgucucuacua

SEQ ID NO: 2136115 - RNA, 10 nt, Human
cccccugggc

SEQ ID NO: 2136116 - RNA, 11 nt, Human
cccccugggcu

SEQ ID NO: 2136117 - RNA, 18 nt, Human
ccccggugugcggugcau

SEQ ID NO: 2136118 - RNA, 19 nt, Human
cccccugccccuucuacac

SEQ ID NO: 2136119 - RNA, 23 nt, Human
cccccugccccuucuacacucuc

SEQ ID NO: 2136120 - RNA, 14 nt, Human
cccccucucccagu

SEQ ID NO: 2136121 - RNA, 12 nt, Human
cccccuccuucc

SEQ ID NO: 2136122 - RNA, 18 nt, Human
cccccuccuucccagcug

SEQ ID NO: 2136123 - RNA, 19 nt, Human
cccccuccuucccagcugc

SEQ ID NO: 2136124 - RNA, 21 nt, Human
cccccuccuucccagcugccc

SEQ ID NO: 2136125 - RNA, 13 nt, Human
cccccgagcuggg

SEQ ID NO: 2136126 - RNA, 15 nt, Human
cccccgagcuggggg

SEQ ID NO: 2136127 - RNA, 11 nt, Human
cccccgccccg

SEQ ID NO: 2136128 - RNA, 18 nt, Human
cccccgccccgccccaca

SEQ ID NO: 2136129 - RNA, 21 nt, Human
cccccgagcugggggccauga

SEQ ID NO: 2136130 - RNA, 22 nt, Human
cccugugguuuccaaggagcug

SEQ ID NO: 2136131 - RNA, 17 nt, Human
cccuguacaauauuuaa

SEQ ID NO: 2136132 - RNA, 18 nt, Human
cccuguacaauauuuaaa

SEQ ID NO: 2136133 - RNA, 20 nt, Human
cccuguccccucccccuucc

SEQ ID NO: 2136134 - RNA, 21 nt, Human
ccccucccccaacccccaccc

SEQ ID NO: 2136135 - RNA, 16 nt, Human
ccccucccccaacccc

SEQ ID NO: 2136136 - RNA, 18 nt, Human
ccccucccccaaccccca

SEQ ID NO: 2136137 - RNA, 19 nt, Human
ccccuccccuaaugccugc

SEQ ID NO: 2136138 - RNA, 15 nt, Human
ccccucccccaaccc

SEQ ID NO: 2136139 - RNA, 15 nt, Human
ccccuccccagggga

SEQ ID NO: 2136140 - RNA, 11 nt, Human
cccccagugug

SEQ ID NO: 2136141 - RNA, 14 nt, Human
ccccucccagggcc

SEQ ID NO: 2136142 - RNA, 19 nt, Human
cccugguggcagugggagc

SEQ ID NO: 2136143 - RNA, 16 nt, Human
cccugguggcaguggg

SEQ ID NO: 2136144 - RNA, 15 nt, Human
cccugguggcagugg

SEQ ID NO: 2136145 - RNA, 21 nt, Human
cccugguggcagugggagcug

SEQ ID NO: 2136146 - RNA, 17 nt, Human
ccccgugggccauggca

SEQ ID NO: 2136147 - RNA, 20 nt, Human
ccccgucugggguucagccc

SEQ ID NO: 2136148 - RNA, 21 nt, Human
ccccgucugggguucagcccc

SEQ ID NO: 2136149 - RNA, 22 nt, Human
ccccgucugggguucagccccu

SEQ ID NO: 2136150 - RNA, 15 nt, Human
ccccgugcagacugg

SEQ ID NO: 2136151 - RNA, 19 nt, Human
ccccgugcagacuggaggg

SEQ ID NO: 2136152 - RNA, 18 nt, Human
ccccuaaugccugcggag

SEQ ID NO: 2136153 - RNA, 12 nt, Human
ccccucccuacc

SEQ ID NO: 2136154 - RNA, 14 nt, Human
ccccucccuaccuc

SEQ ID NO: 2136155 - RNA, 15 nt, Human
ccccucccuaccuca

SEQ ID NO: 2136156 - RNA, 21 nt, Human
ccgaguggauagaugcccugc

SEQ ID NO: 2136157 - RNA, 22 nt, Human
ccgaguggauagaugcccugcu

SEQ ID NO: 2136158 - RNA, 22 nt, Human
ccgagucucuucuccacuggau

SEQ ID NO: 2136159 - RNA, 16 nt, Human
ccgaggguccuggcuc

SEQ ID NO: 2136160 - RNA, 17 nt, Human
ccgaggguccuggcucc

SEQ ID NO: 2136161 - RNA, 21 nt, Human
ccgagucucuucuccacugga

SEQ ID NO: 2136162 - RNA, 14 nt, Human
ccgccccgccccac

SEQ ID NO: 2136163 - RNA, 19 nt, Human
ccgaugcuccagccaaccc

SEQ ID NO: 2136164 - RNA, 22 nt, Human
ccgaugcuccagccaaccccug

SEQ ID NO: 2136165 - RNA, 14 nt, Human
ccgaugcuccagcc

SEQ ID NO: 2136166 - RNA, 15 nt, Human
ccgaugcuccagcca

SEQ ID NO: 2136167 - RNA, 19 nt, Human
ccgcccgagguggcugccu

SEQ ID NO: 2136168 - RNA, 18 nt, Human
ccgagaucacgccacugc

SEQ ID NO: 2136169 - RNA, 13 nt, Human
ccgagagccugcu

SEQ ID NO: 2136170 - RNA, 17 nt, Human
ccgagcccuacuuccag

SEQ ID NO: 2136171 - RNA, 17 nt, Human
ccgaggccuucucugaa

SEQ ID NO: 2136172 - RNA, 17 nt, Human
ccgaggcuggagcuggc

SEQ ID NO: 2136173 - RNA, 14 nt, Human
ccgaggcuggagcu

SEQ ID NO: 2136174 - RNA, 13 nt, Human
ccgagaagaacag

SEQ ID NO: 2136175 - RNA, 13 nt, Human
ccgagaagcaaga

SEQ ID NO: 2136176 - RNA, 17 nt, Human
ccgagaaggaagccucc

SEQ ID NO: 2136177 - RNA, 19 nt, Human
ccgagaagcaagaaagaaa

SEQ ID NO: 2136178 - RNA, 16 nt, Human
cccuuuuguuccccag

SEQ ID NO: 2136179 - RNA, 21 nt, Human
cccuuuuguuccccagcccua

SEQ ID NO: 2136180 - RNA, 20 nt, Human
cccuuuuggguuucugcccu

SEQ ID NO: 2136181 - RNA, 16 nt, Human
cccuuuuuacuccccu

SEQ ID NO: 2136182 - RNA, 23 nt, Human
cccuuuuuacuccccuugagcug

SEQ ID NO: 2136183 - RNA, 18 nt, Human
cccuuuuuacuccccuug

SEQ ID NO: 2136184 - RNA, 16 nt, Human
cccuuuucuacaguua

SEQ ID NO: 2136185 - RNA, 16 nt, Human
cccuuuuggguuucug

SEQ ID NO: 2136186 - RNA, 22 nt, Human
cccuuuuggcccccgagcuggg

SEQ ID NO: 2136187 - RNA, 14 nt, Human
cccuuuuggccccc

SEQ ID NO: 2136188 - RNA, 20 nt, Human
cccuuuuggcccccgagcug

SEQ ID NO: 2136189 - RNA, 13 nt, Human
cccuuugcuccac

SEQ ID NO: 2136190 - RNA, 16 nt, Human
cccuuucuuggccagu

SEQ ID NO: 2136191 - RNA, 16 nt, Human
cccuuugggaggcuga

SEQ ID NO: 2136192 - RNA, 20 nt, Human
cccuuugggaggcugaggcg

SEQ ID NO: 2136193 - RNA, 14 nt, Human
cccuuucuuggcca

SEQ ID NO: 2136194 - RNA, 15 nt, Human
cccuuucuuggccag

SEQ ID NO: 2136195 - RNA, 17 nt, Human
cccuuucuuggccaguu

SEQ ID NO: 2136196 - RNA, 23 nt, Human
cccuugugcgugggugaagccgc

SEQ ID NO: 2136197 - RNA, 13 nt, Human
cccuuuccuucca

SEQ ID NO: 2136198 - RNA, 15 nt, Human
cccuuuccuuccauc

SEQ ID NO: 2136199 - RNA, 18 nt, Human
cccuuuccuuccaucccu

SEQ ID NO: 2136200 - RNA, 18 nt, Human
cccuuuccuuccuucccu

SEQ ID NO: 2136201 - RNA, 21 nt, Human
cccuuuccuuccuucccuggc

SEQ ID NO: 2136202 - RNA, 13 nt, Human
cccuuuccugcgg

SEQ ID NO: 2136203 - RNA, 19 nt, Human
cccuuggccugucucaucc

SEQ ID NO: 2136204 - RNA, 15 nt, Human
cccuuggcucaaucc

SEQ ID NO: 2136205 - RNA, 16 nt, Human
cccuugcagcuaguuu

SEQ ID NO: 2136206 - RNA, 19 nt, Human
cccuugcagcuaguuuucu

SEQ ID NO: 2136207 - RNA, 19 nt, Human
cccuugcaguucagcacca

SEQ ID NO: 2136208 - RNA, 21 nt, Human
cccuugcaguucagcaccacc

SEQ ID NO: 2136209 - RNA, 23 nt, Human
cccuugcaguucagcaccacccu

SEQ ID NO: 2136210 - RNA, 20 nt, Human
cccuuccucuccacugccuu

SEQ ID NO: 2136211 - RNA, 17 nt, Human
cccuuccucuccacugc

SEQ ID NO: 2136212 - RNA, 16 nt, Human
cccuuccucuccacug

SEQ ID NO: 2136213 - RNA, 13 nt, Human
cccuuccucucca

SEQ ID NO: 2136214 - RNA, 17 nt, Human
cccuuaccccuuagccu

SEQ ID NO: 2136215 - RNA, 22 nt, Human
cccuuaccccuuagccucccug

SEQ ID NO: 2136216 - RNA, 19 nt, Human
cccuuaccucggugccuuc

SEQ ID NO: 2136217 - RNA, 12 nt, Human
ccuaccugguaa

SEQ ID NO: 2136218 - RNA, 21 nt, Human
ccuaccugauuggugcaaccc

SEQ ID NO: 2136219 - RNA, 15 nt, Human
ccuaccuucaaagcu

SEQ ID NO: 2136220 - RNA, 16 nt, Human
ccuaccuucaaagcug

SEQ ID NO: 2136221 - RNA, 14 nt, Human
ccuaccccaccacg

SEQ ID NO: 2136222 - RNA, 13 nt, Human
ccuaccccaccac

SEQ ID NO: 2136223 - RNA, 11 nt, Human
ccuaccccacc

SEQ ID NO: 2136224 - RNA, 12 nt, Human
ccuaaagagaua

SEQ ID NO: 2136225 - RNA, 19 nt, Human
ccuaaaguagacuucauuu

SEQ ID NO: 2136226 - RNA, 23 nt, Human
ccguggcuucccgcucagcccuc

SEQ ID NO: 2136227 - RNA, 19 nt, Human
ccgugggcacugaaggcuu

SEQ ID NO: 2136228 - RNA, 15 nt, Human
ccgugggccauggca

SEQ ID NO: 2136229 - RNA, 21 nt, Human
ccguggcuucccgcucagccc

SEQ ID NO: 2136230 - RNA, 15 nt, Human
ccguggcuucccgcu

SEQ ID NO: 2136231 - RNA, 15 nt, Human
ccguggcuuugguuu

SEQ ID NO: 2136232 - RNA, 17 nt, Human
ccgggcacagcuguggu

SEQ ID NO: 2136233 - RNA, 19 nt, Human
ccguuuccagguguuuaua

SEQ ID NO: 2136234 - RNA, 14 nt, Human
ccuaaaaacacaga

SEQ ID NO: 2136235 - RNA, 12 nt, Human
ccuaaaacaaau

SEQ ID NO: 2136236 - RNA, 17 nt, Human
ccgugccuucagcucua

SEQ ID NO: 2136237 - RNA, 16 nt, Human
ccgugccuucagcucu

SEQ ID NO: 2136238 - RNA, 15 nt, Human
ccgugccuucagcuc

SEQ ID NO: 2136239 - RNA, 14 nt, Human
ccgugccuucagcu

SEQ ID NO: 2136240 - RNA, 19 nt, Human
ccgggccuggagaacuaga

SEQ ID NO: 2136241 - RNA, 20 nt, Human
ccgggcacucagaagacacu

SEQ ID NO: 2136242 - RNA, 22 nt, Human
ccggcugcuuuucccuaagcca

SEQ ID NO: 2136243 - RNA, 17 nt, Human
ccggcucuggcucuccc

SEQ ID NO: 2136244 - RNA, 15 nt, Human
ccgggcacucagaag

SEQ ID NO: 2136245 - RNA, 23 nt, Human
ccgcuuucuacccagcgagcccu

SEQ ID NO: 2136246 - RNA, 13 nt, Human
ccggaagcuccug

SEQ ID NO: 2136247 - RNA, 15 nt, Human
ccggaagcuccuggu

SEQ ID NO: 2136248 - RNA, 19 nt, Human
ccggaauccuguccucagc

SEQ ID NO: 2136249 - RNA, 20 nt, Human
ccggaauccuguccucagcu

SEQ ID NO: 2136250 - RNA, 22 nt, Human
ccggaauccuguccucagcuuc

SEQ ID NO: 2136251 - RNA, 15 nt, Human
ccgcuucugccugca

SEQ ID NO: 2136252 - RNA, 18 nt, Human
ccgcuguucacccacagg

SEQ ID NO: 2136253 - RNA, 19 nt, Human
ccgcuguucacccacaggg

SEQ ID NO: 2136254 - RNA, 21 nt, Human
ccgcuguucacccacagggcu

SEQ ID NO: 2136255 - RNA, 14 nt, Human
ccgcuguucaccca

SEQ ID NO: 2136256 - RNA, 15 nt, Human
ccgcuguucacccac

SEQ ID NO: 2136257 - RNA, 16 nt, Human
ccgcuguucacccaca

SEQ ID NO: 2136258 - RNA, 16 nt, Human
ccgcccuguacccucu

SEQ ID NO: 2136259 - RNA, 17 nt, Human
ccuaucagaaguuucuc

SEQ ID NO: 2136260 - RNA, 17 nt, Human
ccuaucaccuccccucc

SEQ ID NO: 2136261 - RNA, 18 nt, Human
ccuaucaccuccccuccu

SEQ ID NO: 2136262 - RNA, 17 nt, Human
ccuauggggauggucca

SEQ ID NO: 2136263 - RNA, 12 nt, Human
ccuauccaccca

SEQ ID NO: 2136264 - RNA, 13 nt, Human
ccuauccacccag

SEQ ID NO: 2136265 - RNA, 14 nt, Human
ccuauccacccagc

SEQ ID NO: 2136266 - RNA, 15 nt, Human
ccuagagcacacugu

SEQ ID NO: 2136267 - RNA, 15 nt, Human
ccuaucaccuccccu

SEQ ID NO: 2136268 - RNA, 16 nt, Human
ccuaucaccuccccuc

SEQ ID NO: 2136269 - RNA, 20 nt, Human
ccucaaugugaaucagaccc

SEQ ID NO: 2136270 - RNA, 21 nt, Human
ccucaaugugaaucagacccu

SEQ ID NO: 2136271 - RNA, 22 nt, Human
ccucaaugugaaucagacccua

SEQ ID NO: 2136272 - RNA, 23 nt, Human
ccucacacacaaugugucugaga

SEQ ID NO: 2136273 - RNA, 22 nt, Human
ccuaugguauaaugguugacug

SEQ ID NO: 2136274 - RNA, 15 nt, Human
ccucaccccacugug

SEQ ID NO: 2136275 - RNA, 16 nt, Human
ccucaccccugcccug

SEQ ID NO: 2136276 - RNA, 17 nt, Human
ccucaccccugcccugg

SEQ ID NO: 2136277 - RNA, 17 nt, Human
ccucaccccgucugggg

SEQ ID NO: 2136278 - RNA, 13 nt, Human
ccucaccccugcc

SEQ ID NO: 2136279 - RNA, 14 nt, Human
ccucaccccugccc

SEQ ID NO: 2136280 - RNA, 16 nt, Human
ccucaccccgucuggg

SEQ ID NO: 2136281 - RNA, 12 nt, Human
ccucaccccacu

SEQ ID NO: 2136282 - RNA, 14 nt, Human
ccucacgcaccucc

SEQ ID NO: 2136283 - RNA, 22 nt, Human
ccucaccuugcaacacacagac

SEQ ID NO: 2136284 - RNA, 17 nt, Human
ccucacgcaccucccau

SEQ ID NO: 2136285 - RNA, 17 nt, Human
ccucaccuuucccaucu

SEQ ID NO: 2136286 - RNA, 19 nt, Human
ccucaccuugcaacacaca

SEQ ID NO: 2136287 - RNA, 21 nt, Human
ccucaccuugcaacacacaga

SEQ ID NO: 2136288 - RNA, 18 nt, Human
ccucaccugggcaccugg

SEQ ID NO: 2136289 - RNA, 19 nt, Human
ccucaccugggcaccuggg

SEQ ID NO: 2136290 - RNA, 22 nt, Human
ccucaccugggcaccuggggag

SEQ ID NO: 2136291 - RNA, 17 nt, Human
ccucaccuugcaacaca

SEQ ID NO: 2136292 - RNA, 18 nt, Human
ccucaccuugcaacacac

SEQ ID NO: 2136293 - RNA, 18 nt, Human
ccucaccccugcccuggg

SEQ ID NO: 2136294 - RNA, 19 nt, Human
ccucacccgaggcugccca

SEQ ID NO: 2136295 - RNA, 21 nt, Human
ccucacccgaggcugcccacu

SEQ ID NO: 2136296 - RNA, 17 nt, Human
ccucaccucugccauuu

SEQ ID NO: 2136297 - RNA, 12 nt, Human
ccucaccucugg

SEQ ID NO: 2136298 - RNA, 13 nt, Human
ccucaccucugga

SEQ ID NO: 2136299 - RNA, 18 nt, Human
ccucaccucuggacuggc

SEQ ID NO: 2136300 - RNA, 20 nt, Human
ccucaccucuggacuggcua

SEQ ID NO: 2136301 - RNA, 22 nt, Human
ccucaccucuggacuggcuaga

SEQ ID NO: 2136302 - RNA, 14 nt, Human
ccucaccugggcac

SEQ ID NO: 2136303 - RNA, 18 nt, Human
cuggucucaaacuccuga

SEQ ID NO: 2136304 - RNA, 14 nt, Human
cuggugcugcugcu

SEQ ID NO: 2136305 - RNA, 20 nt, Human
cuggugcuggauauuuucaa

SEQ ID NO: 2136306 - RNA, 12 nt, Human
cugguggacagu

SEQ ID NO: 2136307 - RNA, 23 nt, Human
cugguggcagugggagcugccug

SEQ ID NO: 2136308 - RNA, 19 nt, Human
cugguggcagugggagcug

SEQ ID NO: 2136309 - RNA, 19 nt, Human
cugguggacaguccuggga

SEQ ID NO: 2136310 - RNA, 21 nt, Human
cugguggacaguccugggaga

SEQ ID NO: 2136311 - RNA, 15 nt, Human
cugguggacaguccu

SEQ ID NO: 2136312 - RNA, 16 nt, Human
cugguggacaguccug

SEQ ID NO: 2136313 - RNA, 17 nt, Human
cugguggacaguccugg

SEQ ID NO: 2136314 - RNA, 18 nt, Human
cugguggacaguccuggg

SEQ ID NO: 2136315 - RNA, 17 nt, Human
cuggugggugaaagaaa

SEQ ID NO: 2136316 - RNA, 19 nt, Human
cuggugggugaaagaaauc

SEQ ID NO: 2136317 - RNA, 20 nt, Human
cuggugggugaaagaaauca

SEQ ID NO: 2136318 - RNA, 22 nt, Human
cuggugggugaaagaaaucaug

SEQ ID NO: 2136319 - RNA, 12 nt, Human
cuggugggccuc

SEQ ID NO: 2136320 - RNA, 17 nt, Human
cuggugggcaccaagag

SEQ ID NO: 2136321 - RNA, 21 nt, Human
cuggugggcaccaagagccaa

SEQ ID NO: 2136322 - RNA, 22 nt, Human
cuggugggcaccaagagccaau

SEQ ID NO: 2136323 - RNA, 17 nt, Human
cuggugggccuccucug

SEQ ID NO: 2136324 - RNA, 15 nt, Human
cugguggccccugcc

SEQ ID NO: 2136325 - RNA, 16 nt, Human
cugguggccccugccu

SEQ ID NO: 2136326 - RNA, 24 nt, Human
cuggugggaucugugcccagagau

SEQ ID NO: 2136327 - RNA, 19 nt, Human
cugguccuuccaggccccc

SEQ ID NO: 2136328 - RNA, 16 nt, Human
cugguccuuccaggcc

SEQ ID NO: 2136329 - RNA, 17 nt, Human
cugguccuuccaggccc

SEQ ID NO: 2136330 - RNA, 18 nt, Human
cuggucccacucagucca

SEQ ID NO: 2136331 - RNA, 15 nt, Human
cuggucccacucagu

SEQ ID NO: 2136332 - RNA, 15 nt, Human
cuggguucugggugg

SEQ ID NO: 2136333 - RNA, 16 nt, Human
cuggguucuggguggu

SEQ ID NO: 2136334 - RNA, 18 nt, Human
cuggguuggaaaacagua

SEQ ID NO: 2136335 - RNA, 13 nt, Human
cuggguuggaaaa

SEQ ID NO: 2136336 - RNA, 13 nt, Human
cuggguuggaggg

SEQ ID NO: 2136337 - RNA, 20 nt, Human
cugggggccaugagcuccag

SEQ ID NO: 2136338 - RNA, 13 nt, Human
cugggcucaagca

SEQ ID NO: 2136339 - RNA, 23 nt, Human
cugggcuucaguggcagcugcuu

SEQ ID NO: 2136340 - RNA, 22 nt, Human
cugggcuucaguggcagcugcu

SEQ ID NO: 2136341 - RNA, 21 nt, Human
cugggcuucaguggcagcugc

SEQ ID NO: 2136342 - RNA, 20 nt, Human
cugggcuucaguggcagcug

SEQ ID NO: 2136343 - RNA, 19 nt, Human
cugggcuucaguggcagcu

SEQ ID NO: 2136344 - RNA, 17 nt, Human
cugggcuucaguggcag

SEQ ID NO: 2136345 - RNA, 18 nt, Human
cugggcuucaguggcagc

SEQ ID NO: 2136346 - RNA, 23 nt, Human
cugggcguaguggcucacaccug

SEQ ID NO: 2136347 - RNA, 24 nt, Human
cugggcucaagcaauccuccugag

SEQ ID NO: 2136348 - RNA, 17 nt, Human
cugggcucaagcagucu

SEQ ID NO: 2136349 - RNA, 13 nt, Human
cugggcgacagag

SEQ ID NO: 2136350 - RNA, 18 nt, Human
cugggggccucagugcca

SEQ ID NO: 2136351 - RNA, 22 nt, Human
cugggggccaugagcuccagac

SEQ ID NO: 2136352 - RNA, 23 nt, Human
cugggggccaugagcuccagacc

SEQ ID NO: 2136353 - RNA, 12 nt, Human
cugggggccuca

SEQ ID NO: 2136354 - RNA, 13 nt, Human
cugggggccucac

SEQ ID NO: 2136355 - RNA, 14 nt, Human
cugggggccucacu

SEQ ID NO: 2136356 - RNA, 16 nt, Human
cugggggccucacucc

SEQ ID NO: 2136357 - RNA, 17 nt, Human
cugggggccucagugcc

SEQ ID NO: 2136358 - RNA, 13 nt, Human
cugggggccucag

SEQ ID NO: 2136359 - RNA, 20 nt, Human
cuggguacuuguggacacag

SEQ ID NO: 2136360 - RNA, 23 nt, Human
cuggguacuuguggacacagcuc

SEQ ID NO: 2136361 - RNA, 21 nt, Human
cuggguacuuguggacacagc

SEQ ID NO: 2136362 - RNA, 12 nt, Human
cugggccccucc

SEQ ID NO: 2136363 - RNA, 16 nt, Human
cugggccccucccuac

SEQ ID NO: 2136364 - RNA, 19 nt, Human
cugggccccucccuaccuc

SEQ ID NO: 2136365 - RNA, 20 nt, Human
cugggccccucccuaccuca

SEQ ID NO: 2136366 - RNA, 22 nt, Human
cugggccccucccuaccucaac

SEQ ID NO: 2136367 - RNA, 20 nt, Human
cugggcaaugugauaaaacc

SEQ ID NO: 2136368 - RNA, 15 nt, Human
cugggauagaggggu

SEQ ID NO: 2136369 - RNA, 12 nt, Human
cugggagugagc

SEQ ID NO: 2136370 - RNA, 13 nt, Human
cugggagugagcu

SEQ ID NO: 2136371 - RNA, 16 nt, Human
cugggagugagcuggu

SEQ ID NO: 2136372 - RNA, 20 nt, Human
cugggagggcccacuucagg

SEQ ID NO: 2136373 - RNA, 22 nt, Human
cugggagggguuuucgaagcuc

SEQ ID NO: 2136374 - RNA, 13 nt, Human
cugggagggccca

SEQ ID NO: 2136375 - RNA, 23 nt, Human
cugggagggauagaggggggcug

SEQ ID NO: 2136376 - RNA, 18 nt, Human
cugggaggucaaggcugc

SEQ ID NO: 2136377 - RNA, 15 nt, Human
cugggaggaagcagg

SEQ ID NO: 2136378 - RNA, 13 nt, Human
cugggaggaagca

SEQ ID NO: 2136379 - RNA, 14 nt, Human
cugggaggaagcag

SEQ ID NO: 2136380 - RNA, 23 nt, Human
cugggaaauggcuugaagccaag

SEQ ID NO: 2136381 - RNA, 19 nt, Human
cugggaaccuuccugucuu

SEQ ID NO: 2136382 - RNA, 18 nt, Human
cugggaacucccaagaac

SEQ ID NO: 2136383 - RNA, 19 nt, Human
cugggaacucccaagaaca

SEQ ID NO: 2136384 - RNA, 21 nt, Human
cugggaacucccaagaacagc

SEQ ID NO: 2136385 - RNA, 23 nt, Human
cugggaacucccaagaacagcag

SEQ ID NO: 2136386 - RNA, 17 nt, Human
cugggaagauaggcucu

SEQ ID NO: 2136387 - RNA, 13 nt, Human
cugggagcucugc

SEQ ID NO: 2136388 - RNA, 19 nt, Human
cugggaaggcuacucaccu

SEQ ID NO: 2136389 - RNA, 20 nt, Human
cugggaaggcuacucaccuu

SEQ ID NO: 2136390 - RNA, 22 nt, Human
cugggaaggcuacucaccuuga

SEQ ID NO: 2136391 - RNA, 24 nt, Human
cugggaagauaggcucugcacaga

SEQ ID NO: 2136392 - RNA, 18 nt, Human
cugggaagauaggcucug

SEQ ID NO: 2136393 - RNA, 20 nt, Human
cugggaagauaggcucugca

SEQ ID NO: 2136394 - RNA, 21 nt, Human
cugggaagauaggcucugcac

SEQ ID NO: 2136395 - RNA, 22 nt, Human
cugggaagauaggcucugcaca

SEQ ID NO: 2136396 - RNA, 15 nt, Human
cugggagcucugcag

SEQ ID NO: 2136397 - RNA, 14 nt, Human
cugggagcucugca

SEQ ID NO: 2136398 - RNA, 12 nt, Human
cugggaaggggu

SEQ ID NO: 2136399 - RNA, 13 nt, Human
cugggaggaaaag

SEQ ID NO: 2136400 - RNA, 22 nt, Human
cugggaggaaaagaaaagaggg

SEQ ID NO: 2136401 - RNA, 14 nt, Human
cuggcugggcaugg

SEQ ID NO: 2136402 - RNA, 15 nt, Human
cuggcugggcaugga

SEQ ID NO: 2136403 - RNA, 17 nt, Human
cuggcugggcauggacg

SEQ ID NO: 2136404 - RNA, 19 nt, Human
cuggcugccuuagaaccuu

SEQ ID NO: 2136405 - RNA, 14 nt, Human
cuggcugccuuaga

SEQ ID NO: 2136406 - RNA, 19 nt, Human
cuggcuguuggcugggggc

SEQ ID NO: 2136407 - RNA, 22 nt, Human
cuggcuggguggcaccagcagc

SEQ ID NO: 2136408 - RNA, 21 nt, Human
cuggcuggguggcaccagcag

SEQ ID NO: 2136409 - RNA, 16 nt, Human
cuggcugggggccuca

SEQ ID NO: 2136410 - RNA, 19 nt, Human
cuggcugggggccucacuc

SEQ ID NO: 2136411 - RNA, 22 nt, Human
cuggcugggggccucacuccag

SEQ ID NO: 2136412 - RNA, 14 nt, Human
cuggcuucacagau

SEQ ID NO: 2136413 - RNA, 20 nt, Human
cuggcuguuggcugggggcc

SEQ ID NO: 2136414 - RNA, 22 nt, Human
cuggcuuuucacugcuggcugc

SEQ ID NO: 2136415 - RNA, 20 nt, Human
cuggcuuuucacugcuggcu

SEQ ID NO: 2136416 - RNA, 19 nt, Human
cuggcuuuucacugcuggc

SEQ ID NO: 2136417 - RNA, 17 nt, Human
cuggcuuuucacugcug

SEQ ID NO: 2136418 - RNA, 16 nt, Human
cugggaaauaagagag

SEQ ID NO: 2136419 - RNA, 17 nt, Human
cugggaaauaagagaga

SEQ ID NO: 2136420 - RNA, 16 nt, Human
cuggcuuuucacugcu

SEQ ID NO: 2136421 - RNA, 15 nt, Human
cuggcuuuucacugc

SEQ ID NO: 2136422 - RNA, 14 nt, Human
cuggcuucuggagc

SEQ ID NO: 2136423 - RNA, 15 nt, Human
cuggcuucuggagcc

SEQ ID NO: 2136424 - RNA, 16 nt, Human
cuggcuucuggagccc

SEQ ID NO: 2136425 - RNA, 20 nt, Human
cuggcuucuggagcccuugg

SEQ ID NO: 2136426 - RNA, 20 nt, Human
cuggcacugacugggcauag

SEQ ID NO: 2136427 - RNA, 16 nt, Human
cuggccagaugcacca

SEQ ID NO: 2136428 - RNA, 20 nt, Human
cuggccagaugcaccagccc

SEQ ID NO: 2136429 - RNA, 19 nt, Human
cuggccagaugcaccagcc

SEQ ID NO: 2136430 - RNA, 18 nt, Human
cuggccagaugcaccagc

SEQ ID NO: 2136431 - RNA, 17 nt, Human
cuggccagaugcaccag

SEQ ID NO: 2136432 - RNA, 21 nt, Human
cuggccagaugcaccagcccu

SEQ ID NO: 2136433 - RNA, 22 nt, Human
cuggccagaugcaccagcccuu

SEQ ID NO: 2136434 - RNA, 17 nt, Human
cuggccaacaugguaaa

SEQ ID NO: 2136435 - RNA, 22 nt, Human
cuggccucaagugauucuccug

SEQ ID NO: 2136436 - RNA, 11 nt, Human
cuggccucugu

SEQ ID NO: 2136437 - RNA, 14 nt, Human
cuggccucugucau

SEQ ID NO: 2136438 - RNA, 17 nt, Human
cuggccucugucauauc

SEQ ID NO: 2136439 - RNA, 12 nt, Human
cuggcccacugc

SEQ ID NO: 2136440 - RNA, 13 nt, Human
cuggcccacugca

SEQ ID NO: 2136441 - RNA, 21 nt, Human
cuggcaaugaaaaauucucag

SEQ ID NO: 2136442 - RNA, 22 nt, Human
cuggcaaugaaaaauucucagu

SEQ ID NO: 2136443 - RNA, 18 nt, Human
cuggcaaagacagaagcc

SEQ ID NO: 2136444 - RNA, 21 nt, Human
cuggcaaagcagaaaauugua

SEQ ID NO: 2136445 - RNA, 16 nt, Human
cuggcaaacaugaaaa

SEQ ID NO: 2136446 - RNA, 22 nt, Human
cuggcaaacaugaaaaaucggc

SEQ ID NO: 2136447 - RNA, 19 nt, Human
cuggcaaacuucagacuga

SEQ ID NO: 2136448 - RNA, 12 nt, Human
cuggcacagucu

SEQ ID NO: 2136449 - RNA, 17 nt, Human
cuggcacagggcagugg

SEQ ID NO: 2136450 - RNA, 23 nt, Human
cuggcacuauaauguaagcucua

SEQ ID NO: 2136451 - RNA, 21 nt, Human
cuggaggccgggugcucaggg

SEQ ID NO: 2136452 - RNA, 12 nt, Human
cuggaggccucu

SEQ ID NO: 2136453 - RNA, 13 nt, Human
cuggaggccucug

SEQ ID NO: 2136454 - RNA, 14 nt, Human
cuggaggccucugg

SEQ ID NO: 2136455 - RNA, 15 nt, Human
cuggaggccucuggg

SEQ ID NO: 2136456 - RNA, 16 nt, Human
cuggaggccucugggc

SEQ ID NO: 2136457 - RNA, 17 nt, Human
cuggaggccucugggcc

SEQ ID NO: 2136458 - RNA, 18 nt, Human
cuggaggccucugggccu

SEQ ID NO: 2136459 - RNA, 21 nt, Human
cuggaggccucugggccuccu

SEQ ID NO: 2136460 - RNA, 22 nt, Human
cuggaggccucugggccuccuc

SEQ ID NO: 2136461 - RNA, 21 nt, Human
cuggauggaggaaaaccaagc

SEQ ID NO: 2136462 - RNA, 20 nt, Human
cuggauguuuuuucccuguu

SEQ ID NO: 2136463 - RNA, 15 nt, Human
cuggaaugcaguggu

SEQ ID NO: 2136464 - RNA, 14 nt, Human
cuggaaugcagugg

SEQ ID NO: 2136465 - RNA, 16 nt, Human
cuggaaguuauuuauu

SEQ ID NO: 2136466 - RNA, 23 nt, Human
cuggaaguuauuuauuuuuuaau

SEQ ID NO: 2136467 - RNA, 17 nt, Human
cuggaaguuuugcauuu

SEQ ID NO: 2136468 - RNA, 20 nt, Human
cuggaaguuuugcauuuaug

SEQ ID NO: 2136469 - RNA, 23 nt, Human
cuggaagcauguaggagaaucca

SEQ ID NO: 2136470 - RNA, 18 nt, Human
cuggaagcacagcuucau

SEQ ID NO: 2136471 - RNA, 15 nt, Human
cuggaagcacagcuu

SEQ ID NO: 2136472 - RNA, 21 nt, Human
cugcuuuuccuuggggcaggc

SEQ ID NO: 2136473 - RNA, 22 nt, Human
cugcuuuuccuuggggcaggca

SEQ ID NO: 2136474 - RNA, 23 nt, Human
cugcuuuuccuuggggcaggcag

SEQ ID NO: 2136475 - RNA, 18 nt, Human
cugcuuugggcugcccug

SEQ ID NO: 2136476 - RNA, 20 nt, Human
cugcuuugggcugcccuggu

SEQ ID NO: 2136477 - RNA, 19 nt, Human
cugcuuugggcugcccugg

SEQ ID NO: 2136478 - RNA, 18 nt, Human
cugcuuuucccuaagcca

SEQ ID NO: 2136479 - RNA, 21 nt, Human
cugcuuuucccuaagccaagg

SEQ ID NO: 2136480 - RNA, 15 nt, Human
cugcuuuucccuaag

SEQ ID NO: 2136481 - RNA, 23 nt, Human
cugcuuugggcugcccuggugcu

SEQ ID NO: 2136482 - RNA, 22 nt, Human
cugcuuugggcugcccuggugc

SEQ ID NO: 2136483 - RNA, 21 nt, Human
cugcuuugggcugcccuggug

SEQ ID NO: 2136484 - RNA, 19 nt, Human
cuggaggaaaacugagacu

SEQ ID NO: 2136485 - RNA, 13 nt, Human
cuggagagcaaca

SEQ ID NO: 2136486 - RNA, 22 nt, Human
cuggaggaagggggguugcagu

SEQ ID NO: 2136487 - RNA, 13 nt, Human
cuggagcuucucu

SEQ ID NO: 2136488 - RNA, 14 nt, Human
cuggagcuucucuu

SEQ ID NO: 2136489 - RNA, 14 nt, Human
cuggaggaaaacug

SEQ ID NO: 2136490 - RNA, 17 nt, Human
cuggaggaaaacugaga

SEQ ID NO: 2136491 - RNA, 19 nt, Human
cuggagcuggcgucugucu

SEQ ID NO: 2136492 - RNA, 13 nt, Human
cuggagcuccugg

SEQ ID NO: 2136493 - RNA, 14 nt, Human
cuggagcuccuggg

SEQ ID NO: 2136494 - RNA, 15 nt, Human
cuggagcuccuggga

SEQ ID NO: 2136495 - RNA, 16 nt, Human
cuggagcuccugggaa

SEQ ID NO: 2136496 - RNA, 18 nt, Human
cuggagcuccugggaagg

SEQ ID NO: 2136497 - RNA, 13 nt, Human
cuggagccaccug

SEQ ID NO: 2136498 - RNA, 14 nt, Human
cuggagccaccugu

SEQ ID NO: 2136499 - RNA, 15 nt, Human
cuggagccaccuguc

SEQ ID NO: 2136500 - RNA, 16 nt, Human
cuggagccaccugucc

SEQ ID NO: 2136501 - RNA, 18 nt, Human
cuggagccaccuguccca

SEQ ID NO: 2136502 - RNA, 19 nt, Human
cuggagccaccugucccac

SEQ ID NO: 2136503 - RNA, 20 nt, Human
cuggagccaccugucccacc

SEQ ID NO: 2136504 - RNA, 21 nt, Human
cuggagccaccugucccaccu

SEQ ID NO: 2136505 - RNA, 22 nt, Human
cuggagccaccugucccaccuc

SEQ ID NO: 2136506 - RNA, 23 nt, Human
cuggagccaccugucccaccuca

SEQ ID NO: 2136507 - RNA, 13 nt, Human
cuggacucaggau

SEQ ID NO: 2136508 - RNA, 19 nt, Human
cuggacucaggaugcccag

SEQ ID NO: 2136509 - RNA, 20 nt, Human
cuggacucaggaugcccagg

SEQ ID NO: 2136510 - RNA, 22 nt, Human
cuggacucaggaugcccagggc

SEQ ID NO: 2136511 - RNA, 13 nt, Human
cuggaccagaugc

SEQ ID NO: 2136512 - RNA, 14 nt, Human
cuggaccagaugcu

SEQ ID NO: 2136513 - RNA, 15 nt, Human
cuggaccagaugcug

SEQ ID NO: 2136514 - RNA, 15 nt, Human
cuggacggcauuccu

SEQ ID NO: 2136515 - RNA, 17 nt, Human
cuggacggcauuccugc

SEQ ID NO: 2136516 - RNA, 19 nt, Human
cuggacggcauuccugcuu

SEQ ID NO: 2136517 - RNA, 20 nt, Human
cuggacggcauuccugcuua

SEQ ID NO: 2136518 - RNA, 18 nt, Human
cuggacauucagaacacc

SEQ ID NO: 2136519 - RNA, 13 nt, Human
cuggaccaaagcu

SEQ ID NO: 2136520 - RNA, 14 nt, Human
cuggaccaaagcug

SEQ ID NO: 2136521 - RNA, 15 nt, Human
cuggaccaaagcuga

SEQ ID NO: 2136522 - RNA, 22 nt, Human
cuggaccaaagcugacgaggcu

SEQ ID NO: 2136523 - RNA, 15 nt, Human
cuggacuccagaucu

SEQ ID NO: 2136524 - RNA, 16 nt, Human
cuggacuccagaucug

SEQ ID NO: 2136525 - RNA, 18 nt, Human
cuggacuccagaucugca

SEQ ID NO: 2136526 - RNA, 19 nt, Human
cuggacuccagaucugcac

SEQ ID NO: 2136527 - RNA, 21 nt, Human
cuggacuccagaucugcaccg

SEQ ID NO: 2136528 - RNA, 23 nt, Human
cuggagaggagggaugcugccug

SEQ ID NO: 2136529 - RNA, 21 nt, Human
cuggagagguuauaggucacu

SEQ ID NO: 2136530 - RNA, 13 nt, Human
cuggagcaccagg

SEQ ID NO: 2136531 - RNA, 16 nt, Human
cuggagagucucacuc

SEQ ID NO: 2136532 - RNA, 23 nt, Human
cuggagagucucacuccccuccu

SEQ ID NO: 2136533 - RNA, 14 nt, Human
cuggagcaccaggc

SEQ ID NO: 2136534 - RNA, 15 nt, Human
cuggagcaccaggca

SEQ ID NO: 2136535 - RNA, 23 nt, Human
cuggagcaccaggcacgaaccca

SEQ ID NO: 2136536 - RNA, 22 nt, Human
cugccacacuucaggcucuucu

SEQ ID NO: 2136537 - RNA, 17 nt, Human
cugccacacuucaggcu

SEQ ID NO: 2136538 - RNA, 13 nt, Human
cugccacacuuca

SEQ ID NO: 2136539 - RNA, 20 nt, Human
cugccacccuggggagaaag

SEQ ID NO: 2136540 - RNA, 16 nt, Human
cugccacccuggggag

SEQ ID NO: 2136541 - RNA, 15 nt, Human
cugccacccugggga

SEQ ID NO: 2136542 - RNA, 16 nt, Human
cugccagcacccccac

SEQ ID NO: 2136543 - RNA, 12 nt, Human
cugccagccaca

SEQ ID NO: 2136544 - RNA, 12 nt, Human
cugccagccagc

SEQ ID NO: 2136545 - RNA, 13 nt, Human
cugccagccagca

SEQ ID NO: 2136546 - RNA, 14 nt, Human
cugccagccagcag

SEQ ID NO: 2136547 - RNA, 15 nt, Human
cugccagccagcagc

SEQ ID NO: 2136548 - RNA, 16 nt, Human
cugccagccagcagcc

SEQ ID NO: 2136549 - RNA, 18 nt, Human
cugccagccagcagccag

SEQ ID NO: 2136550 - RNA, 19 nt, Human
cugccagccagcagccagc

SEQ ID NO: 2136551 - RNA, 22 nt, Human
cugccagccuggcuucuggagc

SEQ ID NO: 2136552 - RNA, 23 nt, Human
cugccagccuggcuucuggagcc

SEQ ID NO: 2136553 - RNA, 17 nt, Human
cugccaugccagcuuau

SEQ ID NO: 2136554 - RNA, 19 nt, Human
cugccaugccagcuuaucu

SEQ ID NO: 2136555 - RNA, 20 nt, Human
cugccagccagcagccagcu

SEQ ID NO: 2136556 - RNA, 23 nt, Human
cugccagccagcagccagcucuc

SEQ ID NO: 2136557 - RNA, 12 nt, Human
cugccagccugg

SEQ ID NO: 2136558 - RNA, 13 nt, Human
cugccagccuggc

SEQ ID NO: 2136559 - RNA, 14 nt, Human
cugccagccuggcu

SEQ ID NO: 2136560 - RNA, 15 nt, Human
cugccagccuggcuu

SEQ ID NO: 2136561 - RNA, 16 nt, Human
cugccagccuggcuuc

SEQ ID NO: 2136562 - RNA, 19 nt, Human
cugccagccuggcuucugg

SEQ ID NO: 2136563 - RNA, 20 nt, Human
cugccagccuggcuucugga

SEQ ID NO: 2136564 - RNA, 20 nt, Human
cugccauggaggcacacagc

SEQ ID NO: 2136565 - RNA, 19 nt, Human
cugccauuugcacccuccg

SEQ ID NO: 2136566 - RNA, 17 nt, Human
cugccauggaggcacac

SEQ ID NO: 2136567 - RNA, 16 nt, Human
cugccauuucugagau

SEQ ID NO: 2136568 - RNA, 17 nt, Human
cugcccaaccugcucuc

SEQ ID NO: 2136569 - RNA, 13 nt, Human
cugcccaaagcag

SEQ ID NO: 2136570 - RNA, 23 nt, Human
cugcccaaagcagcacuuauaaa

SEQ ID NO: 2136571 - RNA, 20 nt, Human
cugccauuugcacccuccgc

SEQ ID NO: 2136572 - RNA, 21 nt, Human
cugccauuugcacccuccgcc

SEQ ID NO: 2136573 - RNA, 11 nt, Human
cugcccaggag

SEQ ID NO: 2136574 - RNA, 19 nt, Human
cugcccaaccugcucuccu

SEQ ID NO: 2136575 - RNA, 13 nt, Human
cugcccaggcccc

SEQ ID NO: 2136576 - RNA, 23 nt, Human
cugcccaggagagccagcccucc

SEQ ID NO: 2136577 - RNA, 21 nt, Human
cugcccaggagagccagcccu

SEQ ID NO: 2136578 - RNA, 22 nt, Human
cugcccaggagagccagcccuc

SEQ ID NO: 2136579 - RNA, 12 nt, Human
cugcccaggaga

SEQ ID NO: 2136580 - RNA, 17 nt, Human
cugcccaggagagccag

SEQ ID NO: 2136581 - RNA, 18 nt, Human
cugcccaggagagccagc

SEQ ID NO: 2136582 - RNA, 19 nt, Human
cugcccaggagagccagcc

SEQ ID NO: 2136583 - RNA, 18 nt, Human
cugcccaggccugccugu

SEQ ID NO: 2136584 - RNA, 19 nt, Human
cugcccaggccugccuguu

SEQ ID NO: 2136585 - RNA, 15 nt, Human
cugcccggcugcgga

SEQ ID NO: 2136586 - RNA, 11 nt, Human
cugccccuggc

SEQ ID NO: 2136587 - RNA, 11 nt, Human
cugcccggcug

SEQ ID NO: 2136588 - RNA, 14 nt, Human
cugcccuccauccc

SEQ ID NO: 2136589 - RNA, 15 nt, Human
cugcccuccaucccg

SEQ ID NO: 2136590 - RNA, 17 nt, Human
cugcccucccuccuucc

SEQ ID NO: 2136591 - RNA, 18 nt, Human
cugcccucccuccuuccu

SEQ ID NO: 2136592 - RNA, 16 nt, Human
cugcccucccuggagc

SEQ ID NO: 2136593 - RNA, 13 nt, Human
cugcccugcccac

SEQ ID NO: 2136594 - RNA, 11 nt, Human
cugcccugccc

SEQ ID NO: 2136595 - RNA, 13 nt, Human
cugcccugccacu

SEQ ID NO: 2136596 - RNA, 13 nt, Human
cugcccucuguuc

SEQ ID NO: 2136597 - RNA, 19 nt, Human
cugcccucuguucaguaac

SEQ ID NO: 2136598 - RNA, 13 nt, Human
cugcuccccuccc

SEQ ID NO: 2136599 - RNA, 17 nt, Human
cugcuccccucccuccu

SEQ ID NO: 2136600 - RNA, 15 nt, Human
cugcuccagcuguuc

SEQ ID NO: 2136601 - RNA, 17 nt, Human
cugcuccucuccccagc

SEQ ID NO: 2136602 - RNA, 16 nt, Human
cugcuccucuccccag

SEQ ID NO: 2136603 - RNA, 16 nt, Human
cugcucugaacacgaa

SEQ ID NO: 2136604 - RNA, 19 nt, Human
cugcucugaacacgaagcu

SEQ ID NO: 2136605 - RNA, 14 nt, Human
cugcucucuaccca

SEQ ID NO: 2136606 - RNA, 16 nt, Human
cugcucucuacccagc

SEQ ID NO: 2136607 - RNA, 17 nt, Human
cugcucucuacccagcc

SEQ ID NO: 2136608 - RNA, 20 nt, Human
cugcucucuacccagcccau

SEQ ID NO: 2136609 - RNA, 22 nt, Human
cugcucucuacccagcccaucu

SEQ ID NO: 2136610 - RNA, 17 nt, Human
cugcuccuuagcugcca

SEQ ID NO: 2136611 - RNA, 20 nt, Human
cugcuccuuagcugccaagc

SEQ ID NO: 2136612 - RNA, 18 nt, Human
cugcuccucuccccagca

SEQ ID NO: 2136613 - RNA, 23 nt, Human
cugcuaacuuggagccccagugc

SEQ ID NO: 2136614 - RNA, 21 nt, Human
cugcuaacuuggagccccagu

SEQ ID NO: 2136615 - RNA, 20 nt, Human
cugcuaacuuggagccccag

SEQ ID NO: 2136616 - RNA, 14 nt, Human
cugcuccagcuguu

SEQ ID NO: 2136617 - RNA, 20 nt, Human
cugcguuuuggaagcucuga

SEQ ID NO: 2136618 - RNA, 12 nt, Human
cugcuaaaucuc

SEQ ID NO: 2136619 - RNA, 17 nt, Human
cugcuaaaucuccuauu

SEQ ID NO: 2136620 - RNA, 18 nt, Human
cugcuaaaucuccuauuu

SEQ ID NO: 2136621 - RNA, 19 nt, Human
cugcuaaaucuccuauuuu

SEQ ID NO: 2136622 - RNA, 20 nt, Human
cugcuaaaucuccuauuuuu

SEQ ID NO: 2136623 - RNA, 16 nt, Human
cugcgguccacccagg

SEQ ID NO: 2136624 - RNA, 17 nt, Human
cugcgguccacccagga

SEQ ID NO: 2136625 - RNA, 15 nt, Human
cugcggucaaggcca

SEQ ID NO: 2136626 - RNA, 16 nt, Human
cugcggucaaggccag

SEQ ID NO: 2136627 - RNA, 17 nt, Human
cugcggucaaggccagc

SEQ ID NO: 2136628 - RNA, 21 nt, Human
cugcggaaugaaccacaucuu

SEQ ID NO: 2136629 - RNA, 15 nt, Human
cugcgguccacccag

SEQ ID NO: 2136630 - RNA, 20 nt, Human
cugcggaaugaaccacaucu

SEQ ID NO: 2136631 - RNA, 13 nt, Human
cugccucagccuc

SEQ ID NO: 2136632 - RNA, 14 nt, Human
cugccucacuuccu

SEQ ID NO: 2136633 - RNA, 23 nt, Human
cugccucacuuccuacaagagca

SEQ ID NO: 2136634 - RNA, 12 nt, Human
cugccucagccu

SEQ ID NO: 2136635 - RNA, 14 nt, Human
cugccucagccucc

SEQ ID NO: 2136636 - RNA, 19 nt, Human
cugccucucccuggcccuc

SEQ ID NO: 2136637 - RNA, 17 nt, Human
cugccucucccuggccc

SEQ ID NO: 2136638 - RNA, 18 nt, Human
cugccucucccuggcccu

SEQ ID NO: 2136639 - RNA, 19 nt, Human
cugcccugggauguccaca

SEQ ID NO: 2136640 - RNA, 11 nt, Human
cugcccuggga

SEQ ID NO: 2136641 - RNA, 16 nt, Human
cugcccugccacuuug

SEQ ID NO: 2136642 - RNA, 18 nt, Human
cugccuaaguggcugcug

SEQ ID NO: 2136643 - RNA, 21 nt, Human
cugccucaaugugaaucagac

SEQ ID NO: 2136644 - RNA, 24 nt, Human
cugccucaaugugaaucagacccu

SEQ ID NO: 2136645 - RNA, 21 nt, Human
cugcccugggauguccacaga

SEQ ID NO: 2136646 - RNA, 14 nt, Human
cugccuaaguggcu

SEQ ID NO: 2136647 - RNA, 15 nt, Human
cugccuaaguggcug

SEQ ID NO: 2136648 - RNA, 16 nt, Human
cugccuaaguggcugc

SEQ ID NO: 2136649 - RNA, 13 nt, Human
cugccugagcacc

SEQ ID NO: 2136650 - RNA, 20 nt, Human
cugccugagcaccucccagc

SEQ ID NO: 2136651 - RNA, 21 nt, Human
cugccugagcaccucccagcc

SEQ ID NO: 2136652 - RNA, 13 nt, Human
cugccugcccacc

SEQ ID NO: 2136653 - RNA, 14 nt, Human
cugccugcccaccc

SEQ ID NO: 2136654 - RNA, 15 nt, Human
cugccugcccaggcc

SEQ ID NO: 2136655 - RNA, 15 nt, Human
cugccugcccacccg

SEQ ID NO: 2136656 - RNA, 16 nt, Human
cugccugcccacccgu

SEQ ID NO: 2136657 - RNA, 14 nt, Human
cugccugcccaggc

SEQ ID NO: 2136658 - RNA, 13 nt, Human
cugccugcccagg

SEQ ID NO: 2136659 - RNA, 18 nt, Human
cugccucucgguggccag

SEQ ID NO: 2136660 - RNA, 12 nt, Human
cugccucuuccu

SEQ ID NO: 2136661 - RNA, 19 nt, Human
cugccucuuaaauaaaccu

SEQ ID NO: 2136662 - RNA, 13 nt, Human
cugccucuucucu

SEQ ID NO: 2136663 - RNA, 23 nt, Human
cugccugaagucacacagugagu

SEQ ID NO: 2136664 - RNA, 14 nt, Human
cugccucuucucua

SEQ ID NO: 2136665 - RNA, 17 nt, Human
cugcagggacugccagu

SEQ ID NO: 2136666 - RNA, 15 nt, Human
cugcagggacugcca

SEQ ID NO: 2136667 - RNA, 16 nt, Human
cugcagggccaagcac

SEQ ID NO: 2136668 - RNA, 22 nt, Human
cugcagggaguccgaaagggac

SEQ ID NO: 2136669 - RNA, 20 nt, Human
cugcagccucaaccuccugg

SEQ ID NO: 2136670 - RNA, 19 nt, Human
cugcagccucaaccuccug

SEQ ID NO: 2136671 - RNA, 22 nt, Human
cugcagccucaaccuccugggc

SEQ ID NO: 2136672 - RNA, 11 nt, Human
cugcagccuca

SEQ ID NO: 2136673 - RNA, 19 nt, Human
cugcagaggggcuuucugg

SEQ ID NO: 2136674 - RNA, 20 nt, Human
cugcagaggggcuuucugga

SEQ ID NO: 2136675 - RNA, 22 nt, Human
cugcagaggggcuuucuggaga

SEQ ID NO: 2136676 - RNA, 23 nt, Human
cugcagaggggcuuucuggagag

SEQ ID NO: 2136677 - RNA, 17 nt, Human
cugcagagacagagagg

SEQ ID NO: 2136678 - RNA, 20 nt, Human
cugcagaacguauuggucca

SEQ ID NO: 2136679 - RNA, 21 nt, Human
cugcagaacguauugguccag

SEQ ID NO: 2136680 - RNA, 23 nt, Human
cugcagaacguauugguccagcu

SEQ ID NO: 2136681 - RNA, 20 nt, Human
cugcagagcaggaaacauga

SEQ ID NO: 2136682 - RNA, 17 nt, Human
cugcacuugcagacucu

SEQ ID NO: 2136683 - RNA, 16 nt, Human
cugcacuugcagacuc

SEQ ID NO: 2136684 - RNA, 14 nt, Human
cugcacuugcagac

SEQ ID NO: 2136685 - RNA, 18 nt, Human
cugcacagugcaucucag

SEQ ID NO: 2136686 - RNA, 18 nt, Human
cugcacaagcugcacccu

SEQ ID NO: 2136687 - RNA, 13 nt, Human
cugcacaagcugc

SEQ ID NO: 2136688 - RNA, 14 nt, Human
cugcacaagcugca

SEQ ID NO: 2136689 - RNA, 15 nt, Human
cugcacaagcugcac

SEQ ID NO: 2136690 - RNA, 16 nt, Human
cugcacaagcugcacc

SEQ ID NO: 2136691 - RNA, 17 nt, Human
cugcacccucaggcagg

SEQ ID NO: 2136692 - RNA, 16 nt, Human
cugcaccccccugggc

SEQ ID NO: 2136693 - RNA, 17 nt, Human
cugcaccccccugggcu

SEQ ID NO: 2136694 - RNA, 18 nt, Human
cugcacccucaggcaggu

SEQ ID NO: 2136695 - RNA, 21 nt, Human
cugcacagugcaucucagccc

SEQ ID NO: 2136696 - RNA, 11 nt, Human
cugcaccagga

SEQ ID NO: 2136697 - RNA, 13 nt, Human
cugcaccaggaga

SEQ ID NO: 2136698 - RNA, 14 nt, Human
cugcaccaggagac

SEQ ID NO: 2136699 - RNA, 15 nt, Human
cugcaccaggagaca

SEQ ID NO: 2136700 - RNA, 17 nt, Human
cugcaccaggagacaga

SEQ ID NO: 2136701 - RNA, 14 nt, Human
cugcaccauugcug

SEQ ID NO: 2136702 - RNA, 16 nt, Human
cugcaccauugcugcu

SEQ ID NO: 2136703 - RNA, 17 nt, Human
cugcaccauugcugcuc

SEQ ID NO: 2136704 - RNA, 14 nt, Human
cugcaccccccugg

SEQ ID NO: 2136705 - RNA, 15 nt, Human
cugcaccccccuggg

SEQ ID NO: 2136706 - RNA, 13 nt, Human
cugcacaaagccc

SEQ ID NO: 2136707 - RNA, 20 nt, Human
cugcacaaagcccuuccaug

SEQ ID NO: 2136708 - RNA, 18 nt, Human
cugcacaaagcccuucca

SEQ ID NO: 2136709 - RNA, 21 nt, Human
cugcacaaagcccuuccaugu

SEQ ID NO: 2136710 - RNA, 16 nt, Human
cugcaauagagacugu

SEQ ID NO: 2136711 - RNA, 18 nt, Human
cugcaauagagacuguag

SEQ ID NO: 2136712 - RNA, 19 nt, Human
cugcaauagagacuguaga

SEQ ID NO: 2136713 - RNA, 20 nt, Human
cugcaauagagacuguagau

SEQ ID NO: 2136714 - RNA, 21 nt, Human
cugcaauagagacuguagauu

SEQ ID NO: 2136715 - RNA, 23 nt, Human
cugcaaacaugggguuggcuggg

SEQ ID NO: 2136716 - RNA, 11 nt, Human
cugcaaaauuu

SEQ ID NO: 2136717 - RNA, 13 nt, Human
cugcaaaauuuua

SEQ ID NO: 2136718 - RNA, 14 nt, Human
cugcaaaaugagac

SEQ ID NO: 2136719 - RNA, 15 nt, Human
cugauucccaagcuc

SEQ ID NO: 2136720 - RNA, 18 nt, Human
cugauucccaagcucugc

SEQ ID NO: 2136721 - RNA, 17 nt, Human
cugauucccaagcucug

SEQ ID NO: 2136722 - RNA, 20 nt, Human
cugauucccaagcucugcuc

SEQ ID NO: 2136723 - RNA, 19 nt, Human
cugauucccaagcucugcu

SEQ ID NO: 2136724 - RNA, 22 nt, Human
cugauucccaagcucugcuccu

SEQ ID NO: 2136725 - RNA, 22 nt, Human
cugauucauaauaaauaucugu

SEQ ID NO: 2136726 - RNA, 19 nt, Human
cugauuagaaaugaccaau

SEQ ID NO: 2136727 - RNA, 13 nt, Human
cugauuagaaaug

SEQ ID NO: 2136728 - RNA, 18 nt, Human
cugauguacaguugggaa

SEQ ID NO: 2136729 - RNA, 13 nt, Human
cugauuacuguca

SEQ ID NO: 2136730 - RNA, 14 nt, Human
cugauuacugucaa

SEQ ID NO: 2136731 - RNA, 16 nt, Human
cugauuacugucaaua

SEQ ID NO: 2136732 - RNA, 17 nt, Human
cugauuacugucaauaa

SEQ ID NO: 2136733 - RNA, 19 nt, Human
cugauuacugucaauaaac

SEQ ID NO: 2136734 - RNA, 20 nt, Human
cugauuacugucaauaaaca

SEQ ID NO: 2136735 - RNA, 23 nt, Human
cugauuacugucaauaaacagcu

SEQ ID NO: 2136736 - RNA, 11 nt, Human
cugauuagaaa

SEQ ID NO: 2136737 - RNA, 23 nt, Human
cugauuagaaaugaccaauauua

SEQ ID NO: 2136738 - RNA, 19 nt, Human
cugauuaaugcuaaaugua

SEQ ID NO: 2136739 - RNA, 22 nt, Human
cugauguugagggaacagacag

SEQ ID NO: 2136740 - RNA, 15 nt, Human
cugauguuaggcugg

SEQ ID NO: 2136741 - RNA, 16 nt, Human
cugauguuaggcuggg

SEQ ID NO: 2136742 - RNA, 17 nt, Human
cugauguuaggcugggc

SEQ ID NO: 2136743 - RNA, 18 nt, Human
cugauguuaggcugggcc

SEQ ID NO: 2136744 - RNA, 19 nt, Human
cugauguuaggcugggccc

SEQ ID NO: 2136745 - RNA, 21 nt, Human
cugauguuaggcugggcccag

SEQ ID NO: 2136746 - RNA, 22 nt, Human
cugauguuaggcugggcccaga

SEQ ID NO: 2136747 - RNA, 23 nt, Human
cugauguuaggcugggcccagag

SEQ ID NO: 2136748 - RNA, 20 nt, Human
cugaucgccaaccuuucccc

SEQ ID NO: 2136749 - RNA, 15 nt, Human
cugaucgugcuaaau

SEQ ID NO: 2136750 - RNA, 17 nt, Human
cugaucgugcuaaauuu

SEQ ID NO: 2136751 - RNA, 19 nt, Human
cugaucgugcuaaauuuuc

SEQ ID NO: 2136752 - RNA, 15 nt, Human
cugaucguucuuucu

SEQ ID NO: 2136753 - RNA, 12 nt, Human
cugaucucaggg

SEQ ID NO: 2136754 - RNA, 13 nt, Human
cugaucucaggga

SEQ ID NO: 2136755 - RNA, 15 nt, Human
cugaucucagggaag

SEQ ID NO: 2136756 - RNA, 20 nt, Human
cugaucucagggaagcccag

SEQ ID NO: 2136757 - RNA, 21 nt, Human
cugaucucagggaagcccagc

SEQ ID NO: 2136758 - RNA, 22 nt, Human
cugaucucagggaagcccagcu

SEQ ID NO: 2136759 - RNA, 23 nt, Human
cugaucucagggaagcccagcuc

SEQ ID NO: 2136760 - RNA, 21 nt, Human
cugaucgugcuaaauuuucag

SEQ ID NO: 2136761 - RNA, 16 nt, Human
cugauagcguuggaau

SEQ ID NO: 2136762 - RNA, 23 nt, Human
cugauagcguuggaauuaaaaca

SEQ ID NO: 2136763 - RNA, 22 nt, Human
cugaguuuuuaaaaauggacaa

SEQ ID NO: 2136764 - RNA, 12 nt, Human
cugauaccucaa

SEQ ID NO: 2136765 - RNA, 16 nt, Human
cugaucaugcauuguu

SEQ ID NO: 2136766 - RNA, 12 nt, Human
cugaucccacuc

SEQ ID NO: 2136767 - RNA, 15 nt, Human
cugaucccacuccua

SEQ ID NO: 2136768 - RNA, 16 nt, Human
cugaucccacuccuag

SEQ ID NO: 2136769 - RNA, 17 nt, Human
cugaucccacuccuagg

SEQ ID NO: 2136770 - RNA, 18 nt, Human
cugaucccacuccuagga

SEQ ID NO: 2136771 - RNA, 19 nt, Human
cugaucagucuaagauggg

SEQ ID NO: 2136772 - RNA, 12 nt, Human
cugaucaugcau

SEQ ID NO: 2136773 - RNA, 14 nt, Human
cugaucaugcauug

SEQ ID NO: 2136774 - RNA, 15 nt, Human
cugaucaugcauugu

SEQ ID NO: 2136775 - RNA, 17 nt, Human
cugaucaugcauuguug

SEQ ID NO: 2136776 - RNA, 22 nt, Human
cugagugggggaucacagccuc

SEQ ID NO: 2136777 - RNA, 16 nt, Human
cugagugagcugaaga

SEQ ID NO: 2136778 - RNA, 16 nt, Human
cugagggcgaggggag

SEQ ID NO: 2136779 - RNA, 19 nt, Human
cugagggaccaacugggcc

SEQ ID NO: 2136780 - RNA, 20 nt, Human
cugagggaccaacugggccc

SEQ ID NO: 2136781 - RNA, 21 nt, Human
cugagggaccaacugggccca

SEQ ID NO: 2136782 - RNA, 13 nt, Human
cugagggaccagc

SEQ ID NO: 2136783 - RNA, 15 nt, Human
cugagggaccagcca

SEQ ID NO: 2136784 - RNA, 12 nt, Human
cugagggaccaa

SEQ ID NO: 2136785 - RNA, 16 nt, Human
cugagggaccaacugg

SEQ ID NO: 2136786 - RNA, 18 nt, Human
cugagggaccaacugggc

SEQ ID NO: 2136787 - RNA, 18 nt, Human
cugacccagucccugggg

SEQ ID NO: 2136788 - RNA, 12 nt, Human
cugacccagucc

SEQ ID NO: 2136789 - RNA, 13 nt, Human
cugacccaguccc

SEQ ID NO: 2136790 - RNA, 14 nt, Human
cugacccagucccu

SEQ ID NO: 2136791 - RNA, 15 nt, Human
cugacccagucccug

SEQ ID NO: 2136792 - RNA, 16 nt, Human
cugacccagucccugg

SEQ ID NO: 2136793 - RNA, 17 nt, Human
cugacccagucccuggg

SEQ ID NO: 2136794 - RNA, 18 nt, Human
cugaccauuucagggguc

SEQ ID NO: 2136795 - RNA, 21 nt, Human
cuccugaguagcuggauuaca

SEQ ID NO: 2136796 - RNA, 19 nt, Human
cuccugaggaucagaaagu

SEQ ID NO: 2136797 - RNA, 20 nt, Human
cuccugaggaucagaaagua

SEQ ID NO: 2136798 - RNA, 23 nt, Human
cuccugaggaucagaaaguaauu

SEQ ID NO: 2136799 - RNA, 16 nt, Human
cuccugaggggcaucu

SEQ ID NO: 2136800 - RNA, 19 nt, Human
cuccugaggggcaucugcc

SEQ ID NO: 2136801 - RNA, 20 nt, Human
cuccugaggggcaucugccc

SEQ ID NO: 2136802 - RNA, 21 nt, Human
cuccugaggggcaucugcccc

SEQ ID NO: 2136803 - RNA, 22 nt, Human
cuccugaggggcaucugccccu

SEQ ID NO: 2136804 - RNA, 16 nt, Human
cuccucuuuguuuugu

SEQ ID NO: 2136805 - RNA, 20 nt, Human
cuccucuuuguuuuguuuua

SEQ ID NO: 2136806 - RNA, 21 nt, Human
cuccucuuuguuuuguuuuaa

SEQ ID NO: 2136807 - RNA, 16 nt, Human
cuccugaccugucacc

SEQ ID NO: 2136808 - RNA, 21 nt, Human
cucccuucuccuugauaacag

SEQ ID NO: 2136809 - RNA, 11 nt, Human
cuccucagacu

SEQ ID NO: 2136810 - RNA, 19 nt, Human
cuccuaucaccuccccucc

SEQ ID NO: 2136811 - RNA, 21 nt, Human
cuccucacucccuucccauaa

SEQ ID NO: 2136812 - RNA, 15 nt, Human
cuccucccugaugua

SEQ ID NO: 2136813 - RNA, 16 nt, Human
cuccucccugauguac

SEQ ID NO: 2136814 - RNA, 19 nt, Human
cuccucccugauguacagu

SEQ ID NO: 2136815 - RNA, 21 nt, Human
cuccucccucccucugccggc

SEQ ID NO: 2136816 - RNA, 17 nt, Human
cuccucuaacaggggcu

SEQ ID NO: 2136817 - RNA, 21 nt, Human
cuccucuaacaggggcuggug

SEQ ID NO: 2136818 - RNA, 19 nt, Human
cuccucgcaagcuggguaa

SEQ ID NO: 2136819 - RNA, 19 nt, Human
cuccucuugccacugccuc

SEQ ID NO: 2136820 - RNA, 17 nt, Human
cucccuucuacugcuuc

SEQ ID NO: 2136821 - RNA, 14 nt, Human
cucccuuccucuuu

SEQ ID NO: 2136822 - RNA, 13 nt, Human
cucccuuccuccc

SEQ ID NO: 2136823 - RNA, 14 nt, Human
cucccuuccuccca

SEQ ID NO: 2136824 - RNA, 13 nt, Human
cucccuuccucuu

SEQ ID NO: 2136825 - RNA, 17 nt, Human
cucccuucccauaagcu

SEQ ID NO: 2136826 - RNA, 21 nt, Human
cuccuaguucuucaucccacu

SEQ ID NO: 2136827 - RNA, 17 nt, Human
cuccuaucaccuccccu

SEQ ID NO: 2136828 - RNA, 18 nt, Human
cuccuaucaccuccccuc

SEQ ID NO: 2136829 - RNA, 20 nt, Human
cuccuagggaaaaguucaua

SEQ ID NO: 2136830 - RNA, 19 nt, Human
cuccuaggacauguucccu

SEQ ID NO: 2136831 - RNA, 22 nt, Human
cuccuaggacauguucccuucu

SEQ ID NO: 2136832 - RNA, 20 nt, Human
cucccuucaaccauucccca

SEQ ID NO: 2136833 - RNA, 19 nt, Human
cucccuucaaccauucccc

SEQ ID NO: 2136834 - RNA, 18 nt, Human
cucccuucaaccauuccc

SEQ ID NO: 2136835 - RNA, 12 nt, Human
cucccuucaacc

SEQ ID NO: 2136836 - RNA, 10 nt, Human
cucccuuccu

SEQ ID NO: 2136837 - RNA, 19 nt, Human
cucccuguugaagcucugg

SEQ ID NO: 2136838 - RNA, 14 nt, Human
cucccuggcuccca

SEQ ID NO: 2136839 - RNA, 15 nt, Human
cucccuggcucccau

SEQ ID NO: 2136840 - RNA, 15 nt, Human
cucccuggcucucag

SEQ ID NO: 2136841 - RNA, 16 nt, Human
cucccuggcucucaga

SEQ ID NO: 2136842 - RNA, 18 nt, Human
cucccuggcucucagaag

SEQ ID NO: 2136843 - RNA, 20 nt, Human
cucccuggcucucagaaggu

SEQ ID NO: 2136844 - RNA, 18 nt, Human
cucccaguucucuaggga

SEQ ID NO: 2136845 - RNA, 20 nt, Human
cucccaguucucuagggaag

SEQ ID NO: 2136846 - RNA, 21 nt, Human
cucccaguucucuagggaagg

SEQ ID NO: 2136847 - RNA, 20 nt, Human
cucccaguccaaauguccuc

SEQ ID NO: 2136848 - RNA, 15 nt, Human
cucccuggccuguuc

SEQ ID NO: 2136849 - RNA, 16 nt, Human
cucccuggccuguucu

SEQ ID NO: 2136850 - RNA, 19 nt, Human
cucccuggccuguucuguu

SEQ ID NO: 2136851 - RNA, 21 nt, Human
cucccuggccuguucuguuuu

SEQ ID NO: 2136852 - RNA, 11 nt, Human
cucccuggcuc

SEQ ID NO: 2136853 - RNA, 12 nt, Human
cucccuggcucc

SEQ ID NO: 2136854 - RNA, 17 nt, Human
cucgagguuucucaaag

SEQ ID NO: 2136855 - RNA, 17 nt, Human
cucgaagcgcgccacuc

SEQ ID NO: 2136856 - RNA, 20 nt, Human
cucgaagcgcgccacucgcu

SEQ ID NO: 2136857 - RNA, 17 nt, Human
cuccuugggaggcccca

SEQ ID NO: 2136858 - RNA, 21 nt, Human
cuccuugggaggccccacugg

SEQ ID NO: 2136859 - RNA, 22 nt, Human
cuccuugggaggccccacuggg

SEQ ID NO: 2136860 - RNA, 12 nt, Human
cucgaagcgcgc

SEQ ID NO: 2136861 - RNA, 13 nt, Human
cucgaagcgcgcc

SEQ ID NO: 2136862 - RNA, 21 nt, Human
cucgcauuugucaaugacagu

SEQ ID NO: 2136863 - RNA, 19 nt, Human
cucgccaccccuccuuccu

SEQ ID NO: 2136864 - RNA, 22 nt, Human
cucgcauuugucaaugacaguu

SEQ ID NO: 2136865 - RNA, 21 nt, Human
cucggccgucuucacucgccc

SEQ ID NO: 2136866 - RNA, 12 nt, Human
cucggagccuca

SEQ ID NO: 2136867 - RNA, 22 nt, Human
cucuaaaugaggggccucaggu

SEQ ID NO: 2136868 - RNA, 14 nt, Human
cucuaagcacacgg

SEQ ID NO: 2136869 - RNA, 17 nt, Human
cucgcuuuguugcccag

SEQ ID NO: 2136870 - RNA, 16 nt, Human
cucggaaggcuggcug

SEQ ID NO: 2136871 - RNA, 20 nt, Human
cucggaaggcuggcugggca

SEQ ID NO: 2136872 - RNA, 20 nt, Human
cuccuucuguccuacucugu

SEQ ID NO: 2136873 - RNA, 15 nt, Human
cuccuucuguccuac

SEQ ID NO: 2136874 - RNA, 14 nt, Human
cuccuucuguccua

SEQ ID NO: 2136875 - RNA, 13 nt, Human
cuccuucucccuu

SEQ ID NO: 2136876 - RNA, 18 nt, Human
cuccuuccaacaggagcu

SEQ ID NO: 2136877 - RNA, 14 nt, Human
cuccuuccaacagg

SEQ ID NO: 2136878 - RNA, 14 nt, Human
cuccuuccaacugc

SEQ ID NO: 2136879 - RNA, 15 nt, Human
cuccuuccaacugcu

SEQ ID NO: 2136880 - RNA, 18 nt, Human
cuccuuccaacugcugcc

SEQ ID NO: 2136881 - RNA, 19 nt, Human
cuccuuccaacugcugccc

SEQ ID NO: 2136882 - RNA, 17 nt, Human
cuccuugccuccugugu

SEQ ID NO: 2136883 - RNA, 17 nt, Human
cuccuugauaacagcua

SEQ ID NO: 2136884 - RNA, 18 nt, Human
cuccuugauaacagcuac

SEQ ID NO: 2136885 - RNA, 18 nt, Human
cuccuugccuccugugua

SEQ ID NO: 2136886 - RNA, 16 nt, Human
cucgaacuggcugcaa

SEQ ID NO: 2136887 - RNA, 13 nt, Human
cuccuugggaggc

SEQ ID NO: 2136888 - RNA, 16 nt, Human
cuccuugggaggcccc

SEQ ID NO: 2136889 - RNA, 22 nt, Human
cuccuugagggcaagagccaca

SEQ ID NO: 2136890 - RNA, 11 nt, Human
cuccugugugu

SEQ ID NO: 2136891 - RNA, 23 nt, Human
cuccugugucuugcaauggcagc

SEQ ID NO: 2136892 - RNA, 14 nt, Human
cuccugcccaccug

SEQ ID NO: 2136893 - RNA, 15 nt, Human
cuccugugucuugca

SEQ ID NO: 2136894 - RNA, 12 nt, Human
cuccugcaugca

SEQ ID NO: 2136895 - RNA, 13 nt, Human
cuccugcaugcag

SEQ ID NO: 2136896 - RNA, 23 nt, Human
cuccugaggggcaucugccccuc

SEQ ID NO: 2136897 - RNA, 14 nt, Human
cuccugugugugcg

SEQ ID NO: 2136898 - RNA, 15 nt, Human
cucaggucuguuuuc

SEQ ID NO: 2136899 - RNA, 19 nt, Human
cucaggucagggugaggau

SEQ ID NO: 2136900 - RNA, 20 nt, Human
cucaggucagggugaggaug

SEQ ID NO: 2136901 - RNA, 18 nt, Human
cucaggucccugcagggc

SEQ ID NO: 2136902 - RNA, 17 nt, Human
cucaggucccugcaggg

SEQ ID NO: 2136903 - RNA, 16 nt, Human
cucagguacagagaag

SEQ ID NO: 2136904 - RNA, 18 nt, Human
cucagguacagagaagga

SEQ ID NO: 2136905 - RNA, 19 nt, Human
cucagguacagagaaggaa

SEQ ID NO: 2136906 - RNA, 21 nt, Human
cucagguacagagaaggaaug

SEQ ID NO: 2136907 - RNA, 16 nt, Human
cucaggugucccugca

SEQ ID NO: 2136908 - RNA, 15 nt, Human
cucaggugucccugc

SEQ ID NO: 2136909 - RNA, 15 nt, Human
cguuuuuuucauucc

SEQ ID NO: 2136910 - RNA, 14 nt, Human
cguuuuguuugaaa

SEQ ID NO: 2136911 - RNA, 23 nt, Human
cuaaaagguaugcaaucaaaucu

SEQ ID NO: 2136912 - RNA, 17 nt, Human
cucaggggcguguggcu

SEQ ID NO: 2136913 - RNA, 19 nt, Human
cucauaguaugguggcugg

SEQ ID NO: 2136914 - RNA, 18 nt, Human
cucauaguaugguggcug

SEQ ID NO: 2136915 - RNA, 20 nt, Human
cucauaguaugguggcuggg

SEQ ID NO: 2136916 - RNA, 19 nt, Human
cucauagggaagaccugcu

SEQ ID NO: 2136917 - RNA, 14 nt, Human
cucauagggaagac

SEQ ID NO: 2136918 - RNA, 20 nt, Human
cucauaagcuacugaugaga

SEQ ID NO: 2136919 - RNA, 19 nt, Human
cucaggugucccugcacuu

SEQ ID NO: 2136920 - RNA, 14 nt, Human
cucaggugagaagc

SEQ ID NO: 2136921 - RNA, 18 nt, Human
cucaggugucccugcacu

SEQ ID NO: 2136922 - RNA, 17 nt, Human
cucaggugucccugcac

SEQ ID NO: 2136923 - RNA, 14 nt, Human
cucaguucccuugg

SEQ ID NO: 2136924 - RNA, 15 nt, Human
cucaguucccuuggc

SEQ ID NO: 2136925 - RNA, 16 nt, Human
cucaguucccuuggcc

SEQ ID NO: 2136926 - RNA, 17 nt, Human
cucaguucccuuggccu

SEQ ID NO: 2136927 - RNA, 18 nt, Human
cucaguucccuuggccuc

SEQ ID NO: 2136928 - RNA, 19 nt, Human
cucaguucccuuggccuca

SEQ ID NO: 2136929 - RNA, 22 nt, Human
cucauugcuucacaacccaucu

SEQ ID NO: 2136930 - RNA, 15 nt, Human
cucauuguaaacaaa

SEQ ID NO: 2136931 - RNA, 23 nt, Human
cucauucuucuguacgucugaca

SEQ ID NO: 2136932 - RNA, 17 nt, Human
cucauuccugccugucu

SEQ ID NO: 2136933 - RNA, 18 nt, Human
cucauuccugccugucuc

SEQ ID NO: 2136934 - RNA, 14 nt, Human
cucauuccccaggu

SEQ ID NO: 2136935 - RNA, 12 nt, Human
cucauuccugcc

SEQ ID NO: 2136936 - RNA, 13 nt, Human
cucauuccugccu

SEQ ID NO: 2136937 - RNA, 16 nt, Human
cucauuccugccuguc

SEQ ID NO: 2136938 - RNA, 20 nt, Human
cucauuccugccugucuccu

SEQ ID NO: 2136939 - RNA, 14 nt, Human
cucauucuucugua

SEQ ID NO: 2136940 - RNA, 13 nt, Human
cucauucuucugu

SEQ ID NO: 2136941 - RNA, 22 nt, Human
cucauucaggaaaacugacaga

SEQ ID NO: 2136942 - RNA, 14 nt, Human
cucauucaguauua

SEQ ID NO: 2136943 - RNA, 15 nt, Human
cucauucaguauuaa

SEQ ID NO: 2136944 - RNA, 17 nt, Human
cucauucaguauuaaag

SEQ ID NO: 2136945 - RNA, 19 nt, Human
cucauucaguauuaaaggg

SEQ ID NO: 2136946 - RNA, 18 nt, Human
cucauuccaccuucccau

SEQ ID NO: 2136947 - RNA, 21 nt, Human
cucauuccaccuucccaugcc

SEQ ID NO: 2136948 - RNA, 13 nt, Human
cucauuccccagg

SEQ ID NO: 2136949 - RNA, 12 nt, Human
cucauuccccag

SEQ ID NO: 2136950 - RNA, 15 nt, Human
cucauccuuuucucc

SEQ ID NO: 2136951 - RNA, 17 nt, Human
cucauccuuuucuccua

SEQ ID NO: 2136952 - RNA, 14 nt, Human
cucauccugcaggc

SEQ ID NO: 2136953 - RNA, 21 nt, Human
cucauuagcauuuugcuaaau

SEQ ID NO: 2136954 - RNA, 19 nt, Human
cucauucaaaaguugaaau

SEQ ID NO: 2136955 - RNA, 21 nt, Human
cucauuaucgccuuuugacag

SEQ ID NO: 2136956 - RNA, 15 nt, Human
cucauucaaaaguug

SEQ ID NO: 2136957 - RNA, 22 nt, Human
cucauauuccugcagccuggag

SEQ ID NO: 2136958 - RNA, 24 nt, Human
cucauauuccugcagccuggaggc

SEQ ID NO: 2136959 - RNA, 15 nt, Human
cucauauuccugcag

SEQ ID NO: 2136960 - RNA, 20 nt, Human
cucauauuccugcagccugg

SEQ ID NO: 2136961 - RNA, 13 nt, Human
cucauccugcagg

SEQ ID NO: 2136962 - RNA, 22 nt, Human
cucauccccaggggucccagcc

SEQ ID NO: 2136963 - RNA, 23 nt, Human
cucauccccaggggucccagcca

SEQ ID NO: 2136964 - RNA, 13 nt, Human
cucauccccaggg

SEQ ID NO: 2136965 - RNA, 14 nt, Human
cucauccccagggg

SEQ ID NO: 2136966 - RNA, 24 nt, Human
cuccauucccguggaacguuuuuc

SEQ ID NO: 2136967 - RNA, 14 nt, Human
cuccaugugggcua

SEQ ID NO: 2136968 - RNA, 16 nt, Human
cuccauuccuggagcc

SEQ ID NO: 2136969 - RNA, 17 nt, Human
cuccauuccuggagccc

SEQ ID NO: 2136970 - RNA, 19 nt, Human
cuccauuccuggagcccga

SEQ ID NO: 2136971 - RNA, 20 nt, Human
cuccauuccuggagcccgag

SEQ ID NO: 2136972 - RNA, 21 nt, Human
cuccauuccuggagcccgagg

SEQ ID NO: 2136973 - RNA, 14 nt, Human
cuccauucugacca

SEQ ID NO: 2136974 - RNA, 20 nt, Human
cuccauucugaccauuucag

SEQ ID NO: 2136975 - RNA, 16 nt, Human
cuccauuguuuugccu

SEQ ID NO: 2136976 - RNA, 21 nt, Human
cucccaaggggcccaaauucu

SEQ ID NO: 2136977 - RNA, 22 nt, Human
cucccaaggggcccaaauucuu

SEQ ID NO: 2136978 - RNA, 14 nt, Human
cucccaggcgcccc

SEQ ID NO: 2136979 - RNA, 22 nt, Human
cucccaggccaggcuccuuccu

SEQ ID NO: 2136980 - RNA, 17 nt, Human
cucccaggccaggcucc

SEQ ID NO: 2136981 - RNA, 21 nt, Human
cucccaggccaggcuccuucc

SEQ ID NO: 2136982 - RNA, 11 nt, Human
cuccaggcucc

SEQ ID NO: 2136983 - RNA, 13 nt, Human
cuccaucuccacu

SEQ ID NO: 2136984 - RNA, 20 nt, Human
cuccaucgcugucaucucag

SEQ ID NO: 2136985 - RNA, 18 nt, Human
cuccagcuguucagcugg

SEQ ID NO: 2136986 - RNA, 19 nt, Human
cuccagcuguucagcuggu

SEQ ID NO: 2136987 - RNA, 13 nt, Human
cuccagcucagca

SEQ ID NO: 2136988 - RNA, 14 nt, Human
cuccagcucagcag

SEQ ID NO: 2136989 - RNA, 14 nt, Human
cuccagccugagca

SEQ ID NO: 2136990 - RNA, 19 nt, Human
cuccagcuggguuggaaaa

SEQ ID NO: 2136991 - RNA, 13 nt, Human
cuccagcuguuca

SEQ ID NO: 2136992 - RNA, 12 nt, Human
cuccacccugcu

SEQ ID NO: 2136993 - RNA, 15 nt, Human
cuccaccucagccuu

SEQ ID NO: 2136994 - RNA, 16 nt, Human
cuccaccucagccuug

SEQ ID NO: 2136995 - RNA, 17 nt, Human
cuccaccucagccuugg

SEQ ID NO: 2136996 - RNA, 15 nt, Human
cuccacagcuaccuc

SEQ ID NO: 2136997 - RNA, 11 nt, Human
cuccacccugc

SEQ ID NO: 2136998 - RNA, 16 nt, Human
cuccaccccccagaac

SEQ ID NO: 2136999 - RNA, 21 nt, Human
cuccaccccccagaaccuguc

SEQ ID NO: 2137000 - RNA, 22 nt, Human
cuccaccccccagaaccugucc

SEQ ID NO: 2137001 - RNA, 23 nt, Human
cuccaccccccagaaccuguccu

SEQ ID NO: 2137002 - RNA, 14 nt, Human
cuccacagccgcag

SEQ ID NO: 2137003 - RNA, 15 nt, Human
cuccacagccgcagc

SEQ ID NO: 2137004 - RNA, 13 nt, Human
cuccagccaaccc

SEQ ID NO: 2137005 - RNA, 14 nt, Human
cuccagccaacccc

SEQ ID NO: 2137006 - RNA, 17 nt, Human
cuccagccaaccccugu

SEQ ID NO: 2137007 - RNA, 18 nt, Human
cuccagccaaccccugug

SEQ ID NO: 2137008 - RNA, 19 nt, Human
cuccagccaaccccugugg

SEQ ID NO: 2137009 - RNA, 20 nt, Human
cuccagccaaccccugugga

SEQ ID NO: 2137010 - RNA, 21 nt, Human
cuccagccaaccccuguggag

SEQ ID NO: 2137011 - RNA, 20 nt, Human
cuccagcucaccagccccag

SEQ ID NO: 2137012 - RNA, 19 nt, Human
cuccagcucaccagcccca

SEQ ID NO: 2137013 - RNA, 13 nt, Human
cuccagccugagc

SEQ ID NO: 2137014 - RNA, 20 nt, Human
cuccagaccccuggcuuuuc

SEQ ID NO: 2137015 - RNA, 19 nt, Human
cuccagaccccuggcuuuu

SEQ ID NO: 2137016 - RNA, 19 nt, Human
cuccacucugacuggcaca

SEQ ID NO: 2137017 - RNA, 16 nt, Human
cuccacugccucugga

SEQ ID NO: 2137018 - RNA, 18 nt, Human
cuccagaccccuggcuuu

SEQ ID NO: 2137019 - RNA, 17 nt, Human
cuccagaccccuggcuu

SEQ ID NO: 2137020 - RNA, 15 nt, Human
cuccagaccccuggc

SEQ ID NO: 2137021 - RNA, 14 nt, Human
cuccagaccccugg

SEQ ID NO: 2137022 - RNA, 11 nt, Human
cuccacugccu

SEQ ID NO: 2137023 - RNA, 12 nt, Human
cuccacugcccu

SEQ ID NO: 2137024 - RNA, 13 nt, Human
cuccacugcccuc

SEQ ID NO: 2137025 - RNA, 14 nt, Human
cuccacugcccucu

SEQ ID NO: 2137026 - RNA, 15 nt, Human
cuccacugcccucug

SEQ ID NO: 2137027 - RNA, 18 nt, Human
cuccaccucagccuugga

SEQ ID NO: 2137028 - RNA, 21 nt, Human
cucuccauucccguggaacgu

SEQ ID NO: 2137029 - RNA, 16 nt, Human
cucuccagucuuccac

SEQ ID NO: 2137030 - RNA, 18 nt, Human
cucuccagucuuccaccu

SEQ ID NO: 2137031 - RNA, 21 nt, Human
cucuccagucuuccaccugga

SEQ ID NO: 2137032 - RNA, 22 nt, Human
cucuccagucuuccaccuggaa

SEQ ID NO: 2137033 - RNA, 20 nt, Human
cucuccaccucagccuugga

SEQ ID NO: 2137034 - RNA, 13 nt, Human
cucucccaucacu

SEQ ID NO: 2137035 - RNA, 12 nt, Human
cucucccaggac

SEQ ID NO: 2137036 - RNA, 13 nt, Human
cucucccaggacc

SEQ ID NO: 2137037 - RNA, 20 nt, Human
cucucccaucacuucccuac

SEQ ID NO: 2137038 - RNA, 12 nt, Human
cucucccaguug

SEQ ID NO: 2137039 - RNA, 14 nt, Human
cucucccaucacuu

SEQ ID NO: 2137040 - RNA, 18 nt, Human
cucucccaucacuucccu

SEQ ID NO: 2137041 - RNA, 23 nt, Human
cucuaaggccgaagaaggguccu

SEQ ID NO: 2137042 - RNA, 14 nt, Human
cucuaacaggggcu

SEQ ID NO: 2137043 - RNA, 23 nt, Human
cucuaauagcgaggcucuaacca

SEQ ID NO: 2137044 - RNA, 18 nt, Human
cucuaaugcucacgcucc

SEQ ID NO: 2137045 - RNA, 16 nt, Human
cucuccacugccuucg

SEQ ID NO: 2137046 - RNA, 12 nt, Human
cucuccaccuca

SEQ ID NO: 2137047 - RNA, 13 nt, Human
cucuccaccucag

SEQ ID NO: 2137048 - RNA, 14 nt, Human
cucuccaccucagc

SEQ ID NO: 2137049 - RNA, 15 nt, Human
cucuccaccucagcc

SEQ ID NO: 2137050 - RNA, 16 nt, Human
cucuccaccucagccu

SEQ ID NO: 2137051 - RNA, 17 nt, Human
cucuccaccucagccuu

SEQ ID NO: 2137052 - RNA, 18 nt, Human
cucuccaccucagccuug

SEQ ID NO: 2137053 - RNA, 10 nt, Human
cucuccaccu

SEQ ID NO: 2137054 - RNA, 15 nt, Human
cucucaucccccauu

SEQ ID NO: 2137055 - RNA, 18 nt, Human
cucucauccuuuucuccu

SEQ ID NO: 2137056 - RNA, 19 nt, Human
cucucauccuuuucuccua

SEQ ID NO: 2137057 - RNA, 12 nt, Human
cucucaguuuuu

SEQ ID NO: 2137058 - RNA, 13 nt, Human
cucuccccagcaa

SEQ ID NO: 2137059 - RNA, 13 nt, Human
cucuccccacacu

SEQ ID NO: 2137060 - RNA, 14 nt, Human
cucuccccacacua

SEQ ID NO: 2137061 - RNA, 15 nt, Human
cucuccccacacuaa

SEQ ID NO: 2137062 - RNA, 20 nt, Human
cucuccccaauauccucgcu

SEQ ID NO: 2137063 - RNA, 21 nt, Human
cucuccccaauauccucgcuc

SEQ ID NO: 2137064 - RNA, 12 nt, Human
cucuccccacac

SEQ ID NO: 2137065 - RNA, 13 nt, Human
cucuccugggccc

SEQ ID NO: 2137066 - RNA, 15 nt, Human
cucuccugggccccu

SEQ ID NO: 2137067 - RNA, 17 nt, Human
cucuccugggccccucc

SEQ ID NO: 2137068 - RNA, 18 nt, Human
cucuccugggccccuccc

SEQ ID NO: 2137069 - RNA, 19 nt, Human
cucuccugggccccucccu

SEQ ID NO: 2137070 - RNA, 20 nt, Human
cucuccugggccccucccua

SEQ ID NO: 2137071 - RNA, 21 nt, Human
cucuccugggccccucccuac

SEQ ID NO: 2137072 - RNA, 22 nt, Human
cucuccugggccccucccuacc

SEQ ID NO: 2137073 - RNA, 23 nt, Human
cucuccugggccccucccuaccu

SEQ ID NO: 2137074 - RNA, 18 nt, Human
cucuccuguacuuuuucc

SEQ ID NO: 2137075 - RNA, 12 nt, Human
cucuccugucca

SEQ ID NO: 2137076 - RNA, 19 nt, Human
cucuccuuuggccauucca

SEQ ID NO: 2137077 - RNA, 16 nt, Human
cucucggaaggcuggc

SEQ ID NO: 2137078 - RNA, 18 nt, Human
cucucggaaggcuggcug

SEQ ID NO: 2137079 - RNA, 19 nt, Human
cucucggaaggcuggcugg

SEQ ID NO: 2137080 - RNA, 22 nt, Human
cucucggaaggcuggcugggca

SEQ ID NO: 2137081 - RNA, 16 nt, Human
cucucugcagccagcc

SEQ ID NO: 2137082 - RNA, 17 nt, Human
cucucugcagccagccc

SEQ ID NO: 2137083 - RNA, 18 nt, Human
cucucugcagccagccca

SEQ ID NO: 2137084 - RNA, 19 nt, Human
cucucugcagccagcccag

SEQ ID NO: 2137085 - RNA, 20 nt, Human
cucucugcagccagcccagc

SEQ ID NO: 2137086 - RNA, 13 nt, Human
cucucuacccagc

SEQ ID NO: 2137087 - RNA, 16 nt, Human
cucucuacccagccca

SEQ ID NO: 2137088 - RNA, 17 nt, Human
cucucuacccagcccau

SEQ ID NO: 2137089 - RNA, 15 nt, Human
cucucuaaccuccuu

SEQ ID NO: 2137090 - RNA, 16 nt, Human
cucucuaaccuccuuu

SEQ ID NO: 2137091 - RNA, 18 nt, Human
cucucuaaccuccuuuac

SEQ ID NO: 2137092 - RNA, 19 nt, Human
cucucggaguaucugggaa

SEQ ID NO: 2137093 - RNA, 20 nt, Human
cucucggaguaucugggaac

SEQ ID NO: 2137094 - RNA, 19 nt, Human
cucugccccagcucuggcu

SEQ ID NO: 2137095 - RNA, 21 nt, Human
cucugccccagcucuggcuuc

SEQ ID NO: 2137096 - RNA, 13 nt, Human
cucugccccagcu

SEQ ID NO: 2137097 - RNA, 16 nt, Human
cucugccccagcucug

SEQ ID NO: 2137098 - RNA, 17 nt, Human
cucugccccagcucugg

SEQ ID NO: 2137099 - RNA, 18 nt, Human
cucugccccagcucuggc

SEQ ID NO: 2137100 - RNA, 12 nt, Human
cucugccccagc

SEQ ID NO: 2137101 - RNA, 14 nt, Human
cucugcccauuccc

SEQ ID NO: 2137102 - RNA, 15 nt, Human
cucugcccauucccc

SEQ ID NO: 2137103 - RNA, 18 nt, Human
cucugcccauuccccagc

SEQ ID NO: 2137104 - RNA, 19 nt, Human
cucugcccauuccccagcc

SEQ ID NO: 2137105 - RNA, 13 nt, Human
cucugcccagagc

SEQ ID NO: 2137106 - RNA, 14 nt, Human
cucugcccagagcu

SEQ ID NO: 2137107 - RNA, 15 nt, Human
cucugcccagagcug

SEQ ID NO: 2137108 - RNA, 16 nt, Human
cucugcccagagcugg

SEQ ID NO: 2137109 - RNA, 17 nt, Human
cucugcccagagcuggg

SEQ ID NO: 2137110 - RNA, 19 nt, Human
cucugcccagagcugggug

SEQ ID NO: 2137111 - RNA, 20 nt, Human
cucugcccagagcuggguga

SEQ ID NO: 2137112 - RNA, 18 nt, Human
cucugccaccuccccuau

SEQ ID NO: 2137113 - RNA, 14 nt, Human
cucugccagccaca

SEQ ID NO: 2137114 - RNA, 10 nt, Human
cucugccacc

SEQ ID NO: 2137115 - RNA, 12 nt, Human
cucugccaccuc

SEQ ID NO: 2137116 - RNA, 13 nt, Human
cucugccaccucc

SEQ ID NO: 2137117 - RNA, 14 nt, Human
cucugccaccuccc

SEQ ID NO: 2137118 - RNA, 20 nt, Human
cucugcccucccuccuuccu

SEQ ID NO: 2137119 - RNA, 15 nt, Human
cucugcccugcccua

SEQ ID NO: 2137120 - RNA, 16 nt, Human
cucugcccugcccuag

SEQ ID NO: 2137121 - RNA, 17 nt, Human
cucugcccugcccuagc

SEQ ID NO: 2137122 - RNA, 19 nt, Human
cucugcccugcccuagcuc

SEQ ID NO: 2137123 - RNA, 20 nt, Human
cucugcccugcccuagcucc

SEQ ID NO: 2137124 - RNA, 23 nt, Human
cucugcccugcccuagcuccaca

SEQ ID NO: 2137125 - RNA, 14 nt, Human
cucugccuccucuu

SEQ ID NO: 2137126 - RNA, 13 nt, Human
cucugccuguccc

SEQ ID NO: 2137127 - RNA, 14 nt, Human
cucugccugucccu

SEQ ID NO: 2137128 - RNA, 16 nt, Human
cucugccugucccucu

SEQ ID NO: 2137129 - RNA, 18 nt, Human
cucugccugucccucuca

SEQ ID NO: 2137130 - RNA, 19 nt, Human
cucugccugucccucucag

SEQ ID NO: 2137131 - RNA, 20 nt, Human
cucugccugucccucucagg

SEQ ID NO: 2137132 - RNA, 16 nt, Human
cucugccugugagcca

SEQ ID NO: 2137133 - RNA, 17 nt, Human
cucugccugugagccag

SEQ ID NO: 2137134 - RNA, 19 nt, Human
cucugccugugagccaguc

SEQ ID NO: 2137135 - RNA, 20 nt, Human
cucugccugugagccagucu

SEQ ID NO: 2137136 - RNA, 16 nt, Human
cucugccuccucuuca

SEQ ID NO: 2137137 - RNA, 15 nt, Human
cucugccuccucuuc

SEQ ID NO: 2137138 - RNA, 14 nt, Human
cucugccucugaca

SEQ ID NO: 2137139 - RNA, 21 nt, Human
cucugccugucccucucaggc

SEQ ID NO: 2137140 - RNA, 15 nt, Human
cucugcuuuggaaau

SEQ ID NO: 2137141 - RNA, 14 nt, Human
cucuggacaggcau

SEQ ID NO: 2137142 - RNA, 16 nt, Human
cucuggacaaagcguu

SEQ ID NO: 2137143 - RNA, 23 nt, Human
cucuggaaaggaggaaggagccu

SEQ ID NO: 2137144 - RNA, 21 nt, Human
cucuggaagagaggaaugccu

SEQ ID NO: 2137145 - RNA, 13 nt, Human
cucuggacuggcu

SEQ ID NO: 2137146 - RNA, 14 nt, Human
cucuggacuggcua

SEQ ID NO: 2137147 - RNA, 15 nt, Human
cucuggacuggcuag

SEQ ID NO: 2137148 - RNA, 16 nt, Human
cucuggacuggcuaga

SEQ ID NO: 2137149 - RNA, 19 nt, Human
cucuggacuggcuagaguc

SEQ ID NO: 2137150 - RNA, 10 nt, Human
cucugcacaa

SEQ ID NO: 2137151 - RNA, 19 nt, Human
cucugauauuccaugaaug

SEQ ID NO: 2137152 - RNA, 20 nt, Human
cucugauauuccaugaaugu

SEQ ID NO: 2137153 - RNA, 23 nt, Human
cucugauauuccaugaauguauc

SEQ ID NO: 2137154 - RNA, 15 nt, Human
cucugaucaaguauu

SEQ ID NO: 2137155 - RNA, 15 nt, Human
cucugauguaaauga

SEQ ID NO: 2137156 - RNA, 18 nt, Human
cucugauguaaaugaagu

SEQ ID NO: 2137157 - RNA, 22 nt, Human
cucugcaagaauugaagcagga

SEQ ID NO: 2137158 - RNA, 13 nt, Human
cucugagccccug

SEQ ID NO: 2137159 - RNA, 22 nt, Human
cucugagccccugggacugcug

SEQ ID NO: 2137160 - RNA, 16 nt, Human
cucugagcaaaugugg

SEQ ID NO: 2137161 - RNA, 17 nt, Human
cucugaggacugcacca

SEQ ID NO: 2137162 - RNA, 19 nt, Human
cucugaggcucuuucuggg

SEQ ID NO: 2137163 - RNA, 20 nt, Human
cucugaggcucuuucugggc

SEQ ID NO: 2137164 - RNA, 21 nt, Human
cucucugcagccagcccagcc

SEQ ID NO: 2137165 - RNA, 13 nt, Human
cucucugcuguac

SEQ ID NO: 2137166 - RNA, 16 nt, Human
cucucuggaaaggagg

SEQ ID NO: 2137167 - RNA, 14 nt, Human
cucucugccuguga

SEQ ID NO: 2137168 - RNA, 15 nt, Human
cucucugccugugag

SEQ ID NO: 2137169 - RNA, 18 nt, Human
cucucugccugugagcca

SEQ ID NO: 2137170 - RNA, 20 nt, Human
cucucugccugugagccagu

SEQ ID NO: 2137171 - RNA, 22 nt, Human
cucucugccugugagccagucu

SEQ ID NO: 2137172 - RNA, 23 nt, Human
cucugagaaggggaggaccucug

SEQ ID NO: 2137173 - RNA, 11 nt, Human
cugacccacug

SEQ ID NO: 2137174 - RNA, 23 nt, Human
cugaccauccacucuacccuccc

SEQ ID NO: 2137175 - RNA, 19 nt, Human
cugaccauccacucuaccc

SEQ ID NO: 2137176 - RNA, 22 nt, Human
cugaccauccacucuacccucc

SEQ ID NO: 2137177 - RNA, 15 nt, Human
cugaccauccacucu

SEQ ID NO: 2137178 - RNA, 16 nt, Human
cugaccauccacucua

SEQ ID NO: 2137179 - RNA, 22 nt, Human
cugaccacgcuuucuagcuguu

SEQ ID NO: 2137180 - RNA, 21 nt, Human
cugaccacacuuccuguccag

SEQ ID NO: 2137181 - RNA, 19 nt, Human
cugacaggcaaugcuggcu

SEQ ID NO: 2137182 - RNA, 18 nt, Human
cugacaggcaaugcuggc

SEQ ID NO: 2137183 - RNA, 17 nt, Human
cugacaggcaaugcugg

SEQ ID NO: 2137184 - RNA, 16 nt, Human
cugacaggcaaugcug

SEQ ID NO: 2137185 - RNA, 20 nt, Human
cugacaggcaaugcuggcug

SEQ ID NO: 2137186 - RNA, 23 nt, Human
cugacauuaacaguuuuccauga

SEQ ID NO: 2137187 - RNA, 17 nt, Human
cugacauuguuggccaa

SEQ ID NO: 2137188 - RNA, 21 nt, Human
cugacagacacaggcccggcu

SEQ ID NO: 2137189 - RNA, 11 nt, Human
cugacaggcaa

SEQ ID NO: 2137190 - RNA, 12 nt, Human
cugacagaggag

SEQ ID NO: 2137191 - RNA, 19 nt, Human
cugacagacacaggcccgg

SEQ ID NO: 2137192 - RNA, 16 nt, Human
cugaauuguccccagu

SEQ ID NO: 2137193 - RNA, 15 nt, Human
cugaauuguccccag

SEQ ID NO: 2137194 - RNA, 21 nt, Human
cugaauaugaacggugagcau

SEQ ID NO: 2137195 - RNA, 16 nt, Human
cugaauauuuauauuu

SEQ ID NO: 2137196 - RNA, 20 nt, Human
cugaauauuuauauuucacu

SEQ ID NO: 2137197 - RNA, 21 nt, Human
cugaauauuuauauuucacua

SEQ ID NO: 2137198 - RNA, 16 nt, Human
cugaauagcucccaga

SEQ ID NO: 2137199 - RNA, 23 nt, Human
cugaauagcucccagauuucagu

SEQ ID NO: 2137200 - RNA, 19 nt, Human
cugaauagucuucagagau

SEQ ID NO: 2137201 - RNA, 18 nt, Human
cugaauaccucuuugaaa

SEQ ID NO: 2137202 - RNA, 20 nt, Human
cugaauaccucuuugaaaga

SEQ ID NO: 2137203 - RNA, 17 nt, Human
cugaaugaaauaucaga

SEQ ID NO: 2137204 - RNA, 20 nt, Human
cugaaugaacaaccucggcu

SEQ ID NO: 2137205 - RNA, 22 nt, Human
cugaaugaacaaccucggcucc

SEQ ID NO: 2137206 - RNA, 16 nt, Human
cugaagucacacagug

SEQ ID NO: 2137207 - RNA, 15 nt, Human
cugaagucacacagu

SEQ ID NO: 2137208 - RNA, 14 nt, Human
cugaagucacacag

SEQ ID NO: 2137209 - RNA, 22 nt, Human
cugaagucacugcacagugcau

SEQ ID NO: 2137210 - RNA, 16 nt, Human
cugaagucacugcaca

SEQ ID NO: 2137211 - RNA, 17 nt, Human
cugaagucacugcacag

SEQ ID NO: 2137212 - RNA, 16 nt, Human
cugaauacauucugcu

SEQ ID NO: 2137213 - RNA, 18 nt, Human
cugaauacauucugcuuu

SEQ ID NO: 2137214 - RNA, 11 nt, Human
cugaauaauaa

SEQ ID NO: 2137215 - RNA, 16 nt, Human
cugaauacagaggcaa

SEQ ID NO: 2137216 - RNA, 21 nt, Human
cugaagacucauucuucugua

SEQ ID NO: 2137217 - RNA, 16 nt, Human
cugaaccuuccaucuc

SEQ ID NO: 2137218 - RNA, 13 nt, Human
cugaacuucagcu

SEQ ID NO: 2137219 - RNA, 20 nt, Human
cugaagagcuauuauauaaa

SEQ ID NO: 2137220 - RNA, 19 nt, Human
cugaagaggaacugggccu

SEQ ID NO: 2137221 - RNA, 14 nt, Human
cugaaccuuccauc

SEQ ID NO: 2137222 - RNA, 13 nt, Human
cugaacggggaga

SEQ ID NO: 2137223 - RNA, 21 nt, Human
cugaaccuggguaacuaggga

SEQ ID NO: 2137224 - RNA, 14 nt, Human
cucuucuccacugg

SEQ ID NO: 2137225 - RNA, 17 nt, Human
cucuucuccacuggaug

SEQ ID NO: 2137226 - RNA, 15 nt, Human
cucuucuccacugga

SEQ ID NO: 2137227 - RNA, 19 nt, Human
cucuucuccacuggaugga

SEQ ID NO: 2137228 - RNA, 12 nt, Human
cucuucuccagg

SEQ ID NO: 2137229 - RNA, 16 nt, Human
cucuucuccuuucaca

SEQ ID NO: 2137230 - RNA, 15 nt, Human
cucuucuccuuucac

SEQ ID NO: 2137231 - RNA, 13 nt, Human
cucuucuccuuuc

SEQ ID NO: 2137232 - RNA, 21 nt, Human
cucuucugcuccacccuuggc

SEQ ID NO: 2137233 - RNA, 19 nt, Human
cucuucugcuccacccuug

SEQ ID NO: 2137234 - RNA, 20 nt, Human
cucuucugcuccacccuugg

SEQ ID NO: 2137235 - RNA, 14 nt, Human
cucuucugcuccac

SEQ ID NO: 2137236 - RNA, 15 nt, Human
cucuucugcuccacc

SEQ ID NO: 2137237 - RNA, 16 nt, Human
cucuucugcuccaccc

SEQ ID NO: 2137238 - RNA, 18 nt, Human
cucuucugcuccacccuu

SEQ ID NO: 2137239 - RNA, 14 nt, Human
cucuggagccaccu

SEQ ID NO: 2137240 - RNA, 15 nt, Human
cucuggagccaccug

SEQ ID NO: 2137241 - RNA, 16 nt, Human
cucuggagccaccugu

SEQ ID NO: 2137242 - RNA, 20 nt, Human
cucuggagccaccuguccca

SEQ ID NO: 2137243 - RNA, 22 nt, Human
cucuggagccaccugucccacc

SEQ ID NO: 2137244 - RNA, 22 nt, Human
cucuguuccuucacauccugug

SEQ ID NO: 2137245 - RNA, 14 nt, Human
cucuguuccuggcu

SEQ ID NO: 2137246 - RNA, 15 nt, Human
cucuguuccuggcuc

SEQ ID NO: 2137247 - RNA, 22 nt, Human
cucuguuccuggcucagccuca

SEQ ID NO: 2137248 - RNA, 16 nt, Human
cucuguuccuucacau

SEQ ID NO: 2137249 - RNA, 13 nt, Human
cucuuaaaaccca

SEQ ID NO: 2137250 - RNA, 24 nt, Human
cucuuaaaacccaagugccuuagc

SEQ ID NO: 2137251 - RNA, 21 nt, Human
cucuggaaugacaugugucaa

SEQ ID NO: 2137252 - RNA, 20 nt, Human
cucuuaaagcugccuguagu

SEQ ID NO: 2137253 - RNA, 22 nt, Human
cucuucagguucuuagugucac

SEQ ID NO: 2137254 - RNA, 14 nt, Human
cucuucagguucuu

SEQ ID NO: 2137255 - RNA, 15 nt, Human
cucuucagguucuua

SEQ ID NO: 2137256 - RNA, 18 nt, Human
cucuucaggccucccucu

SEQ ID NO: 2137257 - RNA, 19 nt, Human
cucuucaggccucccucuc

SEQ ID NO: 2137258 - RNA, 20 nt, Human
cucuucaggccucccucucu

SEQ ID NO: 2137259 - RNA, 18 nt, Human
cucuuucuccuuagucuu

SEQ ID NO: 2137260 - RNA, 15 nt, Human
cucuuuggacacuca

SEQ ID NO: 2137261 - RNA, 18 nt, Human
cucuuuggacacucacac

SEQ ID NO: 2137262 - RNA, 17 nt, Human
cucuuucuggccugccu

SEQ ID NO: 2137263 - RNA, 12 nt, Human
cucuuucugggc

SEQ ID NO: 2137264 - RNA, 15 nt, Human
cucuuucagaaaaca

SEQ ID NO: 2137265 - RNA, 21 nt, Human
cucuuucagaaaacagaaaaa

SEQ ID NO: 2137266 - RNA, 17 nt, Human
cucuuuccaucuacccu

SEQ ID NO: 2137267 - RNA, 12 nt, Human
cucuuguaagau

SEQ ID NO: 2137268 - RNA, 13 nt, Human
cucuuguaagauu

SEQ ID NO: 2137269 - RNA, 14 nt, Human
cucuuguaagauuu

SEQ ID NO: 2137270 - RNA, 15 nt, Human
cucuuguaagauuuu

SEQ ID NO: 2137271 - RNA, 17 nt, Human
cucuuguaagauuuuga

SEQ ID NO: 2137272 - RNA, 18 nt, Human
cucuuguaagauuuugaa

SEQ ID NO: 2137273 - RNA, 19 nt, Human
cucuuguaagauuuugaaa

SEQ ID NO: 2137274 - RNA, 20 nt, Human
cucuuguaagauuuugaaaa

SEQ ID NO: 2137275 - RNA, 23 nt, Human
cucuuguaagauuuugaaaacua

SEQ ID NO: 2137276 - RNA, 15 nt, Human
cucuugaccucaggu

SEQ ID NO: 2137277 - RNA, 13 nt, Human
cucuugaccucag

SEQ ID NO: 2137278 - RNA, 16 nt, Human
cucuugaccucaggug

SEQ ID NO: 2137279 - RNA, 20 nt, Human
cucuugaagaugcugaaaca

SEQ ID NO: 2137280 - RNA, 21 nt, Human
cucuugaagacacugaaauau

SEQ ID NO: 2137281 - RNA, 20 nt, Human
cucuugaagacacugaaaua

SEQ ID NO: 2137282 - RNA, 20 nt, Human
cucuugguuuccuuccuugg

SEQ ID NO: 2137283 - RNA, 18 nt, Human
cucuugggcugagacugg

SEQ ID NO: 2137284 - RNA, 17 nt, Human
cucuugggcugagacug

SEQ ID NO: 2137285 - RNA, 15 nt, Human
cucuugggcugagac

SEQ ID NO: 2137286 - RNA, 16 nt, Human
cucuugggcugagacu

SEQ ID NO: 2137287 - RNA, 15 nt, Human
cucuuggcuggcuuc

SEQ ID NO: 2137288 - RNA, 14 nt, Human
cuuacuuaguguua

SEQ ID NO: 2137289 - RNA, 18 nt, Human
cuuacuuauuaucuucag

SEQ ID NO: 2137290 - RNA, 13 nt, Human
cuuacuuacagca

SEQ ID NO: 2137291 - RNA, 18 nt, Human
cuuacuuagcaugcacaa

SEQ ID NO: 2137292 - RNA, 14 nt, Human
cuuacuccaggaga

SEQ ID NO: 2137293 - RNA, 20 nt, Human
cuuacuacaugugggagcuu

SEQ ID NO: 2137294 - RNA, 18 nt, Human
cuuacuacaugugggagc

SEQ ID NO: 2137295 - RNA, 19 nt, Human
cuuacuauuaagcaguaaa

SEQ ID NO: 2137296 - RNA, 21 nt, Human
cuuaaugauccguuccauugc

SEQ ID NO: 2137297 - RNA, 15 nt, Human
cuuagaagucacaca

SEQ ID NO: 2137298 - RNA, 13 nt, Human
cuuacuuuguaug

SEQ ID NO: 2137299 - RNA, 14 nt, Human
cuuacuuuguauga

SEQ ID NO: 2137300 - RNA, 15 nt, Human
cuuacuuuguaugau

SEQ ID NO: 2137301 - RNA, 18 nt, Human
cuuacuuuguaugauauu

SEQ ID NO: 2137302 - RNA, 19 nt, Human
cuuacuuuguaugauauuc

SEQ ID NO: 2137303 - RNA, 17 nt, Human
cuuagaaauugcauuuc

SEQ ID NO: 2137304 - RNA, 15 nt, Human
cuuagaaccuuucuu

SEQ ID NO: 2137305 - RNA, 13 nt, Human
cuuagauaucuuu

SEQ ID NO: 2137306 - RNA, 14 nt, Human
cuuagauaucuuuu

SEQ ID NO: 2137307 - RNA, 17 nt, Human
cuuagauaucuuuuuau

SEQ ID NO: 2137308 - RNA, 20 nt, Human
cuuagauaucuuuuuauuga

SEQ ID NO: 2137309 - RNA, 15 nt, Human
cuuauacauuugaua

SEQ ID NO: 2137310 - RNA, 23 nt, Human
cuuauagucaauguuucuuuuau

SEQ ID NO: 2137311 - RNA, 18 nt, Human
cuuagguacuuauuccag

SEQ ID NO: 2137312 - RNA, 17 nt, Human
cuuagguuggcaaaaag

SEQ ID NO: 2137313 - RNA, 19 nt, Human
cuuauauuuuuaauaaaag

SEQ ID NO: 2137314 - RNA, 17 nt, Human
cuuaucugugcgugaaa

SEQ ID NO: 2137315 - RNA, 19 nt, Human
cuuaucugugcgugaaaca

SEQ ID NO: 2137316 - RNA, 20 nt, Human
cuuaucugugcgugaaacac

SEQ ID NO: 2137317 - RNA, 21 nt, Human
cuuaucugugcgugaaacaca

SEQ ID NO: 2137318 - RNA, 16 nt, Human
cuuaucuuacaaagug

SEQ ID NO: 2137319 - RNA, 17 nt, Human
cuuaucuuacaaagugu

SEQ ID NO: 2137320 - RNA, 18 nt, Human
cuuaugaauauuuauaac

SEQ ID NO: 2137321 - RNA, 12 nt, Human
cuuauuguucca

SEQ ID NO: 2137322 - RNA, 13 nt, Human
cuuauuguuccaa

SEQ ID NO: 2137323 - RNA, 14 nt, Human
cuuauuguuccaag

SEQ ID NO: 2137324 - RNA, 15 nt, Human
cuuauuguuccaaga

SEQ ID NO: 2137325 - RNA, 17 nt, Human
cuuauuguuccaagaca

SEQ ID NO: 2137326 - RNA, 15 nt, Human
cuuauuuaaugaaag

SEQ ID NO: 2137327 - RNA, 22 nt, Human
cuuauuguuccaagacauuguc

SEQ ID NO: 2137328 - RNA, 19 nt, Human
cuuauuguuccaagacauu

SEQ ID NO: 2137329 - RNA, 20 nt, Human
cuuauuguuccaagacauug

SEQ ID NO: 2137330 - RNA, 13 nt, Human
cuguuuauggccu

SEQ ID NO: 2137331 - RNA, 14 nt, Human
cuguuuauggccuc

SEQ ID NO: 2137332 - RNA, 15 nt, Human
cuguuuauggccuca

SEQ ID NO: 2137333 - RNA, 16 nt, Human
cuguuuauggccucag

SEQ ID NO: 2137334 - RNA, 18 nt, Human
cuguuuacaagaaaaaau

SEQ ID NO: 2137335 - RNA, 20 nt, Human
cuguuuacaagaaaaaauga

SEQ ID NO: 2137336 - RNA, 20 nt, Human
cugguucuuguguuggcugu

SEQ ID NO: 2137337 - RNA, 22 nt, Human
cugguucuucauuuauugagca

SEQ ID NO: 2137338 - RNA, 14 nt, Human
cuguuuacaagaaa

SEQ ID NO: 2137339 - RNA, 15 nt, Human
cuguuuacaagaaaa

SEQ ID NO: 2137340 - RNA, 16 nt, Human
cuguuuacaagaaaaa

SEQ ID NO: 2137341 - RNA, 17 nt, Human
cuguuuacaagaaaaaa

SEQ ID NO: 2137342 - RNA, 13 nt, Human
cuguuuccuuuua

SEQ ID NO: 2137343 - RNA, 15 nt, Human
cuguuuccuuuuaug

SEQ ID NO: 2137344 - RNA, 13 nt, Human
cuguuucucugcu

SEQ ID NO: 2137345 - RNA, 14 nt, Human
cuguuucucugcug

SEQ ID NO: 2137346 - RNA, 22 nt, Human
cuguuuauggccucagcugccu

SEQ ID NO: 2137347 - RNA, 17 nt, Human
cuguuuauggccucagc

SEQ ID NO: 2137348 - RNA, 18 nt, Human
cuguuuauggccucagcu

SEQ ID NO: 2137349 - RNA, 19 nt, Human
cuguuuauggccucagcug

SEQ ID NO: 2137350 - RNA, 21 nt, Human
cuguuuauggccucagcugcc

SEQ ID NO: 2137351 - RNA, 17 nt, Human
cuguuuucucuugagag

SEQ ID NO: 2137352 - RNA, 14 nt, Human
cuguuuuauacugu

SEQ ID NO: 2137353 - RNA, 12 nt, Human
cuguuuugaauu

SEQ ID NO: 2137354 - RNA, 22 nt, Human
cuguuuugccugaaguuggagu

SEQ ID NO: 2137355 - RNA, 21 nt, Human
cuguuuuucagggagguggcu

SEQ ID NO: 2137356 - RNA, 13 nt, Human
cuguuuucucuug

SEQ ID NO: 2137357 - RNA, 14 nt, Human
cuguuuucucuuga

SEQ ID NO: 2137358 - RNA, 12 nt, Human
cuguuuuaaauu

SEQ ID NO: 2137359 - RNA, 22 nt, Human
cuguuuuaaauuuauuucaaaa

SEQ ID NO: 2137360 - RNA, 17 nt, Human
cuguuucugcuugcucu

SEQ ID NO: 2137361 - RNA, 20 nt, Human
cuguuucuauucucuccuca

SEQ ID NO: 2137362 - RNA, 20 nt, Human
cuguuuguuugacaaagaaa

SEQ ID NO: 2137363 - RNA, 14 nt, Human
cuuaaguaucagaa

SEQ ID NO: 2137364 - RNA, 15 nt, Human
cuuaaguaucagaaa

SEQ ID NO: 2137365 - RNA, 11 nt, Human
cuuaagaacac

SEQ ID NO: 2137366 - RNA, 17 nt, Human
cuuaagaacacaaagcg

SEQ ID NO: 2137367 - RNA, 12 nt, Human
cuuaauaaauuc

SEQ ID NO: 2137368 - RNA, 17 nt, Human
cuuaauaaauucagaua

SEQ ID NO: 2137369 - RNA, 18 nt, Human
cuuaauaaauucagauau

SEQ ID NO: 2137370 - RNA, 14 nt, Human
cuuaaugagauagu

SEQ ID NO: 2137371 - RNA, 12 nt, Human
cuuaaugagaua

SEQ ID NO: 2137372 - RNA, 16 nt, Human
cuuaaccgcaucagaa

SEQ ID NO: 2137373 - RNA, 16 nt, Human
cuuaaauuuuaauuua

SEQ ID NO: 2137374 - RNA, 17 nt, Human
cuuaaauuuuaauuuau

SEQ ID NO: 2137375 - RNA, 20 nt, Human
cuuaaccccaguaagccacu

SEQ ID NO: 2137376 - RNA, 11 nt, Human
cuuaaauuaaa

SEQ ID NO: 2137377 - RNA, 12 nt, Human
cuuaaauuaaac

SEQ ID NO: 2137378 - RNA, 14 nt, Human
cuuaaauuaaacaa

SEQ ID NO: 2137379 - RNA, 15 nt, Human
cuuaaauuaaacaau

SEQ ID NO: 2137380 - RNA, 17 nt, Human
cuuaaauuaaacaauuu

SEQ ID NO: 2137381 - RNA, 19 nt, Human
cuuaaauuaaacaauuuau

SEQ ID NO: 2137382 - RNA, 20 nt, Human
cuuaaauuaaacaauuuauu

SEQ ID NO: 2137383 - RNA, 21 nt, Human
cuuaaauuaaacaauuuauuu

SEQ ID NO: 2137384 - RNA, 22 nt, Human
cuuaaauuaaacaauuuauuuu

SEQ ID NO: 2137385 - RNA, 17 nt, Human
cuuaaaaaaaugacaga

SEQ ID NO: 2137386 - RNA, 12 nt, Human
cuuaaaaaacuu

SEQ ID NO: 2137387 - RNA, 18 nt, Human
cuuaaaaaacuuguaaau

SEQ ID NO: 2137388 - RNA, 17 nt, Human
cuguuuuuuccugagcu

SEQ ID NO: 2137389 - RNA, 18 nt, Human
cuguuuuuuccugagcuu

SEQ ID NO: 2137390 - RNA, 14 nt, Human
cuuaaaaaaauaaa

SEQ ID NO: 2137391 - RNA, 15 nt, Human
cuuaaaaaaaugaca

SEQ ID NO: 2137392 - RNA, 19 nt, Human
cuguuuuuuaaacuaggaa

SEQ ID NO: 2137393 - RNA, 13 nt, Human
cuguuuuuuaguu

SEQ ID NO: 2137394 - RNA, 16 nt, Human
cuuaaaugagaaggaa

SEQ ID NO: 2137395 - RNA, 15 nt, Human
cuuaaaaaaaacuca

SEQ ID NO: 2137396 - RNA, 17 nt, Human
cuuaaaaaauaaaaacu

SEQ ID NO: 2137397 - RNA, 13 nt, Human
cuuaaaaaauguc

SEQ ID NO: 2137398 - RNA, 14 nt, Human
cuuaaaaaaugucc

SEQ ID NO: 2137399 - RNA, 13 nt, Human
cuuaaauaucaau

SEQ ID NO: 2137400 - RNA, 18 nt, Human
cuuaaauaucaaucauuu

SEQ ID NO: 2137401 - RNA, 21 nt, Human
cuuaaaugaaagcauguggca

SEQ ID NO: 2137402 - RNA, 16 nt, Human
cuuaacuggagcccca

SEQ ID NO: 2137403 - RNA, 22 nt, Human
cuuaacuuaaauuuuaauuuau

SEQ ID NO: 2137404 - RNA, 11 nt, Human
cuuaacucuuu

SEQ ID NO: 2137405 - RNA, 13 nt, Human
cuuaacucuuugc

SEQ ID NO: 2137406 - RNA, 21 nt, Human
cuuaacucuuugccuuugcca

SEQ ID NO: 2137407 - RNA, 19 nt, Human
cuuaacugcauuuuuagac

SEQ ID NO: 2137408 - RNA, 15 nt, Human
cuuccagcacccugc

SEQ ID NO: 2137409 - RNA, 16 nt, Human
cuuccagcacccugca

SEQ ID NO: 2137410 - RNA, 15 nt, Human
cuuccacauuuuccc

SEQ ID NO: 2137411 - RNA, 13 nt, Human
cuuccaccagccu

SEQ ID NO: 2137412 - RNA, 14 nt, Human
cuuccaccagccug

SEQ ID NO: 2137413 - RNA, 15 nt, Human
cuuccaccagccugc

SEQ ID NO: 2137414 - RNA, 16 nt, Human
cuuccaccagccugca

SEQ ID NO: 2137415 - RNA, 14 nt, Human
cuuccagcacccug

SEQ ID NO: 2137416 - RNA, 23 nt, Human
cuuccaccaaguuggaacauccu

SEQ ID NO: 2137417 - RNA, 12 nt, Human
cuuccaccagcc

SEQ ID NO: 2137418 - RNA, 17 nt, Human
cuuccacaggucucaga

SEQ ID NO: 2137419 - RNA, 21 nt, Human
cuuccacaggucucagaaucu

SEQ ID NO: 2137420 - RNA, 16 nt, Human
cuuccaggaaaaagga

SEQ ID NO: 2137421 - RNA, 19 nt, Human
cuuccaggaaaaaggacag

SEQ ID NO: 2137422 - RNA, 20 nt, Human
cuuccaggaaaaaggacagg

SEQ ID NO: 2137423 - RNA, 23 nt, Human
cuuccagguucugguuagcucag

SEQ ID NO: 2137424 - RNA, 14 nt, Human
cuucccagcucucc

SEQ ID NO: 2137425 - RNA, 15 nt, Human
cuucccagcucuccc

SEQ ID NO: 2137426 - RNA, 18 nt, Human
cuucccagcucucccucu

SEQ ID NO: 2137427 - RNA, 20 nt, Human
cuucccagcucucccucugg

SEQ ID NO: 2137428 - RNA, 21 nt, Human
cuuccuacaagagcagccugu

SEQ ID NO: 2137429 - RNA, 22 nt, Human
cuuccuacaagagcagccugug

SEQ ID NO: 2137430 - RNA, 24 nt, Human
cuuccuacaagagcagccuguggc

SEQ ID NO: 2137431 - RNA, 18 nt, Human
cuuccuacaagagcagcc

SEQ ID NO: 2137432 - RNA, 15 nt, Human
cuuccggagauguag

SEQ ID NO: 2137433 - RNA, 14 nt, Human
cuuccggagaugua

SEQ ID NO: 2137434 - RNA, 14 nt, Human
cuucccuuuuacau

SEQ ID NO: 2137435 - RNA, 11 nt, Human
cuucccucugc

SEQ ID NO: 2137436 - RNA, 13 nt, Human
cuucccucugccu

SEQ ID NO: 2137437 - RNA, 15 nt, Human
cuucccucugccugu

SEQ ID NO: 2137438 - RNA, 16 nt, Human
cuucccucugccuguc

SEQ ID NO: 2137439 - RNA, 17 nt, Human
cuucccucugccugucc

SEQ ID NO: 2137440 - RNA, 18 nt, Human
cuucccucugccuguccc

SEQ ID NO: 2137441 - RNA, 19 nt, Human
cuucccucugccugucccu

SEQ ID NO: 2137442 - RNA, 12 nt, Human
cuucccagcugc

SEQ ID NO: 2137443 - RNA, 15 nt, Human
cuucccagcugcccc

SEQ ID NO: 2137444 - RNA, 16 nt, Human
cuucccagcugccccu

SEQ ID NO: 2137445 - RNA, 18 nt, Human
cuucccagcugccccucc

SEQ ID NO: 2137446 - RNA, 21 nt, Human
cuucccagcugccccucccug

SEQ ID NO: 2137447 - RNA, 22 nt, Human
cuucccagcugccccucccugc

SEQ ID NO: 2137448 - RNA, 11 nt, Human
cuucccagcuu

SEQ ID NO: 2137449 - RNA, 21 nt, Human
cuucccagcucucccucuggc

SEQ ID NO: 2137450 - RNA, 22 nt, Human
cuucccagcucucccucuggcc

SEQ ID NO: 2137451 - RNA, 13 nt, Human
cuuccccuuuccc

SEQ ID NO: 2137452 - RNA, 15 nt, Human
cuucccgcucagccc

SEQ ID NO: 2137453 - RNA, 19 nt, Human
cuuccccuugcccagggcu

SEQ ID NO: 2137454 - RNA, 23 nt, Human
cuuccccuugcccagggcucagc

SEQ ID NO: 2137455 - RNA, 17 nt, Human
cuucccgcucagcccuc

SEQ ID NO: 2137456 - RNA, 16 nt, Human
cuucccgcucagcccu

SEQ ID NO: 2137457 - RNA, 21 nt, Human
cuucccucaaagcuuccauuc

SEQ ID NO: 2137458 - RNA, 23 nt, Human
cuucccucaaagcuuccauucca

SEQ ID NO: 2137459 - RNA, 24 nt, Human
cuucccucaaagcuuccauuccac

SEQ ID NO: 2137460 - RNA, 15 nt, Human
cuucccucacaccgc

SEQ ID NO: 2137461 - RNA, 16 nt, Human
cuucccucuccccaag

SEQ ID NO: 2137462 - RNA, 18 nt, Human
cuucauuuccugugucuu

SEQ ID NO: 2137463 - RNA, 18 nt, Human
cuucaggucaggaguucg

SEQ ID NO: 2137464 - RNA, 23 nt, Human
cuucaggguucuccucuccccuc

SEQ ID NO: 2137465 - RNA, 14 nt, Human
cuucaggguucucc

SEQ ID NO: 2137466 - RNA, 18 nt, Human
cuucaggguucuccucuc

SEQ ID NO: 2137467 - RNA, 20 nt, Human
cuucaggguucuccucuccc

SEQ ID NO: 2137468 - RNA, 21 nt, Human
cuucaggguucuccucucccc

SEQ ID NO: 2137469 - RNA, 14 nt, Human
cuucagggggccag

SEQ ID NO: 2137470 - RNA, 15 nt, Human
cuucagggggccagg

SEQ ID NO: 2137471 - RNA, 23 nt, Human
cuucagggggccaggugcacaga

SEQ ID NO: 2137472 - RNA, 19 nt, Human
cuucauuucugauauagaa

SEQ ID NO: 2137473 - RNA, 20 nt, Human
cuucauuucugauauagaau

SEQ ID NO: 2137474 - RNA, 21 nt, Human
cuucauuucugauauagaauu

SEQ ID NO: 2137475 - RNA, 14 nt, Human
cuucauuuggagau

SEQ ID NO: 2137476 - RNA, 13 nt, Human
cuucauuuggaga

SEQ ID NO: 2137477 - RNA, 18 nt, Human
cuuccaacaggagcuggg

SEQ ID NO: 2137478 - RNA, 14 nt, Human
cuuccaacugcugc

SEQ ID NO: 2137479 - RNA, 15 nt, Human
cuuccaacugcugcc

SEQ ID NO: 2137480 - RNA, 17 nt, Human
cuuccaacugcugcccc

SEQ ID NO: 2137481 - RNA, 18 nt, Human
cuuccaacugcugcccca

SEQ ID NO: 2137482 - RNA, 19 nt, Human
cuuccaacugcugccccaa

SEQ ID NO: 2137483 - RNA, 13 nt, Human
cuuccaagaccug

SEQ ID NO: 2137484 - RNA, 14 nt, Human
cuuccaagaccuga

SEQ ID NO: 2137485 - RNA, 16 nt, Human
cuuccaagaccugacu

SEQ ID NO: 2137486 - RNA, 17 nt, Human
cuuccaagaccugacuc

SEQ ID NO: 2137487 - RNA, 18 nt, Human
cuuccaagaccugacuca

SEQ ID NO: 2137488 - RNA, 19 nt, Human
cuuccaagacuccagcccu

SEQ ID NO: 2137489 - RNA, 16 nt, Human
cuuccaagcaaaggug

SEQ ID NO: 2137490 - RNA, 18 nt, Human
cuucaggcucuucuccuu

SEQ ID NO: 2137491 - RNA, 17 nt, Human
cuucaggcucuucuccu

SEQ ID NO: 2137492 - RNA, 16 nt, Human
cuucaggcucuucucc

SEQ ID NO: 2137493 - RNA, 15 nt, Human
cuucaggcucuucuc

SEQ ID NO: 2137494 - RNA, 20 nt, Human
cuucaggccucccucucucu

SEQ ID NO: 2137495 - RNA, 21 nt, Human
cuucaggggagucccgucagg

SEQ ID NO: 2137496 - RNA, 22 nt, Human
cuucaggggagucccgucagga

SEQ ID NO: 2137497 - RNA, 23 nt, Human
cuucaggggagucccgucaggac

SEQ ID NO: 2137498 - RNA, 14 nt, Human
cuucaggcucuucu

SEQ ID NO: 2137499 - RNA, 12 nt, Human
cuucaggccucc

SEQ ID NO: 2137500 - RNA, 15 nt, Human
cuucaggccucccuc

SEQ ID NO: 2137501 - RNA, 11 nt, Human
cuucagcugac

SEQ ID NO: 2137502 - RNA, 23 nt, Human
cuucagccuagccgaccucagcc

SEQ ID NO: 2137503 - RNA, 21 nt, Human
cuucaaaaacugucaaagaau

SEQ ID NO: 2137504 - RNA, 17 nt, Human
cuucagccaggagcugg

SEQ ID NO: 2137505 - RNA, 15 nt, Human
cuucagccaggagcu

SEQ ID NO: 2137506 - RNA, 15 nt, Human
cuucagccaccucuc

SEQ ID NO: 2137507 - RNA, 17 nt, Human
cuucagccaccucucuu

SEQ ID NO: 2137508 - RNA, 16 nt, Human
cuuauuuuuagauggu

SEQ ID NO: 2137509 - RNA, 22 nt, Human
cuuauuuuuagaugguuacacu

SEQ ID NO: 2137510 - RNA, 23 nt, Human
cuuauuuuuagaugguuacacug

SEQ ID NO: 2137511 - RNA, 16 nt, Human
cuuauuuucauguaua

SEQ ID NO: 2137512 - RNA, 21 nt, Human
cuuauuguuccaagacauugu

SEQ ID NO: 2137513 - RNA, 19 nt, Human
cuucagccaggagcugggc

SEQ ID NO: 2137514 - RNA, 18 nt, Human
cuucagccaggagcuggg

SEQ ID NO: 2137515 - RNA, 13 nt, Human
cuucagccuagcc

SEQ ID NO: 2137516 - RNA, 20 nt, Human
cuucagccuagccgaccuca

SEQ ID NO: 2137517 - RNA, 21 nt, Human
cuucagccuagccgaccucag

SEQ ID NO: 2137518 - RNA, 22 nt, Human
cuucagccuagccgaccucagc

SEQ ID NO: 2137519 - RNA, 13 nt, Human
cuucguuuugguu

SEQ ID NO: 2137520 - RNA, 19 nt, Human
cuucuaaaaaaaaacaaaa

SEQ ID NO: 2137521 - RNA, 22 nt, Human
cuucucauagcauuaacuaauc

SEQ ID NO: 2137522 - RNA, 22 nt, Human
cuucucaggcucugcccugccc

SEQ ID NO: 2137523 - RNA, 13 nt, Human
cuucucauagcau

SEQ ID NO: 2137524 - RNA, 15 nt, Human
cuucucauagcauua

SEQ ID NO: 2137525 - RNA, 13 nt, Human
cuucucaggcucu

SEQ ID NO: 2137526 - RNA, 15 nt, Human
cuucucaggcucugc

SEQ ID NO: 2137527 - RNA, 16 nt, Human
cuucucaggcucugcc

SEQ ID NO: 2137528 - RNA, 19 nt, Human
cuucucaggcucugcccug

SEQ ID NO: 2137529 - RNA, 20 nt, Human
cuucucaggcucugcccugc

SEQ ID NO: 2137530 - RNA, 21 nt, Human
cuucucaggcucugcccugcc

SEQ ID NO: 2137531 - RNA, 23 nt, Human
cuucgagguggaucacagaggcu

SEQ ID NO: 2137532 - RNA, 20 nt, Human
cuucgggaggucgaggcagg

SEQ ID NO: 2137533 - RNA, 21 nt, Human
cuucgggaggucgaggcagga

SEQ ID NO: 2137534 - RNA, 13 nt, Human
cuucgcuccugug

SEQ ID NO: 2137535 - RNA, 13 nt, Human
cuucgacugugac

SEQ ID NO: 2137536 - RNA, 15 nt, Human
cuucgcuccuguguc

SEQ ID NO: 2137537 - RNA, 14 nt, Human
cuucgcuccugugu

SEQ ID NO: 2137538 - RNA, 19 nt, Human
cuuccuugcuguccuaggc

SEQ ID NO: 2137539 - RNA, 20 nt, Human
cuuccuugcuguccuaggcc

SEQ ID NO: 2137540 - RNA, 20 nt, Human
cuucgaaagcaucauuauuu

SEQ ID NO: 2137541 - RNA, 14 nt, Human
cuuccuucccuggc

SEQ ID NO: 2137542 - RNA, 13 nt, Human
cuuccuucccugg

SEQ ID NO: 2137543 - RNA, 15 nt, Human
cuuccuucccuggcu

SEQ ID NO: 2137544 - RNA, 17 nt, Human
cuuccuucccuggcuug

SEQ ID NO: 2137545 - RNA, 14 nt, Human
cuuccuugaccagc

SEQ ID NO: 2137546 - RNA, 15 nt, Human
cuuccuugaccagca

SEQ ID NO: 2137547 - RNA, 16 nt, Human
cuuccuugaccagcag

SEQ ID NO: 2137548 - RNA, 22 nt, Human
cuuccuugaccagcagauccca

SEQ ID NO: 2137549 - RNA, 17 nt, Human
cuuccuugcuguccuag

SEQ ID NO: 2137550 - RNA, 17 nt, Human
cuucugccauauucugu

SEQ ID NO: 2137551 - RNA, 15 nt, Human
cuucugccauauucu

SEQ ID NO: 2137552 - RNA, 14 nt, Human
cuucucucaccucc

SEQ ID NO: 2137553 - RNA, 15 nt, Human
cuucucuacagacuu

SEQ ID NO: 2137554 - RNA, 15 nt, Human
cuucucucaccuccu

SEQ ID NO: 2137555 - RNA, 16 nt, Human
cuucucucaccuccua

SEQ ID NO: 2137556 - RNA, 18 nt, Human
cuucucucaccuccuaaa

SEQ ID NO: 2137557 - RNA, 21 nt, Human
cuucugccauauucuguuggc

SEQ ID NO: 2137558 - RNA, 20 nt, Human
cuucugccauuucugagauc

SEQ ID NO: 2137559 - RNA, 17 nt, Human
cuucugcuucagccucc

SEQ ID NO: 2137560 - RNA, 16 nt, Human
cuucugcuucagccuc

SEQ ID NO: 2137561 - RNA, 10 nt, Human
cuucugcucc

SEQ ID NO: 2137562 - RNA, 12 nt, Human
cuucugcuccac

SEQ ID NO: 2137563 - RNA, 14 nt, Human
cuucugcuccaccc

SEQ ID NO: 2137564 - RNA, 18 nt, Human
cuucugcuucagccuccc

SEQ ID NO: 2137565 - RNA, 13 nt, Human
cuucugcuccacc

SEQ ID NO: 2137566 - RNA, 11 nt, Human
cuucuggagcc

SEQ ID NO: 2137567 - RNA, 13 nt, Human
cuucuggagcccu

SEQ ID NO: 2137568 - RNA, 17 nt, Human
cuucuccuuucacaacc

SEQ ID NO: 2137569 - RNA, 14 nt, Human
cuucuccuuucaca

SEQ ID NO: 2137570 - RNA, 18 nt, Human
cuucuccuuccaacugcu

SEQ ID NO: 2137571 - RNA, 20 nt, Human
cuucuccuuccaacugcugc

SEQ ID NO: 2137572 - RNA, 16 nt, Human
cuucuccuugauaaca

SEQ ID NO: 2137573 - RNA, 19 nt, Human
cuucuccuugauaacagcu

SEQ ID NO: 2137574 - RNA, 20 nt, Human
cuucuccuugauaacagcua

SEQ ID NO: 2137575 - RNA, 22 nt, Human
cuucuccuuucacaaccuucug

SEQ ID NO: 2137576 - RNA, 20 nt, Human
cuucuccuuucacaaccuuc

SEQ ID NO: 2137577 - RNA, 13 nt, Human
cuucucuacagac

SEQ ID NO: 2137578 - RNA, 11 nt, Human
cuucucuacag

SEQ ID NO: 2137579 - RNA, 20 nt, Human
cuucucuaaaugaggggccu

SEQ ID NO: 2137580 - RNA, 16 nt, Human
cuucucccacacugcu

SEQ ID NO: 2137581 - RNA, 17 nt, Human
cuucuccaucuggcagg

SEQ ID NO: 2137582 - RNA, 14 nt, Human
cuucucccacacug

SEQ ID NO: 2137583 - RNA, 15 nt, Human
cuucuccacccugcu

SEQ ID NO: 2137584 - RNA, 14 nt, Human
cuucuccacccugc

SEQ ID NO: 2137585 - RNA, 14 nt, Human
cuucuccaggcugu

SEQ ID NO: 2137586 - RNA, 16 nt, Human
cuucuccacccugcuc

SEQ ID NO: 2137587 - RNA, 17 nt, Human
cuucuccaggcuguauc

SEQ ID NO: 2137588 - RNA, 15 nt, Human
cuucucccaauucau

SEQ ID NO: 2137589 - RNA, 13 nt, Human
cuucucccacacu

SEQ ID NO: 2137590 - RNA, 14 nt, Human
cuucuccaucuggc

SEQ ID NO: 2137591 - RNA, 15 nt, Human
cuuucugcagaaaca

SEQ ID NO: 2137592 - RNA, 16 nt, Human
cuuucuuccucugcug

SEQ ID NO: 2137593 - RNA, 15 nt, Human
cuuucuucuauuuua

SEQ ID NO: 2137594 - RNA, 19 nt, Human
cuuucuguccuuuuggcac

SEQ ID NO: 2137595 - RNA, 15 nt, Human
cuuugaaacuagacu

SEQ ID NO: 2137596 - RNA, 16 nt, Human
cuuucuugcugguugu

SEQ ID NO: 2137597 - RNA, 21 nt, Human
cuuucuugcugguugucauuu

SEQ ID NO: 2137598 - RNA, 13 nt, Human
cuuucuuggccag

SEQ ID NO: 2137599 - RNA, 14 nt, Human
cuuucuuggccagu

SEQ ID NO: 2137600 - RNA, 16 nt, Human
cuuucuucuauuuuau

SEQ ID NO: 2137601 - RNA, 20 nt, Human
cuuucucuuuuccucuacca

SEQ ID NO: 2137602 - RNA, 15 nt, Human
cuuuagucgcugagg

SEQ ID NO: 2137603 - RNA, 18 nt, Human
cuuuaggcagcagcuuuu

SEQ ID NO: 2137604 - RNA, 13 nt, Human
cuuuagaguagca

SEQ ID NO: 2137605 - RNA, 23 nt, Human
cuuugcuucauucaagucagcuc

SEQ ID NO: 2137606 - RNA, 23 nt, Human
cuuugcuuaugaauauuuauaac

SEQ ID NO: 2137607 - RNA, 14 nt, Human
cuuugcuugaacac

SEQ ID NO: 2137608 - RNA, 15 nt, Human
cuuugcuugaacaca

SEQ ID NO: 2137609 - RNA, 16 nt, Human
cuuugcuugaacacag

SEQ ID NO: 2137610 - RNA, 17 nt, Human
cuuugcuugaacacagu

SEQ ID NO: 2137611 - RNA, 19 nt, Human
cuuugcuugaacacaguau

SEQ ID NO: 2137612 - RNA, 20 nt, Human
cuuugcuugaacacaguauu

SEQ ID NO: 2137613 - RNA, 21 nt, Human
cuuugcuugaacacaguauuu

SEQ ID NO: 2137614 - RNA, 22 nt, Human
cuuugcuugaacacaguauuuu

SEQ ID NO: 2137615 - RNA, 23 nt, Human
cuuugcuugaacacaguauuuuc

SEQ ID NO: 2137616 - RNA, 17 nt, Human
cuuugaccucaaccugu

SEQ ID NO: 2137617 - RNA, 18 nt, Human
cuuugaccucaaccugug

SEQ ID NO: 2137618 - RNA, 21 nt, Human
cuuugacaauuccuagauaaa

SEQ ID NO: 2137619 - RNA, 12 nt, Human
cuuugcuucauu

SEQ ID NO: 2137620 - RNA, 21 nt, Human
cuuugcauggagacuugagga

SEQ ID NO: 2137621 - RNA, 21 nt, Human
cuuugaccucaaccugugaug

SEQ ID NO: 2137622 - RNA, 13 nt, Human
cuuuguggcuucc

SEQ ID NO: 2137623 - RNA, 23 nt, Human
cuuugggaggccaaggugggagg

SEQ ID NO: 2137624 - RNA, 17 nt, Human
cuuuggaaacaggacca

SEQ ID NO: 2137625 - RNA, 13 nt, Human
cuuuggauagcau

SEQ ID NO: 2137626 - RNA, 17 nt, Human
cuuuggccauuccaaca

SEQ ID NO: 2137627 - RNA, 14 nt, Human
cuuugggaggcuga

SEQ ID NO: 2137628 - RNA, 17 nt, Human
cuuugggaggcugaggc

SEQ ID NO: 2137629 - RNA, 18 nt, Human
cuuugggaggcugaggcg

SEQ ID NO: 2137630 - RNA, 17 nt, Human
cuuugggaggcugaggu

SEQ ID NO: 2137631 - RNA, 18 nt, Human
gaaaagggaacugaacau

SEQ ID NO: 2137632 - RNA, 17 nt, Human
gaaaacgguuaaaacug

SEQ ID NO: 2137633 - RNA, 21 nt, Human
gaaaagggagauucagacugu

SEQ ID NO: 2137634 - RNA, 20 nt, Human
gaaaagguucuuacugcuug

SEQ ID NO: 2137635 - RNA, 14 nt, Human
gaaaacccagagag

SEQ ID NO: 2137636 - RNA, 15 nt, Human
gaaaacccagagagg

SEQ ID NO: 2137637 - RNA, 22 nt, Human
gaaaacccagagaggaaucaga

SEQ ID NO: 2137638 - RNA, 14 nt, Human
gaaaaccccagcau

SEQ ID NO: 2137639 - RNA, 15 nt, Human
gaaaacauguaauaa

SEQ ID NO: 2137640 - RNA, 19 nt, Human
gaaaaauuuaagcauuguu

SEQ ID NO: 2137641 - RNA, 20 nt, Human
gaaaaauuuaagcauuguuu

SEQ ID NO: 2137642 - RNA, 22 nt, Human
gaaaaauuuaagcauuguuugc

SEQ ID NO: 2137643 - RNA, 14 nt, Human
gaaaacaacaaaaa

SEQ ID NO: 2137644 - RNA, 15 nt, Human
gaaaacaacaaaaaa

SEQ ID NO: 2137645 - RNA, 18 nt, Human
gaaaacaacaaaaaauaa

SEQ ID NO: 2137646 - RNA, 13 nt, Human
gaaaaauauuuaa

SEQ ID NO: 2137647 - RNA, 14 nt, Human
gaaaaauauuuaag

SEQ ID NO: 2137648 - RNA, 15 nt, Human
gaaaaauaugauauu

SEQ ID NO: 2137649 - RNA, 17 nt, Human
gaaaaauccagaaagaa

SEQ ID NO: 2137650 - RNA, 18 nt, Human
gaaaaauccagaaagaaa

SEQ ID NO: 2137651 - RNA, 16 nt, Human
gaaaaauuuaagcauu

SEQ ID NO: 2137652 - RNA, 17 nt, Human
gaaaaauuuaagcauug

SEQ ID NO: 2137653 - RNA, 18 nt, Human
gaaaaauuuaagcauugu

SEQ ID NO: 2137654 - RNA, 10 nt, Human
gaaaaauaug

SEQ ID NO: 2137655 - RNA, 11 nt, Human
gaaaaauauga

SEQ ID NO: 2137656 - RNA, 15 nt, Human
cuuuuuuaaauuuuc

SEQ ID NO: 2137657 - RNA, 18 nt, Human
cuuuuuuaaauuuucuuc

SEQ ID NO: 2137658 - RNA, 20 nt, Human
cuuuuuuaaauuuucuucag

SEQ ID NO: 2137659 - RNA, 21 nt, Human
cuuuuuuaaauuuucuucagu

SEQ ID NO: 2137660 - RNA, 15 nt, Human
cuuuuuuacacaaau

SEQ ID NO: 2137661 - RNA, 19 nt, Human
cuuuguuuugauguuugug

SEQ ID NO: 2137662 - RNA, 23 nt, Human
cuuuguuuugauguuuguggccu

SEQ ID NO: 2137663 - RNA, 20 nt, Human
cuuuguugcucagcaagggg

SEQ ID NO: 2137664 - RNA, 11 nt, Human
cuuuguuuugu

SEQ ID NO: 2137665 - RNA, 24 nt, Human
cuuuguuuugauguuuguggccuc

SEQ ID NO: 2137666 - RNA, 16 nt, Human
cuuuguugcccaggcu

SEQ ID NO: 2137667 - RNA, 21 nt, Human
cuuuguugcaaguacugcugu

SEQ ID NO: 2137668 - RNA, 21 nt, Human
cuuuguuuguugucagcugaa

SEQ ID NO: 2137669 - RNA, 12 nt, Human
cuuuucugcaga

SEQ ID NO: 2137670 - RNA, 15 nt, Human
cuuuucugcagaggg

SEQ ID NO: 2137671 - RNA, 23 nt, Human
cuuuucugcaucaucuguagaua

SEQ ID NO: 2137672 - RNA, 14 nt, Human
cuuuugaacccagg

SEQ ID NO: 2137673 - RNA, 13 nt, Human
cuuuugaacccag

SEQ ID NO: 2137674 - RNA, 21 nt, Human
cuuuucuugacuauuggagga

SEQ ID NO: 2137675 - RNA, 19 nt, Human
cuuuugaauccaugcuugg

SEQ ID NO: 2137676 - RNA, 20 nt, Human
cuuuugaauccaugcuuggg

SEQ ID NO: 2137677 - RNA, 21 nt, Human
cuuuugaauccaugcuugggu

SEQ ID NO: 2137678 - RNA, 23 nt, Human
cuuuugaauccaugcuugggugu

SEQ ID NO: 2137679 - RNA, 20 nt, Human
cuuuugaacccaggaguuca

SEQ ID NO: 2137680 - RNA, 18 nt, Human
cuuuugaacccaggaguu

SEQ ID NO: 2137681 - RNA, 18 nt, Human
cuuuuuauuuuuuaauua

SEQ ID NO: 2137682 - RNA, 21 nt, Human
cuuuuuauuuuuuaauuauug

SEQ ID NO: 2137683 - RNA, 22 nt, Human
cuuggagccaauggagacuguc

SEQ ID NO: 2137684 - RNA, 18 nt, Human
cuuggagccccagugcca

SEQ ID NO: 2137685 - RNA, 13 nt, Human
cuuggagccccag

SEQ ID NO: 2137686 - RNA, 14 nt, Human
cuugggaggcccca

SEQ ID NO: 2137687 - RNA, 15 nt, Human
cuugggaggccccac

SEQ ID NO: 2137688 - RNA, 19 nt, Human
cuugggaggccccacuggg

SEQ ID NO: 2137689 - RNA, 21 nt, Human
cuugggaggccccacugggga

SEQ ID NO: 2137690 - RNA, 22 nt, Human
cuugggaggccccacuggggaa

SEQ ID NO: 2137691 - RNA, 15 nt, Human
cuugggaggcuuccc

SEQ ID NO: 2137692 - RNA, 16 nt, Human
cuugggaggcuucccc

SEQ ID NO: 2137693 - RNA, 16 nt, Human
cuugcugcccuaggcu

SEQ ID NO: 2137694 - RNA, 18 nt, Human
cuuggaauaucugcugua

SEQ ID NO: 2137695 - RNA, 19 nt, Human
cuuggaauaucugcuguau

SEQ ID NO: 2137696 - RNA, 22 nt, Human
cuuggacuauuauaauuuaaug

SEQ ID NO: 2137697 - RNA, 14 nt, Human
cuuggacuauuaua

SEQ ID NO: 2137698 - RNA, 20 nt, Human
cuugggaugaugccucauga

SEQ ID NO: 2137699 - RNA, 18 nt, Human
cuugggccacugugaaga

SEQ ID NO: 2137700 - RNA, 20 nt, Human
cuugggccacugugaagaga

SEQ ID NO: 2137701 - RNA, 13 nt, Human
cuugggcccuccu

SEQ ID NO: 2137702 - RNA, 14 nt, Human
cuugggcccuccug

SEQ ID NO: 2137703 - RNA, 12 nt, Human
cuugggcccucc

SEQ ID NO: 2137704 - RNA, 14 nt, Human
cuugggcugcuccu

SEQ ID NO: 2137705 - RNA, 17 nt, Human
cuugguuggguccucac

SEQ ID NO: 2137706 - RNA, 14 nt, Human
cuuggggcuuccua

SEQ ID NO: 2137707 - RNA, 14 nt, Human
cuugggcugagacu

SEQ ID NO: 2137708 - RNA, 17 nt, Human
cuugggcugagacugga

SEQ ID NO: 2137709 - RNA, 20 nt, Human
cuuguugcucaaaaaaugag

SEQ ID NO: 2137710 - RNA, 16 nt, Human
cuuuaaaaaaaauccu

SEQ ID NO: 2137711 - RNA, 20 nt, Human
cuuuaaaaaaaauccuucua

SEQ ID NO: 2137712 - RNA, 17 nt, Human
cuuguuugcuucaacug

SEQ ID NO: 2137713 - RNA, 20 nt, Human
cuuguuugcucaccuggggu

SEQ ID NO: 2137714 - RNA, 18 nt, Human
cuuguuugcucaccuggg

SEQ ID NO: 2137715 - RNA, 19 nt, Human
cuuguuugcucaccugggg

SEQ ID NO: 2137716 - RNA, 20 nt, Human
cuuguuugauuuuagcugca

SEQ ID NO: 2137717 - RNA, 22 nt, Human
cuuguuugauuuuagcugcaga

SEQ ID NO: 2137718 - RNA, 23 nt, Human
cuuguuugauuuuagcugcagaa

SEQ ID NO: 2137719 - RNA, 16 nt, Human
cuuguuugcucaccug

SEQ ID NO: 2137720 - RNA, 14 nt, Human
cuuguuuaucagca

SEQ ID NO: 2137721 - RNA, 17 nt, Human
cuuuagaauguuuuccu

SEQ ID NO: 2137722 - RNA, 21 nt, Human
cuuuagaauguuuuccuucua

SEQ ID NO: 2137723 - RNA, 23 nt, Human
cuuuagaauguuuuccuucuacu

SEQ ID NO: 2137724 - RNA, 22 nt, Human
cuuuagaaugagagugugaaau

SEQ ID NO: 2137725 - RNA, 18 nt, Human
cuuuagaaugagagugug

SEQ ID NO: 2137726 - RNA, 16 nt, Human
cuuguuaagauaguua

SEQ ID NO: 2137727 - RNA, 12 nt, Human
cuuguucuguuu

SEQ ID NO: 2137728 - RNA, 13 nt, Human
cuuguucuguuuu

SEQ ID NO: 2137729 - RNA, 14 nt, Human
cuuguucuguuuug

SEQ ID NO: 2137730 - RNA, 15 nt, Human
cuuguucuguuuugu

SEQ ID NO: 2137731 - RNA, 16 nt, Human
cuuguucuguuuuguu

SEQ ID NO: 2137732 - RNA, 13 nt, Human
cuuguuaauauuc

SEQ ID NO: 2137733 - RNA, 14 nt, Human
cuuguuaauauucu

SEQ ID NO: 2137734 - RNA, 16 nt, Human
cuuguuaauauucuuu

SEQ ID NO: 2137735 - RNA, 22 nt, Human
cuuguguuuuuaacucaauauu

SEQ ID NO: 2137736 - RNA, 15 nt, Human
cuuguguuuuugucu

SEQ ID NO: 2137737 - RNA, 18 nt, Human
cuuguccuagcuugggag

SEQ ID NO: 2137738 - RNA, 23 nt, Human
cuuguccuuuuguaccauggugu

SEQ ID NO: 2137739 - RNA, 15 nt, Human
cuugucccugcccag

SEQ ID NO: 2137740 - RNA, 16 nt, Human
cuugucccugcccaga

SEQ ID NO: 2137741 - RNA, 20 nt, Human
cuuguccccuccucacuccc

SEQ ID NO: 2137742 - RNA, 21 nt, Human
cuuguccccuccucacucccu

SEQ ID NO: 2137743 - RNA, 14 nt, Human
cuuggaagcuccgc

SEQ ID NO: 2137744 - RNA, 20 nt, Human
cuuggaagcuccgcuuucua

SEQ ID NO: 2137745 - RNA, 23 nt, Human
cuugcugcccuaggcuccgucag

SEQ ID NO: 2137746 - RNA, 12 nt, Human
cuugcugcaccc

SEQ ID NO: 2137747 - RNA, 20 nt, Human
cuugcugaaucggaaucucu

SEQ ID NO: 2137748 - RNA, 22 nt, Human
cuugcucugcugacagacacag

SEQ ID NO: 2137749 - RNA, 19 nt, Human
cuugcucuucagugggaga

SEQ ID NO: 2137750 - RNA, 15 nt, Human
cuugccacugcacuc

SEQ ID NO: 2137751 - RNA, 17 nt, Human
cuugccacugcacucca

SEQ ID NO: 2137752 - RNA, 14 nt, Human
cuugccacagcucu

SEQ ID NO: 2137753 - RNA, 20 nt, Human
cuugccacagcucuugagga

SEQ ID NO: 2137754 - RNA, 22 nt, Human
cuugccaaugaggucugaaaug

SEQ ID NO: 2137755 - RNA, 23 nt, Human
cuugccaaugaggucugaaaugg

SEQ ID NO: 2137756 - RNA, 20 nt, Human
cuugcccagggcucagccug

SEQ ID NO: 2137757 - RNA, 21 nt, Human
cuugcccagggcucagccugg

SEQ ID NO: 2137758 - RNA, 23 nt, Human
cuugcccagggcucagccuggug

SEQ ID NO: 2137759 - RNA, 13 nt, Human
cuugcccagggcu

SEQ ID NO: 2137760 - RNA, 14 nt, Human
cuugcccagggcuc

SEQ ID NO: 2137761 - RNA, 15 nt, Human
cuugcccagggcuca

SEQ ID NO: 2137762 - RNA, 16 nt, Human
cuugcccagggcucag

SEQ ID NO: 2137763 - RNA, 18 nt, Human
cuugcccagggcucagcc

SEQ ID NO: 2137764 - RNA, 19 nt, Human
cuugcccagggcucagccu

SEQ ID NO: 2137765 - RNA, 17 nt, Human
cuugaggguugggcugg

SEQ ID NO: 2137766 - RNA, 15 nt, Human
cuugaggguugggcu

SEQ ID NO: 2137767 - RNA, 12 nt, Human
cuugagccuggg

SEQ ID NO: 2137768 - RNA, 15 nt, Human
cuugagccugggagg

SEQ ID NO: 2137769 - RNA, 13 nt, Human
cuugagcccagga

SEQ ID NO: 2137770 - RNA, 18 nt, Human
cuugagaccucagccaug

SEQ ID NO: 2137771 - RNA, 17 nt, Human
cuugagacuguuuugaa

SEQ ID NO: 2137772 - RNA, 22 nt, Human
cuugagacuguuuugaauuugg

SEQ ID NO: 2137773 - RNA, 15 nt, Human
cuugagcccaggagu

SEQ ID NO: 2137774 - RNA, 14 nt, Human
cuugagcccaggag

SEQ ID NO: 2137775 - RNA, 17 nt, Human
cuucuggcacuuggaga

SEQ ID NO: 2137776 - RNA, 14 nt, Human
cuucuggagcccuu

SEQ ID NO: 2137777 - RNA, 14 nt, Human
cuugagaccucagc

SEQ ID NO: 2137778 - RNA, 15 nt, Human
cuugagaccucagcc

SEQ ID NO: 2137779 - RNA, 16 nt, Human
cuugagaccucagcca

SEQ ID NO: 2137780 - RNA, 11 nt, Human
cuugagaacuu

SEQ ID NO: 2137781 - RNA, 11 nt, Human
cuugagaaacc

SEQ ID NO: 2137782 - RNA, 13 nt, Human
cuugagaaaccuu

SEQ ID NO: 2137783 - RNA, 12 nt, Human
cuugagaaaccu

SEQ ID NO: 2137784 - RNA, 21 nt, Human
cuucugggaagacaacuagga

SEQ ID NO: 2137785 - RNA, 22 nt, Human
cuucugggaagggguuucuaac

SEQ ID NO: 2137786 - RNA, 23 nt, Human
cuugcacacuccccugcacugga

SEQ ID NO: 2137787 - RNA, 19 nt, Human
cuugcacacuccccugcac

SEQ ID NO: 2137788 - RNA, 22 nt, Human
cuugcacacuccccugcacugg

SEQ ID NO: 2137789 - RNA, 20 nt, Human
cuugcagacucuacagaggc

SEQ ID NO: 2137790 - RNA, 21 nt, Human
cuugcagacucuacagaggcc

SEQ ID NO: 2137791 - RNA, 13 nt, Human
cuugcagagaagc

SEQ ID NO: 2137792 - RNA, 15 nt, Human
cuugcagagaagccu

SEQ ID NO: 2137793 - RNA, 18 nt, Human
cuugcagagaagccuugg

SEQ ID NO: 2137794 - RNA, 20 nt, Human
cuugcagagaagccuuggua

SEQ ID NO: 2137795 - RNA, 13 nt, Human
cuugcagagcuug

SEQ ID NO: 2137796 - RNA, 22 nt, Human
cuugcagcucuccccuucucug

SEQ ID NO: 2137797 - RNA, 18 nt, Human
cuugcaauggcagccuug

SEQ ID NO: 2137798 - RNA, 17 nt, Human
cuugcaauggcagccuu

SEQ ID NO: 2137799 - RNA, 16 nt, Human
cuugcaauggcagccu

SEQ ID NO: 2137800 - RNA, 15 nt, Human
cuugcaauggcagcc

SEQ ID NO: 2137801 - RNA, 21 nt, Human
cuugaguugauucagcucugc

SEQ ID NO: 2137802 - RNA, 20 nt, Human
cuugaguugauucagcucug

SEQ ID NO: 2137803 - RNA, 18 nt, Human
cuugaguugauucagcuc

SEQ ID NO: 2137804 - RNA, 19 nt, Human
cuugaguugauucagcucu

SEQ ID NO: 2137805 - RNA, 17 nt, Human
gaccaauauuguacagu

SEQ ID NO: 2137806 - RNA, 18 nt, Human
gaccaauauuguacaguu

SEQ ID NO: 2137807 - RNA, 19 nt, Human
gaccaauauuguacaguuu

SEQ ID NO: 2137808 - RNA, 21 nt, Human
gaccaauauuguacaguuuuu

SEQ ID NO: 2137809 - RNA, 12 nt, Human
gaccacaccucc

SEQ ID NO: 2137810 - RNA, 13 nt, Human
gaccaauucaacc

SEQ ID NO: 2137811 - RNA, 18 nt, Human
gaccacaaaacuuuucua

SEQ ID NO: 2137812 - RNA, 17 nt, Human
gaccacaccucccugaa

SEQ ID NO: 2137813 - RNA, 20 nt, Human
gaccacaccucccugaacca

SEQ ID NO: 2137814 - RNA, 17 nt, Human
gaccacacuuccugucc

SEQ ID NO: 2137815 - RNA, 18 nt, Human
gaccacacuuccugucca

SEQ ID NO: 2137816 - RNA, 20 nt, Human
gaccacacuuccuguccaga

SEQ ID NO: 2137817 - RNA, 22 nt, Human
gaccacacuuccuguccagaga

SEQ ID NO: 2137818 - RNA, 23 nt, Human
gaccacacuuccuguccagagag

SEQ ID NO: 2137819 - RNA, 13 nt, Human
gacaucaguggca

SEQ ID NO: 2137820 - RNA, 20 nt, Human
gacaucaguggcauggcucc

SEQ ID NO: 2137821 - RNA, 13 nt, Human
gacaucagcauca

SEQ ID NO: 2137822 - RNA, 18 nt, Human
gacaucagcaucaccuag

SEQ ID NO: 2137823 - RNA, 19 nt, Human
gacaucaguggcauggcuc

SEQ ID NO: 2137824 - RNA, 17 nt, Human
gacauccaagcuuccuu

SEQ ID NO: 2137825 - RNA, 15 nt, Human
gacauccaagcuucc

SEQ ID NO: 2137826 - RNA, 16 nt, Human
gacauccaagcuuccu

SEQ ID NO: 2137827 - RNA, 16 nt, Human
gaccaaggagaugaag

SEQ ID NO: 2137828 - RNA, 17 nt, Human
gaccaaggaccccucac

SEQ ID NO: 2137829 - RNA, 19 nt, Human
gaccaaggaccccucaccu

SEQ ID NO: 2137830 - RNA, 14 nt, Human
gaccaaguuauaaa

SEQ ID NO: 2137831 - RNA, 20 nt, Human
gaccaauauuauacuaagaa

SEQ ID NO: 2137832 - RNA, 21 nt, Human
gaccaaguuauaaaucaaugu

SEQ ID NO: 2137833 - RNA, 15 nt, Human
gaccaagcaggaagc

SEQ ID NO: 2137834 - RNA, 16 nt, Human
gaccaagcaggaagcu

SEQ ID NO: 2137835 - RNA, 17 nt, Human
gaccaagcaggaagcuc

SEQ ID NO: 2137836 - RNA, 19 nt, Human
gaccaagcaggaagcucag

SEQ ID NO: 2137837 - RNA, 20 nt, Human
gaccaagcaggaagcucaga

SEQ ID NO: 2137838 - RNA, 13 nt, Human
gaccaaggacccc

SEQ ID NO: 2137839 - RNA, 16 nt, Human
gaccaaggaccccuca

SEQ ID NO: 2137840 - RNA, 23 nt, Human
gaccacaggguucaaaaugucug

SEQ ID NO: 2137841 - RNA, 21 nt, Human
gaccacaggguucaaaauguc

SEQ ID NO: 2137842 - RNA, 21 nt, Human
gaccagacaccuugacagggc

SEQ ID NO: 2137843 - RNA, 22 nt, Human
gaccagacaccuugacagggca

SEQ ID NO: 2137844 - RNA, 24 nt, Human
gaccagacaccuugacagggcaca

SEQ ID NO: 2137845 - RNA, 23 nt, Human
gaccagacaccuugacagggcac

SEQ ID NO: 2137846 - RNA, 17 nt, Human
gaccagcacugucucag

SEQ ID NO: 2137847 - RNA, 20 nt, Human
gaccagcaacuugucuuuuu

SEQ ID NO: 2137848 - RNA, 16 nt, Human
gaccagcagaucccag

SEQ ID NO: 2137849 - RNA, 17 nt, Human
gaccagcagaucccagc

SEQ ID NO: 2137850 - RNA, 18 nt, Human
gaccagcagaucccagcu

SEQ ID NO: 2137851 - RNA, 20 nt, Human
gaccagcagaucccagcuca

SEQ ID NO: 2137852 - RNA, 17 nt, Human
gacccaucacgccugug

SEQ ID NO: 2137853 - RNA, 18 nt, Human
gaccccagcggcugaguc

SEQ ID NO: 2137854 - RNA, 16 nt, Human
gaccccccucaggacc

SEQ ID NO: 2137855 - RNA, 18 nt, Human
gaccccccucaggacccu

SEQ ID NO: 2137856 - RNA, 19 nt, Human
gaccagcauccuuaaguau

SEQ ID NO: 2137857 - RNA, 23 nt, Human
gacccacuucacacacaggcaac

SEQ ID NO: 2137858 - RNA, 22 nt, Human
gacccagccccuugagaaaccu

SEQ ID NO: 2137859 - RNA, 23 nt, Human
gacccagccccuugagaaaccuu

SEQ ID NO: 2137860 - RNA, 16 nt, Human
gacccagucccugggg

SEQ ID NO: 2137861 - RNA, 22 nt, Human
gacagacacaggcccggcucca

SEQ ID NO: 2137862 - RNA, 20 nt, Human
gacagacacaggcccggcuc

SEQ ID NO: 2137863 - RNA, 17 nt, Human
gacagacacaggcccgg

SEQ ID NO: 2137864 - RNA, 16 nt, Human
gacacuagaagauuuu

SEQ ID NO: 2137865 - RNA, 23 nt, Human
gacacgcucccucccccugcccc

SEQ ID NO: 2137866 - RNA, 15 nt, Human
gacacuaacgacuuc

SEQ ID NO: 2137867 - RNA, 17 nt, Human
gaauuucccacauaccc

SEQ ID NO: 2137868 - RNA, 16 nt, Human
gacagagugagacucu

SEQ ID NO: 2137869 - RNA, 21 nt, Human
gacagagucucacuguugccc

SEQ ID NO: 2137870 - RNA, 19 nt, Human
gacagagugagacucuguc

SEQ ID NO: 2137871 - RNA, 15 nt, Human
gacagagucugggug

SEQ ID NO: 2137872 - RNA, 20 nt, Human
gacagaugccccagagcugu

SEQ ID NO: 2137873 - RNA, 20 nt, Human
gacagagggaaacacagcag

SEQ ID NO: 2137874 - RNA, 13 nt, Human
gacagagggaaga

SEQ ID NO: 2137875 - RNA, 16 nt, Human
gacagagggaagaaaa

SEQ ID NO: 2137876 - RNA, 13 nt, Human
gacagagucuggg

SEQ ID NO: 2137877 - RNA, 23 nt, Human
gacagaggcagccccauucugcc

SEQ ID NO: 2137878 - RNA, 19 nt, Human
gacagagggaagaaaagag

SEQ ID NO: 2137879 - RNA, 21 nt, Human
gacagagccccacccucagau

SEQ ID NO: 2137880 - RNA, 20 nt, Human
gacagagcugguugggaaga

SEQ ID NO: 2137881 - RNA, 12 nt, Human
gacagaggaggg

SEQ ID NO: 2137882 - RNA, 12 nt, Human
gacagaggcagc

SEQ ID NO: 2137883 - RNA, 23 nt, Human
gacagacacuucuaaaugaagug

SEQ ID NO: 2137884 - RNA, 15 nt, Human
gacagacuugagaac

SEQ ID NO: 2137885 - RNA, 18 nt, Human
gacagacuugagaacuug

SEQ ID NO: 2137886 - RNA, 17 nt, Human
gacagagaaggcagcag

SEQ ID NO: 2137887 - RNA, 15 nt, Human
gacagagacaccugc

SEQ ID NO: 2137888 - RNA, 16 nt, Human
gacagagacaccugca

SEQ ID NO: 2137889 - RNA, 17 nt, Human
gacagagacaccugcac

SEQ ID NO: 2137890 - RNA, 18 nt, Human
gacagagacaccugcacc

SEQ ID NO: 2137891 - RNA, 21 nt, Human
gacagagacaccugcaccucc

SEQ ID NO: 2137892 - RNA, 22 nt, Human
gacagagacaccugcaccuccc

SEQ ID NO: 2137893 - RNA, 21 nt, Human
gacaguuauacugucgguuuu

SEQ ID NO: 2137894 - RNA, 14 nt, Human
gacaggcccaagag

SEQ ID NO: 2137895 - RNA, 22 nt, Human
gacagggcauggccagguggcc

SEQ ID NO: 2137896 - RNA, 15 nt, Human
gacaggcccaagaga

SEQ ID NO: 2137897 - RNA, 20 nt, Human
gacagggcauggccaggugg

SEQ ID NO: 2137898 - RNA, 15 nt, Human
gacagggcauggcca

SEQ ID NO: 2137899 - RNA, 22 nt, Human
gacaggcauguucucugaggac

SEQ ID NO: 2137900 - RNA, 14 nt, Human
gacagggcauggcc

SEQ ID NO: 2137901 - RNA, 11 nt, Human
gacaggcccaa

SEQ ID NO: 2137902 - RNA, 22 nt, Human
gacaguuuuccuucucaucugu

SEQ ID NO: 2137903 - RNA, 19 nt, Human
gacaucaagcacagaagga

SEQ ID NO: 2137904 - RNA, 17 nt, Human
gacauaaccacugcuuc

SEQ ID NO: 2137905 - RNA, 18 nt, Human
gacaggcaagcaccuccu

SEQ ID NO: 2137906 - RNA, 17 nt, Human
gacaggcaagcaccucc

SEQ ID NO: 2137907 - RNA, 13 nt, Human
gacaggcaagcac

SEQ ID NO: 2137908 - RNA, 19 nt, Human
gacagcaacggggaggcca

SEQ ID NO: 2137909 - RNA, 16 nt, Human
gacagcaaaaccauug

SEQ ID NO: 2137910 - RNA, 19 nt, Human
gacagcaaaaccauugcuu

SEQ ID NO: 2137911 - RNA, 20 nt, Human
gacagcaaaaccauugcuuc

SEQ ID NO: 2137912 - RNA, 21 nt, Human
gacagcaaaaccauugcuuca

SEQ ID NO: 2137913 - RNA, 22 nt, Human
gacagcaaaaccauugcuucac

SEQ ID NO: 2137914 - RNA, 22 nt, Human
gacagcaacggggaggccaagu

SEQ ID NO: 2137915 - RNA, 13 nt, Human
gacagcagcucag

SEQ ID NO: 2137916 - RNA, 14 nt, Human
gacagcagcucagg

SEQ ID NO: 2137917 - RNA, 15 nt, Human
gacagcagcucaggc

SEQ ID NO: 2137918 - RNA, 16 nt, Human
gacagcagcucaggca

SEQ ID NO: 2137919 - RNA, 18 nt, Human
gacagcagcucaggcaca

SEQ ID NO: 2137920 - RNA, 20 nt, Human
gacagcagcucaggcacacu

SEQ ID NO: 2137921 - RNA, 19 nt, Human
gacaggcaaugcuggcugu

SEQ ID NO: 2137922 - RNA, 18 nt, Human
gacaggcaaugcuggcug

SEQ ID NO: 2137923 - RNA, 21 nt, Human
gacaggcaagcaccuccugcc

SEQ ID NO: 2137924 - RNA, 20 nt, Human
gacaggcaagcaccuccugc

SEQ ID NO: 2137925 - RNA, 21 nt, Human
gacaggcauguucucugagga

SEQ ID NO: 2137926 - RNA, 20 nt, Human
gacaggcauguucucugagg

SEQ ID NO: 2137927 - RNA, 23 nt, Human
gacaggcaaugcuggcuguuggc

SEQ ID NO: 2137928 - RNA, 18 nt, Human
gacaggauguuugcucag

SEQ ID NO: 2137929 - RNA, 21 nt, Human
gacugaccaauauuguacagu

SEQ ID NO: 2137930 - RNA, 22 nt, Human
gacugaccaauauuguacaguu

SEQ ID NO: 2137931 - RNA, 16 nt, Human
gacugacccugaucag

SEQ ID NO: 2137932 - RNA, 15 nt, Human
gacucuacagaggcc

SEQ ID NO: 2137933 - RNA, 16 nt, Human
gacucuacacugugaa

SEQ ID NO: 2137934 - RNA, 21 nt, Human
gacucuacagaggccaugggc

SEQ ID NO: 2137935 - RNA, 15 nt, Human
gacuacaggcaccca

SEQ ID NO: 2137936 - RNA, 13 nt, Human
gacuacaggcacc

SEQ ID NO: 2137937 - RNA, 18 nt, Human
gacuacaggcacccacca

SEQ ID NO: 2137938 - RNA, 20 nt, Human
gacugcauuuuacuguacag

SEQ ID NO: 2137939 - RNA, 20 nt, Human
gacugccagucccccugccc

SEQ ID NO: 2137940 - RNA, 17 nt, Human
gacugcaagugagcaaa

SEQ ID NO: 2137941 - RNA, 21 nt, Human
gacugcaagugagcaaaccug

SEQ ID NO: 2137942 - RNA, 19 nt, Human
gacugcaccauugcugcuc

SEQ ID NO: 2137943 - RNA, 20 nt, Human
gacugauguuaggcugggcc

SEQ ID NO: 2137944 - RNA, 21 nt, Human
gacugauguuaggcugggccc

SEQ ID NO: 2137945 - RNA, 23 nt, Human
gacugauguuaggcugggcccag

SEQ ID NO: 2137946 - RNA, 21 nt, Human
gacugauguugagggaacaga

SEQ ID NO: 2137947 - RNA, 18 nt, Human
gacugagcaagacccugu

SEQ ID NO: 2137948 - RNA, 21 nt, Human
gacugagcaagacccugucuc

SEQ ID NO: 2137949 - RNA, 13 nt, Human
gacugagcucaag

SEQ ID NO: 2137950 - RNA, 14 nt, Human
gacugagcagacug

SEQ ID NO: 2137951 - RNA, 15 nt, Human
gacugagcagacugg

SEQ ID NO: 2137952 - RNA, 19 nt, Human
gacugagcagacuggugag

SEQ ID NO: 2137953 - RNA, 16 nt, Human
gacuuauuuauauaaa

SEQ ID NO: 2137954 - RNA, 13 nt, Human
gacuuaugggccc

SEQ ID NO: 2137955 - RNA, 13 nt, Human
gacuucacacugc

SEQ ID NO: 2137956 - RNA, 14 nt, Human
gacuucacacugca

SEQ ID NO: 2137957 - RNA, 16 nt, Human
gacuucacacugcaag

SEQ ID NO: 2137958 - RNA, 22 nt, Human
gacuucacacugcaagagccuu

SEQ ID NO: 2137959 - RNA, 17 nt, Human
gacuuaguauauuuucu

SEQ ID NO: 2137960 - RNA, 14 nt, Human
gacuucagggcagg

SEQ ID NO: 2137961 - RNA, 14 nt, Human
gacuucagcucugu

SEQ ID NO: 2137962 - RNA, 18 nt, Human
gacuucagggcagggcuc

SEQ ID NO: 2137963 - RNA, 22 nt, Human
gacuucagggcagggcucugau

SEQ ID NO: 2137964 - RNA, 17 nt, Human
gacuggauaguccgucu

SEQ ID NO: 2137965 - RNA, 18 nt, Human
gacugccccaacuccugg

SEQ ID NO: 2137966 - RNA, 15 nt, Human
gacugccccgugcag

SEQ ID NO: 2137967 - RNA, 21 nt, Human
gacugcgggaugguccugggg

SEQ ID NO: 2137968 - RNA, 22 nt, Human
gacugcgggaugguccuggggc

SEQ ID NO: 2137969 - RNA, 19 nt, Human
gacuggcuuugucccacag

SEQ ID NO: 2137970 - RNA, 20 nt, Human
gacuggcuuugucccacagc

SEQ ID NO: 2137971 - RNA, 21 nt, Human
gacuggcuuugucccacagcu

SEQ ID NO: 2137972 - RNA, 20 nt, Human
gacugggaagauaggcucug

SEQ ID NO: 2137973 - RNA, 22 nt, Human
gacugggaagauaggcucugca

SEQ ID NO: 2137974 - RNA, 23 nt, Human
gacugggaagauaggcucugcac

SEQ ID NO: 2137975 - RNA, 17 nt, Human
gacuggcuggcugcagu

SEQ ID NO: 2137976 - RNA, 14 nt, Human
gacuggcuggcugc

SEQ ID NO: 2137977 - RNA, 16 nt, Human
gacuggcuggcugcag

SEQ ID NO: 2137978 - RNA, 22 nt, Human
gacuggauaguccgucucugcu

SEQ ID NO: 2137979 - RNA, 14 nt, Human
gacuggccugagga

SEQ ID NO: 2137980 - RNA, 18 nt, Human
gacuggccugaggagcag

SEQ ID NO: 2137981 - RNA, 17 nt, Human
gacuggcuagaguccuc

SEQ ID NO: 2137982 - RNA, 20 nt, Human
gacuggcuagaguccucacu

SEQ ID NO: 2137983 - RNA, 21 nt, Human
gacuggcuagaguccucacuc

SEQ ID NO: 2137984 - RNA, 23 nt, Human
gacuggcuagaguccucacuccc

SEQ ID NO: 2137985 - RNA, 19 nt, Human
gaccuguggccaaguucuu

SEQ ID NO: 2137986 - RNA, 20 nt, Human
gaccuguggggauuucuccc

SEQ ID NO: 2137987 - RNA, 21 nt, Human
gaccuguggggauuucuccca

SEQ ID NO: 2137988 - RNA, 15 nt, Human
gaccugugaccagca

SEQ ID NO: 2137989 - RNA, 17 nt, Human
gaccugugaccagcacu

SEQ ID NO: 2137990 - RNA, 19 nt, Human
gaccugugucacuacguga

SEQ ID NO: 2137991 - RNA, 22 nt, Human
gaccuguggggauuucucccag

SEQ ID NO: 2137992 - RNA, 23 nt, Human
gaccuguggggauuucucccagc

SEQ ID NO: 2137993 - RNA, 17 nt, Human
gaccuguaacuuuugua

SEQ ID NO: 2137994 - RNA, 12 nt, Human
gaccugugacca

SEQ ID NO: 2137995 - RNA, 21 nt, Human
gacccugcgaaggggcccugg

SEQ ID NO: 2137996 - RNA, 18 nt, Human
gaccuggcacuggaugca

SEQ ID NO: 2137997 - RNA, 22 nt, Human
gaccuggcacuggaugcagaaa

SEQ ID NO: 2137998 - RNA, 20 nt, Human
gacccugcgaaggggcccug

SEQ ID NO: 2137999 - RNA, 14 nt, Human
gaccuugaacuggg

SEQ ID NO: 2138000 - RNA, 15 nt, Human
gaccuucuaggaagc

SEQ ID NO: 2138001 - RNA, 18 nt, Human
gaccuucuccaaaugaga

SEQ ID NO: 2138002 - RNA, 12 nt, Human
gaccuucuggga

SEQ ID NO: 2138003 - RNA, 17 nt, Human
gaccuugaacuccuggg

SEQ ID NO: 2138004 - RNA, 12 nt, Human
gaccuuaucugu

SEQ ID NO: 2138005 - RNA, 14 nt, Human
gaccuuaucugugc

SEQ ID NO: 2138006 - RNA, 21 nt, Human
gaccuuaucugugcgugaaac

SEQ ID NO: 2138007 - RNA, 22 nt, Human
gaccuuaucugugcgugaaaca

SEQ ID NO: 2138008 - RNA, 17 nt, Human
gacgugauuuugcugua

SEQ ID NO: 2138009 - RNA, 18 nt, Human
gacgugcaccuguacuca

SEQ ID NO: 2138010 - RNA, 16 nt, Human
gacgugauuuugcugu

SEQ ID NO: 2138011 - RNA, 21 nt, Human
gacguccugccaccuggggca

SEQ ID NO: 2138012 - RNA, 14 nt, Human
gacguccugccacc

SEQ ID NO: 2138013 - RNA, 18 nt, Human
gacguccugccaccuggg

SEQ ID NO: 2138014 - RNA, 17 nt, Human
gacggcgcccccagugu

SEQ ID NO: 2138015 - RNA, 18 nt, Human
gacgucccuuuuuucucu

SEQ ID NO: 2138016 - RNA, 13 nt, Human
gacguccugccac

SEQ ID NO: 2138017 - RNA, 19 nt, Human
gacggcacccacccagcac

SEQ ID NO: 2138018 - RNA, 15 nt, Human
gacggagagaaaaaa

SEQ ID NO: 2138019 - RNA, 15 nt, Human
gacggccugaugcuc

SEQ ID NO: 2138020 - RNA, 20 nt, Human
gacggccugaugcucccucc

SEQ ID NO: 2138021 - RNA, 22 nt, Human
gacggccugaugcucccucccc

SEQ ID NO: 2138022 - RNA, 23 nt, Human
gacggccugaugcucccuccccu

SEQ ID NO: 2138023 - RNA, 13 nt, Human
gacggagucccac

SEQ ID NO: 2138024 - RNA, 19 nt, Human
gacguguguuucuagagcc

SEQ ID NO: 2138025 - RNA, 21 nt, Human
gacguucggggcaugcugggg

SEQ ID NO: 2138026 - RNA, 18 nt, Human
gacuaaaaauauuauaac

SEQ ID NO: 2138027 - RNA, 18 nt, Human
gacuaaagagagaaugua

SEQ ID NO: 2138028 - RNA, 14 nt, Human
gacuaaagagagaa

SEQ ID NO: 2138029 - RNA, 17 nt, Human
gacuaaagagagaaugu

SEQ ID NO: 2138030 - RNA, 10 nt, Human
gacuaaagag

SEQ ID NO: 2138031 - RNA, 13 nt, Human
gacuaaagagaga

SEQ ID NO: 2138032 - RNA, 12 nt, Human
gaacguuuuucc

SEQ ID NO: 2138033 - RNA, 15 nt, Human
gaacguuuuuccugu

SEQ ID NO: 2138034 - RNA, 21 nt, Human
gaacgacaauagcuuuacccu

SEQ ID NO: 2138035 - RNA, 17 nt, Human
gaaccucuuccccagaa

SEQ ID NO: 2138036 - RNA, 18 nt, Human
gaacgauuuagaaagaag

SEQ ID NO: 2138037 - RNA, 16 nt, Human
gaacauugauugcugu

SEQ ID NO: 2138038 - RNA, 19 nt, Human
gaacuagacugccuggguu

SEQ ID NO: 2138039 - RNA, 18 nt, Human
gaacuagagguuuuauga

SEQ ID NO: 2138040 - RNA, 22 nt, Human
gaacuagagguuuuaugauauu

SEQ ID NO: 2138041 - RNA, 15 nt, Human
gaacuaauaaaagca

SEQ ID NO: 2138042 - RNA, 13 nt, Human
gaacauugcaaua

SEQ ID NO: 2138043 - RNA, 15 nt, Human
gaacauugcaauaga

SEQ ID NO: 2138044 - RNA, 17 nt, Human
gaacauugcaauagaaa

SEQ ID NO: 2138045 - RNA, 20 nt, Human
gaacauccaaggagaaacag

SEQ ID NO: 2138046 - RNA, 23 nt, Human
gaacauccaaggagaaacagaga

SEQ ID NO: 2138047 - RNA, 20 nt, Human
gaacauguugguauuuaucu

SEQ ID NO: 2138048 - RNA, 15 nt, Human
gaaccaaaacauucc

SEQ ID NO: 2138049 - RNA, 16 nt, Human
gaaccaaaacauuccg

SEQ ID NO: 2138050 - RNA, 20 nt, Human
gaaccaaaacauuccguuua

SEQ ID NO: 2138051 - RNA, 16 nt, Human
gaaccucacgcaccuc

SEQ ID NO: 2138052 - RNA, 17 nt, Human
gaaccucacgcaccucc

SEQ ID NO: 2138053 - RNA, 18 nt, Human
gaaccucacgcaccuccc

SEQ ID NO: 2138054 - RNA, 19 nt, Human
gaaccucacgcaccuccca

SEQ ID NO: 2138055 - RNA, 20 nt, Human
gaaccucacgcaccucccau

SEQ ID NO: 2138056 - RNA, 21 nt, Human
gaaccucacgcaccucccauc

SEQ ID NO: 2138057 - RNA, 13 nt, Human
gaaccucuucccc

SEQ ID NO: 2138058 - RNA, 14 nt, Human
gaaccucuucccca

SEQ ID NO: 2138059 - RNA, 11 nt, Human
gaaccucaggc

SEQ ID NO: 2138060 - RNA, 14 nt, Human
gaaccucaggcuuc

SEQ ID NO: 2138061 - RNA, 18 nt, Human
gaaccucaggcuuccuug

SEQ ID NO: 2138062 - RNA, 13 nt, Human
gaaaauacaauaa

SEQ ID NO: 2138063 - RNA, 14 nt, Human
gaaaauacaauaaa

SEQ ID NO: 2138064 - RNA, 15 nt, Human
gaaaauacaauaaac

SEQ ID NO: 2138065 - RNA, 16 nt, Human
gaaaauacaauaaacu

SEQ ID NO: 2138066 - RNA, 23 nt, Human
gaaaauaaaucaaugcuauaacu

SEQ ID NO: 2138067 - RNA, 19 nt, Human
gaaaauacaacuuaaauaa

SEQ ID NO: 2138068 - RNA, 12 nt, Human
gaaaauaaaauu

SEQ ID NO: 2138069 - RNA, 13 nt, Human
gaaaauaaaauua

SEQ ID NO: 2138070 - RNA, 14 nt, Human
gaaaauaaaauuaa

SEQ ID NO: 2138071 - RNA, 17 nt, Human
gaaaauaaaauuaagaa

SEQ ID NO: 2138072 - RNA, 20 nt, Human
gaaaauaaaauuaagaaugu

SEQ ID NO: 2138073 - RNA, 13 nt, Human
gaacagcaggccc

SEQ ID NO: 2138074 - RNA, 14 nt, Human
gaacagcaggccca

SEQ ID NO: 2138075 - RNA, 15 nt, Human
gaacagcaggcccac

SEQ ID NO: 2138076 - RNA, 20 nt, Human
gaacagcaggcccaccuacc

SEQ ID NO: 2138077 - RNA, 21 nt, Human
gaacagcaggcccaccuaccu

SEQ ID NO: 2138078 - RNA, 18 nt, Human
gaacagauaaucccugua

SEQ ID NO: 2138079 - RNA, 18 nt, Human
gaacagaucuccaaagcu

SEQ ID NO: 2138080 - RNA, 19 nt, Human
gaacagaucuccaaagcuu

SEQ ID NO: 2138081 - RNA, 17 nt, Human
gaacagauaaucccugu

SEQ ID NO: 2138082 - RNA, 23 nt, Human
gaacacugcacucuuaagcuucc

SEQ ID NO: 2138083 - RNA, 18 nt, Human
gaacagccgcuccugucu

SEQ ID NO: 2138084 - RNA, 21 nt, Human
gaacagcuaugggagccccag

SEQ ID NO: 2138085 - RNA, 22 nt, Human
gaacagcuaugggagccccagg

SEQ ID NO: 2138086 - RNA, 23 nt, Human
gaacagcuaugggagccccaggg

SEQ ID NO: 2138087 - RNA, 19 nt, Human
gaacagugauuuuuuuuua

SEQ ID NO: 2138088 - RNA, 21 nt, Human
gaacagugauuuuuuuuuaga

SEQ ID NO: 2138089 - RNA, 14 nt, Human
gaacaguguuuccc

SEQ ID NO: 2138090 - RNA, 18 nt, Human
gaacauagacuagagaaa

SEQ ID NO: 2138091 - RNA, 19 nt, Human
gaacauagacuagagaaac

SEQ ID NO: 2138092 - RNA, 21 nt, Human
gaacauagacuagagaaaccg

SEQ ID NO: 2138093 - RNA, 12 nt, Human
gaacauccaagg

SEQ ID NO: 2138094 - RNA, 13 nt, Human
gaacauacuucag

SEQ ID NO: 2138095 - RNA, 14 nt, Human
gaacaucacagcuu

SEQ ID NO: 2138096 - RNA, 13 nt, Human
gaagauagaagaa

SEQ ID NO: 2138097 - RNA, 14 nt, Human
gaagauagaagaaa

SEQ ID NO: 2138098 - RNA, 15 nt, Human
gaagauaggcucugc

SEQ ID NO: 2138099 - RNA, 16 nt, Human
gaagauaggcucugca

SEQ ID NO: 2138100 - RNA, 17 nt, Human
gaagauaggcucugcac

SEQ ID NO: 2138101 - RNA, 18 nt, Human
gaagauaggcucugcaca

SEQ ID NO: 2138102 - RNA, 16 nt, Human
gaagauaccaucagca

SEQ ID NO: 2138103 - RNA, 13 nt, Human
gaagauaggcucu

SEQ ID NO: 2138104 - RNA, 20 nt, Human
gaagauaauauuaaggaaga

SEQ ID NO: 2138105 - RNA, 20 nt, Human
gaagagggagaagcaugaaa

SEQ ID NO: 2138106 - RNA, 18 nt, Human
gaagcauuuacuuugugu

SEQ ID NO: 2138107 - RNA, 15 nt, Human
gaagccacagcccag

SEQ ID NO: 2138108 - RNA, 17 nt, Human
gaagccacagcccaggc

SEQ ID NO: 2138109 - RNA, 18 nt, Human
gaagccacagcccaggcc

SEQ ID NO: 2138110 - RNA, 19 nt, Human
gaagccacagcccaggccu

SEQ ID NO: 2138111 - RNA, 15 nt, Human
gaagauuauuuuuua

SEQ ID NO: 2138112 - RNA, 18 nt, Human
gaagauuauuuuuuauga

SEQ ID NO: 2138113 - RNA, 15 nt, Human
gaagauguuucaaaa

SEQ ID NO: 2138114 - RNA, 19 nt, Human
gaagaugucaucccauugu

SEQ ID NO: 2138115 - RNA, 17 nt, Human
gaagcauuuacuuugug

SEQ ID NO: 2138116 - RNA, 11 nt, Human
gaagcccugga

SEQ ID NO: 2138117 - RNA, 18 nt, Human
gaagcccuggauuucaga

SEQ ID NO: 2138118 - RNA, 19 nt, Human
gaagcccuggauuucagaa

SEQ ID NO: 2138119 - RNA, 22 nt, Human
gaagcccuggauuucagaaaga

SEQ ID NO: 2138120 - RNA, 18 nt, Human
gaagcccuaacucagcca

SEQ ID NO: 2138121 - RNA, 11 nt, Human
gaagcccuccu

SEQ ID NO: 2138122 - RNA, 12 nt, Human
gaagcccuccuu

SEQ ID NO: 2138123 - RNA, 14 nt, Human
gaagcccuccuucc

SEQ ID NO: 2138124 - RNA, 15 nt, Human
gaagcccuccuucca

SEQ ID NO: 2138125 - RNA, 16 nt, Human
gaagcccuccuuccac

SEQ ID NO: 2138126 - RNA, 19 nt, Human
gaagcccuccuuccacgga

SEQ ID NO: 2138127 - RNA, 20 nt, Human
gaagcccagcuccagggcca

SEQ ID NO: 2138128 - RNA, 12 nt, Human
gaagccacccuc

SEQ ID NO: 2138129 - RNA, 17 nt, Human
gaagccacccucccagc

SEQ ID NO: 2138130 - RNA, 18 nt, Human
gaagccacccucccagcu

SEQ ID NO: 2138131 - RNA, 19 nt, Human
gaagccacccucccagcuc

SEQ ID NO: 2138132 - RNA, 20 nt, Human
gaagccacccucccagcucu

SEQ ID NO: 2138133 - RNA, 22 nt, Human
gaagccacccucccagcucuga

SEQ ID NO: 2138134 - RNA, 12 nt, Human
gaagagaaacca

SEQ ID NO: 2138135 - RNA, 13 nt, Human
gaagacuguggcu

SEQ ID NO: 2138136 - RNA, 15 nt, Human
gaagacuucccagcu

SEQ ID NO: 2138137 - RNA, 16 nt, Human
gaagagacugggaaga

SEQ ID NO: 2138138 - RNA, 15 nt, Human
gaagagagagcugag

SEQ ID NO: 2138139 - RNA, 12 nt, Human
gaagagaaacag

SEQ ID NO: 2138140 - RNA, 13 nt, Human
gaagagaaacagg

SEQ ID NO: 2138141 - RNA, 16 nt, Human
gaagaggcagauucaa

SEQ ID NO: 2138142 - RNA, 12 nt, Human
gaagagcagccc

SEQ ID NO: 2138143 - RNA, 18 nt, Human
gaagagcaggcacaugga

SEQ ID NO: 2138144 - RNA, 23 nt, Human
gaagagcaggcacauggaggagc

SEQ ID NO: 2138145 - RNA, 15 nt, Human
gaagagcaggcacau

SEQ ID NO: 2138146 - RNA, 21 nt, Human
gaagagaguccauauuucaau

SEQ ID NO: 2138147 - RNA, 18 nt, Human
gaagagaugggcuuguuu

SEQ ID NO: 2138148 - RNA, 13 nt, Human
gaagaaaaaauac

SEQ ID NO: 2138149 - RNA, 18 nt, Human
gaagaaaaaauacauuuu

SEQ ID NO: 2138150 - RNA, 16 nt, Human
gaagaaaaaaaauaac

SEQ ID NO: 2138151 - RNA, 17 nt, Human
gaagaaaaaaaauaaca

SEQ ID NO: 2138152 - RNA, 18 nt, Human
gaagaaaaaaaauaacac

SEQ ID NO: 2138153 - RNA, 20 nt, Human
gaagacugucagcuuccaaa

SEQ ID NO: 2138154 - RNA, 11 nt, Human
gaagacugugg

SEQ ID NO: 2138155 - RNA, 12 nt, Human
gaagacuguggc

SEQ ID NO: 2138156 - RNA, 23 nt, Human
gaaguaguggagccccugcucug

SEQ ID NO: 2138157 - RNA, 23 nt, Human
gaaguaggaagugaaaauaggua

SEQ ID NO: 2138158 - RNA, 19 nt, Human
gaagucaugaagcccaagu

SEQ ID NO: 2138159 - RNA, 15 nt, Human
gaagucaugaagccc

SEQ ID NO: 2138160 - RNA, 15 nt, Human
gaagucuuagaugua

SEQ ID NO: 2138161 - RNA, 18 nt, Human
gaagucucuagguucuga

SEQ ID NO: 2138162 - RNA, 20 nt, Human
gaagucuaggagcugggagg

SEQ ID NO: 2138163 - RNA, 22 nt, Human
gaagucuaggagcugggaggaa

SEQ ID NO: 2138164 - RNA, 15 nt, Human
gaagucuaggagcug

SEQ ID NO: 2138165 - RNA, 16 nt, Human
gaagucuaggagcugg

SEQ ID NO: 2138166 - RNA, 23 nt, Human
gaagguggggguuggcuggguac

SEQ ID NO: 2138167 - RNA, 13 nt, Human
gaaguaaugaauu

SEQ ID NO: 2138168 - RNA, 15 nt, Human
gaaguaaugaauuuu

SEQ ID NO: 2138169 - RNA, 22 nt, Human
gaaggugucuggacauucagaa

SEQ ID NO: 2138170 - RNA, 22 nt, Human
gaaggugccccaaaaugcaaga

SEQ ID NO: 2138171 - RNA, 18 nt, Human
gaagggggguugcagugg

SEQ ID NO: 2138172 - RNA, 23 nt, Human
gaagggggguugcaguggagagg

SEQ ID NO: 2138173 - RNA, 17 nt, Human
gaagggggucaaagcaa

SEQ ID NO: 2138174 - RNA, 20 nt, Human
gaagggggucaaagcaagga

SEQ ID NO: 2138175 - RNA, 14 nt, Human
gaagcggcuggcag

SEQ ID NO: 2138176 - RNA, 21 nt, Human
gaagcccuggauuucagaaag

SEQ ID NO: 2138177 - RNA, 13 nt, Human
gaagcguauguuu

SEQ ID NO: 2138178 - RNA, 14 nt, Human
gaagcguauguuuu

SEQ ID NO: 2138179 - RNA, 22 nt, Human
gaauagcugggacuacaggugu

SEQ ID NO: 2138180 - RNA, 23 nt, Human
gaauagcugggacuacaggugug

SEQ ID NO: 2138181 - RNA, 20 nt, Human
gaauacaguguuauuuucuu

SEQ ID NO: 2138182 - RNA, 19 nt, Human
gaauaccucuuugaaagaa

SEQ ID NO: 2138183 - RNA, 13 nt, Human
gaauaaaaauuaa

SEQ ID NO: 2138184 - RNA, 20 nt, Human
gaauauuugucgauauuucc

SEQ ID NO: 2138185 - RNA, 12 nt, Human
gaauauuuuauu

SEQ ID NO: 2138186 - RNA, 14 nt, Human
gaauauuuuauuca

SEQ ID NO: 2138187 - RNA, 15 nt, Human
gaauauuuuauucaa

SEQ ID NO: 2138188 - RNA, 16 nt, Human
gaauauuuuauucaag

SEQ ID NO: 2138189 - RNA, 18 nt, Human
gaauauuuuauucaaggu

SEQ ID NO: 2138190 - RNA, 20 nt, Human
gaauauuuuauucaagguaa

SEQ ID NO: 2138191 - RNA, 13 nt, Human
gaaucaaaacucu

SEQ ID NO: 2138192 - RNA, 14 nt, Human
gaaucaaaacucuc

SEQ ID NO: 2138193 - RNA, 23 nt, Human
gaauauuuuguuuugugcagaga

SEQ ID NO: 2138194 - RNA, 15 nt, Human
gaaucaaaacucucc

SEQ ID NO: 2138195 - RNA, 14 nt, Human
gaaucaacagggca

SEQ ID NO: 2138196 - RNA, 15 nt, Human
gaaucaacagggcag

SEQ ID NO: 2138197 - RNA, 17 nt, Human
gaaucaacagggcagca

SEQ ID NO: 2138198 - RNA, 20 nt, Human
gaaucaagaugucagacugg

SEQ ID NO: 2138199 - RNA, 21 nt, Human
gaaucaagaugucagacuggc

SEQ ID NO: 2138200 - RNA, 21 nt, Human
gaauacagaggcaacugcauu

SEQ ID NO: 2138201 - RNA, 16 nt, Human
gaauacaaacauauuu

SEQ ID NO: 2138202 - RNA, 14 nt, Human
gaauacagaaagau

SEQ ID NO: 2138203 - RNA, 23 nt, Human
gaauacagggcaugcauuuugca

SEQ ID NO: 2138204 - RNA, 13 nt, Human
gaauacaguguua

SEQ ID NO: 2138205 - RNA, 14 nt, Human
gaauaauuucccaa

SEQ ID NO: 2138206 - RNA, 21 nt, Human
gaauaauuucccaauuaggaa

SEQ ID NO: 2138207 - RNA, 23 nt, Human
gaauaauuucccaauuaggaagu

SEQ ID NO: 2138208 - RNA, 22 nt, Human
gaauaauaauuauccagaguuu

SEQ ID NO: 2138209 - RNA, 12 nt, Human
gaauaauagaag

SEQ ID NO: 2138210 - RNA, 15 nt, Human
gaauaauagaagaac

SEQ ID NO: 2138211 - RNA, 19 nt, Human
gaauaauaugcugccaaau

SEQ ID NO: 2138212 - RNA, 17 nt, Human
gaauaauacaguaucuc

SEQ ID NO: 2138213 - RNA, 21 nt, Human
gaauaacucuguggcauuauu

SEQ ID NO: 2138214 - RNA, 22 nt, Human
gaauaaccacuuaaaaaauguc

SEQ ID NO: 2138215 - RNA, 23 nt, Human
gaauaaccacuuaaaaaaugucc

SEQ ID NO: 2138216 - RNA, 20 nt, Human
gaaguuugagaucagccugg

SEQ ID NO: 2138217 - RNA, 21 nt, Human
gaaguuuguguucuguuuguu

SEQ ID NO: 2138218 - RNA, 18 nt, Human
gaauaacauguaauuaag

SEQ ID NO: 2138219 - RNA, 19 nt, Human
gaauaacauguaauuaagu

SEQ ID NO: 2138220 - RNA, 23 nt, Human
gaaguuuucaggacuuggucuga

SEQ ID NO: 2138221 - RNA, 13 nt, Human
gaaguuuucagga

SEQ ID NO: 2138222 - RNA, 12 nt, Human
gaaguuuugcau

SEQ ID NO: 2138223 - RNA, 17 nt, Human
gaaguuuugcauuuaug

SEQ ID NO: 2138224 - RNA, 15 nt, Human
gaaugaaaaaacagu

SEQ ID NO: 2138225 - RNA, 15 nt, Human
gaaugaaaaauuuaa

SEQ ID NO: 2138226 - RNA, 19 nt, Human
gaaugaaaaauuuaagcau

SEQ ID NO: 2138227 - RNA, 20 nt, Human
gaaugaaaaauuuaagcauu

SEQ ID NO: 2138228 - RNA, 22 nt, Human
gaaugaaaaauuuaagcauugu

SEQ ID NO: 2138229 - RNA, 23 nt, Human
gaaugaaaaauuuaagcauuguu

SEQ ID NO: 2138230 - RNA, 23 nt, Human
gaaugaaccacaucuugcucugc

SEQ ID NO: 2138231 - RNA, 18 nt, Human
gaaugaaccacaucuugc

SEQ ID NO: 2138232 - RNA, 22 nt, Human
gaaugaaccacaucuugcucug

SEQ ID NO: 2138233 - RNA, 17 nt, Human
gaaugcccacaggcaaa

SEQ ID NO: 2138234 - RNA, 22 nt, Human
gaaugcccacaggcaaaugcau

SEQ ID NO: 2138235 - RNA, 21 nt, Human
gaaugaagauaccaucagcaa

SEQ ID NO: 2138236 - RNA, 14 nt, Human
gaaugcauaaaaug

SEQ ID NO: 2138237 - RNA, 11 nt, Human
gaaugcagugg

SEQ ID NO: 2138238 - RNA, 17 nt, Human
gaaugaaggugucagaa

SEQ ID NO: 2138239 - RNA, 16 nt, Human
gaauguauuauucugc

SEQ ID NO: 2138240 - RNA, 17 nt, Human
gaauguauuauucugca

SEQ ID NO: 2138241 - RNA, 18 nt, Human
gaauguauuauucugcag

SEQ ID NO: 2138242 - RNA, 19 nt, Human
gaauguauuauucugcagc

SEQ ID NO: 2138243 - RNA, 21 nt, Human
gaauguauuauucugcagcau

SEQ ID NO: 2138244 - RNA, 22 nt, Human
gaaugguuuucaaaauaaaaau

SEQ ID NO: 2138245 - RNA, 13 nt, Human
gaaugguagucua

SEQ ID NO: 2138246 - RNA, 18 nt, Human
gaaugguagucuaaccaa

SEQ ID NO: 2138247 - RNA, 19 nt, Human
gaaugguagucuaaccaaa

SEQ ID NO: 2138248 - RNA, 20 nt, Human
gaaugguagucuaaccaaau

SEQ ID NO: 2138249 - RNA, 23 nt, Human
gaaugguagucuaaccaaaugca

SEQ ID NO: 2138250 - RNA, 17 nt, Human
gaauucucagaaucuca

SEQ ID NO: 2138251 - RNA, 16 nt, Human
gaauucauucuggucu

SEQ ID NO: 2138252 - RNA, 21 nt, Human
gaauucauucuggucucucua

SEQ ID NO: 2138253 - RNA, 22 nt, Human
gaauucauucuggucucucuau

SEQ ID NO: 2138254 - RNA, 14 nt, Human
gaauucagcugccc

SEQ ID NO: 2138255 - RNA, 23 nt, Human
gaauucuaggcaucccaggggac

SEQ ID NO: 2138256 - RNA, 18 nt, Human
gaauucugcuaccucacu

SEQ ID NO: 2138257 - RNA, 19 nt, Human
gaauucugcuaccucacug

SEQ ID NO: 2138258 - RNA, 14 nt, Human
gaauugaagcagga

SEQ ID NO: 2138259 - RNA, 15 nt, Human
gaauugaacccagga

SEQ ID NO: 2138260 - RNA, 16 nt, Human
gaauugaacccaggag

SEQ ID NO: 2138261 - RNA, 18 nt, Human
gaauugaacccaggaggu

SEQ ID NO: 2138262 - RNA, 15 nt, Human
gaauugaggucugcu

SEQ ID NO: 2138263 - RNA, 14 nt, Human
gaauugauaauaaa

SEQ ID NO: 2138264 - RNA, 15 nt, Human
gaauugauaauaaac

SEQ ID NO: 2138265 - RNA, 23 nt, Human
gaauugauaauaaacuguccucu

SEQ ID NO: 2138266 - RNA, 20 nt, Human
gaauugaucauuuucccccc

SEQ ID NO: 2138267 - RNA, 23 nt, Human
gaauuuauucaauuccucuggga

SEQ ID NO: 2138268 - RNA, 11 nt, Human
gaauuuaacaa

SEQ ID NO: 2138269 - RNA, 12 nt, Human
gaauuuaacaau

SEQ ID NO: 2138270 - RNA, 16 nt, Human
gaauuuaacaaugcga

SEQ ID NO: 2138271 - RNA, 17 nt, Human
gaauuuaacaaugcgaa

SEQ ID NO: 2138272 - RNA, 18 nt, Human
gaauuuaacaaugcgaau

SEQ ID NO: 2138273 - RNA, 22 nt, Human
gaauuuaacaaugcgaauggua

SEQ ID NO: 2138274 - RNA, 22 nt, Human
gaauuuaucacacuucugugag

SEQ ID NO: 2138275 - RNA, 17 nt, Human
gaauuuauucaauuccu

SEQ ID NO: 2138276 - RNA, 13 nt, Human
gaauuuauucaau

SEQ ID NO: 2138277 - RNA, 20 nt, Human
gaauuuaucacacuucugug

SEQ ID NO: 2138278 - RNA, 14 nt, Human
gaauuguaucauuu

SEQ ID NO: 2138279 - RNA, 14 nt, Human
gaauuguccccagu

SEQ ID NO: 2138280 - RNA, 23 nt, Human
gaauuguccccaguuugcagaaa

SEQ ID NO: 2138281 - RNA, 18 nt, Human
gaauugugaccaaguuau

SEQ ID NO: 2138282 - RNA, 20 nt, Human
gaauugauuucccuucuucu

SEQ ID NO: 2138283 - RNA, 21 nt, Human
gaauugaucauuuucccccca

SEQ ID NO: 2138284 - RNA, 18 nt, Human
gauauaaaagacugacca

SEQ ID NO: 2138285 - RNA, 13 nt, Human
gauauaaauaaaa

SEQ ID NO: 2138286 - RNA, 13 nt, Human
gauaggcucugca

SEQ ID NO: 2138287 - RNA, 14 nt, Human
gauaggcucugcac

SEQ ID NO: 2138288 - RNA, 17 nt, Human
gauaggcucugcacaga

SEQ ID NO: 2138289 - RNA, 20 nt, Human
gauaggcucugcacagaugg

SEQ ID NO: 2138290 - RNA, 18 nt, Human
gauauaugcucugcaugu

SEQ ID NO: 2138291 - RNA, 15 nt, Human
gauauaaauaaaaca

SEQ ID NO: 2138292 - RNA, 18 nt, Human
gauauagaucacauaaca

SEQ ID NO: 2138293 - RNA, 20 nt, Human
gauauagaucacauaacaga

SEQ ID NO: 2138294 - RNA, 12 nt, Human
gauaauuuugca

SEQ ID NO: 2138295 - RNA, 17 nt, Human
gauaauuuugcauaaaa

SEQ ID NO: 2138296 - RNA, 18 nt, Human
gauaauucuagcuuugag

SEQ ID NO: 2138297 - RNA, 17 nt, Human
gauaauaugagaaucag

SEQ ID NO: 2138298 - RNA, 23 nt, Human
gauaggccugugggccagauugc

SEQ ID NO: 2138299 - RNA, 16 nt, Human
gauaggccuucuugug

SEQ ID NO: 2138300 - RNA, 12 nt, Human
gauaggcucugc

SEQ ID NO: 2138301 - RNA, 17 nt, Human
gaucagcuguuugucau

SEQ ID NO: 2138302 - RNA, 18 nt, Human
gaucagcuguuugucaua

SEQ ID NO: 2138303 - RNA, 17 nt, Human
gaucacuggagcccagg

SEQ ID NO: 2138304 - RNA, 14 nt, Human
gaucacuggagccc

SEQ ID NO: 2138305 - RNA, 16 nt, Human
gaucagcuguuuguca

SEQ ID NO: 2138306 - RNA, 20 nt, Human
gauaggcacauagagaggga

SEQ ID NO: 2138307 - RNA, 18 nt, Human
gaucacuaugcauuuuaa

SEQ ID NO: 2138308 - RNA, 14 nt, Human
gaucaccugagguc

SEQ ID NO: 2138309 - RNA, 14 nt, Human
gaucaccugagguu

SEQ ID NO: 2138310 - RNA, 12 nt, Human
gaucacuggagc

SEQ ID NO: 2138311 - RNA, 13 nt, Human
gaucacuggagcc

SEQ ID NO: 2138312 - RNA, 20 nt, Human
gaucacggcucacugcagcc

SEQ ID NO: 2138313 - RNA, 23 nt, Human
gaucacggcucacugcagccuca

SEQ ID NO: 2138314 - RNA, 13 nt, Human
gaucacagggccc

SEQ ID NO: 2138315 - RNA, 20 nt, Human
gaucacagggccccagaagg

SEQ ID NO: 2138316 - RNA, 18 nt, Human
gaucacauaacagaaugc

SEQ ID NO: 2138317 - RNA, 19 nt, Human
gaucacauaacagaaugca

SEQ ID NO: 2138318 - RNA, 14 nt, Human
gaucacagccucug

SEQ ID NO: 2138319 - RNA, 21 nt, Human
gaucacagcuucagccaggag

SEQ ID NO: 2138320 - RNA, 19 nt, Human
gaucacagcuucagccagg

SEQ ID NO: 2138321 - RNA, 17 nt, Human
gauauauuuuucacagu

SEQ ID NO: 2138322 - RNA, 15 nt, Human
gauauauuuuucaca

SEQ ID NO: 2138323 - RNA, 23 nt, Human
gauauaggucagugaggcccagg

SEQ ID NO: 2138324 - RNA, 17 nt, Human
gauaucccuaugcugcc

SEQ ID NO: 2138325 - RNA, 22 nt, Human
gauaucccuaugcugccuaggc

SEQ ID NO: 2138326 - RNA, 23 nt, Human
gauaucccuaugcugccuaggcu

SEQ ID NO: 2138327 - RNA, 16 nt, Human
gaguguguauuguucc

SEQ ID NO: 2138328 - RNA, 17 nt, Human
gaguguguauuguuccc

SEQ ID NO: 2138329 - RNA, 18 nt, Human
gaguguguauuguuccca

SEQ ID NO: 2138330 - RNA, 13 nt, Human
gacuucccagcuu

SEQ ID NO: 2138331 - RNA, 20 nt, Human
gacuuccccgcauuccaggc

SEQ ID NO: 2138332 - RNA, 22 nt, Human
gacuuccccgcauuccaggcuc

SEQ ID NO: 2138333 - RNA, 23 nt, Human
gacuuccccgcauuccaggcucc

SEQ ID NO: 2138334 - RNA, 15 nt, Human
gacuucccaacugca

SEQ ID NO: 2138335 - RNA, 21 nt, Human
gacuucauagauuuccuuccc

SEQ ID NO: 2138336 - RNA, 15 nt, Human
gacuucauuuuuccu

SEQ ID NO: 2138337 - RNA, 16 nt, Human
gacuucauuuuuccua

SEQ ID NO: 2138338 - RNA, 18 nt, Human
gaguucgagaccagccug

SEQ ID NO: 2138339 - RNA, 15 nt, Human
gaguucagcugcuuc

SEQ ID NO: 2138340 - RNA, 16 nt, Human
gaguucagcugcuucu

SEQ ID NO: 2138341 - RNA, 19 nt, Human
gaguucagguagcugcccc

SEQ ID NO: 2138342 - RNA, 21 nt, Human
gaguucagguagcugccccug

SEQ ID NO: 2138343 - RNA, 22 nt, Human
gaguucagguagcugccccugg

SEQ ID NO: 2138344 - RNA, 19 nt, Human
gaguucgagaccagccugg

SEQ ID NO: 2138345 - RNA, 20 nt, Human
gaguucgagaccagccuggc

SEQ ID NO: 2138346 - RNA, 21 nt, Human
gaguucgagaccagccuggcc

SEQ ID NO: 2138347 - RNA, 19 nt, Human
gaguucgaggcugcaguca

SEQ ID NO: 2138348 - RNA, 19 nt, Human
gaguucaagaccagccugg

SEQ ID NO: 2138349 - RNA, 20 nt, Human
gaguucaagaccagccuggc

SEQ ID NO: 2138350 - RNA, 11 nt, Human
gagugugugca

SEQ ID NO: 2138351 - RNA, 19 nt, Human
gaguguguauuguucccag

SEQ ID NO: 2138352 - RNA, 21 nt, Human
gaguguguccaagugugugug

SEQ ID NO: 2138353 - RNA, 19 nt, Human
gagugugugcaugugugug

SEQ ID NO: 2138354 - RNA, 17 nt, Human
gaguguguuugucaccg

SEQ ID NO: 2138355 - RNA, 19 nt, Human
gaguguguguuugugcuga

SEQ ID NO: 2138356 - RNA, 18 nt, Human
gauaaaaugagguucaac

SEQ ID NO: 2138357 - RNA, 15 nt, Human
gauaaacuuuuagaa

SEQ ID NO: 2138358 - RNA, 18 nt, Human
gauaaacuuuuagaaacu

SEQ ID NO: 2138359 - RNA, 14 nt, Human
gauaaagaaaagaa

SEQ ID NO: 2138360 - RNA, 15 nt, Human
gauaacaagaucuuu

SEQ ID NO: 2138361 - RNA, 13 nt, Human
gauaaauuauaag

SEQ ID NO: 2138362 - RNA, 12 nt, Human
gauaaauuauaa

SEQ ID NO: 2138363 - RNA, 16 nt, Human
gauaaauuccacugga

SEQ ID NO: 2138364 - RNA, 11 nt, Human
gauaacagcua

SEQ ID NO: 2138365 - RNA, 15 nt, Human
gauaacagcuaccau

SEQ ID NO: 2138366 - RNA, 20 nt, Human
gauaacagcuaccaugacaa

SEQ ID NO: 2138367 - RNA, 21 nt, Human
gauaaccuguacuucaaguua

SEQ ID NO: 2138368 - RNA, 22 nt, Human
gauaaccuguacuucaaguuaa

SEQ ID NO: 2138369 - RNA, 16 nt, Human
gaugaaauguaaauac

SEQ ID NO: 2138370 - RNA, 20 nt, Human
gaucuugcucuaucucacag

SEQ ID NO: 2138371 - RNA, 19 nt, Human
gaucuuggcuuacugcagc

SEQ ID NO: 2138372 - RNA, 19 nt, Human
gaugaaugaggucccaggc

SEQ ID NO: 2138373 - RNA, 23 nt, Human
gaugaaugaggucccaggcagag

SEQ ID NO: 2138374 - RNA, 13 nt, Human
gaugaaucuugcg

SEQ ID NO: 2138375 - RNA, 23 nt, Human
gaugacccugcgaaggggcccug

SEQ ID NO: 2138376 - RNA, 19 nt, Human
gaugaccuaaccuaagcaa

SEQ ID NO: 2138377 - RNA, 13 nt, Human
gaugacccaggcu

SEQ ID NO: 2138378 - RNA, 21 nt, Human
gaugacccaggcugccugagc

SEQ ID NO: 2138379 - RNA, 12 nt, Human
gaugaccccucc

SEQ ID NO: 2138380 - RNA, 16 nt, Human
gaugaccccuccccua

SEQ ID NO: 2138381 - RNA, 17 nt, Human
gaugaccccuccccuaa

SEQ ID NO: 2138382 - RNA, 16 nt, Human
gaugaauuaaauuuaa

SEQ ID NO: 2138383 - RNA, 21 nt, Human
gaugaaaugaggucagagccu

SEQ ID NO: 2138384 - RNA, 15 nt, Human
gaugaaaugagguca

SEQ ID NO: 2138385 - RNA, 19 nt, Human
gaucuucuuuauaauucua

SEQ ID NO: 2138386 - RNA, 15 nt, Human
gaucuguauauacaa

SEQ ID NO: 2138387 - RNA, 20 nt, Human
gaucuguauauacaauaaca

SEQ ID NO: 2138388 - RNA, 23 nt, Human
gaucuguauauuuuuuucuaaga

SEQ ID NO: 2138389 - RNA, 23 nt, Human
gaugcaccagcccuuagcaggga

SEQ ID NO: 2138390 - RNA, 15 nt, Human
gaugcaccagcccuu

SEQ ID NO: 2138391 - RNA, 14 nt, Human
gaugcaccagcccu

SEQ ID NO: 2138392 - RNA, 23 nt, Human
gaugagaaauaaaguuucuguug

SEQ ID NO: 2138393 - RNA, 18 nt, Human
gaugagaauucagcugcc

SEQ ID NO: 2138394 - RNA, 20 nt, Human
gaugagaauucagcugcccc

SEQ ID NO: 2138395 - RNA, 16 nt, Human
gaugccugguggcagc

SEQ ID NO: 2138396 - RNA, 15 nt, Human
gaugccugguggcag

SEQ ID NO: 2138397 - RNA, 14 nt, Human
gaugccugguggca

SEQ ID NO: 2138398 - RNA, 14 nt, Human
gaugcagugcuucc

SEQ ID NO: 2138399 - RNA, 16 nt, Human
gauccugucuuuaagg

SEQ ID NO: 2138400 - RNA, 19 nt, Human
gauccugucuuuaaggaaa

SEQ ID NO: 2138401 - RNA, 20 nt, Human
gauccugucuuuaaggaaaa

SEQ ID NO: 2138402 - RNA, 17 nt, Human
gaucuaagccuuuccau

SEQ ID NO: 2138403 - RNA, 23 nt, Human
gauccuggguggucugcaggcag

SEQ ID NO: 2138404 - RNA, 18 nt, Human
gaucuaagccuuuccaua

SEQ ID NO: 2138405 - RNA, 18 nt, Human
gaucuaccagcauaaaua

SEQ ID NO: 2138406 - RNA, 15 nt, Human
gaucuaggugaggau

SEQ ID NO: 2138407 - RNA, 16 nt, Human
gaucauagauuucuga

SEQ ID NO: 2138408 - RNA, 18 nt, Human
gaucauagauuucugauu

SEQ ID NO: 2138409 - RNA, 19 nt, Human
gaucauagauuucugauuu

SEQ ID NO: 2138410 - RNA, 22 nt, Human
gaucauagauuucugauuuuau

SEQ ID NO: 2138411 - RNA, 23 nt, Human
gaucauagauuucugauuuuaug

SEQ ID NO: 2138412 - RNA, 13 nt, Human
gaucauccacugu

SEQ ID NO: 2138413 - RNA, 17 nt, Human
gauccucccaccucagc

SEQ ID NO: 2138414 - RNA, 16 nt, Human
gauccucccaccucag

SEQ ID NO: 2138415 - RNA, 23 nt, Human
gauccuaaugaaugcauaaaaug

SEQ ID NO: 2138416 - RNA, 18 nt, Human
gauccuaagggcucaccg

SEQ ID NO: 2138417 - RNA, 14 nt, Human
gauccuaccccuga

SEQ ID NO: 2138418 - RNA, 18 nt, Human
gauccuaggcauuugcug

SEQ ID NO: 2138419 - RNA, 13 nt, Human
gcaaaccugcccc

SEQ ID NO: 2138420 - RNA, 14 nt, Human
gcaaaccugcccca

SEQ ID NO: 2138421 - RNA, 17 nt, Human
gcaaaccugccccaucc

SEQ ID NO: 2138422 - RNA, 18 nt, Human
gcaaaccugccccauccc

SEQ ID NO: 2138423 - RNA, 17 nt, Human
gauuuuaacaauaacua

SEQ ID NO: 2138424 - RNA, 23 nt, Human
gauuuuaacaauaacuacugugu

SEQ ID NO: 2138425 - RNA, 20 nt, Human
gcaaacuuaagaaacacuga

SEQ ID NO: 2138426 - RNA, 21 nt, Human
gauuuuaaauucacaauagaa

SEQ ID NO: 2138427 - RNA, 12 nt, Human
gauuuuaacaau

SEQ ID NO: 2138428 - RNA, 14 nt, Human
gauuuuaacaauaa

SEQ ID NO: 2138429 - RNA, 15 nt, Human
gauuuuaacaauaac

SEQ ID NO: 2138430 - RNA, 23 nt, Human
gcaaaguucccuacuuccuguga

SEQ ID NO: 2138431 - RNA, 17 nt, Human
gcaaauagaaaacagga

SEQ ID NO: 2138432 - RNA, 21 nt, Human
gcaaauagaaaacaggaaaaa

SEQ ID NO: 2138433 - RNA, 20 nt, Human
gcaaagugaagacacuggcu

SEQ ID NO: 2138434 - RNA, 18 nt, Human
gcaaagaggcaagaggcu

SEQ ID NO: 2138435 - RNA, 14 nt, Human
gcaaagaggcaaga

SEQ ID NO: 2138436 - RNA, 13 nt, Human
gcaaagaggcaag

SEQ ID NO: 2138437 - RNA, 22 nt, Human
gcaaagacuauucccuucuaac

SEQ ID NO: 2138438 - RNA, 21 nt, Human
gcaaagacuauucccuucuaa

SEQ ID NO: 2138439 - RNA, 22 nt, Human
gcaaagaauuucaauuuguuca

SEQ ID NO: 2138440 - RNA, 15 nt, Human
gcaaagacagaagcc

SEQ ID NO: 2138441 - RNA, 16 nt, Human
gcaaagacagaagccu

SEQ ID NO: 2138442 - RNA, 17 nt, Human
gcaaagacagaagccuc

SEQ ID NO: 2138443 - RNA, 18 nt, Human
gcaacugcauuggcuuug

SEQ ID NO: 2138444 - RNA, 19 nt, Human
gcaacugaggcagacagca

SEQ ID NO: 2138445 - RNA, 21 nt, Human
gcaacugaggcagacagcagc

SEQ ID NO: 2138446 - RNA, 22 nt, Human
gcaacugaggcagacagcagcu

SEQ ID NO: 2138447 - RNA, 20 nt, Human
gcaacugcugaugcucaugg

SEQ ID NO: 2138448 - RNA, 21 nt, Human
gcaacugcugaugcucauggu

SEQ ID NO: 2138449 - RNA, 15 nt, Human
gcaacugaacaaaaa

SEQ ID NO: 2138450 - RNA, 16 nt, Human
gcaacugaacaaaaaa

SEQ ID NO: 2138451 - RNA, 13 nt, Human
gcaacugaggcag

SEQ ID NO: 2138452 - RNA, 14 nt, Human
gcaacugaggcaga

SEQ ID NO: 2138453 - RNA, 15 nt, Human
gcaacugaggcagac

SEQ ID NO: 2138454 - RNA, 23 nt, Human
gcaaauggugguuguuucuucca

SEQ ID NO: 2138455 - RNA, 15 nt, Human
gcaaugaaaaauucu

SEQ ID NO: 2138456 - RNA, 23 nt, Human
gcaaucuggggauacuggcaaag

SEQ ID NO: 2138457 - RNA, 16 nt, Human
gcaaugaaaaauucuc

SEQ ID NO: 2138458 - RNA, 13 nt, Human
gcaagguggagug

SEQ ID NO: 2138459 - RNA, 18 nt, Human
gcaagguggaguggaugc

SEQ ID NO: 2138460 - RNA, 23 nt, Human
gcaagguggaguggaugccucag

SEQ ID NO: 2138461 - RNA, 14 nt, Human
gcaaguaugugagu

SEQ ID NO: 2138462 - RNA, 12 nt, Human
gcaauccuccug

SEQ ID NO: 2138463 - RNA, 13 nt, Human
gcaauccuccuga

SEQ ID NO: 2138464 - RNA, 14 nt, Human
gcaauccuccugag

SEQ ID NO: 2138465 - RNA, 18 nt, Human
gcaaguaugugagugugu

SEQ ID NO: 2138466 - RNA, 23 nt, Human
gcaaguauguuuuagcauguguu

SEQ ID NO: 2138467 - RNA, 20 nt, Human
gcaaggaccaggacucccuc

SEQ ID NO: 2138468 - RNA, 19 nt, Human
gcaagcuuuuuuauuuuuu

SEQ ID NO: 2138469 - RNA, 15 nt, Human
gcaaggaaggaaaga

SEQ ID NO: 2138470 - RNA, 13 nt, Human
gcaaggaaggaaa

SEQ ID NO: 2138471 - RNA, 14 nt, Human
gcaaggaaggaaag

SEQ ID NO: 2138472 - RNA, 14 nt, Human
gcaaggaccaggac

SEQ ID NO: 2138473 - RNA, 15 nt, Human
gcaaggaccaggacu

SEQ ID NO: 2138474 - RNA, 21 nt, Human
gcaaggaccaggacucccucc

SEQ ID NO: 2138475 - RNA, 17 nt, Human
gcaagcuuggcuguaga

SEQ ID NO: 2138476 - RNA, 21 nt, Human
gcaagcuuggcuguagaagga

SEQ ID NO: 2138477 - RNA, 22 nt, Human
gcaagcuuggcuguagaaggag

SEQ ID NO: 2138478 - RNA, 13 nt, Human
gcaagcuggguaa

SEQ ID NO: 2138479 - RNA, 21 nt, Human
gcaagcacugcaugggcaagc

SEQ ID NO: 2138480 - RNA, 20 nt, Human
gcaagcaccuccugccucga

SEQ ID NO: 2138481 - RNA, 18 nt, Human
gcaagcaccuccugccuc

SEQ ID NO: 2138482 - RNA, 14 nt, Human
gcaagcacaucugc

SEQ ID NO: 2138483 - RNA, 18 nt, Human
gcaagcaagaaacacugg

SEQ ID NO: 2138484 - RNA, 14 nt, Human
gcaagauugcuuaa

SEQ ID NO: 2138485 - RNA, 16 nt, Human
gcaagcaccuccugcc

SEQ ID NO: 2138486 - RNA, 15 nt, Human
gcaagcaccuccugc

SEQ ID NO: 2138487 - RNA, 13 nt, Human
gcaagauugcuua

SEQ ID NO: 2138488 - RNA, 22 nt, Human
gcaagauuuuccacaagauucc

SEQ ID NO: 2138489 - RNA, 21 nt, Human
gcaacuugucuuuuucuggac

SEQ ID NO: 2138490 - RNA, 22 nt, Human
gcaacuugucuuuuucuggacu

SEQ ID NO: 2138491 - RNA, 23 nt, Human
gcaacuugucuuuuucuggacug

SEQ ID NO: 2138492 - RNA, 19 nt, Human
gcaacuugucuuuuucugg

SEQ ID NO: 2138493 - RNA, 14 nt, Human
gauuuguuuuagaa

SEQ ID NO: 2138494 - RNA, 17 nt, Human
gauuuguuuuagaauga

SEQ ID NO: 2138495 - RNA, 19 nt, Human
gauuuguuaaugauagcua

SEQ ID NO: 2138496 - RNA, 21 nt, Human
gauuguuaagucuaaauauuu

SEQ ID NO: 2138497 - RNA, 17 nt, Human
gauuguuugcucugaga

SEQ ID NO: 2138498 - RNA, 16 nt, Human
gauugcaacaggcugg

SEQ ID NO: 2138499 - RNA, 17 nt, Human
gauucccaagcucugcu

SEQ ID NO: 2138500 - RNA, 16 nt, Human
gauucccaagcucugc

SEQ ID NO: 2138501 - RNA, 14 nt, Human
gauugcuuaaaaua

SEQ ID NO: 2138502 - RNA, 18 nt, Human
gauugcuguguccaacuc

SEQ ID NO: 2138503 - RNA, 19 nt, Human
gauugcuguguccaacucc

SEQ ID NO: 2138504 - RNA, 21 nt, Human
gauugcuguguccaacuccag

SEQ ID NO: 2138505 - RNA, 22 nt, Human
gauugcuguguccaacuccagu

SEQ ID NO: 2138506 - RNA, 23 nt, Human
gauugcuguguccaacuccagua

SEQ ID NO: 2138507 - RNA, 17 nt, Human
gauugcuuaaaauagca

SEQ ID NO: 2138508 - RNA, 18 nt, Human
gauugcuuaaaauagcaa

SEQ ID NO: 2138509 - RNA, 14 nt, Human
gauugcuucuguag

SEQ ID NO: 2138510 - RNA, 16 nt, Human
gauugcuucuguagua

SEQ ID NO: 2138511 - RNA, 16 nt, Human
gauugcuugagcccag

SEQ ID NO: 2138512 - RNA, 19 nt, Human
gauugcuugagcccaggag

SEQ ID NO: 2138513 - RNA, 18 nt, Human
gauugcaacaggcugggc

SEQ ID NO: 2138514 - RNA, 17 nt, Human
gauugcaacaggcuggg

SEQ ID NO: 2138515 - RNA, 15 nt, Human
gauugcuaugaauga

SEQ ID NO: 2138516 - RNA, 17 nt, Human
gaugccugguggcagcu

SEQ ID NO: 2138517 - RNA, 14 nt, Human
gauguucuggcccu

SEQ ID NO: 2138518 - RNA, 13 nt, Human
gauguuuguggcc

SEQ ID NO: 2138519 - RNA, 14 nt, Human
gauguuuguggccu

SEQ ID NO: 2138520 - RNA, 15 nt, Human
gauguuuguggccuc

SEQ ID NO: 2138521 - RNA, 16 nt, Human
gauguuuguggccuca

SEQ ID NO: 2138522 - RNA, 17 nt, Human
gauguuuguggccucag

SEQ ID NO: 2138523 - RNA, 18 nt, Human
gauguuuguggccucaga

SEQ ID NO: 2138524 - RNA, 16 nt, Human
gauuaaggucucucuu

SEQ ID NO: 2138525 - RNA, 17 nt, Human
gauuaaggucucucuuu

SEQ ID NO: 2138526 - RNA, 18 nt, Human
gauuaaggucucucuuug

SEQ ID NO: 2138527 - RNA, 19 nt, Human
gauuaaggucucucuuugg

SEQ ID NO: 2138528 - RNA, 20 nt, Human
gauuaaggucucucuuugga

SEQ ID NO: 2138529 - RNA, 18 nt, Human
gauuaauauggggaugca

SEQ ID NO: 2138530 - RNA, 21 nt, Human
gauuacaagcgugagccacug

SEQ ID NO: 2138531 - RNA, 13 nt, Human
gauuacaagcgug

SEQ ID NO: 2138532 - RNA, 15 nt, Human
gauuaauuaaaugca

SEQ ID NO: 2138533 - RNA, 15 nt, Human
gauucccaagcucug

SEQ ID NO: 2138534 - RNA, 11 nt, Human
gauucaugugg

SEQ ID NO: 2138535 - RNA, 12 nt, Human
gauucaggcugc

SEQ ID NO: 2138536 - RNA, 13 nt, Human
gauucaggcugcu

SEQ ID NO: 2138537 - RNA, 16 nt, Human
gauucaggcugcuugg

SEQ ID NO: 2138538 - RNA, 14 nt, Human
gcagccuggacccu

SEQ ID NO: 2138539 - RNA, 13 nt, Human
gcagccugcgugg

SEQ ID NO: 2138540 - RNA, 15 nt, Human
gcagccugcguggcu

SEQ ID NO: 2138541 - RNA, 19 nt, Human
gcagccugcguggcugacc

SEQ ID NO: 2138542 - RNA, 12 nt, Human
gcagccuggagg

SEQ ID NO: 2138543 - RNA, 13 nt, Human
gcagccuggaggc

SEQ ID NO: 2138544 - RNA, 22 nt, Human
gcagccucaaccuccugggcua

SEQ ID NO: 2138545 - RNA, 21 nt, Human
gcagccucaaccuccugggcu

SEQ ID NO: 2138546 - RNA, 16 nt, Human
gcagccuacuagggac

SEQ ID NO: 2138547 - RNA, 23 nt, Human
gcagccuacuagggaccugggga

SEQ ID NO: 2138548 - RNA, 13 nt, Human
gcagccugccugg

SEQ ID NO: 2138549 - RNA, 14 nt, Human
gcagccugccugga

SEQ ID NO: 2138550 - RNA, 15 nt, Human
gcagccugccuggag

SEQ ID NO: 2138551 - RNA, 16 nt, Human
gcagccugccuggagu

SEQ ID NO: 2138552 - RNA, 18 nt, Human
gcagccgugccuucagcu

SEQ ID NO: 2138553 - RNA, 20 nt, Human
gcagccucaaccuccugggc

SEQ ID NO: 2138554 - RNA, 19 nt, Human
gcagccucaaccuccuggg

SEQ ID NO: 2138555 - RNA, 17 nt, Human
gcagccgugccuucagc

SEQ ID NO: 2138556 - RNA, 15 nt, Human
gcagccgugccuuca

SEQ ID NO: 2138557 - RNA, 14 nt, Human
gcagccgugccuuc

SEQ ID NO: 2138558 - RNA, 20 nt, Human
gcagcagguggcagaauggg

SEQ ID NO: 2138559 - RNA, 14 nt, Human
gcaggagccugagc

SEQ ID NO: 2138560 - RNA, 13 nt, Human
gcaggagcucaga

SEQ ID NO: 2138561 - RNA, 14 nt, Human
gcaggagcucagau

SEQ ID NO: 2138562 - RNA, 16 nt, Human
gcaggagcucagauga

SEQ ID NO: 2138563 - RNA, 18 nt, Human
gcaggagcucagaugaag

SEQ ID NO: 2138564 - RNA, 18 nt, Human
gcaggagggcccuaccug

SEQ ID NO: 2138565 - RNA, 22 nt, Human
gcaggagggcccuaccugauug

SEQ ID NO: 2138566 - RNA, 11 nt, Human
gcaggaccuca

SEQ ID NO: 2138567 - RNA, 14 nt, Human
gcaggaccucagag

SEQ ID NO: 2138568 - RNA, 15 nt, Human
gcaggaccucagagu

SEQ ID NO: 2138569 - RNA, 16 nt, Human
gcaggaccucagaguc

SEQ ID NO: 2138570 - RNA, 22 nt, Human
gcaggaccucagaguccaggcc

SEQ ID NO: 2138571 - RNA, 23 nt, Human
gcaggaccucagaguccaggccc

SEQ ID NO: 2138572 - RNA, 22 nt, Human
gcagcgagcuaugaucgcgcca

SEQ ID NO: 2138573 - RNA, 24 nt, Human
gcagcgaguuguggaaagccucug

SEQ ID NO: 2138574 - RNA, 15 nt, Human
gcagcaaccagagca

SEQ ID NO: 2138575 - RNA, 16 nt, Human
gcagcaaccagagcac

SEQ ID NO: 2138576 - RNA, 17 nt, Human
gcagcaaccagagcacu

SEQ ID NO: 2138577 - RNA, 18 nt, Human
gcagcaaccagagcacug

SEQ ID NO: 2138578 - RNA, 19 nt, Human
gcagcaaccagagcacugu

SEQ ID NO: 2138579 - RNA, 20 nt, Human
gcagcaaccagagcacugua

SEQ ID NO: 2138580 - RNA, 19 nt, Human
gcagcaacacaauguuauu

SEQ ID NO: 2138581 - RNA, 18 nt, Human
gcagaugcaaagaggcaa

SEQ ID NO: 2138582 - RNA, 13 nt, Human
gcagaugccagag

SEQ ID NO: 2138583 - RNA, 14 nt, Human
gcagaugccagagc

SEQ ID NO: 2138584 - RNA, 19 nt, Human
gcagaugcaaagaggcaag

SEQ ID NO: 2138585 - RNA, 22 nt, Human
gcagaugcaaagaggcaagagg

SEQ ID NO: 2138586 - RNA, 13 nt, Human
gcagagucagcag

SEQ ID NO: 2138587 - RNA, 14 nt, Human
gcagagucagcaga

SEQ ID NO: 2138588 - RNA, 12 nt, Human
gcagagucagca

SEQ ID NO: 2138589 - RNA, 14 nt, Human
gcagagugccccac

SEQ ID NO: 2138590 - RNA, 17 nt, Human
gcagagugccccaccug

SEQ ID NO: 2138591 - RNA, 21 nt, Human
gcagagugccccaccugccac

SEQ ID NO: 2138592 - RNA, 15 nt, Human
gcagagacagagagg

SEQ ID NO: 2138593 - RNA, 17 nt, Human
gcagagacaggaccuga

SEQ ID NO: 2138594 - RNA, 23 nt, Human
gcagagaaugaaagggcccagag

SEQ ID NO: 2138595 - RNA, 22 nt, Human
gcagagaaugaaagggcccaga

SEQ ID NO: 2138596 - RNA, 20 nt, Human
gcagagaaucauacuuagca

SEQ ID NO: 2138597 - RNA, 13 nt, Human
gcagagacacuaa

SEQ ID NO: 2138598 - RNA, 21 nt, Human
gcagagaauucucuuauccaa

SEQ ID NO: 2138599 - RNA, 21 nt, Human
gcagagaaugaaagggcccag

SEQ ID NO: 2138600 - RNA, 20 nt, Human
gcagagaaugaaagggccca

SEQ ID NO: 2138601 - RNA, 19 nt, Human
gcagagaaugaaagggccc

SEQ ID NO: 2138602 - RNA, 13 nt, Human
gcagaagcucucg

SEQ ID NO: 2138603 - RNA, 23 nt, Human
gcagaagcucucgauggacaaug

SEQ ID NO: 2138604 - RNA, 12 nt, Human
gcacaugugugc

SEQ ID NO: 2138605 - RNA, 23 nt, Human
gcaccacccuagucccuuccccu

SEQ ID NO: 2138606 - RNA, 19 nt, Human
gcaccacugcacuccagcc

SEQ ID NO: 2138607 - RNA, 11 nt, Human
gcaccacccua

SEQ ID NO: 2138608 - RNA, 14 nt, Human
gcaccaccaggucu

SEQ ID NO: 2138609 - RNA, 15 nt, Human
gcaccaccaggucuc

SEQ ID NO: 2138610 - RNA, 16 nt, Human
gcaccaccaggucucc

SEQ ID NO: 2138611 - RNA, 20 nt, Human
gcaccaccaggucucccggg

SEQ ID NO: 2138612 - RNA, 20 nt, Human
gcaccacccuagucccuucc

SEQ ID NO: 2138613 - RNA, 22 nt, Human
gcaccacccuagucccuucccc

SEQ ID NO: 2138614 - RNA, 22 nt, Human
gcacauggaggagcuuggggga

SEQ ID NO: 2138615 - RNA, 15 nt, Human
gcaccuccugccucg

SEQ ID NO: 2138616 - RNA, 14 nt, Human
gcaccuccugccuc

SEQ ID NO: 2138617 - RNA, 17 nt, Human
gcacccggccccugcug

SEQ ID NO: 2138618 - RNA, 15 nt, Human
gcacccggccccugc

SEQ ID NO: 2138619 - RNA, 14 nt, Human
gcacccacucugcu

SEQ ID NO: 2138620 - RNA, 14 nt, Human
gcacccggccccug

SEQ ID NO: 2138621 - RNA, 15 nt, Human
gcacccauccuagag

SEQ ID NO: 2138622 - RNA, 16 nt, Human
gcacccauccuagaga

SEQ ID NO: 2138623 - RNA, 19 nt, Human
gcacaugccuguaguccca

SEQ ID NO: 2138624 - RNA, 16 nt, Human
gcacagcuucauuucc

SEQ ID NO: 2138625 - RNA, 12 nt, Human
gcacagcugugg

SEQ ID NO: 2138626 - RNA, 14 nt, Human
gcacagcuguggug

SEQ ID NO: 2138627 - RNA, 16 nt, Human
gcaaugacaucuucaa

SEQ ID NO: 2138628 - RNA, 21 nt, Human
gcacagcggggccccagggcu

SEQ ID NO: 2138629 - RNA, 13 nt, Human
gcaaugaaggaaa

SEQ ID NO: 2138630 - RNA, 18 nt, Human
gcacccggccccugcugg

SEQ ID NO: 2138631 - RNA, 14 nt, Human
gcaccacucuccuu

SEQ ID NO: 2138632 - RNA, 15 nt, Human
gcaccccaaguccag

SEQ ID NO: 2138633 - RNA, 22 nt, Human
gcaccugcauccguaguucccu

SEQ ID NO: 2138634 - RNA, 13 nt, Human
gcaccugccagcc

SEQ ID NO: 2138635 - RNA, 14 nt, Human
gcaccugccagccu

SEQ ID NO: 2138636 - RNA, 15 nt, Human
gcaccugccagccug

SEQ ID NO: 2138637 - RNA, 16 nt, Human
gcaccugccagccugg

SEQ ID NO: 2138638 - RNA, 17 nt, Human
gcaccugccagccuggc

SEQ ID NO: 2138639 - RNA, 22 nt, Human
gcaccugccagccuggcuucug

SEQ ID NO: 2138640 - RNA, 15 nt, Human
gcaccugcccccugg

SEQ ID NO: 2138641 - RNA, 16 nt, Human
gcaccugcccccuggu

SEQ ID NO: 2138642 - RNA, 17 nt, Human
gcaccugcccccuggug

SEQ ID NO: 2138643 - RNA, 18 nt, Human
gcaccugcccccuggugg

SEQ ID NO: 2138644 - RNA, 17 nt, Human
gcacuaaggugugcucu

SEQ ID NO: 2138645 - RNA, 23 nt, Human
gcaccugcauccguaguucccug

SEQ ID NO: 2138646 - RNA, 21 nt, Human
gcaccugccgaccucguccuc

SEQ ID NO: 2138647 - RNA, 19 nt, Human
gcaccugccgaccucgucc

SEQ ID NO: 2138648 - RNA, 22 nt, Human
gcaccugcccccugguggacag

SEQ ID NO: 2138649 - RNA, 18 nt, Human
gcacuaaggugugcucug

SEQ ID NO: 2138650 - RNA, 19 nt, Human
gcacuaaggugugcucuga

SEQ ID NO: 2138651 - RNA, 21 nt, Human
gcacuacucccucaaagcaca

SEQ ID NO: 2138652 - RNA, 17 nt, Human
gcacugaggaccagcca

SEQ ID NO: 2138653 - RNA, 15 nt, Human
gcacuguaugcugga

SEQ ID NO: 2138654 - RNA, 16 nt, Human
gcacuguaugcuggac

SEQ ID NO: 2138655 - RNA, 21 nt, Human
gcagaagaauugaacccagga

SEQ ID NO: 2138656 - RNA, 23 nt, Human
gcagaagaauugaacccaggagg

SEQ ID NO: 2138657 - RNA, 12 nt, Human
gcauugcauuua

SEQ ID NO: 2138658 - RNA, 15 nt, Human
gcauugcuuuccacu

SEQ ID NO: 2138659 - RNA, 12 nt, Human
gcauugcuuucc

SEQ ID NO: 2138660 - RNA, 12 nt, Human
gcauugcuuucu

SEQ ID NO: 2138661 - RNA, 14 nt, Human
gcauucucugaaga

SEQ ID NO: 2138662 - RNA, 16 nt, Human
gcauugauggggaagg

SEQ ID NO: 2138663 - RNA, 17 nt, Human
gcauugauggggaagga

SEQ ID NO: 2138664 - RNA, 18 nt, Human
gcauugauggggaaggag

SEQ ID NO: 2138665 - RNA, 18 nt, Human
gcauucucacuccuaccu

SEQ ID NO: 2138666 - RNA, 15 nt, Human
gcauucucacuccua

SEQ ID NO: 2138667 - RNA, 13 nt, Human
gcauucucacucc

SEQ ID NO: 2138668 - RNA, 12 nt, Human
gcauuccccacu

SEQ ID NO: 2138669 - RNA, 23 nt, Human
gcauuugcugaauacagaggcaa

SEQ ID NO: 2138670 - RNA, 20 nt, Human
gcauugcuuucugaaauuag

SEQ ID NO: 2138671 - RNA, 13 nt, Human
gcauugcuuucug

SEQ ID NO: 2138672 - RNA, 17 nt, Human
gcauuuuacuguacaga

SEQ ID NO: 2138673 - RNA, 22 nt, Human
gcauuuugcuaaaugugaauga

SEQ ID NO: 2138674 - RNA, 18 nt, Human
gcauuuucaccccacccu

SEQ ID NO: 2138675 - RNA, 13 nt, Human
gcauuuucugaaa

SEQ ID NO: 2138676 - RNA, 17 nt, Human
gcauuuucugaaacuaa

SEQ ID NO: 2138677 - RNA, 21 nt, Human
gcauuuucugaaacuaaugaa

SEQ ID NO: 2138678 - RNA, 23 nt, Human
gcauuuucugaaacuaaugaaag

SEQ ID NO: 2138679 - RNA, 22 nt, Human
gcauuuucuggguucugggugg

SEQ ID NO: 2138680 - RNA, 11 nt, Human
gccaaaauaau

SEQ ID NO: 2138681 - RNA, 19 nt, Human
gccaaaauaaugucuuguu

SEQ ID NO: 2138682 - RNA, 21 nt, Human
gccaaaauaaugucuuguuaa

SEQ ID NO: 2138683 - RNA, 23 nt, Human
gccaaaauaaugucuuguuaaua

SEQ ID NO: 2138684 - RNA, 18 nt, Human
gccaaacucugccagcca

SEQ ID NO: 2138685 - RNA, 15 nt, Human
gccaaacagccacac

SEQ ID NO: 2138686 - RNA, 17 nt, Human
gccaaagaaugccuuga

SEQ ID NO: 2138687 - RNA, 17 nt, Human
gccaaacucugccagcc

SEQ ID NO: 2138688 - RNA, 13 nt, Human
gcaucaauccugu

SEQ ID NO: 2138689 - RNA, 17 nt, Human
gcaucaauccugugugg

SEQ ID NO: 2138690 - RNA, 19 nt, Human
gcaucaauccugugugguu

SEQ ID NO: 2138691 - RNA, 14 nt, Human
gcaucacagggcag

SEQ ID NO: 2138692 - RNA, 15 nt, Human
gcaucacagggcaga

SEQ ID NO: 2138693 - RNA, 16 nt, Human
gcaucacagggcagag

SEQ ID NO: 2138694 - RNA, 17 nt, Human
gcaucacagggcagagc

SEQ ID NO: 2138695 - RNA, 21 nt, Human
gcaucacagggcagagccggg

SEQ ID NO: 2138696 - RNA, 22 nt, Human
gcaucacagggcagagccggga

SEQ ID NO: 2138697 - RNA, 21 nt, Human
gcaucaccuagaaacuuguua

SEQ ID NO: 2138698 - RNA, 13 nt, Human
gcaucaccucagg

SEQ ID NO: 2138699 - RNA, 15 nt, Human
gcaugacaagcccca

SEQ ID NO: 2138700 - RNA, 16 nt, Human
gcaugacaagccccag

SEQ ID NO: 2138701 - RNA, 17 nt, Human
gcaugacaagccccagg

SEQ ID NO: 2138702 - RNA, 18 nt, Human
gcaugacaagccccaggc

SEQ ID NO: 2138703 - RNA, 19 nt, Human
gcaugacaagccccaggca

SEQ ID NO: 2138704 - RNA, 21 nt, Human
gcaugacaagccccaggcagg

SEQ ID NO: 2138705 - RNA, 13 nt, Human
gcaugcagaaagg

SEQ ID NO: 2138706 - RNA, 14 nt, Human
gcaugcagaaaggg

SEQ ID NO: 2138707 - RNA, 18 nt, Human
gcaugcagaaagggagca

SEQ ID NO: 2138708 - RNA, 12 nt, Human
gcaugcagcagc

SEQ ID NO: 2138709 - RNA, 13 nt, Human
gcaugcagcagcu

SEQ ID NO: 2138710 - RNA, 15 nt, Human
gcaugcagcagcuug

SEQ ID NO: 2138711 - RNA, 17 nt, Human
gcaugcagcagcuugcu

SEQ ID NO: 2138712 - RNA, 22 nt, Human
gcaugcagcagcuugcugcacc

SEQ ID NO: 2138713 - RNA, 15 nt, Human
gcaugcauuuugcag

SEQ ID NO: 2138714 - RNA, 14 nt, Human
gcaugcacagcugu

SEQ ID NO: 2138715 - RNA, 14 nt, Human
gcaugcauuuugca

SEQ ID NO: 2138716 - RNA, 21 nt, Human
gcaugcauuuugcagcaguga

SEQ ID NO: 2138717 - RNA, 13 nt, Human
gcauuaaaacuua

SEQ ID NO: 2138718 - RNA, 14 nt, Human
gcauuacucuugua

SEQ ID NO: 2138719 - RNA, 15 nt, Human
gcauuacucuuguaa

SEQ ID NO: 2138720 - RNA, 16 nt, Human
gcauuacucuuguaag

SEQ ID NO: 2138721 - RNA, 17 nt, Human
gcauuacucuuguaaga

SEQ ID NO: 2138722 - RNA, 18 nt, Human
gcauuacucuuguaagau

SEQ ID NO: 2138723 - RNA, 19 nt, Human
gcauuacucuuguaagauu

SEQ ID NO: 2138724 - RNA, 21 nt, Human
gcauuacucuuguaagauuuu

SEQ ID NO: 2138725 - RNA, 24 nt, Human
gcauuacucuuguaagauuuugaa

SEQ ID NO: 2138726 - RNA, 16 nt, Human
gcauuagaaauagaca

SEQ ID NO: 2138727 - RNA, 21 nt, Human
gcauuagaaauagacaguaua

SEQ ID NO: 2138728 - RNA, 12 nt, Human
gcauuccaggcu

SEQ ID NO: 2138729 - RNA, 13 nt, Human
gcauuccaggcuc

SEQ ID NO: 2138730 - RNA, 14 nt, Human
gcauuccaggcucc

SEQ ID NO: 2138731 - RNA, 13 nt, Human
gcauuagaaauua

SEQ ID NO: 2138732 - RNA, 18 nt, Human
gcauguugagccaggccu

SEQ ID NO: 2138733 - RNA, 16 nt, Human
gcauggaccuaacauu

SEQ ID NO: 2138734 - RNA, 17 nt, Human
gcauggaccuaacauuc

SEQ ID NO: 2138735 - RNA, 18 nt, Human
gcauggaccuaacauucg

SEQ ID NO: 2138736 - RNA, 14 nt, Human
gcauggagaacagu

SEQ ID NO: 2138737 - RNA, 17 nt, Human
gcaugcuggugagccaa

SEQ ID NO: 2138738 - RNA, 21 nt, Human
gcaugccuuccagcacccugc

SEQ ID NO: 2138739 - RNA, 16 nt, Human
gcaugccuuccagcac

SEQ ID NO: 2138740 - RNA, 14 nt, Human
gcaugcgcacaagg

SEQ ID NO: 2138741 - RNA, 21 nt, Human
gcaugcgcacaaggcugacca

SEQ ID NO: 2138742 - RNA, 13 nt, Human
gcaugccugugug

SEQ ID NO: 2138743 - RNA, 15 nt, Human
gcaugccugugugac

SEQ ID NO: 2138744 - RNA, 23 nt, Human
gcauaggccugggugcuggcugc

SEQ ID NO: 2138745 - RNA, 17 nt, Human
gcauaggccugggugcu

SEQ ID NO: 2138746 - RNA, 22 nt, Human
gcauaggccugggugcuggcug

SEQ ID NO: 2138747 - RNA, 12 nt, Human
gcauaggccugg

SEQ ID NO: 2138748 - RNA, 16 nt, Human
gcauaggccugggugc

SEQ ID NO: 2138749 - RNA, 16 nt, Human
gcauagcaagacacau

SEQ ID NO: 2138750 - RNA, 19 nt, Human
gcaguuagagaugccuccc

SEQ ID NO: 2138751 - RNA, 18 nt, Human
gcagugggagcugccugu

SEQ ID NO: 2138752 - RNA, 17 nt, Human
gcagugggagcugccug

SEQ ID NO: 2138753 - RNA, 16 nt, Human
gcagugugucuccugc

SEQ ID NO: 2138754 - RNA, 18 nt, Human
gcagugugucuccugcau

SEQ ID NO: 2138755 - RNA, 20 nt, Human
gcagugugucuccugcaugc

SEQ ID NO: 2138756 - RNA, 16 nt, Human
gcauauucuuauguau

SEQ ID NO: 2138757 - RNA, 15 nt, Human
gcauauuguuauuau

SEQ ID NO: 2138758 - RNA, 19 nt, Human
gcauauuguuauuauauaa

SEQ ID NO: 2138759 - RNA, 21 nt, Human
gcauauguuucgcugauauau

SEQ ID NO: 2138760 - RNA, 15 nt, Human
gcauauguaugacuc

SEQ ID NO: 2138761 - RNA, 12 nt, Human
gcagggcucagc

SEQ ID NO: 2138762 - RNA, 16 nt, Human
gcagggagggcuucug

SEQ ID NO: 2138763 - RNA, 13 nt, Human
gcaggaggggagu

SEQ ID NO: 2138764 - RNA, 12 nt, Human
gcagggagggga

SEQ ID NO: 2138765 - RNA, 14 nt, Human
gcagggaggggacu

SEQ ID NO: 2138766 - RNA, 13 nt, Human
gcagggaggggac

SEQ ID NO: 2138767 - RNA, 18 nt, Human
gcagggccuugcccagag

SEQ ID NO: 2138768 - RNA, 19 nt, Human
gcagggccuugcccagaga

SEQ ID NO: 2138769 - RNA, 21 nt, Human
gcagggccuugcccagagaug

SEQ ID NO: 2138770 - RNA, 20 nt, Human
gcaggauucuuccucccucc

SEQ ID NO: 2138771 - RNA, 21 nt, Human
gcaggauaguugcuccgccuc

SEQ ID NO: 2138772 - RNA, 22 nt, Human
gcaggauaguugcuccgccucu

SEQ ID NO: 2138773 - RNA, 18 nt, Human
gcaggaugauuguacaga

SEQ ID NO: 2138774 - RNA, 16 nt, Human
gcagugggagcugccu

SEQ ID NO: 2138775 - RNA, 16 nt, Human
gcagugcuucucuaca

SEQ ID NO: 2138776 - RNA, 23 nt, Human
gcagugcuuccaaggauggacca

SEQ ID NO: 2138777 - RNA, 22 nt, Human
gcagugccuuccauaauuauga

SEQ ID NO: 2138778 - RNA, 17 nt, Human
gcagguggggagggggu

SEQ ID NO: 2138779 - RNA, 16 nt, Human
gcagugccuuccauaa

SEQ ID NO: 2138780 - RNA, 22 nt, Human
gcagugcgcgugcacguggaga

SEQ ID NO: 2138781 - RNA, 13 nt, Human
gcagguggggagg

SEQ ID NO: 2138782 - RNA, 16 nt, Human
gcaggugggagcuuga

SEQ ID NO: 2138783 - RNA, 23 nt, Human
gcagggguggaggagagccuggu

SEQ ID NO: 2138784 - RNA, 21 nt, Human
gcaggugccccucucuccauc

SEQ ID NO: 2138785 - RNA, 19 nt, Human
gcccaaagugguauagaaa

SEQ ID NO: 2138786 - RNA, 16 nt, Human
gcccaaagccagacag

SEQ ID NO: 2138787 - RNA, 17 nt, Human
gcccaaagccagacagc

SEQ ID NO: 2138788 - RNA, 17 nt, Human
gcccaaauuaucaagcu

SEQ ID NO: 2138789 - RNA, 14 nt, Human
gcccaaaucugccu

SEQ ID NO: 2138790 - RNA, 19 nt, Human
gcccaaauuaucaagcuaa

SEQ ID NO: 2138791 - RNA, 20 nt, Human
gcccaaauuaucaagcuaau

SEQ ID NO: 2138792 - RNA, 13 nt, Human
gcccacacacccc

SEQ ID NO: 2138793 - RNA, 14 nt, Human
gcccacagcuccca

SEQ ID NO: 2138794 - RNA, 14 nt, Human
gcccacagcccgca

SEQ ID NO: 2138795 - RNA, 17 nt, Human
gcccacagcccgcaugc

SEQ ID NO: 2138796 - RNA, 22 nt, Human
gcccacagcccgcaugcagcag

SEQ ID NO: 2138797 - RNA, 13 nt, Human
gcccacagcuccc

SEQ ID NO: 2138798 - RNA, 16 nt, Human
gcccacagcucccacc

SEQ ID NO: 2138799 - RNA, 17 nt, Human
gcccacagcucccaccc

SEQ ID NO: 2138800 - RNA, 19 nt, Human
gcccacccguggagauggg

SEQ ID NO: 2138801 - RNA, 15 nt, Human
gcccaccccucaaca

SEQ ID NO: 2138802 - RNA, 18 nt, Human
gcccacaggaucagucug

SEQ ID NO: 2138803 - RNA, 13 nt, Human
gcccacaggauca

SEQ ID NO: 2138804 - RNA, 19 nt, Human
gcccacaggaucagucuga

SEQ ID NO: 2138805 - RNA, 19 nt, Human
gcccacagcucccacccca

SEQ ID NO: 2138806 - RNA, 17 nt, Human
gcccacaggugucccca

SEQ ID NO: 2138807 - RNA, 15 nt, Human
gcccaccccccucau

SEQ ID NO: 2138808 - RNA, 21 nt, Human
gccauuuaugugagugugugu

SEQ ID NO: 2138809 - RNA, 12 nt, Human
gccauugucuuu

SEQ ID NO: 2138810 - RNA, 13 nt, Human
gccauugucuuua

SEQ ID NO: 2138811 - RNA, 14 nt, Human
gccauugucuuuau

SEQ ID NO: 2138812 - RNA, 15 nt, Human
gccauugucuuuaua

SEQ ID NO: 2138813 - RNA, 18 nt, Human
gccauugucuuuauauga

SEQ ID NO: 2138814 - RNA, 20 nt, Human
gccauuugcacccuccgccu

SEQ ID NO: 2138815 - RNA, 23 nt, Human
gccauuugcacccuccgccuuca

SEQ ID NO: 2138816 - RNA, 21 nt, Human
gccauggaggcacacagcugc

SEQ ID NO: 2138817 - RNA, 16 nt, Human
gccauggcgugucccu

SEQ ID NO: 2138818 - RNA, 17 nt, Human
gccauggcgugucccuc

SEQ ID NO: 2138819 - RNA, 22 nt, Human
gccauggcgugucccucucgga

SEQ ID NO: 2138820 - RNA, 15 nt, Human
gccauggaggcacac

SEQ ID NO: 2138821 - RNA, 16 nt, Human
gccauggaggcacaca

SEQ ID NO: 2138822 - RNA, 18 nt, Human
gccauggaggcacacagc

SEQ ID NO: 2138823 - RNA, 20 nt, Human
gccauccagguucagcuugu

SEQ ID NO: 2138824 - RNA, 19 nt, Human
gccauccagguucagcuug

SEQ ID NO: 2138825 - RNA, 18 nt, Human
gccagagcaaagggccag

SEQ ID NO: 2138826 - RNA, 11 nt, Human
gccagucuuaa

SEQ ID NO: 2138827 - RNA, 13 nt, Human
gccagucuugugu

SEQ ID NO: 2138828 - RNA, 13 nt, Human
gccaggugcagug

SEQ ID NO: 2138829 - RNA, 14 nt, Human
gccaggugcagugg

SEQ ID NO: 2138830 - RNA, 18 nt, Human
gccaguccugccuggcca

SEQ ID NO: 2138831 - RNA, 19 nt, Human
gccaguccugccuggccag

SEQ ID NO: 2138832 - RNA, 20 nt, Human
gccaguccugccuggccagg

SEQ ID NO: 2138833 - RNA, 15 nt, Human
gccagucuaguuccu

SEQ ID NO: 2138834 - RNA, 17 nt, Human
gccaggggaaaaucagc

SEQ ID NO: 2138835 - RNA, 21 nt, Human
gccaggggaaaaucagccugc

SEQ ID NO: 2138836 - RNA, 22 nt, Human
gccaggggaaaaucagccugcu

SEQ ID NO: 2138837 - RNA, 23 nt, Human
gccaggggaaaaucagccugcuc

SEQ ID NO: 2138838 - RNA, 21 nt, Human
gccagguaaugugaauaaauu

SEQ ID NO: 2138839 - RNA, 15 nt, Human
gccagguaaugugaa

SEQ ID NO: 2138840 - RNA, 19 nt, Human
gccagggcccugcagaggg

SEQ ID NO: 2138841 - RNA, 16 nt, Human
gccagggcccugcaga

SEQ ID NO: 2138842 - RNA, 17 nt, Human
gccagggcccugcagag

SEQ ID NO: 2138843 - RNA, 13 nt, Human
gccagggcccugc

SEQ ID NO: 2138844 - RNA, 15 nt, Human
gccagggcccugcag

SEQ ID NO: 2138845 - RNA, 15 nt, Human
gccagcucucagcca

SEQ ID NO: 2138846 - RNA, 16 nt, Human
gccagcucagucccau

SEQ ID NO: 2138847 - RNA, 13 nt, Human
gccagcucucagc

SEQ ID NO: 2138848 - RNA, 14 nt, Human
gccagcucucagcc

SEQ ID NO: 2138849 - RNA, 18 nt, Human
gccagcuuguuauuuaua

SEQ ID NO: 2138850 - RNA, 16 nt, Human
gccagcugggaucuga

SEQ ID NO: 2138851 - RNA, 19 nt, Human
gccagcugggaucugacug

SEQ ID NO: 2138852 - RNA, 21 nt, Human
gccagcugggaucugacugca

SEQ ID NO: 2138853 - RNA, 14 nt, Human
gccagcuggcagca

SEQ ID NO: 2138854 - RNA, 17 nt, Human
gccagcuggcagcagag

SEQ ID NO: 2138855 - RNA, 20 nt, Human
gccagcugugguuuucuuuu

SEQ ID NO: 2138856 - RNA, 18 nt, Human
gccagcuggcagcagagu

SEQ ID NO: 2138857 - RNA, 20 nt, Human
gccagagggagugacagagg

SEQ ID NO: 2138858 - RNA, 19 nt, Human
gccagagggagugacagag

SEQ ID NO: 2138859 - RNA, 19 nt, Human
gccagccccacccaggagg

SEQ ID NO: 2138860 - RNA, 18 nt, Human
gccagccccacccaggag

SEQ ID NO: 2138861 - RNA, 11 nt, Human
gccagccccuc

SEQ ID NO: 2138862 - RNA, 12 nt, Human
gccagccccucc

SEQ ID NO: 2138863 - RNA, 16 nt, Human
gccagccccucccacc

SEQ ID NO: 2138864 - RNA, 17 nt, Human
gccagccccucccacca

SEQ ID NO: 2138865 - RNA, 20 nt, Human
gccagccccucccaccacag

SEQ ID NO: 2138866 - RNA, 21 nt, Human
gccagccccucccaccacagc

SEQ ID NO: 2138867 - RNA, 22 nt, Human
gccagcccucccuguccuccuc

SEQ ID NO: 2138868 - RNA, 23 nt, Human
gccagcccucccuguccuccucg

SEQ ID NO: 2138869 - RNA, 10 nt, Human
gccagcccuc

SEQ ID NO: 2138870 - RNA, 13 nt, Human
gccagcccucccu

SEQ ID NO: 2138871 - RNA, 14 nt, Human
gccagcccucccug

SEQ ID NO: 2138872 - RNA, 15 nt, Human
gccagcccucccugu

SEQ ID NO: 2138873 - RNA, 17 nt, Human
gccagcccucccugucc

SEQ ID NO: 2138874 - RNA, 20 nt, Human
gccagcccucccuguccucc

SEQ ID NO: 2138875 - RNA, 21 nt, Human
gccagcccucccuguccuccu

SEQ ID NO: 2138876 - RNA, 18 nt, Human
gccacuccagaccccugg

SEQ ID NO: 2138877 - RNA, 16 nt, Human
gccacuccagaccccu

SEQ ID NO: 2138878 - RNA, 19 nt, Human
gccacuccagaccccuggc

SEQ ID NO: 2138879 - RNA, 19 nt, Human
gccacugaagcugggauuc

SEQ ID NO: 2138880 - RNA, 20 nt, Human
gccacucaggaggcugaggc

SEQ ID NO: 2138881 - RNA, 21 nt, Human
gccacucaggaggcugaggca

SEQ ID NO: 2138882 - RNA, 18 nt, Human
gccacugcaccgggccac

SEQ ID NO: 2138883 - RNA, 17 nt, Human
gccacugcaccgggcca

SEQ ID NO: 2138884 - RNA, 18 nt, Human
gccagagggagugacaga

SEQ ID NO: 2138885 - RNA, 16 nt, Human
gccacggccaggccag

SEQ ID NO: 2138886 - RNA, 21 nt, Human
gccacgugggcaaacaggcag

SEQ ID NO: 2138887 - RNA, 18 nt, Human
gccacgugccaggcccgg

SEQ ID NO: 2138888 - RNA, 16 nt, Human
gccacgugccaggccc

SEQ ID NO: 2138889 - RNA, 17 nt, Human
gccacgugccaggcccg

SEQ ID NO: 2138890 - RNA, 22 nt, Human
gccacguuccuuacugcagaau

SEQ ID NO: 2138891 - RNA, 16 nt, Human
gccacguuccuuacug

SEQ ID NO: 2138892 - RNA, 21 nt, Human
gccacguuccuuacugcagaa

SEQ ID NO: 2138893 - RNA, 15 nt, Human
gccacggccaggcca

SEQ ID NO: 2138894 - RNA, 14 nt, Human
gccacggccaggcc

SEQ ID NO: 2138895 - RNA, 16 nt, Human
gccaaauguaauugaa

SEQ ID NO: 2138896 - RNA, 18 nt, Human
gccaaauguaauugaaua

SEQ ID NO: 2138897 - RNA, 15 nt, Human
gccaaauauauucuc

SEQ ID NO: 2138898 - RNA, 16 nt, Human
gccaaauauauucucu

SEQ ID NO: 2138899 - RNA, 17 nt, Human
gccaaauauauucucuu

SEQ ID NO: 2138900 - RNA, 12 nt, Human
gccaaaguguua

SEQ ID NO: 2138901 - RNA, 19 nt, Human
gccaaagggaaauaucauu

SEQ ID NO: 2138902 - RNA, 19 nt, Human
gccaaagacuuaguauauu

SEQ ID NO: 2138903 - RNA, 16 nt, Human
gccaaagauaaucucu

SEQ ID NO: 2138904 - RNA, 23 nt, Human
gccaaaggagggucaggaaggau

SEQ ID NO: 2138905 - RNA, 22 nt, Human
gcccagucuggaaugcaguggu

SEQ ID NO: 2138906 - RNA, 15 nt, Human
gcccaguuaaucuug

SEQ ID NO: 2138907 - RNA, 17 nt, Human
gcccagugcccuggggc

SEQ ID NO: 2138908 - RNA, 18 nt, Human
gcccagugcccuggggcu

SEQ ID NO: 2138909 - RNA, 14 nt, Human
gcccaguuaaucuu

SEQ ID NO: 2138910 - RNA, 17 nt, Human
gcccaguguuguuugua

SEQ ID NO: 2138911 - RNA, 18 nt, Human
gcccaguguuguuuguaa

SEQ ID NO: 2138912 - RNA, 19 nt, Human
gcccaguguuguuuguaaa

SEQ ID NO: 2138913 - RNA, 23 nt, Human
gcccaguguuguuuguaaauaag

SEQ ID NO: 2138914 - RNA, 15 nt, Human
gcccaggcuggcgug

SEQ ID NO: 2138915 - RNA, 14 nt, Human
gcccaggcuggcgu

SEQ ID NO: 2138916 - RNA, 16 nt, Human
gcccaggcuggcgugc

SEQ ID NO: 2138917 - RNA, 12 nt, Human
gcccagggcuca

SEQ ID NO: 2138918 - RNA, 13 nt, Human
gcccagggcucag

SEQ ID NO: 2138919 - RNA, 14 nt, Human
gcccagggcucagc

SEQ ID NO: 2138920 - RNA, 15 nt, Human
gcccagggcucagcc

SEQ ID NO: 2138921 - RNA, 16 nt, Human
gcccagggcucagccu

SEQ ID NO: 2138922 - RNA, 17 nt, Human
gcccagggcucagccug

SEQ ID NO: 2138923 - RNA, 18 nt, Human
gcccagggcucagccugg

SEQ ID NO: 2138924 - RNA, 17 nt, Human
gcccaggguucccccag

SEQ ID NO: 2138925 - RNA, 19 nt, Human
gcccaggguucccccagcc

SEQ ID NO: 2138926 - RNA, 20 nt, Human
gcccaggguucccccagccc

SEQ ID NO: 2138927 - RNA, 21 nt, Human
gcccaggguucccccagcccu

SEQ ID NO: 2138928 - RNA, 22 nt, Human
gcccaggguucccccagcccug

SEQ ID NO: 2138929 - RNA, 23 nt, Human
gcccaggguucccccagcccugu

SEQ ID NO: 2138930 - RNA, 17 nt, Human
gcccaggccugccuguu

SEQ ID NO: 2138931 - RNA, 11 nt, Human
gcccaggcugg

SEQ ID NO: 2138932 - RNA, 15 nt, Human
gcccaccuaccuuca

SEQ ID NO: 2138933 - RNA, 21 nt, Human
gcccaccuaccuucaaagcug

SEQ ID NO: 2138934 - RNA, 22 nt, Human
gcccaccuaccuucaaagcuga

SEQ ID NO: 2138935 - RNA, 15 nt, Human
gcccagcucagaggg

SEQ ID NO: 2138936 - RNA, 12 nt, Human
gcccagcucagu

SEQ ID NO: 2138937 - RNA, 14 nt, Human
gcccagcucagucu

SEQ ID NO: 2138938 - RNA, 13 nt, Human
gcccaccugccca

SEQ ID NO: 2138939 - RNA, 14 nt, Human
gcccaccugcccau

SEQ ID NO: 2138940 - RNA, 15 nt, Human
gcccaccugcccauc

SEQ ID NO: 2138941 - RNA, 20 nt, Human
gcccaccugcccaucacagg

SEQ ID NO: 2138942 - RNA, 12 nt, Human
gcccagcuccag

SEQ ID NO: 2138943 - RNA, 14 nt, Human
gcccagcuccaggg

SEQ ID NO: 2138944 - RNA, 15 nt, Human
gcccagcuccagggc

SEQ ID NO: 2138945 - RNA, 16 nt, Human
gcccagcuccagggcc

SEQ ID NO: 2138946 - RNA, 18 nt, Human
gcccagcuccagggccag

SEQ ID NO: 2138947 - RNA, 13 nt, Human
gcccagcugcacc

SEQ ID NO: 2138948 - RNA, 14 nt, Human
gcccagcugcaccu

SEQ ID NO: 2138949 - RNA, 15 nt, Human
gcccagcugcaccug

SEQ ID NO: 2138950 - RNA, 18 nt, Human
gcccagcugcaccugcca

SEQ ID NO: 2138951 - RNA, 23 nt, Human
gcccagcugcaccugccagccug

SEQ ID NO: 2138952 - RNA, 24 nt, Human
gcccagcugcaccugccagccugg

SEQ ID NO: 2138953 - RNA, 11 nt, Human
gcccagcugcu

SEQ ID NO: 2138954 - RNA, 13 nt, Human
gcccagcugcucu

SEQ ID NO: 2138955 - RNA, 14 nt, Human
gcccagcugcucug

SEQ ID NO: 2138956 - RNA, 15 nt, Human
gcccagcugcucugc

SEQ ID NO: 2138957 - RNA, 21 nt, Human
gccccauucugccugcccagg

SEQ ID NO: 2138958 - RNA, 20 nt, Human
gccccauucugccugcccag

SEQ ID NO: 2138959 - RNA, 18 nt, Human
gccccauucugccugccc

SEQ ID NO: 2138960 - RNA, 17 nt, Human
gccccauucugccugcc

SEQ ID NO: 2138961 - RNA, 14 nt, Human
gccccaugaagcca

SEQ ID NO: 2138962 - RNA, 19 nt, Human
gccccaugaagccacagcc

SEQ ID NO: 2138963 - RNA, 14 nt, Human
gccccaugccuguc

SEQ ID NO: 2138964 - RNA, 16 nt, Human
gccccaugccugucca

SEQ ID NO: 2138965 - RNA, 23 nt, Human
gccccaugccuguccagccuggg

SEQ ID NO: 2138966 - RNA, 17 nt, Human
gccccaugccuguccag

SEQ ID NO: 2138967 - RNA, 20 nt, Human
gccccaugccuguccagccu

SEQ ID NO: 2138968 - RNA, 21 nt, Human
gccccagugcccacaggauca

SEQ ID NO: 2138969 - RNA, 17 nt, Human
gccccagugcccacagg

SEQ ID NO: 2138970 - RNA, 16 nt, Human
gccccagugcccacag

SEQ ID NO: 2138971 - RNA, 15 nt, Human
gccccagugcccaca

SEQ ID NO: 2138972 - RNA, 19 nt, Human
gccccaggcaggcugugcg

SEQ ID NO: 2138973 - RNA, 20 nt, Human
gccccaggcaggcugugcgc

SEQ ID NO: 2138974 - RNA, 12 nt, Human
gccccaggcagg

SEQ ID NO: 2138975 - RNA, 15 nt, Human
gccccaggcaggcug

SEQ ID NO: 2138976 - RNA, 22 nt, Human
gcccaucuaugucccuugcugu

SEQ ID NO: 2138977 - RNA, 18 nt, Human
gcccauccugucuguuca

SEQ ID NO: 2138978 - RNA, 16 nt, Human
gcccaucuugccucca

SEQ ID NO: 2138979 - RNA, 20 nt, Human
gcccaucuugccuccauggu

SEQ ID NO: 2138980 - RNA, 21 nt, Human
gcccaucuugccuccauggug

SEQ ID NO: 2138981 - RNA, 13 nt, Human
gcccaugcccacc

SEQ ID NO: 2138982 - RNA, 14 nt, Human
gcccaugcccaccu

SEQ ID NO: 2138983 - RNA, 15 nt, Human
gcccaugcccaccug

SEQ ID NO: 2138984 - RNA, 19 nt, Human
gcccaugcccaccugccca

SEQ ID NO: 2138985 - RNA, 13 nt, Human
gccccagcucugg

SEQ ID NO: 2138986 - RNA, 14 nt, Human
gccccaggaagccg

SEQ ID NO: 2138987 - RNA, 14 nt, Human
gccccagcucuggc

SEQ ID NO: 2138988 - RNA, 14 nt, Human
gccccagcccagcc

SEQ ID NO: 2138989 - RNA, 23 nt, Human
gccccgucaccaucucaggccac

SEQ ID NO: 2138990 - RNA, 21 nt, Human
gccccgucaccaucucaggcc

SEQ ID NO: 2138991 - RNA, 22 nt, Human
gccccgucaccaucucaggcca

SEQ ID NO: 2138992 - RNA, 17 nt, Human
gccccgucaccaucuca

SEQ ID NO: 2138993 - RNA, 18 nt, Human
gccccgucaccaucucag

SEQ ID NO: 2138994 - RNA, 20 nt, Human
gccccgucaccaucucaggc

SEQ ID NO: 2138995 - RNA, 20 nt, Human
gccccgucucaugaggggcc

SEQ ID NO: 2138996 - RNA, 16 nt, Human
gccccggugugcggug

SEQ ID NO: 2138997 - RNA, 15 nt, Human
gccccgucaccaucu

SEQ ID NO: 2138998 - RNA, 17 nt, Human
gccccgcgccuccuucc

SEQ ID NO: 2138999 - RNA, 14 nt, Human
gccccgcuugucca

SEQ ID NO: 2139000 - RNA, 16 nt, Human
gccccgcuuguccagc

SEQ ID NO: 2139001 - RNA, 18 nt, Human
gccccgcuuguccagcgc

SEQ ID NO: 2139002 - RNA, 19 nt, Human
gccccgcuuguccagcgcc

SEQ ID NO: 2139003 - RNA, 20 nt, Human
gccccgcuuguccagcgccu

SEQ ID NO: 2139004 - RNA, 23 nt, Human
gccccgaggccuucucugaagga

SEQ ID NO: 2139005 - RNA, 23 nt, Human
gccccauucugccugcccaggcc

SEQ ID NO: 2139006 - RNA, 22 nt, Human
gccccauucugccugcccaggc

SEQ ID NO: 2139007 - RNA, 22 nt, Human
gccccgaggccuucucugaagg

SEQ ID NO: 2139008 - RNA, 20 nt, Human
gccccgcaaaacccacugac

SEQ ID NO: 2139009 - RNA, 15 nt, Human
gccccgccccacauu

SEQ ID NO: 2139010 - RNA, 22 nt, Human
gccccgccccacauuccgacaa

SEQ ID NO: 2139011 - RNA, 13 nt, Human
gccccgccccaca

SEQ ID NO: 2139012 - RNA, 14 nt, Human
gccccgccccacau

SEQ ID NO: 2139013 - RNA, 15 nt, Human
gccccgugcagacug

SEQ ID NO: 2139014 - RNA, 19 nt, Human
gccccgugcagacuggagg

SEQ ID NO: 2139015 - RNA, 20 nt, Human
gccccgugcagacuggaggg

SEQ ID NO: 2139016 - RNA, 22 nt, Human
gccccgugcagacuggagggga

SEQ ID NO: 2139017 - RNA, 17 nt, Human
gccccuagaagggaagg

SEQ ID NO: 2139018 - RNA, 17 nt, Human
gccccuagaaucagccu

SEQ ID NO: 2139019 - RNA, 20 nt, Human
gccccuagaaucagccuagg

SEQ ID NO: 2139020 - RNA, 17 nt, Human
gccccuucccccuccaa

SEQ ID NO: 2139021 - RNA, 13 nt, Human
gccccugcacaaa

SEQ ID NO: 2139022 - RNA, 15 nt, Human
gcccucccugccccu

SEQ ID NO: 2139023 - RNA, 13 nt, Human
gcccuccucaccc

SEQ ID NO: 2139024 - RNA, 14 nt, Human
gcccuccucacccc

SEQ ID NO: 2139025 - RNA, 21 nt, Human
gcccuccucaccccgucuggg

SEQ ID NO: 2139026 - RNA, 22 nt, Human
gcccggagauuggacggccuga

SEQ ID NO: 2139027 - RNA, 19 nt, Human
gcccggagauuggacggcc

SEQ ID NO: 2139028 - RNA, 21 nt, Human
gcccggagauuggacggccug

SEQ ID NO: 2139029 - RNA, 23 nt, Human
gcccuccugaaacuuacacacaa

SEQ ID NO: 2139030 - RNA, 10 nt, Human
gcccuccuuc

SEQ ID NO: 2139031 - RNA, 15 nt, Human
gcccggcuccaggcu

SEQ ID NO: 2139032 - RNA, 14 nt, Human
gcccggcuccaggc

SEQ ID NO: 2139033 - RNA, 13 nt, Human
gcccggcuccagg

SEQ ID NO: 2139034 - RNA, 18 nt, Human
gccccuucuacacucucc

SEQ ID NO: 2139035 - RNA, 19 nt, Human
gccccuucuacacucuccu

SEQ ID NO: 2139036 - RNA, 20 nt, Human
gccccuucuacacucuccug

SEQ ID NO: 2139037 - RNA, 21 nt, Human
gccccuucuacacucuccugg

SEQ ID NO: 2139038 - RNA, 22 nt, Human
gccccuucuacacucuccuggg

SEQ ID NO: 2139039 - RNA, 23 nt, Human
gccccuucuacacucuccugggc

SEQ ID NO: 2139040 - RNA, 12 nt, Human
gcccggcuccag

SEQ ID NO: 2139041 - RNA, 12 nt, Human
gccgggguggau

SEQ ID NO: 2139042 - RNA, 23 nt, Human
gccggggaagacuugaaagaaag

SEQ ID NO: 2139043 - RNA, 17 nt, Human
gccggggccugccuagc

SEQ ID NO: 2139044 - RNA, 12 nt, Human
gccgggcacagc

SEQ ID NO: 2139045 - RNA, 13 nt, Human
gccgggcacagcu

SEQ ID NO: 2139046 - RNA, 16 nt, Human
gccgggcacagcugug

SEQ ID NO: 2139047 - RNA, 17 nt, Human
gccgggcacagcugugg

SEQ ID NO: 2139048 - RNA, 23 nt, Human
gccgggcaugguggcgcaagccu

SEQ ID NO: 2139049 - RNA, 18 nt, Human
gccgaggguccuggcucc

SEQ ID NO: 2139050 - RNA, 20 nt, Human
gccgaggguccuggcuccug

SEQ ID NO: 2139051 - RNA, 21 nt, Human
gccgaguggauagaugcccug

SEQ ID NO: 2139052 - RNA, 18 nt, Human
gcccuugagcuccccaaa

SEQ ID NO: 2139053 - RNA, 12 nt, Human
gccgaccucagc

SEQ ID NO: 2139054 - RNA, 13 nt, Human
gccgaccucagcc

SEQ ID NO: 2139055 - RNA, 14 nt, Human
gccgaccucagccu

SEQ ID NO: 2139056 - RNA, 15 nt, Human
gccgaccucagccuu

SEQ ID NO: 2139057 - RNA, 17 nt, Human
gccgaccucagccuucc

SEQ ID NO: 2139058 - RNA, 13 nt, Human
gccgaccucgucc

SEQ ID NO: 2139059 - RNA, 19 nt, Human
gccgaccucguccuccccc

SEQ ID NO: 2139060 - RNA, 21 nt, Human
gccgaccucguccucccccug

SEQ ID NO: 2139061 - RNA, 17 nt, Human
gcccuugagcuccccaa

SEQ ID NO: 2139062 - RNA, 22 nt, Human
gcccuugagcuccccaaaaacc

SEQ ID NO: 2139063 - RNA, 19 nt, Human
gcccuugcaguucagcacc

SEQ ID NO: 2139064 - RNA, 20 nt, Human
gcccuugcaguucagcacca

SEQ ID NO: 2139065 - RNA, 21 nt, Human
gcccuugcaguucagcaccac

SEQ ID NO: 2139066 - RNA, 22 nt, Human
gcccuugcaguucagcaccacc

SEQ ID NO: 2139067 - RNA, 17 nt, Human
gccgagagccugcuccc

SEQ ID NO: 2139068 - RNA, 19 nt, Human
gccgagagccugcuccccc

SEQ ID NO: 2139069 - RNA, 20 nt, Human
gccgagagccugcuccccca

SEQ ID NO: 2139070 - RNA, 22 nt, Human
gccgagagccugcucccccacc

SEQ ID NO: 2139071 - RNA, 20 nt, Human
gccgaccucguccucccccu

SEQ ID NO: 2139072 - RNA, 13 nt, Human
gccgagaagcaag

SEQ ID NO: 2139073 - RNA, 14 nt, Human
gccgagaagcaaga

SEQ ID NO: 2139074 - RNA, 22 nt, Human
gccgagacauggcuugccacag

SEQ ID NO: 2139075 - RNA, 12 nt, Human
gccgagagccug

SEQ ID NO: 2139076 - RNA, 15 nt, Human
gccgagagccugcuc

SEQ ID NO: 2139077 - RNA, 16 nt, Human
gccgagagccugcucc

SEQ ID NO: 2139078 - RNA, 22 nt, Human
gcccuuccucuccacugccuuc

SEQ ID NO: 2139079 - RNA, 21 nt, Human
gcccucuuccccucuaaugcu

SEQ ID NO: 2139080 - RNA, 13 nt, Human
gccguggcuuccc

SEQ ID NO: 2139081 - RNA, 12 nt, Human
gccguggcuucc

SEQ ID NO: 2139082 - RNA, 11 nt, Human
gccguggcuuc

SEQ ID NO: 2139083 - RNA, 18 nt, Human
gccguggcugcggcaccc

SEQ ID NO: 2139084 - RNA, 14 nt, Human
gccguggcugcggc

SEQ ID NO: 2139085 - RNA, 15 nt, Human
gccguggcugcggca

SEQ ID NO: 2139086 - RNA, 20 nt, Human
gccguugccaagaacugaaa

SEQ ID NO: 2139087 - RNA, 23 nt, Human
gccguugccaagaacugaaaaca

SEQ ID NO: 2139088 - RNA, 14 nt, Human
gccuaaaaaugcaa

SEQ ID NO: 2139089 - RNA, 17 nt, Human
gccuaaaaaugcaacuu

SEQ ID NO: 2139090 - RNA, 21 nt, Human
gccgucuucacucgcccccgg

SEQ ID NO: 2139091 - RNA, 22 nt, Human
gccgucuucacucgcccccggg

SEQ ID NO: 2139092 - RNA, 15 nt, Human
gccgugaugccuccc

SEQ ID NO: 2139093 - RNA, 16 nt, Human
gccgggugcucagggc

SEQ ID NO: 2139094 - RNA, 17 nt, Human
gccgggugcucagggcu

SEQ ID NO: 2139095 - RNA, 11 nt, Human
gccgucucaac

SEQ ID NO: 2139096 - RNA, 19 nt, Human
gccgucuucacucgccccc

SEQ ID NO: 2139097 - RNA, 20 nt, Human
gccgucuucacucgcccccg

SEQ ID NO: 2139098 - RNA, 18 nt, Human
gccuauuguaaauacaag

SEQ ID NO: 2139099 - RNA, 21 nt, Human
gccucagcauccuggcacccg

SEQ ID NO: 2139100 - RNA, 15 nt, Human
gccucacagaagaau

SEQ ID NO: 2139101 - RNA, 17 nt, Human
gccucagcauccuggca

SEQ ID NO: 2139102 - RNA, 18 nt, Human
gccucagcauccuggcac

SEQ ID NO: 2139103 - RNA, 13 nt, Human
gccucaaaugcag

SEQ ID NO: 2139104 - RNA, 14 nt, Human
gccucaacccuccc

SEQ ID NO: 2139105 - RNA, 15 nt, Human
gccucaacccucccu

SEQ ID NO: 2139106 - RNA, 21 nt, Human
gccucaaugugguugcaaggc

SEQ ID NO: 2139107 - RNA, 13 nt, Human
gccucacagaaga

SEQ ID NO: 2139108 - RNA, 21 nt, Human
gccucaaugugaaucagaccc

SEQ ID NO: 2139109 - RNA, 22 nt, Human
gccucaaugugaaucagacccu

SEQ ID NO: 2139110 - RNA, 24 nt, Human
gccucaagugauucuccugccuca

SEQ ID NO: 2139111 - RNA, 22 nt, Human
gccucaagugauucuccugccu

SEQ ID NO: 2139112 - RNA, 15 nt, Human
gccucugacacacag

SEQ ID NO: 2139113 - RNA, 18 nt, Human
gccucugaaguuggacag

SEQ ID NO: 2139114 - RNA, 19 nt, Human
gccucugaaguuggacagc

SEQ ID NO: 2139115 - RNA, 15 nt, Human
gccucucuuccuauc

SEQ ID NO: 2139116 - RNA, 17 nt, Human
gccucucuuccuauccc

SEQ ID NO: 2139117 - RNA, 18 nt, Human
gccucucuuccuauccca

SEQ ID NO: 2139118 - RNA, 21 nt, Human
gccucucuuccuaucccaucc

SEQ ID NO: 2139119 - RNA, 22 nt, Human
gccucucuuccuaucccauccc

SEQ ID NO: 2139120 - RNA, 23 nt, Human
gccucucuuccuaucccauccca

SEQ ID NO: 2139121 - RNA, 19 nt, Human
gccucucuugguuuccuuc

SEQ ID NO: 2139122 - RNA, 16 nt, Human
gccucugacacacagc

SEQ ID NO: 2139123 - RNA, 15 nt, Human
gccugaagucacaca

SEQ ID NO: 2139124 - RNA, 15 nt, Human
gccugaaccuuccau

SEQ ID NO: 2139125 - RNA, 17 nt, Human
gccucaacccucccuca

SEQ ID NO: 2139126 - RNA, 14 nt, Human
gccugaaccuucca

SEQ ID NO: 2139127 - RNA, 13 nt, Human
gccugagaguauu

SEQ ID NO: 2139128 - RNA, 21 nt, Human
gccugagaguauuuaggcaga

SEQ ID NO: 2139129 - RNA, 12 nt, Human
gccucugcauuc

SEQ ID NO: 2139130 - RNA, 12 nt, Human
gccugcccaggc

SEQ ID NO: 2139131 - RNA, 11 nt, Human
gccugcccagg

SEQ ID NO: 2139132 - RNA, 13 nt, Human
gccugcuggaucu

SEQ ID NO: 2139133 - RNA, 22 nt, Human
gccugcuggaucucccagggcu

SEQ ID NO: 2139134 - RNA, 10 nt, Human
gccugcccac

SEQ ID NO: 2139135 - RNA, 13 nt, Human
gccugcccacccg

SEQ ID NO: 2139136 - RNA, 14 nt, Human
gccugcccacccgu

SEQ ID NO: 2139137 - RNA, 14 nt, Human
gccuggacccugug

SEQ ID NO: 2139138 - RNA, 13 nt, Human
gccugcugggcuc

SEQ ID NO: 2139139 - RNA, 16 nt, Human
gccugcugggcucucc

SEQ ID NO: 2139140 - RNA, 17 nt, Human
gccugcugggcucucca

SEQ ID NO: 2139141 - RNA, 18 nt, Human
gccugcugggcucuccac

SEQ ID NO: 2139142 - RNA, 19 nt, Human
gccugcugggcucuccacc

SEQ ID NO: 2139143 - RNA, 20 nt, Human
gccugcugggcucuccaccu

SEQ ID NO: 2139144 - RNA, 21 nt, Human
gccugcugggcucuccaccuc

SEQ ID NO: 2139145 - RNA, 22 nt, Human
gccugcugggcucuccaccuca

SEQ ID NO: 2139146 - RNA, 23 nt, Human
gccugcugggcucuccaccucag

SEQ ID NO: 2139147 - RNA, 24 nt, Human
gccugcugggcucuccaccucagc

SEQ ID NO: 2139148 - RNA, 10 nt, Human
gccugcagcc

SEQ ID NO: 2139149 - RNA, 17 nt, Human
gccugagcaccucccag

SEQ ID NO: 2139150 - RNA, 18 nt, Human
gccugagcaccucccagc

SEQ ID NO: 2139151 - RNA, 19 nt, Human
gccugagcaccucccagcc

SEQ ID NO: 2139152 - RNA, 20 nt, Human
gccugagcaccucccagccc

SEQ ID NO: 2139153 - RNA, 23 nt, Human
gccugagcaccucccagccccug

SEQ ID NO: 2139154 - RNA, 22 nt, Human
gccugagcaacagagugagacc

SEQ ID NO: 2139155 - RNA, 11 nt, Human
gccugcagccc

SEQ ID NO: 2139156 - RNA, 20 nt, Human
gccucccgaauagcugggac

SEQ ID NO: 2139157 - RNA, 23 nt, Human
gccucccgaguagcugggacuac

SEQ ID NO: 2139158 - RNA, 21 nt, Human
gccucccgaguagcugggacu

SEQ ID NO: 2139159 - RNA, 19 nt, Human
gccucccgaauagcuggga

SEQ ID NO: 2139160 - RNA, 18 nt, Human
gccucccgaauagcuggg

SEQ ID NO: 2139161 - RNA, 22 nt, Human
gccucagccucccaaagugcug

SEQ ID NO: 2139162 - RNA, 14 nt, Human
gccucagccuccca

SEQ ID NO: 2139163 - RNA, 12 nt, Human
gccucagccucc

SEQ ID NO: 2139164 - RNA, 17 nt, Human
gccuccccaacccugcc

SEQ ID NO: 2139165 - RNA, 19 nt, Human
gccuccccaacccugcccc

SEQ ID NO: 2139166 - RNA, 20 nt, Human
gccuccccaacccugccccu

SEQ ID NO: 2139167 - RNA, 21 nt, Human
gccuccccaacccugccccug

SEQ ID NO: 2139168 - RNA, 22 nt, Human
gccuccccaacccugccccugc

SEQ ID NO: 2139169 - RNA, 12 nt, Human
gccuccccaccu

SEQ ID NO: 2139170 - RNA, 15 nt, Human
gccucucccaucacu

SEQ ID NO: 2139171 - RNA, 19 nt, Human
gccucccugacccugcaga

SEQ ID NO: 2139172 - RNA, 23 nt, Human
gccucccugacccugcagagaug

SEQ ID NO: 2139173 - RNA, 11 nt, Human
gccucccugaa

SEQ ID NO: 2139174 - RNA, 22 nt, Human
gccucccugaaaauguuuuucu

SEQ ID NO: 2139175 - RNA, 13 nt, Human
gccucccucaacc

SEQ ID NO: 2139176 - RNA, 14 nt, Human
gccucccucaaccc

SEQ ID NO: 2139177 - RNA, 16 nt, Human
gccucccuccccugcc

SEQ ID NO: 2139178 - RNA, 18 nt, Human
gccucccuccccugcccu

SEQ ID NO: 2139179 - RNA, 19 nt, Human
gccucccuccccugcccuc

SEQ ID NO: 2139180 - RNA, 16 nt, Human
gccucccucucucuuc

SEQ ID NO: 2139181 - RNA, 21 nt, Human
gccucccucucucuucugcuc

SEQ ID NO: 2139182 - RNA, 22 nt, Human
gccucccucucucuucugcucc

SEQ ID NO: 2139183 - RNA, 23 nt, Human
gccucccucucucuucugcucca

SEQ ID NO: 2139184 - RNA, 12 nt, Human
gccucccucuga

SEQ ID NO: 2139185 - RNA, 14 nt, Human
gccucccucugacc

SEQ ID NO: 2139186 - RNA, 20 nt, Human
gccucccucugaccugcagg

SEQ ID NO: 2139187 - RNA, 21 nt, Human
gccucccucugaccugcaggc

SEQ ID NO: 2139188 - RNA, 18 nt, Human
gcgccuacaggagugagc

SEQ ID NO: 2139189 - RNA, 16 nt, Human
gcgccauugcacucca

SEQ ID NO: 2139190 - RNA, 20 nt, Human
gcgccauugcacuccagccu

SEQ ID NO: 2139191 - RNA, 21 nt, Human
gcgacucuauagacucuagga

SEQ ID NO: 2139192 - RNA, 16 nt, Human
gcgacggagagaaaaa

SEQ ID NO: 2139193 - RNA, 17 nt, Human
gcgacggagagaaaaaa

SEQ ID NO: 2139194 - RNA, 23 nt, Human
gcgcugacaaccaccgcucccca

SEQ ID NO: 2139195 - RNA, 16 nt, Human
gcgcucuagccugggc

SEQ ID NO: 2139196 - RNA, 19 nt, Human
gcgcugacaaccaccgcuc

SEQ ID NO: 2139197 - RNA, 21 nt, Human
gcgccuacaggagugagcacu

SEQ ID NO: 2139198 - RNA, 20 nt, Human
gcgccuacaggagugagcac

SEQ ID NO: 2139199 - RNA, 21 nt, Human
gcgccuaguggggucucccuc

SEQ ID NO: 2139200 - RNA, 20 nt, Human
gcgccuaguggggucucccu

SEQ ID NO: 2139201 - RNA, 23 nt, Human
gcgguccacccaggagccccgag

SEQ ID NO: 2139202 - RNA, 16 nt, Human
gcggggaguacaaggc

SEQ ID NO: 2139203 - RNA, 20 nt, Human
gcgguccacccaggagcccc

SEQ ID NO: 2139204 - RNA, 23 nt, Human
gcggggacagcuccuucuguccu

SEQ ID NO: 2139205 - RNA, 19 nt, Human
gcguccugucggagcccug

SEQ ID NO: 2139206 - RNA, 17 nt, Human
gcguccugacggcgccc

SEQ ID NO: 2139207 - RNA, 19 nt, Human
gcgguccccuccgccaggc

SEQ ID NO: 2139208 - RNA, 22 nt, Human
gcgguccccuccgccaggcgag

SEQ ID NO: 2139209 - RNA, 19 nt, Human
gcggggacagcuccuucug

SEQ ID NO: 2139210 - RNA, 18 nt, Human
gcggggacagcuccuucu

SEQ ID NO: 2139211 - RNA, 23 nt, Human
gcggacagccacggccaggccag

SEQ ID NO: 2139212 - RNA, 17 nt, Human
gcgcuuuugcuggucac

SEQ ID NO: 2139213 - RNA, 15 nt, Human
gcggaaagcagcuca

SEQ ID NO: 2139214 - RNA, 19 nt, Human
gcggacagccacggccagg

SEQ ID NO: 2139215 - RNA, 16 nt, Human
gcggacagccacggcc

SEQ ID NO: 2139216 - RNA, 19 nt, Human
gcggaaugaaccacaucuu

SEQ ID NO: 2139217 - RNA, 23 nt, Human
gcuacaugacgacaaagcugcua

SEQ ID NO: 2139218 - RNA, 17 nt, Human
gcuacccacuucuaaau

SEQ ID NO: 2139219 - RNA, 21 nt, Human
gcuacccaggaggcugaggug

SEQ ID NO: 2139220 - RNA, 13 nt, Human
gcuaccucaaggg

SEQ ID NO: 2139221 - RNA, 17 nt, Human
gcuaccucaagggggac

SEQ ID NO: 2139222 - RNA, 14 nt, Human
gcuaccucacuggg

SEQ ID NO: 2139223 - RNA, 20 nt, Human
gcuagagauauggcagcgaa

SEQ ID NO: 2139224 - RNA, 21 nt, Human
gcuagagauauggcagcgaaa

SEQ ID NO: 2139225 - RNA, 22 nt, Human
gcuagagcuucaagucugugcc

SEQ ID NO: 2139226 - RNA, 20 nt, Human
gcuagaggaaccaaccccca

SEQ ID NO: 2139227 - RNA, 15 nt, Human
gcgugagccacugca

SEQ ID NO: 2139228 - RNA, 16 nt, Human
gcgugagccacugcac

SEQ ID NO: 2139229 - RNA, 14 nt, Human
gcgugagccacugc

SEQ ID NO: 2139230 - RNA, 22 nt, Human
gcguccugucggagcccugucu

SEQ ID NO: 2139231 - RNA, 22 nt, Human
gcuaacccccuucuacugagcc

SEQ ID NO: 2139232 - RNA, 13 nt, Human
gcuaacuggaagc

SEQ ID NO: 2139233 - RNA, 20 nt, Human
gcuaacuuggagccccagug

SEQ ID NO: 2139234 - RNA, 21 nt, Human
gcuaacuagcuuggaaacugg

SEQ ID NO: 2139235 - RNA, 21 nt, Human
gcuaacccccuucuacugagc

SEQ ID NO: 2139236 - RNA, 12 nt, Human
gcuaacuggaag

SEQ ID NO: 2139237 - RNA, 18 nt, Human
gcuaacuuggagccccag

SEQ ID NO: 2139238 - RNA, 16 nt, Human
gccuugggcugcuccu

SEQ ID NO: 2139239 - RNA, 18 nt, Human
gccuugggcugcuccuca

SEQ ID NO: 2139240 - RNA, 22 nt, Human
gccuugggcugcuccucauggu

SEQ ID NO: 2139241 - RNA, 14 nt, Human
gccuugggcugcuc

SEQ ID NO: 2139242 - RNA, 15 nt, Human
gccuugggcugcucc

SEQ ID NO: 2139243 - RNA, 19 nt, Human
gccuucggacaacucaguc

SEQ ID NO: 2139244 - RNA, 16 nt, Human
gccuucagcucuacag

SEQ ID NO: 2139245 - RNA, 13 nt, Human
gccuuccauaauu

SEQ ID NO: 2139246 - RNA, 14 nt, Human
gccuuccauaauua

SEQ ID NO: 2139247 - RNA, 15 nt, Human
gccuuccauaauuau

SEQ ID NO: 2139248 - RNA, 16 nt, Human
gccuuccauaauuaug

SEQ ID NO: 2139249 - RNA, 21 nt, Human
gccuuccauaauuaugacagu

SEQ ID NO: 2139250 - RNA, 13 nt, Human
gccuucagcucua

SEQ ID NO: 2139251 - RNA, 20 nt, Human
gccuucacuccggugugccu

SEQ ID NO: 2139252 - RNA, 16 nt, Human
gccuuccccuugccca

SEQ ID NO: 2139253 - RNA, 14 nt, Human
gccuuccccagccu

SEQ ID NO: 2139254 - RNA, 15 nt, Human
gccuuccccagccuc

SEQ ID NO: 2139255 - RNA, 16 nt, Human
gccuuccccagccucu

SEQ ID NO: 2139256 - RNA, 17 nt, Human
gccuuccccagccucuu

SEQ ID NO: 2139257 - RNA, 18 nt, Human
gccuucccccucccaggg

SEQ ID NO: 2139258 - RNA, 23 nt, Human
gccuucccccucccagggccagg

SEQ ID NO: 2139259 - RNA, 11 nt, Human
gccuuuguaag

SEQ ID NO: 2139260 - RNA, 15 nt, Human
gccuuuguaaguuau

SEQ ID NO: 2139261 - RNA, 13 nt, Human
gccuuuugacagc

SEQ ID NO: 2139262 - RNA, 16 nt, Human
gccuuuuauuucuuaa

SEQ ID NO: 2139263 - RNA, 15 nt, Human
gccuuuguugcucag

SEQ ID NO: 2139264 - RNA, 17 nt, Human
gccugguggcagcugcg

SEQ ID NO: 2139265 - RNA, 16 nt, Human
gccugguggcagcugc

SEQ ID NO: 2139266 - RNA, 14 nt, Human
gccugguuagaggc

SEQ ID NO: 2139267 - RNA, 18 nt, Human
gccuguaaucccagcacu

SEQ ID NO: 2139268 - RNA, 16 nt, Human
gccuguaaucccagca

SEQ ID NO: 2139269 - RNA, 17 nt, Human
gccuguaaucccagcac

SEQ ID NO: 2139270 - RNA, 19 nt, Human
gccuguaaucccagcacuu

SEQ ID NO: 2139271 - RNA, 17 nt, Human
gccuguaaucccagcag

SEQ ID NO: 2139272 - RNA, 18 nt, Human
gccuguaaucccagcagu

SEQ ID NO: 2139273 - RNA, 15 nt, Human
gccuguaaucccagc

SEQ ID NO: 2139274 - RNA, 16 nt, Human
gccuguaaucccagcu

SEQ ID NO: 2139275 - RNA, 12 nt, Human
gccuguccagcc

SEQ ID NO: 2139276 - RNA, 13 nt, Human
gccuguccagccu

SEQ ID NO: 2139277 - RNA, 14 nt, Human
gccuguccagccug

SEQ ID NO: 2139278 - RNA, 15 nt, Human
gccugguggcagcug

SEQ ID NO: 2139279 - RNA, 12 nt, Human
gccuggagcucc

SEQ ID NO: 2139280 - RNA, 14 nt, Human
gccuggagcuccug

SEQ ID NO: 2139281 - RNA, 15 nt, Human
gccuggagcuccugg

SEQ ID NO: 2139282 - RNA, 16 nt, Human
gccuggagcuccuggg

SEQ ID NO: 2139283 - RNA, 20 nt, Human
gccuggagcuccugggaagg

SEQ ID NO: 2139284 - RNA, 11 nt, Human
gccuggagccc

SEQ ID NO: 2139285 - RNA, 13 nt, Human
gccuggagcccca

SEQ ID NO: 2139286 - RNA, 14 nt, Human
gccuggagccccac

SEQ ID NO: 2139287 - RNA, 18 nt, Human
gccuggagccccacugcc

SEQ ID NO: 2139288 - RNA, 19 nt, Human
gccuggagccccacugccc

SEQ ID NO: 2139289 - RNA, 20 nt, Human
gccuggagccccacugcccu

SEQ ID NO: 2139290 - RNA, 16 nt, Human
gccuuagaaccuuucu

SEQ ID NO: 2139291 - RNA, 13 nt, Human
gccuuacuuugua

SEQ ID NO: 2139292 - RNA, 15 nt, Human
gccuuacuuuguaug

SEQ ID NO: 2139293 - RNA, 16 nt, Human
gccuuacuuuguauga

SEQ ID NO: 2139294 - RNA, 19 nt, Human
gccuuacuuuguaugauau

SEQ ID NO: 2139295 - RNA, 20 nt, Human
gccuuacuuuguaugauauu

SEQ ID NO: 2139296 - RNA, 15 nt, Human
gccuuaccuccugcc

SEQ ID NO: 2139297 - RNA, 16 nt, Human
gccuuaccuccugccc

SEQ ID NO: 2139298 - RNA, 17 nt, Human
gccuuaccuccugccca

SEQ ID NO: 2139299 - RNA, 18 nt, Human
gccuuaccuccugcccag

SEQ ID NO: 2139300 - RNA, 19 nt, Human
gccuuaccuccugcccagg

SEQ ID NO: 2139301 - RNA, 20 nt, Human
gccuuaccuccugcccagga

SEQ ID NO: 2139302 - RNA, 21 nt, Human
gccuuaccuccugcccaggag

SEQ ID NO: 2139303 - RNA, 22 nt, Human
gccuuaccuccugcccaggaga

SEQ ID NO: 2139304 - RNA, 20 nt, Human
gccuuagaagucacacagua

SEQ ID NO: 2139305 - RNA, 20 nt, Human
gccuguccugaccugucuca

SEQ ID NO: 2139306 - RNA, 12 nt, Human
gccuuaccuccu

SEQ ID NO: 2139307 - RNA, 13 nt, Human
gccuuaccuccug

SEQ ID NO: 2139308 - RNA, 14 nt, Human
gccuuaccuccugc

SEQ ID NO: 2139309 - RNA, 13 nt, Human
gccugucccuggc

SEQ ID NO: 2139310 - RNA, 18 nt, Human
gccugucccuggccaucu

SEQ ID NO: 2139311 - RNA, 20 nt, Human
gccugucccuggccaucucu

SEQ ID NO: 2139312 - RNA, 21 nt, Human
gccugucccuggccaucucug

SEQ ID NO: 2139313 - RNA, 13 nt, Human
gccugucccccug

SEQ ID NO: 2139314 - RNA, 14 nt, Human
gccugucccucuca

SEQ ID NO: 2139315 - RNA, 18 nt, Human
gccugucccucucaggca

SEQ ID NO: 2139316 - RNA, 15 nt, Human
gccuguccagccugg

SEQ ID NO: 2139317 - RNA, 17 nt, Human
gccuguccagccugggc

SEQ ID NO: 2139318 - RNA, 17 nt, Human
ggucucaaacuccugac

SEQ ID NO: 2139319 - RNA, 21 nt, Human
ggucucaaacuccugggcuca

SEQ ID NO: 2139320 - RNA, 23 nt, Human
ggucucaaacuccugggcucagg

SEQ ID NO: 2139321 - RNA, 18 nt, Human
ggucucacaguguugccc

SEQ ID NO: 2139322 - RNA, 23 nt, Human
ggucucacucugucgcccagucu

SEQ ID NO: 2139323 - RNA, 22 nt, Human
ggucucacucugucgcccaguc

SEQ ID NO: 2139324 - RNA, 21 nt, Human
ggucucacaguguugcccagg

SEQ ID NO: 2139325 - RNA, 19 nt, Human
ggucucacaguguugccca

SEQ ID NO: 2139326 - RNA, 20 nt, Human
ggucucacaguguugcccag

SEQ ID NO: 2139327 - RNA, 21 nt, Human
ggucucgcuuuguugcccagg

SEQ ID NO: 2139328 - RNA, 19 nt, Human
ggucucgcuuuguugccca

SEQ ID NO: 2139329 - RNA, 20 nt, Human
ggucucgcuuuguugcccag

SEQ ID NO: 2139330 - RNA, 18 nt, Human
ggucucagaaucuuuccu

SEQ ID NO: 2139331 - RNA, 22 nt, Human
ggucucccgggaagccacccuc

SEQ ID NO: 2139332 - RNA, 14 nt, Human
ggucucccucuccu

SEQ ID NO: 2139333 - RNA, 15 nt, Human
ggucucccucuccug

SEQ ID NO: 2139334 - RNA, 20 nt, Human
ggucagguuauacuccuccu

SEQ ID NO: 2139335 - RNA, 12 nt, Human
ggucucucuuug

SEQ ID NO: 2139336 - RNA, 13 nt, Human
ggucucucuuugg

SEQ ID NO: 2139337 - RNA, 15 nt, Human
ggucucucuuuggac

SEQ ID NO: 2139338 - RNA, 21 nt, Human
ggucucugccaugaacuggag

SEQ ID NO: 2139339 - RNA, 23 nt, Human
ggucucugccaugaacuggaggc

SEQ ID NO: 2139340 - RNA, 21 nt, Human
ggucucuugagggagcuuagc

SEQ ID NO: 2139341 - RNA, 15 nt, Human
ggucucuugagggag

SEQ ID NO: 2139342 - RNA, 12 nt, Human
ggucugaaaugg

SEQ ID NO: 2139343 - RNA, 13 nt, Human
ggucugaaaugga

SEQ ID NO: 2139344 - RNA, 11 nt, Human
ggucugaaugu

SEQ ID NO: 2139345 - RNA, 12 nt, Human
ggucugaauguu

SEQ ID NO: 2139346 - RNA, 14 nt, Human
ggucugaauguucu

SEQ ID NO: 2139347 - RNA, 21 nt, Human
ggugaccucugccugaaguca

SEQ ID NO: 2139348 - RNA, 15 nt, Human
ggugaccuucuggga

SEQ ID NO: 2139349 - RNA, 17 nt, Human
ggucugaauguucugac

SEQ ID NO: 2139350 - RNA, 21 nt, Human
ggucugaauguucugacauua

SEQ ID NO: 2139351 - RNA, 22 nt, Human
ggucugaauguucugacauuaa

SEQ ID NO: 2139352 - RNA, 14 nt, Human
ggucugacccacug

SEQ ID NO: 2139353 - RNA, 13 nt, Human
ggucugcaggcag

SEQ ID NO: 2139354 - RNA, 14 nt, Human
ggucugcaggcagg

SEQ ID NO: 2139355 - RNA, 23 nt, Human
ggucugcaggcagggcugacucu

SEQ ID NO: 2139356 - RNA, 21 nt, Human
ggugacagagugagacucugu

SEQ ID NO: 2139357 - RNA, 17 nt, Human
ggugaggaagcuccagu

SEQ ID NO: 2139358 - RNA, 15 nt, Human
ggugaggaccacucc

SEQ ID NO: 2139359 - RNA, 18 nt, Human
ggugagcagacugguggg

SEQ ID NO: 2139360 - RNA, 18 nt, Human
ggugaggaccacuccugu

SEQ ID NO: 2139361 - RNA, 13 nt, Human
ggugaggagcaca

SEQ ID NO: 2139362 - RNA, 18 nt, Human
ggugccuggguggggcug

SEQ ID NO: 2139363 - RNA, 19 nt, Human
ggugccuggguggggcugc

SEQ ID NO: 2139364 - RNA, 22 nt, Human
ggugccuggguggggcugcucc

SEQ ID NO: 2139365 - RNA, 23 nt, Human
ggugccuggguggggcugcuccu

SEQ ID NO: 2139366 - RNA, 17 nt, Human
ggugccugugaggcagg

SEQ ID NO: 2139367 - RNA, 18 nt, Human
ggugccugugaggcaggg

SEQ ID NO: 2139368 - RNA, 19 nt, Human
ggugccugugaggcagggg

SEQ ID NO: 2139369 - RNA, 23 nt, Human
ggugccuucuuauucucacucca

SEQ ID NO: 2139370 - RNA, 12 nt, Human
ggugccuuuccu

SEQ ID NO: 2139371 - RNA, 16 nt, Human
ggugccuuuccuguuc

SEQ ID NO: 2139372 - RNA, 17 nt, Human
ggugccuuuccuguuca

SEQ ID NO: 2139373 - RNA, 18 nt, Human
ggugccuuuccuguucag

SEQ ID NO: 2139374 - RNA, 19 nt, Human
ggugccuuuccuguucagc

SEQ ID NO: 2139375 - RNA, 22 nt, Human
ggugccuuuccuguucagcauu

SEQ ID NO: 2139376 - RNA, 16 nt, Human
ggugagaggggaacag

SEQ ID NO: 2139377 - RNA, 15 nt, Human
ggugagaagcagagg

SEQ ID NO: 2139378 - RNA, 21 nt, Human
ggugccugugaggcaggggcg

SEQ ID NO: 2139379 - RNA, 13 nt, Human
gguggcaucccag

SEQ ID NO: 2139380 - RNA, 15 nt, Human
gguggcauacgccug

SEQ ID NO: 2139381 - RNA, 22 nt, Human
gguggcagugggagcugccugu

SEQ ID NO: 2139382 - RNA, 19 nt, Human
gguggcagugggagcugcc

SEQ ID NO: 2139383 - RNA, 21 nt, Human
ggugcugccauccagguucag

SEQ ID NO: 2139384 - RNA, 15 nt, Human
ggugcugccauccag

SEQ ID NO: 2139385 - RNA, 23 nt, Human
ggugacagugagguccugggggc

SEQ ID NO: 2139386 - RNA, 21 nt, Human
gguggcgacucuauagacucu

SEQ ID NO: 2139387 - RNA, 19 nt, Human
gguggcgggcaccuauagu

SEQ ID NO: 2139388 - RNA, 14 nt, Human
gguggcuaaagguc

SEQ ID NO: 2139389 - RNA, 22 nt, Human
gguggccacuccagaccccugg

SEQ ID NO: 2139390 - RNA, 21 nt, Human
gguggccacuccagaccccug

SEQ ID NO: 2139391 - RNA, 20 nt, Human
gguggccacuccagaccccu

SEQ ID NO: 2139392 - RNA, 17 nt, Human
gguggcaucccaguggc

SEQ ID NO: 2139393 - RNA, 19 nt, Human
gguggcaugugccuauagu

SEQ ID NO: 2139394 - RNA, 23 nt, Human
gguggcaugugccuauaguccca

SEQ ID NO: 2139395 - RNA, 23 nt, Human
gguggccacuccagaccccuggc

SEQ ID NO: 2139396 - RNA, 16 nt, Human
gguugacuuucaggua

SEQ ID NO: 2139397 - RNA, 13 nt, Human
gguugagaaauga

SEQ ID NO: 2139398 - RNA, 18 nt, Human
gguugaggggcuccugga

SEQ ID NO: 2139399 - RNA, 19 nt, Human
gguugaggggcuccuggaa

SEQ ID NO: 2139400 - RNA, 13 nt, Human
gguugagguuuca

SEQ ID NO: 2139401 - RNA, 19 nt, Human
gguugagguggaagcccuc

SEQ ID NO: 2139402 - RNA, 16 nt, Human
gguucuuucuuccucu

SEQ ID NO: 2139403 - RNA, 14 nt, Human
gguucuuucuuccu

SEQ ID NO: 2139404 - RNA, 13 nt, Human
gguucuucccuuu

SEQ ID NO: 2139405 - RNA, 18 nt, Human
gguucugguuagcucagc

SEQ ID NO: 2139406 - RNA, 20 nt, Human
gguucugguuagcucagccc

SEQ ID NO: 2139407 - RNA, 22 nt, Human
gguucugguuagcucagcccca

SEQ ID NO: 2139408 - RNA, 16 nt, Human
gguucuuagugucacu

SEQ ID NO: 2139409 - RNA, 12 nt, Human
gguucaccagcc

SEQ ID NO: 2139410 - RNA, 13 nt, Human
gguucaccagccu

SEQ ID NO: 2139411 - RNA, 14 nt, Human
gguucaccagccuc

SEQ ID NO: 2139412 - RNA, 15 nt, Human
gguucaccagccucu

SEQ ID NO: 2139413 - RNA, 21 nt, Human
gguucacgccuguaaucccag

SEQ ID NO: 2139414 - RNA, 22 nt, Human
gguucacgccuguaaucccagc

SEQ ID NO: 2139415 - RNA, 15 nt, Human
gguucacuaaagcag

SEQ ID NO: 2139416 - RNA, 20 nt, Human
gguuauuuagggaacugcuu

SEQ ID NO: 2139417 - RNA, 22 nt, Human
gguuauguguaugugccauuua

SEQ ID NO: 2139418 - RNA, 12 nt, Human
gguuauuuuuau

SEQ ID NO: 2139419 - RNA, 11 nt, Human
gguuaaaacug

SEQ ID NO: 2139420 - RNA, 13 nt, Human
gguuaaaacuguc

SEQ ID NO: 2139421 - RNA, 14 nt, Human
gguguuuucaugua

SEQ ID NO: 2139422 - RNA, 17 nt, Human
gguguccuuucccucca

SEQ ID NO: 2139423 - RNA, 17 nt, Human
gguuaacuauguacaau

SEQ ID NO: 2139424 - RNA, 15 nt, Human
gguuaaggcugagga

SEQ ID NO: 2139425 - RNA, 22 nt, Human
gguuaaggcugaggaaaggcca

SEQ ID NO: 2139426 - RNA, 21 nt, Human
gguuacccaguuagcucucaa

SEQ ID NO: 2139427 - RNA, 14 nt, Human
gguuacaaacugca

SEQ ID NO: 2139428 - RNA, 15 nt, Human
gguuacaaacugcaa

SEQ ID NO: 2139429 - RNA, 13 nt, Human
gguuaauaaguuu

SEQ ID NO: 2139430 - RNA, 13 nt, Human
gguuacacuguua

SEQ ID NO: 2139431 - RNA, 15 nt, Human
gguuacacuguuaga

SEQ ID NO: 2139432 - RNA, 20 nt, Human
gguuacacuguuagaacacu

SEQ ID NO: 2139433 - RNA, 21 nt, Human
gguuacacuguuagaacacua

SEQ ID NO: 2139434 - RNA, 17 nt, Human
gguuagcagagcuggac

SEQ ID NO: 2139435 - RNA, 22 nt, Human
gguuagcucagccccagcccag

SEQ ID NO: 2139436 - RNA, 20 nt, Human
gguuaggaguucgagaccag

SEQ ID NO: 2139437 - RNA, 13 nt, Human
gguuagggagggg

SEQ ID NO: 2139438 - RNA, 15 nt, Human
gguuagggaggggua

SEQ ID NO: 2139439 - RNA, 21 nt, Human
gguuauauuuuacuacugugg

SEQ ID NO: 2139440 - RNA, 12 nt, Human
gguuauacauga

SEQ ID NO: 2139441 - RNA, 14 nt, Human
gguuauacaugaca

SEQ ID NO: 2139442 - RNA, 23 nt, Human
gguuauacaugacacugaaaugc

SEQ ID NO: 2139443 - RNA, 13 nt, Human
gguuauggagagg

SEQ ID NO: 2139444 - RNA, 17 nt, Human
ggugucaagagggucug

SEQ ID NO: 2139445 - RNA, 19 nt, Human
ggugucaagagggucugag

SEQ ID NO: 2139446 - RNA, 17 nt, Human
gguguauuuauuuuccu

SEQ ID NO: 2139447 - RNA, 22 nt, Human
gguguauuuauuuuccucccca

SEQ ID NO: 2139448 - RNA, 23 nt, Human
gguguauuuauuuuccuccccag

SEQ ID NO: 2139449 - RNA, 16 nt, Human
gguguccccagcccac

SEQ ID NO: 2139450 - RNA, 17 nt, Human
gguguccccagcccacu

SEQ ID NO: 2139451 - RNA, 19 nt, Human
ggugucaccugaagacuca

SEQ ID NO: 2139452 - RNA, 21 nt, Human
ggugguuauggagaggguguc

SEQ ID NO: 2139453 - RNA, 16 nt, Human
gguguaaccugagaug

SEQ ID NO: 2139454 - RNA, 15 nt, Human
gguggugaccucugc

SEQ ID NO: 2139455 - RNA, 14 nt, Human
gguggugaccucug

SEQ ID NO: 2139456 - RNA, 19 nt, Human
ggugguccugacucaacau

SEQ ID NO: 2139457 - RNA, 15 nt, Human
gguggucugaauguu

SEQ ID NO: 2139458 - RNA, 18 nt, Human
gguggucugaauguucug

SEQ ID NO: 2139459 - RNA, 19 nt, Human
gguggucugaauguucuga

SEQ ID NO: 2139460 - RNA, 16 nt, Human
gguggucugcaggcag

SEQ ID NO: 2139461 - RNA, 17 nt, Human
gguggucugcaggcagg

SEQ ID NO: 2139462 - RNA, 18 nt, Human
gguggucugcaggcaggg

SEQ ID NO: 2139463 - RNA, 16 nt, Human
gguggugaccucugcc

SEQ ID NO: 2139464 - RNA, 17 nt, Human
gguggguuuucuuccca

SEQ ID NO: 2139465 - RNA, 16 nt, Human
gguggguuuucuuccc

SEQ ID NO: 2139466 - RNA, 14 nt, Human
ggugguaugugugu

SEQ ID NO: 2139467 - RNA, 12 nt, Human
ggugggugaaag

SEQ ID NO: 2139468 - RNA, 15 nt, Human
gguggcuagucagag

SEQ ID NO: 2139469 - RNA, 16 nt, Human
gguggcuagucagaga

SEQ ID NO: 2139470 - RNA, 17 nt, Human
gguggcuagucagagag

SEQ ID NO: 2139471 - RNA, 14 nt, Human
gguggcucacgccu

SEQ ID NO: 2139472 - RNA, 19 nt, Human
gguggcucacgccuguaau

SEQ ID NO: 2139473 - RNA, 13 nt, Human
gguggcucugaga

SEQ ID NO: 2139474 - RNA, 14 nt, Human
gguggcucuggaau

SEQ ID NO: 2139475 - RNA, 13 nt, Human
gguggcugaccca

SEQ ID NO: 2139476 - RNA, 15 nt, Human
gguggcugacccagu

SEQ ID NO: 2139477 - RNA, 18 nt, Human
gguggcugacccaguccc

SEQ ID NO: 2139478 - RNA, 19 nt, Human
gguggcugacccagucccu

SEQ ID NO: 2139479 - RNA, 21 nt, Human
gguggcugacccagucccugg

SEQ ID NO: 2139480 - RNA, 22 nt, Human
gguggcugacccagucccuggg

SEQ ID NO: 2139481 - RNA, 23 nt, Human
gguggcugacccagucccugggg

SEQ ID NO: 2139482 - RNA, 22 nt, Human
ggucagcuugcugcccuaggcu

SEQ ID NO: 2139483 - RNA, 22 nt, Human
ggucaggagaggggcagaacag

SEQ ID NO: 2139484 - RNA, 21 nt, Human
ggucaggaguuccuaaccagc

SEQ ID NO: 2139485 - RNA, 22 nt, Human
ggucaggaaggaugagcauuua

SEQ ID NO: 2139486 - RNA, 15 nt, Human
ggucaggaggcaggg

SEQ ID NO: 2139487 - RNA, 21 nt, Human
ggucaggaguuagaggccagc

SEQ ID NO: 2139488 - RNA, 11 nt, Human
ggucagagccu

SEQ ID NO: 2139489 - RNA, 22 nt, Human
ggucaggaguuagaggccagcc

SEQ ID NO: 2139490 - RNA, 16 nt, Human
ggucaggccacggcag

SEQ ID NO: 2139491 - RNA, 19 nt, Human
ggucagguguucaagacca

SEQ ID NO: 2139492 - RNA, 17 nt, Human
ggucagggaccaaggac

SEQ ID NO: 2139493 - RNA, 14 nt, Human
ggucaacagagaag

SEQ ID NO: 2139494 - RNA, 20 nt, Human
ggucaacagagaaggcagga

SEQ ID NO: 2139495 - RNA, 18 nt, Human
ggucacaggacucugccu

SEQ ID NO: 2139496 - RNA, 16 nt, Human
ggucacaggacucugc

SEQ ID NO: 2139497 - RNA, 19 nt, Human
ggucaacauggugaaaccc

SEQ ID NO: 2139498 - RNA, 23 nt, Human
ggucaacaucuuuuacauucugc

SEQ ID NO: 2139499 - RNA, 22 nt, Human
ggucaacuugagcauguuacug

SEQ ID NO: 2139500 - RNA, 13 nt, Human
ggucacuccuggg

SEQ ID NO: 2139501 - RNA, 15 nt, Human
ggucacugccaugga

SEQ ID NO: 2139502 - RNA, 17 nt, Human
gguacuuguggacacag

SEQ ID NO: 2139503 - RNA, 16 nt, Human
gguacuuguggacaca

SEQ ID NO: 2139504 - RNA, 20 nt, Human
gguacuuguggacacagcuc

SEQ ID NO: 2139505 - RNA, 22 nt, Human
gguagaaauaucugaaaaugua

SEQ ID NO: 2139506 - RNA, 13 nt, Human
gguacccacugcu

SEQ ID NO: 2139507 - RNA, 16 nt, Human
gguacccacugcucug

SEQ ID NO: 2139508 - RNA, 11 nt, Human
gguacccacug

SEQ ID NO: 2139509 - RNA, 23 nt, Human
gguagaaauaucugaaaauguau

SEQ ID NO: 2139510 - RNA, 11 nt, Human
gguagaacaca

SEQ ID NO: 2139511 - RNA, 16 nt, Human
gguagccaucauggau

SEQ ID NO: 2139512 - RNA, 20 nt, Human
gguauuuaucuauuguaaga

SEQ ID NO: 2139513 - RNA, 21 nt, Human
gguauuuaucuauuguaagau

SEQ ID NO: 2139514 - RNA, 18 nt, Human
gguagaucacgagaucaa

SEQ ID NO: 2139515 - RNA, 19 nt, Human
gggugacagagcaagugag

SEQ ID NO: 2139516 - RNA, 13 nt, Human
gggugaagggaga

SEQ ID NO: 2139517 - RNA, 14 nt, Human
gggugaagggagag

SEQ ID NO: 2139518 - RNA, 23 nt, Human
gggucuucccuaccucaggcagg

SEQ ID NO: 2139519 - RNA, 13 nt, Human
gggugaaagaaau

SEQ ID NO: 2139520 - RNA, 14 nt, Human
gggugaaagaaauc

SEQ ID NO: 2139521 - RNA, 20 nt, Human
gggucuucagggggccaggu

SEQ ID NO: 2139522 - RNA, 15 nt, Human
gggucugugucucuu

SEQ ID NO: 2139523 - RNA, 18 nt, Human
gggugaggaccacuccug

SEQ ID NO: 2139524 - RNA, 15 nt, Human
gggugaggaccacuc

SEQ ID NO: 2139525 - RNA, 16 nt, Human
gggugcucccuaccac

SEQ ID NO: 2139526 - RNA, 21 nt, Human
gggugcugcuucccucugccu

SEQ ID NO: 2139527 - RNA, 23 nt, Human
gggugcugcuucccucugccugu

SEQ ID NO: 2139528 - RNA, 19 nt, Human
gggugcuggcugcccagac

SEQ ID NO: 2139529 - RNA, 14 nt, Human
gggugcagcaguga

SEQ ID NO: 2139530 - RNA, 14 nt, Human
gggugaggauaaca

SEQ ID NO: 2139531 - RNA, 15 nt, Human
gggugcagcugagaa

SEQ ID NO: 2139532 - RNA, 13 nt, Human
gggugcccacagc

SEQ ID NO: 2139533 - RNA, 21 nt, Human
gggugccccccuugccagaca

SEQ ID NO: 2139534 - RNA, 18 nt, Human
gggugcccuccacugccc

SEQ ID NO: 2139535 - RNA, 20 nt, Human
gggugcccuccacugcccuc

SEQ ID NO: 2139536 - RNA, 16 nt, Human
ggguucuuucuuccuc

SEQ ID NO: 2139537 - RNA, 17 nt, Human
ggguucuuucuuccucu

SEQ ID NO: 2139538 - RNA, 18 nt, Human
ggguucguggaaagggug

SEQ ID NO: 2139539 - RNA, 19 nt, Human
ggguucuuucuuccucugc

SEQ ID NO: 2139540 - RNA, 20 nt, Human
ggguugcguccugacggcgc

SEQ ID NO: 2139541 - RNA, 21 nt, Human
gggugcugccccaugaagcca

SEQ ID NO: 2139542 - RNA, 18 nt, Human
ggguugcaguggagaggg

SEQ ID NO: 2139543 - RNA, 19 nt, Human
ggguugcaguggagaggga

SEQ ID NO: 2139544 - RNA, 18 nt, Human
ggguugcaucagaaaugu

SEQ ID NO: 2139545 - RNA, 22 nt, Human
ggguucagccccuccucugcca

SEQ ID NO: 2139546 - RNA, 13 nt, Human
ggguucauuauug

SEQ ID NO: 2139547 - RNA, 17 nt, Human
ggguucauuauuggaau

SEQ ID NO: 2139548 - RNA, 23 nt, Human
ggguucaagcgauucuucugcuu

SEQ ID NO: 2139549 - RNA, 20 nt, Human
ggguucaccugggcugaggc

SEQ ID NO: 2139550 - RNA, 20 nt, Human
ggguuauguguaugugccau

SEQ ID NO: 2139551 - RNA, 16 nt, Human
ggguucaaaaugucug

SEQ ID NO: 2139552 - RNA, 19 nt, Human
ggguucagagacucagggc

SEQ ID NO: 2139553 - RNA, 13 nt, Human
ggguucagccccu

SEQ ID NO: 2139554 - RNA, 16 nt, Human
ggguucagccccuccu

SEQ ID NO: 2139555 - RNA, 17 nt, Human
ggguucagccccuccuc

SEQ ID NO: 2139556 - RNA, 19 nt, Human
ggguucagccccuccucug

SEQ ID NO: 2139557 - RNA, 20 nt, Human
ggguucagccccuccucugc

SEQ ID NO: 2139558 - RNA, 21 nt, Human
ggguucagccccuccucugcc

SEQ ID NO: 2139559 - RNA, 13 nt, Human
ggguucaggggac

SEQ ID NO: 2139560 - RNA, 12 nt, Human
ggguuacaaacu

SEQ ID NO: 2139561 - RNA, 16 nt, Human
ggguuacaaacugcaa

SEQ ID NO: 2139562 - RNA, 22 nt, Human
ggguucaagcgauucuucugcu

SEQ ID NO: 2139563 - RNA, 14 nt, Human
ggguguguguuugu

SEQ ID NO: 2139564 - RNA, 22 nt, Human
ggguguguguuugugugagaga

SEQ ID NO: 2139565 - RNA, 14 nt, Human
gggucucacucugu

SEQ ID NO: 2139566 - RNA, 13 nt, Human
ggguaaauuauuc

SEQ ID NO: 2139567 - RNA, 18 nt, Human
gggucuccaggaggagac

SEQ ID NO: 2139568 - RNA, 19 nt, Human
gggucuccaggaggagacu

SEQ ID NO: 2139569 - RNA, 15 nt, Human
gggucucccucuccu

SEQ ID NO: 2139570 - RNA, 16 nt, Human
gggucucccucuccug

SEQ ID NO: 2139571 - RNA, 18 nt, Human
gggucucccucuccugcc

SEQ ID NO: 2139572 - RNA, 19 nt, Human
gggucucccucuccugccu

SEQ ID NO: 2139573 - RNA, 23 nt, Human
gggguuuucgaagcucagcccac

SEQ ID NO: 2139574 - RNA, 22 nt, Human
ggguaaaauuccuuagcuuaga

SEQ ID NO: 2139575 - RNA, 13 nt, Human
ggguaaggugccu

SEQ ID NO: 2139576 - RNA, 14 nt, Human
ggguaaggugccuu

SEQ ID NO: 2139577 - RNA, 14 nt, Human
gggggagggggagg

SEQ ID NO: 2139578 - RNA, 13 nt, Human
gggguuacaaacu

SEQ ID NO: 2139579 - RNA, 17 nt, Human
gggguuacaaacugcaa

SEQ ID NO: 2139580 - RNA, 13 nt, Human
gggguuggcuggg

SEQ ID NO: 2139581 - RNA, 20 nt, Human
gggucucccucuccugccua

SEQ ID NO: 2139582 - RNA, 21 nt, Human
gggucugaggaauccagaccc

SEQ ID NO: 2139583 - RNA, 12 nt, Human
gggucugaggaa

SEQ ID NO: 2139584 - RNA, 17 nt, Human
gggggagucugaagcag

SEQ ID NO: 2139585 - RNA, 22 nt, Human
gggggagucugaagcagaugca

SEQ ID NO: 2139586 - RNA, 15 nt, Human
ggggugggagagguc

SEQ ID NO: 2139587 - RNA, 14 nt, Human
ggggcugaggggca

SEQ ID NO: 2139588 - RNA, 20 nt, Human
ggggcugaucucagggaagc

SEQ ID NO: 2139589 - RNA, 18 nt, Human
ggggcugaacggggagaa

SEQ ID NO: 2139590 - RNA, 19 nt, Human
ggggcugaggugggaggau

SEQ ID NO: 2139591 - RNA, 14 nt, Human
ggggauuucuccca

SEQ ID NO: 2139592 - RNA, 15 nt, Human
ggggauuucucccag

SEQ ID NO: 2139593 - RNA, 19 nt, Human
ggggaggaucacuggagcc

SEQ ID NO: 2139594 - RNA, 14 nt, Human
ggggaggcagccgg

SEQ ID NO: 2139595 - RNA, 13 nt, Human
ggggaggccaagu

SEQ ID NO: 2139596 - RNA, 21 nt, Human
ggggaggccaagugcaggcug

SEQ ID NO: 2139597 - RNA, 21 nt, Human
ggggaaaaucagccugcucca

SEQ ID NO: 2139598 - RNA, 16 nt, Human
gggccuggucccuggg

SEQ ID NO: 2139599 - RNA, 14 nt, Human
gggcuuucuggaga

SEQ ID NO: 2139600 - RNA, 20 nt, Human
gggcuuugauuccaucuccu

SEQ ID NO: 2139601 - RNA, 15 nt, Human
gggcuuucuggagag

SEQ ID NO: 2139602 - RNA, 16 nt, Human
ggggaaaaucagccug

SEQ ID NO: 2139603 - RNA, 17 nt, Human
ggggaaaaucagccugc

SEQ ID NO: 2139604 - RNA, 19 nt, Human
ggggaaaaucagccugcuc

SEQ ID NO: 2139605 - RNA, 17 nt, Human
ggggcugaggugggagg

SEQ ID NO: 2139606 - RNA, 12 nt, Human
ggggcucuggga

SEQ ID NO: 2139607 - RNA, 21 nt, Human
ggggcuccuggaaaggcucag

SEQ ID NO: 2139608 - RNA, 23 nt, Human
ggggcucugcccucccuccuucc

SEQ ID NO: 2139609 - RNA, 11 nt, Human
ggggcuccugg

SEQ ID NO: 2139610 - RNA, 12 nt, Human
ggggcuccugga

SEQ ID NO: 2139611 - RNA, 13 nt, Human
ggggcuccuggaa

SEQ ID NO: 2139612 - RNA, 15 nt, Human
ggggcaaacaccugc

SEQ ID NO: 2139613 - RNA, 13 nt, Human
ggggcagaacagc

SEQ ID NO: 2139614 - RNA, 17 nt, Human
ggggcagucuggagggg

SEQ ID NO: 2139615 - RNA, 17 nt, Human
ggggcagaacagccgcu

SEQ ID NO: 2139616 - RNA, 13 nt, Human
ggggcaguggcaa

SEQ ID NO: 2139617 - RNA, 14 nt, Human
ggggcaucugcccc

SEQ ID NO: 2139618 - RNA, 20 nt, Human
ggggcaucugccccuccccc

SEQ ID NO: 2139619 - RNA, 17 nt, Human
gggcccagagagggugg

SEQ ID NO: 2139620 - RNA, 18 nt, Human
gggccacgugccaggccc

SEQ ID NO: 2139621 - RNA, 19 nt, Human
gggccacgugccaggcccg

SEQ ID NO: 2139622 - RNA, 15 nt, Human
gggccacucugccuc

SEQ ID NO: 2139623 - RNA, 16 nt, Human
gggccacucugccucu

SEQ ID NO: 2139624 - RNA, 19 nt, Human
gggcccaagacagaugccc

SEQ ID NO: 2139625 - RNA, 23 nt, Human
gggcccaagacagaugccccaga

SEQ ID NO: 2139626 - RNA, 13 nt, Human
gggcccagaucug

SEQ ID NO: 2139627 - RNA, 14 nt, Human
gggcccagauucua

SEQ ID NO: 2139628 - RNA, 23 nt, Human
gggccaaauauauucucuuuggu

SEQ ID NO: 2139629 - RNA, 18 nt, Human
gggcauugauggggaagg

SEQ ID NO: 2139630 - RNA, 23 nt, Human
gggcauugauggggaaggaggcu

SEQ ID NO: 2139631 - RNA, 14 nt, Human
gggcauugcuuucc

SEQ ID NO: 2139632 - RNA, 13 nt, Human
gggccaagaaaga

SEQ ID NO: 2139633 - RNA, 11 nt, Human
gggccaacacc

SEQ ID NO: 2139634 - RNA, 15 nt, Human
gggccaacaccaggg

SEQ ID NO: 2139635 - RNA, 16 nt, Human
gggccaacaccaggga

SEQ ID NO: 2139636 - RNA, 16 nt, Human
gggccacagagaaagu

SEQ ID NO: 2139637 - RNA, 13 nt, Human
gggccaaggacug

SEQ ID NO: 2139638 - RNA, 15 nt, Human
gggccaagucccacc

SEQ ID NO: 2139639 - RNA, 23 nt, Human
gggccacagagaaaguacuucuc

SEQ ID NO: 2139640 - RNA, 14 nt, Human
gggccacagccaga

SEQ ID NO: 2139641 - RNA, 14 nt, Human
gggccacgugccag

SEQ ID NO: 2139642 - RNA, 19 nt, Human
gggccaccuccccaggccg

SEQ ID NO: 2139643 - RNA, 22 nt, Human
gggccaccuccccaggccgugg

SEQ ID NO: 2139644 - RNA, 15 nt, Human
gggccaccuccccag

SEQ ID NO: 2139645 - RNA, 16 nt, Human
gggccaccuccccagg

SEQ ID NO: 2139646 - RNA, 17 nt, Human
gggccaccuccccaggc

SEQ ID NO: 2139647 - RNA, 19 nt, Human
gggcaugguauuugagaca

SEQ ID NO: 2139648 - RNA, 16 nt, Human
gggcauggccagcagc

SEQ ID NO: 2139649 - RNA, 20 nt, Human
gggcauggccagguggccac

SEQ ID NO: 2139650 - RNA, 17 nt, Human
gggcauggccagguggc

SEQ ID NO: 2139651 - RNA, 15 nt, Human
gggcauggccaggug

SEQ ID NO: 2139652 - RNA, 20 nt, Human
gggcauggacguucggggca

SEQ ID NO: 2139653 - RNA, 22 nt, Human
gggcauggacguucggggcaug

SEQ ID NO: 2139654 - RNA, 14 nt, Human
gggcaucugccccu

SEQ ID NO: 2139655 - RNA, 17 nt, Human
gggcaucugccccuccc

SEQ ID NO: 2139656 - RNA, 19 nt, Human
gggcaucugccccuccccc

SEQ ID NO: 2139657 - RNA, 13 nt, Human
gggcaucuggccu

SEQ ID NO: 2139658 - RNA, 18 nt, Human
gggcaucuggccuuacac

SEQ ID NO: 2139659 - RNA, 20 nt, Human
gggcaucugccccuccccca

SEQ ID NO: 2139660 - RNA, 14 nt, Human
gggcaugcuggggc

SEQ ID NO: 2139661 - RNA, 17 nt, Human
gggcaugcuggggcaag

SEQ ID NO: 2139662 - RNA, 13 nt, Human
gggcaucaugcau

SEQ ID NO: 2139663 - RNA, 15 nt, Human
gggcagucuggaggg

SEQ ID NO: 2139664 - RNA, 14 nt, Human
gggcaguggaggug

SEQ ID NO: 2139665 - RNA, 14 nt, Human
gggcagucuggagg

SEQ ID NO: 2139666 - RNA, 17 nt, Human
gggcagucuggaggggc

SEQ ID NO: 2139667 - RNA, 12 nt, Human
gggcccugagcu

SEQ ID NO: 2139668 - RNA, 18 nt, Human
gggccccuuuuuacuccc

SEQ ID NO: 2139669 - RNA, 16 nt, Human
gggcccgccuggcaga

SEQ ID NO: 2139670 - RNA, 20 nt, Human
gggcccgccuggcagaacug

SEQ ID NO: 2139671 - RNA, 13 nt, Human
gggcccugagcuc

SEQ ID NO: 2139672 - RNA, 22 nt, Human
gggcccugagcucgguggaccc

SEQ ID NO: 2139673 - RNA, 23 nt, Human
gggcccgccuggcagaacugagc

SEQ ID NO: 2139674 - RNA, 15 nt, Human
gggcccugcagaggg

SEQ ID NO: 2139675 - RNA, 18 nt, Human
gggccaagccagggaugg

SEQ ID NO: 2139676 - RNA, 18 nt, Human
gggccccagaaggcaggg

SEQ ID NO: 2139677 - RNA, 15 nt, Human
gggccccaccaccua

SEQ ID NO: 2139678 - RNA, 22 nt, Human
gggccccaaacgggcugcccug

SEQ ID NO: 2139679 - RNA, 13 nt, Human
gggcccaggcagg

SEQ ID NO: 2139680 - RNA, 10 nt, Human
gggccccucc

SEQ ID NO: 2139681 - RNA, 18 nt, Human
gggccccucccuaccuca

SEQ ID NO: 2139682 - RNA, 19 nt, Human
gggccccucccuaccucaa

SEQ ID NO: 2139683 - RNA, 20 nt, Human
gggccccucccuaccucaac

SEQ ID NO: 2139684 - RNA, 14 nt, Human
gggcagggcaugac

SEQ ID NO: 2139685 - RNA, 20 nt, Human
gggcagggcaucuccugugc

SEQ ID NO: 2139686 - RNA, 17 nt, Human
gggcagguugguggggg

SEQ ID NO: 2139687 - RNA, 13 nt, Human
gggcaggugggag

SEQ ID NO: 2139688 - RNA, 17 nt, Human
gggcaggugggagcuug

SEQ ID NO: 2139689 - RNA, 16 nt, Human
gggcacugguggcccg

SEQ ID NO: 2139690 - RNA, 13 nt, Human
gggcacugguggc

SEQ ID NO: 2139691 - RNA, 18 nt, Human
gggcacgcugugggcagg

SEQ ID NO: 2139692 - RNA, 17 nt, Human
gggcacgcugugggcag

SEQ ID NO: 2139693 - RNA, 18 nt, Human
gggcaccuggggaguggg

SEQ ID NO: 2139694 - RNA, 20 nt, Human
gggcacucagaagacacuga

SEQ ID NO: 2139695 - RNA, 20 nt, Human
gggcacuuuaaaugaagcua

SEQ ID NO: 2139696 - RNA, 15 nt, Human
gggcagaaaguggcc

SEQ ID NO: 2139697 - RNA, 22 nt, Human
gggcagaacagccgcuccuguc

SEQ ID NO: 2139698 - RNA, 17 nt, Human
gggcaccaagcccacag

SEQ ID NO: 2139699 - RNA, 13 nt, Human
gggcacagggucu

SEQ ID NO: 2139700 - RNA, 16 nt, Human
gggcacagggucucua

SEQ ID NO: 2139701 - RNA, 18 nt, Human
gggcaccuauaauaccag

SEQ ID NO: 2139702 - RNA, 19 nt, Human
gggcaccuauagucccagc

SEQ ID NO: 2139703 - RNA, 19 nt, Human
gggcacucagaagacacug

SEQ ID NO: 2139704 - RNA, 16 nt, Human
gggcacucagaagaca

SEQ ID NO: 2139705 - RNA, 23 nt, Human
gggcacaccgggcacucagaaga

SEQ ID NO: 2139706 - RNA, 21 nt, Human
gggcaauauaaccaauguuua

SEQ ID NO: 2139707 - RNA, 14 nt, Human
gggagugagcuggu

SEQ ID NO: 2139708 - RNA, 11 nt, Human
gggagugagcu

SEQ ID NO: 2139709 - RNA, 18 nt, Human
gggagugacagaggcagc

SEQ ID NO: 2139710 - RNA, 14 nt, Human
gggagguggcuggg

SEQ ID NO: 2139711 - RNA, 21 nt, Human
gggagugggacagagucuggg

SEQ ID NO: 2139712 - RNA, 20 nt, Human
gggaguucgagaccaaccug

SEQ ID NO: 2139713 - RNA, 22 nt, Human
gggaguugucaagucucugcug

SEQ ID NO: 2139714 - RNA, 16 nt, Human
gggaggugaccccagg

SEQ ID NO: 2139715 - RNA, 16 nt, Human
gggaggucgagguagg

SEQ ID NO: 2139716 - RNA, 16 nt, Human
gggacucagcccugag

SEQ ID NO: 2139717 - RNA, 17 nt, Human
gggacucagcccugagg

SEQ ID NO: 2139718 - RNA, 17 nt, Human
gggacuaaaugcccugc

SEQ ID NO: 2139719 - RNA, 18 nt, Human
gggacuagccuggcuugg

SEQ ID NO: 2139720 - RNA, 16 nt, Human
gggacucacuggcagc

SEQ ID NO: 2139721 - RNA, 18 nt, Human
gggacucacuggcagccc

SEQ ID NO: 2139722 - RNA, 21 nt, Human
gggacucacuggcagccccag

SEQ ID NO: 2139723 - RNA, 23 nt, Human
gggacucacuggcagccccagca

SEQ ID NO: 2139724 - RNA, 13 nt, Human
gggauagagagag

SEQ ID NO: 2139725 - RNA, 23 nt, Human
gggaguucgagaccaaccugacc

SEQ ID NO: 2139726 - RNA, 21 nt, Human
gggauaugauuuaaaucagcc

SEQ ID NO: 2139727 - RNA, 16 nt, Human
gggauagcacugagca

SEQ ID NO: 2139728 - RNA, 19 nt, Human
gggauagucaccuuuuaaa

SEQ ID NO: 2139729 - RNA, 14 nt, Human
gggaucacagggcc

SEQ ID NO: 2139730 - RNA, 20 nt, Human
gggcaacccccagccugcua

SEQ ID NO: 2139731 - RNA, 13 nt, Human
gggcaaggagacc

SEQ ID NO: 2139732 - RNA, 17 nt, Human
gggaucugugcccagag

SEQ ID NO: 2139733 - RNA, 14 nt, Human
gggcaacgaagaaa

SEQ ID NO: 2139734 - RNA, 15 nt, Human
gggcaacgaagaaaa

SEQ ID NO: 2139735 - RNA, 17 nt, Human
gggcaacgaagaaaaaa

SEQ ID NO: 2139736 - RNA, 23 nt, Human
gggcaacgaagaaaaaaaauaac

SEQ ID NO: 2139737 - RNA, 24 nt, Human
gggcaagucccugacucucuguga

SEQ ID NO: 2139738 - RNA, 23 nt, Human
ggcuugcaaguauguuuuagcau

SEQ ID NO: 2139739 - RNA, 15 nt, Human
ggcuugucagagcug

SEQ ID NO: 2139740 - RNA, 16 nt, Human
ggcuugucagagcugg

SEQ ID NO: 2139741 - RNA, 17 nt, Human
ggcuugucagagcuggg

SEQ ID NO: 2139742 - RNA, 21 nt, Human
ggcuucaauuuauugcacaaa

SEQ ID NO: 2139743 - RNA, 17 nt, Human
ggcuuguaacuccacca

SEQ ID NO: 2139744 - RNA, 18 nt, Human
ggcuuguaacuccaccaa

SEQ ID NO: 2139745 - RNA, 15 nt, Human
ggcuuggggcuuccu

SEQ ID NO: 2139746 - RNA, 21 nt, Human
ggcuugguggcucacgccugu

SEQ ID NO: 2139747 - RNA, 15 nt, Human
ggcuuguaacuccac

SEQ ID NO: 2139748 - RNA, 16 nt, Human
ggcuuucaugaggagg

SEQ ID NO: 2139749 - RNA, 20 nt, Human
ggcuuucaugaggaggcaga

SEQ ID NO: 2139750 - RNA, 17 nt, Human
ggcuuuucacugcuggc

SEQ ID NO: 2139751 - RNA, 15 nt, Human
ggcuuuucacugcug

SEQ ID NO: 2139752 - RNA, 13 nt, Human
ggcuuuucacugc

SEQ ID NO: 2139753 - RNA, 14 nt, Human
ggcuuuucacugcu

SEQ ID NO: 2139754 - RNA, 22 nt, Human
ggcuuuucacugcuggcugccu

SEQ ID NO: 2139755 - RNA, 19 nt, Human
ggcuuuucacugcuggcug

SEQ ID NO: 2139756 - RNA, 12 nt, Human
ggcugggcuuca

SEQ ID NO: 2139757 - RNA, 14 nt, Human
ggcugggcccagag

SEQ ID NO: 2139758 - RNA, 15 nt, Human
ggcugggcccagagg

SEQ ID NO: 2139759 - RNA, 16 nt, Human
ggcugggcccagaggc

SEQ ID NO: 2139760 - RNA, 17 nt, Human
ggcugggcccagaggca

SEQ ID NO: 2139761 - RNA, 13 nt, Human
ggcugggcccaga

SEQ ID NO: 2139762 - RNA, 14 nt, Human
ggcugggcccagaa

SEQ ID NO: 2139763 - RNA, 17 nt, Human
ggcugggcuucaguggc

SEQ ID NO: 2139764 - RNA, 13 nt, Human
ggcugggcuucag

SEQ ID NO: 2139765 - RNA, 22 nt, Human
ggcuuacuacaugugggagcuu

SEQ ID NO: 2139766 - RNA, 17 nt, Human
ggcuuacacguggagga

SEQ ID NO: 2139767 - RNA, 13 nt, Human
ggcuuacacccac

SEQ ID NO: 2139768 - RNA, 16 nt, Human
gggacucaaugcacug

SEQ ID NO: 2139769 - RNA, 17 nt, Human
gggacuacaggcaccca

SEQ ID NO: 2139770 - RNA, 18 nt, Human
gggaccgguacagaaagg

SEQ ID NO: 2139771 - RNA, 18 nt, Human
gggacaaauuuaaaacaa

SEQ ID NO: 2139772 - RNA, 19 nt, Human
gggacaaauuuaaaacaaa

SEQ ID NO: 2139773 - RNA, 22 nt, Human
gggacaaauuuaaaacaaacaa

SEQ ID NO: 2139774 - RNA, 20 nt, Human
gggaauguauuauucugcag

SEQ ID NO: 2139775 - RNA, 22 nt, Human
gggaauugaggucugcucggcc

SEQ ID NO: 2139776 - RNA, 21 nt, Human
gggaauguauuauucugcagc

SEQ ID NO: 2139777 - RNA, 16 nt, Human
gggacccuuuccuucc

SEQ ID NO: 2139778 - RNA, 19 nt, Human
gggaaggccccacagacaa

SEQ ID NO: 2139779 - RNA, 13 nt, Human
gggaagggagagc

SEQ ID NO: 2139780 - RNA, 16 nt, Human
gggaagggagagcggg

SEQ ID NO: 2139781 - RNA, 15 nt, Human
gggaaggccaccugc

SEQ ID NO: 2139782 - RNA, 18 nt, Human
gggaaggccaccugcagg

SEQ ID NO: 2139783 - RNA, 12 nt, Human
ggcuuucuggag

SEQ ID NO: 2139784 - RNA, 14 nt, Human
gggaaguccccagg

SEQ ID NO: 2139785 - RNA, 12 nt, Human
gggaaggucacc

SEQ ID NO: 2139786 - RNA, 16 nt, Human
gggaauggcacagccc

SEQ ID NO: 2139787 - RNA, 22 nt, Human
gggaauggcacagcccaaagaa

SEQ ID NO: 2139788 - RNA, 18 nt, Human
ggcugcaaaggguaucag

SEQ ID NO: 2139789 - RNA, 23 nt, Human
ggcugcaaaggguaucaggugcu

SEQ ID NO: 2139790 - RNA, 22 nt, Human
ggcugcaaaggguaucaggugc

SEQ ID NO: 2139791 - RNA, 22 nt, Human
ggcugagucaugaucucccugc

SEQ ID NO: 2139792 - RNA, 23 nt, Human
ggcugagucaugaucucccugcc

SEQ ID NO: 2139793 - RNA, 13 nt, Human
ggcugaucucagg

SEQ ID NO: 2139794 - RNA, 14 nt, Human
ggcugaucucaggg

SEQ ID NO: 2139795 - RNA, 15 nt, Human
ggcugaucucaggga

SEQ ID NO: 2139796 - RNA, 19 nt, Human
ggcugaucucagggaagcc

SEQ ID NO: 2139797 - RNA, 22 nt, Human
ggcugaucucagggaagcccag

SEQ ID NO: 2139798 - RNA, 15 nt, Human
ggcugauggaguaaa

SEQ ID NO: 2139799 - RNA, 24 nt, Human
ggcugcaaaggguaucaggugcug

SEQ ID NO: 2139800 - RNA, 13 nt, Human
ggcugagguggga

SEQ ID NO: 2139801 - RNA, 15 nt, Human
ggcugaggugggagg

SEQ ID NO: 2139802 - RNA, 19 nt, Human
ggcugaggggcaacgaaga

SEQ ID NO: 2139803 - RNA, 15 nt, Human
ggcugagcccuggca

SEQ ID NO: 2139804 - RNA, 16 nt, Human
ggcugagcccuggcag

SEQ ID NO: 2139805 - RNA, 12 nt, Human
ggcugagcccug

SEQ ID NO: 2139806 - RNA, 13 nt, Human
ggcugagcccugg

SEQ ID NO: 2139807 - RNA, 14 nt, Human
ggcugagcccuggc

SEQ ID NO: 2139808 - RNA, 12 nt, Human
ggcugagacugg

SEQ ID NO: 2139809 - RNA, 13 nt, Human
ggcugagacugga

SEQ ID NO: 2139810 - RNA, 21 nt, Human
ggcugagacuggauacugccc

SEQ ID NO: 2139811 - RNA, 17 nt, Human
ggccccugcccggcugc

SEQ ID NO: 2139812 - RNA, 16 nt, Human
ggccccugcccggcug

SEQ ID NO: 2139813 - RNA, 20 nt, Human
ggccccugcccggcugcgga

SEQ ID NO: 2139814 - RNA, 13 nt, Human
ggcugcagggagu

SEQ ID NO: 2139815 - RNA, 12 nt, Human
ggcugcagggag

SEQ ID NO: 2139816 - RNA, 16 nt, Human
ggcugcugaccuccac

SEQ ID NO: 2139817 - RNA, 21 nt, Human
ggcugcugaccuccacagcuu

SEQ ID NO: 2139818 - RNA, 12 nt, Human
ggcugcuggagg

SEQ ID NO: 2139819 - RNA, 13 nt, Human
ggcugcuggagga

SEQ ID NO: 2139820 - RNA, 14 nt, Human
ggcugcuggaggaa

SEQ ID NO: 2139821 - RNA, 15 nt, Human
ggcugcuggaggaaa

SEQ ID NO: 2139822 - RNA, 16 nt, Human
ggcugcuggaggaaaa

SEQ ID NO: 2139823 - RNA, 15 nt, Human
ggcuggacguggugg

SEQ ID NO: 2139824 - RNA, 18 nt, Human
ggcugggccaagccaggg

SEQ ID NO: 2139825 - RNA, 22 nt, Human
ggcugggccaagccagggaugg

SEQ ID NO: 2139826 - RNA, 13 nt, Human
ggcugggcagcug

SEQ ID NO: 2139827 - RNA, 14 nt, Human
ggcugggcagcugu

SEQ ID NO: 2139828 - RNA, 19 nt, Human
ggaaaaaccacccccaaau

SEQ ID NO: 2139829 - RNA, 21 nt, Human
ggaaaaacaucugaaagccac

SEQ ID NO: 2139830 - RNA, 13 nt, Human
ggaaaaauagccu

SEQ ID NO: 2139831 - RNA, 12 nt, Human
ggaaaaaggaca

SEQ ID NO: 2139832 - RNA, 22 nt, Human
ggaaaaaggacaggcagaaaga

SEQ ID NO: 2139833 - RNA, 23 nt, Human
ggaaaaaggacaggcagaaagag

SEQ ID NO: 2139834 - RNA, 21 nt, Human
ggaaaaaguaucauggaaaua

SEQ ID NO: 2139835 - RNA, 22 nt, Human
ggaaaaccaagccguggcuucc

SEQ ID NO: 2139836 - RNA, 15 nt, Human
ggaaaaauagccugc

SEQ ID NO: 2139837 - RNA, 16 nt, Human
ggaaaacugacagagg

SEQ ID NO: 2139838 - RNA, 21 nt, Human
ggaaaacugagacucagacag

SEQ ID NO: 2139839 - RNA, 22 nt, Human
ggaaaaccagacuacuugggag

SEQ ID NO: 2139840 - RNA, 12 nt, Human
ggaaaaccagac

SEQ ID NO: 2139841 - RNA, 11 nt, Human
ggaaaaauauu

SEQ ID NO: 2139842 - RNA, 17 nt, Human
gcuuuuaacuucugaua

SEQ ID NO: 2139843 - RNA, 16 nt, Human
gcuuugggcugcccug

SEQ ID NO: 2139844 - RNA, 15 nt, Human
gcuuugggcugcccu

SEQ ID NO: 2139845 - RNA, 14 nt, Human
gcuuuuacuuaaac

SEQ ID NO: 2139846 - RNA, 14 nt, Human
gcuuuacaaaaaga

SEQ ID NO: 2139847 - RNA, 15 nt, Human
gcuuuacaaaaagac

SEQ ID NO: 2139848 - RNA, 16 nt, Human
gcuuuaauugugaauu

SEQ ID NO: 2139849 - RNA, 14 nt, Human
gcuuugggcugccc

SEQ ID NO: 2139850 - RNA, 18 nt, Human
gcuuuggacgcacacagc

SEQ ID NO: 2139851 - RNA, 19 nt, Human
gcuuuggacgcacacagcu

SEQ ID NO: 2139852 - RNA, 15 nt, Human
gcuuuauguaauaau

SEQ ID NO: 2139853 - RNA, 13 nt, Human
gcuuuauuuuuua

SEQ ID NO: 2139854 - RNA, 17 nt, Human
gcuuuauuuuuuaagua

SEQ ID NO: 2139855 - RNA, 13 nt, Human
gcuuggccagaag

SEQ ID NO: 2139856 - RNA, 13 nt, Human
gcuuggcagcuga

SEQ ID NO: 2139857 - RNA, 18 nt, Human
gcuuggccagaagggggc

SEQ ID NO: 2139858 - RNA, 19 nt, Human
gcuugcagugagccgagau

SEQ ID NO: 2139859 - RNA, 23 nt, Human
gcuugcauaauaagcuaaagagg

SEQ ID NO: 2139860 - RNA, 15 nt, Human
gcuugcauaauaagc

SEQ ID NO: 2139861 - RNA, 23 nt, Human
gcuugcaaguauguuuuagcaug

SEQ ID NO: 2139862 - RNA, 19 nt, Human
gcuugaguuuggggaaugc

SEQ ID NO: 2139863 - RNA, 20 nt, Human
gcuucuguaguacuccuuaa

SEQ ID NO: 2139864 - RNA, 22 nt, Human
gcuugaggguugggcugguguc

SEQ ID NO: 2139865 - RNA, 15 nt, Human
gcuugccacagcucu

SEQ ID NO: 2139866 - RNA, 17 nt, Human
gcuucucacugccaugc

SEQ ID NO: 2139867 - RNA, 14 nt, Human
gcuucucuacagac

SEQ ID NO: 2139868 - RNA, 20 nt, Human
gcuguucacccacagggcua

SEQ ID NO: 2139869 - RNA, 19 nt, Human
gcuucucugugaacgauuu

SEQ ID NO: 2139870 - RNA, 12 nt, Human
gcuucugggaag

SEQ ID NO: 2139871 - RNA, 23 nt, Human
gcuguguccuugcaccugcaucc

SEQ ID NO: 2139872 - RNA, 22 nt, Human
gcuguucacccacagggcuaag

SEQ ID NO: 2139873 - RNA, 17 nt, Human
ggaagcacagcuucauu

SEQ ID NO: 2139874 - RNA, 18 nt, Human
ggaagauuuuaaauucac

SEQ ID NO: 2139875 - RNA, 20 nt, Human
ggaagauuugcccauuuaca

SEQ ID NO: 2139876 - RNA, 22 nt, Human
ggaagcaaaaacgaaagcuggg

SEQ ID NO: 2139877 - RNA, 16 nt, Human
ggaagcacagaaaacu

SEQ ID NO: 2139878 - RNA, 19 nt, Human
ggaagcacagaaaacuaga

SEQ ID NO: 2139879 - RNA, 18 nt, Human
ggaagauaggcucugcac

SEQ ID NO: 2139880 - RNA, 17 nt, Human
ggaagauaggcucugca

SEQ ID NO: 2139881 - RNA, 21 nt, Human
ggaagauaggcucugcacaga

SEQ ID NO: 2139882 - RNA, 13 nt, Human
ggaagagccuugc

SEQ ID NO: 2139883 - RNA, 21 nt, Human
ggaagagcaggcacauggagg

SEQ ID NO: 2139884 - RNA, 15 nt, Human
ggaagagcaggcaca

SEQ ID NO: 2139885 - RNA, 14 nt, Human
ggaagagcaggcac

SEQ ID NO: 2139886 - RNA, 22 nt, Human
ggaacucauuccugccugucuc

SEQ ID NO: 2139887 - RNA, 15 nt, Human
ggaacuccuggaaau

SEQ ID NO: 2139888 - RNA, 19 nt, Human
ggaagcagugccuuccaua

SEQ ID NO: 2139889 - RNA, 20 nt, Human
ggaagcagugccuuccauaa

SEQ ID NO: 2139890 - RNA, 21 nt, Human
ggaagcagugccuuccauaau

SEQ ID NO: 2139891 - RNA, 12 nt, Human
ggaagcagugcc

SEQ ID NO: 2139892 - RNA, 11 nt, Human
ggaagcagugc

SEQ ID NO: 2139893 - RNA, 22 nt, Human
ggaagcaccccaugccaaagcu

SEQ ID NO: 2139894 - RNA, 13 nt, Human
ggaagcaccccau

SEQ ID NO: 2139895 - RNA, 15 nt, Human
ggaagcaccccaugc

SEQ ID NO: 2139896 - RNA, 20 nt, Human
ggaagcauauuguuauuaua

SEQ ID NO: 2139897 - RNA, 17 nt, Human
ggaagcauguaggagaa

SEQ ID NO: 2139898 - RNA, 20 nt, Human
ggaagcauguaggagaaucc

SEQ ID NO: 2139899 - RNA, 21 nt, Human
ggaagcauguaggagaaucca

SEQ ID NO: 2139900 - RNA, 20 nt, Human
ggaacagacuggaagcacag

SEQ ID NO: 2139901 - RNA, 19 nt, Human
ggaacagacuggaagcaca

SEQ ID NO: 2139902 - RNA, 19 nt, Human
ggaacagcuaugggagccc

SEQ ID NO: 2139903 - RNA, 20 nt, Human
ggaacagcuaugggagcccc

SEQ ID NO: 2139904 - RNA, 17 nt, Human
ggaaccgcaggaagcug

SEQ ID NO: 2139905 - RNA, 15 nt, Human
ggaaccgcaggaagc

SEQ ID NO: 2139906 - RNA, 16 nt, Human
ggaaccgcaggaagcu

SEQ ID NO: 2139907 - RNA, 18 nt, Human
ggaaccgcaggaagcugc

SEQ ID NO: 2139908 - RNA, 15 nt, Human
ggaaccgaaaggcca

SEQ ID NO: 2139909 - RNA, 16 nt, Human
ggaacgugacugcccc

SEQ ID NO: 2139910 - RNA, 23 nt, Human
ggaacuagacucccaagcuggac

SEQ ID NO: 2139911 - RNA, 15 nt, Human
ggaacguuggacuuu

SEQ ID NO: 2139912 - RNA, 17 nt, Human
ggaacgugacugcccca

SEQ ID NO: 2139913 - RNA, 18 nt, Human
ggaacuagacugccuggg

SEQ ID NO: 2139914 - RNA, 20 nt, Human
ggaacuagacugccuggguu

SEQ ID NO: 2139915 - RNA, 21 nt, Human
ggaacuagagggauacacuga

SEQ ID NO: 2139916 - RNA, 22 nt, Human
ggaacuagagggauacacugaa

SEQ ID NO: 2139917 - RNA, 21 nt, Human
ggaacucauuccugccugucu

SEQ ID NO: 2139918 - RNA, 15 nt, Human
ggaacucccaagaac

SEQ ID NO: 2139919 - RNA, 23 nt, Human
ggaacucccaagaacagcaggcc

SEQ ID NO: 2139920 - RNA, 18 nt, Human
ggaacgggguccuucaag

SEQ ID NO: 2139921 - RNA, 20 nt, Human
ggaacgguaaauuucugugg

SEQ ID NO: 2139922 - RNA, 13 nt, Human
ggaaagugaauuu

SEQ ID NO: 2139923 - RNA, 14 nt, Human
ggaaagugaauuug

SEQ ID NO: 2139924 - RNA, 18 nt, Human
ggaaagugaauuugaaug

SEQ ID NO: 2139925 - RNA, 19 nt, Human
ggaaagugaauuugaauga

SEQ ID NO: 2139926 - RNA, 22 nt, Human
ggaaagugaauuugaaugaaaa

SEQ ID NO: 2139927 - RNA, 15 nt, Human
ggaaaaucagccugc

SEQ ID NO: 2139928 - RNA, 20 nt, Human
ggaaagggugcugcuucccu

SEQ ID NO: 2139929 - RNA, 15 nt, Human
ggaaagggugcugcu

SEQ ID NO: 2139930 - RNA, 14 nt, Human
ggaaaagaauacag

SEQ ID NO: 2139931 - RNA, 18 nt, Human
ggaaaagaauacagaaag

SEQ ID NO: 2139932 - RNA, 22 nt, Human
ggaaaagagcgcaucaggccug

SEQ ID NO: 2139933 - RNA, 14 nt, Human
ggaaaauaaauuau

SEQ ID NO: 2139934 - RNA, 22 nt, Human
ggaaauauuaugcaaauuccca

SEQ ID NO: 2139935 - RNA, 17 nt, Human
ggaacagacuggaagca

SEQ ID NO: 2139936 - RNA, 16 nt, Human
gcuggauuacaggcau

SEQ ID NO: 2139937 - RNA, 15 nt, Human
gcuggcaaagacaga

SEQ ID NO: 2139938 - RNA, 19 nt, Human
gcuggcaaagacagaagcc

SEQ ID NO: 2139939 - RNA, 23 nt, Human
gcuggcacauuuccccagaccug

SEQ ID NO: 2139940 - RNA, 11 nt, Human
gcuggccccuc

SEQ ID NO: 2139941 - RNA, 12 nt, Human
gcuggccccuca

SEQ ID NO: 2139942 - RNA, 14 nt, Human
gcuggccccucacc

SEQ ID NO: 2139943 - RNA, 19 nt, Human
gcuggccccucaccugggc

SEQ ID NO: 2139944 - RNA, 23 nt, Human
gcuggccccucaccugggcaccu

SEQ ID NO: 2139945 - RNA, 12 nt, Human
gcuggcccccac

SEQ ID NO: 2139946 - RNA, 14 nt, Human
gcuggcccccacug

SEQ ID NO: 2139947 - RNA, 15 nt, Human
gcuggcccccacugg

SEQ ID NO: 2139948 - RNA, 17 nt, Human
gcuggcccccacuggcu

SEQ ID NO: 2139949 - RNA, 19 nt, Human
gcuggcccccacuggcugu

SEQ ID NO: 2139950 - RNA, 20 nt, Human
gcuggcccccacuggcugug

SEQ ID NO: 2139951 - RNA, 21 nt, Human
gcuggcccccacuggcugugg

SEQ ID NO: 2139952 - RNA, 22 nt, Human
gcuggcccccacuggcuguggg

SEQ ID NO: 2139953 - RNA, 24 nt, Human
gcuggcccccacuggcugugggcu

SEQ ID NO: 2139954 - RNA, 22 nt, Human
gcuggaccuugaacuggguacu

SEQ ID NO: 2139955 - RNA, 21 nt, Human
gcuggaccuugaacuggguac

SEQ ID NO: 2139956 - RNA, 23 nt, Human
gcugcuuggaccucgugcuuuaa

SEQ ID NO: 2139957 - RNA, 21 nt, Human
gcuggaugcuccuuccaacag

SEQ ID NO: 2139958 - RNA, 22 nt, Human
gcuggaugcuccuuccaacagg

SEQ ID NO: 2139959 - RNA, 18 nt, Human
gcuggaccuugaacuggg

SEQ ID NO: 2139960 - RNA, 21 nt, Human
gcugcuucuuaaccccaguaa

SEQ ID NO: 2139961 - RNA, 16 nt, Human
gcuggaccuugaacug

SEQ ID NO: 2139962 - RNA, 20 nt, Human
gcugggacuacaggcaccca

SEQ ID NO: 2139963 - RNA, 19 nt, Human
gcugggacuacaggcaccc

SEQ ID NO: 2139964 - RNA, 18 nt, Human
gcugggacuacaggcacc

SEQ ID NO: 2139965 - RNA, 13 nt, Human
gcugggacuacag

SEQ ID NO: 2139966 - RNA, 19 nt, Human
gcugggacuacagguguga

SEQ ID NO: 2139967 - RNA, 14 nt, Human
gcugggacuggcca

SEQ ID NO: 2139968 - RNA, 20 nt, Human
gcuggccccucaccugggca

SEQ ID NO: 2139969 - RNA, 15 nt, Human
gcuggccgggcacag

SEQ ID NO: 2139970 - RNA, 17 nt, Human
gcuggccgggcacagcu

SEQ ID NO: 2139971 - RNA, 18 nt, Human
gcuggccgggcacagcug

SEQ ID NO: 2139972 - RNA, 19 nt, Human
gcuggccgggcacagcugu

SEQ ID NO: 2139973 - RNA, 21 nt, Human
gcuggccgggcacagcugugg

SEQ ID NO: 2139974 - RNA, 12 nt, Human
gcuggccucaga

SEQ ID NO: 2139975 - RNA, 13 nt, Human
gcuggccucagac

SEQ ID NO: 2139976 - RNA, 16 nt, Human
gcuggccucagacuca

SEQ ID NO: 2139977 - RNA, 16 nt, Human
gcugccgaccagagcc

SEQ ID NO: 2139978 - RNA, 17 nt, Human
gcugccgaccagagccc

SEQ ID NO: 2139979 - RNA, 23 nt, Human
gcugcccuggugcugccacacuu

SEQ ID NO: 2139980 - RNA, 16 nt, Human
gcugcgguccacccag

SEQ ID NO: 2139981 - RNA, 15 nt, Human
gcugcgauacuggca

SEQ ID NO: 2139982 - RNA, 20 nt, Human
gcugccuuuagucgcugagg

SEQ ID NO: 2139983 - RNA, 14 nt, Human
gcugccgcacccca

SEQ ID NO: 2139984 - RNA, 21 nt, Human
gcuagaggccagccccaccca

SEQ ID NO: 2139985 - RNA, 18 nt, Human
gcuagaggaagcagccaa

SEQ ID NO: 2139986 - RNA, 18 nt, Human
gcuagaggccagccccac

SEQ ID NO: 2139987 - RNA, 19 nt, Human
gcuagaggccagccccacc

SEQ ID NO: 2139988 - RNA, 20 nt, Human
gcuagaggccagccccaccc

SEQ ID NO: 2139989 - RNA, 17 nt, Human
gcuagcaaaagaaguaa

SEQ ID NO: 2139990 - RNA, 22 nt, Human
gcuagcaaaagaaguaacaaga

SEQ ID NO: 2139991 - RNA, 22 nt, Human
gcugcccuggugcugccacacu

SEQ ID NO: 2139992 - RNA, 20 nt, Human
gcugcccuggugcugccaca

SEQ ID NO: 2139993 - RNA, 19 nt, Human
gcugcccuggugcugccac

SEQ ID NO: 2139994 - RNA, 18 nt, Human
gcugcccuggugcugcca

SEQ ID NO: 2139995 - RNA, 22 nt, Human
gcuagcagcagggagggcuucu

SEQ ID NO: 2139996 - RNA, 17 nt, Human
gcuagcacuuggagcca

SEQ ID NO: 2139997 - RNA, 23 nt, Human
gcuagcagaaaucuagaagacug

SEQ ID NO: 2139998 - RNA, 18 nt, Human
gcugcgguccacccagga

SEQ ID NO: 2139999 - RNA, 17 nt, Human
gcugcgguccacccagg

SEQ ID NO: 2140000 - RNA, 19 nt, Human
gcugcgguccacccaggag

SEQ ID NO: 2140001 - RNA, 19 nt, Human
gcugcuagcacuuggagcc

SEQ ID NO: 2140002 - RNA, 20 nt, Human
gcugcuguggccaucaaccu

SEQ ID NO: 2140003 - RNA, 20 nt, Human
gcugcuagcacuuggagcca

SEQ ID NO: 2140004 - RNA, 23 nt, Human
gcugcuagcacuuggagccaagg

SEQ ID NO: 2140005 - RNA, 12 nt, Human
gcugcuucccuc

SEQ ID NO: 2140006 - RNA, 14 nt, Human
gcugcuucccucug

SEQ ID NO: 2140007 - RNA, 15 nt, Human
gcugcuucccucugc

SEQ ID NO: 2140008 - RNA, 20 nt, Human
gcugcuucccucugccuguc

SEQ ID NO: 2140009 - RNA, 21 nt, Human
gcugcuucccucugccugucc

SEQ ID NO: 2140010 - RNA, 22 nt, Human
gcugcuucccucugccuguccc

SEQ ID NO: 2140011 - RNA, 23 nt, Human
gcugcuucccucugccugucccu

SEQ ID NO: 2140012 - RNA, 20 nt, Human
gcuggucccacucaguccau

SEQ ID NO: 2140013 - RNA, 22 nt, Human
gcugggagaagggggucaaagc

SEQ ID NO: 2140014 - RNA, 18 nt, Human
gcuggugucaccugaaga

SEQ ID NO: 2140015 - RNA, 16 nt, Human
gcuggugucaccugaa

SEQ ID NO: 2140016 - RNA, 17 nt, Human
gcugguggcuaauggug

SEQ ID NO: 2140017 - RNA, 21 nt, Human
gcuggugggaagcgucugucc

SEQ ID NO: 2140018 - RNA, 13 nt, Human
gcuggugggcacc

SEQ ID NO: 2140019 - RNA, 15 nt, Human
gcuggugggcaccaa

SEQ ID NO: 2140020 - RNA, 19 nt, Human
gcuggugggcaccaagagc

SEQ ID NO: 2140021 - RNA, 21 nt, Human
gcuggugggcaccaagagcca

SEQ ID NO: 2140022 - RNA, 19 nt, Human
gcuggugggugaaagaaau

SEQ ID NO: 2140023 - RNA, 22 nt, Human
gcugguucaggguuggccccug

SEQ ID NO: 2140024 - RNA, 15 nt, Human
gcugguucaggguug

SEQ ID NO: 2140025 - RNA, 16 nt, Human
gcugugguuccugggg

SEQ ID NO: 2140026 - RNA, 13 nt, Human
gcugugguuuucu

SEQ ID NO: 2140027 - RNA, 14 nt, Human
gcugugguuuucuu

SEQ ID NO: 2140028 - RNA, 15 nt, Human
gcugugguuuucuuu

SEQ ID NO: 2140029 - RNA, 23 nt, Human
gcugugguuuucuuuugccauga

SEQ ID NO: 2140030 - RNA, 22 nt, Human
gcugugguuuucuuuugccaug

SEQ ID NO: 2140031 - RNA, 17 nt, Human
gcuguguccaacuccag

SEQ ID NO: 2140032 - RNA, 18 nt, Human
gcuguguccaacuccagu

SEQ ID NO: 2140033 - RNA, 19 nt, Human
gcuguguccaacuccagua

SEQ ID NO: 2140034 - RNA, 14 nt, Human
gcuguguccuugca

SEQ ID NO: 2140035 - RNA, 18 nt, Human
gcuguguccuugcaccug

SEQ ID NO: 2140036 - RNA, 19 nt, Human
gcuguguccuugcaccugc

SEQ ID NO: 2140037 - RNA, 20 nt, Human
gcuguguccuugcaccugca

SEQ ID NO: 2140038 - RNA, 21 nt, Human
gcuguguccuugcaccugcau

SEQ ID NO: 2140039 - RNA, 20 nt, Human
gcugucuucucaggcucugc

SEQ ID NO: 2140040 - RNA, 22 nt, Human
gcugucuucucaggcucugccc

SEQ ID NO: 2140041 - RNA, 17 nt, Human
gcugucuccauguuuga

SEQ ID NO: 2140042 - RNA, 15 nt, Human
gcugucccugucacc

SEQ ID NO: 2140043 - RNA, 18 nt, Human
gcugucccugucaccaag

SEQ ID NO: 2140044 - RNA, 14 nt, Human
gcugucccugucac

SEQ ID NO: 2140045 - RNA, 17 nt, Human
gcugggcuucaguggca

SEQ ID NO: 2140046 - RNA, 15 nt, Human
gcugggagcucugca

SEQ ID NO: 2140047 - RNA, 16 nt, Human
gcugggagcucugcag

SEQ ID NO: 2140048 - RNA, 15 nt, Human
gcugggacuggccag

SEQ ID NO: 2140049 - RNA, 16 nt, Human
gcugggacuggccagg

SEQ ID NO: 2140050 - RNA, 20 nt, Human
gcugggggcagccugcgugg

SEQ ID NO: 2140051 - RNA, 21 nt, Human
gcugggggcagccugcguggc

SEQ ID NO: 2140052 - RNA, 22 nt, Human
gcugggggcagccugcguggcu

SEQ ID NO: 2140053 - RNA, 13 nt, Human
gcugggggcagga

SEQ ID NO: 2140054 - RNA, 20 nt, Human
gcugggggcaggagggcccu

SEQ ID NO: 2140055 - RNA, 23 nt, Human
gcugggggcaggagggcccuacc

SEQ ID NO: 2140056 - RNA, 16 nt, Human
gcugggggccaugagc

SEQ ID NO: 2140057 - RNA, 23 nt, Human
gcugggggccaugagcuccagac

SEQ ID NO: 2140058 - RNA, 20 nt, Human
gcugggggccucagugccac

SEQ ID NO: 2140059 - RNA, 19 nt, Human
gcugggggccucagugcca

SEQ ID NO: 2140060 - RNA, 19 nt, Human
gcuggucccacucagucca

SEQ ID NO: 2140061 - RNA, 15 nt, Human
gcuggucccacucag

SEQ ID NO: 2140062 - RNA, 13 nt, Human
gcugggggccuca

SEQ ID NO: 2140063 - RNA, 19 nt, Human
gcugggcuucaguggcagc

SEQ ID NO: 2140064 - RNA, 18 nt, Human
gcugggcuucaguggcag

SEQ ID NO: 2140065 - RNA, 23 nt, Human
gcugggggaagaagcucucuccu

SEQ ID NO: 2140066 - RNA, 12 nt, Human
ggccaaguucuu

SEQ ID NO: 2140067 - RNA, 14 nt, Human
ggccaccugccccc

SEQ ID NO: 2140068 - RNA, 22 nt, Human
ggccaccugcccccuucuccca

SEQ ID NO: 2140069 - RNA, 23 nt, Human
ggcauguucucugaggacacuaa

SEQ ID NO: 2140070 - RNA, 16 nt, Human
ggcagugcagcaacca

SEQ ID NO: 2140071 - RNA, 21 nt, Human
ggcagugcagcaaccagagca

SEQ ID NO: 2140072 - RNA, 22 nt, Human
ggcagugcagcaaccagagcac

SEQ ID NO: 2140073 - RNA, 18 nt, Human
ggcagugaugcuggaugc

SEQ ID NO: 2140074 - RNA, 17 nt, Human
ggcagugcgggaggaau

SEQ ID NO: 2140075 - RNA, 15 nt, Human
ggcagguuggugggg

SEQ ID NO: 2140076 - RNA, 12 nt, Human
ggcaggugggag

SEQ ID NO: 2140077 - RNA, 16 nt, Human
ggcaggugggagcuug

SEQ ID NO: 2140078 - RNA, 17 nt, Human
ggcaggugggagcuuga

SEQ ID NO: 2140079 - RNA, 13 nt, Human
ggcagucuggagg

SEQ ID NO: 2140080 - RNA, 14 nt, Human
ggcagucuggaggg

SEQ ID NO: 2140081 - RNA, 16 nt, Human
ggcagucuggaggggc

SEQ ID NO: 2140082 - RNA, 21 nt, Human
ggcagucuggaggggcauggc

SEQ ID NO: 2140083 - RNA, 11 nt, Human
ggccacuguga

SEQ ID NO: 2140084 - RNA, 22 nt, Human
ggccacucugccucugccugca

SEQ ID NO: 2140085 - RNA, 23 nt, Human
ggccaccugcccccuucucccac

SEQ ID NO: 2140086 - RNA, 16 nt, Human
ggccacucugccucug

SEQ ID NO: 2140087 - RNA, 20 nt, Human
ggccacucugccucugccug

SEQ ID NO: 2140088 - RNA, 21 nt, Human
ggccacucugccucugccugc

SEQ ID NO: 2140089 - RNA, 23 nt, Human
ggccaggaguuuaagaccagccu

SEQ ID NO: 2140090 - RNA, 19 nt, Human
ggccaggaguuugagacca

SEQ ID NO: 2140091 - RNA, 13 nt, Human
ggccaggagcucu

SEQ ID NO: 2140092 - RNA, 16 nt, Human
ggccacugugaagaga

SEQ ID NO: 2140093 - RNA, 11 nt, Human
ggccaggcugg

SEQ ID NO: 2140094 - RNA, 16 nt, Human
ggccaggccagaggga

SEQ ID NO: 2140095 - RNA, 14 nt, Human
ggccaggccagagg

SEQ ID NO: 2140096 - RNA, 22 nt, Human
ggccaggcagaucugugcccca

SEQ ID NO: 2140097 - RNA, 16 nt, Human
ggccaggauggagggg

SEQ ID NO: 2140098 - RNA, 15 nt, Human
ggccaggcagaucug

SEQ ID NO: 2140099 - RNA, 15 nt, Human
ggccaggagcucuuc

SEQ ID NO: 2140100 - RNA, 20 nt, Human
ggccaggaguuugagaccag

SEQ ID NO: 2140101 - RNA, 12 nt, Human
ggcccccacugg

SEQ ID NO: 2140102 - RNA, 16 nt, Human
ggcccccacuggcugu

SEQ ID NO: 2140103 - RNA, 17 nt, Human
ggcccccacuggcugug

SEQ ID NO: 2140104 - RNA, 18 nt, Human
ggcccccacuggcugugg

SEQ ID NO: 2140105 - RNA, 13 nt, Human
ggccaugggccuc

SEQ ID NO: 2140106 - RNA, 13 nt, Human
ggccauggcagaa

SEQ ID NO: 2140107 - RNA, 12 nt, Human
ggccaggcuggu

SEQ ID NO: 2140108 - RNA, 21 nt, Human
ggccccgcuuguccagcgccu

SEQ ID NO: 2140109 - RNA, 19 nt, Human
ggccccgcuuguccagcgc

SEQ ID NO: 2140110 - RNA, 15 nt, Human
ggcccccagcugugg

SEQ ID NO: 2140111 - RNA, 12 nt, Human
ggcccccagcug

SEQ ID NO: 2140112 - RNA, 13 nt, Human
ggcccccgagcug

SEQ ID NO: 2140113 - RNA, 15 nt, Human
ggcccccgagcuggg

SEQ ID NO: 2140114 - RNA, 12 nt, Human
ggccccugccac

SEQ ID NO: 2140115 - RNA, 16 nt, Human
ggccccugccacccug

SEQ ID NO: 2140116 - RNA, 13 nt, Human
ggccccugccacc

SEQ ID NO: 2140117 - RNA, 13 nt, Human
ggccccugcccgg

SEQ ID NO: 2140118 - RNA, 18 nt, Human
ggccccugccacccuggg

SEQ ID NO: 2140119 - RNA, 17 nt, Human
ggccccugccacccugg

SEQ ID NO: 2140120 - RNA, 14 nt, Human
ggccccucccuacc

SEQ ID NO: 2140121 - RNA, 16 nt, Human
ggccccucccuaccuc

SEQ ID NO: 2140122 - RNA, 17 nt, Human
ggccccucccuaccuca

SEQ ID NO: 2140123 - RNA, 20 nt, Human
ggccccucccuaccucaacc

SEQ ID NO: 2140124 - RNA, 21 nt, Human
ggccccucccuaccucaaccu

SEQ ID NO: 2140125 - RNA, 24 nt, Human
ggccccucugacucccaaagagcu

SEQ ID NO: 2140126 - RNA, 22 nt, Human
ggcaccuauagucccagcuacu

SEQ ID NO: 2140127 - RNA, 23 nt, Human
ggcaccuccuacgucaaacauga

SEQ ID NO: 2140128 - RNA, 17 nt, Human
ggcaccuauaaaacagg

SEQ ID NO: 2140129 - RNA, 18 nt, Human
ggagugaggcaggugaca

SEQ ID NO: 2140130 - RNA, 18 nt, Human
ggcaccuauagucccagc

SEQ ID NO: 2140131 - RNA, 19 nt, Human
ggcaccuauagucccagcu

SEQ ID NO: 2140132 - RNA, 16 nt, Human
ggcacccggccccugc

SEQ ID NO: 2140133 - RNA, 15 nt, Human
ggcacccggccccug

SEQ ID NO: 2140134 - RNA, 17 nt, Human
ggcacccggccccugcu

SEQ ID NO: 2140135 - RNA, 23 nt, Human
ggcaagucccugacucucuguga

SEQ ID NO: 2140136 - RNA, 15 nt, Human
ggcaaggggugccug

SEQ ID NO: 2140137 - RNA, 17 nt, Human
ggcaaggggugccuggg

SEQ ID NO: 2140138 - RNA, 22 nt, Human
ggcaagucccugacucucugug

SEQ ID NO: 2140139 - RNA, 19 nt, Human
ggcaacccccagccugcua

SEQ ID NO: 2140140 - RNA, 21 nt, Human
ggaucagucugauucccaagc

SEQ ID NO: 2140141 - RNA, 16 nt, Human
ggcaacgcacaaaaca

SEQ ID NO: 2140142 - RNA, 15 nt, Human
ggcaacgaagaaaaa

SEQ ID NO: 2140143 - RNA, 16 nt, Human
ggcaacgaagaaaaaa

SEQ ID NO: 2140144 - RNA, 17 nt, Human
ggcaacgaagaaaaaaa

SEQ ID NO: 2140145 - RNA, 20 nt, Human
ggcaacgaagaaaaaaaaua

SEQ ID NO: 2140146 - RNA, 15 nt, Human
ggcaaccuugucucu

SEQ ID NO: 2140147 - RNA, 19 nt, Human
ggcaaccuugucucuaugc

SEQ ID NO: 2140148 - RNA, 18 nt, Human
ggcaacugcauuggcuuu

SEQ ID NO: 2140149 - RNA, 14 nt, Human
ggcaacugaacaaa

SEQ ID NO: 2140150 - RNA, 16 nt, Human
ggcaacugaacaaaaa

SEQ ID NO: 2140151 - RNA, 19 nt, Human
ggcaacugaacaaaaaaau

SEQ ID NO: 2140152 - RNA, 13 nt, Human
ggcaacugaggca

SEQ ID NO: 2140153 - RNA, 14 nt, Human
ggcaacugaggcag

SEQ ID NO: 2140154 - RNA, 15 nt, Human
ggcaacugaggcaga

SEQ ID NO: 2140155 - RNA, 23 nt, Human
ggcaacuugggaacuagacuccc

SEQ ID NO: 2140156 - RNA, 18 nt, Human
ggcaacuugggaacuaga

SEQ ID NO: 2140157 - RNA, 19 nt, Human
ggcaacugcauuggcuuug

SEQ ID NO: 2140158 - RNA, 19 nt, Human
ggcaacugaggcagacagc

SEQ ID NO: 2140159 - RNA, 20 nt, Human
ggcaacugaggcagacagca

SEQ ID NO: 2140160 - RNA, 23 nt, Human
ggcaacugaggcagacagcagcu

SEQ ID NO: 2140161 - RNA, 13 nt, Human
ggcaacugcugau

SEQ ID NO: 2140162 - RNA, 22 nt, Human
ggcaacugcugaugcucauggu

SEQ ID NO: 2140163 - RNA, 23 nt, Human
ggcagauacaggaaaagcugcug

SEQ ID NO: 2140164 - RNA, 15 nt, Human
ggcagauaaucagcc

SEQ ID NO: 2140165 - RNA, 18 nt, Human
ggcagauaaucagccucu

SEQ ID NO: 2140166 - RNA, 19 nt, Human
ggcagauaaucagccucuu

SEQ ID NO: 2140167 - RNA, 20 nt, Human
ggcagauaaucagccucuua

SEQ ID NO: 2140168 - RNA, 12 nt, Human
ggcagaggcugg

SEQ ID NO: 2140169 - RNA, 13 nt, Human
ggcagaggcugga

SEQ ID NO: 2140170 - RNA, 19 nt, Human
ggcagaggcuggaggcagg

SEQ ID NO: 2140171 - RNA, 21 nt, Human
ggcagcacagagacccccgga

SEQ ID NO: 2140172 - RNA, 14 nt, Human
ggcagcacagagac

SEQ ID NO: 2140173 - RNA, 24 nt, Human
ggcagauuuagugaaagcuagaga

SEQ ID NO: 2140174 - RNA, 20 nt, Human
ggcagaucugugccccaugc

SEQ ID NO: 2140175 - RNA, 16 nt, Human
ggcagauuuuacaaaa

SEQ ID NO: 2140176 - RNA, 21 nt, Human
ggcagauuuuacaaaagaugu

SEQ ID NO: 2140177 - RNA, 13 nt, Human
ggcagauugaaaa

SEQ ID NO: 2140178 - RNA, 18 nt, Human
ggcagaucaccagagguc

SEQ ID NO: 2140179 - RNA, 15 nt, Human
ggcagaucugugccc

SEQ ID NO: 2140180 - RNA, 16 nt, Human
ggcagaucugugcccc

SEQ ID NO: 2140181 - RNA, 17 nt, Human
ggcagaucugugcccca

SEQ ID NO: 2140182 - RNA, 18 nt, Human
ggcagaucugugccccau

SEQ ID NO: 2140183 - RNA, 14 nt, Human
ggcaggaaggcuga

SEQ ID NO: 2140184 - RNA, 23 nt, Human
ggcaggaaggagagccugcugca

SEQ ID NO: 2140185 - RNA, 13 nt, Human
ggcagguccaggg

SEQ ID NO: 2140186 - RNA, 15 nt, Human
ggcaggaaggagagc

SEQ ID NO: 2140187 - RNA, 16 nt, Human
ggcaggaaggagagcc

SEQ ID NO: 2140188 - RNA, 23 nt, Human
ggcaggucuugaacuccuggccu

SEQ ID NO: 2140189 - RNA, 16 nt, Human
ggcaggugacagugag

SEQ ID NO: 2140190 - RNA, 17 nt, Human
ggcaggugacagugagg

SEQ ID NO: 2140191 - RNA, 19 nt, Human
ggcaggugacagugagguc

SEQ ID NO: 2140192 - RNA, 21 nt, Human
ggcaggugacagugagguccu

SEQ ID NO: 2140193 - RNA, 16 nt, Human
ggcaggugaccuucug

SEQ ID NO: 2140194 - RNA, 19 nt, Human
ggcagcugcgguccaccca

SEQ ID NO: 2140195 - RNA, 21 nt, Human
ggcagcuugaggguugggcug

SEQ ID NO: 2140196 - RNA, 20 nt, Human
ggagauggaaguugcaguga

SEQ ID NO: 2140197 - RNA, 20 nt, Human
ggagagggucuggagaagca

SEQ ID NO: 2140198 - RNA, 21 nt, Human
ggagagggucuggagaagcag

SEQ ID NO: 2140199 - RNA, 14 nt, Human
ggagagggucugga

SEQ ID NO: 2140200 - RNA, 17 nt, Human
ggagagggucuggagaa

SEQ ID NO: 2140201 - RNA, 18 nt, Human
ggagagggucuggagaag

SEQ ID NO: 2140202 - RNA, 15 nt, Human
ggagaggggcacagg

SEQ ID NO: 2140203 - RNA, 24 nt, Human
ggagagggaugaggugcugggagg

SEQ ID NO: 2140204 - RNA, 14 nt, Human
ggagaggggcagaa

SEQ ID NO: 2140205 - RNA, 17 nt, Human
ggagauuggacggccug

SEQ ID NO: 2140206 - RNA, 14 nt, Human
ggagauucagacug

SEQ ID NO: 2140207 - RNA, 18 nt, Human
ggagaugggccuuuugga

SEQ ID NO: 2140208 - RNA, 13 nt, Human
ggagauggggaga

SEQ ID NO: 2140209 - RNA, 16 nt, Human
ggagauggggagaaac

SEQ ID NO: 2140210 - RNA, 17 nt, Human
ggagauggggagaaacc

SEQ ID NO: 2140211 - RNA, 13 nt, Human
ggagauguaagag

SEQ ID NO: 2140212 - RNA, 14 nt, Human
ggagauguaagagc

SEQ ID NO: 2140213 - RNA, 16 nt, Human
ggagauguagcaaaac

SEQ ID NO: 2140214 - RNA, 20 nt, Human
ggagcccgcacccccacccu

SEQ ID NO: 2140215 - RNA, 21 nt, Human
ggagcccgcacccccacccuu

SEQ ID NO: 2140216 - RNA, 21 nt, Human
ggagcccgaggcaccaguguc

SEQ ID NO: 2140217 - RNA, 14 nt, Human
ggagcccgcacccc

SEQ ID NO: 2140218 - RNA, 16 nt, Human
ggagcccgcaccccca

SEQ ID NO: 2140219 - RNA, 18 nt, Human
ggagcccgcacccccacc

SEQ ID NO: 2140220 - RNA, 20 nt, Human
ggagcaaaaucgaugcagug

SEQ ID NO: 2140221 - RNA, 17 nt, Human
ggagagcuagcagcagg

SEQ ID NO: 2140222 - RNA, 21 nt, Human
ggagagcuagcagcagggagg

SEQ ID NO: 2140223 - RNA, 10 nt, Human
ggagacuaga

SEQ ID NO: 2140224 - RNA, 14 nt, Human
ggagagggaugagg

SEQ ID NO: 2140225 - RNA, 21 nt, Human
ggagagggaugaggugcuggg

SEQ ID NO: 2140226 - RNA, 19 nt, Human
ggagagggacagcccacug

SEQ ID NO: 2140227 - RNA, 22 nt, Human
ggagagggacagcccacugaga

SEQ ID NO: 2140228 - RNA, 15 nt, Human
ggagagcuggugccc

SEQ ID NO: 2140229 - RNA, 17 nt, Human
ggagagcuggugcccgg

SEQ ID NO: 2140230 - RNA, 18 nt, Human
ggagagcuggugcccgga

SEQ ID NO: 2140231 - RNA, 23 nt, Human
ggagagggaaacgugcccucugu

SEQ ID NO: 2140232 - RNA, 22 nt, Human
ggagacuagauuuaugaauaca

SEQ ID NO: 2140233 - RNA, 14 nt, Human
ggagacuagauugc

SEQ ID NO: 2140234 - RNA, 19 nt, Human
ggagacuagauugccuuug

SEQ ID NO: 2140235 - RNA, 20 nt, Human
ggacugucuuucagauacau

SEQ ID NO: 2140236 - RNA, 19 nt, Human
ggacugguggccccugccu

SEQ ID NO: 2140237 - RNA, 13 nt, Human
ggacuguacacac

SEQ ID NO: 2140238 - RNA, 19 nt, Human
ggacuguacacacuuuauu

SEQ ID NO: 2140239 - RNA, 22 nt, Human
ggacuguacacacuuuauuuac

SEQ ID NO: 2140240 - RNA, 18 nt, Human
ggacugccccgugcagac

SEQ ID NO: 2140241 - RNA, 21 nt, Human
ggacugccagucccccugccc

SEQ ID NO: 2140242 - RNA, 21 nt, Human
ggacugccccgugcagacugg

SEQ ID NO: 2140243 - RNA, 20 nt, Human
ggacuggguugcguccugac

SEQ ID NO: 2140244 - RNA, 10 nt, Human
ggacugcaug

SEQ ID NO: 2140245 - RNA, 19 nt, Human
ggacugcaugguaauuuau

SEQ ID NO: 2140246 - RNA, 11 nt, Human
ggacucugccu

SEQ ID NO: 2140247 - RNA, 11 nt, Human
ggacucucccc

SEQ ID NO: 2140248 - RNA, 21 nt, Human
ggacucugaggcucuuucugg

SEQ ID NO: 2140249 - RNA, 11 nt, Human
ggacucugagg

SEQ ID NO: 2140250 - RNA, 13 nt, Human
ggacucugaggcu

SEQ ID NO: 2140251 - RNA, 12 nt, Human
ggacuccucugu

SEQ ID NO: 2140252 - RNA, 14 nt, Human
ggacuccucugucc

SEQ ID NO: 2140253 - RNA, 15 nt, Human
ggacuccucugucca

SEQ ID NO: 2140254 - RNA, 15 nt, Human
ggaccuuaucugugc

SEQ ID NO: 2140255 - RNA, 22 nt, Human
ggaccuuaucugugcgugaaac

SEQ ID NO: 2140256 - RNA, 12 nt, Human
ggaccucugggc

SEQ ID NO: 2140257 - RNA, 14 nt, Human
ggaccucugggcuu

SEQ ID NO: 2140258 - RNA, 14 nt, Human
ggaaggagagccug

SEQ ID NO: 2140259 - RNA, 15 nt, Human
ggaaggagagccugc

SEQ ID NO: 2140260 - RNA, 16 nt, Human
ggaaggagagccugcu

SEQ ID NO: 2140261 - RNA, 17 nt, Human
ggaaggagagccugcug

SEQ ID NO: 2140262 - RNA, 21 nt, Human
ggaagccacccucccagcucu

SEQ ID NO: 2140263 - RNA, 22 nt, Human
ggaagccacccucccagcucug

SEQ ID NO: 2140264 - RNA, 23 nt, Human
ggaagccacccucccagcucuga

SEQ ID NO: 2140265 - RNA, 14 nt, Human
ggaccaggacagga

SEQ ID NO: 2140266 - RNA, 13 nt, Human
ggaaggagggagg

SEQ ID NO: 2140267 - RNA, 20 nt, Human
ggaaggaggguuagggaggg

SEQ ID NO: 2140268 - RNA, 16 nt, Human
ggaccucgugcuuuaa

SEQ ID NO: 2140269 - RNA, 19 nt, Human
ggacccaucacgccugugc

SEQ ID NO: 2140270 - RNA, 17 nt, Human
ggaccaggacucccucc

SEQ ID NO: 2140271 - RNA, 17 nt, Human
ggaccaggacaggacca

SEQ ID NO: 2140272 - RNA, 15 nt, Human
ggaccaggacucccu

SEQ ID NO: 2140273 - RNA, 14 nt, Human
ggacccagggauga

SEQ ID NO: 2140274 - RNA, 21 nt, Human
ggaggacugccccgugcagac

SEQ ID NO: 2140275 - RNA, 11 nt, Human
ggaggagagcc

SEQ ID NO: 2140276 - RNA, 14 nt, Human
ggaggagagccugg

SEQ ID NO: 2140277 - RNA, 15 nt, Human
ggaggagagccuggu

SEQ ID NO: 2140278 - RNA, 21 nt, Human
ggagccgagaucacgccacug

SEQ ID NO: 2140279 - RNA, 13 nt, Human
ggagcccuugggu

SEQ ID NO: 2140280 - RNA, 13 nt, Human
ggaggaggaggca

SEQ ID NO: 2140281 - RNA, 14 nt, Human
ggaggaggaggcaa

SEQ ID NO: 2140282 - RNA, 17 nt, Human
ggaggagcuugggggau

SEQ ID NO: 2140283 - RNA, 19 nt, Human
ggaggagggcggggggcac

SEQ ID NO: 2140284 - RNA, 20 nt, Human
ggaggagguggcagcccugu

SEQ ID NO: 2140285 - RNA, 23 nt, Human
ggaggagguuuaggucaagaaga

SEQ ID NO: 2140286 - RNA, 16 nt, Human
ggaggaucacuggagc

SEQ ID NO: 2140287 - RNA, 17 nt, Human
ggaggaucacuggagcc

SEQ ID NO: 2140288 - RNA, 19 nt, Human
ggaggaucacuggagccca

SEQ ID NO: 2140289 - RNA, 20 nt, Human
ggaggaucacuggagcccag

SEQ ID NO: 2140290 - RNA, 21 nt, Human
ggaggaucacuggagcccagg

SEQ ID NO: 2140291 - RNA, 15 nt, Human
ggaggauguucuggg

SEQ ID NO: 2140292 - RNA, 14 nt, Human
ggaggauggagaga

SEQ ID NO: 2140293 - RNA, 21 nt, Human
ggaggauggagagaggggaau

SEQ ID NO: 2140294 - RNA, 15 nt, Human
ggagggaauugaggu

SEQ ID NO: 2140295 - RNA, 17 nt, Human
ggagggaauugaggucu

SEQ ID NO: 2140296 - RNA, 19 nt, Human
ggagggaauugaggucugc

SEQ ID NO: 2140297 - RNA, 23 nt, Human
ggaggaucacuugaguccagaag

SEQ ID NO: 2140298 - RNA, 17 nt, Human
ggaggaucucuugagcc

SEQ ID NO: 2140299 - RNA, 21 nt, Human
ggaggaucucuugagccuggg

SEQ ID NO: 2140300 - RNA, 20 nt, Human
ggaggaucuuuugaacccag

SEQ ID NO: 2140301 - RNA, 12 nt, Human
ggaggauggaga

SEQ ID NO: 2140302 - RNA, 13 nt, Human
ggaggauggagag

SEQ ID NO: 2140303 - RNA, 22 nt, Human
ggaggaucacuggagcccagga

SEQ ID NO: 2140304 - RNA, 13 nt, Human
ggagggagaugga

SEQ ID NO: 2140305 - RNA, 14 nt, Human
ggagugagcugguu

SEQ ID NO: 2140306 - RNA, 12 nt, Human
ggagugagcugg

SEQ ID NO: 2140307 - RNA, 21 nt, Human
ggagugacagaggcagcccca

SEQ ID NO: 2140308 - RNA, 19 nt, Human
ggagugacagaggcagccc

SEQ ID NO: 2140309 - RNA, 18 nt, Human
ggagugacagaggcagcc

SEQ ID NO: 2140310 - RNA, 17 nt, Human
ggagugacagaggcagc

SEQ ID NO: 2140311 - RNA, 16 nt, Human
ggaucacagccucuga

SEQ ID NO: 2140312 - RNA, 13 nt, Human
ggaucacagggcc

SEQ ID NO: 2140313 - RNA, 14 nt, Human
ggaucacagggccc

SEQ ID NO: 2140314 - RNA, 17 nt, Human
ggaucacagggccccag

SEQ ID NO: 2140315 - RNA, 13 nt, Human
ggaucacuggagc

SEQ ID NO: 2140316 - RNA, 17 nt, Human
ggaucagaacagcagag

SEQ ID NO: 2140317 - RNA, 17 nt, Human
ggaucacuugagcccag

SEQ ID NO: 2140318 - RNA, 22 nt, Human
ggaucagaaagaguucaguaag

SEQ ID NO: 2140319 - RNA, 12 nt, Human
ggaucagaaagu

SEQ ID NO: 2140320 - RNA, 16 nt, Human
ggaucagaacagcaga

SEQ ID NO: 2140321 - RNA, 14 nt, Human
ggaucacuggagcc

SEQ ID NO: 2140322 - RNA, 17 nt, Human
ggaucacuggagcccag

SEQ ID NO: 2140323 - RNA, 18 nt, Human
ggaucacuggagcccagg

SEQ ID NO: 2140324 - RNA, 19 nt, Human
ggaucacuggagcccagga

SEQ ID NO: 2140325 - RNA, 21 nt, Human
ggagugaguguggcuccccuc

SEQ ID NO: 2140326 - RNA, 16 nt, Human
ggagucccaaggaaag

SEQ ID NO: 2140327 - RNA, 17 nt, Human
ggagucccaaggaaagc

SEQ ID NO: 2140328 - RNA, 17 nt, Human
ggagucaucucaaccau

SEQ ID NO: 2140329 - RNA, 23 nt, Human
ggagucaucucaaccauccccuc

SEQ ID NO: 2140330 - RNA, 13 nt, Human
ggaggggacgcug

SEQ ID NO: 2140331 - RNA, 20 nt, Human
ggaggggacuauuuaugaag

SEQ ID NO: 2140332 - RNA, 21 nt, Human
ggaggggacuauuuaugaagg

SEQ ID NO: 2140333 - RNA, 21 nt, Human
ggagucccaccuuggcugcag

SEQ ID NO: 2140334 - RNA, 20 nt, Human
ggagucccaccuuggcugca

SEQ ID NO: 2140335 - RNA, 16 nt, Human
ggagucccgucaggac

SEQ ID NO: 2140336 - RNA, 14 nt, Human
ggagucugaagcag

SEQ ID NO: 2140337 - RNA, 15 nt, Human
ggagucugaagcaga

SEQ ID NO: 2140338 - RNA, 16 nt, Human
ggagugacagaggcag

SEQ ID NO: 2140339 - RNA, 11 nt, Human
ggagugacaga

SEQ ID NO: 2140340 - RNA, 17 nt, Human
uauaaauuuuuuuuguu

SEQ ID NO: 2140341 - RNA, 21 nt, Human
uauaaauuuuuuuuguuucau

SEQ ID NO: 2140342 - RNA, 20 nt, Human
uauaaaucaaugucacuuaa

SEQ ID NO: 2140343 - RNA, 16 nt, Human
uauaaaucaaugucac

SEQ ID NO: 2140344 - RNA, 20 nt, Human
uauaaugaaugaaacauuuu

SEQ ID NO: 2140345 - RNA, 18 nt, Human
uauaaugaaugaaacauu

SEQ ID NO: 2140346 - RNA, 15 nt, Human
uauaaaucaauguca

SEQ ID NO: 2140347 - RNA, 14 nt, Human
uaguuuuaguugca

SEQ ID NO: 2140348 - RNA, 16 nt, Human
uaguuuuaguugcaga

SEQ ID NO: 2140349 - RNA, 17 nt, Human
uaguuuuaguugcagaa

SEQ ID NO: 2140350 - RNA, 13 nt, Human
uauaauucccuau

SEQ ID NO: 2140351 - RNA, 20 nt, Human
uauaccccgugaagcaucca

SEQ ID NO: 2140352 - RNA, 21 nt, Human
uauaccccgugaagcauccag

SEQ ID NO: 2140353 - RNA, 22 nt, Human
uauaccccgugaagcauccagg

SEQ ID NO: 2140354 - RNA, 19 nt, Human
uauaccccuuacuuagcau

SEQ ID NO: 2140355 - RNA, 22 nt, Human
uauaccccuuacuuagcaugca

SEQ ID NO: 2140356 - RNA, 15 nt, Human
uauaaugguugacug

SEQ ID NO: 2140357 - RNA, 15 nt, Human
uauaaugcuggagcg

SEQ ID NO: 2140358 - RNA, 14 nt, Human
uauaauguaagcuc

SEQ ID NO: 2140359 - RNA, 19 nt, Human
uauaauguaagcucuacug

SEQ ID NO: 2140360 - RNA, 20 nt, Human
uauaauguaagcucuacuga

SEQ ID NO: 2140361 - RNA, 17 nt, Human
uauaauucuacuuugag

SEQ ID NO: 2140362 - RNA, 18 nt, Human
uagugaugguuccccugu

SEQ ID NO: 2140363 - RNA, 14 nt, Human
uagugaugguuccc

SEQ ID NO: 2140364 - RNA, 21 nt, Human
uagugcuuaaaaaucauugau

SEQ ID NO: 2140365 - RNA, 19 nt, Human
uagugcugaagcuuauuaa

SEQ ID NO: 2140366 - RNA, 17 nt, Human
uagugcugaagcuuauu

SEQ ID NO: 2140367 - RNA, 18 nt, Human
uagugcugaagcuuauua

SEQ ID NO: 2140368 - RNA, 22 nt, Human
uagugcugaagcuuauuaaugc

SEQ ID NO: 2140369 - RNA, 12 nt, Human
uagugcugaagc

SEQ ID NO: 2140370 - RNA, 14 nt, Human
uagugcugaagcuu

SEQ ID NO: 2140371 - RNA, 15 nt, Human
uagugcugaagcuua

SEQ ID NO: 2140372 - RNA, 15 nt, Human
uagucaagauugugu

SEQ ID NO: 2140373 - RNA, 13 nt, Human
uagugaugguucc

SEQ ID NO: 2140374 - RNA, 16 nt, Human
uaggcgggaaggaggg

SEQ ID NO: 2140375 - RNA, 16 nt, Human
uaggcgugagaagcau

SEQ ID NO: 2140376 - RNA, 14 nt, Human
uaguguaggcuuua

SEQ ID NO: 2140377 - RNA, 15 nt, Human
uaguguaggcuuuac

SEQ ID NO: 2140378 - RNA, 18 nt, Human
uaguguaggcuuuacuua

SEQ ID NO: 2140379 - RNA, 21 nt, Human
uaguguaggcuuuacuuagcu

SEQ ID NO: 2140380 - RNA, 23 nt, Human
uaguguaggcuuuacuuagcuua

SEQ ID NO: 2140381 - RNA, 16 nt, Human
uaguugcuccgccucu

SEQ ID NO: 2140382 - RNA, 17 nt, Human
uagugucacuuaccuag

SEQ ID NO: 2140383 - RNA, 15 nt, Human
uaguugcuccgccuc

SEQ ID NO: 2140384 - RNA, 13 nt, Human
uagugguggcucu

SEQ ID NO: 2140385 - RNA, 17 nt, Human
uagugguggcucugaga

SEQ ID NO: 2140386 - RNA, 14 nt, Human
uagugguguuuuaa

SEQ ID NO: 2140387 - RNA, 22 nt, Human
uagugguguuuuaaagagaaug

SEQ ID NO: 2140388 - RNA, 18 nt, Human
uagugguucuuggaaaaa

SEQ ID NO: 2140389 - RNA, 13 nt, Human
uaguguaaaaaug

SEQ ID NO: 2140390 - RNA, 14 nt, Human
uaguguaaaaauga

SEQ ID NO: 2140391 - RNA, 16 nt, Human
uaguguaaaaaugaga

SEQ ID NO: 2140392 - RNA, 17 nt, Human
uaguguaaaaaugagaa

SEQ ID NO: 2140393 - RNA, 18 nt, Human
uaguguaaaaaugagaac

SEQ ID NO: 2140394 - RNA, 22 nt, Human
uaguguaaaaaugagaacaugu

SEQ ID NO: 2140395 - RNA, 15 nt, Human
uaguggauguucuga

SEQ ID NO: 2140396 - RNA, 12 nt, Human
uaguuugcaguu

SEQ ID NO: 2140397 - RNA, 18 nt, Human
uaguuuauacaguuuuaa

SEQ ID NO: 2140398 - RNA, 21 nt, Human
uaguuuauacaguuuuaaaga

SEQ ID NO: 2140399 - RNA, 18 nt, Human
uaguuguguacucuggcc

SEQ ID NO: 2140400 - RNA, 15 nt, Human
uaguuuacuauuuua

SEQ ID NO: 2140401 - RNA, 22 nt, Human
uauccugcuucugauaugcagu

SEQ ID NO: 2140402 - RNA, 17 nt, Human
uauccuggcuuugccca

SEQ ID NO: 2140403 - RNA, 19 nt, Human
uauccuggcuuugcccaac

SEQ ID NO: 2140404 - RNA, 21 nt, Human
uauccuggcuuugcccaaccu

SEQ ID NO: 2140405 - RNA, 21 nt, Human
uaucaugucaaacgugaaaau

SEQ ID NO: 2140406 - RNA, 18 nt, Human
uauccugccaaaaucauu

SEQ ID NO: 2140407 - RNA, 10 nt, Human
uauccugccc

SEQ ID NO: 2140408 - RNA, 15 nt, Human
uauccugcccagugu

SEQ ID NO: 2140409 - RNA, 16 nt, Human
uauccugcccaguguu

SEQ ID NO: 2140410 - RNA, 17 nt, Human
uaucgccuuuugacagc

SEQ ID NO: 2140411 - RNA, 16 nt, Human
uaucgaucucuuauuu

SEQ ID NO: 2140412 - RNA, 16 nt, Human
uaucggagacagugau

SEQ ID NO: 2140413 - RNA, 14 nt, Human
uaucggaagcagug

SEQ ID NO: 2140414 - RNA, 15 nt, Human
uaucggaagcagugc

SEQ ID NO: 2140415 - RNA, 15 nt, Human
uaucuaaauguugaa

SEQ ID NO: 2140416 - RNA, 16 nt, Human
uaucgggaacaguguu

SEQ ID NO: 2140417 - RNA, 14 nt, Human
uaucgggaacagug

SEQ ID NO: 2140418 - RNA, 22 nt, Human
uaucucuuuugaauccaugcuu

SEQ ID NO: 2140419 - RNA, 16 nt, Human
uaucaugucaaacgug

SEQ ID NO: 2140420 - RNA, 15 nt, Human
uaucaguuacucagc

SEQ ID NO: 2140421 - RNA, 20 nt, Human
uaucagugacagaguucacu

SEQ ID NO: 2140422 - RNA, 22 nt, Human
uaucagugacagaguucacuau

SEQ ID NO: 2140423 - RNA, 15 nt, Human
uaucagugacagagu

SEQ ID NO: 2140424 - RNA, 16 nt, Human
uaucagugacagaguu

SEQ ID NO: 2140425 - RNA, 17 nt, Human
uaucagugacagaguuc

SEQ ID NO: 2140426 - RNA, 21 nt, Human
uaucaguuacucagcccuggg

SEQ ID NO: 2140427 - RNA, 16 nt, Human
uaucaguuacucagcc

SEQ ID NO: 2140428 - RNA, 17 nt, Human
uaucaguuacucagccc

SEQ ID NO: 2140429 - RNA, 18 nt, Human
uaucaguuacucagcccu

SEQ ID NO: 2140430 - RNA, 19 nt, Human
uaucaguuacucagcccug

SEQ ID NO: 2140431 - RNA, 20 nt, Human
uaucaguuacucagcccugg

SEQ ID NO: 2140432 - RNA, 21 nt, Human
uaucaguugagcuucauauac

SEQ ID NO: 2140433 - RNA, 19 nt, Human
uauauuuuuuaauuugaug

SEQ ID NO: 2140434 - RNA, 22 nt, Human
uauauuuuuuaauuugaugaaa

SEQ ID NO: 2140435 - RNA, 17 nt, Human
uaucaggugcugccauc

SEQ ID NO: 2140436 - RNA, 15 nt, Human
uauauuuuuguuugu

SEQ ID NO: 2140437 - RNA, 16 nt, Human
uauauuuuuguuuguu

SEQ ID NO: 2140438 - RNA, 17 nt, Human
uauauuuuuguuuguuu

SEQ ID NO: 2140439 - RNA, 20 nt, Human
uauauuuuuguuuguuuugu

SEQ ID NO: 2140440 - RNA, 21 nt, Human
uauauuuuuguuuguuuugug

SEQ ID NO: 2140441 - RNA, 15 nt, Human
uauauuuuucacagu

SEQ ID NO: 2140442 - RNA, 21 nt, Human
uauauuuuauacauuaacuuc

SEQ ID NO: 2140443 - RNA, 15 nt, Human
uauauguauccagua

SEQ ID NO: 2140444 - RNA, 11 nt, Human
uauauguaugu

SEQ ID NO: 2140445 - RNA, 12 nt, Human
uauauguaugua

SEQ ID NO: 2140446 - RNA, 16 nt, Human
uauauguauguaaaaa

SEQ ID NO: 2140447 - RNA, 12 nt, Human
uauauguaugug

SEQ ID NO: 2140448 - RNA, 16 nt, Human
uauauuucacuauuuu

SEQ ID NO: 2140449 - RNA, 14 nt, Human
uauauuuuaauuug

SEQ ID NO: 2140450 - RNA, 20 nt, Human
uauaugcucugcauguuaca

SEQ ID NO: 2140451 - RNA, 15 nt, Human
uauauacauauauau

SEQ ID NO: 2140452 - RNA, 22 nt, Human
uauauacaauaacauaauuugu

SEQ ID NO: 2140453 - RNA, 18 nt, Human
uauauacacacacaaaga

SEQ ID NO: 2140454 - RNA, 21 nt, Human
uauauacacacacaaagagag

SEQ ID NO: 2140455 - RNA, 22 nt, Human
uauauacacacacaaagagagu

SEQ ID NO: 2140456 - RNA, 16 nt, Human
uauacuguacuuaaua

SEQ ID NO: 2140457 - RNA, 22 nt, Human
uauauaauuuuuuuauguuuug

SEQ ID NO: 2140458 - RNA, 16 nt, Human
uauauacaauaacaua

SEQ ID NO: 2140459 - RNA, 17 nt, Human
uauauacaauaacauaa

SEQ ID NO: 2140460 - RNA, 14 nt, Human
uauauaauaaagua

SEQ ID NO: 2140461 - RNA, 14 nt, Human
uauauaauuauguu

SEQ ID NO: 2140462 - RNA, 17 nt, Human
uauauaauuauguuauu

SEQ ID NO: 2140463 - RNA, 22 nt, Human
uauauaauuacauauuugcaua

SEQ ID NO: 2140464 - RNA, 23 nt, Human
uagcagagaaugaaagggcccag

SEQ ID NO: 2140465 - RNA, 19 nt, Human
uagcagagaaugaaagggc

SEQ ID NO: 2140466 - RNA, 20 nt, Human
uagcagauuuuaauuuugaa

SEQ ID NO: 2140467 - RNA, 14 nt, Human
uagcagauuuuaau

SEQ ID NO: 2140468 - RNA, 20 nt, Human
uagcagaaucaaaaugaccu

SEQ ID NO: 2140469 - RNA, 18 nt, Human
uagcagauuuuaauuuug

SEQ ID NO: 2140470 - RNA, 17 nt, Human
uagcagguaccacugau

SEQ ID NO: 2140471 - RNA, 16 nt, Human
uagcacuuugggaggc

SEQ ID NO: 2140472 - RNA, 16 nt, Human
uagauugcuucuguag

SEQ ID NO: 2140473 - RNA, 16 nt, Human
uagauuguuaaaauaa

SEQ ID NO: 2140474 - RNA, 18 nt, Human
uagauuaagagauggguu

SEQ ID NO: 2140475 - RNA, 20 nt, Human
uagauucuacauauucuuua

SEQ ID NO: 2140476 - RNA, 13 nt, Human
uagauaacucuuu

SEQ ID NO: 2140477 - RNA, 14 nt, Human
uagauaacucuuug

SEQ ID NO: 2140478 - RNA, 15 nt, Human
uagauaacucuuugg

SEQ ID NO: 2140479 - RNA, 16 nt, Human
uagauaacucuuugga

SEQ ID NO: 2140480 - RNA, 15 nt, Human
uagauaaacucagaa

SEQ ID NO: 2140481 - RNA, 12 nt, Human
uagauguauaua

SEQ ID NO: 2140482 - RNA, 20 nt, Human
uagauguagauaaacucaga

SEQ ID NO: 2140483 - RNA, 14 nt, Human
uagaugguuacacu

SEQ ID NO: 2140484 - RNA, 16 nt, Human
uagaugguuacacugu

SEQ ID NO: 2140485 - RNA, 17 nt, Human
uagaugguuacacuguu

SEQ ID NO: 2140486 - RNA, 18 nt, Human
uagaugguuacacuguua

SEQ ID NO: 2140487 - RNA, 20 nt, Human
uagaugguuacacuguuaga

SEQ ID NO: 2140488 - RNA, 21 nt, Human
uagaugguuacacuguuagaa

SEQ ID NO: 2140489 - RNA, 19 nt, Human
uagaugguuugagccugag

SEQ ID NO: 2140490 - RNA, 21 nt, Human
uagaugucuuuaggcagcagc

SEQ ID NO: 2140491 - RNA, 22 nt, Human
uagaugugcauuuuugugaaau

SEQ ID NO: 2140492 - RNA, 23 nt, Human
uagauguagauaaacucagaaau

SEQ ID NO: 2140493 - RNA, 18 nt, Human
uagaugucccuuucuugg

SEQ ID NO: 2140494 - RNA, 21 nt, Human
uagaugucccuuucuuggcca

SEQ ID NO: 2140495 - RNA, 22 nt, Human
uagaugucccuuucuuggccag

SEQ ID NO: 2140496 - RNA, 23 nt, Human
uagaugucccuuucuuggccagu

SEQ ID NO: 2140497 - RNA, 15 nt, Human
uagacuugaaauacu

SEQ ID NO: 2140498 - RNA, 18 nt, Human
uagacuugugcugaucgu

SEQ ID NO: 2140499 - RNA, 17 nt, Human
uagacuuuagaaauaaa

SEQ ID NO: 2140500 - RNA, 18 nt, Human
uagacuuuagaaauaaau

SEQ ID NO: 2140501 - RNA, 19 nt, Human
uagacuuuagaaauaaaug

SEQ ID NO: 2140502 - RNA, 19 nt, Human
uagagaaaccguccucuuu

SEQ ID NO: 2140503 - RNA, 21 nt, Human
uagagaaaccguccucuuuuu

SEQ ID NO: 2140504 - RNA, 22 nt, Human
uagagaaaccguccucuuuuuc

SEQ ID NO: 2140505 - RNA, 17 nt, Human
uagacugccuggguucc

SEQ ID NO: 2140506 - RNA, 21 nt, Human
uagaccucagccugugcugcc

SEQ ID NO: 2140507 - RNA, 22 nt, Human
uagaccucagccugugcugccc

SEQ ID NO: 2140508 - RNA, 14 nt, Human
uagaccucagccug

SEQ ID NO: 2140509 - RNA, 15 nt, Human
uagaccucagccugu

SEQ ID NO: 2140510 - RNA, 16 nt, Human
uagaccucagccugug

SEQ ID NO: 2140511 - RNA, 20 nt, Human
uagaccucagccugugcugc

SEQ ID NO: 2140512 - RNA, 19 nt, Human
uagaccuagggaggaccuu

SEQ ID NO: 2140513 - RNA, 22 nt, Human
uagaccuagggaggaccuuauc

SEQ ID NO: 2140514 - RNA, 11 nt, Human
uagaccucagc

SEQ ID NO: 2140515 - RNA, 12 nt, Human
uagaccucagcc

SEQ ID NO: 2140516 - RNA, 13 nt, Human
uagaccucagccu

SEQ ID NO: 2140517 - RNA, 23 nt, Human
uagaaccaggcaacuugggaacu

SEQ ID NO: 2140518 - RNA, 16 nt, Human
uagaaccacuaugaag

SEQ ID NO: 2140519 - RNA, 12 nt, Human
uagaaccaggca

SEQ ID NO: 2140520 - RNA, 15 nt, Human
uagaaccacuaugaa

SEQ ID NO: 2140521 - RNA, 16 nt, Human
uagagagagaccacuu

SEQ ID NO: 2140522 - RNA, 14 nt, Human
uagagacuguagau

SEQ ID NO: 2140523 - RNA, 15 nt, Human
uagagacuguagauu

SEQ ID NO: 2140524 - RNA, 19 nt, Human
uagagacuguagauugcuu

SEQ ID NO: 2140525 - RNA, 16 nt, Human
uagacuugaggaaacc

SEQ ID NO: 2140526 - RNA, 14 nt, Human
uagagguuuuauga

SEQ ID NO: 2140527 - RNA, 21 nt, Human
uagagucaucuccaucagcug

SEQ ID NO: 2140528 - RNA, 22 nt, Human
uagagucaucuccaucagcugu

SEQ ID NO: 2140529 - RNA, 23 nt, Human
uagagucaucuccaucagcugua

SEQ ID NO: 2140530 - RNA, 19 nt, Human
uagaguccaacguggggca

SEQ ID NO: 2140531 - RNA, 22 nt, Human
uagaguccaacguggggcagca

SEQ ID NO: 2140532 - RNA, 14 nt, Human
uagaguauaugcac

SEQ ID NO: 2140533 - RNA, 13 nt, Human
uagagucagccuu

SEQ ID NO: 2140534 - RNA, 14 nt, Human
uagagucagccuuc

SEQ ID NO: 2140535 - RNA, 15 nt, Human
uagauaaaaagaugg

SEQ ID NO: 2140536 - RNA, 12 nt, Human
uagauaaacuca

SEQ ID NO: 2140537 - RNA, 17 nt, Human
uagccugccucuucucu

SEQ ID NO: 2140538 - RNA, 21 nt, Human
uagcuccccgcuucugccugc

SEQ ID NO: 2140539 - RNA, 20 nt, Human
uagccucgccgucugugaau

SEQ ID NO: 2140540 - RNA, 20 nt, Human
uagcuccacacccucuccca

SEQ ID NO: 2140541 - RNA, 21 nt, Human
uagcucuaggagggcuggcaa

SEQ ID NO: 2140542 - RNA, 20 nt, Human
uagcugggacuacaggcacc

SEQ ID NO: 2140543 - RNA, 23 nt, Human
uagcuggaauuuuuuauucuugu

SEQ ID NO: 2140544 - RNA, 18 nt, Human
uagcugggacuacaggug

SEQ ID NO: 2140545 - RNA, 13 nt, Human
uagcucuuuccuu

SEQ ID NO: 2140546 - RNA, 11 nt, Human
uagcugggacu

SEQ ID NO: 2140547 - RNA, 14 nt, Human
uagcccaaaaccaa

SEQ ID NO: 2140548 - RNA, 21 nt, Human
uagcauacauuuauaauguuu

SEQ ID NO: 2140549 - RNA, 13 nt, Human
uagcagugauuuu

SEQ ID NO: 2140550 - RNA, 15 nt, Human
uagcagugauuuuua

SEQ ID NO: 2140551 - RNA, 21 nt, Human
uagcagugauuuuuauccaau

SEQ ID NO: 2140552 - RNA, 15 nt, Human
uagcauacauuuaua

SEQ ID NO: 2140553 - RNA, 14 nt, Human
uagcaguucugcaa

SEQ ID NO: 2140554 - RNA, 16 nt, Human
uagcaguucugcaaau

SEQ ID NO: 2140555 - RNA, 17 nt, Human
uagcaguucugcaaaua

SEQ ID NO: 2140556 - RNA, 20 nt, Human
uagcaguucugcaaauagaa

SEQ ID NO: 2140557 - RNA, 16 nt, Human
uagcccuggccagagg

SEQ ID NO: 2140558 - RNA, 18 nt, Human
uagcccuggccagaggcu

SEQ ID NO: 2140559 - RNA, 13 nt, Human
uagccccauaauu

SEQ ID NO: 2140560 - RNA, 21 nt, Human
uagccccaacccaaaccugga

SEQ ID NO: 2140561 - RNA, 22 nt, Human
uagccccaacccaaaccuggag

SEQ ID NO: 2140562 - RNA, 18 nt, Human
uagccccaagaaggcugg

SEQ ID NO: 2140563 - RNA, 19 nt, Human
uagccccaagaaggcuggg

SEQ ID NO: 2140564 - RNA, 20 nt, Human
uagccccaagaaggcugggg

SEQ ID NO: 2140565 - RNA, 22 nt, Human
uagccccaagaaggcuggggcu

SEQ ID NO: 2140566 - RNA, 12 nt, Human
uagccucccuga

SEQ ID NO: 2140567 - RNA, 13 nt, Human
uagccucccugaa

SEQ ID NO: 2140568 - RNA, 14 nt, Human
uagccgaccucagc

SEQ ID NO: 2140569 - RNA, 15 nt, Human
uagccgaccucagcc

SEQ ID NO: 2140570 - RNA, 13 nt, Human
uagccgaccucag

SEQ ID NO: 2140571 - RNA, 22 nt, Human
uaggaaguguaacagcugaggu

SEQ ID NO: 2140572 - RNA, 18 nt, Human
uaggaaguguaacagcug

SEQ ID NO: 2140573 - RNA, 19 nt, Human
uaggaaguguaacagcuga

SEQ ID NO: 2140574 - RNA, 20 nt, Human
uaggaaguguaacagcugag

SEQ ID NO: 2140575 - RNA, 21 nt, Human
uaggaaguguaacagcugagg

SEQ ID NO: 2140576 - RNA, 17 nt, Human
uaggaaguguaacagcu

SEQ ID NO: 2140577 - RNA, 15 nt, Human
uaggaagguuaaugu

SEQ ID NO: 2140578 - RNA, 13 nt, Human
uaggccuggccag

SEQ ID NO: 2140579 - RNA, 14 nt, Human
uaggccuggccaga

SEQ ID NO: 2140580 - RNA, 13 nt, Human
uaggccacuccuc

SEQ ID NO: 2140581 - RNA, 14 nt, Human
uaggccacuccucc

SEQ ID NO: 2140582 - RNA, 15 nt, Human
uaggccacuccucca

SEQ ID NO: 2140583 - RNA, 12 nt, Human
uaggaauaaaua

SEQ ID NO: 2140584 - RNA, 20 nt, Human
uaggaacgguaaauuucugu

SEQ ID NO: 2140585 - RNA, 16 nt, Human
uaggaacauaugaaaa

SEQ ID NO: 2140586 - RNA, 19 nt, Human
uaggaagagaaaccaggga

SEQ ID NO: 2140587 - RNA, 15 nt, Human
uaggaagagaaacca

SEQ ID NO: 2140588 - RNA, 14 nt, Human
uaggaagagaaacc

SEQ ID NO: 2140589 - RNA, 13 nt, Human
uacaguguacagu

SEQ ID NO: 2140590 - RNA, 14 nt, Human
uacaggcaccgaga

SEQ ID NO: 2140591 - RNA, 19 nt, Human
uacaggcaccgagaauguu

SEQ ID NO: 2140592 - RNA, 15 nt, Human
uacaggcagcacaga

SEQ ID NO: 2140593 - RNA, 22 nt, Human
uacaguguacagucuuguauua

SEQ ID NO: 2140594 - RNA, 20 nt, Human
uacaggcaccgagaauguug

SEQ ID NO: 2140595 - RNA, 15 nt, Human
uacaguguacagucu

SEQ ID NO: 2140596 - RNA, 16 nt, Human
uacaguguacagucuu

SEQ ID NO: 2140597 - RNA, 16 nt, Human
uacaggcacccaccau

SEQ ID NO: 2140598 - RNA, 19 nt, Human
uacaggaaaagcugcugac

SEQ ID NO: 2140599 - RNA, 21 nt, Human
uacaggaagcaccccaugcca

SEQ ID NO: 2140600 - RNA, 18 nt, Human
uacaggaaaagcugcuga

SEQ ID NO: 2140601 - RNA, 17 nt, Human
uacaggaaaagcugcug

SEQ ID NO: 2140602 - RNA, 18 nt, Human
uacagcuuucaugauuag

SEQ ID NO: 2140603 - RNA, 22 nt, Human
uacagccaaagauaaucucuca

SEQ ID NO: 2140604 - RNA, 18 nt, Human
uacagccaaagauaaucu

SEQ ID NO: 2140605 - RNA, 15 nt, Human
uacacugucaaacau

SEQ ID NO: 2140606 - RNA, 13 nt, Human
uacacuuuaugca

SEQ ID NO: 2140607 - RNA, 21 nt, Human
uacagaaagauggaugugcuu

SEQ ID NO: 2140608 - RNA, 21 nt, Human
uacagaauucugcuaccucac

SEQ ID NO: 2140609 - RNA, 18 nt, Human
uacagaauucugcuaccu

SEQ ID NO: 2140610 - RNA, 11 nt, Human
uacagaaucau

SEQ ID NO: 2140611 - RNA, 16 nt, Human
uacagaaucauugcuu

SEQ ID NO: 2140612 - RNA, 17 nt, Human
uacagaaucauugcuua

SEQ ID NO: 2140613 - RNA, 18 nt, Human
uacagaaucauugcuuau

SEQ ID NO: 2140614 - RNA, 13 nt, Human
uacagaauacuag

SEQ ID NO: 2140615 - RNA, 17 nt, Human
uacagaaauuagccggg

SEQ ID NO: 2140616 - RNA, 18 nt, Human
uacagaaauuagccgggc

SEQ ID NO: 2140617 - RNA, 18 nt, Human
uacacaccuuauauuuac

SEQ ID NO: 2140618 - RNA, 15 nt, Human
uacacacacauacac

SEQ ID NO: 2140619 - RNA, 21 nt, Human
uacacacacacgcgugcacac

SEQ ID NO: 2140620 - RNA, 17 nt, Human
uacacagacuauugaca

SEQ ID NO: 2140621 - RNA, 21 nt, Human
uacacagacuauugacaucag

SEQ ID NO: 2140622 - RNA, 22 nt, Human
uacacagacuauugacaucagc

SEQ ID NO: 2140623 - RNA, 22 nt, Human
uacacagaucacagcuucagcc

SEQ ID NO: 2140624 - RNA, 17 nt, Human
uacacacuuuauuuacu

SEQ ID NO: 2140625 - RNA, 21 nt, Human
uacacugguuugagcuuagug

SEQ ID NO: 2140626 - RNA, 16 nt, Human
uacacuguauuacaua

SEQ ID NO: 2140627 - RNA, 22 nt, Human
uacacuguauuacauaaauaaa

SEQ ID NO: 2140628 - RNA, 12 nt, Human
uacacugugaac

SEQ ID NO: 2140629 - RNA, 19 nt, Human
uacacaaauacuuauucau

SEQ ID NO: 2140630 - RNA, 20 nt, Human
uacacaaauacuuauucauu

SEQ ID NO: 2140631 - RNA, 22 nt, Human
uacacaagacuuuccccauacu

SEQ ID NO: 2140632 - RNA, 16 nt, Human
uacaagagcagccugu

SEQ ID NO: 2140633 - RNA, 19 nt, Human
uacaagagcagccuguggc

SEQ ID NO: 2140634 - RNA, 20 nt, Human
uacaagagcagccuguggca

SEQ ID NO: 2140635 - RNA, 23 nt, Human
uacaagagcagccuguggcaucu

SEQ ID NO: 2140636 - RNA, 15 nt, Human
uaauuuugcauaaaa

SEQ ID NO: 2140637 - RNA, 15 nt, Human
uacaagauaagcuuc

SEQ ID NO: 2140638 - RNA, 14 nt, Human
uaauuuuguaucuu

SEQ ID NO: 2140639 - RNA, 16 nt, Human
uaauuuuguaaaggug

SEQ ID NO: 2140640 - RNA, 19 nt, Human
uaauuuuguaaaggugaaa

SEQ ID NO: 2140641 - RNA, 15 nt, Human
uaauuuugaauaaau

SEQ ID NO: 2140642 - RNA, 14 nt, Human
uaauuuucuucaug

SEQ ID NO: 2140643 - RNA, 23 nt, Human
uaauuuucuucaugcaaugacau

SEQ ID NO: 2140644 - RNA, 12 nt, Human
uaauuuucuuga

SEQ ID NO: 2140645 - RNA, 13 nt, Human
uaauuuucuugau

SEQ ID NO: 2140646 - RNA, 14 nt, Human
uaauuuucuugaug

SEQ ID NO: 2140647 - RNA, 17 nt, Human
uaauuuucuugaugacu

SEQ ID NO: 2140648 - RNA, 23 nt, Human
uaauuuucuugaugacuggaauu

SEQ ID NO: 2140649 - RNA, 21 nt, Human
uacauuuuguauauuuguauu

SEQ ID NO: 2140650 - RNA, 18 nt, Human
uaccaaaauuauuucaga

SEQ ID NO: 2140651 - RNA, 18 nt, Human
uaccaaaauguccaccaa

SEQ ID NO: 2140652 - RNA, 17 nt, Human
uaccaaaauuauuucag

SEQ ID NO: 2140653 - RNA, 12 nt, Human
uacauuuuaaca

SEQ ID NO: 2140654 - RNA, 13 nt, Human
uacauuuuaacau

SEQ ID NO: 2140655 - RNA, 14 nt, Human
uacauuuuaacaug

SEQ ID NO: 2140656 - RNA, 16 nt, Human
uacauuuuaacaugga

SEQ ID NO: 2140657 - RNA, 16 nt, Human
uacauuuguauguugu

SEQ ID NO: 2140658 - RNA, 17 nt, Human
uacauuuguauguugug

SEQ ID NO: 2140659 - RNA, 23 nt, Human
uacauuuguauguugugaagaug

SEQ ID NO: 2140660 - RNA, 16 nt, Human
uacauuuuagacagua

SEQ ID NO: 2140661 - RNA, 14 nt, Human
uacauuuuauauua

SEQ ID NO: 2140662 - RNA, 14 nt, Human
uaccaacuggaagc

SEQ ID NO: 2140663 - RNA, 13 nt, Human
uaccaaaggauag

SEQ ID NO: 2140664 - RNA, 23 nt, Human
uaccaaaauuauuucagaaaugu

SEQ ID NO: 2140665 - RNA, 22 nt, Human
uacauaagauaaaugugcugaa

SEQ ID NO: 2140666 - RNA, 12 nt, Human
uacauccuugug

SEQ ID NO: 2140667 - RNA, 13 nt, Human
uacauccuugugg

SEQ ID NO: 2140668 - RNA, 20 nt, Human
uacauccuuguggcacauuu

SEQ ID NO: 2140669 - RNA, 21 nt, Human
uacauccuuguggcacauuuu

SEQ ID NO: 2140670 - RNA, 14 nt, Human
uacaucgcccucca

SEQ ID NO: 2140671 - RNA, 15 nt, Human
uacaucgcccuccac

SEQ ID NO: 2140672 - RNA, 13 nt, Human
uacaugagaacag

SEQ ID NO: 2140673 - RNA, 17 nt, Human
uacaugagaacagacug

SEQ ID NO: 2140674 - RNA, 22 nt, Human
uacaugagaacagacuggccug

SEQ ID NO: 2140675 - RNA, 18 nt, Human
uacaugacgacaaagcug

SEQ ID NO: 2140676 - RNA, 23 nt, Human
uacaugacgacaaagcugcuaaa

SEQ ID NO: 2140677 - RNA, 14 nt, Human
uacaucuuucacau

SEQ ID NO: 2140678 - RNA, 13 nt, Human
uacaucugucaug

SEQ ID NO: 2140679 - RNA, 15 nt, Human
uacaucuuucacauu

SEQ ID NO: 2140680 - RNA, 15 nt, Human
uacaugacacugaaa

SEQ ID NO: 2140681 - RNA, 17 nt, Human
uacaugacacugaaaug

SEQ ID NO: 2140682 - RNA, 18 nt, Human
uacaugacacugaaaugc

SEQ ID NO: 2140683 - RNA, 19 nt, Human
uacaugacacugaaaugcc

SEQ ID NO: 2140684 - RNA, 20 nt, Human
uacaugacacugaaaugccu

SEQ ID NO: 2140685 - RNA, 16 nt, Human
uacaguguuauuuucu

SEQ ID NO: 2140686 - RNA, 19 nt, Human
uacaguguuauuuucuuug

SEQ ID NO: 2140687 - RNA, 18 nt, Human
uacauaagauaaaugugc

SEQ ID NO: 2140688 - RNA, 19 nt, Human
uacauaagauaaaugugcu

SEQ ID NO: 2140689 - RNA, 21 nt, Human
uaccaagaugccaucuguguc

SEQ ID NO: 2140690 - RNA, 16 nt, Human
uaccaaguuauauaaa

SEQ ID NO: 2140691 - RNA, 18 nt, Human
uaccaaguuauauaaaga

SEQ ID NO: 2140692 - RNA, 18 nt, Human
uaccacaaugcagugccu

SEQ ID NO: 2140693 - RNA, 13 nt, Human
uaccacagugucu

SEQ ID NO: 2140694 - RNA, 14 nt, Human
uaccacagugucug

SEQ ID NO: 2140695 - RNA, 13 nt, Human
uaccauuuguaau

SEQ ID NO: 2140696 - RNA, 14 nt, Human
uaccauuuguaaua

SEQ ID NO: 2140697 - RNA, 17 nt, Human
uaccauuuguaauaaag

SEQ ID NO: 2140698 - RNA, 18 nt, Human
uaccauuuguaauaaagu

SEQ ID NO: 2140699 - RNA, 20 nt, Human
uaccauuuguaauaaaguau

SEQ ID NO: 2140700 - RNA, 22 nt, Human
uaccauuuguaauaaaguauau

SEQ ID NO: 2140701 - RNA, 23 nt, Human
uaccauuuguaauaaaguauaua

SEQ ID NO: 2140702 - RNA, 15 nt, Human
uaccauuuucugguu

SEQ ID NO: 2140703 - RNA, 16 nt, Human
uaccauuuucugguuc

SEQ ID NO: 2140704 - RNA, 23 nt, Human
uaccauuuugggguacccacugc

SEQ ID NO: 2140705 - RNA, 18 nt, Human
uacccagcgagcccuggu

SEQ ID NO: 2140706 - RNA, 16 nt, Human
uacccagcgagcccug

SEQ ID NO: 2140707 - RNA, 14 nt, Human
uacccacugcucug

SEQ ID NO: 2140708 - RNA, 13 nt, Human
uacccacugcucu

SEQ ID NO: 2140709 - RNA, 12 nt, Human
uacccacugcuc

SEQ ID NO: 2140710 - RNA, 11 nt, Human
uacccacugcu

SEQ ID NO: 2140711 - RNA, 11 nt, Human
uacccaccuga

SEQ ID NO: 2140712 - RNA, 14 nt, Human
uacccaccugagcu

SEQ ID NO: 2140713 - RNA, 15 nt, Human
uacccaccugagcuu

SEQ ID NO: 2140714 - RNA, 18 nt, Human
uacccaccugagcuuugg

SEQ ID NO: 2140715 - RNA, 23 nt, Human
uacccaccugagcuuuggacaca

SEQ ID NO: 2140716 - RNA, 23 nt, Human
uacccaccugagcuuuggacgca

SEQ ID NO: 2140717 - RNA, 14 nt, Human
uacgacaacuugca

SEQ ID NO: 2140718 - RNA, 15 nt, Human
uacgacaacuugcac

SEQ ID NO: 2140719 - RNA, 14 nt, Human
uacgacuuuauuuu

SEQ ID NO: 2140720 - RNA, 15 nt, Human
uacgacuuuauuuuc

SEQ ID NO: 2140721 - RNA, 17 nt, Human
uacgacuuuauuuucug

SEQ ID NO: 2140722 - RNA, 13 nt, Human
uacuaacuuuccu

SEQ ID NO: 2140723 - RNA, 13 nt, Human
uacuacaaaauuu

SEQ ID NO: 2140724 - RNA, 18 nt, Human
uacuacaaaauuugaaau

SEQ ID NO: 2140725 - RNA, 18 nt, Human
uacuacacauucaauaag

SEQ ID NO: 2140726 - RNA, 18 nt, Human
uacccaucgguguccauu

SEQ ID NO: 2140727 - RNA, 20 nt, Human
uacccaucgguguccauuua

SEQ ID NO: 2140728 - RNA, 21 nt, Human
uacccaucgguguccauuuau

SEQ ID NO: 2140729 - RNA, 14 nt, Human
uacccaccucagcc

SEQ ID NO: 2140730 - RNA, 15 nt, Human
uacccaccucagccu

SEQ ID NO: 2140731 - RNA, 15 nt, Human
uaccuugaggucuuu

SEQ ID NO: 2140732 - RNA, 17 nt, Human
uaccuugcaucucacag

SEQ ID NO: 2140733 - RNA, 18 nt, Human
uaccuugaacacuggggg

SEQ ID NO: 2140734 - RNA, 19 nt, Human
uacccaugucuacacagau

SEQ ID NO: 2140735 - RNA, 21 nt, Human
uacccauucguggugaucaau

SEQ ID NO: 2140736 - RNA, 12 nt, Human
uaccuuugucac

SEQ ID NO: 2140737 - RNA, 22 nt, Human
uaccuuguguuuuguuuugauu

SEQ ID NO: 2140738 - RNA, 14 nt, Human
uaccuuuaugguuu

SEQ ID NO: 2140739 - RNA, 16 nt, Human
uaccuuuaugguuucu

SEQ ID NO: 2140740 - RNA, 14 nt, Human
uacuccuuaagaac

SEQ ID NO: 2140741 - RNA, 21 nt, Human
uacuccuuaagaacacaaagc

SEQ ID NO: 2140742 - RNA, 22 nt, Human
uacuccuuaagaacacaaagcg

SEQ ID NO: 2140743 - RNA, 15 nt, Human
uacugaggugcuaug

SEQ ID NO: 2140744 - RNA, 17 nt, Human
uacugagcuucucugug

SEQ ID NO: 2140745 - RNA, 14 nt, Human
uacugagcuucucu

SEQ ID NO: 2140746 - RNA, 18 nt, Human
uacugaucaugcauuguu

SEQ ID NO: 2140747 - RNA, 18 nt, Human
uacugagcuucucuguga

SEQ ID NO: 2140748 - RNA, 23 nt, Human
uacugagggaccaacugggccca

SEQ ID NO: 2140749 - RNA, 20 nt, Human
uacugaguauguggaaggca

SEQ ID NO: 2140750 - RNA, 16 nt, Human
uacugaucaugcauug

SEQ ID NO: 2140751 - RNA, 17 nt, Human
uacugaucaugcauugu

SEQ ID NO: 2140752 - RNA, 12 nt, Human
uacuccugcaaa

SEQ ID NO: 2140753 - RNA, 14 nt, Human
uacuccugcaaaau

SEQ ID NO: 2140754 - RNA, 16 nt, Human
uacuccugcaaaauuu

SEQ ID NO: 2140755 - RNA, 17 nt, Human
uacuccugcaaaauuuu

SEQ ID NO: 2140756 - RNA, 22 nt, Human
uacuccugcaaaauuuuauagc

SEQ ID NO: 2140757 - RNA, 17 nt, Human
uacuccucuuuacacug

SEQ ID NO: 2140758 - RNA, 14 nt, Human
uacucagcagcccu

SEQ ID NO: 2140759 - RNA, 15 nt, Human
uacucagcagcccuc

SEQ ID NO: 2140760 - RNA, 16 nt, Human
uacucagcagcccucc

SEQ ID NO: 2140761 - RNA, 17 nt, Human
uacucagcagcccuccu

SEQ ID NO: 2140762 - RNA, 18 nt, Human
uacucagcagcccuccuc

SEQ ID NO: 2140763 - RNA, 19 nt, Human
uacucagaagccugaggcu

SEQ ID NO: 2140764 - RNA, 16 nt, Human
uacucagaagccugag

SEQ ID NO: 2140765 - RNA, 17 nt, Human
uacucagaagccugagg

SEQ ID NO: 2140766 - RNA, 15 nt, Human
uacucaggaggcuga

SEQ ID NO: 2140767 - RNA, 19 nt, Human
uacucauauauaucuaucu

SEQ ID NO: 2140768 - RNA, 21 nt, Human
uacucauauauaucuaucuua

SEQ ID NO: 2140769 - RNA, 23 nt, Human
uacucauauauaucuaucuuaua

SEQ ID NO: 2140770 - RNA, 16 nt, Human
uacucaugaucuugug

SEQ ID NO: 2140771 - RNA, 17 nt, Human
uacucaugaucuuguga

SEQ ID NO: 2140772 - RNA, 12 nt, Human
uacucaggaggc

SEQ ID NO: 2140773 - RNA, 22 nt, Human
uacucaggaggcugaggcagaa

SEQ ID NO: 2140774 - RNA, 22 nt, Human
uacucagcccugggccccacca

SEQ ID NO: 2140775 - RNA, 23 nt, Human
uacucagcccugggccccaccac

SEQ ID NO: 2140776 - RNA, 19 nt, Human
uacucagcagcccuccuca

SEQ ID NO: 2140777 - RNA, 20 nt, Human
uacucagcagcccuccucac

SEQ ID NO: 2140778 - RNA, 23 nt, Human
uacucagcagcccuccucacccc

SEQ ID NO: 2140779 - RNA, 12 nt, Human
uacucagcccug

SEQ ID NO: 2140780 - RNA, 13 nt, Human
uacucagcccugg

SEQ ID NO: 2140781 - RNA, 14 nt, Human
uacucagcccuggg

SEQ ID NO: 2140782 - RNA, 15 nt, Human
uacucagcccugggc

SEQ ID NO: 2140783 - RNA, 16 nt, Human
uacucagcccugggcc

SEQ ID NO: 2140784 - RNA, 14 nt, Human
uacucaccucaccc

SEQ ID NO: 2140785 - RNA, 21 nt, Human
uacucacagucucuuuaaucu

SEQ ID NO: 2140786 - RNA, 17 nt, Human
uacuacuagaugucuuu

SEQ ID NO: 2140787 - RNA, 18 nt, Human
uacuacuagaugucuuua

SEQ ID NO: 2140788 - RNA, 24 nt, Human
uacucaccuugaacaccacgcuug

SEQ ID NO: 2140789 - RNA, 20 nt, Human
uacucacucaaguucaagga

SEQ ID NO: 2140790 - RNA, 23 nt, Human
uacucacucaaguucaaggacca

SEQ ID NO: 2140791 - RNA, 12 nt, Human
uacucaccucac

SEQ ID NO: 2140792 - RNA, 15 nt, Human
uacucacagucucuu

SEQ ID NO: 2140793 - RNA, 18 nt, Human
uacuacaugugggagcuu

SEQ ID NO: 2140794 - RNA, 16 nt, Human
uaccuuugcucuugca

SEQ ID NO: 2140795 - RNA, 17 nt, Human
uacuacaucgcccucca

SEQ ID NO: 2140796 - RNA, 15 nt, Human
uagaaagaagaugaa

SEQ ID NO: 2140797 - RNA, 14 nt, Human
uagaaagaagccca

SEQ ID NO: 2140798 - RNA, 23 nt, Human
uagaaagaagcccaauauuauaa

SEQ ID NO: 2140799 - RNA, 21 nt, Human
uagaaagaagcccaauauuau

SEQ ID NO: 2140800 - RNA, 22 nt, Human
uagaaacuuaucuuacaaagug

SEQ ID NO: 2140801 - RNA, 23 nt, Human
uagaaacuuaucuuacaaagugu

SEQ ID NO: 2140802 - RNA, 17 nt, Human
uagaaagacagagcugg

SEQ ID NO: 2140803 - RNA, 18 nt, Human
uagaaagagauacagagg

SEQ ID NO: 2140804 - RNA, 17 nt, Human
uagaaagagauacagag

SEQ ID NO: 2140805 - RNA, 17 nt, Human
uacuuuacauaugcuuu

SEQ ID NO: 2140806 - RNA, 23 nt, Human
uacuuuacauaugcuuuaagaau

SEQ ID NO: 2140807 - RNA, 22 nt, Human
uagaaagccaaaucaaaauaug

SEQ ID NO: 2140808 - RNA, 20 nt, Human
uagaaaguucaaaaagucua

SEQ ID NO: 2140809 - RNA, 16 nt, Human
uagaaauaaagcaucu

SEQ ID NO: 2140810 - RNA, 17 nt, Human
uagaaagugaauaaaaa

SEQ ID NO: 2140811 - RNA, 20 nt, Human
uagaaagugaauaaaaauua

SEQ ID NO: 2140812 - RNA, 21 nt, Human
uagaaagugaauaaaaauuaa

SEQ ID NO: 2140813 - RNA, 19 nt, Human
uagaaauaaauagcuauau

SEQ ID NO: 2140814 - RNA, 16 nt, Human
uagaaauaaauagcua

SEQ ID NO: 2140815 - RNA, 16 nt, Human
uagaaauaauaugcau

SEQ ID NO: 2140816 - RNA, 15 nt, Human
uagaaauaauaugca

SEQ ID NO: 2140817 - RNA, 15 nt, Human
uagaaauauaauuga

SEQ ID NO: 2140818 - RNA, 20 nt, Human
uagaaauaucugaaaaugua

SEQ ID NO: 2140819 - RNA, 21 nt, Human
uagaaauaucugaaaauguau

SEQ ID NO: 2140820 - RNA, 23 nt, Human
uagaaauaucugaaaauguaugu

SEQ ID NO: 2140821 - RNA, 19 nt, Human
uagaaaugaugauguggaa

SEQ ID NO: 2140822 - RNA, 22 nt, Human
uagaaaucccccuuucucuaau

SEQ ID NO: 2140823 - RNA, 18 nt, Human
uagaaaugaccaauauua

SEQ ID NO: 2140824 - RNA, 19 nt, Human
uagaaauuuuucagaugcu

SEQ ID NO: 2140825 - RNA, 22 nt, Human
uagaaauuuuucagaugcuucu

SEQ ID NO: 2140826 - RNA, 18 nt, Human
uagaaauuagcuguguga

SEQ ID NO: 2140827 - RNA, 14 nt, Human
uagaaauuuuacaa

SEQ ID NO: 2140828 - RNA, 17 nt, Human
uagaaauuuuacaauag

SEQ ID NO: 2140829 - RNA, 22 nt, Human
uagaaauuuuacaauaggugcu

SEQ ID NO: 2140830 - RNA, 14 nt, Human
uagaacaucccugc

SEQ ID NO: 2140831 - RNA, 18 nt, Human
uagaacaucccugccagc

SEQ ID NO: 2140832 - RNA, 18 nt, Human
uagaacauugauugcugu

SEQ ID NO: 2140833 - RNA, 12 nt, Human
uagaacacuauu

SEQ ID NO: 2140834 - RNA, 13 nt, Human
uagaacacuauuu

SEQ ID NO: 2140835 - RNA, 14 nt, Human
uagaacacuauuuu

SEQ ID NO: 2140836 - RNA, 16 nt, Human
uagaacacuauuuuca

SEQ ID NO: 2140837 - RNA, 17 nt, Human
uagaacacuauuuucag

SEQ ID NO: 2140838 - RNA, 18 nt, Human
uagaacacuauuuucaga

SEQ ID NO: 2140839 - RNA, 19 nt, Human
uagaacacuauuuucagaa

SEQ ID NO: 2140840 - RNA, 20 nt, Human
uagaacacuauuuucagaau

SEQ ID NO: 2140841 - RNA, 21 nt, Human
uagaacacuauuuucagaauc

SEQ ID NO: 2140842 - RNA, 22 nt, Human
uagaacacuauuuucagaaucu

SEQ ID NO: 2140843 - RNA, 23 nt, Human
uagaacacuauuuucagaaucug

SEQ ID NO: 2140844 - RNA, 12 nt, Human
uagaacagaaaa

SEQ ID NO: 2140845 - RNA, 13 nt, Human
uagaacagaaaac

SEQ ID NO: 2140846 - RNA, 14 nt, Human
uagaacagaaaaca

SEQ ID NO: 2140847 - RNA, 15 nt, Human
uagaacagaaaacaa

SEQ ID NO: 2140848 - RNA, 16 nt, Human
uagaacagaaaacaac

SEQ ID NO: 2140849 - RNA, 21 nt, Human
uagaacagaaaacaacaaaaa

SEQ ID NO: 2140850 - RNA, 22 nt, Human
uagaacagaaaacaacaaaaaa

SEQ ID NO: 2140851 - RNA, 23 nt, Human
uagaacagaaaacaacaaaaaau

SEQ ID NO: 2140852 - RNA, 12 nt, Human
uacuugggaggc

SEQ ID NO: 2140853 - RNA, 15 nt, Human
uacuugcugcuauuu

SEQ ID NO: 2140854 - RNA, 18 nt, Human
uacuuguggacacagcuc

SEQ ID NO: 2140855 - RNA, 15 nt, Human
uacuuguggacacag

SEQ ID NO: 2140856 - RNA, 19 nt, Human
uacuuguggacacagcucu

SEQ ID NO: 2140857 - RNA, 22 nt, Human
uacuugaugaguguaacaagaa

SEQ ID NO: 2140858 - RNA, 23 nt, Human
uacuugaugaguguaacaagaaa

SEQ ID NO: 2140859 - RNA, 15 nt, Human
uacuuagcuuaucaa

SEQ ID NO: 2140860 - RNA, 16 nt, Human
uacuuagcuuaucaau

SEQ ID NO: 2140861 - RNA, 18 nt, Human
uacuuagcuuaucaauuu

SEQ ID NO: 2140862 - RNA, 19 nt, Human
uacuuagcuuaucaauuug

SEQ ID NO: 2140863 - RNA, 20 nt, Human
uacuuagcuuaucaauuugu

SEQ ID NO: 2140864 - RNA, 18 nt, Human
uacuuagcaaaguuuuac

SEQ ID NO: 2140865 - RNA, 18 nt, Human
uacuuagcaauguuaucu

SEQ ID NO: 2140866 - RNA, 15 nt, Human
uacuuagcagcuauc

SEQ ID NO: 2140867 - RNA, 17 nt, Human
uacuuaccauaugugcu

SEQ ID NO: 2140868 - RNA, 14 nt, Human
uacuuaauaaauuc

SEQ ID NO: 2140869 - RNA, 17 nt, Human
uacuuaauaaauucaga

SEQ ID NO: 2140870 - RNA, 19 nt, Human
uacuuaauaaauucagaua

SEQ ID NO: 2140871 - RNA, 22 nt, Human
uacuguguacagaauucugcua

SEQ ID NO: 2140872 - RNA, 23 nt, Human
uacuguguacagaauucugcuac

SEQ ID NO: 2140873 - RNA, 22 nt, Human
uacuguauuuuuaccuuuuucc

SEQ ID NO: 2140874 - RNA, 17 nt, Human
uacugcauaugaaagga

SEQ ID NO: 2140875 - RNA, 14 nt, Human
uacugauuguuuca

SEQ ID NO: 2140876 - RNA, 15 nt, Human
uacugauuguuucau

SEQ ID NO: 2140877 - RNA, 13 nt, Human
uaauaaagacagg

SEQ ID NO: 2140878 - RNA, 13 nt, Human
uaaguggcugcug

SEQ ID NO: 2140879 - RNA, 20 nt, Human
uaagugguacuaacuuuccu

SEQ ID NO: 2140880 - RNA, 13 nt, Human
uaagugcuuugua

SEQ ID NO: 2140881 - RNA, 15 nt, Human
uaagugcuuuguaau

SEQ ID NO: 2140882 - RNA, 16 nt, Human
uaaggccgaagaaggg

SEQ ID NO: 2140883 - RNA, 20 nt, Human
uaaggccgaagaaggguccu

SEQ ID NO: 2140884 - RNA, 16 nt, Human
uaauaaauugcaugcu

SEQ ID NO: 2140885 - RNA, 21 nt, Human
uaauaaauugcaugcugcuuu

SEQ ID NO: 2140886 - RNA, 23 nt, Human
uaauaaauugcaugcugcuuuaa

SEQ ID NO: 2140887 - RNA, 13 nt, Human
uaauaaauucaga

SEQ ID NO: 2140888 - RNA, 13 nt, Human
uaauaacauaaca

SEQ ID NO: 2140889 - RNA, 17 nt, Human
uaauaaagaugcucuuu

SEQ ID NO: 2140890 - RNA, 15 nt, Human
uaauaaaucugguag

SEQ ID NO: 2140891 - RNA, 15 nt, Human
uaauaaauucagaua

SEQ ID NO: 2140892 - RNA, 14 nt, Human
uaauaaagaugcuc

SEQ ID NO: 2140893 - RNA, 16 nt, Human
uaauaaagaugcucuu

SEQ ID NO: 2140894 - RNA, 14 nt, Human
uaauaauaauguuu

SEQ ID NO: 2140895 - RNA, 11 nt, Human
uaauaauacaa

SEQ ID NO: 2140896 - RNA, 12 nt, Human
uaauaauacaag

SEQ ID NO: 2140897 - RNA, 21 nt, Human
uaauaguucagguaacaggca

SEQ ID NO: 2140898 - RNA, 16 nt, Human
uaauaauuuuuuaauu

SEQ ID NO: 2140899 - RNA, 14 nt, Human
uaauacaaaggcuu

SEQ ID NO: 2140900 - RNA, 22 nt, Human
uaauaauuuuaggcacccaucc

SEQ ID NO: 2140901 - RNA, 14 nt, Human
uaauauaaaguugg

SEQ ID NO: 2140902 - RNA, 19 nt, Human
uaauauaaaguuggaugcg

SEQ ID NO: 2140903 - RNA, 16 nt, Human
uaauauaacugccuua

SEQ ID NO: 2140904 - RNA, 21 nt, Human
uaauauaacugccuuaaaacu

SEQ ID NO: 2140905 - RNA, 22 nt, Human
uaauauaacugccuuaaaacuu

SEQ ID NO: 2140906 - RNA, 23 nt, Human
uaauauaacugccuuaaaacuuu

SEQ ID NO: 2140907 - RNA, 23 nt, Human
uaauauguuaaccucagugucau

SEQ ID NO: 2140908 - RNA, 22 nt, Human
uaaucggcccacagcucccacc

SEQ ID NO: 2140909 - RNA, 15 nt, Human
uaaucguuaugugug

SEQ ID NO: 2140910 - RNA, 16 nt, Human
uaaucguuaugugugu

SEQ ID NO: 2140911 - RNA, 15 nt, Human
uaaucggcccacagc

SEQ ID NO: 2140912 - RNA, 16 nt, Human
uaaucggcccacagcu

SEQ ID NO: 2140913 - RNA, 16 nt, Human
uaauauauguuuuaaa

SEQ ID NO: 2140914 - RNA, 16 nt, Human
uaauauggggaugcag

SEQ ID NO: 2140915 - RNA, 15 nt, Human
uaauauguauuuuau

SEQ ID NO: 2140916 - RNA, 19 nt, Human
uaauauguauuuuauguau

SEQ ID NO: 2140917 - RNA, 21 nt, Human
uaauauguauuuuauguaugu

SEQ ID NO: 2140918 - RNA, 20 nt, Human
uaauauguuaaccucagugu

SEQ ID NO: 2140919 - RNA, 21 nt, Human
uaauauguuaaccucaguguc

SEQ ID NO: 2140920 - RNA, 11 nt, Human
uaaugauguuu

SEQ ID NO: 2140921 - RNA, 23 nt, Human
uaaugaugucguuugaaucacag

SEQ ID NO: 2140922 - RNA, 17 nt, Human
uaaugaugucguuugaa

SEQ ID NO: 2140923 - RNA, 16 nt, Human
uaaugcauguuaggaa

SEQ ID NO: 2140924 - RNA, 17 nt, Human
uaaugcauguuaggaaa

SEQ ID NO: 2140925 - RNA, 20 nt, Human
uaaucuucaguuuuaucuuu

SEQ ID NO: 2140926 - RNA, 13 nt, Human
uaaucuucaguuu

SEQ ID NO: 2140927 - RNA, 16 nt, Human
uaaucuucaguuuuau

SEQ ID NO: 2140928 - RNA, 17 nt, Human
uaaucguuaugugugua

SEQ ID NO: 2140929 - RNA, 18 nt, Human
uaaucguuauguguguau

SEQ ID NO: 2140930 - RNA, 19 nt, Human
uaaucguuauguguguaua

SEQ ID NO: 2140931 - RNA, 19 nt, Human
uaaucuauuggguucauua

SEQ ID NO: 2140932 - RNA, 20 nt, Human
uaaucuauuggguucauuau

SEQ ID NO: 2140933 - RNA, 22 nt, Human
uaaucuauuggguucauuauug

SEQ ID NO: 2140934 - RNA, 18 nt, Human
uaaucuccucuuuuaucu

SEQ ID NO: 2140935 - RNA, 20 nt, Human
uaaucugaucguucuuucua

SEQ ID NO: 2140936 - RNA, 19 nt, Human
uaaucuuaggggagagcuu

SEQ ID NO: 2140937 - RNA, 20 nt, Human
uaaucuuaggggagagcuuu

SEQ ID NO: 2140938 - RNA, 21 nt, Human
uaauugugaaaaaguuaaaca

SEQ ID NO: 2140939 - RNA, 14 nt, Human
uaauugugaauuga

SEQ ID NO: 2140940 - RNA, 12 nt, Human
uaauuguaaacu

SEQ ID NO: 2140941 - RNA, 13 nt, Human
uaauuguaaacug

SEQ ID NO: 2140942 - RNA, 14 nt, Human
uaauuguaaacugu

SEQ ID NO: 2140943 - RNA, 15 nt, Human
uaauuguaaacugua

SEQ ID NO: 2140944 - RNA, 16 nt, Human
uaauuguaaacuguac

SEQ ID NO: 2140945 - RNA, 18 nt, Human
uaauuguaaacuguacua

SEQ ID NO: 2140946 - RNA, 20 nt, Human
uaauuguuaagauaugaugu

SEQ ID NO: 2140947 - RNA, 23 nt, Human
uaauugccacugagagaucugcu

SEQ ID NO: 2140948 - RNA, 11 nt, Human
uaauugccaug

SEQ ID NO: 2140949 - RNA, 12 nt, Human
uaauugccaugu

SEQ ID NO: 2140950 - RNA, 22 nt, Human
uaauugaauuuucaagcaucuc

SEQ ID NO: 2140951 - RNA, 14 nt, Human
uaauugauuucaag

SEQ ID NO: 2140952 - RNA, 19 nt, Human
uaauugauuucaagaccuu

SEQ ID NO: 2140953 - RNA, 20 nt, Human
uaauuuuaugaacugcaugu

SEQ ID NO: 2140954 - RNA, 18 nt, Human
uaauuuuaugaaugucuu

SEQ ID NO: 2140955 - RNA, 13 nt, Human
uaauuuuaaauaa

SEQ ID NO: 2140956 - RNA, 19 nt, Human
uaauuuuaagauuccuuuu

SEQ ID NO: 2140957 - RNA, 19 nt, Human
uaauuuuaggcacccaucc

SEQ ID NO: 2140958 - RNA, 21 nt, Human
uaauuuguacauauguaaaau

SEQ ID NO: 2140959 - RNA, 13 nt, Human
uaauuuguguaau

SEQ ID NO: 2140960 - RNA, 14 nt, Human
uaauuuguguaaua

SEQ ID NO: 2140961 - RNA, 20 nt, Human
uaauuuguguaauaaagugu

SEQ ID NO: 2140962 - RNA, 21 nt, Human
uaauuuguguaauaaaguguu

SEQ ID NO: 2140963 - RNA, 17 nt, Human
uaauuacauauuugcau

SEQ ID NO: 2140964 - RNA, 12 nt, Human
uaauuagagcag

SEQ ID NO: 2140965 - RNA, 13 nt, Human
uaauugaaggaaa

SEQ ID NO: 2140966 - RNA, 14 nt, Human
uaauugaaggaaag

SEQ ID NO: 2140967 - RNA, 15 nt, Human
uaauugaaggaaaga

SEQ ID NO: 2140968 - RNA, 22 nt, Human
uaauugaaggaaagauuuguac

SEQ ID NO: 2140969 - RNA, 12 nt, Human
uaauugagaagc

SEQ ID NO: 2140970 - RNA, 21 nt, Human
uaauugagaagcguauguuuu

SEQ ID NO: 2140971 - RNA, 22 nt, Human
uaauugacaggauuauuggaaa

SEQ ID NO: 2140972 - RNA, 20 nt, Human
uaauugacaggauuauugga

SEQ ID NO: 2140973 - RNA, 15 nt, Human
uaauucuuguauauu

SEQ ID NO: 2140974 - RNA, 16 nt, Human
uaauucuuguauauua

SEQ ID NO: 2140975 - RNA, 12 nt, Human
uaauucuuugau

SEQ ID NO: 2140976 - RNA, 15 nt, Human
uaauguuuaugagcc

SEQ ID NO: 2140977 - RNA, 16 nt, Human
uaauguuuaugagcca

SEQ ID NO: 2140978 - RNA, 17 nt, Human
uaauguuuaugagccag

SEQ ID NO: 2140979 - RNA, 22 nt, Human
uaauguuuaugagccagacaaa

SEQ ID NO: 2140980 - RNA, 21 nt, Human
uaaugcauguuaggaaaauuu

SEQ ID NO: 2140981 - RNA, 21 nt, Human
uaauuaaauaaaaaucugugg

SEQ ID NO: 2140982 - RNA, 18 nt, Human
uaauguuuaugagccaga

SEQ ID NO: 2140983 - RNA, 14 nt, Human
uaauuaacauauaa

SEQ ID NO: 2140984 - RNA, 20 nt, Human
uaauuaacauauaauauaug

SEQ ID NO: 2140985 - RNA, 18 nt, Human
uaagaucguucucugccu

SEQ ID NO: 2140986 - RNA, 16 nt, Human
uaagauaaaugugcug

SEQ ID NO: 2140987 - RNA, 17 nt, Human
uaagauaaaugugcuga

SEQ ID NO: 2140988 - RNA, 21 nt, Human
uaagaguuaguuucuuuggga

SEQ ID NO: 2140989 - RNA, 13 nt, Human
uaagauaaaaaag

SEQ ID NO: 2140990 - RNA, 16 nt, Human
uaagauaaaaaagcug

SEQ ID NO: 2140991 - RNA, 14 nt, Human
uaagauaaaugugc

SEQ ID NO: 2140992 - RNA, 22 nt, Human
uaagaggcagggucucacucug

SEQ ID NO: 2140993 - RNA, 14 nt, Human
uaagagcugguguc

SEQ ID NO: 2140994 - RNA, 17 nt, Human
uaagagcuggugucuga

SEQ ID NO: 2140995 - RNA, 12 nt, Human
uaagagcuauac

SEQ ID NO: 2140996 - RNA, 14 nt, Human
uaagagcuauacag

SEQ ID NO: 2140997 - RNA, 18 nt, Human
uaagagcuagcgcugccg

SEQ ID NO: 2140998 - RNA, 20 nt, Human
uaagagcuagcgcugccgca

SEQ ID NO: 2140999 - RNA, 22 nt, Human
uaagagccauuuaggggccacu

SEQ ID NO: 2141000 - RNA, 16 nt, Human
uaagagcuagcgcugc

SEQ ID NO: 2141001 - RNA, 14 nt, Human
uaagaagagacugg

SEQ ID NO: 2141002 - RNA, 19 nt, Human
uaagaagagacugggaaga

SEQ ID NO: 2141003 - RNA, 14 nt, Human
uaagaagaugacuu

SEQ ID NO: 2141004 - RNA, 23 nt, Human
uaagaagcacgugguaaaacacu

SEQ ID NO: 2141005 - RNA, 14 nt, Human
uaagaagacaugaa

SEQ ID NO: 2141006 - RNA, 15 nt, Human
uaagaagacaugaac

SEQ ID NO: 2141007 - RNA, 12 nt, Human
uaagaagagacu

SEQ ID NO: 2141008 - RNA, 15 nt, Human
uaagaaagugaagca

SEQ ID NO: 2141009 - RNA, 18 nt, Human
uaagaaagugaagcaaau

SEQ ID NO: 2141010 - RNA, 22 nt, Human
uaagaaagugaagcaaaucaga

SEQ ID NO: 2141011 - RNA, 20 nt, Human
uaacuuuuguaaauacacau

SEQ ID NO: 2141012 - RNA, 24 nt, Human
uaagaaagacuaucuaaauguuga

SEQ ID NO: 2141013 - RNA, 15 nt, Human
uaagcaucaaacucu

SEQ ID NO: 2141014 - RNA, 16 nt, Human
uaagcaucaaacucuu

SEQ ID NO: 2141015 - RNA, 16 nt, Human
uaagcauuacucuugu

SEQ ID NO: 2141016 - RNA, 17 nt, Human
uaagcauuacucuugua

SEQ ID NO: 2141017 - RNA, 18 nt, Human
uaagcauuacucuuguaa

SEQ ID NO: 2141018 - RNA, 19 nt, Human
uaagcauuacucuuguaag

SEQ ID NO: 2141019 - RNA, 20 nt, Human
uaagcauuacucuuguaaga

SEQ ID NO: 2141020 - RNA, 21 nt, Human
uaagcauuacucuuguaagau

SEQ ID NO: 2141021 - RNA, 22 nt, Human
uaagcauuacucuuguaagauu

SEQ ID NO: 2141022 - RNA, 10 nt, Human
uaagccaagg

SEQ ID NO: 2141023 - RNA, 14 nt, Human
uaagccaagggccu

SEQ ID NO: 2141024 - RNA, 23 nt, Human
uaagcauuguuugcuuauuguuc

SEQ ID NO: 2141025 - RNA, 18 nt, Human
uaagcauuguuugcuuau

SEQ ID NO: 2141026 - RNA, 19 nt, Human
uaagcauuguuugcuuauu

SEQ ID NO: 2141027 - RNA, 20 nt, Human
uaagcauuguuugcuuauug

SEQ ID NO: 2141028 - RNA, 21 nt, Human
uaagcauuguuugcuuauugu

SEQ ID NO: 2141029 - RNA, 18 nt, Human
uaagcauuggguggguaa

SEQ ID NO: 2141030 - RNA, 13 nt, Human
uaagcaucacaaa

SEQ ID NO: 2141031 - RNA, 12 nt, Human
uaagcauuguuu

SEQ ID NO: 2141032 - RNA, 15 nt, Human
uaagcauuguuugcu

SEQ ID NO: 2141033 - RNA, 17 nt, Human
uaagcauuguuugcuua

SEQ ID NO: 2141034 - RNA, 14 nt, Human
uaagccuccauuua

SEQ ID NO: 2141035 - RNA, 17 nt, Human
uaagccuccauuuaguu

SEQ ID NO: 2141036 - RNA, 19 nt, Human
uaagccuccauuuaguucu

SEQ ID NO: 2141037 - RNA, 20 nt, Human
uaagccuccauuuaguucuu

SEQ ID NO: 2141038 - RNA, 21 nt, Human
uaagccuccauuuaguucuuu

SEQ ID NO: 2141039 - RNA, 16 nt, Human
uaagccuuuccauaag

SEQ ID NO: 2141040 - RNA, 15 nt, Human
uaagccuuuccauaa

SEQ ID NO: 2141041 - RNA, 18 nt, Human
uaaggaugggaaggaggg

SEQ ID NO: 2141042 - RNA, 12 nt, Human
uaaggaugggaa

SEQ ID NO: 2141043 - RNA, 16 nt, Human
uaaggaugggaaggag

SEQ ID NO: 2141044 - RNA, 15 nt, Human
uaaauugcaugcugc

SEQ ID NO: 2141045 - RNA, 18 nt, Human
uaaauugcaugcugcuuu

SEQ ID NO: 2141046 - RNA, 19 nt, Human
uaaauugcaugcugcuuua

SEQ ID NO: 2141047 - RNA, 20 nt, Human
uaaauugcaugcugcuuuaa

SEQ ID NO: 2141048 - RNA, 15 nt, Human
uaaauugcuccuuga

SEQ ID NO: 2141049 - RNA, 12 nt, Human
uaacaaugucuu

SEQ ID NO: 2141050 - RNA, 12 nt, Human
uaacacagagag

SEQ ID NO: 2141051 - RNA, 16 nt, Human
uaacacagagagacag

SEQ ID NO: 2141052 - RNA, 17 nt, Human
uaacacagcauguguau

SEQ ID NO: 2141053 - RNA, 16 nt, Human
uaacacacauaaagga

SEQ ID NO: 2141054 - RNA, 20 nt, Human
uaacacacauaaaggauaaa

SEQ ID NO: 2141055 - RNA, 11 nt, Human
uaacacauuau

SEQ ID NO: 2141056 - RNA, 21 nt, Human
uaacagaugcaaugugcuacu

SEQ ID NO: 2141057 - RNA, 22 nt, Human
uaacagcauucuugucacaaua

SEQ ID NO: 2141058 - RNA, 23 nt, Human
uaacagcauucuugucacaauaa

SEQ ID NO: 2141059 - RNA, 18 nt, Human
uaacagauaagcaagaga

SEQ ID NO: 2141060 - RNA, 12 nt, Human
uaacagaugcaa

SEQ ID NO: 2141061 - RNA, 15 nt, Human
uaacagaugcaaugu

SEQ ID NO: 2141062 - RNA, 24 nt, Human
uaacaauggaagauuugcccauuu

SEQ ID NO: 2141063 - RNA, 16 nt, Human
uaacaggauuagacag

SEQ ID NO: 2141064 - RNA, 15 nt, Human
uaacagcugaggucu

SEQ ID NO: 2141065 - RNA, 12 nt, Human
uaacagcugagg

SEQ ID NO: 2141066 - RNA, 12 nt, Human
uaacagcugugg

SEQ ID NO: 2141067 - RNA, 19 nt, Human
uaacaggcagauacaggaa

SEQ ID NO: 2141068 - RNA, 22 nt, Human
uaacaggcucaauauuccugaa

SEQ ID NO: 2141069 - RNA, 23 nt, Human
uaacaggcucaauauuccugaau

SEQ ID NO: 2141070 - RNA, 13 nt, Human
uaacauuauauug

SEQ ID NO: 2141071 - RNA, 16 nt, Human
uaacauuauauugcaa

SEQ ID NO: 2141072 - RNA, 17 nt, Human
uaacauuauauugcaau

SEQ ID NO: 2141073 - RNA, 13 nt, Human
uaaccaaaugcau

SEQ ID NO: 2141074 - RNA, 14 nt, Human
uaaccaaaugcauc

SEQ ID NO: 2141075 - RNA, 21 nt, Human
uaaccaaaugcaucaauccug

SEQ ID NO: 2141076 - RNA, 22 nt, Human
uaaccaaaugcaucaauccugu

SEQ ID NO: 2141077 - RNA, 18 nt, Human
uaacagcuaccaugacaa

SEQ ID NO: 2141078 - RNA, 13 nt, Human
uaaccacggaaaa

SEQ ID NO: 2141079 - RNA, 12 nt, Human
uaaccaauguuu

SEQ ID NO: 2141080 - RNA, 14 nt, Human
uaaccaauguuuaa

SEQ ID NO: 2141081 - RNA, 17 nt, Human
uaaccaauguuuaaaaa

SEQ ID NO: 2141082 - RNA, 22 nt, Human
uaaccaauguuuaaaaaaguuu

SEQ ID NO: 2141083 - RNA, 11 nt, Human
uaacuccacca

SEQ ID NO: 2141084 - RNA, 16 nt, Human
uaacuccaccaaccca

SEQ ID NO: 2141085 - RNA, 22 nt, Human
uaacuccaccaacccaucagaa

SEQ ID NO: 2141086 - RNA, 17 nt, Human
uaacucaucauaaaaua

SEQ ID NO: 2141087 - RNA, 15 nt, Human
uaacucaucauaaaa

SEQ ID NO: 2141088 - RNA, 16 nt, Human
uaacucaucauaaaau

SEQ ID NO: 2141089 - RNA, 15 nt, Human
uaacucaggacucca

SEQ ID NO: 2141090 - RNA, 16 nt, Human
uaacucaggacuccag

SEQ ID NO: 2141091 - RNA, 17 nt, Human
uaacucaggacuccagc

SEQ ID NO: 2141092 - RNA, 18 nt, Human
uaacucaggacuccagcc

SEQ ID NO: 2141093 - RNA, 20 nt, Human
uaacucaggacuccagccca

SEQ ID NO: 2141094 - RNA, 21 nt, Human
uaacucaggacuccagcccau

SEQ ID NO: 2141095 - RNA, 14 nt, Human
uaacucaucauaaa

SEQ ID NO: 2141096 - RNA, 22 nt, Human
uaacucagaaacaucaguuacu

SEQ ID NO: 2141097 - RNA, 21 nt, Human
uaaccagggcaccaagcccac

SEQ ID NO: 2141098 - RNA, 19 nt, Human
uaaccucagugucauuuau

SEQ ID NO: 2141099 - RNA, 20 nt, Human
uaaccucagugucauuuaug

SEQ ID NO: 2141100 - RNA, 14 nt, Human
uaacuccagugaag

SEQ ID NO: 2141101 - RNA, 17 nt, Human
uaacugcauugagaacu

SEQ ID NO: 2141102 - RNA, 16 nt, Human
uaacugcauuuuuaga

SEQ ID NO: 2141103 - RNA, 23 nt, Human
uaacugccaucaagaugagagaa

SEQ ID NO: 2141104 - RNA, 17 nt, Human
uaacugcccaaagcagc

SEQ ID NO: 2141105 - RNA, 21 nt, Human
uaacugcccaaagcagcacuu

SEQ ID NO: 2141106 - RNA, 24 nt, Human
uaacuggcaguuuuccauugguuu

SEQ ID NO: 2141107 - RNA, 18 nt, Human
uaacugccuuaaaacuuu

SEQ ID NO: 2141108 - RNA, 23 nt, Human
uaacuggcaguuuuccauugguu

SEQ ID NO: 2141109 - RNA, 14 nt, Human
uaaagcuagaaaug

SEQ ID NO: 2141110 - RNA, 17 nt, Human
uaaaggagaaggcauga

SEQ ID NO: 2141111 - RNA, 22 nt, Human
uaaaggagaaggcaugaaauug

SEQ ID NO: 2141112 - RNA, 14 nt, Human
uaaaggacagugaa

SEQ ID NO: 2141113 - RNA, 15 nt, Human
uaaagcuagaaauga

SEQ ID NO: 2141114 - RNA, 21 nt, Human
uaaagccugcuuuuuaagugu

SEQ ID NO: 2141115 - RNA, 16 nt, Human
uaaagccugcuuuuua

SEQ ID NO: 2141116 - RNA, 23 nt, Human
uaaagcauucaauuuauucaaga

SEQ ID NO: 2141117 - RNA, 22 nt, Human
uaaagcaugaaugguauggaac

SEQ ID NO: 2141118 - RNA, 19 nt, Human
uaaagcaguggacaccagg

SEQ ID NO: 2141119 - RNA, 14 nt, Human
uaaagcaucuaaac

SEQ ID NO: 2141120 - RNA, 15 nt, Human
uaaagcaucuaaacu

SEQ ID NO: 2141121 - RNA, 16 nt, Human
uaaagcaucuaaacuu

SEQ ID NO: 2141122 - RNA, 18 nt, Human
uaaagcaucuaaacuuua

SEQ ID NO: 2141123 - RNA, 14 nt, Human
uaaacuuuuagaaa

SEQ ID NO: 2141124 - RNA, 17 nt, Human
uaaacuuuuagaaacuu

SEQ ID NO: 2141125 - RNA, 19 nt, Human
uaaagcagucacuuuuccu

SEQ ID NO: 2141126 - RNA, 13 nt, Human
uaaagcaguggac

SEQ ID NO: 2141127 - RNA, 22 nt, Human
uaaauaaaacauuuucacacaa

SEQ ID NO: 2141128 - RNA, 21 nt, Human
uaaauaaaacauuuucacaca

SEQ ID NO: 2141129 - RNA, 20 nt, Human
uaaauaaaaaauaauaauac

SEQ ID NO: 2141130 - RNA, 21 nt, Human
uaaauaaaaaauaauaauaca

SEQ ID NO: 2141131 - RNA, 22 nt, Human
uaaauaaaaaauaauaauacaa

SEQ ID NO: 2141132 - RNA, 23 nt, Human
uaaauaaaaaauaauaauacaag

SEQ ID NO: 2141133 - RNA, 14 nt, Human
uaaauaaaaaugga

SEQ ID NO: 2141134 - RNA, 12 nt, Human
uaaaguucugug

SEQ ID NO: 2141135 - RNA, 13 nt, Human
uaaaguucugugu

SEQ ID NO: 2141136 - RNA, 14 nt, Human
uaaaguucugugua

SEQ ID NO: 2141137 - RNA, 23 nt, Human
uaaaguucuguguauuuaauugu

SEQ ID NO: 2141138 - RNA, 20 nt, Human
uaaaguugaagcuaagauuu

SEQ ID NO: 2141139 - RNA, 13 nt, Human
uaaaguuucuguu

SEQ ID NO: 2141140 - RNA, 20 nt, Human
uaaauaaacacauagauuca

SEQ ID NO: 2141141 - RNA, 23 nt, Human
uaaauaaacacauagauucaccu

SEQ ID NO: 2141142 - RNA, 11 nt, Human
uaaauaaaaua

SEQ ID NO: 2141143 - RNA, 12 nt, Human
uaaauaaaauaa

SEQ ID NO: 2141144 - RNA, 14 nt, Human
uaaauaaaauaacc

SEQ ID NO: 2141145 - RNA, 17 nt, Human
uaaauaaaauauaauug

SEQ ID NO: 2141146 - RNA, 17 nt, Human
uaaauaaaagugaucaa

SEQ ID NO: 2141147 - RNA, 20 nt, Human
uaaauaaaagaaaugcacaa

SEQ ID NO: 2141148 - RNA, 21 nt, Human
uaaauaaaagaaaugcacaau

SEQ ID NO: 2141149 - RNA, 14 nt, Human
uaaauaaaagcagc

SEQ ID NO: 2141150 - RNA, 15 nt, Human
uaaauaaaagcagca

SEQ ID NO: 2141151 - RNA, 19 nt, Human
uaaauaaaagcagcaucug

SEQ ID NO: 2141152 - RNA, 20 nt, Human
uaaauaaaagcagcaucugc

SEQ ID NO: 2141153 - RNA, 19 nt, Human
uaaauaaaagugaucaaua

SEQ ID NO: 2141154 - RNA, 13 nt, Human
uaaauauauguau

SEQ ID NO: 2141155 - RNA, 14 nt, Human
uaaauauauguaug

SEQ ID NO: 2141156 - RNA, 15 nt, Human
uaaauauauguaugu

SEQ ID NO: 2141157 - RNA, 16 nt, Human
uaaauauauguaugua

SEQ ID NO: 2141158 - RNA, 19 nt, Human
uaaauauauguauguaaaa

SEQ ID NO: 2141159 - RNA, 20 nt, Human
uaaauauauguauguaaaaa

SEQ ID NO: 2141160 - RNA, 15 nt, Human
uaaauauauuuucaa

SEQ ID NO: 2141161 - RNA, 14 nt, Human
uaaauaucaaucau

SEQ ID NO: 2141162 - RNA, 16 nt, Human
uaaauaucaaucauuu

SEQ ID NO: 2141163 - RNA, 17 nt, Human
uaaauaucuucugauuu

SEQ ID NO: 2141164 - RNA, 18 nt, Human
uaaauaucuucugauuug

SEQ ID NO: 2141165 - RNA, 22 nt, Human
uaaauaucuguacuucuucgau

SEQ ID NO: 2141166 - RNA, 11 nt, Human
uaaaucagugg

SEQ ID NO: 2141167 - RNA, 21 nt, Human
uaaaucauguuaauccuagcu

SEQ ID NO: 2141168 - RNA, 22 nt, Human
uaaaucauguuaauccuagcug

SEQ ID NO: 2141169 - RNA, 19 nt, Human
uaaaucaaguuggcuucua

SEQ ID NO: 2141170 - RNA, 23 nt, Human
uaaaucaaugucacuuaaaggcu

SEQ ID NO: 2141171 - RNA, 14 nt, Human
uaaaucaaugucac

SEQ ID NO: 2141172 - RNA, 19 nt, Human
uaaaucagccguguaacca

SEQ ID NO: 2141173 - RNA, 21 nt, Human
uaaauauguuagcaaagaguu

SEQ ID NO: 2141174 - RNA, 18 nt, Human
uaaauauguuagcaaaga

SEQ ID NO: 2141175 - RNA, 10 nt, Human
uaaauauuua

SEQ ID NO: 2141176 - RNA, 11 nt, Human
uaaauauuuac

SEQ ID NO: 2141177 - RNA, 17 nt, Human
uaaauauuuacauauga

SEQ ID NO: 2141178 - RNA, 18 nt, Human
uaaauauuuacauaugaa

SEQ ID NO: 2141179 - RNA, 19 nt, Human
uaaauauuuacauaugaaa

SEQ ID NO: 2141180 - RNA, 21 nt, Human
uaaauauuuacauaugaaauu

SEQ ID NO: 2141181 - RNA, 16 nt, Human
uaaauauuuauguaga

SEQ ID NO: 2141182 - RNA, 17 nt, Human
uaaauauuuauguagau

SEQ ID NO: 2141183 - RNA, 12 nt, Human
uaaauauuuccu

SEQ ID NO: 2141184 - RNA, 13 nt, Human
uaaauauuuccuu

SEQ ID NO: 2141185 - RNA, 14 nt, Human
uaaauauuuccuua

SEQ ID NO: 2141186 - RNA, 15 nt, Human
uaaauauuuccuuaa

SEQ ID NO: 2141187 - RNA, 14 nt, Human
uaaaaugaaauuac

SEQ ID NO: 2141188 - RNA, 20 nt, Human
uaaaaugagguucaacuguu

SEQ ID NO: 2141189 - RNA, 11 nt, Human
uaaaaucacua

SEQ ID NO: 2141190 - RNA, 16 nt, Human
uaaaaucacuaacauu

SEQ ID NO: 2141191 - RNA, 17 nt, Human
uaaaaucacuaacauua

SEQ ID NO: 2141192 - RNA, 18 nt, Human
uaaaaucacuaacauuau

SEQ ID NO: 2141193 - RNA, 19 nt, Human
uaaaaucacuaacauuaua

SEQ ID NO: 2141194 - RNA, 20 nt, Human
uaaaaucacuaacauuauau

SEQ ID NO: 2141195 - RNA, 18 nt, Human
uaaaaucacucucagugc

SEQ ID NO: 2141196 - RNA, 20 nt, Human
uaaaauccugcuuaaaacuu

SEQ ID NO: 2141197 - RNA, 13 nt, Human
uaaaagaucgcag

SEQ ID NO: 2141198 - RNA, 15 nt, Human
uaaaaaugguaaaau

SEQ ID NO: 2141199 - RNA, 16 nt, Human
uaaaaaugguaaaauu

SEQ ID NO: 2141200 - RNA, 17 nt, Human
uaaaaaugguaaaauug

SEQ ID NO: 2141201 - RNA, 18 nt, Human
uaaaaaugguaaaauugc

SEQ ID NO: 2141202 - RNA, 15 nt, Human
uaaaagcauaaaugc

SEQ ID NO: 2141203 - RNA, 15 nt, Human
uaaaagccaucaugu

SEQ ID NO: 2141204 - RNA, 18 nt, Human
uaaaagccaucauguaaa

SEQ ID NO: 2141205 - RNA, 20 nt, Human
uaaaagccaucauguaaauu

SEQ ID NO: 2141206 - RNA, 17 nt, Human
uaaaagcauaaaugcaa

SEQ ID NO: 2141207 - RNA, 18 nt, Human
uaaaagcauaaaugcaaa

SEQ ID NO: 2141208 - RNA, 12 nt, Human
uaaacuuuaaua

SEQ ID NO: 2141209 - RNA, 15 nt, Human
uaaacuuuaauaugu

SEQ ID NO: 2141210 - RNA, 16 nt, Human
uaaacuuuaauaugua

SEQ ID NO: 2141211 - RNA, 17 nt, Human
uaaacuuuaauauguau

SEQ ID NO: 2141212 - RNA, 18 nt, Human
uaaacuuuagaguagcau

SEQ ID NO: 2141213 - RNA, 20 nt, Human
uaaacauaauucuuguauau

SEQ ID NO: 2141214 - RNA, 15 nt, Human
uaaacauaauucuug

SEQ ID NO: 2141215 - RNA, 13 nt, Human
uaaacugcccugu

SEQ ID NO: 2141216 - RNA, 15 nt, Human
uaaacugcccugucu

SEQ ID NO: 2141217 - RNA, 16 nt, Human
uaaacugcccugucua

SEQ ID NO: 2141218 - RNA, 18 nt, Human
uaaacagcuucaugccuu

SEQ ID NO: 2141219 - RNA, 23 nt, Human
uaaacagcuucaugccuuuguaa

SEQ ID NO: 2141220 - RNA, 13 nt, Human
uaaacagugccug

SEQ ID NO: 2141221 - RNA, 17 nt, Human
uaaacagugccugcuga

SEQ ID NO: 2141222 - RNA, 18 nt, Human
uaaacagugccugcugaa

SEQ ID NO: 2141223 - RNA, 12 nt, Human
uaaacagugccu

SEQ ID NO: 2141224 - RNA, 19 nt, Human
uaaacaaauguaugauuac

SEQ ID NO: 2141225 - RNA, 12 nt, Human
uaaacaaaugua

SEQ ID NO: 2141226 - RNA, 15 nt, Human
uaaaaauggacaaaa

SEQ ID NO: 2141227 - RNA, 18 nt, Human
uaaacaauuuauuuuauu

SEQ ID NO: 2141228 - RNA, 24 nt, Human
uaaacaauuuauuuuauuuuagca

SEQ ID NO: 2141229 - RNA, 13 nt, Human
uaaacacauagau

SEQ ID NO: 2141230 - RNA, 16 nt, Human
uaaacacauagauuca

SEQ ID NO: 2141231 - RNA, 20 nt, Human
uaaacacauagauucaccug

SEQ ID NO: 2141232 - RNA, 12 nt, Human
guuuuucaguuu

SEQ ID NO: 2141233 - RNA, 16 nt, Human
guuuuuauuccuugug

SEQ ID NO: 2141234 - RNA, 21 nt, Human
guuuuuaugaagaaaaaauac

SEQ ID NO: 2141235 - RNA, 16 nt, Human
guuuuuauggggcuga

SEQ ID NO: 2141236 - RNA, 18 nt, Human
guuuuuauggggcugaac

SEQ ID NO: 2141237 - RNA, 20 nt, Human
uaaaaaaauaauaauaaugu

SEQ ID NO: 2141238 - RNA, 22 nt, Human
uaaaaaaauacaguauucugua

SEQ ID NO: 2141239 - RNA, 13 nt, Human
uaaaaaaaugaca

SEQ ID NO: 2141240 - RNA, 16 nt, Human
uaaaaaaaauaauaaa

SEQ ID NO: 2141241 - RNA, 17 nt, Human
uaaaaaaaauaauaaau

SEQ ID NO: 2141242 - RNA, 19 nt, Human
uaaaaaaaauccuucuaau

SEQ ID NO: 2141243 - RNA, 20 nt, Human
uaaaaaaaauccuucuaauc

SEQ ID NO: 2141244 - RNA, 13 nt, Human
uaaaaaaaaugaa

SEQ ID NO: 2141245 - RNA, 17 nt, Human
uaaaaaaaaugaaaugu

SEQ ID NO: 2141246 - RNA, 20 nt, Human
uaaaaaaaaugaaauguuuu

SEQ ID NO: 2141247 - RNA, 14 nt, Human
uaaaaaacaaagaa

SEQ ID NO: 2141248 - RNA, 19 nt, Human
uaaaaaacaaagaagacaa

SEQ ID NO: 2141249 - RNA, 20 nt, Human
uaaaaaacugcugacuguuu

SEQ ID NO: 2141250 - RNA, 23 nt, Human
uaaaaaacugcugacuguuuucu

SEQ ID NO: 2141251 - RNA, 15 nt, Human
uaaaaaacuuguaaa

SEQ ID NO: 2141252 - RNA, 12 nt, Human
uaaaaaagucuc

SEQ ID NO: 2141253 - RNA, 13 nt, Human
uaaaaaagucucu

SEQ ID NO: 2141254 - RNA, 14 nt, Human
uaaaaaagucucua

SEQ ID NO: 2141255 - RNA, 16 nt, Human
uaaaaaagucucuauu

SEQ ID NO: 2141256 - RNA, 17 nt, Human
uaaaaaagucucuauuu

SEQ ID NO: 2141257 - RNA, 18 nt, Human
uaaaaaagucucuauuua

SEQ ID NO: 2141258 - RNA, 19 nt, Human
uaaaaaagucucuauuuaa

SEQ ID NO: 2141259 - RNA, 20 nt, Human
uaaaaaagucucuauuuaaa

SEQ ID NO: 2141260 - RNA, 21 nt, Human
uaaaaaagucucuauuuaaau

SEQ ID NO: 2141261 - RNA, 22 nt, Human
uaaaaaagucucuauuuaaauu

SEQ ID NO: 2141262 - RNA, 17 nt, Human
uaaaaaaguuuaaaaug

SEQ ID NO: 2141263 - RNA, 18 nt, Human
uaaaaaaguuuaaaaugu

SEQ ID NO: 2141264 - RNA, 20 nt, Human
uaaaaaaguuuaaaauguau

SEQ ID NO: 2141265 - RNA, 17 nt, Human
uaaaaaauaauaauaca

SEQ ID NO: 2141266 - RNA, 19 nt, Human
uaaaaaauaauaauacaag

SEQ ID NO: 2141267 - RNA, 15 nt, Human
uaaaaaauuuuguaa

SEQ ID NO: 2141268 - RNA, 17 nt, Human
uaaaaaauuuuguaauu

SEQ ID NO: 2141269 - RNA, 13 nt, Human
uaaaaaaugucca

SEQ ID NO: 2141270 - RNA, 18 nt, Human
uaaaaacagcauugcuuu

SEQ ID NO: 2141271 - RNA, 19 nt, Human
uaaaaacagcauugcuuuc

SEQ ID NO: 2141272 - RNA, 17 nt, Human
uaaaaacagcauugcuu

SEQ ID NO: 2141273 - RNA, 11 nt, Human
uaaaaaugcaa

SEQ ID NO: 2141274 - RNA, 16 nt, Human
uaaaaacugacuccuu

SEQ ID NO: 2141275 - RNA, 17 nt, Human
uaaaaacugacuccuua

SEQ ID NO: 2141276 - RNA, 20 nt, Human
uaaaaacagcauugcuuucu

SEQ ID NO: 2141277 - RNA, 22 nt, Human
uaaaaacagcauugcuuucuga

SEQ ID NO: 2141278 - RNA, 14 nt, Human
uaaaaaccaagaag

SEQ ID NO: 2141279 - RNA, 20 nt, Human
guuuucuccugccugugcug

SEQ ID NO: 2141280 - RNA, 15 nt, Human
guuuuguagguacuu

SEQ ID NO: 2141281 - RNA, 18 nt, Human
guuuuguagguacuuuug

SEQ ID NO: 2141282 - RNA, 12 nt, Human
guuuucucuuga

SEQ ID NO: 2141283 - RNA, 19 nt, Human
guuuucucuugagagggug

SEQ ID NO: 2141284 - RNA, 23 nt, Human
guuuucucaacaaauggaaugcc

SEQ ID NO: 2141285 - RNA, 14 nt, Human
guuuuguuuuuuag

SEQ ID NO: 2141286 - RNA, 20 nt, Human
guuuuguuuuuuaguuccca

SEQ ID NO: 2141287 - RNA, 17 nt, Human
guuuuguuuuaaaauua

SEQ ID NO: 2141288 - RNA, 17 nt, Human
guuuugucaaacuguag

SEQ ID NO: 2141289 - RNA, 24 nt, Human
guuuugucaaacuguagaaaugau

SEQ ID NO: 2141290 - RNA, 19 nt, Human
guuuuguggaggagcucag

SEQ ID NO: 2141291 - RNA, 18 nt, Human
guuuugugauguuugucc

SEQ ID NO: 2141292 - RNA, 17 nt, Human
guuuuuacuuucuguug

SEQ ID NO: 2141293 - RNA, 16 nt, Human
guuuuuagagacaggg

SEQ ID NO: 2141294 - RNA, 15 nt, Human
guuuuuaacucaaua

SEQ ID NO: 2141295 - RNA, 15 nt, Human
guuuuuaaauauauu

SEQ ID NO: 2141296 - RNA, 19 nt, Human
guuuuuaacucaauauuuu

SEQ ID NO: 2141297 - RNA, 21 nt, Human
guuuuuaccuaccacaguguc

SEQ ID NO: 2141298 - RNA, 22 nt, Human
guuuuuaccuaccacagugucu

SEQ ID NO: 2141299 - RNA, 16 nt, Human
guuuuuacuacaguug

SEQ ID NO: 2141300 - RNA, 18 nt, Human
guuuguuucucccccugg

SEQ ID NO: 2141301 - RNA, 21 nt, Human
guuuguuucucccccugggcu

SEQ ID NO: 2141302 - RNA, 19 nt, Human
guuuguuucucccccuggg

SEQ ID NO: 2141303 - RNA, 20 nt, Human
guuuguuucucccccugggc

SEQ ID NO: 2141304 - RNA, 15 nt, Human
guuuguggccucaga

SEQ ID NO: 2141305 - RNA, 14 nt, Human
guuuucauaauaaa

SEQ ID NO: 2141306 - RNA, 22 nt, Human
guuuucauaauaaaacuuuaaa

SEQ ID NO: 2141307 - RNA, 17 nt, Human
guuuucaguguacaugg

SEQ ID NO: 2141308 - RNA, 16 nt, Human
guuuucaguguacaug

SEQ ID NO: 2141309 - RNA, 20 nt, Human
guuuucgaagcucagcccac

SEQ ID NO: 2141310 - RNA, 23 nt, Human
guuuucgaagcucagcccacccc

SEQ ID NO: 2141311 - RNA, 17 nt, Human
guuuucgaagcucagcc

SEQ ID NO: 2141312 - RNA, 18 nt, Human
guuuucgaagcucagccc

SEQ ID NO: 2141313 - RNA, 19 nt, Human
guuuucgaagcucagccca

SEQ ID NO: 2141314 - RNA, 19 nt, Human
guuuucuccugccugugcu

SEQ ID NO: 2141315 - RNA, 14 nt, Human
guuuuccacccugg

SEQ ID NO: 2141316 - RNA, 16 nt, Human
guuuuccacccuggaa

SEQ ID NO: 2141317 - RNA, 16 nt, Human
guuuucauguaaauaa

SEQ ID NO: 2141318 - RNA, 14 nt, Human
guuuccuucagugc

SEQ ID NO: 2141319 - RNA, 20 nt, Human
guuucgugaaguauacugua

SEQ ID NO: 2141320 - RNA, 13 nt, Human
guuugaauauaaa

SEQ ID NO: 2141321 - RNA, 19 nt, Human
guuugaauauaaacacuau

SEQ ID NO: 2141322 - RNA, 17 nt, Human
guuugaauauaaacacu

SEQ ID NO: 2141323 - RNA, 14 nt, Human
guuugguucugggg

SEQ ID NO: 2141324 - RNA, 14 nt, Human
guuugauccuuguu

SEQ ID NO: 2141325 - RNA, 16 nt, Human
guuugaggcugcagcg

SEQ ID NO: 2141326 - RNA, 13 nt, Human
guuugagcucaga

SEQ ID NO: 2141327 - RNA, 15 nt, Human
guuugagcucagacc

SEQ ID NO: 2141328 - RNA, 16 nt, Human
guuugagcucagaccc

SEQ ID NO: 2141329 - RNA, 15 nt, Human
guuuguaaauaagag

SEQ ID NO: 2141330 - RNA, 17 nt, Human
guuuguaaauaagagau

SEQ ID NO: 2141331 - RNA, 18 nt, Human
guuuguaaauaagagauu

SEQ ID NO: 2141332 - RNA, 19 nt, Human
guuuguggaaaaugaaaau

SEQ ID NO: 2141333 - RNA, 12 nt, Human
guuuguggccuc

SEQ ID NO: 2141334 - RNA, 13 nt, Human
guuuguggccuca

SEQ ID NO: 2141335 - RNA, 14 nt, Human
guuuguggccucag

SEQ ID NO: 2141336 - RNA, 15 nt, Human
guuugucugucuuca

SEQ ID NO: 2141337 - RNA, 18 nt, Human
guuugucugucuucauag

SEQ ID NO: 2141338 - RNA, 19 nt, Human
gguuggcugggcccagaag

SEQ ID NO: 2141339 - RNA, 15 nt, Human
gguuggcugggccca

SEQ ID NO: 2141340 - RNA, 21 nt, Human
gguuggccccugcccggcugc

SEQ ID NO: 2141341 - RNA, 13 nt, Human
gguugcagggagc

SEQ ID NO: 2141342 - RNA, 16 nt, Human
gguugcaaggccgcug

SEQ ID NO: 2141343 - RNA, 16 nt, Human
guuuacuuguuucaga

SEQ ID NO: 2141344 - RNA, 11 nt, Human
guuucauugac

SEQ ID NO: 2141345 - RNA, 20 nt, Human
guuucauugcgaaucuuuuu

SEQ ID NO: 2141346 - RNA, 14 nt, Human
guuuccaagcaaau

SEQ ID NO: 2141347 - RNA, 14 nt, Human
guuuccaaggagcu

SEQ ID NO: 2141348 - RNA, 15 nt, Human
guuuccaaggagcug

SEQ ID NO: 2141349 - RNA, 19 nt, Human
guuuccaaggagcugagaa

SEQ ID NO: 2141350 - RNA, 20 nt, Human
guuuccaaggagcugagaau

SEQ ID NO: 2141351 - RNA, 18 nt, Human
guuuccauuuuuuguucc

SEQ ID NO: 2141352 - RNA, 18 nt, Human
guuucauuuaugauacaa

SEQ ID NO: 2141353 - RNA, 22 nt, Human
guuuccacgaugaaaaacuucc

SEQ ID NO: 2141354 - RNA, 13 nt, Human
guuucccauaauu

SEQ ID NO: 2141355 - RNA, 15 nt, Human
ucaaaaacauucuua

SEQ ID NO: 2141356 - RNA, 23 nt, Human
uauuuuuuucuaccuugaggucu

SEQ ID NO: 2141357 - RNA, 22 nt, Human
ucaaaaacugucaaagaaucaa

SEQ ID NO: 2141358 - RNA, 23 nt, Human
ucaaaaagucuacgcucuccuuu

SEQ ID NO: 2141359 - RNA, 14 nt, Human
uauuuuuuucucuc

SEQ ID NO: 2141360 - RNA, 13 nt, Human
ucaaaaaaugagc

SEQ ID NO: 2141361 - RNA, 14 nt, Human
uauuuuuuucuacc

SEQ ID NO: 2141362 - RNA, 15 nt, Human
uauuuuuuucuaccu

SEQ ID NO: 2141363 - RNA, 18 nt, Human
ucaaaacucauuuccuau

SEQ ID NO: 2141364 - RNA, 22 nt, Human
ucaaaacgguuuuacugcagcu

SEQ ID NO: 2141365 - RNA, 18 nt, Human
ucaaaacggggcagccaa

SEQ ID NO: 2141366 - RNA, 16 nt, Human
ucaaacgugaaaaugc

SEQ ID NO: 2141367 - RNA, 15 nt, Human
ucaaacgugaaaaug

SEQ ID NO: 2141368 - RNA, 14 nt, Human
ucaaacucuuaaaa

SEQ ID NO: 2141369 - RNA, 23 nt, Human
uauuuuuguuggagccacucugu

SEQ ID NO: 2141370 - RNA, 19 nt, Human
uauuuuuguuguguucugu

SEQ ID NO: 2141371 - RNA, 20 nt, Human
uauuuuuguuucuuccaaag

SEQ ID NO: 2141372 - RNA, 13 nt, Human
uauuuuuuaagua

SEQ ID NO: 2141373 - RNA, 14 nt, Human
uauuuuuguuuguu

SEQ ID NO: 2141374 - RNA, 18 nt, Human
uauuuuuguuuguuuugu

SEQ ID NO: 2141375 - RNA, 12 nt, Human
uauuuuuuaauu

SEQ ID NO: 2141376 - RNA, 15 nt, Human
uauuuuuuaauuauu

SEQ ID NO: 2141377 - RNA, 15 nt, Human
uauuuuuuaaguauu

SEQ ID NO: 2141378 - RNA, 21 nt, Human
uauuuuuuaaguauuuauaua

SEQ ID NO: 2141379 - RNA, 16 nt, Human
uauuuuuuaauuauug

SEQ ID NO: 2141380 - RNA, 16 nt, Human
uauuuuuuaauuugau

SEQ ID NO: 2141381 - RNA, 23 nt, Human
uauuuuuuaauuugaugaaagcu

SEQ ID NO: 2141382 - RNA, 13 nt, Human
uauuuuuuauaca

SEQ ID NO: 2141383 - RNA, 14 nt, Human
uauuuuuuauacag

SEQ ID NO: 2141384 - RNA, 12 nt, Human
uauuuuuuauga

SEQ ID NO: 2141385 - RNA, 16 nt, Human
uauuuucuuuuguaaa

SEQ ID NO: 2141386 - RNA, 14 nt, Human
uauuuucuuugaaa

SEQ ID NO: 2141387 - RNA, 21 nt, Human
uauuuucaacgcagcccugcu

SEQ ID NO: 2141388 - RNA, 21 nt, Human
uauuuucaauucaaaaaugua

SEQ ID NO: 2141389 - RNA, 22 nt, Human
uauuuucaauucaaaaauguac

SEQ ID NO: 2141390 - RNA, 12 nt, Human
uauuuucagaau

SEQ ID NO: 2141391 - RNA, 13 nt, Human
uauuuucagaauc

SEQ ID NO: 2141392 - RNA, 14 nt, Human
uauuuucagaaucu

SEQ ID NO: 2141393 - RNA, 20 nt, Human
uauuuucagaaucugaaugu

SEQ ID NO: 2141394 - RNA, 21 nt, Human
uauuuucagaaucugaaugua

SEQ ID NO: 2141395 - RNA, 22 nt, Human
uauuuucagaaucugaauguaa

SEQ ID NO: 2141396 - RNA, 23 nt, Human
uauuuucagaaucugaauguaau

SEQ ID NO: 2141397 - RNA, 15 nt, Human
uauuuuauauaauaa

SEQ ID NO: 2141398 - RNA, 20 nt, Human
uauuuuauauaauaaaguau

SEQ ID NO: 2141399 - RNA, 21 nt, Human
uauuuuauauaauaaaguauu

SEQ ID NO: 2141400 - RNA, 16 nt, Human
uauuuuauacauuaac

SEQ ID NO: 2141401 - RNA, 21 nt, Human
uauuuuauaaaauuaaagaaa

SEQ ID NO: 2141402 - RNA, 14 nt, Human
uauuuuauguaugu

SEQ ID NO: 2141403 - RNA, 14 nt, Human
uaucugaaaaugua

SEQ ID NO: 2141404 - RNA, 15 nt, Human
uaucugaaaauguau

SEQ ID NO: 2141405 - RNA, 23 nt, Human
uaucucuuuugaauccaugcuug

SEQ ID NO: 2141406 - RNA, 20 nt, Human
uaucugaaaauguaugugua

SEQ ID NO: 2141407 - RNA, 15 nt, Human
uauuuauuaaauuuu

SEQ ID NO: 2141408 - RNA, 13 nt, Human
uauuuauuaaauu

SEQ ID NO: 2141409 - RNA, 14 nt, Human
uauuuauuaaauuu

SEQ ID NO: 2141410 - RNA, 17 nt, Human
uauuuauugcuacuucc

SEQ ID NO: 2141411 - RNA, 21 nt, Human
uauuuauugcuacuuccugcc

SEQ ID NO: 2141412 - RNA, 13 nt, Human
uauuuauuguauu

SEQ ID NO: 2141413 - RNA, 16 nt, Human
uauuuauuguuuauuu

SEQ ID NO: 2141414 - RNA, 11 nt, Human
uauuuauuuaa

SEQ ID NO: 2141415 - RNA, 22 nt, Human
uauuuauuguuuauuuaucagu

SEQ ID NO: 2141416 - RNA, 13 nt, Human
uauuuauuaagau

SEQ ID NO: 2141417 - RNA, 13 nt, Human
uauuuauuaccuc

SEQ ID NO: 2141418 - RNA, 16 nt, Human
uauuuauuaccucuga

SEQ ID NO: 2141419 - RNA, 15 nt, Human
uauuuauuaccucug

SEQ ID NO: 2141420 - RNA, 21 nt, Human
uauuuuagacaaaucuaaggg

SEQ ID NO: 2141421 - RNA, 13 nt, Human
uauuuuagcaguu

SEQ ID NO: 2141422 - RNA, 20 nt, Human
uauuuuagcaguucugcaaa

SEQ ID NO: 2141423 - RNA, 21 nt, Human
uauuuuagcaguucugcaaau

SEQ ID NO: 2141424 - RNA, 22 nt, Human
uauuuuagcaguucugcaaaua

SEQ ID NO: 2141425 - RNA, 11 nt, Human
uauuucugaga

SEQ ID NO: 2141426 - RNA, 16 nt, Human
uauuucugagaagguc

SEQ ID NO: 2141427 - RNA, 21 nt, Human
uauuucugagaagguccuuaa

SEQ ID NO: 2141428 - RNA, 20 nt, Human
uauuucuuaaacaaauguau

SEQ ID NO: 2141429 - RNA, 14 nt, Human
uauuugagacauuc

SEQ ID NO: 2141430 - RNA, 16 nt, Human
uauuugagacuaguuu

SEQ ID NO: 2141431 - RNA, 17 nt, Human
ucaagcgauucuucugc

SEQ ID NO: 2141432 - RNA, 13 nt, Human
ucaagcuaauaaa

SEQ ID NO: 2141433 - RNA, 19 nt, Human
ucaagcuaauaaaauauca

SEQ ID NO: 2141434 - RNA, 20 nt, Human
ucaagcuaauaaaauaucau

SEQ ID NO: 2141435 - RNA, 22 nt, Human
ucaagcuaauaaaauaucauuc

SEQ ID NO: 2141436 - RNA, 23 nt, Human
ucaagcuaauaaaauaucauuca

SEQ ID NO: 2141437 - RNA, 16 nt, Human
ucaagcgauucuucug

SEQ ID NO: 2141438 - RNA, 14 nt, Human
ucaagccugccuag

SEQ ID NO: 2141439 - RNA, 17 nt, Human
ucaagccaagcagccaa

SEQ ID NO: 2141440 - RNA, 12 nt, Human
ucaagcccugca

SEQ ID NO: 2141441 - RNA, 13 nt, Human
ucaagcccugcag

SEQ ID NO: 2141442 - RNA, 15 nt, Human
ucaagccaagcagcc

SEQ ID NO: 2141443 - RNA, 16 nt, Human
ucaagccaagcagcca

SEQ ID NO: 2141444 - RNA, 19 nt, Human
ucaagccaagcagccaagc

SEQ ID NO: 2141445 - RNA, 19 nt, Human
ucaagcccaggaggacugc

SEQ ID NO: 2141446 - RNA, 19 nt, Human
ucaagcagucuacccaccu

SEQ ID NO: 2141447 - RNA, 20 nt, Human
ucaagcagucuacccaccuc

SEQ ID NO: 2141448 - RNA, 14 nt, Human
ucaagcaucuccug

SEQ ID NO: 2141449 - RNA, 18 nt, Human
ucaagcaucuccugagga

SEQ ID NO: 2141450 - RNA, 22 nt, Human
ucaagcaucuccugaggaucag

SEQ ID NO: 2141451 - RNA, 23 nt, Human
ucaagcaucuccugaggaucaga

SEQ ID NO: 2141452 - RNA, 14 nt, Human
ucaagccaagcagc

SEQ ID NO: 2141453 - RNA, 22 nt, Human
ucaagugauucuccugccucag

SEQ ID NO: 2141454 - RNA, 17 nt, Human
ucaagccgcaucccaga

SEQ ID NO: 2141455 - RNA, 19 nt, Human
ucaagugcaugcucucugc

SEQ ID NO: 2141456 - RNA, 20 nt, Human
ucaagugcaugcucucugca

SEQ ID NO: 2141457 - RNA, 21 nt, Human
ucaagugcaugcucucugcag

SEQ ID NO: 2141458 - RNA, 22 nt, Human
ucaagugcaugcucucugcagc

SEQ ID NO: 2141459 - RNA, 14 nt, Human
ucaagcugcuugga

SEQ ID NO: 2141460 - RNA, 16 nt, Human
ucaacucaccuaaugu

SEQ ID NO: 2141461 - RNA, 19 nt, Human
ucaacucaccuaauguuua

SEQ ID NO: 2141462 - RNA, 14 nt, Human
ucaaccuccugggc

SEQ ID NO: 2141463 - RNA, 13 nt, Human
ucaaccuccuggg

SEQ ID NO: 2141464 - RNA, 16 nt, Human
ucaaacugaagccaga

SEQ ID NO: 2141465 - RNA, 22 nt, Human
ucaaacucuugaccucagguga

SEQ ID NO: 2141466 - RNA, 11 nt, Human
ucacaggcagg

SEQ ID NO: 2141467 - RNA, 23 nt, Human
ucacacagugagucgaggacagg

SEQ ID NO: 2141468 - RNA, 22 nt, Human
ucacacagugagucgaggacag

SEQ ID NO: 2141469 - RNA, 14 nt, Human
ucacacaaagcaga

SEQ ID NO: 2141470 - RNA, 13 nt, Human
ucacacagugagu

SEQ ID NO: 2141471 - RNA, 22 nt, Human
ucacacaguauuacuucugcua

SEQ ID NO: 2141472 - RNA, 21 nt, Human
ucacacaguauuacuucugcu

SEQ ID NO: 2141473 - RNA, 19 nt, Human
ucacacaauacaauaaguu

SEQ ID NO: 2141474 - RNA, 10 nt, Human
ucacacacac

SEQ ID NO: 2141475 - RNA, 13 nt, Human
ucacacaaagcag

SEQ ID NO: 2141476 - RNA, 16 nt, Human
ucacaauagaaacuca

SEQ ID NO: 2141477 - RNA, 23 nt, Human
ucacaaugaaaugcucuccuuuc

SEQ ID NO: 2141478 - RNA, 20 nt, Human
ucacaaguuguguuugauau

SEQ ID NO: 2141479 - RNA, 22 nt, Human
ucacaaugaaaugcucuccuuu

SEQ ID NO: 2141480 - RNA, 18 nt, Human
ucacaauaaauguauuca

SEQ ID NO: 2141481 - RNA, 14 nt, Human
ucacaauagaaacu

SEQ ID NO: 2141482 - RNA, 21 nt, Human
ucacaauggugcucauuucau

SEQ ID NO: 2141483 - RNA, 17 nt, Human
ucaaugcuauaacuaug

SEQ ID NO: 2141484 - RNA, 18 nt, Human
ucaaugcacugacauugu

SEQ ID NO: 2141485 - RNA, 17 nt, Human
ucaaugguuugcaagga

SEQ ID NO: 2141486 - RNA, 16 nt, Human
ucaauuaaauguaggu

SEQ ID NO: 2141487 - RNA, 14 nt, Human
ucaaugcacugaca

SEQ ID NO: 2141488 - RNA, 21 nt, Human
ucaaguuauugacaaacucuc

SEQ ID NO: 2141489 - RNA, 15 nt, Human
ucaaguuagcucagg

SEQ ID NO: 2141490 - RNA, 16 nt, Human
ucaagugucucagucc

SEQ ID NO: 2141491 - RNA, 21 nt, Human
ucaagugucucaguccaccug

SEQ ID NO: 2141492 - RNA, 14 nt, Human
ucaaguuaaaguga

SEQ ID NO: 2141493 - RNA, 17 nt, Human
ucaauacaguacaggca

SEQ ID NO: 2141494 - RNA, 18 nt, Human
ucaauacaguacaggcag

SEQ ID NO: 2141495 - RNA, 19 nt, Human
ucaauacaguacaggcagc

SEQ ID NO: 2141496 - RNA, 20 nt, Human
ucaauacaguacaggcagca

SEQ ID NO: 2141497 - RNA, 12 nt, Human
ucacuuugcucu

SEQ ID NO: 2141498 - RNA, 14 nt, Human
ucacuuugcucuga

SEQ ID NO: 2141499 - RNA, 13 nt, Human
ucacuuuucugua

SEQ ID NO: 2141500 - RNA, 21 nt, Human
ucacuuuucuguaacgccugc

SEQ ID NO: 2141501 - RNA, 16 nt, Human
ucagaaaaacaauaag

SEQ ID NO: 2141502 - RNA, 11 nt, Human
ucagaaaacag

SEQ ID NO: 2141503 - RNA, 12 nt, Human
ucagaaaacaga

SEQ ID NO: 2141504 - RNA, 16 nt, Human
ucagaaaacagaaaaa

SEQ ID NO: 2141505 - RNA, 17 nt, Human
ucagaaaacagaaaaaa

SEQ ID NO: 2141506 - RNA, 20 nt, Human
ucagaaaacagaaaaaaaac

SEQ ID NO: 2141507 - RNA, 14 nt, Human
ucagaaagagcaag

SEQ ID NO: 2141508 - RNA, 23 nt, Human
ucagaaagagcaagucuggaucu

SEQ ID NO: 2141509 - RNA, 16 nt, Human
ucagaaaguaauuucu

SEQ ID NO: 2141510 - RNA, 16 nt, Human
ucacuggcaaugaaaa

SEQ ID NO: 2141511 - RNA, 15 nt, Human
ucacuggcagcccca

SEQ ID NO: 2141512 - RNA, 18 nt, Human
ucacuggcagccccagca

SEQ ID NO: 2141513 - RNA, 19 nt, Human
ucacuggcagccccagcac

SEQ ID NO: 2141514 - RNA, 15 nt, Human
ucacuggcaucuuug

SEQ ID NO: 2141515 - RNA, 16 nt, Human
ucacuggcaucuuugc

SEQ ID NO: 2141516 - RNA, 11 nt, Human
ucacuugcagu

SEQ ID NO: 2141517 - RNA, 16 nt, Human
ucacucugucgcccag

SEQ ID NO: 2141518 - RNA, 12 nt, Human
ucacucugucgc

SEQ ID NO: 2141519 - RNA, 19 nt, Human
ucacucugucgcccagucu

SEQ ID NO: 2141520 - RNA, 22 nt, Human
ucacucugucgcccagucugga

SEQ ID NO: 2141521 - RNA, 18 nt, Human
ucagaggcacaaaagggu

SEQ ID NO: 2141522 - RNA, 15 nt, Human
ucagagcugggaggg

SEQ ID NO: 2141523 - RNA, 15 nt, Human
ucagaggcugaggug

SEQ ID NO: 2141524 - RNA, 21 nt, Human
ucagagggaaaguaaauauuu

SEQ ID NO: 2141525 - RNA, 17 nt, Human
ucagaguccaggcccca

SEQ ID NO: 2141526 - RNA, 14 nt, Human
ucagagggaggaau

SEQ ID NO: 2141527 - RNA, 14 nt, Human
ucagagggcccaaa

SEQ ID NO: 2141528 - RNA, 20 nt, Human
ucagagggcccaaauggcag

SEQ ID NO: 2141529 - RNA, 14 nt, Human
ucagaguccaggcc

SEQ ID NO: 2141530 - RNA, 16 nt, Human
ucagaguccaggcccc

SEQ ID NO: 2141531 - RNA, 23 nt, Human
ucagcacuugggggaucuguugu

SEQ ID NO: 2141532 - RNA, 13 nt, Human
ucagcaauauuua

SEQ ID NO: 2141533 - RNA, 19 nt, Human
ucagcaauauuuaaggaga

SEQ ID NO: 2141534 - RNA, 12 nt, Human
ucagaaauaugu

SEQ ID NO: 2141535 - RNA, 14 nt, Human
ucagacuagugaca

SEQ ID NO: 2141536 - RNA, 14 nt, Human
ucagacugaacaug

SEQ ID NO: 2141537 - RNA, 19 nt, Human
ucagacugaacauguacac

SEQ ID NO: 2141538 - RNA, 13 nt, Human
ucagacugcuggg

SEQ ID NO: 2141539 - RNA, 14 nt, Human
ucagacugcuggga

SEQ ID NO: 2141540 - RNA, 15 nt, Human
ucagacugcugggac

SEQ ID NO: 2141541 - RNA, 16 nt, Human
ucagacugcugggacu

SEQ ID NO: 2141542 - RNA, 17 nt, Human
ucagacugcugggacug

SEQ ID NO: 2141543 - RNA, 21 nt, Human
ucagacugcugggacuggcca

SEQ ID NO: 2141544 - RNA, 23 nt, Human
ucagaggacaccuguacuggaga

SEQ ID NO: 2141545 - RNA, 18 nt, Human
ucacuccuaccugguaau

SEQ ID NO: 2141546 - RNA, 22 nt, Human
ucacgggagauuucuuguugcu

SEQ ID NO: 2141547 - RNA, 18 nt, Human
ucacgggcaguagcugug

SEQ ID NO: 2141548 - RNA, 23 nt, Human
ucacggcaggacaacgaggaagc

SEQ ID NO: 2141549 - RNA, 11 nt, Human
ucacuccuggg

SEQ ID NO: 2141550 - RNA, 12 nt, Human
ucacuccugggg

SEQ ID NO: 2141551 - RNA, 13 nt, Human
ucacuccuggggc

SEQ ID NO: 2141552 - RNA, 15 nt, Human
ucacucgcccccggg

SEQ ID NO: 2141553 - RNA, 20 nt, Human
ucacuccuggggccucuugg

SEQ ID NO: 2141554 - RNA, 20 nt, Human
ucacggcucacugcagccuc

SEQ ID NO: 2141555 - RNA, 15 nt, Human
ucacggcucacugca

SEQ ID NO: 2141556 - RNA, 13 nt, Human
ucacggcucacug

SEQ ID NO: 2141557 - RNA, 22 nt, Human
ucacggcaggacaacgaggaag

SEQ ID NO: 2141558 - RNA, 14 nt, Human
ucacggaagagccu

SEQ ID NO: 2141559 - RNA, 16 nt, Human
ucacggaagagccuug

SEQ ID NO: 2141560 - RNA, 17 nt, Human
ucacggaagagccuugc

SEQ ID NO: 2141561 - RNA, 13 nt, Human
ucacucucagugc

SEQ ID NO: 2141562 - RNA, 20 nt, Human
ucacucuacuuagcaugucc

SEQ ID NO: 2141563 - RNA, 19 nt, Human
ucacucuacuuagcauguc

SEQ ID NO: 2141564 - RNA, 18 nt, Human
ucaccuugcaacacacag

SEQ ID NO: 2141565 - RNA, 19 nt, Human
ucaccuugcaacacacaga

SEQ ID NO: 2141566 - RNA, 21 nt, Human
ucaccuugcaacacacagaca

SEQ ID NO: 2141567 - RNA, 14 nt, Human
ucaccuuucccauc

SEQ ID NO: 2141568 - RNA, 18 nt, Human
ucaccucaggccaggugc

SEQ ID NO: 2141569 - RNA, 15 nt, Human
ucacaggcaggucca

SEQ ID NO: 2141570 - RNA, 12 nt, Human
ucacaggcaggu

SEQ ID NO: 2141571 - RNA, 18 nt, Human
ucacagggcagagccggg

SEQ ID NO: 2141572 - RNA, 19 nt, Human
ucacagggcagagccggga

SEQ ID NO: 2141573 - RNA, 15 nt, Human
ucacagggcagagcc

SEQ ID NO: 2141574 - RNA, 15 nt, Human
ucaccuacuuuguaa

SEQ ID NO: 2141575 - RNA, 14 nt, Human
ucaccuagaaacuu

SEQ ID NO: 2141576 - RNA, 18 nt, Human
ucaccuagaaacuuguua

SEQ ID NO: 2141577 - RNA, 16 nt, Human
ucacagggccccagaa

SEQ ID NO: 2141578 - RNA, 17 nt, Human
ucacagggccccagaag

SEQ ID NO: 2141579 - RNA, 15 nt, Human
ucacgcaccucccau

SEQ ID NO: 2141580 - RNA, 16 nt, Human
ucacgcaccucccauc

SEQ ID NO: 2141581 - RNA, 17 nt, Human
ucaccuuucccuaaaga

SEQ ID NO: 2141582 - RNA, 12 nt, Human
ucaccuuuuaaa

SEQ ID NO: 2141583 - RNA, 16 nt, Human
ucaccuuuuaaauccu

SEQ ID NO: 2141584 - RNA, 18 nt, Human
ucaccuuuuaaauccugu

SEQ ID NO: 2141585 - RNA, 19 nt, Human
ucaccuuuuaaauccuguu

SEQ ID NO: 2141586 - RNA, 22 nt, Human
ucaccuuuuaaauccuguugaa

SEQ ID NO: 2141587 - RNA, 23 nt, Human
ucaccuuuuaaauccuguugaaa

SEQ ID NO: 2141588 - RNA, 14 nt, Human
ucacgccacugcac

SEQ ID NO: 2141589 - RNA, 13 nt, Human
ucacgccacugca

SEQ ID NO: 2141590 - RNA, 16 nt, Human
ucacgccacugcacua

SEQ ID NO: 2141591 - RNA, 17 nt, Human
ucacgcaccucccaucc

SEQ ID NO: 2141592 - RNA, 16 nt, Human
ucacgccacugcacuc

SEQ ID NO: 2141593 - RNA, 17 nt, Human
ucacgccacugcacucc

SEQ ID NO: 2141594 - RNA, 22 nt, Human
ucacgccacugcacuccagccu

SEQ ID NO: 2141595 - RNA, 19 nt, Human
ucacgccuguaauccuagc

SEQ ID NO: 2141596 - RNA, 19 nt, Human
ucacgccuguaaucccagc

SEQ ID NO: 2141597 - RNA, 20 nt, Human
ucacgccuguaaucccagca

SEQ ID NO: 2141598 - RNA, 19 nt, Human
ucacgccuaugaucccagc

SEQ ID NO: 2141599 - RNA, 21 nt, Human
ucacgccuaugaucccagcac

SEQ ID NO: 2141600 - RNA, 23 nt, Human
ucacgcucccaacacaagguggg

SEQ ID NO: 2141601 - RNA, 21 nt, Human
ucacgccuguaaucccagcag

SEQ ID NO: 2141602 - RNA, 13 nt, Human
ucacgccugugca

SEQ ID NO: 2141603 - RNA, 16 nt, Human
ucacgccugugcagug

SEQ ID NO: 2141604 - RNA, 20 nt, Human
ucacgccuguaauccuagca

SEQ ID NO: 2141605 - RNA, 15 nt, Human
uccccagcuguuuau

SEQ ID NO: 2141606 - RNA, 12 nt, Human
ucccccagcccu

SEQ ID NO: 2141607 - RNA, 13 nt, Human
ucccccagcccug

SEQ ID NO: 2141608 - RNA, 14 nt, Human
ucccccagcccugu

SEQ ID NO: 2141609 - RNA, 15 nt, Human
ucccccagcccugug

SEQ ID NO: 2141610 - RNA, 12 nt, Human
ucccccauagcc

SEQ ID NO: 2141611 - RNA, 16 nt, Human
ucccccagcccugugg

SEQ ID NO: 2141612 - RNA, 17 nt, Human
ucccccagcccugugga

SEQ ID NO: 2141613 - RNA, 14 nt, Human
ucccccauagccac

SEQ ID NO: 2141614 - RNA, 15 nt, Human
ucccccauagccacc

SEQ ID NO: 2141615 - RNA, 17 nt, Human
ucccccauccuccccuu

SEQ ID NO: 2141616 - RNA, 18 nt, Human
ucccccauccuccccuuc

SEQ ID NO: 2141617 - RNA, 21 nt, Human
ucccccauccuccccuucccu

SEQ ID NO: 2141618 - RNA, 14 nt, Human
uccccagcuguuua

SEQ ID NO: 2141619 - RNA, 23 nt, Human
uccccagccuuugaucagguggg

SEQ ID NO: 2141620 - RNA, 14 nt, Human
uccccagccucucu

SEQ ID NO: 2141621 - RNA, 16 nt, Human
uccccagccucucuuc

SEQ ID NO: 2141622 - RNA, 17 nt, Human
uccccagccucucuucc

SEQ ID NO: 2141623 - RNA, 18 nt, Human
uccccagccucucuuccu

SEQ ID NO: 2141624 - RNA, 22 nt, Human
uccccagccucucuuccuaucc

SEQ ID NO: 2141625 - RNA, 13 nt, Human
ucccccugcccca

SEQ ID NO: 2141626 - RNA, 16 nt, Human
ucccccugccagugcc

SEQ ID NO: 2141627 - RNA, 17 nt, Human
ucccccugccagugccu

SEQ ID NO: 2141628 - RNA, 18 nt, Human
ucccccugccagugccuu

SEQ ID NO: 2141629 - RNA, 11 nt, Human
ucccccuccuu

SEQ ID NO: 2141630 - RNA, 12 nt, Human
ucccccuccuuc

SEQ ID NO: 2141631 - RNA, 18 nt, Human
ucccccuccuucccagcu

SEQ ID NO: 2141632 - RNA, 19 nt, Human
ucccccuccuucccagcug

SEQ ID NO: 2141633 - RNA, 20 nt, Human
ucccccuccuucccagcugc

SEQ ID NO: 2141634 - RNA, 21 nt, Human
ucccccuccuucccagcugcc

SEQ ID NO: 2141635 - RNA, 19 nt, Human
ucccccauccuccccuucc

SEQ ID NO: 2141636 - RNA, 20 nt, Human
ucccccgcaaugugccccca

SEQ ID NO: 2141637 - RNA, 21 nt, Human
ucccccgcaaugugcccccag

SEQ ID NO: 2141638 - RNA, 21 nt, Human
ucccccguagaaaucccccuu

SEQ ID NO: 2141639 - RNA, 17 nt, Human
ucccccucccagggcca

SEQ ID NO: 2141640 - RNA, 18 nt, Human
ucccccucccagggccag

SEQ ID NO: 2141641 - RNA, 19 nt, Human
ucccccucccagggccagg

SEQ ID NO: 2141642 - RNA, 23 nt, Human
uccccugcccccagaccuuuuau

SEQ ID NO: 2141643 - RNA, 13 nt, Human
uccccugccauuu

SEQ ID NO: 2141644 - RNA, 16 nt, Human
uccccgcauuccaggc

SEQ ID NO: 2141645 - RNA, 18 nt, Human
uccccgcauuccaggcuc

SEQ ID NO: 2141646 - RNA, 19 nt, Human
uccccgcauuccaggcucc

SEQ ID NO: 2141647 - RNA, 15 nt, Human
uccccuucccugcaa

SEQ ID NO: 2141648 - RNA, 13 nt, Human
uccccuucccugc

SEQ ID NO: 2141649 - RNA, 10 nt, Human
ucccccuggg

SEQ ID NO: 2141650 - RNA, 19 nt, Human
uccccuucgcguauuucag

SEQ ID NO: 2141651 - RNA, 22 nt, Human
uccccuucgcguauuucaggau

SEQ ID NO: 2141652 - RNA, 15 nt, Human
ucccuaagccaaggg

SEQ ID NO: 2141653 - RNA, 20 nt, Human
ucccuaagccaagggccucu

SEQ ID NO: 2141654 - RNA, 11 nt, Human
ucccuaccuca

SEQ ID NO: 2141655 - RNA, 15 nt, Human
ucccuaccucaaccu

SEQ ID NO: 2141656 - RNA, 16 nt, Human
ucccuaccucaaccug

SEQ ID NO: 2141657 - RNA, 20 nt, Human
ucccuaccucaaccuguaaa

SEQ ID NO: 2141658 - RNA, 21 nt, Human
ucccuaccucaaccuguaaau

SEQ ID NO: 2141659 - RNA, 22 nt, Human
ucccuaccucaaccuguaaauu

SEQ ID NO: 2141660 - RNA, 13 nt, Human
ucccuaccucagg

SEQ ID NO: 2141661 - RNA, 19 nt, Human
ucccuaccuugaaagaaga

SEQ ID NO: 2141662 - RNA, 15 nt, Human
ucccuaccucaggca

SEQ ID NO: 2141663 - RNA, 17 nt, Human
ucccuaccucaggcagg

SEQ ID NO: 2141664 - RNA, 14 nt, Human
ucccucccucugcc

SEQ ID NO: 2141665 - RNA, 16 nt, Human
ucccucccucugccgg

SEQ ID NO: 2141666 - RNA, 17 nt, Human
ucccucccucuuucccu

SEQ ID NO: 2141667 - RNA, 16 nt, Human
ucccuacuuccuguga

SEQ ID NO: 2141668 - RNA, 15 nt, Human
ucccuacuuccugug

SEQ ID NO: 2141669 - RNA, 15 nt, Human
ucccucccucuuucc

SEQ ID NO: 2141670 - RNA, 19 nt, Human
uccccuguagagugggagc

SEQ ID NO: 2141671 - RNA, 15 nt, Human
uccccuguucacucu

SEQ ID NO: 2141672 - RNA, 22 nt, Human
uccccuguagagugggagcuga

SEQ ID NO: 2141673 - RNA, 17 nt, Human
uccccugcccuggucca

SEQ ID NO: 2141674 - RNA, 24 nt, Human
uccccugcccugguccagggaagc

SEQ ID NO: 2141675 - RNA, 12 nt, Human
uccccugcccug

SEQ ID NO: 2141676 - RNA, 15 nt, Human
uccccugcccugcug

SEQ ID NO: 2141677 - RNA, 16 nt, Human
uccccugcccugcugc

SEQ ID NO: 2141678 - RNA, 23 nt, Human
uccccugcccugcugccgccucc

SEQ ID NO: 2141679 - RNA, 13 nt, Human
uccccugcccugg

SEQ ID NO: 2141680 - RNA, 15 nt, Human
uccccugcccugguc

SEQ ID NO: 2141681 - RNA, 21 nt, Human
ucccaaagugcugggauuaca

SEQ ID NO: 2141682 - RNA, 14 nt, Human
uccauguacuguag

SEQ ID NO: 2141683 - RNA, 16 nt, Human
uccauguacuguaguu

SEQ ID NO: 2141684 - RNA, 20 nt, Human
uccauguacuguaguuuuuc

SEQ ID NO: 2141685 - RNA, 21 nt, Human
uccauguacuguaguuuuucu

SEQ ID NO: 2141686 - RNA, 14 nt, Human
uccauguagcagga

SEQ ID NO: 2141687 - RNA, 15 nt, Human
uccauguagcaggac

SEQ ID NO: 2141688 - RNA, 13 nt, Human
uccauggugccuc

SEQ ID NO: 2141689 - RNA, 15 nt, Human
uccauggugccucug

SEQ ID NO: 2141690 - RNA, 16 nt, Human
uccauggugccucugg

SEQ ID NO: 2141691 - RNA, 17 nt, Human
uccauggugccucugga

SEQ ID NO: 2141692 - RNA, 13 nt, Human
uccauguacugua

SEQ ID NO: 2141693 - RNA, 15 nt, Human
uccaugggggcaggg

SEQ ID NO: 2141694 - RNA, 17 nt, Human
uccaugggggcagggca

SEQ ID NO: 2141695 - RNA, 18 nt, Human
uccaucccuacccccuaa

SEQ ID NO: 2141696 - RNA, 14 nt, Human
uccauggauuuugg

SEQ ID NO: 2141697 - RNA, 15 nt, Human
uccaucccagcggcu

SEQ ID NO: 2141698 - RNA, 14 nt, Human
uccaucccaucauc

SEQ ID NO: 2141699 - RNA, 14 nt, Human
uccaucccuacccc

SEQ ID NO: 2141700 - RNA, 23 nt, Human
uccagcucaccagccccagugcc

SEQ ID NO: 2141701 - RNA, 13 nt, Human
uccagcucagcag

SEQ ID NO: 2141702 - RNA, 15 nt, Human
ucccaagcucugcuc

SEQ ID NO: 2141703 - RNA, 14 nt, Human
ucccaagcucugcu

SEQ ID NO: 2141704 - RNA, 13 nt, Human
ucccaagcucugc

SEQ ID NO: 2141705 - RNA, 12 nt, Human
ucccaagcucug

SEQ ID NO: 2141706 - RNA, 18 nt, Human
ucccaaggcucugagcaa

SEQ ID NO: 2141707 - RNA, 22 nt, Human
ucccaaggaaagccccagcacu

SEQ ID NO: 2141708 - RNA, 12 nt, Human
ucccaaggaaag

SEQ ID NO: 2141709 - RNA, 13 nt, Human
ucccaaggaaagc

SEQ ID NO: 2141710 - RNA, 17 nt, Human
ucccaagcucugcuccu

SEQ ID NO: 2141711 - RNA, 12 nt, Human
ucccaagcugga

SEQ ID NO: 2141712 - RNA, 20 nt, Human
ucccaagcuggagugcagug

SEQ ID NO: 2141713 - RNA, 22 nt, Human
ucccaagcuggagugcaguggu

SEQ ID NO: 2141714 - RNA, 17 nt, Human
uccauguagcaggacug

SEQ ID NO: 2141715 - RNA, 22 nt, Human
uccccacuugagaauuacccuu

SEQ ID NO: 2141716 - RNA, 14 nt, Human
ucccauugcccugg

SEQ ID NO: 2141717 - RNA, 15 nt, Human
ucccauugcccuggu

SEQ ID NO: 2141718 - RNA, 14 nt, Human
ucccauugaaaaug

SEQ ID NO: 2141719 - RNA, 20 nt, Human
ucccauugaaaauguaagua

SEQ ID NO: 2141720 - RNA, 13 nt, Human
ucccauugcccug

SEQ ID NO: 2141721 - RNA, 13 nt, Human
uccccagaccuga

SEQ ID NO: 2141722 - RNA, 17 nt, Human
uccccagaaaggagacu

SEQ ID NO: 2141723 - RNA, 16 nt, Human
uccccagaccugagcu

SEQ ID NO: 2141724 - RNA, 12 nt, Human
ucccaugcccug

SEQ ID NO: 2141725 - RNA, 15 nt, Human
ucccaccucagccuc

SEQ ID NO: 2141726 - RNA, 14 nt, Human
ucccaccucagccu

SEQ ID NO: 2141727 - RNA, 23 nt, Human
ucccaaggcaaggggugccuggg

SEQ ID NO: 2141728 - RNA, 22 nt, Human
ucccaccucaaaugggucuggg

SEQ ID NO: 2141729 - RNA, 22 nt, Human
ucccaaggcucugagcaaaugu

SEQ ID NO: 2141730 - RNA, 18 nt, Human
ucccaaggaaagccccag

SEQ ID NO: 2141731 - RNA, 13 nt, Human
ucccaccucagcc

SEQ ID NO: 2141732 - RNA, 21 nt, Human
ucccaggcgccccuucccccu

SEQ ID NO: 2141733 - RNA, 18 nt, Human
ucccaggcgccccuuccc

SEQ ID NO: 2141734 - RNA, 20 nt, Human
ucccaggcgccccuuccccc

SEQ ID NO: 2141735 - RNA, 24 nt, Human
ucagucugauucccaagcucugcu

SEQ ID NO: 2141736 - RNA, 16 nt, Human
ucagcagcccuccuca

SEQ ID NO: 2141737 - RNA, 17 nt, Human
ucagcagcccuccucac

SEQ ID NO: 2141738 - RNA, 18 nt, Human
ucagcagcccuccucacc

SEQ ID NO: 2141739 - RNA, 20 nt, Human
ucagcaaggggcucugcccu

SEQ ID NO: 2141740 - RNA, 12 nt, Human
ucagcagcccuc

SEQ ID NO: 2141741 - RNA, 14 nt, Human
ucagcagcccuccu

SEQ ID NO: 2141742 - RNA, 15 nt, Human
ucagcagcccuccuc

SEQ ID NO: 2141743 - RNA, 15 nt, Human
ucagucuggcccuuc

SEQ ID NO: 2141744 - RNA, 17 nt, Human
ucagcaggaagcaacga

SEQ ID NO: 2141745 - RNA, 17 nt, Human
ucagucugcacuuaaau

SEQ ID NO: 2141746 - RNA, 20 nt, Human
ucagucugcacuuaaauauc

SEQ ID NO: 2141747 - RNA, 23 nt, Human
ucagucugcacuuaaauaucaau

SEQ ID NO: 2141748 - RNA, 14 nt, Human
ucagcaggaagcaa

SEQ ID NO: 2141749 - RNA, 20 nt, Human
ucagugguuauuuagggaac

SEQ ID NO: 2141750 - RNA, 11 nt, Human
ucaguguacau

SEQ ID NO: 2141751 - RNA, 20 nt, Human
ucagugucauuuaugaaaag

SEQ ID NO: 2141752 - RNA, 15 nt, Human
ucaguuacucagccc

SEQ ID NO: 2141753 - RNA, 16 nt, Human
ucaguuacucagcccu

SEQ ID NO: 2141754 - RNA, 17 nt, Human
ucaguuacucagcccug

SEQ ID NO: 2141755 - RNA, 18 nt, Human
ucaguuacucagcccugg

SEQ ID NO: 2141756 - RNA, 23 nt, Human
ucauacaaugacaaguaugauga

SEQ ID NO: 2141757 - RNA, 13 nt, Human
ucauacacagaaa

SEQ ID NO: 2141758 - RNA, 15 nt, Human
ucaguucccuuggcc

SEQ ID NO: 2141759 - RNA, 23 nt, Human
ucaguugagcuucauauaccagc

SEQ ID NO: 2141760 - RNA, 19 nt, Human
ucaguuacucagcccuggg

SEQ ID NO: 2141761 - RNA, 16 nt, Human
ucaguuacucugaagg

SEQ ID NO: 2141762 - RNA, 17 nt, Human
ucaguuacucugaaggg

SEQ ID NO: 2141763 - RNA, 15 nt, Human
ucaguugguaagcuu

SEQ ID NO: 2141764 - RNA, 16 nt, Human
ucaguugguaagcuuc

SEQ ID NO: 2141765 - RNA, 20 nt, Human
ucaguugguguguuuuuggg

SEQ ID NO: 2141766 - RNA, 14 nt, Human
ucaguuggcugacu

SEQ ID NO: 2141767 - RNA, 14 nt, Human
ucauuauuuauuaa

SEQ ID NO: 2141768 - RNA, 18 nt, Human
ucauuauuuauuaaauuu

SEQ ID NO: 2141769 - RNA, 16 nt, Human
ucauuauuugcagaga

SEQ ID NO: 2141770 - RNA, 20 nt, Human
ucauguaacuucccugaaaa

SEQ ID NO: 2141771 - RNA, 13 nt, Human
ucauguaaauuac

SEQ ID NO: 2141772 - RNA, 14 nt, Human
ucauguaaauaaau

SEQ ID NO: 2141773 - RNA, 15 nt, Human
ucauguaaauaaaua

SEQ ID NO: 2141774 - RNA, 13 nt, Human
ucaugccuuugua

SEQ ID NO: 2141775 - RNA, 14 nt, Human
ucaugccuuuguaa

SEQ ID NO: 2141776 - RNA, 16 nt, Human
ucaugccuuuguaagu

SEQ ID NO: 2141777 - RNA, 17 nt, Human
ucaugccuuuguaaguu

SEQ ID NO: 2141778 - RNA, 20 nt, Human
ucauaccaacuuuagcagaa

SEQ ID NO: 2141779 - RNA, 20 nt, Human
ucauaguacucuuuguagca

SEQ ID NO: 2141780 - RNA, 22 nt, Human
ucauaccaggccgccccagccu

SEQ ID NO: 2141781 - RNA, 17 nt, Human
ucauagggucucuucag

SEQ ID NO: 2141782 - RNA, 18 nt, Human
ucauagggucucuucagg

SEQ ID NO: 2141783 - RNA, 20 nt, Human
ucauagggucucuucagguu

SEQ ID NO: 2141784 - RNA, 21 nt, Human
ucauagggucucuucagguuc

SEQ ID NO: 2141785 - RNA, 13 nt, Human
ucaucuguagaua

SEQ ID NO: 2141786 - RNA, 17 nt, Human
ucaucuguagauacuag

SEQ ID NO: 2141787 - RNA, 22 nt, Human
ucauaguacucuuuguagcaaa

SEQ ID NO: 2141788 - RNA, 16 nt, Human
ucaucucucuuuaaua

SEQ ID NO: 2141789 - RNA, 16 nt, Human
ucauacagaagguggg

SEQ ID NO: 2141790 - RNA, 17 nt, Human
uccaccugagcugccau

SEQ ID NO: 2141791 - RNA, 16 nt, Human
uccagaagccucuggc

SEQ ID NO: 2141792 - RNA, 14 nt, Human
uccaccugagcugc

SEQ ID NO: 2141793 - RNA, 15 nt, Human
uccagaucugcaccg

SEQ ID NO: 2141794 - RNA, 23 nt, Human
uccagccaaagccuccuccagcc

SEQ ID NO: 2141795 - RNA, 19 nt, Human
uccagaagccucuggcuag

SEQ ID NO: 2141796 - RNA, 17 nt, Human
uccagaagccucuggcu

SEQ ID NO: 2141797 - RNA, 18 nt, Human
uccagaagccucuggcua

SEQ ID NO: 2141798 - RNA, 11 nt, Human
uccaagcaaag

SEQ ID NO: 2141799 - RNA, 13 nt, Human
uccacccuuggcc

SEQ ID NO: 2141800 - RNA, 14 nt, Human
uccacccuuggccu

SEQ ID NO: 2141801 - RNA, 15 nt, Human
uccacccuuggccug

SEQ ID NO: 2141802 - RNA, 16 nt, Human
uccacccuuggccugu

SEQ ID NO: 2141803 - RNA, 17 nt, Human
uccacccuuggccuguc

SEQ ID NO: 2141804 - RNA, 19 nt, Human
uccacccuuggccugucuc

SEQ ID NO: 2141805 - RNA, 17 nt, Human
uccaccucagccuugga

SEQ ID NO: 2141806 - RNA, 11 nt, Human
uccaccucagc

SEQ ID NO: 2141807 - RNA, 12 nt, Human
uccaccucagcc

SEQ ID NO: 2141808 - RNA, 13 nt, Human
uccaccucagccu

SEQ ID NO: 2141809 - RNA, 14 nt, Human
uccaccucagccuu

SEQ ID NO: 2141810 - RNA, 16 nt, Human
uccaccucagccuugg

SEQ ID NO: 2141811 - RNA, 15 nt, Human
uccaccgcugccuaa

SEQ ID NO: 2141812 - RNA, 13 nt, Human
uccaccgcugccu

SEQ ID NO: 2141813 - RNA, 14 nt, Human
uccaccgcugccua

SEQ ID NO: 2141814 - RNA, 19 nt, Human
uccaccgcugccuaagugg

SEQ ID NO: 2141815 - RNA, 20 nt, Human
uccacccuuggccugucuca

SEQ ID NO: 2141816 - RNA, 13 nt, Human
ucauuucuugggc

SEQ ID NO: 2141817 - RNA, 16 nt, Human
ucauuugaacaacuag

SEQ ID NO: 2141818 - RNA, 17 nt, Human
ucauucaguauuaaagg

SEQ ID NO: 2141819 - RNA, 12 nt, Human
ucauucaggaaa

SEQ ID NO: 2141820 - RNA, 13 nt, Human
ucauucaggaaaa

SEQ ID NO: 2141821 - RNA, 10 nt, Human
ucauucagca

SEQ ID NO: 2141822 - RNA, 19 nt, Human
uccaaacuaccuuccaguu

SEQ ID NO: 2141823 - RNA, 20 nt, Human
uccaaacugccuaagcccuc

SEQ ID NO: 2141824 - RNA, 19 nt, Human
uccaaagcacauugaaaga

SEQ ID NO: 2141825 - RNA, 16 nt, Human
uccaagacauugucaa

SEQ ID NO: 2141826 - RNA, 11 nt, Human
uccaagacauu

SEQ ID NO: 2141827 - RNA, 15 nt, Human
uccaagacauuguca

SEQ ID NO: 2141828 - RNA, 17 nt, Human
uccaagacauugucaau

SEQ ID NO: 2141829 - RNA, 18 nt, Human
uccaagacagaauaauga

SEQ ID NO: 2141830 - RNA, 23 nt, Human
uccaaaggaaucuccaguuuuca

SEQ ID NO: 2141831 - RNA, 22 nt, Human
uccaaaggaggauggcauauaa

SEQ ID NO: 2141832 - RNA, 13 nt, Human
uccaaaggaggcu

SEQ ID NO: 2141833 - RNA, 15 nt, Human
uccaaaggaggcugg

SEQ ID NO: 2141834 - RNA, 19 nt, Human
uccaaaggaggcuggcagg

SEQ ID NO: 2141835 - RNA, 15 nt, Human
uccaaagcuuuccug

SEQ ID NO: 2141836 - RNA, 17 nt, Human
uccaaagcuuuccugga

SEQ ID NO: 2141837 - RNA, 19 nt, Human
uccaaagcuuuccuggaga

SEQ ID NO: 2141838 - RNA, 23 nt, Human
uccaaaggaagucuaggagcugg

SEQ ID NO: 2141839 - RNA, 17 nt, Human
ucucuuuguucuaaaga

SEQ ID NO: 2141840 - RNA, 15 nt, Human
ucucuuuggacucuc

SEQ ID NO: 2141841 - RNA, 21 nt, Human
ucucuuuggacucuccccucu

SEQ ID NO: 2141842 - RNA, 15 nt, Human
ucucuuuucaaaaca

SEQ ID NO: 2141843 - RNA, 16 nt, Human
ucucuuuucaaaacau

SEQ ID NO: 2141844 - RNA, 13 nt, Human
ucucuuuuucagu

SEQ ID NO: 2141845 - RNA, 16 nt, Human
ucugaaaauguaugug

SEQ ID NO: 2141846 - RNA, 12 nt, Human
ucucuuuucucu

SEQ ID NO: 2141847 - RNA, 16 nt, Human
ucucuuuucucuuucu

SEQ ID NO: 2141848 - RNA, 20 nt, Human
ucucuuuugaauccaugcuu

SEQ ID NO: 2141849 - RNA, 22 nt, Human
ucucuuuugaauccaugcuugg

SEQ ID NO: 2141850 - RNA, 23 nt, Human
ucucuuuugaauccaugcuuggg

SEQ ID NO: 2141851 - RNA, 23 nt, Human
ucugaaaauguauguguaaguau

SEQ ID NO: 2141852 - RNA, 14 nt, Human
ucugaaaauguaug

SEQ ID NO: 2141853 - RNA, 17 nt, Human
ucugaaaauuaacacug

SEQ ID NO: 2141854 - RNA, 18 nt, Human
ucugaaaauuaacacugc

SEQ ID NO: 2141855 - RNA, 19 nt, Human
ucugaaaauuaacacugcu

SEQ ID NO: 2141856 - RNA, 22 nt, Human
ucugaaaauuccagaaaggaua

SEQ ID NO: 2141857 - RNA, 14 nt, Human
ucugaaagccacgu

SEQ ID NO: 2141858 - RNA, 17 nt, Human
ucugaacucgcuucucu

SEQ ID NO: 2141859 - RNA, 21 nt, Human
ucugaacucgcuucucuguga

SEQ ID NO: 2141860 - RNA, 11 nt, Human
ucucuucucca

SEQ ID NO: 2141861 - RNA, 13 nt, Human
ucucuuccuaucc

SEQ ID NO: 2141862 - RNA, 15 nt, Human
ucucuuccuauccca

SEQ ID NO: 2141863 - RNA, 16 nt, Human
ucucuuccuaucccau

SEQ ID NO: 2141864 - RNA, 20 nt, Human
ucucuuccuaucccauccca

SEQ ID NO: 2141865 - RNA, 16 nt, Human
ucucuucuccacugga

SEQ ID NO: 2141866 - RNA, 15 nt, Human
ucucuucuccacugg

SEQ ID NO: 2141867 - RNA, 14 nt, Human
ucucuucuccacug

SEQ ID NO: 2141868 - RNA, 13 nt, Human
ucucuucuccacu

SEQ ID NO: 2141869 - RNA, 23 nt, Human
ucucuucagguucuuagugucac

SEQ ID NO: 2141870 - RNA, 15 nt, Human
ucucuucagguucuu

SEQ ID NO: 2141871 - RNA, 16 nt, Human
ucucuucagguucuua

SEQ ID NO: 2141872 - RNA, 13 nt, Human
ucucuucagguuc

SEQ ID NO: 2141873 - RNA, 14 nt, Human
ucucuucagguucu

SEQ ID NO: 2141874 - RNA, 20 nt, Human
ucucugcagccagcccagcc

SEQ ID NO: 2141875 - RNA, 11 nt, Human
ucucugcagcc

SEQ ID NO: 2141876 - RNA, 15 nt, Human
ucucugcagccagcc

SEQ ID NO: 2141877 - RNA, 16 nt, Human
ucucugcagccagccc

SEQ ID NO: 2141878 - RNA, 17 nt, Human
ucucugcagccagccca

SEQ ID NO: 2141879 - RNA, 18 nt, Human
ucucugcagccagcccag

SEQ ID NO: 2141880 - RNA, 19 nt, Human
ucucugcagccagcccagc

SEQ ID NO: 2141881 - RNA, 19 nt, Human
ucugcacaagcugcacccu

SEQ ID NO: 2141882 - RNA, 14 nt, Human
ucugcacaagcugc

SEQ ID NO: 2141883 - RNA, 21 nt, Human
ucugaggaaucaacagggcag

SEQ ID NO: 2141884 - RNA, 22 nt, Human
ucugaggaaucaacagggcagc

SEQ ID NO: 2141885 - RNA, 23 nt, Human
ucugauucccaagcucugcuccu

SEQ ID NO: 2141886 - RNA, 23 nt, Human
ucugaggacacuaaccacgcugg

SEQ ID NO: 2141887 - RNA, 20 nt, Human
ucugaggacacuaaccacgc

SEQ ID NO: 2141888 - RNA, 17 nt, Human
ucugaggaauccagacc

SEQ ID NO: 2141889 - RNA, 16 nt, Human
ucugaggaauccagac

SEQ ID NO: 2141890 - RNA, 18 nt, Human
ucugagccaaagagaaug

SEQ ID NO: 2141891 - RNA, 20 nt, Human
ucugagauuauuuuaaucua

SEQ ID NO: 2141892 - RNA, 22 nt, Human
ucugaccacacuuccuguccag

SEQ ID NO: 2141893 - RNA, 12 nt, Human
ucugaccacacu

SEQ ID NO: 2141894 - RNA, 13 nt, Human
ucugaccacacuu

SEQ ID NO: 2141895 - RNA, 18 nt, Human
ucugaccacacuuccugu

SEQ ID NO: 2141896 - RNA, 14 nt, Human
ucugaacuucagcu

SEQ ID NO: 2141897 - RNA, 15 nt, Human
ucugaacuucagcua

SEQ ID NO: 2141898 - RNA, 15 nt, Human
ucugacauuaacagu

SEQ ID NO: 2141899 - RNA, 16 nt, Human
ucugacauuaacaguu

SEQ ID NO: 2141900 - RNA, 23 nt, Human
ucugacauuaacaguuuuccaug

SEQ ID NO: 2141901 - RNA, 18 nt, Human
ucugacauuaacaguuuu

SEQ ID NO: 2141902 - RNA, 19 nt, Human
ucugacauuaacaguuuuc

SEQ ID NO: 2141903 - RNA, 21 nt, Human
ucugacauuaacaguuuucca

SEQ ID NO: 2141904 - RNA, 22 nt, Human
ucugacauuaacaguuuuccau

SEQ ID NO: 2141905 - RNA, 21 nt, Human
ucucuacugucucaguuuaca

SEQ ID NO: 2141906 - RNA, 13 nt, Human
ucucuagaauuuu

SEQ ID NO: 2141907 - RNA, 17 nt, Human
ucucuagaauuuuaagu

SEQ ID NO: 2141908 - RNA, 22 nt, Human
ucucuacuaaaaauacaaacaa

SEQ ID NO: 2141909 - RNA, 19 nt, Human
ucucuacuccuaccucagc

SEQ ID NO: 2141910 - RNA, 20 nt, Human
ucucuacuccuaccucagcc

SEQ ID NO: 2141911 - RNA, 21 nt, Human
ucucuacuccuaccucagccu

SEQ ID NO: 2141912 - RNA, 19 nt, Human
ucucuacagaugucccauu

SEQ ID NO: 2141913 - RNA, 20 nt, Human
ucucuacagaugucccauuu

SEQ ID NO: 2141914 - RNA, 12 nt, Human
ucucuacccagc

SEQ ID NO: 2141915 - RNA, 18 nt, Human
ucucuacccagcccaucu

SEQ ID NO: 2141916 - RNA, 20 nt, Human
ucucuacccagcccaucuug

SEQ ID NO: 2141917 - RNA, 20 nt, Human
ucucuacagacuucuccaga

SEQ ID NO: 2141918 - RNA, 15 nt, Human
ucucuacaaaaagca

SEQ ID NO: 2141919 - RNA, 13 nt, Human
ucuccugggcccc

SEQ ID NO: 2141920 - RNA, 15 nt, Human
ucuccugggccccuc

SEQ ID NO: 2141921 - RNA, 19 nt, Human
ucuccugggccccucccua

SEQ ID NO: 2141922 - RNA, 20 nt, Human
ucuccugggccccucccuac

SEQ ID NO: 2141923 - RNA, 22 nt, Human
ucuccugggccccucccuaccu

SEQ ID NO: 2141924 - RNA, 23 nt, Human
ucuccugggccccucccuaccuc

SEQ ID NO: 2141925 - RNA, 22 nt, Human
ucucuagaauuuuaagugcuuu

SEQ ID NO: 2141926 - RNA, 13 nt, Human
ucucugaggacac

SEQ ID NO: 2141927 - RNA, 19 nt, Human
ucucugagcuccaguggaa

SEQ ID NO: 2141928 - RNA, 23 nt, Human
ucucugagcuccaguggaagaag

SEQ ID NO: 2141929 - RNA, 12 nt, Human
ucucucuuugga

SEQ ID NO: 2141930 - RNA, 13 nt, Human
ucucucuuuggac

SEQ ID NO: 2141931 - RNA, 16 nt, Human
ucucucuuuggacucu

SEQ ID NO: 2141932 - RNA, 13 nt, Human
ucucucuguugug

SEQ ID NO: 2141933 - RNA, 11 nt, Human
ucucucuucug

SEQ ID NO: 2141934 - RNA, 14 nt, Human
ucucucuucugcuc

SEQ ID NO: 2141935 - RNA, 16 nt, Human
ucucucuucugcucca

SEQ ID NO: 2141936 - RNA, 17 nt, Human
ucucucuucugcuccac

SEQ ID NO: 2141937 - RNA, 19 nt, Human
ucucucuucugcuccaccc

SEQ ID NO: 2141938 - RNA, 20 nt, Human
ucucucuucugcuccacccu

SEQ ID NO: 2141939 - RNA, 23 nt, Human
ucucucggaguaucugggaacug

SEQ ID NO: 2141940 - RNA, 22 nt, Human
ucucuaugguaaagauauuauu

SEQ ID NO: 2141941 - RNA, 14 nt, Human
ucucuauuuaaauu

SEQ ID NO: 2141942 - RNA, 15 nt, Human
ucucuauuuaaauuc

SEQ ID NO: 2141943 - RNA, 16 nt, Human
ucucuauuuaaauucu

SEQ ID NO: 2141944 - RNA, 17 nt, Human
ucucuauuuaaauucuu

SEQ ID NO: 2141945 - RNA, 18 nt, Human
ucucuauuuaaauucuuu

SEQ ID NO: 2141946 - RNA, 23 nt, Human
ucucuauuuaaauucuuuuuuaa

SEQ ID NO: 2141947 - RNA, 14 nt, Human
ucucucuauuacca

SEQ ID NO: 2141948 - RNA, 16 nt, Human
ucucucuauuaccacu

SEQ ID NO: 2141949 - RNA, 22 nt, Human
ucucucuacuccuaccucagcc

SEQ ID NO: 2141950 - RNA, 13 nt, Human
ucucucuuacccu

SEQ ID NO: 2141951 - RNA, 21 nt, Human
ucucuauuaccacugaagaua

SEQ ID NO: 2141952 - RNA, 19 nt, Human
ucucucuacuccuaccuca

SEQ ID NO: 2141953 - RNA, 20 nt, Human
ucucucuacuccuaccucag

SEQ ID NO: 2141954 - RNA, 20 nt, Human
ucuccugccugugcugugac

SEQ ID NO: 2141955 - RNA, 22 nt, Human
ucuccugccucagccucccaaa

SEQ ID NO: 2141956 - RNA, 16 nt, Human
ucuccugcccccacac

SEQ ID NO: 2141957 - RNA, 21 nt, Human
ucuccugcccccacaccuggc

SEQ ID NO: 2141958 - RNA, 11 nt, Human
ucuccugccua

SEQ ID NO: 2141959 - RNA, 12 nt, Human
ucuccugccuac

SEQ ID NO: 2141960 - RNA, 14 nt, Human
ucuccugccuacuc

SEQ ID NO: 2141961 - RNA, 15 nt, Human
ucuccugccuacuca

SEQ ID NO: 2141962 - RNA, 17 nt, Human
ucuccugccuacucacg

SEQ ID NO: 2141963 - RNA, 20 nt, Human
ucucccgggaagccacccuc

SEQ ID NO: 2141964 - RNA, 18 nt, Human
ucucccuauaaugcugga

SEQ ID NO: 2141965 - RNA, 21 nt, Human
ucucccuauaaugcuggagcg

SEQ ID NO: 2141966 - RNA, 19 nt, Human
ucucccucgaacccacacu

SEQ ID NO: 2141967 - RNA, 14 nt, Human
ucucccucuccugc

SEQ ID NO: 2141968 - RNA, 15 nt, Human
ucucccucuccugcc

SEQ ID NO: 2141969 - RNA, 16 nt, Human
ucucccucuccugccu

SEQ ID NO: 2141970 - RNA, 17 nt, Human
ucucccucuccugccua

SEQ ID NO: 2141971 - RNA, 18 nt, Human
ucucccucuccugccuac

SEQ ID NO: 2141972 - RNA, 21 nt, Human
ucucccucuccugccuacuca

SEQ ID NO: 2141973 - RNA, 12 nt, Human
ucucccucuggc

SEQ ID NO: 2141974 - RNA, 14 nt, Human
ucucccucuggccc

SEQ ID NO: 2141975 - RNA, 15 nt, Human
ucucccucuggcccu

SEQ ID NO: 2141976 - RNA, 16 nt, Human
ucucccucuggcccug

SEQ ID NO: 2141977 - RNA, 17 nt, Human
ucucccucuggcccugc

SEQ ID NO: 2141978 - RNA, 18 nt, Human
ucucccucuggcccugcc

SEQ ID NO: 2141979 - RNA, 20 nt, Human
ucucccucuggcccugccuu

SEQ ID NO: 2141980 - RNA, 22 nt, Human
ucuccucuugccacugccucuu

SEQ ID NO: 2141981 - RNA, 19 nt, Human
ucucccucuggcccugccu

SEQ ID NO: 2141982 - RNA, 18 nt, Human
ucuccugaggaucagaaa

SEQ ID NO: 2141983 - RNA, 20 nt, Human
ucuccugaggaucagaaagu

SEQ ID NO: 2141984 - RNA, 15 nt, Human
ucuccugauuauuua

SEQ ID NO: 2141985 - RNA, 16 nt, Human
ucuccugauuauuuau

SEQ ID NO: 2141986 - RNA, 13 nt, Human
ucuccugcaugca

SEQ ID NO: 2141987 - RNA, 17 nt, Human
ucuccucuuuguuuugu

SEQ ID NO: 2141988 - RNA, 16 nt, Human
ucuccucuuuuaucuu

SEQ ID NO: 2141989 - RNA, 14 nt, Human
ucuccccugcccug

SEQ ID NO: 2141990 - RNA, 15 nt, Human
ucuccccugcccugc

SEQ ID NO: 2141991 - RNA, 17 nt, Human
ucuccccugcccugcug

SEQ ID NO: 2141992 - RNA, 12 nt, Human
ucucccccuggg

SEQ ID NO: 2141993 - RNA, 13 nt, Human
ucucccccugggc

SEQ ID NO: 2141994 - RNA, 14 nt, Human
ucucccccugggcu

SEQ ID NO: 2141995 - RNA, 15 nt, Human
ucucaggucccugca

SEQ ID NO: 2141996 - RNA, 16 nt, Human
ucucagaaucuuuccu

SEQ ID NO: 2141997 - RNA, 15 nt, Human
ucucagucaguaauu

SEQ ID NO: 2141998 - RNA, 23 nt, Human
ucucagugcuucuuacuauuaag

SEQ ID NO: 2141999 - RNA, 14 nt, Human
ucucaaacuccuga

SEQ ID NO: 2142000 - RNA, 13 nt, Human
ucucaaaccucca

SEQ ID NO: 2142001 - RNA, 18 nt, Human
ucucaaaccuccaaaagc

SEQ ID NO: 2142002 - RNA, 20 nt, Human
ucucaaacgguacacagacu

SEQ ID NO: 2142003 - RNA, 22 nt, Human
ucucaaacgguacacagacuau

SEQ ID NO: 2142004 - RNA, 23 nt, Human
ucuagggauagucaccuuuuaaa

SEQ ID NO: 2142005 - RNA, 17 nt, Human
ucuagggagagacccuu

SEQ ID NO: 2142006 - RNA, 17 nt, Human
ucucaaagaaauuucca

SEQ ID NO: 2142007 - RNA, 22 nt, Human
ucucaaacucuugaccucaggu

SEQ ID NO: 2142008 - RNA, 21 nt, Human
ucucaaacucuugaccucagg

SEQ ID NO: 2142009 - RNA, 13 nt, Human
ucucaaacucuug

SEQ ID NO: 2142010 - RNA, 13 nt, Human
ucucaaccauccc

SEQ ID NO: 2142011 - RNA, 17 nt, Human
ucucacucugucgccca

SEQ ID NO: 2142012 - RNA, 16 nt, Human
ucucacucugucgccc

SEQ ID NO: 2142013 - RNA, 22 nt, Human
ucucacucugucgcccagucug

SEQ ID NO: 2142014 - RNA, 18 nt, Human
ucucacucugucgcccag

SEQ ID NO: 2142015 - RNA, 21 nt, Human
ucucacuguugcccaggcugg

SEQ ID NO: 2142016 - RNA, 20 nt, Human
ucucacuguugcccaggcug

SEQ ID NO: 2142017 - RNA, 19 nt, Human
ucucacuguugcccaggcu

SEQ ID NO: 2142018 - RNA, 18 nt, Human
ucucacuguugcccaggc

SEQ ID NO: 2142019 - RNA, 17 nt, Human
ucucagaaucucaaaua

SEQ ID NO: 2142020 - RNA, 21 nt, Human
ucucagaaucucaaauaacua

SEQ ID NO: 2142021 - RNA, 19 nt, Human
ucucagaagguauuccuuu

SEQ ID NO: 2142022 - RNA, 20 nt, Human
ucucacuuuucuccaugagu

SEQ ID NO: 2142023 - RNA, 15 nt, Human
ucucacuuuucucca

SEQ ID NO: 2142024 - RNA, 17 nt, Human
ucucacuuuucuccaug

SEQ ID NO: 2142025 - RNA, 17 nt, Human
ucucacuguugcccagg

SEQ ID NO: 2142026 - RNA, 13 nt, Human
ucuaaaugaagug

SEQ ID NO: 2142027 - RNA, 14 nt, Human
ucuaaaugcauauc

SEQ ID NO: 2142028 - RNA, 23 nt, Human
ucuaaaugcauauccugagccau

SEQ ID NO: 2142029 - RNA, 13 nt, Human
ucuaaccagugau

SEQ ID NO: 2142030 - RNA, 13 nt, Human
ucuaaccuccuuu

SEQ ID NO: 2142031 - RNA, 19 nt, Human
ucuaacuagaaaucugcca

SEQ ID NO: 2142032 - RNA, 15 nt, Human
ucuaacucagaaaca

SEQ ID NO: 2142033 - RNA, 15 nt, Human
ucuacucuuuuuguu

SEQ ID NO: 2142034 - RNA, 13 nt, Human
ucuacacugugaa

SEQ ID NO: 2142035 - RNA, 14 nt, Human
ucuacacugugaac

SEQ ID NO: 2142036 - RNA, 22 nt, Human
ucuacugaggugcuauguucuu

SEQ ID NO: 2142037 - RNA, 19 nt, Human
ucuagaacaucccugccag

SEQ ID NO: 2142038 - RNA, 20 nt, Human
ucuagaacaucccugccagc

SEQ ID NO: 2142039 - RNA, 18 nt, Human
ucuagaacuugacccccu

SEQ ID NO: 2142040 - RNA, 14 nt, Human
ucuagaagaaauga

SEQ ID NO: 2142041 - RNA, 15 nt, Human
ucuagaagaaaugaa

SEQ ID NO: 2142042 - RNA, 16 nt, Human
ucuagaagaaaugaaa

SEQ ID NO: 2142043 - RNA, 17 nt, Human
ucuagaagaaaugaaau

SEQ ID NO: 2142044 - RNA, 18 nt, Human
ucuagaagaaaugaaauu

SEQ ID NO: 2142045 - RNA, 19 nt, Human
ucuagaagaaaugaaauuu

SEQ ID NO: 2142046 - RNA, 23 nt, Human
ucuagaagaaaugaaauuuuacc

SEQ ID NO: 2142047 - RNA, 20 nt, Human
ucuagaagacugucagcuuc

SEQ ID NO: 2142048 - RNA, 21 nt, Human
ucuagaagacugucagcuucc

SEQ ID NO: 2142049 - RNA, 21 nt, Human
ucuagaacaucccugccagcu

SEQ ID NO: 2142050 - RNA, 17 nt, Human
ucuagggaaaugaaaga

SEQ ID NO: 2142051 - RNA, 19 nt, Human
ucuagggaaggccaccugc

SEQ ID NO: 2142052 - RNA, 20 nt, Human
ucuagggaaggccaccugca

SEQ ID NO: 2142053 - RNA, 22 nt, Human
ucuagggaaggccaccugcagg

SEQ ID NO: 2142054 - RNA, 23 nt, Human
ucuagggaaggccaccugcaggu

SEQ ID NO: 2142055 - RNA, 19 nt, Human
ucuagggaaaaaccagcgu

SEQ ID NO: 2142056 - RNA, 19 nt, Human
ucuagaauuuaucacacuu

SEQ ID NO: 2142057 - RNA, 13 nt, Human
ucuagggaaauga

SEQ ID NO: 2142058 - RNA, 22 nt, Human
ucuagggaaaaaccagcgugug

SEQ ID NO: 2142059 - RNA, 11 nt, Human
ucuacacucuc

SEQ ID NO: 2142060 - RNA, 12 nt, Human
ucuacacucucc

SEQ ID NO: 2142061 - RNA, 14 nt, Human
ucuacacucuccug

SEQ ID NO: 2142062 - RNA, 15 nt, Human
ucuacacucuccugg

SEQ ID NO: 2142063 - RNA, 16 nt, Human
ucuacacucuccuggg

SEQ ID NO: 2142064 - RNA, 17 nt, Human
ucuacacucuccugggc

SEQ ID NO: 2142065 - RNA, 18 nt, Human
ucuacacucuccugggcc

SEQ ID NO: 2142066 - RNA, 18 nt, Human
ucuacugaggugcuaugu

SEQ ID NO: 2142067 - RNA, 19 nt, Human
ucuacugaggugcuauguu

SEQ ID NO: 2142068 - RNA, 16 nt, Human
ucuaacucugauguaa

SEQ ID NO: 2142069 - RNA, 17 nt, Human
ucuaacucugauguaaa

SEQ ID NO: 2142070 - RNA, 20 nt, Human
ucuaacucugauguaaauga

SEQ ID NO: 2142071 - RNA, 21 nt, Human
ucuaacucugauguaaaugaa

SEQ ID NO: 2142072 - RNA, 17 nt, Human
ucuaacugugcucaaga

SEQ ID NO: 2142073 - RNA, 21 nt, Human
ucuaacugugcucaagagguu

SEQ ID NO: 2142074 - RNA, 15 nt, Human
ucuacacucaucuua

SEQ ID NO: 2142075 - RNA, 10 nt, Human
ucccucccuu

SEQ ID NO: 2142076 - RNA, 17 nt, Human
uccuggcccacugcauc

SEQ ID NO: 2142077 - RNA, 17 nt, Human
uccuggucuugagaugu

SEQ ID NO: 2142078 - RNA, 20 nt, Human
uccuggucuugagaugucuu

SEQ ID NO: 2142079 - RNA, 16 nt, Human
uccuugaucuguauau

SEQ ID NO: 2142080 - RNA, 22 nt, Human
uccuugaucuguauauacaaua

SEQ ID NO: 2142081 - RNA, 21 nt, Human
uccuugcacacuccccugcac

SEQ ID NO: 2142082 - RNA, 22 nt, Human
uccuugauuuaucacacaaagc

SEQ ID NO: 2142083 - RNA, 22 nt, Human
uccuugcacacuccccugcacu

SEQ ID NO: 2142084 - RNA, 14 nt, Human
uccuugcaccugca

SEQ ID NO: 2142085 - RNA, 19 nt, Human
uccuucuguccuacucugu

SEQ ID NO: 2142086 - RNA, 12 nt, Human
uccuucuguccu

SEQ ID NO: 2142087 - RNA, 18 nt, Human
uccuucaaguuagcucag

SEQ ID NO: 2142088 - RNA, 19 nt, Human
uccuucaaguuagcucagg

SEQ ID NO: 2142089 - RNA, 20 nt, Human
uccuucaaguuagcucagga

SEQ ID NO: 2142090 - RNA, 23 nt, Human
uccuucaaguuagcucaggaggc

SEQ ID NO: 2142091 - RNA, 19 nt, Human
uccuucaagaacucugggc

SEQ ID NO: 2142092 - RNA, 20 nt, Human
uccuucaagaacucugggcu

SEQ ID NO: 2142093 - RNA, 21 nt, Human
uccuucaagaacucugggcug

SEQ ID NO: 2142094 - RNA, 23 nt, Human
uccuucaagaacucugggcugcu

SEQ ID NO: 2142095 - RNA, 22 nt, Human
uccuuauguauauuuaaaagaa

SEQ ID NO: 2142096 - RNA, 14 nt, Human
uccuuaaugauccg

SEQ ID NO: 2142097 - RNA, 18 nt, Human
uccuuuuguguacagugu

SEQ ID NO: 2142098 - RNA, 17 nt, Human
uccuuuuguguacagug

SEQ ID NO: 2142099 - RNA, 14 nt, Human
uccuuggggcaggc

SEQ ID NO: 2142100 - RNA, 15 nt, Human
uccuuggggcaggca

SEQ ID NO: 2142101 - RNA, 16 nt, Human
uccuuggggcaggcag

SEQ ID NO: 2142102 - RNA, 20 nt, Human
uccuugggaggccccacugg

SEQ ID NO: 2142103 - RNA, 21 nt, Human
uccuugggaggccccacuggg

SEQ ID NO: 2142104 - RNA, 22 nt, Human
uccuugggaggccccacugggg

SEQ ID NO: 2142105 - RNA, 17 nt, Human
uccuugcaccugcaucc

SEQ ID NO: 2142106 - RNA, 18 nt, Human
uccuuuuucccaauaaau

SEQ ID NO: 2142107 - RNA, 13 nt, Human
uccuuuuuguuau

SEQ ID NO: 2142108 - RNA, 19 nt, Human
uccuuuuucuuuauaaacu

SEQ ID NO: 2142109 - RNA, 14 nt, Human
uccuuuuucuuuau

SEQ ID NO: 2142110 - RNA, 14 nt, Human
uccuuuuuguuauu

SEQ ID NO: 2142111 - RNA, 12 nt, Human
uccuuuuuuucc

SEQ ID NO: 2142112 - RNA, 13 nt, Human
ucgcaagcugggu

SEQ ID NO: 2142113 - RNA, 11 nt, Human
ucgcccaggag

SEQ ID NO: 2142114 - RNA, 17 nt, Human
ucgcccaaagccagaca

SEQ ID NO: 2142115 - RNA, 18 nt, Human
ucgcccaaagccagacag

SEQ ID NO: 2142116 - RNA, 12 nt, Human
ucgcccaggaga

SEQ ID NO: 2142117 - RNA, 13 nt, Human
ucggaagcagugc

SEQ ID NO: 2142118 - RNA, 19 nt, Human
ucggaaggcuggcugggca

SEQ ID NO: 2142119 - RNA, 15 nt, Human
ucggaagcagugccu

SEQ ID NO: 2142120 - RNA, 16 nt, Human
ucggaagcagugccuu

SEQ ID NO: 2142121 - RNA, 22 nt, Human
ucggaagcagugccuuccauaa

SEQ ID NO: 2142122 - RNA, 23 nt, Human
ucggaagcagugccuuccauaau

SEQ ID NO: 2142123 - RNA, 14 nt, Human
ucgcuucucuguga

SEQ ID NO: 2142124 - RNA, 15 nt, Human
ucgcuucccccauag

SEQ ID NO: 2142125 - RNA, 16 nt, Human
ucgcuucccccauagc

SEQ ID NO: 2142126 - RNA, 17 nt, Human
ucgcuucccccauagcc

SEQ ID NO: 2142127 - RNA, 19 nt, Human
ucgcuucccccauagccac

SEQ ID NO: 2142128 - RNA, 14 nt, Human
ucgcuucccccaua

SEQ ID NO: 2142129 - RNA, 13 nt, Human
ugaacauuccaga

SEQ ID NO: 2142130 - RNA, 14 nt, Human
ugaacauuccagag

SEQ ID NO: 2142131 - RNA, 15 nt, Human
ugaacauugcaauag

SEQ ID NO: 2142132 - RNA, 17 nt, Human
ugaacauugcaauagaa

SEQ ID NO: 2142133 - RNA, 20 nt, Human
ugaacauagacuagagaaac

SEQ ID NO: 2142134 - RNA, 22 nt, Human
ugaacacugggggaggggacau

SEQ ID NO: 2142135 - RNA, 15 nt, Human
ugaacacuuauugcu

SEQ ID NO: 2142136 - RNA, 17 nt, Human
ugaacacuuauugcuuu

SEQ ID NO: 2142137 - RNA, 18 nt, Human
ugaacacuuauugcuuug

SEQ ID NO: 2142138 - RNA, 18 nt, Human
ugaacacuggcaacaaca

SEQ ID NO: 2142139 - RNA, 14 nt, Human
ugaacacuggggga

SEQ ID NO: 2142140 - RNA, 16 nt, Human
ugaacacugggggagg

SEQ ID NO: 2142141 - RNA, 17 nt, Human
ugaacacugggggaggg

SEQ ID NO: 2142142 - RNA, 17 nt, Human
ugaaaugcucuccuuuc

SEQ ID NO: 2142143 - RNA, 16 nt, Human
ugaaaugcucuccuuu

SEQ ID NO: 2142144 - RNA, 14 nt, Human
ugaaaugccuuacu

SEQ ID NO: 2142145 - RNA, 15 nt, Human
ugaaaugccuuacuu

SEQ ID NO: 2142146 - RNA, 18 nt, Human
ugaaaugccuuacuuugu

SEQ ID NO: 2142147 - RNA, 19 nt, Human
ugaaaugccuuacuuugua

SEQ ID NO: 2142148 - RNA, 20 nt, Human
ugaaaugccuuacuuuguau

SEQ ID NO: 2142149 - RNA, 21 nt, Human
ugaaaugccuuacuuuguaug

SEQ ID NO: 2142150 - RNA, 22 nt, Human
ugaaaugccuuacuuuguauga

SEQ ID NO: 2142151 - RNA, 23 nt, Human
ugaaaugccuuacuuuguaugau

SEQ ID NO: 2142152 - RNA, 24 nt, Human
ugaaaugccuuacuuuguaugaua

SEQ ID NO: 2142153 - RNA, 16 nt, Human
ugaaaugcuggcauuu

SEQ ID NO: 2142154 - RNA, 14 nt, Human
ugaacacaucagcu

SEQ ID NO: 2142155 - RNA, 18 nt, Human
ugaacacaucagcuagca

SEQ ID NO: 2142156 - RNA, 19 nt, Human
ugaacacaucagcuagcaa

SEQ ID NO: 2142157 - RNA, 20 nt, Human
ugaacacaucagcuagcaaa

SEQ ID NO: 2142158 - RNA, 11 nt, Human
ugaacacagua

SEQ ID NO: 2142159 - RNA, 12 nt, Human
ugaacacaguau

SEQ ID NO: 2142160 - RNA, 13 nt, Human
ugaacacaguauu

SEQ ID NO: 2142161 - RNA, 15 nt, Human
ugaacacaguauuuu

SEQ ID NO: 2142162 - RNA, 19 nt, Human
ugaacacaguauuuuccca

SEQ ID NO: 2142163 - RNA, 16 nt, Human
ugaacacgaagcuuag

SEQ ID NO: 2142164 - RNA, 18 nt, Human
ugaacucuucaaucucuu

SEQ ID NO: 2142165 - RNA, 14 nt, Human
ugaacucuuucugg

SEQ ID NO: 2142166 - RNA, 20 nt, Human
ugaacucuuucuggccugcc

SEQ ID NO: 2142167 - RNA, 22 nt, Human
ugaacucuuucuggccugccuu

SEQ ID NO: 2142168 - RNA, 23 nt, Human
ugaacucuuucuggccugccuuc

SEQ ID NO: 2142169 - RNA, 22 nt, Human
ugaaccacaucuugcucugcug

SEQ ID NO: 2142170 - RNA, 15 nt, Human
ugaacucuucaaucu

SEQ ID NO: 2142171 - RNA, 21 nt, Human
ugaaccacaucuugcucugcu

SEQ ID NO: 2142172 - RNA, 20 nt, Human
ugaaccacaucuugcucugc

SEQ ID NO: 2142173 - RNA, 18 nt, Human
ugaacugcauguauaaau

SEQ ID NO: 2142174 - RNA, 20 nt, Human
ugaaggagagcccuucauuu

SEQ ID NO: 2142175 - RNA, 21 nt, Human
ugaagaugcugaaacaggaga

SEQ ID NO: 2142176 - RNA, 16 nt, Human
ugaagaugggaacgca

SEQ ID NO: 2142177 - RNA, 14 nt, Human
ugaagauagaagaa

SEQ ID NO: 2142178 - RNA, 15 nt, Human
ugaagauagaagaaa

SEQ ID NO: 2142179 - RNA, 16 nt, Human
ugaagauagaagaaaa

SEQ ID NO: 2142180 - RNA, 17 nt, Human
ugaagauagaagaaaaa

SEQ ID NO: 2142181 - RNA, 16 nt, Human
ugaagauaucuugaaa

SEQ ID NO: 2142182 - RNA, 21 nt, Human
ugaagauaucuugaaaugaaa

SEQ ID NO: 2142183 - RNA, 22 nt, Human
ugaagauaucuugaaaugaaag

SEQ ID NO: 2142184 - RNA, 19 nt, Human
ugaagaucguuaguaucua

SEQ ID NO: 2142185 - RNA, 18 nt, Human
ugaagagggagaagcaug

SEQ ID NO: 2142186 - RNA, 17 nt, Human
ugaagagggagaaggga

SEQ ID NO: 2142187 - RNA, 21 nt, Human
ugaagagggagaagcaugaaa

SEQ ID NO: 2142188 - RNA, 19 nt, Human
ugaacuggguacuugugga

SEQ ID NO: 2142189 - RNA, 16 nt, Human
ugaacuggaggccagg

SEQ ID NO: 2142190 - RNA, 14 nt, Human
ugaagacaggacag

SEQ ID NO: 2142191 - RNA, 14 nt, Human
ugaagacagaggga

SEQ ID NO: 2142192 - RNA, 18 nt, Human
ugaagaggaucggaggcu

SEQ ID NO: 2142193 - RNA, 13 nt, Human
ugaagaggaaggg

SEQ ID NO: 2142194 - RNA, 16 nt, Human
ucuuuuuauacuauua

SEQ ID NO: 2142195 - RNA, 20 nt, Human
ucuuuugacauguggaaagu

SEQ ID NO: 2142196 - RNA, 13 nt, Human
ucuuuugccauga

SEQ ID NO: 2142197 - RNA, 21 nt, Human
ucuuuugcccuucacaguguu

SEQ ID NO: 2142198 - RNA, 19 nt, Human
ucuuuugaauccaugcuug

SEQ ID NO: 2142199 - RNA, 20 nt, Human
ucuuuugaauccaugcuugg

SEQ ID NO: 2142200 - RNA, 13 nt, Human
ucuuuugacaugu

SEQ ID NO: 2142201 - RNA, 14 nt, Human
ucuuuugacaugug

SEQ ID NO: 2142202 - RNA, 15 nt, Human
ucuuuugacaugugg

SEQ ID NO: 2142203 - RNA, 17 nt, Human
ucuuuugacauguggaa

SEQ ID NO: 2142204 - RNA, 23 nt, Human
ucuuucacacuuccaccagccug

SEQ ID NO: 2142205 - RNA, 23 nt, Human
ucuuuucugcaucaucuguagau

SEQ ID NO: 2142206 - RNA, 20 nt, Human
ucuuucacacuuccaccagc

SEQ ID NO: 2142207 - RNA, 21 nt, Human
ucuuucacacuuccaccagcc

SEQ ID NO: 2142208 - RNA, 21 nt, Human
ucuuucaagugaaucuaaaag

SEQ ID NO: 2142209 - RNA, 10 nt, Human
ucuuucacau

SEQ ID NO: 2142210 - RNA, 15 nt, Human
ugaaaacuacauuuu

SEQ ID NO: 2142211 - RNA, 16 nt, Human
ugaaaacuacauuuua

SEQ ID NO: 2142212 - RNA, 17 nt, Human
ugaaaacuacauuuuaa

SEQ ID NO: 2142213 - RNA, 19 nt, Human
ugaaaacuacauuuuaaca

SEQ ID NO: 2142214 - RNA, 20 nt, Human
ugaaaacuacauuuuaacau

SEQ ID NO: 2142215 - RNA, 21 nt, Human
ugaaaacuacauuuuaacaug

SEQ ID NO: 2142216 - RNA, 20 nt, Human
ucuuuuuuagcauaaaauuu

SEQ ID NO: 2142217 - RNA, 13 nt, Human
ucuuuuuuaugug

SEQ ID NO: 2142218 - RNA, 15 nt, Human
ucuuuuuuagcauaa

SEQ ID NO: 2142219 - RNA, 16 nt, Human
ucuuuuuuagcauaaa

SEQ ID NO: 2142220 - RNA, 17 nt, Human
ucuuuuuuaaauuuucu

SEQ ID NO: 2142221 - RNA, 22 nt, Human
ucuuuuuuaaauuuucuucagu

SEQ ID NO: 2142222 - RNA, 14 nt, Human
ucuuuuucuggacu

SEQ ID NO: 2142223 - RNA, 22 nt, Human
ucuuuuuauugaugugcaaaaa

SEQ ID NO: 2142224 - RNA, 21 nt, Human
ucuuuuuauuuuuuaauuauu

SEQ ID NO: 2142225 - RNA, 12 nt, Human
ucuuuuucaguu

SEQ ID NO: 2142226 - RNA, 17 nt, Human
ugaaaagacaucaagca

SEQ ID NO: 2142227 - RNA, 18 nt, Human
ugaaaagacaucaagcac

SEQ ID NO: 2142228 - RNA, 12 nt, Human
ucuuuuuauuga

SEQ ID NO: 2142229 - RNA, 19 nt, Human
ugaaaacguuuuauugugu

SEQ ID NO: 2142230 - RNA, 11 nt, Human
ugaaagcugug

SEQ ID NO: 2142231 - RNA, 21 nt, Human
ugaaagauggcugugccucug

SEQ ID NO: 2142232 - RNA, 23 nt, Human
ugaaagauggcugugccucugcc

SEQ ID NO: 2142233 - RNA, 22 nt, Human
ugaaagauggcugugccucugc

SEQ ID NO: 2142234 - RNA, 23 nt, Human
ugaaaagaggggaccagaagcca

SEQ ID NO: 2142235 - RNA, 18 nt, Human
ugaaagggcccagagagg

SEQ ID NO: 2142236 - RNA, 17 nt, Human
ugaaagggcccagagag

SEQ ID NO: 2142237 - RNA, 16 nt, Human
ugaaagggcccagaga

SEQ ID NO: 2142238 - RNA, 15 nt, Human
ugaaagggcccagag

SEQ ID NO: 2142239 - RNA, 19 nt, Human
ugaaaucucagaauuccuu

SEQ ID NO: 2142240 - RNA, 16 nt, Human
ugaaaucucagaauuc

SEQ ID NO: 2142241 - RNA, 19 nt, Human
ugaaaugaccucaagaugu

SEQ ID NO: 2142242 - RNA, 13 nt, Human
ugaaaugaaaaca

SEQ ID NO: 2142243 - RNA, 14 nt, Human
ugaaaugaaaacau

SEQ ID NO: 2142244 - RNA, 19 nt, Human
ugaaaugaaaacauguaau

SEQ ID NO: 2142245 - RNA, 20 nt, Human
ugaaaugaaaacauguaaua

SEQ ID NO: 2142246 - RNA, 20 nt, Human
ugaaaugaggucagagccug

SEQ ID NO: 2142247 - RNA, 19 nt, Human
ugaaaugaggucagagccu

SEQ ID NO: 2142248 - RNA, 22 nt, Human
ugaaaugaggucagagccugca

SEQ ID NO: 2142249 - RNA, 21 nt, Human
ugaaaugaggucagagccugc

SEQ ID NO: 2142250 - RNA, 23 nt, Human
ugaaaugaggucagagccugcag

SEQ ID NO: 2142251 - RNA, 19 nt, Human
ugaaaugcagagucaauga

SEQ ID NO: 2142252 - RNA, 16 nt, Human
ucuuguauuaaguugu

SEQ ID NO: 2142253 - RNA, 18 nt, Human
ucuugcucuaucucacag

SEQ ID NO: 2142254 - RNA, 21 nt, Human
ucuugcucuaucucacagcac

SEQ ID NO: 2142255 - RNA, 18 nt, Human
ucuuguauuaaguuguua

SEQ ID NO: 2142256 - RNA, 22 nt, Human
ucuuguauuaaguuguuaauaa

SEQ ID NO: 2142257 - RNA, 15 nt, Human
ucuugucacaauaaa

SEQ ID NO: 2142258 - RNA, 16 nt, Human
ucuugucacaauaaau

SEQ ID NO: 2142259 - RNA, 22 nt, Human
ucuuguccagagacaagacuuc

SEQ ID NO: 2142260 - RNA, 11 nt, Human
ucuugcucugc

SEQ ID NO: 2142261 - RNA, 13 nt, Human
ucuugcucugcug

SEQ ID NO: 2142262 - RNA, 12 nt, Human
ucuugcucugcu

SEQ ID NO: 2142263 - RNA, 11 nt, Human
ucuugugacua

SEQ ID NO: 2142264 - RNA, 14 nt, Human
ucuugugacuagug

SEQ ID NO: 2142265 - RNA, 18 nt, Human
ucuugugaauauguacau

SEQ ID NO: 2142266 - RNA, 22 nt, Human
ucuugugaauauguacauaggc

SEQ ID NO: 2142267 - RNA, 21 nt, Human
ucuugugacauauuaugucuu

SEQ ID NO: 2142268 - RNA, 15 nt, Human
ucuugucucugggcu

SEQ ID NO: 2142269 - RNA, 14 nt, Human
ucuugucucugggc

SEQ ID NO: 2142270 - RNA, 13 nt, Human
ucuugucucuggg

SEQ ID NO: 2142271 - RNA, 12 nt, Human
ucuugucucugg

SEQ ID NO: 2142272 - RNA, 21 nt, Human
ucuuguccccaacaccccaca

SEQ ID NO: 2142273 - RNA, 21 nt, Human
ucuuguuuuuuuuuuccacuu

SEQ ID NO: 2142274 - RNA, 18 nt, Human
ucuuguuuuuuuuuucca

SEQ ID NO: 2142275 - RNA, 16 nt, Human
ucuugugacuagugcu

SEQ ID NO: 2142276 - RNA, 18 nt, Human
ucuugugacuagugcuga

SEQ ID NO: 2142277 - RNA, 19 nt, Human
ucuugugacuagugcugaa

SEQ ID NO: 2142278 - RNA, 21 nt, Human
ucuugugacuagugcugaagc

SEQ ID NO: 2142279 - RNA, 16 nt, Human
ucuucuccacuggaug

SEQ ID NO: 2142280 - RNA, 12 nt, Human
ucuucuccaggc

SEQ ID NO: 2142281 - RNA, 14 nt, Human
ucuucuccaggcug

SEQ ID NO: 2142282 - RNA, 13 nt, Human
ucuucuccaggcu

SEQ ID NO: 2142283 - RNA, 18 nt, Human
ucuugaacuccuggccuc

SEQ ID NO: 2142284 - RNA, 17 nt, Human
ucuugaacuccuggccu

SEQ ID NO: 2142285 - RNA, 16 nt, Human
ucuugaacuccuggcc

SEQ ID NO: 2142286 - RNA, 15 nt, Human
ucuucuccaggcugu

SEQ ID NO: 2142287 - RNA, 19 nt, Human
ucuugaccaagcaggaagc

SEQ ID NO: 2142288 - RNA, 18 nt, Human
ucuugaauuucuaaaaaa

SEQ ID NO: 2142289 - RNA, 20 nt, Human
ucuugccuaaguauuccuuu

SEQ ID NO: 2142290 - RNA, 21 nt, Human
ucuugaccaagcaggaagcuc

SEQ ID NO: 2142291 - RNA, 20 nt, Human
ucuugccuccauggugccuc

SEQ ID NO: 2142292 - RNA, 15 nt, Human
ucuucuauuuuauuc

SEQ ID NO: 2142293 - RNA, 16 nt, Human
ucuucuauuuuauucc

SEQ ID NO: 2142294 - RNA, 13 nt, Human
ucuucuccacugg

SEQ ID NO: 2142295 - RNA, 12 nt, Human
ucuucucaaagg

SEQ ID NO: 2142296 - RNA, 17 nt, Human
ucuucucacucccuucu

SEQ ID NO: 2142297 - RNA, 21 nt, Human
ucuuccaagacuccagcccug

SEQ ID NO: 2142298 - RNA, 18 nt, Human
ucuuccaagcaaagguga

SEQ ID NO: 2142299 - RNA, 24 nt, Human
ucuuccaagcaaaggugaagagac

SEQ ID NO: 2142300 - RNA, 16 nt, Human
ucuucaguaagccgug

SEQ ID NO: 2142301 - RNA, 15 nt, Human
ucuucagggggccag

SEQ ID NO: 2142302 - RNA, 16 nt, Human
ucuucagguggaaaaa

SEQ ID NO: 2142303 - RNA, 23 nt, Human
ucuucagguggaaaaacaucuga

SEQ ID NO: 2142304 - RNA, 14 nt, Human
ucuucagguucuua

SEQ ID NO: 2142305 - RNA, 19 nt, Human
ucuucagugggagaaaaca

SEQ ID NO: 2142306 - RNA, 13 nt, Human
ucuuccaccugga

SEQ ID NO: 2142307 - RNA, 14 nt, Human
ucuuccaccuggaa

SEQ ID NO: 2142308 - RNA, 18 nt, Human
ucuucguucuuguuagua

SEQ ID NO: 2142309 - RNA, 16 nt, Human
ucuucuaaaaaaaaac

SEQ ID NO: 2142310 - RNA, 14 nt, Human
ucuucuaccaccca

SEQ ID NO: 2142311 - RNA, 23 nt, Human
ucuucuagagccgugaugccucc

SEQ ID NO: 2142312 - RNA, 16 nt, Human
ucuuaguggauguucu

SEQ ID NO: 2142313 - RNA, 13 nt, Human
ucuuaaaacuccu

SEQ ID NO: 2142314 - RNA, 12 nt, Human
ucuuaaaacucc

SEQ ID NO: 2142315 - RNA, 20 nt, Human
ucuuaaaacauuaugaguuu

SEQ ID NO: 2142316 - RNA, 22 nt, Human
ucuuaaaaaguuauaaccaacu

SEQ ID NO: 2142317 - RNA, 19 nt, Human
ucuuaaaauauauuucaga

SEQ ID NO: 2142318 - RNA, 20 nt, Human
ucuuaaaauauauuucagau

SEQ ID NO: 2142319 - RNA, 22 nt, Human
ucuguucaguaacagggccuug

SEQ ID NO: 2142320 - RNA, 15 nt, Human
ucuuauacauuugau

SEQ ID NO: 2142321 - RNA, 14 nt, Human
ucuuauacauuuga

SEQ ID NO: 2142322 - RNA, 13 nt, Human
ucuucagggcacu

SEQ ID NO: 2142323 - RNA, 15 nt, Human
ucuucagggcacugc

SEQ ID NO: 2142324 - RNA, 15 nt, Human
ucuucaguaagccgu

SEQ ID NO: 2142325 - RNA, 14 nt, Human
ucuuaugccauuug

SEQ ID NO: 2142326 - RNA, 20 nt, Human
ucuuaugccauuuguuuauu

SEQ ID NO: 2142327 - RNA, 22 nt, Human
ucuuauagucaauguuucuuuu

SEQ ID NO: 2142328 - RNA, 20 nt, Human
ucuuauagaauauuuauuac

SEQ ID NO: 2142329 - RNA, 19 nt, Human
ucuuauagaauauuuauua

SEQ ID NO: 2142330 - RNA, 13 nt, Human
ucuuauagaaagu

SEQ ID NO: 2142331 - RNA, 15 nt, Human
ucugcaccccccugg

SEQ ID NO: 2142332 - RNA, 16 nt, Human
ucugcaccccccuggg

SEQ ID NO: 2142333 - RNA, 17 nt, Human
ucugcaccccccugggc

SEQ ID NO: 2142334 - RNA, 18 nt, Human
ucugcaccccccugggcu

SEQ ID NO: 2142335 - RNA, 16 nt, Human
ucuggagaauaauucu

SEQ ID NO: 2142336 - RNA, 16 nt, Human
ucuggagcccuugggu

SEQ ID NO: 2142337 - RNA, 14 nt, Human
ucuggaggccucug

SEQ ID NO: 2142338 - RNA, 15 nt, Human
ucuggaggccucugg

SEQ ID NO: 2142339 - RNA, 16 nt, Human
ucuggaggccucuggg

SEQ ID NO: 2142340 - RNA, 17 nt, Human
ucuggaggccucugggc

SEQ ID NO: 2142341 - RNA, 12 nt, Human
ucuggagcccuu

SEQ ID NO: 2142342 - RNA, 13 nt, Human
ucuggagcccuug

SEQ ID NO: 2142343 - RNA, 16 nt, Human
ucuggagggaaacacc

SEQ ID NO: 2142344 - RNA, 15 nt, Human
ucuggaggggagcuc

SEQ ID NO: 2142345 - RNA, 22 nt, Human
ucuggaggggagcucugucugu

SEQ ID NO: 2142346 - RNA, 13 nt, Human
ucuggcucugucu

SEQ ID NO: 2142347 - RNA, 22 nt, Human
ucuggcuagaggccagccccac

SEQ ID NO: 2142348 - RNA, 17 nt, Human
ucuggcuagaggccagc

SEQ ID NO: 2142349 - RNA, 21 nt, Human
ucuggcuagaggccagcccca

SEQ ID NO: 2142350 - RNA, 18 nt, Human
ucuggcgacaguuuuccu

SEQ ID NO: 2142351 - RNA, 22 nt, Human
ucuggcgacaguuuuccuucuc

SEQ ID NO: 2142352 - RNA, 16 nt, Human
ucuggcuaaggacagg

SEQ ID NO: 2142353 - RNA, 16 nt, Human
ucuggcuagaggccag

SEQ ID NO: 2142354 - RNA, 21 nt, Human
ucuguaagcucuuugaaacaa

SEQ ID NO: 2142355 - RNA, 19 nt, Human
ucuguaauaaacucauuuc

SEQ ID NO: 2142356 - RNA, 24 nt, Human
ucuguaauaaacucauuucuagca

SEQ ID NO: 2142357 - RNA, 23 nt, Human
ucuguaauaaacucauuucuagc

SEQ ID NO: 2142358 - RNA, 15 nt, Human
ucuggcucuccccaa

SEQ ID NO: 2142359 - RNA, 12 nt, Human
ucugggacacag

SEQ ID NO: 2142360 - RNA, 15 nt, Human
ucugggaacucccaa

SEQ ID NO: 2142361 - RNA, 18 nt, Human
ucugggaacugugccuuu

SEQ ID NO: 2142362 - RNA, 22 nt, Human
ucugggaaauggcuugaagcca

SEQ ID NO: 2142363 - RNA, 13 nt, Human
ucugggacacagu

SEQ ID NO: 2142364 - RNA, 18 nt, Human
ucugggaaauaagagaga

SEQ ID NO: 2142365 - RNA, 20 nt, Human
ucuguccguuuacuccaagg

SEQ ID NO: 2142366 - RNA, 19 nt, Human
ucuguccgagcuuugaaaa

SEQ ID NO: 2142367 - RNA, 17 nt, Human
ucuguacgucugacagg

SEQ ID NO: 2142368 - RNA, 22 nt, Human
ucuguaccauagcgcugcucuu

SEQ ID NO: 2142369 - RNA, 16 nt, Human
ucuguaccauuuauuu

SEQ ID NO: 2142370 - RNA, 22 nt, Human
ucugugucagguggggcagcuu

SEQ ID NO: 2142371 - RNA, 11 nt, Human
ucugugucucu

SEQ ID NO: 2142372 - RNA, 12 nt, Human
ucugugucucuu

SEQ ID NO: 2142373 - RNA, 16 nt, Human
ucuguucaaggaauca

SEQ ID NO: 2142374 - RNA, 18 nt, Human
ucuuaaaaaguggaaaaa

SEQ ID NO: 2142375 - RNA, 17 nt, Human
ucuguuaagugguuuca

SEQ ID NO: 2142376 - RNA, 16 nt, Human
ucuguguuuuugaaau

SEQ ID NO: 2142377 - RNA, 15 nt, Human
ucuguguuuuugaaa

SEQ ID NO: 2142378 - RNA, 20 nt, Human
uggaaaaaccacccccaaau

SEQ ID NO: 2142379 - RNA, 23 nt, Human
uggaaaaacaucugaaagccacg

SEQ ID NO: 2142380 - RNA, 15 nt, Human
uggaaaauaaaucaa

SEQ ID NO: 2142381 - RNA, 11 nt, Human
uggaaaauaaa

SEQ ID NO: 2142382 - RNA, 15 nt, Human
uggaaaauaaauuau

SEQ ID NO: 2142383 - RNA, 16 nt, Human
uggaaaauaaauuauu

SEQ ID NO: 2142384 - RNA, 18 nt, Human
uggaacccuuuuggcccc

SEQ ID NO: 2142385 - RNA, 19 nt, Human
uggaacccuuuuggccccc

SEQ ID NO: 2142386 - RNA, 21 nt, Human
uggaacccuuuuggcccccga

SEQ ID NO: 2142387 - RNA, 16 nt, Human
uggaaccgcaggaagc

SEQ ID NO: 2142388 - RNA, 17 nt, Human
uggaaccgcaggaagcu

SEQ ID NO: 2142389 - RNA, 19 nt, Human
uggaaccgcaggaagcugc

SEQ ID NO: 2142390 - RNA, 23 nt, Human
uggaaccgcaggaagcugcuccg

SEQ ID NO: 2142391 - RNA, 20 nt, Human
uggaaccgcaggaagcugcu

SEQ ID NO: 2142392 - RNA, 21 nt, Human
uggaauuaaccuggugcugga

SEQ ID NO: 2142393 - RNA, 17 nt, Human
uggaaaauaaaaggucu

SEQ ID NO: 2142394 - RNA, 16 nt, Human
uggaauuaaccuggug

SEQ ID NO: 2142395 - RNA, 17 nt, Human
uggaauuaaccuggugc

SEQ ID NO: 2142396 - RNA, 18 nt, Human
uggaauuaaccuggugcu

SEQ ID NO: 2142397 - RNA, 19 nt, Human
uggaauuaaccuggugcug

SEQ ID NO: 2142398 - RNA, 20 nt, Human
uggaauuaaccuggugcugg

SEQ ID NO: 2142399 - RNA, 20 nt, Human
uggaaucuucucuuugacaa

SEQ ID NO: 2142400 - RNA, 21 nt, Human
uggaaucuucucuuugacaau

SEQ ID NO: 2142401 - RNA, 22 nt, Human
uggaaucuucucuuugacaauu

SEQ ID NO: 2142402 - RNA, 14 nt, Human
uggaauuaaaacaa

SEQ ID NO: 2142403 - RNA, 15 nt, Human
uggaauuaaaacaau

SEQ ID NO: 2142404 - RNA, 16 nt, Human
uggaauuaaaacaaug

SEQ ID NO: 2142405 - RNA, 17 nt, Human
uggaauuaaaacaaugu

SEQ ID NO: 2142406 - RNA, 16 nt, Human
uggaaucuagaagaaa

SEQ ID NO: 2142407 - RNA, 17 nt, Human
uggaaucuagaagaaau

SEQ ID NO: 2142408 - RNA, 18 nt, Human
uggaaucuagaagaaaug

SEQ ID NO: 2142409 - RNA, 19 nt, Human
uggaaucuagaagaaauga

SEQ ID NO: 2142410 - RNA, 21 nt, Human
uggaaucuagaagaaaugaaa

SEQ ID NO: 2142411 - RNA, 22 nt, Human
uggaaucuagaagaaaugaaau

SEQ ID NO: 2142412 - RNA, 22 nt, Human
uggaauaucugcuguaugucaa

SEQ ID NO: 2142413 - RNA, 23 nt, Human
uggaauauuccccuaucucuaga

SEQ ID NO: 2142414 - RNA, 21 nt, Human
uggaagugugugaucuguggg

SEQ ID NO: 2142415 - RNA, 20 nt, Human
uggaauacuaaaaaucauga

SEQ ID NO: 2142416 - RNA, 22 nt, Human
uggaauacuaaaaaucaugaga

SEQ ID NO: 2142417 - RNA, 22 nt, Human
uggaauacaguguuauuuucuu

SEQ ID NO: 2142418 - RNA, 14 nt, Human
uggaauacaguguu

SEQ ID NO: 2142419 - RNA, 15 nt, Human
uggaauacaguguua

SEQ ID NO: 2142420 - RNA, 16 nt, Human
uggaaguuuguguucu

SEQ ID NO: 2142421 - RNA, 19 nt, Human
uggaaguuuguguucuguu

SEQ ID NO: 2142422 - RNA, 23 nt, Human
uggaaguuuguguucuguuuguu

SEQ ID NO: 2142423 - RNA, 13 nt, Human
uggaaguuuucag

SEQ ID NO: 2142424 - RNA, 15 nt, Human
uggaaguuuucagga

SEQ ID NO: 2142425 - RNA, 14 nt, Human
ugcuuguuggauuu

SEQ ID NO: 2142426 - RNA, 23 nt, Human
ugcuuguuugcucaccuggggug

SEQ ID NO: 2142427 - RNA, 14 nt, Human
ugcuugaaagaaaa

SEQ ID NO: 2142428 - RNA, 21 nt, Human
ugcuugaaagaaaauaugcau

SEQ ID NO: 2142429 - RNA, 12 nt, Human
ugcuugaacaca

SEQ ID NO: 2142430 - RNA, 13 nt, Human
ugcuugaacacag

SEQ ID NO: 2142431 - RNA, 14 nt, Human
ugcuugaacacagu

SEQ ID NO: 2142432 - RNA, 16 nt, Human
ugcuugaacacaguau

SEQ ID NO: 2142433 - RNA, 17 nt, Human
ugcuugaacacaguauu

SEQ ID NO: 2142434 - RNA, 20 nt, Human
ugcuugaacacaguauuuuc

SEQ ID NO: 2142435 - RNA, 17 nt, Human
ugcuugaacccaggaga

SEQ ID NO: 2142436 - RNA, 16 nt, Human
ugcuuguucccucucc

SEQ ID NO: 2142437 - RNA, 19 nt, Human
ugcuuguucccucucccug

SEQ ID NO: 2142438 - RNA, 23 nt, Human
ugcuuuuuuauggcgauucccau

SEQ ID NO: 2142439 - RNA, 19 nt, Human
ugcuuucaucuuggucaca

SEQ ID NO: 2142440 - RNA, 12 nt, Human
ugcuucugggaa

SEQ ID NO: 2142441 - RNA, 14 nt, Human
ugcuucugggaagg

SEQ ID NO: 2142442 - RNA, 13 nt, Human
ugcuucugggaga

SEQ ID NO: 2142443 - RNA, 17 nt, Human
ugcuucuguaguacucc

SEQ ID NO: 2142444 - RNA, 20 nt, Human
ugcuucuguaguacuccuua

SEQ ID NO: 2142445 - RNA, 21 nt, Human
ugcuucuucccuuaaaauuua

SEQ ID NO: 2142446 - RNA, 22 nt, Human
ugcuucuucccuuaaaauuuau

SEQ ID NO: 2142447 - RNA, 12 nt, Human
ugcuucucacug

SEQ ID NO: 2142448 - RNA, 18 nt, Human
ugcuucuaccaacuggaa

SEQ ID NO: 2142449 - RNA, 21 nt, Human
ugcuucuaccaacuggaagca

SEQ ID NO: 2142450 - RNA, 23 nt, Human
ugcuucuaccaacuggaagcaca

SEQ ID NO: 2142451 - RNA, 12 nt, Human
ugcugccucccc

SEQ ID NO: 2142452 - RNA, 13 nt, Human
ugcugccucccca

SEQ ID NO: 2142453 - RNA, 14 nt, Human
ugcugccuccccaa

SEQ ID NO: 2142454 - RNA, 17 nt, Human
ugcugccuccccaaccc

SEQ ID NO: 2142455 - RNA, 19 nt, Human
ugcugccuccccaacccug

SEQ ID NO: 2142456 - RNA, 22 nt, Human
ugcugccuccccaacccugccc

SEQ ID NO: 2142457 - RNA, 13 nt, Human
ugcugccuaggcu

SEQ ID NO: 2142458 - RNA, 18 nt, Human
ugcugccuaggcugaccu

SEQ ID NO: 2142459 - RNA, 20 nt, Human
ugcugccgccucccagccug

SEQ ID NO: 2142460 - RNA, 21 nt, Human
ugcugccgccucccagccugg

SEQ ID NO: 2142461 - RNA, 16 nt, Human
ugcugccgccucccag

SEQ ID NO: 2142462 - RNA, 17 nt, Human
ugcugccgccucccagc

SEQ ID NO: 2142463 - RNA, 19 nt, Human
ugcugccgccucccagccu

SEQ ID NO: 2142464 - RNA, 14 nt, Human
ugcugccuccagaa

SEQ ID NO: 2142465 - RNA, 19 nt, Human
uggauacgacaacuugcac

SEQ ID NO: 2142466 - RNA, 18 nt, Human
uggauaaugcuguugccu

SEQ ID NO: 2142467 - RNA, 17 nt, Human
uggauacugcccggggc

SEQ ID NO: 2142468 - RNA, 22 nt, Human
uggauacugcccggggcagcug

SEQ ID NO: 2142469 - RNA, 14 nt, Human
uggauaauuuugca

SEQ ID NO: 2142470 - RNA, 21 nt, Human
uggauaauuuugcauaaaauu

SEQ ID NO: 2142471 - RNA, 13 nt, Human
uggauagaugccc

SEQ ID NO: 2142472 - RNA, 14 nt, Human
uggauagaugcccu

SEQ ID NO: 2142473 - RNA, 17 nt, Human
uggauagaugcccugcu

SEQ ID NO: 2142474 - RNA, 13 nt, Human
uggauagcauguc

SEQ ID NO: 2142475 - RNA, 16 nt, Human
uggauagcaugucuuu

SEQ ID NO: 2142476 - RNA, 22 nt, Human
uggaugaaguuaucuggcuuca

SEQ ID NO: 2142477 - RNA, 12 nt, Human
uggaugauguuu

SEQ ID NO: 2142478 - RNA, 14 nt, Human
uggaggccagccag

SEQ ID NO: 2142479 - RNA, 15 nt, Human
uggaggccagccagu

SEQ ID NO: 2142480 - RNA, 22 nt, Human
uggaggcacacagcugcagaga

SEQ ID NO: 2142481 - RNA, 14 nt, Human
uggaggcagggccu

SEQ ID NO: 2142482 - RNA, 22 nt, Human
uggaggcagggccuugcccaga

SEQ ID NO: 2142483 - RNA, 18 nt, Human
uggaggcacacagcugca

SEQ ID NO: 2142484 - RNA, 19 nt, Human
uggaggcacacagcugcag

SEQ ID NO: 2142485 - RNA, 13 nt, Human
uggaggcugucuu

SEQ ID NO: 2142486 - RNA, 14 nt, Human
uggaggccucuggg

SEQ ID NO: 2142487 - RNA, 15 nt, Human
uggaggccucugggc

SEQ ID NO: 2142488 - RNA, 16 nt, Human
uggaggccucugggcc

SEQ ID NO: 2142489 - RNA, 22 nt, Human
uggaggccucugggccuccucu

SEQ ID NO: 2142490 - RNA, 14 nt, Human
uggaggcugucuuc

SEQ ID NO: 2142491 - RNA, 22 nt, Human
uggaggcugucuucucaggcuc

SEQ ID NO: 2142492 - RNA, 23 nt, Human
uggaggcugucuucucaggcucu

SEQ ID NO: 2142493 - RNA, 19 nt, Human
uggaggccgggugcucagg

SEQ ID NO: 2142494 - RNA, 21 nt, Human
uggaggccgggugcucagggc

SEQ ID NO: 2142495 - RNA, 14 nt, Human
uggaggccaggaau

SEQ ID NO: 2142496 - RNA, 17 nt, Human
uggagacugucucaaga

SEQ ID NO: 2142497 - RNA, 12 nt, Human
uggagagagggg

SEQ ID NO: 2142498 - RNA, 13 nt, Human
uggagagagggga

SEQ ID NO: 2142499 - RNA, 16 nt, Human
uggacaggcauguucu

SEQ ID NO: 2142500 - RNA, 12 nt, Human
uggacaggcaug

SEQ ID NO: 2142501 - RNA, 22 nt, Human
uggagaggagggaugcugccug

SEQ ID NO: 2142502 - RNA, 14 nt, Human
uggagagcaacaca

SEQ ID NO: 2142503 - RNA, 23 nt, Human
uggagaggagggaugcugccuga

SEQ ID NO: 2142504 - RNA, 19 nt, Human
uggagagggaugaggugcu

SEQ ID NO: 2142505 - RNA, 20 nt, Human
uggagagggacagcccacug

SEQ ID NO: 2142506 - RNA, 13 nt, Human
uggagagggauga

SEQ ID NO: 2142507 - RNA, 22 nt, Human
uggagagguuauaggucacucc

SEQ ID NO: 2142508 - RNA, 21 nt, Human
uggagagggaugaggugcugg

SEQ ID NO: 2142509 - RNA, 15 nt, Human
uggagaguaaaaacu

SEQ ID NO: 2142510 - RNA, 17 nt, Human
uggagagugcaacagua

SEQ ID NO: 2142511 - RNA, 20 nt, Human
uggagagugcaacaguagca

SEQ ID NO: 2142512 - RNA, 16 nt, Human
uggagaugggaugcuu

SEQ ID NO: 2142513 - RNA, 18 nt, Human
uggagaugggaugcuugc

SEQ ID NO: 2142514 - RNA, 13 nt, Human
uggagauggggag

SEQ ID NO: 2142515 - RNA, 15 nt, Human
uggagauggggagaa

SEQ ID NO: 2142516 - RNA, 17 nt, Human
uggagauggggagaaac

SEQ ID NO: 2142517 - RNA, 22 nt, Human
uggccacuccagaccccuggcu

SEQ ID NO: 2142518 - RNA, 20 nt, Human
uggcagugggagcugccugu

SEQ ID NO: 2142519 - RNA, 20 nt, Human
uggccagaagggggccauga

SEQ ID NO: 2142520 - RNA, 13 nt, Human
uggccagagagcc

SEQ ID NO: 2142521 - RNA, 23 nt, Human
uggccagagagccuggugcugcu

SEQ ID NO: 2142522 - RNA, 14 nt, Human
uggccagaccagag

SEQ ID NO: 2142523 - RNA, 15 nt, Human
uggccagaccagagc

SEQ ID NO: 2142524 - RNA, 16 nt, Human
uggccagaccagagcu

SEQ ID NO: 2142525 - RNA, 17 nt, Human
uggccagaccagagcuc

SEQ ID NO: 2142526 - RNA, 20 nt, Human
uggccagaccagagcucugg

SEQ ID NO: 2142527 - RNA, 21 nt, Human
uggccagaccagagcucugga

SEQ ID NO: 2142528 - RNA, 22 nt, Human
uggccagaccagagcucuggag

SEQ ID NO: 2142529 - RNA, 23 nt, Human
uggccagaccagagcucuggagc

SEQ ID NO: 2142530 - RNA, 15 nt, Human
uggcaggccagcugu

SEQ ID NO: 2142531 - RNA, 19 nt, Human
uggcagugggagcugccug

SEQ ID NO: 2142532 - RNA, 16 nt, Human
uggcagugggagcugc

SEQ ID NO: 2142533 - RNA, 15 nt, Human
uggcagugggagcug

SEQ ID NO: 2142534 - RNA, 14 nt, Human
uggcagugggagcu

SEQ ID NO: 2142535 - RNA, 14 nt, Human
uggaugccuggugg

SEQ ID NO: 2142536 - RNA, 14 nt, Human
uggaugccucagaa

SEQ ID NO: 2142537 - RNA, 14 nt, Human
uggaugauguuucg

SEQ ID NO: 2142538 - RNA, 19 nt, Human
uggcacugcauacaaucug

SEQ ID NO: 2142539 - RNA, 22 nt, Human
uggcagcugcgguccacccagg

SEQ ID NO: 2142540 - RNA, 21 nt, Human
uggcagcugcgguccacccag

SEQ ID NO: 2142541 - RNA, 23 nt, Human
uggcagcugcgguccacccagga

SEQ ID NO: 2142542 - RNA, 14 nt, Human
uggcagaacugagc

SEQ ID NO: 2142543 - RNA, 23 nt, Human
uggcagaaagcaaaugugaccug

SEQ ID NO: 2142544 - RNA, 16 nt, Human
uggcagaacugagcuc

SEQ ID NO: 2142545 - RNA, 20 nt, Human
uggcagaacugagcuccucu

SEQ ID NO: 2142546 - RNA, 21 nt, Human
uggcagaacugagcuccucug

SEQ ID NO: 2142547 - RNA, 13 nt, Human
uggcgcuaggcau

SEQ ID NO: 2142548 - RNA, 22 nt, Human
uggcgugcaguggugcgaucug

SEQ ID NO: 2142549 - RNA, 13 nt, Human
uggcgucugucuu

SEQ ID NO: 2142550 - RNA, 15 nt, Human
uggcgucugucuuca

SEQ ID NO: 2142551 - RNA, 17 nt, Human
uggcgucugucuucaag

SEQ ID NO: 2142552 - RNA, 20 nt, Human
uggcgucugucuucaagggc

SEQ ID NO: 2142553 - RNA, 22 nt, Human
uggcgucugucuucaagggcuu

SEQ ID NO: 2142554 - RNA, 15 nt, Human
uggccagaugcacca

SEQ ID NO: 2142555 - RNA, 14 nt, Human
uggccagaggcuug

SEQ ID NO: 2142556 - RNA, 22 nt, Human
uggccuuguucucucuauggua

SEQ ID NO: 2142557 - RNA, 18 nt, Human
uggccuuugcuuaugaau

SEQ ID NO: 2142558 - RNA, 21 nt, Human
uggccuuugcuuaugaauauu

SEQ ID NO: 2142559 - RNA, 12 nt, Human
uggcugggggcc

SEQ ID NO: 2142560 - RNA, 16 nt, Human
uggcugggggcaggag

SEQ ID NO: 2142561 - RNA, 17 nt, Human
uggcugggggcaggagg

SEQ ID NO: 2142562 - RNA, 16 nt, Human
uggcugggcccagaag

SEQ ID NO: 2142563 - RNA, 18 nt, Human
uggcucuguggcuugcua

SEQ ID NO: 2142564 - RNA, 16 nt, Human
uggcucucagaaggua

SEQ ID NO: 2142565 - RNA, 21 nt, Human
uggcuccugaggggcaucugc

SEQ ID NO: 2142566 - RNA, 23 nt, Human
uggcuccugaggggcaucugccc

SEQ ID NO: 2142567 - RNA, 14 nt, Human
uggcuaaagguccc

SEQ ID NO: 2142568 - RNA, 19 nt, Human
uggcucauauuccugcagc

SEQ ID NO: 2142569 - RNA, 21 nt, Human
uggcucauauuccugcagccu

SEQ ID NO: 2142570 - RNA, 22 nt, Human
uggcucauauuccugcagccug

SEQ ID NO: 2142571 - RNA, 18 nt, Human
uggcgugucccucucgga

SEQ ID NO: 2142572 - RNA, 21 nt, Human
uggcuuuggucucuugcuugu

SEQ ID NO: 2142573 - RNA, 11 nt, Human
uggcuuuguuu

SEQ ID NO: 2142574 - RNA, 17 nt, Human
uggcuuugucccacagc

SEQ ID NO: 2142575 - RNA, 22 nt, Human
uggcuuugucccacagcuuggg

SEQ ID NO: 2142576 - RNA, 20 nt, Human
uggcuguagaaggagacaga

SEQ ID NO: 2142577 - RNA, 17 nt, Human
uggcuguaucuuguuuu

SEQ ID NO: 2142578 - RNA, 14 nt, Human
uggcugucagcagg

SEQ ID NO: 2142579 - RNA, 17 nt, Human
uggcugucagcaggaag

SEQ ID NO: 2142580 - RNA, 15 nt, Human
uggcugggggccuca

SEQ ID NO: 2142581 - RNA, 14 nt, Human
uggcugggggccuc

SEQ ID NO: 2142582 - RNA, 21 nt, Human
ugggaauguauuauucugcag

SEQ ID NO: 2142583 - RNA, 16 nt, Human
ugggaaugcggcaaga

SEQ ID NO: 2142584 - RNA, 14 nt, Human
uggcuuuucacugc

SEQ ID NO: 2142585 - RNA, 15 nt, Human
uggcuuuucacugcu

SEQ ID NO: 2142586 - RNA, 13 nt, Human
ugggacccuuucc

SEQ ID NO: 2142587 - RNA, 14 nt, Human
ugggacccuuuccu

SEQ ID NO: 2142588 - RNA, 17 nt, Human
ugggacccuuuccuucc

SEQ ID NO: 2142589 - RNA, 18 nt, Human
ugggacccuuuccuuccu

SEQ ID NO: 2142590 - RNA, 22 nt, Human
ugggaauguauuauucugcagc

SEQ ID NO: 2142591 - RNA, 16 nt, Human
ugggacagggcauggc

SEQ ID NO: 2142592 - RNA, 22 nt, Human
ugggagccccagggucuucccu

SEQ ID NO: 2142593 - RNA, 23 nt, Human
ugggagccccagggucuucccua

SEQ ID NO: 2142594 - RNA, 12 nt, Human
ugggagccaggg

SEQ ID NO: 2142595 - RNA, 13 nt, Human
ugggagccccagg

SEQ ID NO: 2142596 - RNA, 14 nt, Human
ugggagccccaggg

SEQ ID NO: 2142597 - RNA, 16 nt, Human
ugggagccccaggguc

SEQ ID NO: 2142598 - RNA, 21 nt, Human
ugggagcagcgguuuggggag

SEQ ID NO: 2142599 - RNA, 23 nt, Human
ugggagcugccuguucagcucca

SEQ ID NO: 2142600 - RNA, 22 nt, Human
uggggcaggaggggagugaggc

SEQ ID NO: 2142601 - RNA, 22 nt, Human
uggggcagucaccugcccagau

SEQ ID NO: 2142602 - RNA, 12 nt, Human
uggggcaggcag

SEQ ID NO: 2142603 - RNA, 14 nt, Human
uggggcaggcagug

SEQ ID NO: 2142604 - RNA, 17 nt, Human
uggggcaggcuggcugg

SEQ ID NO: 2142605 - RNA, 18 nt, Human
uggguuccaauccuggcu

SEQ ID NO: 2142606 - RNA, 11 nt, Human
uggguucauua

SEQ ID NO: 2142607 - RNA, 13 nt, Human
uggguucauuauu

SEQ ID NO: 2142608 - RNA, 16 nt, Human
uggguucauuauugga

SEQ ID NO: 2142609 - RNA, 18 nt, Human
uggguucauuauuggaau

SEQ ID NO: 2142610 - RNA, 20 nt, Human
uggguucauuauuggaauua

SEQ ID NO: 2142611 - RNA, 21 nt, Human
uggguagcuucugaccucagc

SEQ ID NO: 2142612 - RNA, 20 nt, Human
uggguucccuuuccuuccau

SEQ ID NO: 2142613 - RNA, 13 nt, Human
uggguuccucuuc

SEQ ID NO: 2142614 - RNA, 21 nt, Human
uggguuccucuuccccacucc

SEQ ID NO: 2142615 - RNA, 17 nt, Human
uggguuggaaaacagua

SEQ ID NO: 2142616 - RNA, 19 nt, Human
uggguugcguccugacggc

SEQ ID NO: 2142617 - RNA, 14 nt, Human
uggguucugggugg

SEQ ID NO: 2142618 - RNA, 14 nt, Human
uggguugacuuuca

SEQ ID NO: 2142619 - RNA, 22 nt, Human
uggguuucacaagugaaaaaca

SEQ ID NO: 2142620 - RNA, 16 nt, Human
uggguucacugcaacc

SEQ ID NO: 2142621 - RNA, 24 nt, Human
uggguucaggggacucagcccuga

SEQ ID NO: 2142622 - RNA, 23 nt, Human
uggguucaagcgauucuucugcu

SEQ ID NO: 2142623 - RNA, 15 nt, Human
uggguccaggggaug

SEQ ID NO: 2142624 - RNA, 20 nt, Human
uggguccaggggaugggagg

SEQ ID NO: 2142625 - RNA, 21 nt, Human
uggguccaggggaugggaggu

SEQ ID NO: 2142626 - RNA, 22 nt, Human
uggguguauuuauuuuccuccc

SEQ ID NO: 2142627 - RNA, 23 nt, Human
ugggugucaagagggucugagga

SEQ ID NO: 2142628 - RNA, 21 nt, Human
ugggugucaagagggucugag

SEQ ID NO: 2142629 - RNA, 16 nt, Human
uggggcagcuugaggg

SEQ ID NO: 2142630 - RNA, 20 nt, Human
ugggcuucaguggcagcugc

SEQ ID NO: 2142631 - RNA, 19 nt, Human
ugggcuucaguggcagcug

SEQ ID NO: 2142632 - RNA, 18 nt, Human
ugggcuucaguggcagcu

SEQ ID NO: 2142633 - RNA, 13 nt, Human
ugggcggcagaga

SEQ ID NO: 2142634 - RNA, 15 nt, Human
ugggcggcagagagg

SEQ ID NO: 2142635 - RNA, 19 nt, Human
ugggcggcagagaggacug

SEQ ID NO: 2142636 - RNA, 24 nt, Human
ugggaggaagcagguugaggggcu

SEQ ID NO: 2142637 - RNA, 13 nt, Human
ugggaggaagcag

SEQ ID NO: 2142638 - RNA, 24 nt, Human
ugggagcugccuguucagcuccag

SEQ ID NO: 2142639 - RNA, 20 nt, Human
ugggagcuugauucucagca

SEQ ID NO: 2142640 - RNA, 12 nt, Human
ugggaggaaaag

SEQ ID NO: 2142641 - RNA, 20 nt, Human
ugggaggaaaagaaaagagg

SEQ ID NO: 2142642 - RNA, 11 nt, Human
ugggaggaagc

SEQ ID NO: 2142643 - RNA, 15 nt, Human
ugggaggaaauuuga

SEQ ID NO: 2142644 - RNA, 13 nt, Human
ugggccuugcuac

SEQ ID NO: 2142645 - RNA, 18 nt, Human
ugggccuccucuguccag

SEQ ID NO: 2142646 - RNA, 20 nt, Human
ugggccuccucuguccaggg

SEQ ID NO: 2142647 - RNA, 22 nt, Human
ugggccuccugugugugcgccu

SEQ ID NO: 2142648 - RNA, 16 nt, Human
ugggccuccugugugu

SEQ ID NO: 2142649 - RNA, 14 nt, Human
ugggccuccugugu

SEQ ID NO: 2142650 - RNA, 13 nt, Human
ugcgugucguggg

SEQ ID NO: 2142651 - RNA, 14 nt, Human
ugcguggcugaccc

SEQ ID NO: 2142652 - RNA, 17 nt, Human
ugcguggcugacccccc

SEQ ID NO: 2142653 - RNA, 20 nt, Human
ugcguacguuuccugagaag

SEQ ID NO: 2142654 - RNA, 23 nt, Human
ugcguacguuuccugagaagugu

SEQ ID NO: 2142655 - RNA, 15 nt, Human
ugcguacguuuccug

SEQ ID NO: 2142656 - RNA, 20 nt, Human
ugcuagcacuuggagccaag

SEQ ID NO: 2142657 - RNA, 17 nt, Human
ugcuagcuaugugaccu

SEQ ID NO: 2142658 - RNA, 18 nt, Human
ugcuagcuaugugaccuu

SEQ ID NO: 2142659 - RNA, 18 nt, Human
ugcuagcacuuggagcca

SEQ ID NO: 2142660 - RNA, 23 nt, Human
ugcuagaugagaauucagcugcc

SEQ ID NO: 2142661 - RNA, 18 nt, Human
ugcgugugcgugcaugug

SEQ ID NO: 2142662 - RNA, 19 nt, Human
ugcuccucuccccagcaag

SEQ ID NO: 2142663 - RNA, 22 nt, Human
ugcucaucauuccuugagaaaa

SEQ ID NO: 2142664 - RNA, 17 nt, Human
ugcucagcuucuccaac

SEQ ID NO: 2142665 - RNA, 20 nt, Human
ugcucagcuucuccaacaau

SEQ ID NO: 2142666 - RNA, 14 nt, Human
ugcuaggugggcca

SEQ ID NO: 2142667 - RNA, 21 nt, Human
ugcuaggugggccagccccuc

SEQ ID NO: 2142668 - RNA, 23 nt, Human
ugcuaggugggccagccccuccc

SEQ ID NO: 2142669 - RNA, 15 nt, Human
ugcuaggugggccag

SEQ ID NO: 2142670 - RNA, 17 nt, Human
ugcuaggugggccagcc

SEQ ID NO: 2142671 - RNA, 19 nt, Human
ugcuaggugggccagcccc

SEQ ID NO: 2142672 - RNA, 20 nt, Human
ugcuaggugggccagccccu

SEQ ID NO: 2142673 - RNA, 15 nt, Human
ugcugaguugguguu

SEQ ID NO: 2142674 - RNA, 19 nt, Human
ugcugacagacacaggccc

SEQ ID NO: 2142675 - RNA, 16 nt, Human
ugcugacagacacagg

SEQ ID NO: 2142676 - RNA, 15 nt, Human
ugcugacagacacag

SEQ ID NO: 2142677 - RNA, 21 nt, Human
ugcguggguggggagggaggu

SEQ ID NO: 2142678 - RNA, 19 nt, Human
ugcugaaucggaaucucug

SEQ ID NO: 2142679 - RNA, 17 nt, Human
ugcugauucucccguuc

SEQ ID NO: 2142680 - RNA, 16 nt, Human
ugcugaugcucauggu

SEQ ID NO: 2142681 - RNA, 22 nt, Human
ugcugaugcucaugguccccau

SEQ ID NO: 2142682 - RNA, 17 nt, Human
ugcugauguggcaacug

SEQ ID NO: 2142683 - RNA, 21 nt, Human
ugcugauguggcaacugcuga

SEQ ID NO: 2142684 - RNA, 17 nt, Human
ugcugaaugguuuucaa

SEQ ID NO: 2142685 - RNA, 18 nt, Human
ugcugaaugguuuucaaa

SEQ ID NO: 2142686 - RNA, 22 nt, Human
ugcugaaugguuuucaaaauaa

SEQ ID NO: 2142687 - RNA, 18 nt, Human
ugcugaauacagaggcaa

SEQ ID NO: 2142688 - RNA, 23 nt, Human
ugcugaauacagaggcaacugca

SEQ ID NO: 2142689 - RNA, 19 nt, Human
ugcuccuggcccacugcau

SEQ ID NO: 2142690 - RNA, 16 nt, Human
ugcuccuuagcugcca

SEQ ID NO: 2142691 - RNA, 18 nt, Human
ugcuccuuagcugccaag

SEQ ID NO: 2142692 - RNA, 20 nt, Human
ugcuccuuagcugccaagcc

SEQ ID NO: 2142693 - RNA, 19 nt, Human
ugcuccuuccaacaggagc

SEQ ID NO: 2142694 - RNA, 21 nt, Human
ugcuccuuccaacaggagcug

SEQ ID NO: 2142695 - RNA, 16 nt, Human
ugccuggcccccagcu

SEQ ID NO: 2142696 - RNA, 12 nt, Human
ugccuggccagg

SEQ ID NO: 2142697 - RNA, 14 nt, Human
ugccuggccaggca

SEQ ID NO: 2142698 - RNA, 16 nt, Human
ugccuggccaggcaga

SEQ ID NO: 2142699 - RNA, 20 nt, Human
ugccuggccaggcagaucug

SEQ ID NO: 2142700 - RNA, 18 nt, Human
ugccuucagcucuacagc

SEQ ID NO: 2142701 - RNA, 17 nt, Human
ugccuucagcucuacag

SEQ ID NO: 2142702 - RNA, 13 nt, Human
ugccuuccacgcu

SEQ ID NO: 2142703 - RNA, 13 nt, Human
ugccuucagcucu

SEQ ID NO: 2142704 - RNA, 18 nt, Human
ugccuuccagcacccugc

SEQ ID NO: 2142705 - RNA, 13 nt, Human
ugccuuccauaau

SEQ ID NO: 2142706 - RNA, 14 nt, Human
ugccuuccauaauu

SEQ ID NO: 2142707 - RNA, 17 nt, Human
ugccuuccauaauuaug

SEQ ID NO: 2142708 - RNA, 21 nt, Human
ugccuuccauaauuaugacag

SEQ ID NO: 2142709 - RNA, 23 nt, Human
ugccuuccacgcugucuccagac

SEQ ID NO: 2142710 - RNA, 21 nt, Human
ugccuuccacgcugucuccag

SEQ ID NO: 2142711 - RNA, 22 nt, Human
ugccuuccacgcugucuccaga

SEQ ID NO: 2142712 - RNA, 14 nt, Human
ugccuuccacgcug

SEQ ID NO: 2142713 - RNA, 17 nt, Human
ugccuuccacgcugucu

SEQ ID NO: 2142714 - RNA, 19 nt, Human
ugccuuccacgcugucucc

SEQ ID NO: 2142715 - RNA, 20 nt, Human
ugccuuccacgcugucucca

SEQ ID NO: 2142716 - RNA, 13 nt, Human
ugcgccuacagga

SEQ ID NO: 2142717 - RNA, 18 nt, Human
ugcgccauugcacuccag

SEQ ID NO: 2142718 - RNA, 21 nt, Human
ugcgccauugcacuccagccu

SEQ ID NO: 2142719 - RNA, 21 nt, Human
ugccuucuuauucucacucca

SEQ ID NO: 2142720 - RNA, 16 nt, Human
ugcgcacaacuuaaaa

SEQ ID NO: 2142721 - RNA, 22 nt, Human
ugcgcacaaggcugaccaagag

SEQ ID NO: 2142722 - RNA, 23 nt, Human
ugccuucuccagacaaaccagaa

SEQ ID NO: 2142723 - RNA, 14 nt, Human
ugccuaggcugacc

SEQ ID NO: 2142724 - RNA, 18 nt, Human
ugccuaggcugaccuuga

SEQ ID NO: 2142725 - RNA, 17 nt, Human
ugccuagggccuggucc

SEQ ID NO: 2142726 - RNA, 18 nt, Human
ugccuagggccuggucca

SEQ ID NO: 2142727 - RNA, 19 nt, Human
ugccuagcacucacaugcu

SEQ ID NO: 2142728 - RNA, 22 nt, Human
ugccuagcacucacaugcugga

SEQ ID NO: 2142729 - RNA, 17 nt, Human
ugccuaggaauucccag

SEQ ID NO: 2142730 - RNA, 15 nt, Human
ugccuacauuaucua

SEQ ID NO: 2142731 - RNA, 18 nt, Human
ugccuaauacauuaaagc

SEQ ID NO: 2142732 - RNA, 21 nt, Human
ugccuaauacauuaaagcagu

SEQ ID NO: 2142733 - RNA, 22 nt, Human
ugccuaauacauuaaagcaguc

SEQ ID NO: 2142734 - RNA, 17 nt, Human
ugccuaaguauuccuuu

SEQ ID NO: 2142735 - RNA, 14 nt, Human
ugccuaaguggcug

SEQ ID NO: 2142736 - RNA, 15 nt, Human
ugccuaaguggcugc

SEQ ID NO: 2142737 - RNA, 17 nt, Human
ugccuaaguggcugcug

SEQ ID NO: 2142738 - RNA, 18 nt, Human
ugccuaauaaacauccuu

SEQ ID NO: 2142739 - RNA, 21 nt, Human
ugccuaauaaacauccuucaa

SEQ ID NO: 2142740 - RNA, 19 nt, Human
ugcccagggcucagccugg

SEQ ID NO: 2142741 - RNA, 17 nt, Human
ugcccagggcucagccu

SEQ ID NO: 2142742 - RNA, 18 nt, Human
ugcccagggcucagccug

SEQ ID NO: 2142743 - RNA, 11 nt, Human
ugcccagggcu

SEQ ID NO: 2142744 - RNA, 14 nt, Human
ugcccagggcucag

SEQ ID NO: 2142745 - RNA, 15 nt, Human
ugcccagggcucagc

SEQ ID NO: 2142746 - RNA, 16 nt, Human
ugcccagggcucagcc

SEQ ID NO: 2142747 - RNA, 17 nt, Human
ugcccaggcuggucuca

SEQ ID NO: 2142748 - RNA, 17 nt, Human
ugcccagggauuugucc

SEQ ID NO: 2142749 - RNA, 19 nt, Human
ugcccagggccacucugcc

SEQ ID NO: 2142750 - RNA, 21 nt, Human
ugcccagggccacucugccuc

SEQ ID NO: 2142751 - RNA, 22 nt, Human
ugcccagggccacucugccucu

SEQ ID NO: 2142752 - RNA, 23 nt, Human
ugcccaggcuggcgugcaguggu

SEQ ID NO: 2142753 - RNA, 16 nt, Human
ugcccagaucccagaa

SEQ ID NO: 2142754 - RNA, 17 nt, Human
ugcccagaucccagaag

SEQ ID NO: 2142755 - RNA, 22 nt, Human
ugcccagaucccagaaggaccu

SEQ ID NO: 2142756 - RNA, 14 nt, Human
ugccucugggacug

SEQ ID NO: 2142757 - RNA, 17 nt, Human
ugccugaagucacacag

SEQ ID NO: 2142758 - RNA, 18 nt, Human
ugccugaagucacacagu

SEQ ID NO: 2142759 - RNA, 22 nt, Human
ugccugaagucacacagugagu

SEQ ID NO: 2142760 - RNA, 19 nt, Human
ugccugaaguuggagugag

SEQ ID NO: 2142761 - RNA, 19 nt, Human
ugccugagucacccaugaa

SEQ ID NO: 2142762 - RNA, 14 nt, Human
ugccugcaccagga

SEQ ID NO: 2142763 - RNA, 15 nt, Human
ugccugcaccaggag

SEQ ID NO: 2142764 - RNA, 16 nt, Human
ugccugcaccaggaga

SEQ ID NO: 2142765 - RNA, 17 nt, Human
ugccugcaccaggagac

SEQ ID NO: 2142766 - RNA, 18 nt, Human
ugccugcaccaggagaca

SEQ ID NO: 2142767 - RNA, 19 nt, Human
ugccugcaccaggagacag

SEQ ID NO: 2142768 - RNA, 20 nt, Human
ugccugcaccaggagacaga

SEQ ID NO: 2142769 - RNA, 15 nt, Human
ugcauuuuuuaaaac

SEQ ID NO: 2142770 - RNA, 19 nt, Human
ugcauuuuugugaaaugaa

SEQ ID NO: 2142771 - RNA, 17 nt, Human
ugcauuuuuuaaaacaa

SEQ ID NO: 2142772 - RNA, 19 nt, Human
ugcauuuuuuaaaacaaga

SEQ ID NO: 2142773 - RNA, 18 nt, Human
ugcauuacagagaggaga

SEQ ID NO: 2142774 - RNA, 14 nt, Human
ugcauuuuugugaa

SEQ ID NO: 2142775 - RNA, 16 nt, Human
ugcauuuuugugaaau

SEQ ID NO: 2142776 - RNA, 17 nt, Human
ugcauuuuugugaaaug

SEQ ID NO: 2142777 - RNA, 16 nt, Human
ugcauuacagagagga

SEQ ID NO: 2142778 - RNA, 17 nt, Human
ugcauuacagagaggag

SEQ ID NO: 2142779 - RNA, 12 nt, Human
ugccaaaauaau

SEQ ID NO: 2142780 - RNA, 13 nt, Human
ugccaaaauaaug

SEQ ID NO: 2142781 - RNA, 14 nt, Human
ugccaaaauaaugu

SEQ ID NO: 2142782 - RNA, 17 nt, Human
ugccaaaauaaugucuu

SEQ ID NO: 2142783 - RNA, 18 nt, Human
ugccaaaauaaugucuug

SEQ ID NO: 2142784 - RNA, 21 nt, Human
ugccaaaauaaugucuuguua

SEQ ID NO: 2142785 - RNA, 22 nt, Human
ugccaaaauaaugucuuguuaa

SEQ ID NO: 2142786 - RNA, 16 nt, Human
ugccaagaacugaaaa

SEQ ID NO: 2142787 - RNA, 17 nt, Human
ugccaagaacugaaaac

SEQ ID NO: 2142788 - RNA, 18 nt, Human
ugccaagaacugaaaaca

SEQ ID NO: 2142789 - RNA, 19 nt, Human
ugccaagaacugaaaacau

SEQ ID NO: 2142790 - RNA, 20 nt, Human
ugccaagaacugaaaacaua

SEQ ID NO: 2142791 - RNA, 19 nt, Human
ugcauguuacauaagauaa

SEQ ID NO: 2142792 - RNA, 11 nt, Human
ugcaugugugu

SEQ ID NO: 2142793 - RNA, 12 nt, Human
ugcaugugugcg

SEQ ID NO: 2142794 - RNA, 13 nt, Human
ugcaugugugugc

SEQ ID NO: 2142795 - RNA, 14 nt, Human
ugcaugugugugcu

SEQ ID NO: 2142796 - RNA, 11 nt, Human
ugcauuacaga

SEQ ID NO: 2142797 - RNA, 12 nt, Human
ugcauuacagag

SEQ ID NO: 2142798 - RNA, 15 nt, Human
ugcauuacagagagg

SEQ ID NO: 2142799 - RNA, 22 nt, Human
ugcauuacagagaggagaaaca

SEQ ID NO: 2142800 - RNA, 19 nt, Human
ugcaggaugauuguacaga

SEQ ID NO: 2142801 - RNA, 23 nt, Human
ugcaggaguuaaaaagggcaggg

SEQ ID NO: 2142802 - RNA, 16 nt, Human
ugcaucaucuguagau

SEQ ID NO: 2142803 - RNA, 17 nt, Human
ugcaucaucuguagaua

SEQ ID NO: 2142804 - RNA, 19 nt, Human
ugcauccauuccucaggga

SEQ ID NO: 2142805 - RNA, 14 nt, Human
ugcauccauuccuc

SEQ ID NO: 2142806 - RNA, 16 nt, Human
ugcauccauuccucag

SEQ ID NO: 2142807 - RNA, 17 nt, Human
ugcauccauuccucagg

SEQ ID NO: 2142808 - RNA, 18 nt, Human
ugcauccauuccucaggg

SEQ ID NO: 2142809 - RNA, 15 nt, Human
ugcaucguuucaucu

SEQ ID NO: 2142810 - RNA, 24 nt, Human
ugccagguuuuuggucugacccac

SEQ ID NO: 2142811 - RNA, 11 nt, Human
ugccagggagc

SEQ ID NO: 2142812 - RNA, 12 nt, Human
ugccagggagcu

SEQ ID NO: 2142813 - RNA, 15 nt, Human
ugccaagcacagugc

SEQ ID NO: 2142814 - RNA, 16 nt, Human
ugccaucugugggcac

SEQ ID NO: 2142815 - RNA, 18 nt, Human
ugccaucugugggcacgc

SEQ ID NO: 2142816 - RNA, 16 nt, Human
ugccaucuguguccug

SEQ ID NO: 2142817 - RNA, 20 nt, Human
ugccaucuguguccugguua

SEQ ID NO: 2142818 - RNA, 18 nt, Human
ugccauggacagaagaag

SEQ ID NO: 2142819 - RNA, 20 nt, Human
ugccauggacagaagaaggc

SEQ ID NO: 2142820 - RNA, 23 nt, Human
ugccauggacagaagaaggcagc

SEQ ID NO: 2142821 - RNA, 16 nt, Human
ugccauggaggcacac

SEQ ID NO: 2142822 - RNA, 17 nt, Human
ugccauggaggcacaca

SEQ ID NO: 2142823 - RNA, 18 nt, Human
ugccauggaggcacacag

SEQ ID NO: 2142824 - RNA, 23 nt, Human
ugccauggaggcacacagcugca

SEQ ID NO: 2142825 - RNA, 17 nt, Human
ugccauggcgugucccu

SEQ ID NO: 2142826 - RNA, 19 nt, Human
ugcccacauguguccaucc

SEQ ID NO: 2142827 - RNA, 23 nt, Human
ugcccacauguguccaucccagc

SEQ ID NO: 2142828 - RNA, 17 nt, Human
ugcccaccaacauccca

SEQ ID NO: 2142829 - RNA, 23 nt, Human
ugcccaccaacaucccauugccc

SEQ ID NO: 2142830 - RNA, 20 nt, Human
ugcccacccguggagauggg

SEQ ID NO: 2142831 - RNA, 20 nt, Human
ugcccagagggcccaggcag

SEQ ID NO: 2142832 - RNA, 21 nt, Human
ugcccagagggcccaggcagg

SEQ ID NO: 2142833 - RNA, 23 nt, Human
ugcccagagggcccaggcaggcc

SEQ ID NO: 2142834 - RNA, 19 nt, Human
ugcccacccguggagaugg

SEQ ID NO: 2142835 - RNA, 12 nt, Human
ugcagcccaugc

SEQ ID NO: 2142836 - RNA, 22 nt, Human
ugcagccagcccagcccagcug

SEQ ID NO: 2142837 - RNA, 13 nt, Human
ugcagcccaugcc

SEQ ID NO: 2142838 - RNA, 14 nt, Human
ugcagccagcccag

SEQ ID NO: 2142839 - RNA, 15 nt, Human
ugcagccagcccagc

SEQ ID NO: 2142840 - RNA, 16 nt, Human
ugcagccagcccagcc

SEQ ID NO: 2142841 - RNA, 17 nt, Human
ugcagccagcccagccc

SEQ ID NO: 2142842 - RNA, 19 nt, Human
ugcagccagcccagcccag

SEQ ID NO: 2142843 - RNA, 21 nt, Human
ugcagccagcccagcccagcu

SEQ ID NO: 2142844 - RNA, 23 nt, Human
ugcagccagcccagcccagcugg

SEQ ID NO: 2142845 - RNA, 12 nt, Human
ugcagccagccc

SEQ ID NO: 2142846 - RNA, 13 nt, Human
ugcagccagccca

SEQ ID NO: 2142847 - RNA, 18 nt, Human
ugcaggaccucaggugag

SEQ ID NO: 2142848 - RNA, 16 nt, Human
ugcaggaauaaggccu

SEQ ID NO: 2142849 - RNA, 17 nt, Human
ugcaggaauaaggccuu

SEQ ID NO: 2142850 - RNA, 15 nt, Human
ugcaggaccucaggu

SEQ ID NO: 2142851 - RNA, 16 nt, Human
ugcaggaccucaggug

SEQ ID NO: 2142852 - RNA, 14 nt, Human
ugcaggaccucagg

SEQ ID NO: 2142853 - RNA, 16 nt, Human
ugcacguacacacaca

SEQ ID NO: 2142854 - RNA, 19 nt, Human
ugcacguacacacacauac

SEQ ID NO: 2142855 - RNA, 22 nt, Human
ugcaccugccagccuggcuucu

SEQ ID NO: 2142856 - RNA, 18 nt, Human
ugcaccugcauccguagu

SEQ ID NO: 2142857 - RNA, 16 nt, Human
ugcacuugcagacucu

SEQ ID NO: 2142858 - RNA, 21 nt, Human
ugcacuugcagacucuacaga

SEQ ID NO: 2142859 - RNA, 14 nt, Human
ugcacuuggccucu

SEQ ID NO: 2142860 - RNA, 15 nt, Human
ugcacuuggccucug

SEQ ID NO: 2142861 - RNA, 17 nt, Human
ugcacuuggccucugga

SEQ ID NO: 2142862 - RNA, 18 nt, Human
ugcagagugcccagaacu

SEQ ID NO: 2142863 - RNA, 14 nt, Human
ugcagcaaccagag

SEQ ID NO: 2142864 - RNA, 16 nt, Human
ugcagcaaccagagca

SEQ ID NO: 2142865 - RNA, 17 nt, Human
ugcagcaaccagagcac

SEQ ID NO: 2142866 - RNA, 18 nt, Human
ugcagcaaccagagcacu

SEQ ID NO: 2142867 - RNA, 19 nt, Human
ugcagcaaccagagcacug

SEQ ID NO: 2142868 - RNA, 20 nt, Human
ugcagcaaccagagcacugu

SEQ ID NO: 2142869 - RNA, 22 nt, Human
ugcagcaaccagagcacuguau

SEQ ID NO: 2142870 - RNA, 13 nt, Human
ugcagagucagca

SEQ ID NO: 2142871 - RNA, 14 nt, Human
ugcagagucagcag

SEQ ID NO: 2142872 - RNA, 15 nt, Human
ugcagagucagcaga

SEQ ID NO: 2142873 - RNA, 17 nt, Human
ugcagagucagcagaac

SEQ ID NO: 2142874 - RNA, 14 nt, Human
ugcagagugcccag

SEQ ID NO: 2142875 - RNA, 15 nt, Human
ugcagagugcccaga

SEQ ID NO: 2142876 - RNA, 19 nt, Human
ugaaggccuuauucuacau

SEQ ID NO: 2142877 - RNA, 21 nt, Human
ugcacacuugugugugggcug

SEQ ID NO: 2142878 - RNA, 23 nt, Human
ugcacacuugugugugggcugug

SEQ ID NO: 2142879 - RNA, 19 nt, Human
ugcacagacgucccuccac

SEQ ID NO: 2142880 - RNA, 19 nt, Human
ugcacagauggauuugccu

SEQ ID NO: 2142881 - RNA, 23 nt, Human
ugcacagauggauuugccugugc

SEQ ID NO: 2142882 - RNA, 14 nt, Human
ugcaccucccccca

SEQ ID NO: 2142883 - RNA, 15 nt, Human
ugcaccuccccccac

SEQ ID NO: 2142884 - RNA, 16 nt, Human
ugcaccuccccccacu

SEQ ID NO: 2142885 - RNA, 17 nt, Human
ugcaccuccccccacug

SEQ ID NO: 2142886 - RNA, 18 nt, Human
ugcaccuccccccacugc

SEQ ID NO: 2142887 - RNA, 19 nt, Human
ugcaccuccccccacugca

SEQ ID NO: 2142888 - RNA, 20 nt, Human
ugcaccuccccccacugcag

SEQ ID NO: 2142889 - RNA, 11 nt, Human
ugcaccugcau

SEQ ID NO: 2142890 - RNA, 15 nt, Human
ugcaccugccagccu

SEQ ID NO: 2142891 - RNA, 16 nt, Human
ugcaccugccagccug

SEQ ID NO: 2142892 - RNA, 17 nt, Human
ugcaccugccagccugg

SEQ ID NO: 2142893 - RNA, 18 nt, Human
ugcaccugccagccuggc

SEQ ID NO: 2142894 - RNA, 19 nt, Human
ugcaccugccagccuggcu

SEQ ID NO: 2142895 - RNA, 20 nt, Human
ugcaccugccagccuggcuu

SEQ ID NO: 2142896 - RNA, 12 nt, Human
ugcacaucccug

SEQ ID NO: 2142897 - RNA, 15 nt, Human
ugcacauacuugaga

SEQ ID NO: 2142898 - RNA, 20 nt, Human
ugcacagugcaucucagccc

SEQ ID NO: 2142899 - RNA, 19 nt, Human
ugcacagugcaucucagcc

SEQ ID NO: 2142900 - RNA, 18 nt, Human
ugcacagugcaucucagc

SEQ ID NO: 2142901 - RNA, 19 nt, Human
ugcacagcuguaguacccc

SEQ ID NO: 2142902 - RNA, 20 nt, Human
uuaauagcgucauaacuaga

SEQ ID NO: 2142903 - RNA, 15 nt, Human
uuaaggcaacugaac

SEQ ID NO: 2142904 - RNA, 20 nt, Human
uuaaggcaacugaacaaaaa

SEQ ID NO: 2142905 - RNA, 22 nt, Human
uuaaggcaacugaacaaaaaaa

SEQ ID NO: 2142906 - RNA, 23 nt, Human
uuaaggcugaggaaaggccagcu

SEQ ID NO: 2142907 - RNA, 19 nt, Human
uuaaggagauguaagagcu

SEQ ID NO: 2142908 - RNA, 20 nt, Human
uuaaggauugugauauuuuu

SEQ ID NO: 2142909 - RNA, 13 nt, Human
uuaaggaagaaaa

SEQ ID NO: 2142910 - RNA, 17 nt, Human
uuaaggaagaaaaauca

SEQ ID NO: 2142911 - RNA, 18 nt, Human
uuaaggaagaaaaaucag

SEQ ID NO: 2142912 - RNA, 21 nt, Human
uuaaggaagacaaugugaaaa

SEQ ID NO: 2142913 - RNA, 14 nt, Human
uuaacauucuguaa

SEQ ID NO: 2142914 - RNA, 14 nt, Human
uuaacauugaccaa

SEQ ID NO: 2142915 - RNA, 19 nt, Human
uuaacauugaccaagaacu

SEQ ID NO: 2142916 - RNA, 20 nt, Human
uuaacauugaccaagaacug

SEQ ID NO: 2142917 - RNA, 21 nt, Human
uuaacauugaccaagaacugc

SEQ ID NO: 2142918 - RNA, 12 nt, Human
uuaagcuuauuu

SEQ ID NO: 2142919 - RNA, 13 nt, Human
uuaaugcuaaggg

SEQ ID NO: 2142920 - RNA, 21 nt, Human
uuaaugcuaagggcaggccca

SEQ ID NO: 2142921 - RNA, 13 nt, Human
uuaauauguauuu

SEQ ID NO: 2142922 - RNA, 17 nt, Human
uuaauauguauuuuaug

SEQ ID NO: 2142923 - RNA, 19 nt, Human
uuaauauguauuuuaugua

SEQ ID NO: 2142924 - RNA, 22 nt, Human
uuaauauguauuuuauguaugu

SEQ ID NO: 2142925 - RNA, 23 nt, Human
uuaauauguauuuuauguauguu

SEQ ID NO: 2142926 - RNA, 23 nt, Human
uuaauauguuaaccucaguguca

SEQ ID NO: 2142927 - RNA, 16 nt, Human
uuaauauggggaugca

SEQ ID NO: 2142928 - RNA, 22 nt, Human
uuaauauggggaugcagcauua

SEQ ID NO: 2142929 - RNA, 18 nt, Human
uuaaggcccaacauuaaa

SEQ ID NO: 2142930 - RNA, 18 nt, Human
uuaaugucacaggcaggu

SEQ ID NO: 2142931 - RNA, 17 nt, Human
uuaaugucacaggcagg

SEQ ID NO: 2142932 - RNA, 20 nt, Human
uuacaauaggugcuuauucu

SEQ ID NO: 2142933 - RNA, 18 nt, Human
uuacagauaggccuucuu

SEQ ID NO: 2142934 - RNA, 22 nt, Human
uuacaugguuaagguaaaguaa

SEQ ID NO: 2142935 - RNA, 12 nt, Human
uuacauguuuuc

SEQ ID NO: 2142936 - RNA, 18 nt, Human
uuacauguuuucuuugcu

SEQ ID NO: 2142937 - RNA, 22 nt, Human
uuacauguuuucuuugcuuuaa

SEQ ID NO: 2142938 - RNA, 12 nt, Human
uuacaaucaaag

SEQ ID NO: 2142939 - RNA, 23 nt, Human
uuacaauaaaaucuugaaaaugc

SEQ ID NO: 2142940 - RNA, 13 nt, Human
uuaauuauuguuu

SEQ ID NO: 2142941 - RNA, 13 nt, Human
uuaauucauguuu

SEQ ID NO: 2142942 - RNA, 21 nt, Human
uuacaauaaaacuuugcugcc

SEQ ID NO: 2142943 - RNA, 20 nt, Human
uuacagagaggagaaacaca

SEQ ID NO: 2142944 - RNA, 22 nt, Human
uuacagagaggagaaacacauc

SEQ ID NO: 2142945 - RNA, 14 nt, Human
uuacagagaggaga

SEQ ID NO: 2142946 - RNA, 17 nt, Human
uuacagagaggagaaac

SEQ ID NO: 2142947 - RNA, 18 nt, Human
uuacagagaggagaaaca

SEQ ID NO: 2142948 - RNA, 20 nt, Human
uuacgguuuuccagguuuaa

SEQ ID NO: 2142949 - RNA, 14 nt, Human
uuacggcuccucuc

SEQ ID NO: 2142950 - RNA, 20 nt, Human
uuacguaguguagauuuguu

SEQ ID NO: 2142951 - RNA, 21 nt, Human
uuacguaguguagauuuguuu

SEQ ID NO: 2142952 - RNA, 20 nt, Human
uuacgcacacguacuuaaau

SEQ ID NO: 2142953 - RNA, 13 nt, Human
uuaccacugaaga

SEQ ID NO: 2142954 - RNA, 21 nt, Human
uuaccacugaagauagaagaa

SEQ ID NO: 2142955 - RNA, 22 nt, Human
uuaccacugaagauagaagaaa

SEQ ID NO: 2142956 - RNA, 21 nt, Human
uuaccagacgguucaccagcc

SEQ ID NO: 2142957 - RNA, 22 nt, Human
uuaccagacgguucaccagccu

SEQ ID NO: 2142958 - RNA, 17 nt, Human
uguuuuuuccugagcuu

SEQ ID NO: 2142959 - RNA, 14 nt, Human
uguuuuuuaucuuu

SEQ ID NO: 2142960 - RNA, 23 nt, Human
uguuuuuuaucuuuucuacagca

SEQ ID NO: 2142961 - RNA, 14 nt, Human
uguuuuuugaaaac

SEQ ID NO: 2142962 - RNA, 16 nt, Human
uguuuuuugaaaacau

SEQ ID NO: 2142963 - RNA, 19 nt, Human
uguuuuuugaaaacauggu

SEQ ID NO: 2142964 - RNA, 12 nt, Human
uuaaaacaaugu

SEQ ID NO: 2142965 - RNA, 11 nt, Human
uuaaaacaaga

SEQ ID NO: 2142966 - RNA, 19 nt, Human
uuaaaacaagaaaguuucc

SEQ ID NO: 2142967 - RNA, 20 nt, Human
uuaaaacaagaaaguuuccc

SEQ ID NO: 2142968 - RNA, 20 nt, Human
uuaaaacaauauuguuucua

SEQ ID NO: 2142969 - RNA, 20 nt, Human
uguuuuuccuuguauuuaaa

SEQ ID NO: 2142970 - RNA, 13 nt, Human
uguuuuuguugug

SEQ ID NO: 2142971 - RNA, 20 nt, Human
uguuuuuuaaacuaggaaaa

SEQ ID NO: 2142972 - RNA, 15 nt, Human
uguuuuuuaaagucu

SEQ ID NO: 2142973 - RNA, 13 nt, Human
uguuuuugucuua

SEQ ID NO: 2142974 - RNA, 14 nt, Human
uguuuugcuaaagg

SEQ ID NO: 2142975 - RNA, 13 nt, Human
uguuuuucacauu

SEQ ID NO: 2142976 - RNA, 20 nt, Human
uguuuuuaugaagaaaaaau

SEQ ID NO: 2142977 - RNA, 17 nt, Human
uguuucucccccugggc

SEQ ID NO: 2142978 - RNA, 23 nt, Human
uguuucucccccugggcucugcc

SEQ ID NO: 2142979 - RNA, 15 nt, Human
uguuucucccccugg

SEQ ID NO: 2142980 - RNA, 16 nt, Human
uguuucucccccuggg

SEQ ID NO: 2142981 - RNA, 24 nt, Human
uguuucuauucucuccucagacug

SEQ ID NO: 2142982 - RNA, 16 nt, Human
uguuucuaguugagga

SEQ ID NO: 2142983 - RNA, 22 nt, Human
uguuucuaguugaggaguuucc

SEQ ID NO: 2142984 - RNA, 23 nt, Human
uguuucuaguugaggaguuuccu

SEQ ID NO: 2142985 - RNA, 17 nt, Human
uguuuguugucagcuga

SEQ ID NO: 2142986 - RNA, 16 nt, Human
uguuuguugucagcug

SEQ ID NO: 2142987 - RNA, 13 nt, Human
uguuucucugcug

SEQ ID NO: 2142988 - RNA, 14 nt, Human
uguuucucugcugu

SEQ ID NO: 2142989 - RNA, 15 nt, Human
uguuucucugcuguu

SEQ ID NO: 2142990 - RNA, 12 nt, Human
uguuuguuuugu

SEQ ID NO: 2142991 - RNA, 22 nt, Human
uguuuguuucucccccugggcu

SEQ ID NO: 2142992 - RNA, 13 nt, Human
uuaaauauagaau

SEQ ID NO: 2142993 - RNA, 23 nt, Human
uuaaaugggcuacuuuguccuuu

SEQ ID NO: 2142994 - RNA, 21 nt, Human
uuaaauggguagagaaacacu

SEQ ID NO: 2142995 - RNA, 16 nt, Human
uuaaauguaaauaauc

SEQ ID NO: 2142996 - RNA, 18 nt, Human
uuaaauguaaagacaaaa

SEQ ID NO: 2142997 - RNA, 13 nt, Human
uuaacauauaaua

SEQ ID NO: 2142998 - RNA, 18 nt, Human
uuaacauauaauauaugu

SEQ ID NO: 2142999 - RNA, 16 nt, Human
uuaacauggaacucua

SEQ ID NO: 2143000 - RNA, 15 nt, Human
uuaacauucauagag

SEQ ID NO: 2143001 - RNA, 18 nt, Human
uuaaauaguaaaaauaaa

SEQ ID NO: 2143002 - RNA, 15 nt, Human
uuaaauauaauaugc

SEQ ID NO: 2143003 - RNA, 16 nt, Human
uuaaauauauguaugu

SEQ ID NO: 2143004 - RNA, 17 nt, Human
uuaaauauauguaugua

SEQ ID NO: 2143005 - RNA, 18 nt, Human
uuaaauauauguauguaa

SEQ ID NO: 2143006 - RNA, 19 nt, Human
uuaaauauauguauguaaa

SEQ ID NO: 2143007 - RNA, 20 nt, Human
uuaaauauauguauguaaaa

SEQ ID NO: 2143008 - RNA, 22 nt, Human
uuaaauauauguauguaaaaau

SEQ ID NO: 2143009 - RNA, 13 nt, Human
uuaaauauauuuu

SEQ ID NO: 2143010 - RNA, 22 nt, Human
uuaaauauauuuucaaaguaca

SEQ ID NO: 2143011 - RNA, 23 nt, Human
uuaaauauauuuucaaaguacau

SEQ ID NO: 2143012 - RNA, 12 nt, Human
uuaaauaucaau

SEQ ID NO: 2143013 - RNA, 14 nt, Human
uuaaagcaaaggag

SEQ ID NO: 2143014 - RNA, 19 nt, Human
uuaaagcuaaaguaucugu

SEQ ID NO: 2143015 - RNA, 14 nt, Human
uuaaagcugccugu

SEQ ID NO: 2143016 - RNA, 15 nt, Human
uuaaagcugccugua

SEQ ID NO: 2143017 - RNA, 17 nt, Human
uuaaagcugccuguagu

SEQ ID NO: 2143018 - RNA, 18 nt, Human
uuaaagcugccuguaguu

SEQ ID NO: 2143019 - RNA, 14 nt, Human
uuaaaagacacugu

SEQ ID NO: 2143020 - RNA, 14 nt, Human
uguuggccaggcug

SEQ ID NO: 2143021 - RNA, 16 nt, Human
uguuuaaaaaaguuua

SEQ ID NO: 2143022 - RNA, 17 nt, Human
uguuuaaaaaaguuuaa

SEQ ID NO: 2143023 - RNA, 18 nt, Human
uguuuaaaaaaguuuaaa

SEQ ID NO: 2143024 - RNA, 19 nt, Human
uguuuaaaaaaguuuaaaa

SEQ ID NO: 2143025 - RNA, 21 nt, Human
uguuuaaaaaaguuuaaaaug

SEQ ID NO: 2143026 - RNA, 22 nt, Human
uguuuaaaaaaguuuaaaaugu

SEQ ID NO: 2143027 - RNA, 13 nt, Human
uguuguuuguaaa

SEQ ID NO: 2143028 - RNA, 14 nt, Human
uguuguuuguaaau

SEQ ID NO: 2143029 - RNA, 15 nt, Human
uguuguuuguaaaua

SEQ ID NO: 2143030 - RNA, 21 nt, Human
uguuguuuguaaauaagagau

SEQ ID NO: 2143031 - RNA, 17 nt, Human
uguuguuugaaaauauu

SEQ ID NO: 2143032 - RNA, 12 nt, Human
uguuguuuguuu

SEQ ID NO: 2143033 - RNA, 15 nt, Human
uguuuacaagaaaaa

SEQ ID NO: 2143034 - RNA, 14 nt, Human
uguuuacacuguca

SEQ ID NO: 2143035 - RNA, 15 nt, Human
uguuuacacugucaa

SEQ ID NO: 2143036 - RNA, 16 nt, Human
uguuuacacugucaaa

SEQ ID NO: 2143037 - RNA, 20 nt, Human
uguuggauuuuugucuugug

SEQ ID NO: 2143038 - RNA, 11 nt, Human
uguuggccagg

SEQ ID NO: 2143039 - RNA, 17 nt, Human
uguuggauuuuugucuu

SEQ ID NO: 2143040 - RNA, 19 nt, Human
uguuggauaaaucaguggu

SEQ ID NO: 2143041 - RNA, 20 nt, Human
uguuggauaaaucagugguu

SEQ ID NO: 2143042 - RNA, 14 nt, Human
uguugcuuggacua

SEQ ID NO: 2143043 - RNA, 21 nt, Human
uguuggaaaagaauacagaaa

SEQ ID NO: 2143044 - RNA, 13 nt, Human
uguuggaaaagaa

SEQ ID NO: 2143045 - RNA, 19 nt, Human
uguugagguggucugaaug

SEQ ID NO: 2143046 - RNA, 13 nt, Human
uguugagcuguuu

SEQ ID NO: 2143047 - RNA, 23 nt, Human
uguugagguggucugaauguucu

SEQ ID NO: 2143048 - RNA, 20 nt, Human
uguugagguggucugaaugu

SEQ ID NO: 2143049 - RNA, 21 nt, Human
uguugagguggucugaauguu

SEQ ID NO: 2143050 - RNA, 19 nt, Human
uguugauaaauuccacugg

SEQ ID NO: 2143051 - RNA, 22 nt, Human
uguugauaaauuccacuggacu

SEQ ID NO: 2143052 - RNA, 17 nt, Human
uguugagccaggccugg

SEQ ID NO: 2143053 - RNA, 15 nt, Human
uguucugacccugcu

SEQ ID NO: 2143054 - RNA, 13 nt, Human
uguucugacauua

SEQ ID NO: 2143055 - RNA, 15 nt, Human
uguucugacauuaac

SEQ ID NO: 2143056 - RNA, 16 nt, Human
uguucugacauuaaca

SEQ ID NO: 2143057 - RNA, 17 nt, Human
uguucugacauuaacag

SEQ ID NO: 2143058 - RNA, 18 nt, Human
uguucugacccugcuuca

SEQ ID NO: 2143059 - RNA, 19 nt, Human
uguucugacauuaacaguu

SEQ ID NO: 2143060 - RNA, 20 nt, Human
uguucugacauuaacaguuu

SEQ ID NO: 2143061 - RNA, 22 nt, Human
uguucugacauuaacaguuuuc

SEQ ID NO: 2143062 - RNA, 14 nt, Human
uguucugauuagaa

SEQ ID NO: 2143063 - RNA, 16 nt, Human
uguucugauuagaaau

SEQ ID NO: 2143064 - RNA, 19 nt, Human
uguucugauuagaaaugac

SEQ ID NO: 2143065 - RNA, 22 nt, Human
uguucugauuagaaaugaccaa

SEQ ID NO: 2143066 - RNA, 20 nt, Human
uguugaaaagccauguuuaa

SEQ ID NO: 2143067 - RNA, 22 nt, Human
uguugaaaagccauguuuaaga

SEQ ID NO: 2143068 - RNA, 23 nt, Human
uguugaaaagccauguuuaagau

SEQ ID NO: 2143069 - RNA, 11 nt, Human
uguugaaagau

SEQ ID NO: 2143070 - RNA, 18 nt, Human
uguucucugaggacacua

SEQ ID NO: 2143071 - RNA, 16 nt, Human
uguucucugaggacac

SEQ ID NO: 2143072 - RNA, 13 nt, Human
uguucucugagga

SEQ ID NO: 2143073 - RNA, 22 nt, Human
uguucuccuagacugacccuga

SEQ ID NO: 2143074 - RNA, 22 nt, Human
uguucaguaacagggccuugcu

SEQ ID NO: 2143075 - RNA, 14 nt, Human
uguucagucuuuca

SEQ ID NO: 2143076 - RNA, 22 nt, Human
uguucauuaaagcaugaauggu

SEQ ID NO: 2143077 - RNA, 12 nt, Human
uguucauuguaa

SEQ ID NO: 2143078 - RNA, 22 nt, Human
uguucauuguaauguuacugau

SEQ ID NO: 2143079 - RNA, 23 nt, Human
uguucauuguaauguuacugauc

SEQ ID NO: 2143080 - RNA, 13 nt, Human
uguucauuguaau

SEQ ID NO: 2143081 - RNA, 14 nt, Human
uguucauuguaaug

SEQ ID NO: 2143082 - RNA, 16 nt, Human
uguucauuguaauguu

SEQ ID NO: 2143083 - RNA, 18 nt, Human
uguucauuguaauguuac

SEQ ID NO: 2143084 - RNA, 19 nt, Human
uguucauuguaauguuacu

SEQ ID NO: 2143085 - RNA, 20 nt, Human
uguucauuguaauguuacug

SEQ ID NO: 2143086 - RNA, 21 nt, Human
uguucauuguaauguuacuga

SEQ ID NO: 2143087 - RNA, 13 nt, Human
uguuacauagugu

SEQ ID NO: 2143088 - RNA, 14 nt, Human
uguuacauagugua

SEQ ID NO: 2143089 - RNA, 15 nt, Human
uguuacauaguguag

SEQ ID NO: 2143090 - RNA, 15 nt, Human
uguuacugucuucag

SEQ ID NO: 2143091 - RNA, 16 nt, Human
uguuacugucuucagu

SEQ ID NO: 2143092 - RNA, 18 nt, Human
uguguuugguucuggggc

SEQ ID NO: 2143093 - RNA, 17 nt, Human
uguguuuucauaauaaa

SEQ ID NO: 2143094 - RNA, 11 nt, Human
uguguuugugu

SEQ ID NO: 2143095 - RNA, 13 nt, Human
uguguuuguguga

SEQ ID NO: 2143096 - RNA, 13 nt, Human
uguuagaacacua

SEQ ID NO: 2143097 - RNA, 14 nt, Human
uguuagaacacuau

SEQ ID NO: 2143098 - RNA, 15 nt, Human
uguuagaacacuauu

SEQ ID NO: 2143099 - RNA, 17 nt, Human
uguuagaacacuauuuu

SEQ ID NO: 2143100 - RNA, 18 nt, Human
uguuagaacacuauuuuc

SEQ ID NO: 2143101 - RNA, 19 nt, Human
uguuagaacacuauuuuca

SEQ ID NO: 2143102 - RNA, 20 nt, Human
uguuagaacacuauuuucag

SEQ ID NO: 2143103 - RNA, 21 nt, Human
uguuagaacacuauuuucaga

SEQ ID NO: 2143104 - RNA, 22 nt, Human
uguuagaacacuauuuucagaa

SEQ ID NO: 2143105 - RNA, 23 nt, Human
uguuagaacacuauuuucagaau

SEQ ID NO: 2143106 - RNA, 18 nt, Human
uguuagaguccaacgugg

SEQ ID NO: 2143107 - RNA, 23 nt, Human
uguuagaguccaacguggggcag

SEQ ID NO: 2143108 - RNA, 14 nt, Human
uguucagcuccagc

SEQ ID NO: 2143109 - RNA, 16 nt, Human
uguucaauguuuaaug

SEQ ID NO: 2143110 - RNA, 23 nt, Human
uguucaagaccagccugaccaac

SEQ ID NO: 2143111 - RNA, 18 nt, Human
uguucagcuccagcucac

SEQ ID NO: 2143112 - RNA, 11 nt, Human
uguucagcugg

SEQ ID NO: 2143113 - RNA, 16 nt, Human
uguucagcuccagcuc

SEQ ID NO: 2143114 - RNA, 15 nt, Human
uguucagcuccagcu

SEQ ID NO: 2143115 - RNA, 23 nt, Human
uguguagacgaagggggcaucug

SEQ ID NO: 2143116 - RNA, 19 nt, Human
uguguauuuccagugcaau

SEQ ID NO: 2143117 - RNA, 15 nt, Human
ugugucaagcugcuu

SEQ ID NO: 2143118 - RNA, 12 nt, Human
uguguauuguuc

SEQ ID NO: 2143119 - RNA, 13 nt, Human
uguguauuguucc

SEQ ID NO: 2143120 - RNA, 14 nt, Human
uguguauuguuccc

SEQ ID NO: 2143121 - RNA, 15 nt, Human
uguguauuguuccca

SEQ ID NO: 2143122 - RNA, 17 nt, Human
uguguauuuaauuguaa

SEQ ID NO: 2143123 - RNA, 18 nt, Human
uguguauuuaauuguaaa

SEQ ID NO: 2143124 - RNA, 19 nt, Human
uguguauuuaauuguaaac

SEQ ID NO: 2143125 - RNA, 20 nt, Human
uguguauuuaauuguaaacu

SEQ ID NO: 2143126 - RNA, 21 nt, Human
uguguauuuaauuguaaacug

SEQ ID NO: 2143127 - RNA, 22 nt, Human
uguguauuuaauuguaaacugu

SEQ ID NO: 2143128 - RNA, 23 nt, Human
uguguauuuaauuguaaacugua

SEQ ID NO: 2143129 - RNA, 17 nt, Human
ugugugagcaagcauuu

SEQ ID NO: 2143130 - RNA, 17 nt, Human
ugugugaggagcugcug

SEQ ID NO: 2143131 - RNA, 12 nt, Human
uguguuguuuga

SEQ ID NO: 2143132 - RNA, 14 nt, Human
uguguuguuugaaa

SEQ ID NO: 2143133 - RNA, 19 nt, Human
ugugugcguccugucggag

SEQ ID NO: 2143134 - RNA, 20 nt, Human
ugugugcaugugugugcuca

SEQ ID NO: 2143135 - RNA, 19 nt, Human
ugugugcagacucaauaaa

SEQ ID NO: 2143136 - RNA, 21 nt, Human
ugugugcagucucucuuaccc

SEQ ID NO: 2143137 - RNA, 20 nt, Human
ugugugaggagcugcuggcu

SEQ ID NO: 2143138 - RNA, 19 nt, Human
uguguguauguuugcacac

SEQ ID NO: 2143139 - RNA, 18 nt, Human
ugugugcgagugugugca

SEQ ID NO: 2143140 - RNA, 22 nt, Human
ugugugguuuaguguaaaaaug

SEQ ID NO: 2143141 - RNA, 23 nt, Human
ugugugguuuaguguaaaaauga

SEQ ID NO: 2143142 - RNA, 13 nt, Human
uguguguaugcua

SEQ ID NO: 2143143 - RNA, 15 nt, Human
uguauuuaaaugaaa

SEQ ID NO: 2143144 - RNA, 17 nt, Human
uguauugcgucuuagca

SEQ ID NO: 2143145 - RNA, 19 nt, Human
uguauugcauauauacaua

SEQ ID NO: 2143146 - RNA, 16 nt, Human
uguauuuaugugugag

SEQ ID NO: 2143147 - RNA, 13 nt, Human
uguauuuaauugu

SEQ ID NO: 2143148 - RNA, 17 nt, Human
uguauuuaauuguaaac

SEQ ID NO: 2143149 - RNA, 18 nt, Human
uguauuuaauuguaaacu

SEQ ID NO: 2143150 - RNA, 19 nt, Human
uguauuuaauuguaaacug

SEQ ID NO: 2143151 - RNA, 22 nt, Human
uguauuuaauuguaaacuguac

SEQ ID NO: 2143152 - RNA, 23 nt, Human
uguauuuaauuguaaacuguacu

SEQ ID NO: 2143153 - RNA, 15 nt, Human
uguaucggagacagu

SEQ ID NO: 2143154 - RNA, 17 nt, Human
uguaucggagacaguga

SEQ ID NO: 2143155 - RNA, 15 nt, Human
uguaucggaugcuuu

SEQ ID NO: 2143156 - RNA, 18 nt, Human
uguaucggagacagugau

SEQ ID NO: 2143157 - RNA, 21 nt, Human
uguauccuuccaauuuggaau

SEQ ID NO: 2143158 - RNA, 17 nt, Human
uguaucuagugcagcug

SEQ ID NO: 2143159 - RNA, 19 nt, Human
uguaucuagugcagcugau

SEQ ID NO: 2143160 - RNA, 21 nt, Human
uguaucuagugcagcugauuu

SEQ ID NO: 2143161 - RNA, 22 nt, Human
uguauugaacuuggaaagaaau

SEQ ID NO: 2143162 - RNA, 14 nt, Human
uguaugcacuuugu

SEQ ID NO: 2143163 - RNA, 18 nt, Human
uguaugcacgugugcaca

SEQ ID NO: 2143164 - RNA, 23 nt, Human
uguauaccccgugaagcauccag

SEQ ID NO: 2143165 - RNA, 13 nt, Human
uguauaccuguaa

SEQ ID NO: 2143166 - RNA, 15 nt, Human
uguauaccuguaacu

SEQ ID NO: 2143167 - RNA, 23 nt, Human
uguaucccaugagccucagcauc

SEQ ID NO: 2143168 - RNA, 19 nt, Human
uguaucccaugagccucag

SEQ ID NO: 2143169 - RNA, 15 nt, Human
uguauaauauuuuua

SEQ ID NO: 2143170 - RNA, 19 nt, Human
uguauaaguccuugcaaga

SEQ ID NO: 2143171 - RNA, 16 nt, Human
uguauaaguccuugca

SEQ ID NO: 2143172 - RNA, 16 nt, Human
uguauaaguugaggca

SEQ ID NO: 2143173 - RNA, 19 nt, Human
uguauaaguugaggcauuu

SEQ ID NO: 2143174 - RNA, 22 nt, Human
uguagcaaaauucuuaaguaug

SEQ ID NO: 2143175 - RNA, 20 nt, Human
uguagcaaaacgcauggagu

SEQ ID NO: 2143176 - RNA, 17 nt, Human
uguagcaaucagauuuu

SEQ ID NO: 2143177 - RNA, 13 nt, Human
ugucagucugcuu

SEQ ID NO: 2143178 - RNA, 14 nt, Human
ugucagugcagccc

SEQ ID NO: 2143179 - RNA, 16 nt, Human
ugucagugcagcccgu

SEQ ID NO: 2143180 - RNA, 23 nt, Human
ugucauaccaggccgccccagcc

SEQ ID NO: 2143181 - RNA, 16 nt, Human
ugucauaagaaugaau

SEQ ID NO: 2143182 - RNA, 17 nt, Human
ugucauaagaaugaaua

SEQ ID NO: 2143183 - RNA, 17 nt, Human
uguauuuaugugugagg

SEQ ID NO: 2143184 - RNA, 14 nt, Human
ugucauaagaauga

SEQ ID NO: 2143185 - RNA, 15 nt, Human
ugucauaagaaugaa

SEQ ID NO: 2143186 - RNA, 18 nt, Human
uguauuuguuaaugguuu

SEQ ID NO: 2143187 - RNA, 20 nt, Human
uguauuuguuaaugguuuga

SEQ ID NO: 2143188 - RNA, 17 nt, Human
ugucacugacacacacg

SEQ ID NO: 2143189 - RNA, 15 nt, Human
ugucacuaaagcagg

SEQ ID NO: 2143190 - RNA, 16 nt, Human
ugucacuacucacagu

SEQ ID NO: 2143191 - RNA, 14 nt, Human
ugucacuaaagcag

SEQ ID NO: 2143192 - RNA, 22 nt, Human
ugucacuacucacagucucuuu

SEQ ID NO: 2143193 - RNA, 23 nt, Human
ugucccaaaaagaaaggagggga

SEQ ID NO: 2143194 - RNA, 12 nt, Human
uguccauuuaua

SEQ ID NO: 2143195 - RNA, 17 nt, Human
ugucccacucaagccaa

SEQ ID NO: 2143196 - RNA, 20 nt, Human
ugucccacucaagccaagca

SEQ ID NO: 2143197 - RNA, 12 nt, Human
uguccaugugug

SEQ ID NO: 2143198 - RNA, 13 nt, Human
uguccaugugugu

SEQ ID NO: 2143199 - RNA, 15 nt, Human
uguccaugugugugc

SEQ ID NO: 2143200 - RNA, 16 nt, Human
uguccaugugugugca

SEQ ID NO: 2143201 - RNA, 19 nt, Human
ugucauuaccagacgguuc

SEQ ID NO: 2143202 - RNA, 13 nt, Human
ugucauugcuuua

SEQ ID NO: 2143203 - RNA, 14 nt, Human
ugucauugcuuuac

SEQ ID NO: 2143204 - RNA, 19 nt, Human
ugucauuaaaauaaauaaa

SEQ ID NO: 2143205 - RNA, 15 nt, Human
ugucauuaaacauga

SEQ ID NO: 2143206 - RNA, 20 nt, Human
ugucauauauggggggccaa

SEQ ID NO: 2143207 - RNA, 22 nt, Human
ugucauauauggggggccaaca

SEQ ID NO: 2143208 - RNA, 17 nt, Human
uguacagucuuguauua

SEQ ID NO: 2143209 - RNA, 14 nt, Human
uguacagucuugua

SEQ ID NO: 2143210 - RNA, 15 nt, Human
uguacagucuuguau

SEQ ID NO: 2143211 - RNA, 12 nt, Human
uguacagucuug

SEQ ID NO: 2143212 - RNA, 18 nt, Human
uguacaguauguucaaag

SEQ ID NO: 2143213 - RNA, 20 nt, Human
uguaaugguaucuuaaagug

SEQ ID NO: 2143214 - RNA, 13 nt, Human
uguaaugucacca

SEQ ID NO: 2143215 - RNA, 16 nt, Human
uguaaugucaccaccu

SEQ ID NO: 2143216 - RNA, 19 nt, Human
uguaaugucaccaccuucc

SEQ ID NO: 2143217 - RNA, 20 nt, Human
uguaaugucaccaccuuccc

SEQ ID NO: 2143218 - RNA, 14 nt, Human
uguaccucuuuuag

SEQ ID NO: 2143219 - RNA, 21 nt, Human
uguaccucuuuuagucauuuu

SEQ ID NO: 2143220 - RNA, 21 nt, Human
uguacccaguauucuagguag

SEQ ID NO: 2143221 - RNA, 12 nt, Human
uguacucuggcc

SEQ ID NO: 2143222 - RNA, 13 nt, Human
uguacucuggccu

SEQ ID NO: 2143223 - RNA, 14 nt, Human
uguacucuggccuc

SEQ ID NO: 2143224 - RNA, 15 nt, Human
uguacucuggccucu

SEQ ID NO: 2143225 - RNA, 16 nt, Human
uguacgucugacaggc

SEQ ID NO: 2143226 - RNA, 17 nt, Human
uguacgucugacaggca

SEQ ID NO: 2143227 - RNA, 14 nt, Human
uguacguggagagg

SEQ ID NO: 2143228 - RNA, 12 nt, Human
uguacguggaga

SEQ ID NO: 2143229 - RNA, 15 nt, Human
uguacguggagaggg

SEQ ID NO: 2143230 - RNA, 17 nt, Human
uguacguuuaaagugua

SEQ ID NO: 2143231 - RNA, 13 nt, Human
uguacuccuccca

SEQ ID NO: 2143232 - RNA, 12 nt, Human
uguacuccuccc

SEQ ID NO: 2143233 - RNA, 18 nt, Human
uguacucaggaggcugag

SEQ ID NO: 2143234 - RNA, 15 nt, Human
uguacuagucugugu

SEQ ID NO: 2143235 - RNA, 19 nt, Human
uguacuagucuguguggga

SEQ ID NO: 2143236 - RNA, 12 nt, Human
uguacuacaauu

SEQ ID NO: 2143237 - RNA, 21 nt, Human
uguacuaauuaacauauaaua

SEQ ID NO: 2143238 - RNA, 17 nt, Human
ugguaggacuguagaaa

SEQ ID NO: 2143239 - RNA, 18 nt, Human
ugguaggacuguagaaaa

SEQ ID NO: 2143240 - RNA, 19 nt, Human
ugguagggggaaaaugugu

SEQ ID NO: 2143241 - RNA, 20 nt, Human
ugguaguuaguagcauguug

SEQ ID NO: 2143242 - RNA, 21 nt, Human
ugguagucuaaccaaaugcau

SEQ ID NO: 2143243 - RNA, 22 nt, Human
ugguagucuaaccaaaugcauc

SEQ ID NO: 2143244 - RNA, 17 nt, Human
ugguaguuaguagcaug

SEQ ID NO: 2143245 - RNA, 18 nt, Human
ugguaguuaguagcaugu

SEQ ID NO: 2143246 - RNA, 17 nt, Human
ugguagggacuuaaaaa

SEQ ID NO: 2143247 - RNA, 22 nt, Human
ugguaguacuccugcaaaauuu

SEQ ID NO: 2143248 - RNA, 12 nt, Human
uguaaacagugc

SEQ ID NO: 2143249 - RNA, 14 nt, Human
uguaaacagugccu

SEQ ID NO: 2143250 - RNA, 16 nt, Human
uguaaacagugccugc

SEQ ID NO: 2143251 - RNA, 17 nt, Human
uguaaacagugccugcu

SEQ ID NO: 2143252 - RNA, 19 nt, Human
uguaaacagugccugcuga

SEQ ID NO: 2143253 - RNA, 21 nt, Human
uguaaacaaacuguguaacug

SEQ ID NO: 2143254 - RNA, 20 nt, Human
uguaaaauuuugccuaauac

SEQ ID NO: 2143255 - RNA, 21 nt, Human
uguaaaugaaguaacuugucu

SEQ ID NO: 2143256 - RNA, 22 nt, Human
uguaaaugcugucaacuaugau

SEQ ID NO: 2143257 - RNA, 18 nt, Human
uguaacugcccaaagcag

SEQ ID NO: 2143258 - RNA, 21 nt, Human
uguaacuggcaguuuuccauu

SEQ ID NO: 2143259 - RNA, 11 nt, Human
uguaacugccc

SEQ ID NO: 2143260 - RNA, 13 nt, Human
uguaacugcccaa

SEQ ID NO: 2143261 - RNA, 12 nt, Human
uguaacuccacc

SEQ ID NO: 2143262 - RNA, 13 nt, Human
uguaacuccacca

SEQ ID NO: 2143263 - RNA, 23 nt, Human
uguaacugcauugagaacugcau

SEQ ID NO: 2143264 - RNA, 15 nt, Human
uguaaucccagcacu

SEQ ID NO: 2143265 - RNA, 21 nt, Human
uguaaucauuucuugggcccu

SEQ ID NO: 2143266 - RNA, 16 nt, Human
uguaaucccagcuacu

SEQ ID NO: 2143267 - RNA, 22 nt, Human
uguaaucccagcacuuugggag

SEQ ID NO: 2143268 - RNA, 16 nt, Human
uguaaucccagcacuu

SEQ ID NO: 2143269 - RNA, 18 nt, Human
uguaaauuauuuuaaauu

SEQ ID NO: 2143270 - RNA, 14 nt, Human
uguaacgccugcuu

SEQ ID NO: 2143271 - RNA, 13 nt, Human
uguaaccugagau

SEQ ID NO: 2143272 - RNA, 19 nt, Human
uguaaccugagauggcccu

SEQ ID NO: 2143273 - RNA, 22 nt, Human
uguaaccugagauggcccucug

SEQ ID NO: 2143274 - RNA, 12 nt, Human
uguaaauuauuu

SEQ ID NO: 2143275 - RNA, 20 nt, Human
uguaaauuaccaguaaagug

SEQ ID NO: 2143276 - RNA, 21 nt, Human
uguaaauuaccaguaaagugu

SEQ ID NO: 2143277 - RNA, 10 nt, Human
uguaaauuau

SEQ ID NO: 2143278 - RNA, 18 nt, Human
ugucugccagccagcagc

SEQ ID NO: 2143279 - RNA, 19 nt, Human
ugucugccagccagcagcc

SEQ ID NO: 2143280 - RNA, 19 nt, Human
ugucuggcugaggauuuca

SEQ ID NO: 2143281 - RNA, 21 nt, Human
ugucugcgugguuccuuucuc

SEQ ID NO: 2143282 - RNA, 15 nt, Human
ugucugccagccagc

SEQ ID NO: 2143283 - RNA, 16 nt, Human
ugucugccagccagca

SEQ ID NO: 2143284 - RNA, 17 nt, Human
ugucucaguccaccuga

SEQ ID NO: 2143285 - RNA, 17 nt, Human
ugucucaggucccugca

SEQ ID NO: 2143286 - RNA, 16 nt, Human
ugucucaggucccugc

SEQ ID NO: 2143287 - RNA, 21 nt, Human
ugucucaagagggcacuggug

SEQ ID NO: 2143288 - RNA, 20 nt, Human
ugucucaagagggcacuggu

SEQ ID NO: 2143289 - RNA, 23 nt, Human
ugucucaagagggcacugguggc

SEQ ID NO: 2143290 - RNA, 20 nt, Human
ugucccauuucuaaaggccu

SEQ ID NO: 2143291 - RNA, 21 nt, Human
ugucccauuuucagacugcuu

SEQ ID NO: 2143292 - RNA, 19 nt, Human
ugucucaagagggcacugg

SEQ ID NO: 2143293 - RNA, 16 nt, Human
ugucuuuuuucacuac

SEQ ID NO: 2143294 - RNA, 23 nt, Human
ugucuggcugaggauuucaagcc

SEQ ID NO: 2143295 - RNA, 17 nt, Human
ugugacaugcgggcugg

SEQ ID NO: 2143296 - RNA, 18 nt, Human
ugugacauauuaugucuu

SEQ ID NO: 2143297 - RNA, 19 nt, Human
ugugacaauuuuguacaaa

SEQ ID NO: 2143298 - RNA, 19 nt, Human
ugugacaugcgggcugggc

SEQ ID NO: 2143299 - RNA, 21 nt, Human
ugugacaugcgggcugggcag

SEQ ID NO: 2143300 - RNA, 14 nt, Human
ugugaccagcacug

SEQ ID NO: 2143301 - RNA, 17 nt, Human
ugugaccagcacugucu

SEQ ID NO: 2143302 - RNA, 21 nt, Human
ugugacaaggauugcuacugu

SEQ ID NO: 2143303 - RNA, 15 nt, Human
ugugaaucagacccu

SEQ ID NO: 2143304 - RNA, 18 nt, Human
ugugaaucagacccuacc

SEQ ID NO: 2143305 - RNA, 20 nt, Human
ugugaauauggacucaguuu

SEQ ID NO: 2143306 - RNA, 12 nt, Human
ugugaauaaauu

SEQ ID NO: 2143307 - RNA, 14 nt, Human
ugugaaucagaccc

SEQ ID NO: 2143308 - RNA, 22 nt, Human
ugugauacccauagcuuccaug

SEQ ID NO: 2143309 - RNA, 18 nt, Human
ugugauaaggaucagaac

SEQ ID NO: 2143310 - RNA, 17 nt, Human
ugugcaaguaugugagu

SEQ ID NO: 2143311 - RNA, 18 nt, Human
ugugcaaguaugugagug

SEQ ID NO: 2143312 - RNA, 16 nt, Human
ugugcaaguguaugca

SEQ ID NO: 2143313 - RNA, 15 nt, Human
ugugcaagugucugu

SEQ ID NO: 2143314 - RNA, 19 nt, Human
ugugcaagugucugugugc

SEQ ID NO: 2143315 - RNA, 20 nt, Human
ugugcaagugucugugugca

SEQ ID NO: 2143316 - RNA, 12 nt, Human
ugugcaagugug

SEQ ID NO: 2143317 - RNA, 21 nt, Human
ugugcaagugugugcaugugu

SEQ ID NO: 2143318 - RNA, 21 nt, Human
ugugaggugcagagugcccag

SEQ ID NO: 2143319 - RNA, 15 nt, Human
ugugaguaagagcug

SEQ ID NO: 2143320 - RNA, 19 nt, Human
ugugaguaagagcuggugu

SEQ ID NO: 2143321 - RNA, 19 nt, Human
uguggcuugcuagcuaugu

SEQ ID NO: 2143322 - RNA, 17 nt, Human
uguggcuuucagagccu

SEQ ID NO: 2143323 - RNA, 17 nt, Human
uguggcuuucuuucuuu

SEQ ID NO: 2143324 - RNA, 19 nt, Human
uguggcugucagcaggaag

SEQ ID NO: 2143325 - RNA, 21 nt, Human
uguggcugucagcaggaagca

SEQ ID NO: 2143326 - RNA, 21 nt, Human
uguggcugggggcaggagggc

SEQ ID NO: 2143327 - RNA, 15 nt, Human
uguggcugucagcag

SEQ ID NO: 2143328 - RNA, 14 nt, Human
uguggcugcuagca

SEQ ID NO: 2143329 - RNA, 15 nt, Human
uguggcugggggcag

SEQ ID NO: 2143330 - RNA, 18 nt, Human
uguggcugggggcaggag

SEQ ID NO: 2143331 - RNA, 15 nt, Human
ugugggaagaaacaa

SEQ ID NO: 2143332 - RNA, 19 nt, Human
ugugggaagaaacaaaccc

SEQ ID NO: 2143333 - RNA, 15 nt, Human
ugugggaagggagag

SEQ ID NO: 2143334 - RNA, 18 nt, Human
ugugggaaugcggcaaga

SEQ ID NO: 2143335 - RNA, 19 nt, Human
ugugggaaugcggcaagaa

SEQ ID NO: 2143336 - RNA, 14 nt, Human
ugugggcugugagu

SEQ ID NO: 2143337 - RNA, 13 nt, Human
ugugggcugugag

SEQ ID NO: 2143338 - RNA, 17 nt, Human
ugugggacuagccuggc

SEQ ID NO: 2143339 - RNA, 13 nt, Human
ugugggacuguac

SEQ ID NO: 2143340 - RNA, 15 nt, Human
ugugggacuguacac

SEQ ID NO: 2143341 - RNA, 16 nt, Human
ugugggacuguacaca

SEQ ID NO: 2143342 - RNA, 19 nt, Human
ugugggacuguacacacuu

SEQ ID NO: 2143343 - RNA, 20 nt, Human
ugugggacuguacacacuuu

SEQ ID NO: 2143344 - RNA, 13 nt, Human
ugugggcucccuu

SEQ ID NO: 2143345 - RNA, 14 nt, Human
ugugggcucccuuc

SEQ ID NO: 2143346 - RNA, 12 nt, Human
uguggggccuug

SEQ ID NO: 2143347 - RNA, 16 nt, Human
uguggggauuucuccc

SEQ ID NO: 2143348 - RNA, 15 nt, Human
ugugggucaaggaau

SEQ ID NO: 2143349 - RNA, 21 nt, Human
uguggguacagagaggucaag

SEQ ID NO: 2143350 - RNA, 15 nt, Human
uguggguaccuguau

SEQ ID NO: 2143351 - RNA, 15 nt, Human
uguguacguggagag

SEQ ID NO: 2143352 - RNA, 14 nt, Human
uguguacucuggcc

SEQ ID NO: 2143353 - RNA, 15 nt, Human
uguguacucuggccu

SEQ ID NO: 2143354 - RNA, 16 nt, Human
uguguacucuggccuc

SEQ ID NO: 2143355 - RNA, 17 nt, Human
uguguacucuggccucu

SEQ ID NO: 2143356 - RNA, 18 nt, Human
uguguacucuggccucug

SEQ ID NO: 2143357 - RNA, 20 nt, Human
uguguacucuggccucuguc

SEQ ID NO: 2143358 - RNA, 17 nt, Human
uguguacuguaaagaau

SEQ ID NO: 2143359 - RNA, 16 nt, Human
uguguacguggagagg

SEQ ID NO: 2143360 - RNA, 13 nt, Human
uguggacacagcu

SEQ ID NO: 2143361 - RNA, 14 nt, Human
uguggacacagcuc

SEQ ID NO: 2143362 - RNA, 14 nt, Human
uguggaaagccucu

SEQ ID NO: 2143363 - RNA, 15 nt, Human
uguggaaagccucug

SEQ ID NO: 2143364 - RNA, 17 nt, Human
uguggaaagccucugcu

SEQ ID NO: 2143365 - RNA, 19 nt, Human
uguggaaagccucugcugc

SEQ ID NO: 2143366 - RNA, 20 nt, Human
uguggaaagccucugcugcc

SEQ ID NO: 2143367 - RNA, 16 nt, Human
uguggaaagugaauuu

SEQ ID NO: 2143368 - RNA, 19 nt, Human
uguggaaagugaauuugaa

SEQ ID NO: 2143369 - RNA, 22 nt, Human
uguggaaagugaauuugaauga

SEQ ID NO: 2143370 - RNA, 23 nt, Human
uguggaaagugaauuugaaugaa

SEQ ID NO: 2143371 - RNA, 17 nt, Human
uguggaaaaugaaaauu

SEQ ID NO: 2143372 - RNA, 12 nt, Human
uguggaaagccu

SEQ ID NO: 2143373 - RNA, 14 nt, Human
uguggaaaaauauu

SEQ ID NO: 2143374 - RNA, 16 nt, Human
uguggaaaaauauuua

SEQ ID NO: 2143375 - RNA, 14 nt, Human
uguggacugugaug

SEQ ID NO: 2143376 - RNA, 15 nt, Human
uguggacugugaugc

SEQ ID NO: 2143377 - RNA, 16 nt, Human
uguggacacagcucuu

SEQ ID NO: 2143378 - RNA, 15 nt, Human
uguggacacagcucu

SEQ ID NO: 2143379 - RNA, 21 nt, Human
uguggcuccuggggguucuuu

SEQ ID NO: 2143380 - RNA, 23 nt, Human
uguggcuccccucuauuuagcau

SEQ ID NO: 2143381 - RNA, 15 nt, Human
uguggcuccccucua

SEQ ID NO: 2143382 - RNA, 23 nt, Human
uguggagaaacuguagucucagg

SEQ ID NO: 2143383 - RNA, 12 nt, Human
uguggagaagcg

SEQ ID NO: 2143384 - RNA, 21 nt, Human
uguggagaagcggcuggcagc

SEQ ID NO: 2143385 - RNA, 14 nt, Human
ugugccucugccug

SEQ ID NO: 2143386 - RNA, 14 nt, Human
ugugcaugugugug

SEQ ID NO: 2143387 - RNA, 13 nt, Human
ugugccucuggga

SEQ ID NO: 2143388 - RNA, 15 nt, Human
ugugccucugggacu

SEQ ID NO: 2143389 - RNA, 16 nt, Human
ugugccucugggacug

SEQ ID NO: 2143390 - RNA, 19 nt, Human
ugugcauagagccacguau

SEQ ID NO: 2143391 - RNA, 19 nt, Human
ugugcaugggugaagggag

SEQ ID NO: 2143392 - RNA, 22 nt, Human
ugugcaugugugcgagugugug

SEQ ID NO: 2143393 - RNA, 13 nt, Human
ugugcauggguga

SEQ ID NO: 2143394 - RNA, 22 nt, Human
ugugcacaugcacgugugugca

SEQ ID NO: 2143395 - RNA, 16 nt, Human
ugugcacaugcacgug

SEQ ID NO: 2143396 - RNA, 18 nt, Human
ugugcacaugugugcgug

SEQ ID NO: 2143397 - RNA, 23 nt, Human
ugugcagacucaauaaaaucaug

SEQ ID NO: 2143398 - RNA, 21 nt, Human
ugugcacgagugggaaggacu

SEQ ID NO: 2143399 - RNA, 13 nt, Human
ugugcuuauguuu

SEQ ID NO: 2143400 - RNA, 15 nt, Human
ugugcgugaaacaca

SEQ ID NO: 2143401 - RNA, 16 nt, Human
ugugcgugaaacacac

SEQ ID NO: 2143402 - RNA, 22 nt, Human
ugugcgugaaacacaccaggcu

SEQ ID NO: 2143403 - RNA, 15 nt, Human
ugugcgugcaugugc

SEQ ID NO: 2143404 - RNA, 21 nt, Human
ugugcguguguccaugugugu

SEQ ID NO: 2143405 - RNA, 20 nt, Human
ugugcguguguccaugugug

SEQ ID NO: 2143406 - RNA, 17 nt, Human
ugugcuacugauuguuu

SEQ ID NO: 2143407 - RNA, 17 nt, Human
ugugcuacaugacgaca

SEQ ID NO: 2143408 - RNA, 23 nt, Human
ugugcuaaccacgucugucuuca

SEQ ID NO: 2143409 - RNA, 13 nt, Human
ugugccuggagcu

SEQ ID NO: 2143410 - RNA, 17 nt, Human
ugugccuggagcuccug

SEQ ID NO: 2143411 - RNA, 18 nt, Human
ugugccuggagcuccugg

SEQ ID NO: 2143412 - RNA, 19 nt, Human
ugugccuggagcuccuggg

SEQ ID NO: 2143413 - RNA, 13 nt, Human
ugugccugcagcc

SEQ ID NO: 2143414 - RNA, 15 nt, Human
ugugccucugccugu

SEQ ID NO: 2143415 - RNA, 14 nt, Human
ugugccugcaccag

SEQ ID NO: 2143416 - RNA, 16 nt, Human
ugugccugcaccagga

SEQ ID NO: 2143417 - RNA, 17 nt, Human
ugugccugcaccaggag

SEQ ID NO: 2143418 - RNA, 18 nt, Human
ugugccugcaccaggaga

SEQ ID NO: 2143419 - RNA, 19 nt, Human
ugugccugcaccaggagac

SEQ ID NO: 2143420 - RNA, 12 nt, Human
ugugccugcagc

SEQ ID NO: 2143421 - RNA, 17 nt, Human
ugugccucugggacugg

SEQ ID NO: 2143422 - RNA, 14 nt, Human
ugugcguccugucg

SEQ ID NO: 2143423 - RNA, 15 nt, Human
ugugcggugcauaca

SEQ ID NO: 2143424 - RNA, 13 nt, Human
ugugcgugaaaca

SEQ ID NO: 2143425 - RNA, 14 nt, Human
ugugcgugaaacac

SEQ ID NO: 2143426 - RNA, 16 nt, Human
uuguacaguuuuuauu

SEQ ID NO: 2143427 - RNA, 12 nt, Human
uuguacaguuuu

SEQ ID NO: 2143428 - RNA, 13 nt, Human
uuguacaguuuuu

SEQ ID NO: 2143429 - RNA, 21 nt, Human
uuguacagacguaugcuuauu

SEQ ID NO: 2143430 - RNA, 18 nt, Human
uuguacagacguaugcuu

SEQ ID NO: 2143431 - RNA, 19 nt, Human
uuguacagacguaugcuua

SEQ ID NO: 2143432 - RNA, 15 nt, Human
uuguagagccagggu

SEQ ID NO: 2143433 - RNA, 14 nt, Human
uuguagagccaggg

SEQ ID NO: 2143434 - RNA, 19 nt, Human
uuguaucauuugaacaacu

SEQ ID NO: 2143435 - RNA, 13 nt, Human
uuguaucuagugc

SEQ ID NO: 2143436 - RNA, 17 nt, Human
uuguaucuagugcagcu

SEQ ID NO: 2143437 - RNA, 18 nt, Human
uuguaucuagugcagcug

SEQ ID NO: 2143438 - RNA, 20 nt, Human
uuguaucuagugcagcugau

SEQ ID NO: 2143439 - RNA, 21 nt, Human
uuguaucuagugcagcugauu

SEQ ID NO: 2143440 - RNA, 13 nt, Human
uuguaaagaguug

SEQ ID NO: 2143441 - RNA, 20 nt, Human
uuguaucucuuuugaaucca

SEQ ID NO: 2143442 - RNA, 13 nt, Human
uuguaucucuuuu

SEQ ID NO: 2143443 - RNA, 14 nt, Human
uuguaucucuuuug

SEQ ID NO: 2143444 - RNA, 21 nt, Human
uugguccuaagucccugcccc

SEQ ID NO: 2143445 - RNA, 12 nt, Human
uugguccucuug

SEQ ID NO: 2143446 - RNA, 17 nt, Human
uugguccucuugccauc

SEQ ID NO: 2143447 - RNA, 19 nt, Human
uuguacagaaucauugcuu

SEQ ID NO: 2143448 - RNA, 20 nt, Human
uuguacagaaucauugcuua

SEQ ID NO: 2143449 - RNA, 19 nt, Human
uuguacacaccuuauauuu

SEQ ID NO: 2143450 - RNA, 23 nt, Human
uuguacaauugaacuuaaauaaa

SEQ ID NO: 2143451 - RNA, 19 nt, Human
uuguaaauauuuauguaaa

SEQ ID NO: 2143452 - RNA, 13 nt, Human
uuguaaauaagag

SEQ ID NO: 2143453 - RNA, 14 nt, Human
uuguaaauaagaga

SEQ ID NO: 2143454 - RNA, 15 nt, Human
uuguaaauaagagau

SEQ ID NO: 2143455 - RNA, 16 nt, Human
uuguaaauaagagauu

SEQ ID NO: 2143456 - RNA, 12 nt, Human
uuguaaauauuu

SEQ ID NO: 2143457 - RNA, 13 nt, Human
uuguaaauauuua

SEQ ID NO: 2143458 - RNA, 16 nt, Human
uuguaaauauuuaugu

SEQ ID NO: 2143459 - RNA, 16 nt, Human
uuggguggaugccugg

SEQ ID NO: 2143460 - RNA, 19 nt, Human
uuggguguaacaggucucc

SEQ ID NO: 2143461 - RNA, 20 nt, Human
uuggguguaacaggucuccu

SEQ ID NO: 2143462 - RNA, 17 nt, Human
uuggguucauuauugga

SEQ ID NO: 2143463 - RNA, 12 nt, Human
uugggaggcuga

SEQ ID NO: 2143464 - RNA, 17 nt, Human
uugggaggccccacugg

SEQ ID NO: 2143465 - RNA, 22 nt, Human
uuggcuuuggguugcaggaccu

SEQ ID NO: 2143466 - RNA, 17 nt, Human
uuggcuuacugcagccu

SEQ ID NO: 2143467 - RNA, 21 nt, Human
uuggcuuucaugaggaggcag

SEQ ID NO: 2143468 - RNA, 16 nt, Human
uuggcuuuccagucau

SEQ ID NO: 2143469 - RNA, 22 nt, Human
uuggcugggggccucagugcca

SEQ ID NO: 2143470 - RNA, 21 nt, Human
uuggcugggggccucagugcc

SEQ ID NO: 2143471 - RNA, 21 nt, Human
uuggcuguagaaggagacaga

SEQ ID NO: 2143472 - RNA, 16 nt, Human
uuggcugggcccagaa

SEQ ID NO: 2143473 - RNA, 17 nt, Human
uuggcugggcccagaag

SEQ ID NO: 2143474 - RNA, 18 nt, Human
uuggcugggcccagaagg

SEQ ID NO: 2143475 - RNA, 11 nt, Human
uuggcugggua

SEQ ID NO: 2143476 - RNA, 18 nt, Human
uuggcugggggccucagu

SEQ ID NO: 2143477 - RNA, 13 nt, Human
uuggcugggccca

SEQ ID NO: 2143478 - RNA, 24 nt, Human
uuggccaaagccaaagcuaggccu

SEQ ID NO: 2143479 - RNA, 14 nt, Human
uuggcauuaaaacu

SEQ ID NO: 2143480 - RNA, 15 nt, Human
uuggcauuaaaacuu

SEQ ID NO: 2143481 - RNA, 15 nt, Human
uuggccaaaguguua

SEQ ID NO: 2143482 - RNA, 14 nt, Human
uuggccaggcuggu

SEQ ID NO: 2143483 - RNA, 13 nt, Human
uuggcauucccca

SEQ ID NO: 2143484 - RNA, 21 nt, Human
uuggcaucacagggcagagcc

SEQ ID NO: 2143485 - RNA, 18 nt, Human
uuggauuuuugucuugug

SEQ ID NO: 2143486 - RNA, 17 nt, Human
uuggcaaaaaggcagga

SEQ ID NO: 2143487 - RNA, 15 nt, Human
uuggauugacaguaa

SEQ ID NO: 2143488 - RNA, 17 nt, Human
uuggauugacaguaacu

SEQ ID NO: 2143489 - RNA, 18 nt, Human
uuggauugacaguaacuu

SEQ ID NO: 2143490 - RNA, 19 nt, Human
uuggaaguuuguguucugu

SEQ ID NO: 2143491 - RNA, 16 nt, Human
uuggaaguuuucagga

SEQ ID NO: 2143492 - RNA, 20 nt, Human
uugcuguagaagauggcacu

SEQ ID NO: 2143493 - RNA, 15 nt, Human
uugcuggucacugcc

SEQ ID NO: 2143494 - RNA, 17 nt, Human
uugcuggucuuguaaga

SEQ ID NO: 2143495 - RNA, 18 nt, Human
uugcuggucuuguaagag

SEQ ID NO: 2143496 - RNA, 23 nt, Human
uugcuggucuuguaagagcuaua

SEQ ID NO: 2143497 - RNA, 21 nt, Human
uugcugccugaagaacaguaa

SEQ ID NO: 2143498 - RNA, 22 nt, Human
uuggaaccacggagaucuccuu

SEQ ID NO: 2143499 - RNA, 20 nt, Human
uuggaaagcaucaccucagg

SEQ ID NO: 2143500 - RNA, 14 nt, Human
uuggaaaggaccag

SEQ ID NO: 2143501 - RNA, 22 nt, Human
uuggaaagcaucaccucaggcc

SEQ ID NO: 2143502 - RNA, 22 nt, Human
uugcuaaaggaaaaaaccaucc

SEQ ID NO: 2143503 - RNA, 19 nt, Human
uugcguuagaaugaggagg

SEQ ID NO: 2143504 - RNA, 15 nt, Human
uugcugauucuugag

SEQ ID NO: 2143505 - RNA, 12 nt, Human
uugccugcaggc

SEQ ID NO: 2143506 - RNA, 18 nt, Human
uugccugcggucaaggcc

SEQ ID NO: 2143507 - RNA, 19 nt, Human
uugccugcggucaaggcca

SEQ ID NO: 2143508 - RNA, 22 nt, Human
uugccugcguuuuggaagcucu

SEQ ID NO: 2143509 - RNA, 20 nt, Human
uugccugaaguuggagugag

SEQ ID NO: 2143510 - RNA, 21 nt, Human
uugcguggaauugugcugagu

SEQ ID NO: 2143511 - RNA, 21 nt, Human
uugcuaaaaauaguggccaga

SEQ ID NO: 2143512 - RNA, 12 nt, Human
uugcccagagau

SEQ ID NO: 2143513 - RNA, 16 nt, Human
uugcccagagaugccu

SEQ ID NO: 2143514 - RNA, 17 nt, Human
uugcccagagaugccuc

SEQ ID NO: 2143515 - RNA, 18 nt, Human
uugcccagagaugccucc

SEQ ID NO: 2143516 - RNA, 19 nt, Human
uugcccagagaugccucca

SEQ ID NO: 2143517 - RNA, 22 nt, Human
uugcccagagaugccuccaccg

SEQ ID NO: 2143518 - RNA, 11 nt, Human
uugcccaggca

SEQ ID NO: 2143519 - RNA, 23 nt, Human
uugcccacgcuggagugcaguga

SEQ ID NO: 2143520 - RNA, 13 nt, Human
uugccagugucuu

SEQ ID NO: 2143521 - RNA, 14 nt, Human
uugccagugucuuu

SEQ ID NO: 2143522 - RNA, 15 nt, Human
uugccagugucuuuc

SEQ ID NO: 2143523 - RNA, 16 nt, Human
uugccagugucuuucu

SEQ ID NO: 2143524 - RNA, 17 nt, Human
uugccagugucuuucuu

SEQ ID NO: 2143525 - RNA, 18 nt, Human
uugccagugucuuucuuu

SEQ ID NO: 2143526 - RNA, 21 nt, Human
uugccagugucuuucuuuggu

SEQ ID NO: 2143527 - RNA, 18 nt, Human
uugccacugccucuuccu

SEQ ID NO: 2143528 - RNA, 15 nt, Human
uugccuccuguguaa

SEQ ID NO: 2143529 - RNA, 14 nt, Human
uugccucugccucu

SEQ ID NO: 2143530 - RNA, 11 nt, Human
uugccucugcc

SEQ ID NO: 2143531 - RNA, 18 nt, Human
uugccucugccucugaca

SEQ ID NO: 2143532 - RNA, 16 nt, Human
uugccucugccucuga

SEQ ID NO: 2143533 - RNA, 13 nt, Human
uucugacugcuga

SEQ ID NO: 2143534 - RNA, 22 nt, Human
uucugacuucauagauuuccuu

SEQ ID NO: 2143535 - RNA, 17 nt, Human
uucuguccgagcuuuga

SEQ ID NO: 2143536 - RNA, 21 nt, Human
uucuguccgagcuuugaaaau

SEQ ID NO: 2143537 - RNA, 15 nt, Human
uucuguucauuuguu

SEQ ID NO: 2143538 - RNA, 16 nt, Human
uucuguucauuuguua

SEQ ID NO: 2143539 - RNA, 17 nt, Human
uucuguucauuuguuau

SEQ ID NO: 2143540 - RNA, 22 nt, Human
uucugugggagaauucuuacau

SEQ ID NO: 2143541 - RNA, 17 nt, Human
uucuguccuacucugug

SEQ ID NO: 2143542 - RNA, 16 nt, Human
uucuguggcucacaga

SEQ ID NO: 2143543 - RNA, 12 nt, Human
uucuguggcuca

SEQ ID NO: 2143544 - RNA, 14 nt, Human
uucuucagaagaca

SEQ ID NO: 2143545 - RNA, 17 nt, Human
uucuucagaagacacug

SEQ ID NO: 2143546 - RNA, 22 nt, Human
uucuucaccuaagucucuguga

SEQ ID NO: 2143547 - RNA, 21 nt, Human
uucuucaccuaagucucugug

SEQ ID NO: 2143548 - RNA, 17 nt, Human
uucuucaacaucaaugu

SEQ ID NO: 2143549 - RNA, 21 nt, Human
uucuucaacaucaauguucau

SEQ ID NO: 2143550 - RNA, 22 nt, Human
uucuucaacaucaauguucauu

SEQ ID NO: 2143551 - RNA, 19 nt, Human
uucuuauuuaaugaaagac

SEQ ID NO: 2143552 - RNA, 23 nt, Human
uucuuauuuaaugaaagacugua

SEQ ID NO: 2143553 - RNA, 17 nt, Human
uugaagagagagcugag

SEQ ID NO: 2143554 - RNA, 22 nt, Human
uugaagacacugaaauauacac

SEQ ID NO: 2143555 - RNA, 15 nt, Human
uugaagacacugaaa

SEQ ID NO: 2143556 - RNA, 13 nt, Human
uugaagacacuga

SEQ ID NO: 2143557 - RNA, 17 nt, Human
uugaagacaaaaauacu

SEQ ID NO: 2143558 - RNA, 22 nt, Human
uugaagacaaaaauacucuaau

SEQ ID NO: 2143559 - RNA, 19 nt, Human
uugaacucuucaaucucuu

SEQ ID NO: 2143560 - RNA, 10 nt, Human
uucuuucaag

SEQ ID NO: 2143561 - RNA, 20 nt, Human
uucuuucaagugaaucuaaa

SEQ ID NO: 2143562 - RNA, 22 nt, Human
uucuuucaagugaaucuaaaag

SEQ ID NO: 2143563 - RNA, 13 nt, Human
uucuuuauaaacu

SEQ ID NO: 2143564 - RNA, 14 nt, Human
uucuuuauaaacuu

SEQ ID NO: 2143565 - RNA, 18 nt, Human
uucuuuauaauucuacuu

SEQ ID NO: 2143566 - RNA, 15 nt, Human
uugaaagaaaauaug

SEQ ID NO: 2143567 - RNA, 15 nt, Human
uugccacugccucuu

SEQ ID NO: 2143568 - RNA, 14 nt, Human
uugccacugccucu

SEQ ID NO: 2143569 - RNA, 22 nt, Human
uugccacugagagaucugcugu

SEQ ID NO: 2143570 - RNA, 15 nt, Human
uugcagugagcugag

SEQ ID NO: 2143571 - RNA, 13 nt, Human
uugcaguggaaga

SEQ ID NO: 2143572 - RNA, 20 nt, Human
uugcaguguggugagaucau

SEQ ID NO: 2143573 - RNA, 17 nt, Human
uugcagucugcuucugc

SEQ ID NO: 2143574 - RNA, 13 nt, Human
uugcagugagcca

SEQ ID NO: 2143575 - RNA, 22 nt, Human
uugcagacaggcaagcaccucc

SEQ ID NO: 2143576 - RNA, 20 nt, Human
uugcaguagagucaucucca

SEQ ID NO: 2143577 - RNA, 20 nt, Human
uugcagaagggggucucuuc

SEQ ID NO: 2143578 - RNA, 16 nt, Human
uugcagacaggcaagc

SEQ ID NO: 2143579 - RNA, 13 nt, Human
uugcaacacacag

SEQ ID NO: 2143580 - RNA, 15 nt, Human
uugcaacacacagac

SEQ ID NO: 2143581 - RNA, 22 nt, Human
uugcagaaacauuuugugguca

SEQ ID NO: 2143582 - RNA, 16 nt, Human
uugcaaaauuuccagu

SEQ ID NO: 2143583 - RNA, 21 nt, Human
uugcaaaauuuccaguaccuu

SEQ ID NO: 2143584 - RNA, 22 nt, Human
uugcaaaauuuccaguaccuuu

SEQ ID NO: 2143585 - RNA, 23 nt, Human
uugcaaaauuuccaguaccuuug

SEQ ID NO: 2143586 - RNA, 15 nt, Human
uugcaaaauuuccag

SEQ ID NO: 2143587 - RNA, 11 nt, Human
uugcaaaauuu

SEQ ID NO: 2143588 - RNA, 17 nt, Human
uugcaacaggcugggcu

SEQ ID NO: 2143589 - RNA, 14 nt, Human
uugcaacaggcugg

SEQ ID NO: 2143590 - RNA, 17 nt, Human
uugauuucccuucuucu

SEQ ID NO: 2143591 - RNA, 18 nt, Human
uugauuucccuucuucug

SEQ ID NO: 2143592 - RNA, 20 nt, Human
uugaaugaaaaauuuaagca

SEQ ID NO: 2143593 - RNA, 16 nt, Human
uugauuuaauaacaua

SEQ ID NO: 2143594 - RNA, 17 nt, Human
uugauugucagcuacua

SEQ ID NO: 2143595 - RNA, 21 nt, Human
uugauugucagcuacuaauga

SEQ ID NO: 2143596 - RNA, 15 nt, Human
uugaugaaagcugau

SEQ ID NO: 2143597 - RNA, 16 nt, Human
uugaugaaagcugauu

SEQ ID NO: 2143598 - RNA, 15 nt, Human
uugauugucagcuac

SEQ ID NO: 2143599 - RNA, 18 nt, Human
uugaccuaagauuuauuu

SEQ ID NO: 2143600 - RNA, 15 nt, Human
uugaccucaggugau

SEQ ID NO: 2143601 - RNA, 18 nt, Human
uugaauggccugccuuga

SEQ ID NO: 2143602 - RNA, 15 nt, Human
uugaauggguccauu

SEQ ID NO: 2143603 - RNA, 18 nt, Human
uugaaugaaaaauuuaag

SEQ ID NO: 2143604 - RNA, 12 nt, Human
uugaaugaaaaa

SEQ ID NO: 2143605 - RNA, 15 nt, Human
uugaaugaaaaauuu

SEQ ID NO: 2143606 - RNA, 16 nt, Human
uugaaugcuuccugac

SEQ ID NO: 2143607 - RNA, 16 nt, Human
uugaggggcuccugga

SEQ ID NO: 2143608 - RNA, 15 nt, Human
uugaggggcuccugg

SEQ ID NO: 2143609 - RNA, 22 nt, Human
uugagggacaaauuuaaaacaa

SEQ ID NO: 2143610 - RNA, 23 nt, Human
uugagggacaaauuuaaaacaaa

SEQ ID NO: 2143611 - RNA, 12 nt, Human
uugagcuguuuu

SEQ ID NO: 2143612 - RNA, 18 nt, Human
uugagcuguuuucccuga

SEQ ID NO: 2143613 - RNA, 18 nt, Human
uugagcuuagugaaauua

SEQ ID NO: 2143614 - RNA, 22 nt, Human
uugacuagaaaauuuaaaacau

SEQ ID NO: 2143615 - RNA, 19 nt, Human
uugacuagggauucaggcu

SEQ ID NO: 2143616 - RNA, 21 nt, Human
uugacuagggauucaggcugc

SEQ ID NO: 2143617 - RNA, 17 nt, Human
uugacuaucaaacugaa

SEQ ID NO: 2143618 - RNA, 13 nt, Human
uucucaaagaaau

SEQ ID NO: 2143619 - RNA, 15 nt, Human
uucucaaagaaauuu

SEQ ID NO: 2143620 - RNA, 19 nt, Human
uucucaaagaaauuuccac

SEQ ID NO: 2143621 - RNA, 20 nt, Human
uucucaaagaaauuuccacu

SEQ ID NO: 2143622 - RNA, 15 nt, Human
uucucauccugcagg

SEQ ID NO: 2143623 - RNA, 12 nt, Human
uucucaaagcag

SEQ ID NO: 2143624 - RNA, 15 nt, Human
uucucaaagcaggaa

SEQ ID NO: 2143625 - RNA, 19 nt, Human
uucucaaaggguacuucca

SEQ ID NO: 2143626 - RNA, 14 nt, Human
uucuccaaaugaga

SEQ ID NO: 2143627 - RNA, 15 nt, Human
uucuauuuuuguaga

SEQ ID NO: 2143628 - RNA, 13 nt, Human
uucuauuuaagug

SEQ ID NO: 2143629 - RNA, 16 nt, Human
uucuauuuaaguguac

SEQ ID NO: 2143630 - RNA, 15 nt, Human
uucuauuuauuuacu

SEQ ID NO: 2143631 - RNA, 14 nt, Human
uucuaauagaacuc

SEQ ID NO: 2143632 - RNA, 12 nt, Human
uucuaauagaac

SEQ ID NO: 2143633 - RNA, 18 nt, Human
uucuaauagaacucaguu

SEQ ID NO: 2143634 - RNA, 13 nt, Human
uucuaaucugcua

SEQ ID NO: 2143635 - RNA, 14 nt, Human
uucuaaucugcuau

SEQ ID NO: 2143636 - RNA, 15 nt, Human
uucuaaucugcuaug

SEQ ID NO: 2143637 - RNA, 14 nt, Human
uucuauuaaaagug

SEQ ID NO: 2143638 - RNA, 18 nt, Human
uucuauuaaaagugggaa

SEQ ID NO: 2143639 - RNA, 23 nt, Human
uucuauuaaaagugggaauuagg

SEQ ID NO: 2143640 - RNA, 17 nt, Human
uucuauucucuccucag

SEQ ID NO: 2143641 - RNA, 20 nt, Human
uucuauucucuccucagacu

SEQ ID NO: 2143642 - RNA, 13 nt, Human
uuccuucccucaa

SEQ ID NO: 2143643 - RNA, 22 nt, Human
uucuaugugacaauuuuguaca

SEQ ID NO: 2143644 - RNA, 15 nt, Human
uucuccauccuacca

SEQ ID NO: 2143645 - RNA, 18 nt, Human
uucuccaucuggcagggu

SEQ ID NO: 2143646 - RNA, 23 nt, Human
uucuccaugagacacaucuccuc

SEQ ID NO: 2143647 - RNA, 23 nt, Human
uucucccaauucauccucacuca

SEQ ID NO: 2143648 - RNA, 13 nt, Human
uucucccacacug

SEQ ID NO: 2143649 - RNA, 23 nt, Human
uucucccaggccaggcuccuucc

SEQ ID NO: 2143650 - RNA, 13 nt, Human
uucuccacccugc

SEQ ID NO: 2143651 - RNA, 11 nt, Human
uucuccaggcu

SEQ ID NO: 2143652 - RNA, 21 nt, Human
uucucucugccugugagccag

SEQ ID NO: 2143653 - RNA, 16 nt, Human
uucucucuccugucca

SEQ ID NO: 2143654 - RNA, 18 nt, Human
uucucucuaugguaaaga

SEQ ID NO: 2143655 - RNA, 20 nt, Human
uucucucuaugguaaagaua

SEQ ID NO: 2143656 - RNA, 22 nt, Human
uucucucuaugguaaagauauu

SEQ ID NO: 2143657 - RNA, 20 nt, Human
uucucucggaguaucuggga

SEQ ID NO: 2143658 - RNA, 14 nt, Human
uucucccccugggc

SEQ ID NO: 2143659 - RNA, 17 nt, Human
uucucccccugggcucu

SEQ ID NO: 2143660 - RNA, 18 nt, Human
uucucccccugggcucug

SEQ ID NO: 2143661 - RNA, 14 nt, Human
uucucuguauagua

SEQ ID NO: 2143662 - RNA, 13 nt, Human
uucugaccucagc

SEQ ID NO: 2143663 - RNA, 14 nt, Human
uucugaccucagca

SEQ ID NO: 2143664 - RNA, 15 nt, Human
uucugaccucagcau

SEQ ID NO: 2143665 - RNA, 22 nt, Human
uucucugaguaucuccucgcaa

SEQ ID NO: 2143666 - RNA, 15 nt, Human
uucucugcuccacca

SEQ ID NO: 2143667 - RNA, 11 nt, Human
uucucugcuuc

SEQ ID NO: 2143668 - RNA, 12 nt, Human
uucucugcuuca

SEQ ID NO: 2143669 - RNA, 15 nt, Human
uucucugcuucagcu

SEQ ID NO: 2143670 - RNA, 19 nt, Human
uucucugcuucagcuugcu

SEQ ID NO: 2143671 - RNA, 11 nt, Human
uucucugcucc

SEQ ID NO: 2143672 - RNA, 13 nt, Human
uucucugcuccac

SEQ ID NO: 2143673 - RNA, 14 nt, Human
uucucugcuccacc

SEQ ID NO: 2143674 - RNA, 23 nt, Human
uucucugaagaguggguuucaca

SEQ ID NO: 2143675 - RNA, 13 nt, Human
uucuaaagaugga

SEQ ID NO: 2143676 - RNA, 20 nt, Human
uucuaaaggccucuuccuug

SEQ ID NO: 2143677 - RNA, 15 nt, Human
uucuaauaaaacaaa

SEQ ID NO: 2143678 - RNA, 12 nt, Human
uuccuuucucag

SEQ ID NO: 2143679 - RNA, 16 nt, Human
uuccuuucccuuuagc

SEQ ID NO: 2143680 - RNA, 18 nt, Human
uuccuuucccuuuagcac

SEQ ID NO: 2143681 - RNA, 14 nt, Human
uuccuuccuucccu

SEQ ID NO: 2143682 - RNA, 14 nt, Human
uuccuucucaucug

SEQ ID NO: 2143683 - RNA, 16 nt, Human
uuccuucucaucugug

SEQ ID NO: 2143684 - RNA, 16 nt, Human
uuccuuccuucccugg

SEQ ID NO: 2143685 - RNA, 20 nt, Human
uuccuuccaucccuaccccc

SEQ ID NO: 2143686 - RNA, 15 nt, Human
uuccugccuggucuc

SEQ ID NO: 2143687 - RNA, 16 nt, Human
uuccugccuggucucc

SEQ ID NO: 2143688 - RNA, 17 nt, Human
uuccugccuggucuccu

SEQ ID NO: 2143689 - RNA, 12 nt, Human
uuccuucccugg

SEQ ID NO: 2143690 - RNA, 13 nt, Human
uuccuucccuggc

SEQ ID NO: 2143691 - RNA, 14 nt, Human
uuccuucccuggcu

SEQ ID NO: 2143692 - RNA, 19 nt, Human
uuccuucauucaacccacc

SEQ ID NO: 2143693 - RNA, 14 nt, Human
uucccuuaaaauuu

SEQ ID NO: 2143694 - RNA, 14 nt, Human
uuccccacugccug

SEQ ID NO: 2143695 - RNA, 18 nt, Human
uuccccacugccugccca

SEQ ID NO: 2143696 - RNA, 21 nt, Human
uuccccacugacagccuccca

SEQ ID NO: 2143697 - RNA, 23 nt, Human
uuccccacugacagccucccacc

SEQ ID NO: 2143698 - RNA, 17 nt, Human
uuccccacugacagccu

SEQ ID NO: 2143699 - RNA, 21 nt, Human
uuccccaccagugaaugaaag

SEQ ID NO: 2143700 - RNA, 22 nt, Human
uuccccacuugagaauuacccu

SEQ ID NO: 2143701 - RNA, 21 nt, Human
uucccuuuagcacguuuaaag

SEQ ID NO: 2143702 - RNA, 23 nt, Human
uucccuuuagcacguuuaaaguu

SEQ ID NO: 2143703 - RNA, 16 nt, Human
uucccuuggccucaga

SEQ ID NO: 2143704 - RNA, 11 nt, Human
uucccuuggcc

SEQ ID NO: 2143705 - RNA, 12 nt, Human
uucccuuggccu

SEQ ID NO: 2143706 - RNA, 14 nt, Human
uucccuuggccuca

SEQ ID NO: 2143707 - RNA, 15 nt, Human
uucccuuggccucag

SEQ ID NO: 2143708 - RNA, 17 nt, Human
uuccuagauaaaaagau

SEQ ID NO: 2143709 - RNA, 18 nt, Human
uuccuagauaaaaagaug

SEQ ID NO: 2143710 - RNA, 15 nt, Human
uucccuuuccuucca

SEQ ID NO: 2143711 - RNA, 23 nt, Human
uuccucauaguaugguggcuggg

SEQ ID NO: 2143712 - RNA, 22 nt, Human
uuccucccucccucuuucccuc

SEQ ID NO: 2143713 - RNA, 12 nt, Human
uuccucccuccc

SEQ ID NO: 2143714 - RNA, 19 nt, Human
uuccucccucccucuuucc

SEQ ID NO: 2143715 - RNA, 21 nt, Human
uuccucccucccucuuucccu

SEQ ID NO: 2143716 - RNA, 12 nt, Human
uucaguuuucag

SEQ ID NO: 2143717 - RNA, 17 nt, Human
uucaguuuuaucuuuaa

SEQ ID NO: 2143718 - RNA, 19 nt, Human
uucaguuucaauucagugc

SEQ ID NO: 2143719 - RNA, 20 nt, Human
uucaucuaccauuuucuggu

SEQ ID NO: 2143720 - RNA, 13 nt, Human
uucaguggcagcu

SEQ ID NO: 2143721 - RNA, 19 nt, Human
uucagugcuguggccuggg

SEQ ID NO: 2143722 - RNA, 21 nt, Human
uucagugcuguggccugggca

SEQ ID NO: 2143723 - RNA, 18 nt, Human
uucagggaauuucaggaa

SEQ ID NO: 2143724 - RNA, 22 nt, Human
uucagggaauuucaggaacuag

SEQ ID NO: 2143725 - RNA, 13 nt, Human
uucagugcugugg

SEQ ID NO: 2143726 - RNA, 17 nt, Human
uucaguugguaagcuuc

SEQ ID NO: 2143727 - RNA, 18 nt, Human
uucaguugguguguuuuu

SEQ ID NO: 2143728 - RNA, 19 nt, Human
uucaguuggcugacuucca

SEQ ID NO: 2143729 - RNA, 16 nt, Human
uucaguugauuuuaca

SEQ ID NO: 2143730 - RNA, 16 nt, Human
uucaggcucuucuccu

SEQ ID NO: 2143731 - RNA, 13 nt, Human
uucaggcugcuug

SEQ ID NO: 2143732 - RNA, 16 nt, Human
uucaggcugcuuggga

SEQ ID NO: 2143733 - RNA, 13 nt, Human
uucauuucaucua

SEQ ID NO: 2143734 - RNA, 19 nt, Human
uucauuuggaaauaagcug

SEQ ID NO: 2143735 - RNA, 16 nt, Human
uucauuuguuauucuu

SEQ ID NO: 2143736 - RNA, 18 nt, Human
uucauuuguuauucuuaa

SEQ ID NO: 2143737 - RNA, 20 nt, Human
uucaucuuccaacucaaacu

SEQ ID NO: 2143738 - RNA, 16 nt, Human
uucaucuauuucugag

SEQ ID NO: 2143739 - RNA, 17 nt, Human
uucaucuauuucugaga

SEQ ID NO: 2143740 - RNA, 18 nt, Human
uucaucuauuucugagaa

SEQ ID NO: 2143741 - RNA, 21 nt, Human
uuccacuuagaaauugcauuu

SEQ ID NO: 2143742 - RNA, 20 nt, Human
uuccacugucaagaaagagc

SEQ ID NO: 2143743 - RNA, 12 nt, Human
uuccacuggacu

SEQ ID NO: 2143744 - RNA, 22 nt, Human
uuccacuggacuugagcuuggc

SEQ ID NO: 2143745 - RNA, 18 nt, Human
uuccacugauggaaacaa

SEQ ID NO: 2143746 - RNA, 23 nt, Human
uuccacugauggaaacaaagugg

SEQ ID NO: 2143747 - RNA, 23 nt, Human
uuccaucucgccaccccuccuuc

SEQ ID NO: 2143748 - RNA, 15 nt, Human
uuccaucccuacccc

SEQ ID NO: 2143749 - RNA, 21 nt, Human
uuccaucccuacccccuaaga

SEQ ID NO: 2143750 - RNA, 17 nt, Human
uuccagaaaaccccagc

SEQ ID NO: 2143751 - RNA, 18 nt, Human
uuccagaaaaccccagca

SEQ ID NO: 2143752 - RNA, 21 nt, Human
uuccagaaaaccccagcaucc

SEQ ID NO: 2143753 - RNA, 14 nt, Human
uuccagaaaggaua

SEQ ID NO: 2143754 - RNA, 15 nt, Human
uuccagaaaggauau

SEQ ID NO: 2143755 - RNA, 22 nt, Human
uuccagaaaggauauuuaagaa

SEQ ID NO: 2143756 - RNA, 15 nt, Human
uuccauuucucucuc

SEQ ID NO: 2143757 - RNA, 21 nt, Human
uuccauuucucucuccagucu

SEQ ID NO: 2143758 - RNA, 14 nt, Human
uuccauuugugugu

SEQ ID NO: 2143759 - RNA, 21 nt, Human
uuccaugucgccucugcauuc

SEQ ID NO: 2143760 - RNA, 20 nt, Human
uuccaugucgccucugcauu

SEQ ID NO: 2143761 - RNA, 13 nt, Human
uuccauuguguga

SEQ ID NO: 2143762 - RNA, 16 nt, Human
uuccccaacgaaaagc

SEQ ID NO: 2143763 - RNA, 18 nt, Human
uuccccaacgaaaagcac

SEQ ID NO: 2143764 - RNA, 18 nt, Human
uuccccaaccacuucauu

SEQ ID NO: 2143765 - RNA, 14 nt, Human
uucccauuuugcaa

SEQ ID NO: 2143766 - RNA, 17 nt, Human
uucccauuuugcaaaau

SEQ ID NO: 2143767 - RNA, 19 nt, Human
uucccauuuugcaaaauuu

SEQ ID NO: 2143768 - RNA, 13 nt, Human
uucccauuuugga

SEQ ID NO: 2143769 - RNA, 19 nt, Human
uuccaugucgccucugcau

SEQ ID NO: 2143770 - RNA, 18 nt, Human
uuccaugucgccucugca

SEQ ID NO: 2143771 - RNA, 16 nt, Human
uuccaugucgccucug

SEQ ID NO: 2143772 - RNA, 17 nt, Human
uuccaugucgccucugc

SEQ ID NO: 2143773 - RNA, 12 nt, Human
uuccaugaaugu

SEQ ID NO: 2143774 - RNA, 16 nt, Human
uuccaugaaggcagag

SEQ ID NO: 2143775 - RNA, 15 nt, Human
uuccaugaauguauc

SEQ ID NO: 2143776 - RNA, 20 nt, Human
uuccaugaauguaucaggaa

SEQ ID NO: 2143777 - RNA, 18 nt, Human
uuccaugacugcauuuua

SEQ ID NO: 2143778 - RNA, 18 nt, Human
uuccaugagaacagcagg

SEQ ID NO: 2143779 - RNA, 13 nt, Human
uuccaugaaaacg

SEQ ID NO: 2143780 - RNA, 15 nt, Human
uuccaugaaaacguu

SEQ ID NO: 2143781 - RNA, 22 nt, Human
uuccaugaaaacguuuuauugu

SEQ ID NO: 2143782 - RNA, 15 nt, Human
uuccaugaaaaugca

SEQ ID NO: 2143783 - RNA, 24 nt, Human
uuccaugaaaaugcaacaacaugu

SEQ ID NO: 2143784 - RNA, 18 nt, Human
uucaauucucauuuguca

SEQ ID NO: 2143785 - RNA, 16 nt, Human
uucaauuccucuggga

SEQ ID NO: 2143786 - RNA, 13 nt, Human
uucaauuccuggg

SEQ ID NO: 2143787 - RNA, 12 nt, Human
uucaauuccucu

SEQ ID NO: 2143788 - RNA, 19 nt, Human
uucaauucagugcuguacu

SEQ ID NO: 2143789 - RNA, 13 nt, Human
uucaauucagugc

SEQ ID NO: 2143790 - RNA, 23 nt, Human
uucaaugguuugcaaggaagcca

SEQ ID NO: 2143791 - RNA, 20 nt, Human
uucaaugguuugcaaggaag

SEQ ID NO: 2143792 - RNA, 22 nt, Human
uucaaugguuugcaaggaagcc

SEQ ID NO: 2143793 - RNA, 15 nt, Human
uucaacgcagcccug

SEQ ID NO: 2143794 - RNA, 14 nt, Human
uucaacgcagcccu

SEQ ID NO: 2143795 - RNA, 13 nt, Human
uucaacgcagccc

SEQ ID NO: 2143796 - RNA, 20 nt, Human
uucaaccauuccccauggga

SEQ ID NO: 2143797 - RNA, 17 nt, Human
uucaaccauuccccaug

SEQ ID NO: 2143798 - RNA, 23 nt, Human
uucaacagacccccucuagaaau

SEQ ID NO: 2143799 - RNA, 23 nt, Human
uucaaagccaaguuuauauacaa

SEQ ID NO: 2143800 - RNA, 13 nt, Human
uucaaauuucaca

SEQ ID NO: 2143801 - RNA, 16 nt, Human
uuauuuucuccugaua

SEQ ID NO: 2143802 - RNA, 17 nt, Human
uuauuuucuuugaaauu

SEQ ID NO: 2143803 - RNA, 12 nt, Human
uuauuuucuggu

SEQ ID NO: 2143804 - RNA, 21 nt, Human
uuauuuucugguagauagaaa

SEQ ID NO: 2143805 - RNA, 16 nt, Human
uuauuuuccuccccag

SEQ ID NO: 2143806 - RNA, 14 nt, Human
uuauuuuccucccc

SEQ ID NO: 2143807 - RNA, 15 nt, Human
uuauuuuccucccca

SEQ ID NO: 2143808 - RNA, 21 nt, Human
uucagagacucagggccccag

SEQ ID NO: 2143809 - RNA, 14 nt, Human
uucagacucagacu

SEQ ID NO: 2143810 - RNA, 15 nt, Human
uucagagacucaggg

SEQ ID NO: 2143811 - RNA, 20 nt, Human
uucagagacucagggcccca

SEQ ID NO: 2143812 - RNA, 13 nt, Human
uucagaccccagc

SEQ ID NO: 2143813 - RNA, 15 nt, Human
uucagaccccagcgg

SEQ ID NO: 2143814 - RNA, 12 nt, Human
uucagacucaga

SEQ ID NO: 2143815 - RNA, 13 nt, Human
uucagacucagac

SEQ ID NO: 2143816 - RNA, 19 nt, Human
uucacugaaguucuccuga

SEQ ID NO: 2143817 - RNA, 10 nt, Human
uucagacccc

SEQ ID NO: 2143818 - RNA, 23 nt, Human
uucaaucugaagauacaugucuu

SEQ ID NO: 2143819 - RNA, 13 nt, Human
uucaccccacccu

SEQ ID NO: 2143820 - RNA, 14 nt, Human
uucaccccacccuu

SEQ ID NO: 2143821 - RNA, 14 nt, Human
uucaauuccugggc

SEQ ID NO: 2143822 - RNA, 16 nt, Human
uucaauuccugggccc

SEQ ID NO: 2143823 - RNA, 16 nt, Human
uucaauucaaaaaugu

SEQ ID NO: 2143824 - RNA, 19 nt, Human
uucaauucaaaaauguaca

SEQ ID NO: 2143825 - RNA, 20 nt, Human
uucaauucaaaaauguacaa

SEQ ID NO: 2143826 - RNA, 14 nt, Human
uucacccacagaaa

SEQ ID NO: 2143827 - RNA, 16 nt, Human
uucacccacagaaaga

SEQ ID NO: 2143828 - RNA, 17 nt, Human
uucacccacagaaagag

SEQ ID NO: 2143829 - RNA, 19 nt, Human
uucacccacagaaagagag

SEQ ID NO: 2143830 - RNA, 15 nt, Human
uucacccagacagcu

SEQ ID NO: 2143831 - RNA, 23 nt, Human
uucagcuccagcucaccagcccc

SEQ ID NO: 2143832 - RNA, 16 nt, Human
uucagaggcugaggug

SEQ ID NO: 2143833 - RNA, 17 nt, Human
uucagagggaaaguaaa

SEQ ID NO: 2143834 - RNA, 17 nt, Human
uucagcucugcaagaau

SEQ ID NO: 2143835 - RNA, 24 nt, Human
uucagcucugcaagaauugaagca

SEQ ID NO: 2143836 - RNA, 21 nt, Human
uucagcugguugagguuucaa

SEQ ID NO: 2143837 - RNA, 19 nt, Human
uucagagguggcucuggaa

SEQ ID NO: 2143838 - RNA, 12 nt, Human
uucagcugcccc

SEQ ID NO: 2143839 - RNA, 17 nt, Human
uucagcugacuuuucug

SEQ ID NO: 2143840 - RNA, 15 nt, Human
uucaggcucuucucc

SEQ ID NO: 2143841 - RNA, 21 nt, Human
uucaggauacucugucagaug

SEQ ID NO: 2143842 - RNA, 17 nt, Human
uucaggagucccaagga

SEQ ID NO: 2143843 - RNA, 17 nt, Human
uucaggauacucuguca

SEQ ID NO: 2143844 - RNA, 18 nt, Human
uucaggacacucacuaca

SEQ ID NO: 2143845 - RNA, 14 nt, Human
uucaggaggcugga

SEQ ID NO: 2143846 - RNA, 23 nt, Human
uucagcugcccccgcucaugggc

SEQ ID NO: 2143847 - RNA, 16 nt, Human
uucagcugcuucucuu

SEQ ID NO: 2143848 - RNA, 13 nt, Human
uuuauugcuuguu

SEQ ID NO: 2143849 - RNA, 14 nt, Human
uuuauugcuacuuc

SEQ ID NO: 2143850 - RNA, 19 nt, Human
uuuauugcuguguaacacu

SEQ ID NO: 2143851 - RNA, 17 nt, Human
uuuauugcuugauacuu

SEQ ID NO: 2143852 - RNA, 15 nt, Human
uuuaugcaaggaagg

SEQ ID NO: 2143853 - RNA, 17 nt, Human
uuuaugcaaggaaggaa

SEQ ID NO: 2143854 - RNA, 18 nt, Human
uuuaugcaaggaaggaaa

SEQ ID NO: 2143855 - RNA, 12 nt, Human
uuuauucaaggu

SEQ ID NO: 2143856 - RNA, 19 nt, Human
uuuauucaagguaaaauuc

SEQ ID NO: 2143857 - RNA, 20 nt, Human
uuuauucaagguaaaauucu

SEQ ID NO: 2143858 - RNA, 17 nt, Human
uuuauuauuuucaccug

SEQ ID NO: 2143859 - RNA, 17 nt, Human
uuuauucaauuccucug

SEQ ID NO: 2143860 - RNA, 15 nt, Human
uuuauuuaucaguga

SEQ ID NO: 2143861 - RNA, 15 nt, Human
uuuauuuauacuauu

SEQ ID NO: 2143862 - RNA, 17 nt, Human
uuuauuguguuuuuaau

SEQ ID NO: 2143863 - RNA, 17 nt, Human
uuuauaaaauuaaagaa

SEQ ID NO: 2143864 - RNA, 18 nt, Human
uuuauaaaauuaaagaaa

SEQ ID NO: 2143865 - RNA, 19 nt, Human
uuuauaaaauuaaagaaaa

SEQ ID NO: 2143866 - RNA, 20 nt, Human
uuuauaaaauuaaagaaaau

SEQ ID NO: 2143867 - RNA, 21 nt, Human
uuuagagauaagaguuggcug

SEQ ID NO: 2143868 - RNA, 18 nt, Human
uuuagaguagcaugagag

SEQ ID NO: 2143869 - RNA, 21 nt, Human
uuuaugaaaugguuaagaauu

SEQ ID NO: 2143870 - RNA, 18 nt, Human
uuuaugaagaaaaaauac

SEQ ID NO: 2143871 - RNA, 19 nt, Human
uuuaugaagaaaaaauaca

SEQ ID NO: 2143872 - RNA, 12 nt, Human
uuuaugaagaaa

SEQ ID NO: 2143873 - RNA, 22 nt, Human
uuuaugaagaaaaaauacauuu

SEQ ID NO: 2143874 - RNA, 17 nt, Human
uuuaugaaggcaaaaaa

SEQ ID NO: 2143875 - RNA, 22 nt, Human
uuuaugauauuuuuuuaagucu

SEQ ID NO: 2143876 - RNA, 19 nt, Human
uuuaugauuuacucauuau

SEQ ID NO: 2143877 - RNA, 13 nt, Human
uuuaucuauugua

SEQ ID NO: 2143878 - RNA, 14 nt, Human
uuuaucuauuguaa

SEQ ID NO: 2143879 - RNA, 16 nt, Human
uuuaucuauuguaaga

SEQ ID NO: 2143880 - RNA, 17 nt, Human
uuuaucuauuguaagau

SEQ ID NO: 2143881 - RNA, 20 nt, Human
uuuaucuauuguaagauaaa

SEQ ID NO: 2143882 - RNA, 12 nt, Human
uuuaucuuuucu

SEQ ID NO: 2143883 - RNA, 15 nt, Human
uuuaucuuuucuaca

SEQ ID NO: 2143884 - RNA, 16 nt, Human
uuuaucuuuucuacag

SEQ ID NO: 2143885 - RNA, 21 nt, Human
uuuaucuuuucuacagcaaau

SEQ ID NO: 2143886 - RNA, 19 nt, Human
uuuaugaaagguuuacauu

SEQ ID NO: 2143887 - RNA, 18 nt, Human
uuuaugaaagguuuacau

SEQ ID NO: 2143888 - RNA, 13 nt, Human
uuuaugaaaagag

SEQ ID NO: 2143889 - RNA, 23 nt, Human
uuguauuuaaaugaaagugagac

SEQ ID NO: 2143890 - RNA, 19 nt, Human
uuuacaagaaaaaaugaau

SEQ ID NO: 2143891 - RNA, 21 nt, Human
uuuacaagaaaaaaugaauuu

SEQ ID NO: 2143892 - RNA, 13 nt, Human
uuuaaucuucagu

SEQ ID NO: 2143893 - RNA, 14 nt, Human
uuuaauccagaauu

SEQ ID NO: 2143894 - RNA, 21 nt, Human
uuuaauccagaauugaccuuu

SEQ ID NO: 2143895 - RNA, 15 nt, Human
uuuacaauugaaaug

SEQ ID NO: 2143896 - RNA, 16 nt, Human
uuuacaauugaaauga

SEQ ID NO: 2143897 - RNA, 23 nt, Human
uuuacaauuguaaaacugaggca

SEQ ID NO: 2143898 - RNA, 21 nt, Human
uuuacaaucagccacauucua

SEQ ID NO: 2143899 - RNA, 19 nt, Human
uuuacaugggguuuucaau

SEQ ID NO: 2143900 - RNA, 13 nt, Human
uuuacuuugaauu

SEQ ID NO: 2143901 - RNA, 15 nt, Human
uuuacuuuguguuca

SEQ ID NO: 2143902 - RNA, 18 nt, Human
uuuacaugggguuuucaa

SEQ ID NO: 2143903 - RNA, 22 nt, Human
uuuagaaugaugcacauuucau

SEQ ID NO: 2143904 - RNA, 22 nt, Human
uuuagagauaagaguuggcugg

SEQ ID NO: 2143905 - RNA, 21 nt, Human
uuuagagaugaauuaaauuua

SEQ ID NO: 2143906 - RNA, 15 nt, Human
uuuagaacagaaaac

SEQ ID NO: 2143907 - RNA, 16 nt, Human
uuuagaacagaaaaca

SEQ ID NO: 2143908 - RNA, 17 nt, Human
uuuagaacagaaaacaa

SEQ ID NO: 2143909 - RNA, 18 nt, Human
uuuagaacagaaaacaac

SEQ ID NO: 2143910 - RNA, 22 nt, Human
uuuagaacagaaaacaacaaaa

SEQ ID NO: 2143911 - RNA, 23 nt, Human
uuuagaacagaaaacaacaaaaa

SEQ ID NO: 2143912 - RNA, 11 nt, Human
uuuagaaacuu

SEQ ID NO: 2143913 - RNA, 16 nt, Human
uuuagaaacuuaucuu

SEQ ID NO: 2143914 - RNA, 19 nt, Human
uuuagaaacuuaucuuaca

SEQ ID NO: 2143915 - RNA, 20 nt, Human
uuuagaaacuuaucuuacaa

SEQ ID NO: 2143916 - RNA, 13 nt, Human
uuucagacugcuu

SEQ ID NO: 2143917 - RNA, 15 nt, Human
uuucagacugcuuua

SEQ ID NO: 2143918 - RNA, 13 nt, Human
uuucagagccucc

SEQ ID NO: 2143919 - RNA, 13 nt, Human
uuuauuucuuaaa

SEQ ID NO: 2143920 - RNA, 20 nt, Human
uuuauuuguuugugcauuug

SEQ ID NO: 2143921 - RNA, 14 nt, Human
uuuauuuaucagug

SEQ ID NO: 2143922 - RNA, 14 nt, Human
uuuauuuauuaaga

SEQ ID NO: 2143923 - RNA, 13 nt, Human
uuucauugccagu

SEQ ID NO: 2143924 - RNA, 16 nt, Human
uuucauugccaguguc

SEQ ID NO: 2143925 - RNA, 18 nt, Human
uuucauugccagugucuu

SEQ ID NO: 2143926 - RNA, 19 nt, Human
uuucauugccagugucuuu

SEQ ID NO: 2143927 - RNA, 15 nt, Human
uuuccaaauucacaa

SEQ ID NO: 2143928 - RNA, 22 nt, Human
uuucaggaggcuggaggaaggg

SEQ ID NO: 2143929 - RNA, 13 nt, Human
uuucaggauacuc

SEQ ID NO: 2143930 - RNA, 16 nt, Human
uuucaggauacucugu

SEQ ID NO: 2143931 - RNA, 19 nt, Human
uuucaggauacucugucag

SEQ ID NO: 2143932 - RNA, 20 nt, Human
uuucaggauacucugucaga

SEQ ID NO: 2143933 - RNA, 21 nt, Human
uuucaggauacucugucagau

SEQ ID NO: 2143934 - RNA, 21 nt, Human
uuucaggggucgucaccaccu

SEQ ID NO: 2143935 - RNA, 22 nt, Human
uuucagggagguggcuggguuu

SEQ ID NO: 2143936 - RNA, 19 nt, Human
uuucagggagguggcuggg

SEQ ID NO: 2143937 - RNA, 22 nt, Human
uuucauugcugggcuugucugu

SEQ ID NO: 2143938 - RNA, 22 nt, Human
uuucauugacuaucaaacugaa

SEQ ID NO: 2143939 - RNA, 21 nt, Human
uuucauugauaugaaaaauau

SEQ ID NO: 2143940 - RNA, 22 nt, Human
uuucauugauaugaaaaauaug

SEQ ID NO: 2143941 - RNA, 13 nt, Human
uuuccugagcuug

SEQ ID NO: 2143942 - RNA, 18 nt, Human
uuuccugagcuuggccag

SEQ ID NO: 2143943 - RNA, 22 nt, Human
uuuccugagcuuggccagaagg

SEQ ID NO: 2143944 - RNA, 19 nt, Human
uuucuaaaggccucuuccu

SEQ ID NO: 2143945 - RNA, 22 nt, Human
uuucuaacacuagucugugugc

SEQ ID NO: 2143946 - RNA, 16 nt, Human
uuucuaacucugaugu

SEQ ID NO: 2143947 - RNA, 18 nt, Human
uuucuaacucugauguaa

SEQ ID NO: 2143948 - RNA, 20 nt, Human
uuucuaacucugauguaaau

SEQ ID NO: 2143949 - RNA, 21 nt, Human
uuucuaacucugauguaaaug

SEQ ID NO: 2143950 - RNA, 22 nt, Human
uuucuaacucugauguaaauga

SEQ ID NO: 2143951 - RNA, 23 nt, Human
uuuccugacagaaggacucaggu

SEQ ID NO: 2143952 - RNA, 15 nt, Human
uuuccuacuuuuccu

SEQ ID NO: 2143953 - RNA, 20 nt, Human
uuuccuacuuuuccuucccu

SEQ ID NO: 2143954 - RNA, 21 nt, Human
uuucuagcuguugagcuguuu

SEQ ID NO: 2143955 - RNA, 19 nt, Human
uuucuagcuguugagcugu

SEQ ID NO: 2143956 - RNA, 18 nt, Human
uuucuagcuaauggaaaa

SEQ ID NO: 2143957 - RNA, 13 nt, Human
uuucucuugggcu

SEQ ID NO: 2143958 - RNA, 21 nt, Human
uuucucuugggcugagacugg

SEQ ID NO: 2143959 - RNA, 12 nt, Human
uuucucuugggc

SEQ ID NO: 2143960 - RNA, 13 nt, Human
uuucuccuaucuu

SEQ ID NO: 2143961 - RNA, 19 nt, Human
uuucuccuuagucuucuca

SEQ ID NO: 2143962 - RNA, 20 nt, Human
uuucuccuuagucuucucau

SEQ ID NO: 2143963 - RNA, 16 nt, Human
uuucugagaagguccu

SEQ ID NO: 2143964 - RNA, 19 nt, Human
uuucugagaagguccuuaa

SEQ ID NO: 2143965 - RNA, 14 nt, Human
uuucucuuucuccu

SEQ ID NO: 2143966 - RNA, 12 nt, Human
uuucucuuucuc

SEQ ID NO: 2143967 - RNA, 20 nt, Human
uuuucacugcuggcugccuu

SEQ ID NO: 2143968 - RNA, 19 nt, Human
uuuucacugcuggcugccu

SEQ ID NO: 2143969 - RNA, 18 nt, Human
uuuucaauuuugcaugcu

SEQ ID NO: 2143970 - RNA, 23 nt, Human
uuuucacacaauacaauaaguua

SEQ ID NO: 2143971 - RNA, 14 nt, Human
uuuucaauuuugca

SEQ ID NO: 2143972 - RNA, 17 nt, Human
uuuucaauucaaaaaug

SEQ ID NO: 2143973 - RNA, 18 nt, Human
uuuucaauucaaaaaugu

SEQ ID NO: 2143974 - RNA, 20 nt, Human
uuuucaauucaaaaauguac

SEQ ID NO: 2143975 - RNA, 22 nt, Human
uuuucaauucaaaaauguacaa

SEQ ID NO: 2143976 - RNA, 16 nt, Human
uuuucaauauuuauua

SEQ ID NO: 2143977 - RNA, 14 nt, Human
uuuucaauauuuau

SEQ ID NO: 2143978 - RNA, 11 nt, Human
uuuuaugauau

SEQ ID NO: 2143979 - RNA, 18 nt, Human
uuuuaugagcucauguag

SEQ ID NO: 2143980 - RNA, 21 nt, Human
uuuuaugagcucauguagcaa

SEQ ID NO: 2143981 - RNA, 22 nt, Human
uuuuaugagcucauguagcaau

SEQ ID NO: 2143982 - RNA, 22 nt, Human
uuuucaacgcagcccugcuuug

SEQ ID NO: 2143983 - RNA, 21 nt, Human
uuuucaacgcagcccugcuuu

SEQ ID NO: 2143984 - RNA, 17 nt, Human
uuuucaacgcagcccug

SEQ ID NO: 2143985 - RNA, 18 nt, Human
uuuucaagcaucuccuga

SEQ ID NO: 2143986 - RNA, 21 nt, Human
uuuucaagcaucuccugagga

SEQ ID NO: 2143987 - RNA, 22 nt, Human
uuuucaagcaucuccugaggau

SEQ ID NO: 2143988 - RNA, 14 nt, Human
uuuucuucucccuc

SEQ ID NO: 2143989 - RNA, 19 nt, Human
uuuucgaagcucagcccac

SEQ ID NO: 2143990 - RNA, 16 nt, Human
uuuucguuaacauuga

SEQ ID NO: 2143991 - RNA, 12 nt, Human
uuuucguuuguu

SEQ ID NO: 2143992 - RNA, 21 nt, Human
uuuuaugaggagugaacauuu

SEQ ID NO: 2143993 - RNA, 16 nt, Human
uuuuccauugguuuac

SEQ ID NO: 2143994 - RNA, 13 nt, Human
uuuucccaauaaa

SEQ ID NO: 2143995 - RNA, 14 nt, Human
uuuucccaauaaau

SEQ ID NO: 2143996 - RNA, 21 nt, Human
uuuucccaauagcacuuucau

SEQ ID NO: 2143997 - RNA, 19 nt, Human
uuuuccuccgggagagggg

SEQ ID NO: 2143998 - RNA, 16 nt, Human
uuuuauccaaucuugu

SEQ ID NO: 2143999 - RNA, 19 nt, Human
uuuuauauagcuugaaaca

SEQ ID NO: 2144000 - RNA, 18 nt, Human
uuuuacugucuuaauuaa

SEQ ID NO: 2144001 - RNA, 22 nt, Human
uuuuacugucuuaauuaaguaa

SEQ ID NO: 2144002 - RNA, 14 nt, Human
uuuuacuuagcaau

SEQ ID NO: 2144003 - RNA, 22 nt, Human
uuuuacuugcauugaauauauu

SEQ ID NO: 2144004 - RNA, 15 nt, Human
uuuuacugcuuuuaa

SEQ ID NO: 2144005 - RNA, 23 nt, Human
uuuuacugcuuuuaacuucugau

SEQ ID NO: 2144006 - RNA, 14 nt, Human
uuuguguuguuuga

SEQ ID NO: 2144007 - RNA, 23 nt, Human
uuuuaauuuaugaguuuuugaua

SEQ ID NO: 2144008 - RNA, 21 nt, Human
uuuuaauuuauuuauacuauu

SEQ ID NO: 2144009 - RNA, 16 nt, Human
uuuuacagcugccugc

SEQ ID NO: 2144010 - RNA, 21 nt, Human
uuuuaauuuuguaaaggugaa

SEQ ID NO: 2144011 - RNA, 22 nt, Human
uuuuaauuuuguaaaggugaaa

SEQ ID NO: 2144012 - RNA, 13 nt, Human
uuuuaauuuugua

SEQ ID NO: 2144013 - RNA, 10 nt, Human
uuuuacaaaa

SEQ ID NO: 2144014 - RNA, 15 nt, Human
uuuuaauuugaugaa

SEQ ID NO: 2144015 - RNA, 19 nt, Human
uuuuaauuugaugaaagcu

SEQ ID NO: 2144016 - RNA, 20 nt, Human
uuuuaauuugaugaaagcug

SEQ ID NO: 2144017 - RNA, 21 nt, Human
uuuuaauuugaugaaagcuga

SEQ ID NO: 2144018 - RNA, 12 nt, Human
uuuuaauuuugu

SEQ ID NO: 2144019 - RNA, 22 nt, Human
uuuuaauuuauuuauuaagaug

SEQ ID NO: 2144020 - RNA, 13 nt, Human
uuuuaauuugaua

SEQ ID NO: 2144021 - RNA, 15 nt, Human
uuuuacuacugugga

SEQ ID NO: 2144022 - RNA, 13 nt, Human
uuuuacuccccuu

SEQ ID NO: 2144023 - RNA, 17 nt, Human
uuuuaccaaguuauaua

SEQ ID NO: 2144024 - RNA, 21 nt, Human
uuuuaccaaguuauauaaaga

SEQ ID NO: 2144025 - RNA, 15 nt, Human
uuuuacauacugcug

SEQ ID NO: 2144026 - RNA, 16 nt, Human
uuuuacauacugcugu

SEQ ID NO: 2144027 - RNA, 22 nt, Human
uuugccaugacaacuucuaauu

SEQ ID NO: 2144028 - RNA, 16 nt, Human
uuugccagugggaacu

SEQ ID NO: 2144029 - RNA, 15 nt, Human
uuugccagugggaac

SEQ ID NO: 2144030 - RNA, 18 nt, Human
uuugccauguuggccagg

SEQ ID NO: 2144031 - RNA, 14 nt, Human
uuugcagacaggca

SEQ ID NO: 2144032 - RNA, 17 nt, Human
uuugcacuguaugcugg

SEQ ID NO: 2144033 - RNA, 22 nt, Human
uuugagucccuuccaggccauc

SEQ ID NO: 2144034 - RNA, 18 nt, Human
uuugauaguauugugcau

SEQ ID NO: 2144035 - RNA, 15 nt, Human
uuugauacuuguuca

SEQ ID NO: 2144036 - RNA, 19 nt, Human
uuugcagaaaagcaccugc

SEQ ID NO: 2144037 - RNA, 20 nt, Human
uuugcagaaaagcaccugcc

SEQ ID NO: 2144038 - RNA, 22 nt, Human
uuugcagaaaagcaccugccga

SEQ ID NO: 2144039 - RNA, 14 nt, Human
uuugcagaaacaga

SEQ ID NO: 2144040 - RNA, 21 nt, Human
uuugcagcagugagucucuuc

SEQ ID NO: 2144041 - RNA, 16 nt, Human
uuucugaggagaaaca

SEQ ID NO: 2144042 - RNA, 18 nt, Human
uuucugaggagaaacaaa

SEQ ID NO: 2144043 - RNA, 15 nt, Human
uuugagcagggcuca

SEQ ID NO: 2144044 - RNA, 19 nt, Human
uuugagcuuagugaaauua

SEQ ID NO: 2144045 - RNA, 19 nt, Human
uuugauacauaugugaaua

SEQ ID NO: 2144046 - RNA, 16 nt, Human
uuugauacauauguga

SEQ ID NO: 2144047 - RNA, 16 nt, Human
uuuguugucagcugaa

SEQ ID NO: 2144048 - RNA, 16 nt, Human
uuuguuaacuuugggu

SEQ ID NO: 2144049 - RNA, 18 nt, Human
uuuguuaaauauuuacau

SEQ ID NO: 2144050 - RNA, 22 nt, Human
uuuguuaaauauuuacauauga

SEQ ID NO: 2144051 - RNA, 21 nt, Human
uuuguuaaaacuggcaucuga

SEQ ID NO: 2144052 - RNA, 17 nt, Human
uuuguuaaauauuuaca

SEQ ID NO: 2144053 - RNA, 12 nt, Human
uuugucauuuug

SEQ ID NO: 2144054 - RNA, 14 nt, Human
uuugucauuuugaa

SEQ ID NO: 2144055 - RNA, 17 nt, Human
uuugucauuuugaagcu

SEQ ID NO: 2144056 - RNA, 19 nt, Human
uuugucauuuugaagcuaa

SEQ ID NO: 2144057 - RNA, 20 nt, Human
uuugucauuuugaagcuaau

SEQ ID NO: 2144058 - RNA, 19 nt, Human
uuuguguucuguuuguuaa

SEQ ID NO: 2144059 - RNA, 21 nt, Human
uuuguguuguuggaaaaaguc

SEQ ID NO: 2144060 - RNA, 20 nt, Human
uuuguguuguuggaaaaagu

SEQ ID NO: 2144061 - RNA, 12 nt, Human
uuuguguucugu

SEQ ID NO: 2144062 - RNA, 16 nt, Human
uuugucccacagcuug

SEQ ID NO: 2144063 - RNA, 14 nt, Human
uuugucagacuuua

SEQ ID NO: 2144064 - RNA, 23 nt, Human
uuugucacaauccuaacacauua

SEQ ID NO: 2144065 - RNA, 17 nt, Human
uuugucaaugacaguuu

SEQ ID NO: 2144066 - RNA, 16 nt, Human
uuuguauaguaaagug

SEQ ID NO: 2144067 - RNA, 16 nt, Human
uuugucaaacuguaga

SEQ ID NO: 2144068 - RNA, 17 nt, Human
uuugucaaacuguagaa

SEQ ID NO: 2144069 - RNA, 23 nt, Human
uuugucaaacuguagaaaugaug

SEQ ID NO: 2144070 - RNA, 11 nt, Human
uuugucaauga

SEQ ID NO: 2144071 - RNA, 13 nt, Human
uuuguauaaaaug

SEQ ID NO: 2144072 - RNA, 13 nt, Human
uuuggaauaaagu

SEQ ID NO: 2144073 - RNA, 18 nt, Human
uuuggaaguuuguguucu

SEQ ID NO: 2144074 - RNA, 14 nt, Human
uuuggaaguuuuca

SEQ ID NO: 2144075 - RNA, 13 nt, Human
uuuggaaucuaga

SEQ ID NO: 2144076 - RNA, 14 nt, Human
uuuggaaucuagaa

SEQ ID NO: 2144077 - RNA, 15 nt, Human
uuugguuaaguuggc

SEQ ID NO: 2144078 - RNA, 19 nt, Human
uuugguuaaguuggcuucu

SEQ ID NO: 2144079 - RNA, 22 nt, Human
uuugguuaaguuggcuucuguu

SEQ ID NO: 2144080 - RNA, 11 nt, Human
uuuuuucuacc

SEQ ID NO: 2144081 - RNA, 15 nt, Human
uuuuuuauguuuugu

SEQ ID NO: 2144082 - RNA, 13 nt, Human
uuuuuucguuugu

SEQ ID NO: 2144083 - RNA, 11 nt, Human
uuuuuuauucu

SEQ ID NO: 2144084 - RNA, 14 nt, Human
uuuuuuauucuugu

SEQ ID NO: 2144085 - RNA, 12 nt, Human
uuuuuuaucuuu

SEQ ID NO: 2144086 - RNA, 13 nt, Human
uuuuuuaucuuuu

SEQ ID NO: 2144087 - RNA, 11 nt, Human
uuuuuuauaca

SEQ ID NO: 2144088 - RNA, 13 nt, Human
uuuuuuagaacag

SEQ ID NO: 2144089 - RNA, 12 nt, Human
uuuugaaaaggc

SEQ ID NO: 2144090 - RNA, 22 nt, Human
uuuugaaauauuaaacccugga

SEQ ID NO: 2144091 - RNA, 18 nt, Human
uuuugaaaacuacauuuu

SEQ ID NO: 2144092 - RNA, 23 nt, Human
uuuugaaaacuacauuuuaacau

SEQ ID NO: 2144093 - RNA, 21 nt, Human
uuuucuugccaaugaggucug

SEQ ID NO: 2144094 - RNA, 12 nt, Human
uuuuuugaaaac

SEQ ID NO: 2144095 - RNA, 21 nt, Human
gacuggcuguccuuuccagug

SEQ ID NO: 2144096 - RNA, 13 nt, Human
gacuguagaagaa

SEQ ID NO: 2144097 - RNA, 22 nt, Human
gacaucuuaguauuugcauauu

SEQ ID NO: 2144098 - RNA, 18 nt, Human
gaugauuaauucaccuuc

SEQ ID NO: 2144099 - RNA, 21 nt, Human
gaucacgagaucaagagauca

SEQ ID NO: 2144100 - RNA, 23 nt, Human
gaagagacguuuaaaagccauca

SEQ ID NO: 2144101 - RNA, 16 nt, Human
gacaucucuuugaugu

SEQ ID NO: 2144102 - RNA, 16 nt, Human
gaccaggacaggacca

SEQ ID NO: 2144103 - RNA, 14 nt, Human
gaccauagugacca

SEQ ID NO: 2144104 - RNA, 13 nt, Human
gacuaugaauauu

SEQ ID NO: 2144105 - RNA, 17 nt, Human
gaccucaccauuuuugu

SEQ ID NO: 2144106 - RNA, 14 nt, Human
gaccucagagucca

SEQ ID NO: 2144107 - RNA, 19 nt, Human
gaccucggugggcccagug

SEQ ID NO: 2144108 - RNA, 22 nt, Human
gaggcagggccuugcccagaga

SEQ ID NO: 2144109 - RNA, 15 nt, Human
gagucacugccucuc

SEQ ID NO: 2144110 - RNA, 20 nt, Human
gcuaauuuuucauuuuuagu

SEQ ID NO: 2144111 - RNA, 14 nt, Human
gcccaggagagcca

SEQ ID NO: 2144112 - RNA, 11 nt, Human
gcauuuuuaga

SEQ ID NO: 2144113 - RNA, 13 nt, Human
gcauaugucuaua

SEQ ID NO: 2144114 - RNA, 17 nt, Human
gaugcauguacccuaag

SEQ ID NO: 2144115 - RNA, 17 nt, Human
gauugauuaccuaguag

SEQ ID NO: 2144116 - RNA, 12 nt, Human
gcaauaaaaauc

SEQ ID NO: 2144117 - RNA, 18 nt, Human
cuguguuuuugaaauauu

SEQ ID NO: 2144118 - RNA, 17 nt, Human
cuguuguguuguuguua

SEQ ID NO: 2144119 - RNA, 16 nt, Human
cuugaguuuuguuuua

SEQ ID NO: 2144120 - RNA, 21 nt, Human
cuuguugacacggccaugacc

SEQ ID NO: 2144121 - RNA, 15 nt, Human
cuuuacuguuuguua

SEQ ID NO: 2144122 - RNA, 19 nt, Human
gaaaagaguugggaacuuc

SEQ ID NO: 2144123 - RNA, 15 nt, Human
gaaaaugaaccauuc

SEQ ID NO: 2144124 - RNA, 17 nt, Human
gaaauuaccaaaauguc

SEQ ID NO: 2144125 - RNA, 14 nt, Human
gaaauuuguuauaa

SEQ ID NO: 2144126 - RNA, 23 nt, Human
cugggcugccaugugaagaggga

SEQ ID NO: 2144127 - RNA, 15 nt, Human
gcgagucacugccuc

SEQ ID NO: 2144128 - RNA, 19 nt, Human
gcuaaaaccaucauaguac

SEQ ID NO: 2144129 - RNA, 19 nt, Human
gcuaagaagggaaaauauc

SEQ ID NO: 2144130 - RNA, 14 nt, Human
uuauuuuaaaauuu

SEQ ID NO: 2144131 - RNA, 18 nt, Human
uuacuguggccaguauuu

SEQ ID NO: 2144132 - RNA, 18 nt, Human
uuauacccguuucacaug

SEQ ID NO: 2144133 - RNA, 21 nt, Human
uuauacgauaaauaacuuuuu

SEQ ID NO: 2144134 - RNA, 13 nt, Human
uuaacaucuuuuu

SEQ ID NO: 2144135 - RNA, 12 nt, Human
uggucacagaga

SEQ ID NO: 2144136 - RNA, 14 nt, Human
uguauaaauaugua

SEQ ID NO: 2144137 - RNA, 23 nt, Human
uguaugacuaaagagagaaugua

SEQ ID NO: 2144138 - RNA, 15 nt, Human
uguauuuuauuuuuu

SEQ ID NO: 2144139 - RNA, 16 nt, Human
ugucuuccauaaugua

SEQ ID NO: 2144140 - RNA, 19 nt, Human
guauccuuccaauuuggaa

SEQ ID NO: 2144141 - RNA, 16 nt, Human
gucuagggagagaccc

SEQ ID NO: 2144142 - RNA, 17 nt, Human
guuaucuggcuucaaau

SEQ ID NO: 2144143 - RNA, 17 nt, Human
uaaauaucaaucauuuu

SEQ ID NO: 2144144 - RNA, 23 nt, Human
uaaauauuuacauaugaaauuua

SEQ ID NO: 2144145 - RNA, 18 nt, Human
uaacaacaccuucagagg

SEQ ID NO: 2144146 - RNA, 14 nt, Human
guuuccuuuuauga

SEQ ID NO: 2144147 - RNA, 20 nt, Human
uagccugccucuucucuacu

SEQ ID NO: 2144148 - RNA, 20 nt, Human
uacagccaggcccagagcaa

SEQ ID NO: 2144149 - RNA, 16 nt, Human
uaaggcaggacagaga

SEQ ID NO: 2144150 - RNA, 17 nt, Human
uacaauauuuaaaauuu

SEQ ID NO: 2144151 - RNA, 16 nt, Human
ucaaagagguuuuaaa

SEQ ID NO: 2144152 - RNA, 17 nt, Human
ucaauucauaucuauuu

SEQ ID NO: 2144153 - RNA, 19 nt, Human
ucauaggaaaguauuuuuu

SEQ ID NO: 2144154 - RNA, 22 nt, Human
uauacuguacuuaauaaauuca

SEQ ID NO: 2144155 - RNA, 22 nt, Human
uaggguuauaauaauguuaaca

SEQ ID NO: 2144156 - RNA, 23 nt, Human
uaguaccccaagaagaaaauguu

SEQ ID NO: 2144157 - RNA, 19 nt, Human
uaguauauuaaaaauggua

SEQ ID NO: 2144158 - RNA, 14 nt, Human
ucuucuaaucuuuu

SEQ ID NO: 2144159 - RNA, 17 nt, Human
ucuuucagggauuuuuu

SEQ ID NO: 2144160 - RNA, 19 nt, Human
ucucucuccuguacuuuuu

SEQ ID NO: 2144161 - RNA, 12 nt, Human
ugaugaagaaaa

SEQ ID NO: 2144162 - RNA, 20 nt, Human
ugaauaagacaacaaagaga

SEQ ID NO: 2144163 - RNA, 16 nt, Human
ugaauauuauaguauu

SEQ ID NO: 2144164 - RNA, 17 nt, Human
ugcagauaucacagagg

SEQ ID NO: 2144165 - RNA, 13 nt, Human
ugcauaaaauguu

SEQ ID NO: 2144166 - RNA, 14 nt, Human
ugggaagacaugaa

SEQ ID NO: 2144167 - RNA, 23 nt, Human
ugggauguccacagaugccucca

SEQ ID NO: 2144168 - RNA, 19 nt, Human
uggugaucaauuaaaugua

SEQ ID NO: 2144169 - RNA, 13 nt, Human
uggacaaagcguu

SEQ ID NO: 2144170 - RNA, 20 nt, Human
uggagccuccacugccucug

SEQ ID NO: 2144171 - RNA, 16 nt, Human
uggcuagucagagaga

SEQ ID NO: 2144172 - RNA, 12 nt, Human
gcugcuccagug

SEQ ID NO: 2144173 - RNA, 15 nt, Human
ggagcauggggauaa

SEQ ID NO: 2144174 - RNA, 14 nt, Human
ggcagggugauaaa

SEQ ID NO: 2144175 - RNA, 18 nt, Human
gggacuauuacauccaca

SEQ ID NO: 2144176 - RNA, 16 nt, Human
ggccuuugcuuaugaa

SEQ ID NO: 2144177 - RNA, 23 nt, Human
gcuguguucuugccacugcacuc

SEQ ID NO: 2144178 - RNA, 10 nt, Human
gcuuccacau

SEQ ID NO: 2144179 - RNA, 16 nt, Human
ggaaaauauguccaua

SEQ ID NO: 2144180 - RNA, 14 nt, Human
ggagaaggcaugaa

SEQ ID NO: 2144181 - RNA, 18 nt, Human
ggaaucuucucuuugaca

SEQ ID NO: 2144182 - RNA, 19 nt, Human
ggacucaaguuucuucaau

SEQ ID NO: 2144183 - RNA, 15 nt, Human
gguguuuaguugcag

SEQ ID NO: 2144184 - RNA, 14 nt, Human
gcugggagcucugc

SEQ ID NO: 2144185 - RNA, 17 nt, Human
ggacggcauuccugcuu

SEQ ID NO: 2144186 - RNA, 17 nt, Human
aaugaauaguuuuucau

SEQ ID NO: 2144187 - RNA, 15 nt, Human
aauguacaacuuuuu

SEQ ID NO: 2144188 - RNA, 21 nt, Human
aagucuucaagggcugcuuca

SEQ ID NO: 2144189 - RNA, 22 nt, Human
acaaauugcuugaaagaaaaua

SEQ ID NO: 2144190 - RNA, 20 nt, Human
acaacacacacuguucugaa

SEQ ID NO: 2144191 - RNA, 17 nt, Human
acacaacaaaaauuuga

SEQ ID NO: 2144192 - RNA, 14 nt, Human
acacacagcucugu

SEQ ID NO: 2144193 - RNA, 20 nt, Human
aauuacuaaauuacaaaugc

SEQ ID NO: 2144194 - RNA, 13 nt, Human
aauugcauuuuuu

SEQ ID NO: 2144195 - RNA, 21 nt, Human
aauuuugggguaagacuuuuu

SEQ ID NO: 2144196 - RNA, 16 nt, Human
aaguguaaauccuuuu

SEQ ID NO: 2144197 - RNA, 17 nt, Human
aauaaaguguuuucaga

SEQ ID NO: 2144198 - RNA, 22 nt, Human
aauacauggauaacacauuuga

SEQ ID NO: 2144199 - RNA, 20 nt, Human
aauacgccagaacugcuuua

SEQ ID NO: 2144200 - RNA, 17 nt, Human
aauagcaacaugcuuca

SEQ ID NO: 2144201 - RNA, 13 nt, Human
aauauuguacagu

SEQ ID NO: 2144202 - RNA, 18 nt, Human
aauauuuccuuaaacugu

SEQ ID NO: 2144203 - RNA, 18 nt, Human
aaucaugaaagcaucuga

SEQ ID NO: 2144204 - RNA, 17 nt, Human
agccugaggcugagacu

SEQ ID NO: 2144205 - RNA, 15 nt, Human
agcugggaccacagg

SEQ ID NO: 2144206 - RNA, 14 nt, Human
agcugguuuuuagc

SEQ ID NO: 2144207 - RNA, 16 nt, Human
aguaacuugucuuaaa

SEQ ID NO: 2144208 - RNA, 19 nt, Human
aggucgggcucagcucugg

SEQ ID NO: 2144209 - RNA, 21 nt, Human
agucacauucuuguuuuaagu

SEQ ID NO: 2144210 - RNA, 23 nt, Human
agucuauaugacuucagaaaugu

SEQ ID NO: 2144211 - RNA, 23 nt, Human
agucucuagguucugagcucugg

SEQ ID NO: 2144212 - RNA, 19 nt, Human
agccuagaagagcuucuga

SEQ ID NO: 2144213 - RNA, 23 nt, Human
agcaagugagacccugucucaaa

SEQ ID NO: 2144214 - RNA, 16 nt, Human
agauuauuuuuuauga

SEQ ID NO: 2144215 - RNA, 16 nt, Human
agagauagaaccugga

SEQ ID NO: 2144216 - RNA, 20 nt, Human
agagcuuucuucccgaaccc

SEQ ID NO: 2144217 - RNA, 21 nt, Human
agauaucacagaggccuauaa

SEQ ID NO: 2144218 - RNA, 23 nt, Human
agauaucuugaaaugaaaguaua

SEQ ID NO: 2144219 - RNA, 15 nt, Human
agaccagagcucugg

SEQ ID NO: 2144220 - RNA, 22 nt, Human
agaauugaucauuuucccccca

SEQ ID NO: 2144221 - RNA, 23 nt, Human
agaaaugacuuugaaaaccuggc

SEQ ID NO: 2144222 - RNA, 23 nt, Human
agaaaugaugauguggaagaacu

SEQ ID NO: 2144223 - RNA, 19 nt, Human
agaaauaaagagaagauau

SEQ ID NO: 2144224 - RNA, 20 nt, Human
aaacagcagaacuucugaaa

SEQ ID NO: 2144225 - RNA, 18 nt, Human
aaacauuuugucauauaa

SEQ ID NO: 2144226 - RNA, 17 nt, Human
aaaccagggagccccuu

SEQ ID NO: 2144227 - RNA, 13 nt, Human
aaaauaaaauaua

SEQ ID NO: 2144228 - RNA, 22 nt, Human
aaaauuauaucucaguaaacuu

SEQ ID NO: 2144229 - RNA, 12 nt, Human
aaaauucagaga

SEQ ID NO: 2144230 - RNA, 14 nt, Human
aaauaauuuuauga

SEQ ID NO: 2144231 - RNA, 23 nt, Human
aaauaugaaacauuuaaaauaua

SEQ ID NO: 2144232 - RNA, 16 nt, Human
aaauauuuggaaaaua

SEQ ID NO: 2144233 - RNA, 17 nt, Human
acuagcuggaauuuuuu

SEQ ID NO: 2144234 - RNA, 20 nt, Human
acucaccugcuggccccuca

SEQ ID NO: 2144235 - RNA, 15 nt, Human
acucauauauaucua

SEQ ID NO: 2144236 - RNA, 18 nt, Human
acucuguuccuucacauc

SEQ ID NO: 2144237 - RNA, 23 nt, Human
acuucuuuuuuuuuauuuuuaga

SEQ ID NO: 2144238 - RNA, 15 nt, Human
auuuccuaucauuuu

SEQ ID NO: 2144239 - RNA, 13 nt, Human
aaauugaaauaua

SEQ ID NO: 2144240 - RNA, 18 nt, Human
aaaugaacaucagaauuu

SEQ ID NO: 2144241 - RNA, 12 nt, Human
aaauguccucca

SEQ ID NO: 2144242 - RNA, 13 nt, Human
aaauguucuugca

SEQ ID NO: 2144243 - RNA, 18 nt, Human
acagcauugcuuucugaa

SEQ ID NO: 2144244 - RNA, 17 nt, Human
acauucuguaaaauguc

SEQ ID NO: 2144245 - RNA, 15 nt, Human
accucuuuucugcau

SEQ ID NO: 2144246 - RNA, 23 nt, Human
acuugucaggguauaaaaugaca

SEQ ID NO: 2144247 - RNA, 15 nt, Human
acugacauauaucua

SEQ ID NO: 2144248 - RNA, 15 nt, Human
acuguagauugcuuc

SEQ ID NO: 2144249 - RNA, 21 nt, Human
acuacacauauguauuccuga

SEQ ID NO: 2144250 - RNA, 17 nt, Human
acucuccuggaaauauu

SEQ ID NO: 2144251 - RNA, 18 nt, Human
agaaugccuugaagauau

SEQ ID NO: 2144252 - RNA, 14 nt, Human
agaauuuuuaaugu

SEQ ID NO: 2144253 - RNA, 20 nt, Human
agaacuagugguggcucuga

SEQ ID NO: 2144254 - RNA, 22 nt, Human
agaauaaauacuguuuuacugu

SEQ ID NO: 2144255 - RNA, 15 nt, Human
agacuuuuuuuauga

SEQ ID NO: 2144256 - RNA, 15 nt, Human
ccuuggacuguguuu

SEQ ID NO: 2144257 - RNA, 14 nt, Human
ccugagcucacuga

SEQ ID NO: 2144258 - RNA, 21 nt, Human
uuucaccaacuauagaaugua

SEQ ID NO: 2144259 - RNA, 16 nt, Human
uuuccuggcuacucca

SEQ ID NO: 2144260 - RNA, 17 nt, Human
uuucuuaaacaaaugua

SEQ ID NO: 2144261 - RNA, 14 nt, Human
uuuguauauauauu

SEQ ID NO: 2144262 - RNA, 13 nt, Human
uuuguuaaaaucu

SEQ ID NO: 2144263 - RNA, 14 nt, Human
uuuguuaaauauuu

SEQ ID NO: 2144264 - RNA, 14 nt, Human
uuuguuuuaaaauu

SEQ ID NO: 2144265 - RNA, 17 nt, Human
uuguuaaugaaaauguc

SEQ ID NO: 2144266 - RNA, 15 nt, Human
uuuaaaaauauaauu

SEQ ID NO: 2144267 - RNA, 16 nt, Human
uuuaaauauagaauuu

SEQ ID NO: 2144268 - RNA, 15 nt, Human
uuuaaggauaaauuu

SEQ ID NO: 2144269 - RNA, 17 nt, Human
uuuaauagaauauaauu

SEQ ID NO: 2144270 - RNA, 17 nt, Human
uuuacuucuuauacauu

SEQ ID NO: 2144271 - RNA, 15 nt, Human
uuuagaaauauaauu

SEQ ID NO: 2144272 - RNA, 19 nt, Human
uuuagauugaguaagauuu

SEQ ID NO: 2144273 - RNA, 20 nt, Human
uuuaguauauuuauauaauu

SEQ ID NO: 2144274 - RNA, 21 nt, Human
uuuauaaaauuggcaaaauua

SEQ ID NO: 2144275 - RNA, 16 nt, Human
uuuaugaguacuuuuu

SEQ ID NO: 2144276 - RNA, 16 nt, Human
cccuuugaccuuguuu

SEQ ID NO: 2144277 - RNA, 22 nt, Human
ccgagaucgcgccacugcacuc

SEQ ID NO: 2144278 - RNA, 22 nt, Human
gcuuauuuaauuaaaaaauuuc

SEQ ID NO: 2144279 - RNA, 18 nt, Human
gggaggaacacugcacuc

SEQ ID NO: 2144280 - RNA, 22 nt, Human
uugacacuauucacuaaaauua

SEQ ID NO: 2144281 - RNA, 13 nt, Human
uucuaaucuuuua

SEQ ID NO: 2144282 - RNA, 13 nt, Human
uucuacugcuucu

SEQ ID NO: 2144283 - RNA, 12 nt, Human
uucucugcuuca

SEQ ID NO: 2144284 - RNA, 12 nt, Human
uucuuucagugg

SEQ ID NO: 2144285 - RNA, 13 nt, Human
uugcauaaaauug

SEQ ID NO: 2144286 - RNA, 23 nt, Human
uugcauguaucuucuaagaauuu

SEQ ID NO: 2144287 - RNA, 18 nt, Human
uugagcuuggcagcugaa

SEQ ID NO: 2144288 - RNA, 15 nt, Human
uuggacaaucaugaa

SEQ ID NO: 2144289 - RNA, 13 nt, Human
uugucaaacugua

SEQ ID NO: 2144290 - RNA, 17 nt, Human
gggccacucugccucug

SEQ ID NO: 2144291 - RNA, 13 nt, Human
guaauugaacuua

SEQ ID NO: 2144292 - RNA, 21 nt, Human
guacaacuuuuuaccuaguac

SEQ ID NO: 2144293 - RNA, 18 nt, Human
uugacaauaauuucaggu

SEQ ID NO: 2144294 - RNA, 22 nt, Human
ccgagaucacgccacugcacuc

SEQ ID NO: 2144295 - RNA, 11 nt, Human
cccuuccucuu

SEQ ID NO: 2144296 - RNA, 16 nt, Human
ccugucuaaaaauuca

SEQ ID NO: 2144297 - RNA, 14 nt, Human
ccugugaaauacca

SEQ ID NO: 2144298 - RNA, 22 nt, Human
ccuuaaguaauguuaauucuua

SEQ ID NO: 2144299 - RNA, 20 nt, Human
ccugaauuuggccugcacua

SEQ ID NO: 2144300 - RNA, 14 nt, Human
gcuaauaaaauauc

SEQ ID NO: 2144301 - RNA, 20 nt, Human
ugccagaaagcauaaaauuc

SEQ ID NO: 2144302 - RNA, 23 nt, Human
ugucuccagacccccaccccuuc

SEQ ID NO: 2144303 - RNA, 16 nt, Human
uggauaggcacauaga

SEQ ID NO: 2144304 - RNA, 20 nt, Human
uggcacagcccaaagaagga

SEQ ID NO: 2144305 - RNA, 13 nt, Human
uuagauaucuuuu

SEQ ID NO: 2144306 - RNA, 21 nt, Human
uuaaaggggcagaaaaacucu

SEQ ID NO: 2144307 - RNA, 13 nt, Human
uuaaauuagauaa

SEQ ID NO: 2144308 - RNA, 16 nt, Human
uuaauuuaaucuuuuu

SEQ ID NO: 2144309 - RNA, 19 nt, Human
uuacaucuguuuuaaauuu

SEQ ID NO: 2144310 - RNA, 20 nt, Human
ugcugccuccccaacccugc

SEQ ID NO: 2144311 - RNA, 15 nt, Human
ugccugcaccccugc

SEQ ID NO: 2144312 - RNA, 20 nt, Human
ugcuauuuuacugucuuaau

SEQ ID NO: 2144313 - RNA, 22 nt, Human
ugggaaugcggcaagaaggaau

SEQ ID NO: 2144314 - RNA, 22 nt, Human
ugggacacuaauggggcgguga

SEQ ID NO: 2144315 - RNA, 18 nt, Human
ugggcaaaacccacagaa

SEQ ID NO: 2144316 - RNA, 15 nt, Human
uggugaugaaaugua

SEQ ID NO: 2144317 - RNA, 17 nt, Human
uggugauuuagcaggaa

SEQ ID NO: 2144318 - RNA, 19 nt, Human
uguaauaaaguauauaauu

SEQ ID NO: 2144319 - RNA, 16 nt, Human
uguacauauauauauu

SEQ ID NO: 2144320 - RNA, 14 nt, Human
uguauuuucuuuuu

SEQ ID NO: 2144321 - RNA, 18 nt, Human
ugucauuaaauaaaaauu

SEQ ID NO: 2144322 - RNA, 17 nt, Human
uucccauugaaaaugua

SEQ ID NO: 2144323 - RNA, 19 nt, Human
uuccccgugggccauggca

SEQ ID NO: 2144324 - RNA, 13 nt, Human
uugcuaagaaggg

SEQ ID NO: 2144325 - RNA, 23 nt, Human
uugcucauuuuuuaaaaaaugga

SEQ ID NO: 2144326 - RNA, 18 nt, Human
uuugauuuuuucaaauuu

SEQ ID NO: 2144327 - RNA, 23 nt, Human
uuuaaugcauguuaggaaaauuu

SEQ ID NO: 2144328 - RNA, 16 nt, Human
uuuaauuaaaaaauuu

SEQ ID NO: 2144329 - RNA, 20 nt, Human
uuuagauuuuaaucaaauuu

SEQ ID NO: 2144330 - RNA, 18 nt, Human
uuuaggaagauaaaaguu

SEQ ID NO: 2144331 - RNA, 16 nt, Human
uuuauaaaaaaaauga

SEQ ID NO: 2144332 - RNA, 22 nt, Human
uuuauauauuuaacuacaauuu

SEQ ID NO: 2144333 - RNA, 16 nt, Human
uuuauccaaucuuguu

SEQ ID NO: 2144334 - RNA, 22 nt, Human
uuuaugaaaugguuaagaauuu

SEQ ID NO: 2144335 - RNA, 14 nt, Human
uuuauguaaaauuu

SEQ ID NO: 2144336 - RNA, 13 nt, Human
uuuauuaaaaucu

SEQ ID NO: 2144337 - RNA, 18 nt, Human
uuuauucaagguaaaauu

SEQ ID NO: 2144338 - RNA, 13 nt, Human
uuucacaaaauuu

SEQ ID NO: 2144339 - RNA, 23 nt, Human
uuuccuuaaauuaucuaaaaucu

SEQ ID NO: 2144340 - RNA, 13 nt, Human
uuuccuucagugc

SEQ ID NO: 2144341 - RNA, 17 nt, Human
uucaagcauucuucaac

SEQ ID NO: 2144342 - RNA, 17 nt, Human
uucacauaaaauagauu

SEQ ID NO: 2144343 - RNA, 20 nt, Human
uucacuuguucuuaaacuuu

SEQ ID NO: 2144344 - RNA, 15 nt, Human
uucauagaaaaagua

SEQ ID NO: 2144345 - RNA, 22 nt, Human
uuaucaaaaaaaaaaaaaugug

SEQ ID NO: 2144346 - RNA, 11 nt, Human
uuauuagauaa

SEQ ID NO: 2144347 - RNA, 19 nt, Human
uuaggcagauugaaaagga

SEQ ID NO: 2144348 - RNA, 18 nt, Human
uuguacguuuaaagugua

SEQ ID NO: 2144349 - RNA, 13 nt, Human
uuguuuucagugu

SEQ ID NO: 2144350 - RNA, 21 nt, Human
uuuaaaaaaguuuaaaaugua

SEQ ID NO: 2144351 - RNA, 14 nt, Human
uuuaaauauagaau

SEQ ID NO: 2144352 - RNA, 22 nt, Human
uuuaaauuauaacuuaaaauau

SEQ ID NO: 2144353 - RNA, 21 nt, Human
uuuaaauucuuuuuuaaauuu

SEQ ID NO: 2144354 - RNA, 14 nt, Human
uucugcuucacauu

SEQ ID NO: 2144355 - RNA, 12 nt, Human
uuuauaaaauug

SEQ ID NO: 2144356 - RNA, 20 nt, Human
uuuauguugaccuaagauuu

SEQ ID NO: 2144357 - RNA, 17 nt, Human
uuuauguuguauagauu

SEQ ID NO: 2144358 - RNA, 17 nt, Human
uuuauucaagaaaagua

SEQ ID NO: 2144359 - RNA, 16 nt, Human
uuuauuucaaaauaua

SEQ ID NO: 2144360 - RNA, 19 nt, Human
uuucacaccugaaaauguu

SEQ ID NO: 2144361 - RNA, 22 nt, Human
uuucagaaagcuagaaagugua

SEQ ID NO: 2144362 - RNA, 14 nt, Human
uuucaguauaauuu

SEQ ID NO: 2144363 - RNA, 17 nt, Human
uuguuauuauaaaagua

SEQ ID NO: 2144364 - RNA, 13 nt, Human
uuuaaaaaaugua

SEQ ID NO: 2144365 - RNA, 22 nt, Human
uuucuacucucuuuuaauauuu

SEQ ID NO: 2144366 - RNA, 13 nt, Human
uuucugaaaauua

SEQ ID NO: 2144367 - RNA, 15 nt, Human
uuugauauuaaauuu

SEQ ID NO: 2144368 - RNA, 17 nt, Human
uuugaucaguauaauuu

SEQ ID NO: 2144369 - RNA, 18 nt, Human
ccauucucccucuuguuu

SEQ ID NO: 2144370 - RNA, 22 nt, Human
uuuguauugaaagcuuuuguua

SEQ ID NO: 2144371 - RNA, 21 nt, Human
gcauaaaauucuuaaaauaua

SEQ ID NO: 2144372 - RNA, 13 nt, Human
gccuguuuuaugu

SEQ ID NO: 2144373 - RNA, 16 nt, Human
gcccgaggcaccagug

SEQ ID NO: 2144374 - RNA, 14 nt, Human
uagccaaaaauguc

SEQ ID NO: 2144375 - RNA, 22 nt, Human
uagccaaauugaaaaaagaaau

SEQ ID NO: 2144376 - RNA, 21 nt, Human
uagcuauuuuuauggaauuuu

SEQ ID NO: 2144377 - RNA, 15 nt, Human
uaaaguguaaauccu

SEQ ID NO: 2144378 - RNA, 18 nt, Human
uaaauaaacacauagauu

SEQ ID NO: 2144379 - RNA, 18 nt, Human
uaaaaggucuaugcucau

SEQ ID NO: 2144380 - RNA, 22 nt, Human
uaaaauaaaguauauauagaau

SEQ ID NO: 2144381 - RNA, 13 nt, Human
uacaaauucaagc

SEQ ID NO: 2144382 - RNA, 20 nt, Human
uaacauggaagggaagaaaa

SEQ ID NO: 2144383 - RNA, 18 nt, Human
guuuuuccuccauaaauu

SEQ ID NO: 2144384 - RNA, 16 nt, Human
guggcgcgcaccugua

SEQ ID NO: 2144385 - RNA, 16 nt, Human
uccagaucagauucuu

SEQ ID NO: 2144386 - RNA, 16 nt, Human
uccagucucccaacuu

SEQ ID NO: 2144387 - RNA, 13 nt, Human
ucauuuauuuuuu

SEQ ID NO: 2144388 - RNA, 19 nt, Human
uccaaaugcccagcuuaaa

SEQ ID NO: 2144389 - RNA, 17 nt, Human
uccaaucagaucuuuau

SEQ ID NO: 2144390 - RNA, 17 nt, Human
uauguaaaauaaaauua

SEQ ID NO: 2144391 - RNA, 21 nt, Human
uauaauuguuuuuuaucuuuu

SEQ ID NO: 2144392 - RNA, 22 nt, Human
uauauuaaaaaugguaaaauug

SEQ ID NO: 2144393 - RNA, 13 nt, Human
ucaaacacagaga

SEQ ID NO: 2144394 - RNA, 13 nt, Human
ucaaacucuuaaa

SEQ ID NO: 2144395 - RNA, 20 nt, Human
ucaacccuuugccccaccuu

SEQ ID NO: 2144396 - RNA, 15 nt, Human
ucagcugaaccuggg

SEQ ID NO: 2144397 - RNA, 15 nt, Human
ucaguauaauuuuuu

SEQ ID NO: 2144398 - RNA, 23 nt, Human
ucaugagaaauuaccaaaauguc

SEQ ID NO: 2144399 - RNA, 13 nt, Human
gucauuuuuaugu

SEQ ID NO: 2144400 - RNA, 19 nt, Human
guaaauaagagauuuggag

SEQ ID NO: 2144401 - RNA, 16 nt, Human
guauuugaaaaauauu

SEQ ID NO: 2144402 - RNA, 16 nt, Human
guacuuuuggaaucua

SEQ ID NO: 2144403 - RNA, 21 nt, Human
ggagauaacaaucuguauaua

SEQ ID NO: 2144404 - RNA, 14 nt, Human
ggcagaaagcaaau

SEQ ID NO: 2144405 - RNA, 18 nt, Human
ggaauguacaugucaaua

SEQ ID NO: 2144406 - RNA, 19 nt, Human
cuugaaggaucuguuuuua

SEQ ID NO: 2144407 - RNA, 10 nt, Human
gaccaaucag

SEQ ID NO: 2144408 - RNA, 13 nt, Human
gacacuagaagau

SEQ ID NO: 2144409 - RNA, 15 nt, Human
gacagaucauagauu

SEQ ID NO: 2144410 - RNA, 19 nt, Human
gaagggaaaauauccaucc

SEQ ID NO: 2144411 - RNA, 13 nt, Human
gaagggacauauu

SEQ ID NO: 2144412 - RNA, 16 nt, Human
gaaguaacuugucuua

SEQ ID NO: 2144413 - RNA, 16 nt, Human
gaaguaugagggaaaa

SEQ ID NO: 2144414 - RNA, 19 nt, Human
gaauauuauuggaaaauuc

SEQ ID NO: 2144415 - RNA, 15 nt, Human
gaaauagccaaucau

SEQ ID NO: 2144416 - RNA, 14 nt, Human
cuuugucaaaagga

SEQ ID NO: 2144417 - RNA, 14 nt, Human
cuuuugacaacaaa

SEQ ID NO: 2144418 - RNA, 14 nt, Human
cuuuuguaaauaca

SEQ ID NO: 2144419 - RNA, 17 nt, Human
gaaaauuuuuguuuaua

SEQ ID NO: 2144420 - RNA, 15 nt, Human
cuuuccauguuguug

SEQ ID NO: 2144421 - RNA, 14 nt, Human
cucuguagaaauuc

SEQ ID NO: 2144422 - RNA, 16 nt, Human
cuguaucccaugagcc

SEQ ID NO: 2144423 - RNA, 14 nt, Human
cugugccaugugcc

SEQ ID NO: 2144424 - RNA, 16 nt, Human
cugugggguuuuguua

SEQ ID NO: 2144425 - RNA, 19 nt, Human
cuucagagggaaaguaaau

SEQ ID NO: 2144426 - RNA, 21 nt, Human
cuuccaggggagguucaguga

SEQ ID NO: 2144427 - RNA, 17 nt, Human
cuguacgucugacaggc

SEQ ID NO: 2144428 - RNA, 14 nt, Human
ucuuuauucuuuuu

SEQ ID NO: 2144429 - RNA, 18 nt, Human
ucuguuaaaauaaaauug

SEQ ID NO: 2144430 - RNA, 16 nt, Human
ugaaguuguagguaau

SEQ ID NO: 2144431 - RNA, 23 nt, Human
ugaauaaccacuuaaaaaauguc

SEQ ID NO: 2144432 - RNA, 12 nt, Human
ugagaaaauguc

SEQ ID NO: 2144433 - RNA, 14 nt, Human
ugaugcucccuccc

SEQ ID NO: 2144434 - RNA, 12 nt, Human
ugcaaaaaugua

SEQ ID NO: 2144435 - RNA, 14 nt, Human
ugcaauaaccuggg

SEQ ID NO: 2144436 - RNA, 16 nt, Human
cuacucugugucaggu

SEQ ID NO: 2144437 - RNA, 17 nt, Human
cuauauggaauugcuua

SEQ ID NO: 2144438 - RNA, 16 nt, Human
cuauucacuaaaauua

SEQ ID NO: 2144439 - RNA, 18 nt, Human
cucaucaucaacccuaaa

SEQ ID NO: 2144440 - RNA, 17 nt, Human
cggauugcauuagaaau

SEQ ID NO: 2144441 - RNA, 20 nt, Human
ucagcaaaaaaguacuuaaa

SEQ ID NO: 2144442 - RNA, 12 nt, Human
uugaacaaauga

SEQ ID NO: 2144443 - RNA, 16 nt, Human
uugacuagaaaauuua

SEQ ID NO: 2144444 - RNA, 12 nt, Human
uugagagagcaa

SEQ ID NO: 2144445 - RNA, 14 nt, Human
uugaugaaaaugua

SEQ ID NO: 2144446 - RNA, 10 nt, Human
uucacagagc

SEQ ID NO: 2144447 - RNA, 13 nt, Human
uucauagauugug

SEQ ID NO: 2144448 - RNA, 23 nt, Human
uucauaucacacuguuaaaaguu

SEQ ID NO: 2144449 - RNA, 22 nt, Human
uucauaucuauuuauuaaauuu

SEQ ID NO: 2144450 - RNA, 12 nt, Human
uucccugaucaa

SEQ ID NO: 2144451 - RNA, 23 nt, Human
uucucuuugguguacaaaaugga

SEQ ID NO: 2144452 - RNA, 11 nt, Human
uucugcuccac

SEQ ID NO: 2144453 - RNA, 12 nt, Human
ucucugcuccac

SEQ ID NO: 2144454 - RNA, 21 nt, Human
ucuauguggcuguaucuuguu

SEQ ID NO: 2144455 - RNA, 14 nt, Human
uccaggcaauggcc

SEQ ID NO: 2144456 - RNA, 14 nt, Human
uccccuucucugua

SEQ ID NO: 2144457 - RNA, 21 nt, Human
ucauuuucugccuaucuucuu

SEQ ID NO: 2144458 - RNA, 16 nt, Human
ucgauaucuucuuuuu

SEQ ID NO: 2144459 - RNA, 18 nt, Human
uggaguccgaugauucuc

SEQ ID NO: 2144460 - RNA, 14 nt, Human
uggcugugccucug

SEQ ID NO: 2144461 - RNA, 16 nt, Human
uggucugacccacugc

SEQ ID NO: 2144462 - RNA, 18 nt, Human
ugguagggggaaaaugug

SEQ ID NO: 2144463 - RNA, 18 nt, Human
uuacugaagguaaaauug

SEQ ID NO: 2144464 - RNA, 16 nt, Human
uuauacguuauagagu

SEQ ID NO: 2144465 - RNA, 17 nt, Human
uuauaugugaucuuugu

SEQ ID NO: 2144466 - RNA, 13 nt, Human
uuauuuuagauau

SEQ ID NO: 2144467 - RNA, 11 nt, Human
uucaaaauguc

SEQ ID NO: 2144468 - RNA, 22 nt, Human
uuaaauucacaauagaaacuca

SEQ ID NO: 2144469 - RNA, 21 nt, Human
uuaacagagacagauaacucu

SEQ ID NO: 2144470 - RNA, 13 nt, Human
uuaaucuuccaug

SEQ ID NO: 2144471 - RNA, 22 nt, Human
uuaauguuuccuuuaauuuuuu

SEQ ID NO: 2144472 - RNA, 16 nt, Human
ugugaagaaaaaugua

SEQ ID NO: 2144473 - RNA, 20 nt, Human
uguacauggaauaacaugua

SEQ ID NO: 2144474 - RNA, 15 nt, Human
uguauguuauagaua

SEQ ID NO: 2144475 - RNA, 13 nt, Human
uguuaaaaauguu

SEQ ID NO: 2144476 - RNA, 14 nt, Human
uguucugacccugc

SEQ ID NO: 2144477 - RNA, 22 nt, Human
ugcuccaccccacucacagaga

SEQ ID NO: 2144478 - RNA, 19 nt, Human
ugccugcccaggccccugc

SEQ ID NO: 2144479 - RNA, 20 nt, Human
ugcaauagagacuguagauu

SEQ ID NO: 2144480 - RNA, 20 nt, Human
ugacaucaagaaucuucugu

SEQ ID NO: 2144481 - RNA, 20 nt, Human
ugacaucgccaguaaaauua

SEQ ID NO: 2144482 - RNA, 15 nt, Human
ugagaccaaccuggg

SEQ ID NO: 2144483 - RNA, 21 nt, Human
ucuaaccagagcaagcuuuuu

SEQ ID NO: 2144484 - RNA, 18 nt, Human
ucuacucucuuuuaauau

SEQ ID NO: 2144485 - RNA, 16 nt, Human
ucagauggagcaugaa

SEQ ID NO: 2144486 - RNA, 17 nt, Human
ucgagaccagccuggcc

SEQ ID NO: 2144487 - RNA, 18 nt, Human
ucuccagaugagaguaca

SEQ ID NO: 2144488 - RNA, 23 nt, Human
ucuccuuugcaggcucauaggga

SEQ ID NO: 2144489 - RNA, 23 nt, Human
ucucuuauucaguaaaaaacaac

SEQ ID NO: 2144490 - RNA, 22 nt, Human
ugaaaguauaacugaguuaaau

SEQ ID NO: 2144491 - RNA, 21 nt, Human
uaguaauagguaggaaaauga

SEQ ID NO: 2144492 - RNA, 16 nt, Human
uaguaucuaacaugua

SEQ ID NO: 2144493 - RNA, 22 nt, Human
uaguccuuuacuaauccaaccc

SEQ ID NO: 2144494 - RNA, 21 nt, Human
uaucaguuugcuagcagaaau

SEQ ID NO: 2144495 - RNA, 14 nt, Human
uaucugaaaaugua

SEQ ID NO: 2144496 - RNA, 14 nt, Human
uaugaaucucuacg

SEQ ID NO: 2144497 - RNA, 20 nt, Human
ucaagaaagccagucuuaac

SEQ ID NO: 2144498 - RNA, 16 nt, Human
ucaaucucugauucug

SEQ ID NO: 2144499 - RNA, 22 nt, Human
uaaccacgucugucuucacagc

SEQ ID NO: 2144500 - RNA, 16 nt, Human
uaacuagggaagaaag

SEQ ID NO: 2144501 - RNA, 16 nt, Human
uaagaauuugguaaau

SEQ ID NO: 2144502 - RNA, 21 nt, Human
uaagcauuguuugcuuauugu

SEQ ID NO: 2144503 - RNA, 16 nt, Human
uaaauaaaauauaauu

SEQ ID NO: 2144504 - RNA, 13 nt, Human
uaaaugaaaaaau

SEQ ID NO: 2144505 - RNA, 13 nt, Human
uaaaugcuuaugu

SEQ ID NO: 2144506 - RNA, 16 nt, Human
uaaauuaggaauaaau

SEQ ID NO: 2144507 - RNA, 16 nt, Human
uaacaauaacuacugu

SEQ ID NO: 2144508 - RNA, 18 nt, Human
uaaaaccccaucucuaca

SEQ ID NO: 2144509 - RNA, 19 nt, Human
guucaggguuggccccugc

SEQ ID NO: 2144510 - RNA, 18 nt, Human
gguuaacagcugucuaug

SEQ ID NO: 2144511 - RNA, 21 nt, Human
guagauaaacucagaaauuua

SEQ ID NO: 2144512 - RNA, 23 nt, Human
guauauuuauaaauaaaaauauu

SEQ ID NO: 2144513 - RNA, 14 nt, Human
uuuaaaauauaauu

SEQ ID NO: 2144514 - RNA, 20 nt, Human
uuuaaacugaaugaacaacc

SEQ ID NO: 2144515 - RNA, 22 nt, Human
uuuaaauuagauaacaaaauuu

SEQ ID NO: 2144516 - RNA, 19 nt, Human
uuugacucuauuaaaaucu

SEQ ID NO: 2144517 - RNA, 20 nt, Human
uuugguggagauaaagauuu

SEQ ID NO: 2144518 - RNA, 18 nt, Human
uuuugggguacccacugc

SEQ ID NO: 2144519 - RNA, 13 nt, Human
uugacuuucaggu

SEQ ID NO: 2144520 - RNA, 14 nt, Human
uugauguguuaucu

SEQ ID NO: 2144521 - RNA, 14 nt, Human
uugcacaaaauaua

SEQ ID NO: 2144522 - RNA, 17 nt, Human
uugccucaguaaaauga

SEQ ID NO: 2144523 - RNA, 15 nt, Human
uugcucaaaaaauga

SEQ ID NO: 2144524 - RNA, 22 nt, Human
uugcuucuucccuuaaaauuua

SEQ ID NO: 2144525 - RNA, 14 nt, Human
uuggaaauuuguua

SEQ ID NO: 2144526 - RNA, 20 nt, Human
uugugaaaugaaaacaugua

SEQ ID NO: 2144527 - RNA, 17 nt, Human
uugguuucuagcaugaa

SEQ ID NO: 2144528 - RNA, 22 nt, Human
uuguaauuauuuuuaauaugua

SEQ ID NO: 2144529 - RNA, 14 nt, Human
uuguuuuaaaauua

SEQ ID NO: 2144530 - RNA, 18 nt, Human
uuuaaguauuuauauauu

SEQ ID NO: 2144531 - RNA, 20 nt, Human
uuuaaguguuguaaauauuu

SEQ ID NO: 2144532 - RNA, 14 nt, Human
uuuagcauaaaauu

SEQ ID NO: 2144533 - RNA, 14 nt, Human
uuuaugauauuuuu

SEQ ID NO: 2144534 - RNA, 21 nt, Human
uuuauuauguacaaauagauu

SEQ ID NO: 2144535 - RNA, 21 nt, Human
uuuauugaugugcaaaaauuu

SEQ ID NO: 2144536 - RNA, 17 nt, Human
uuucaaaauaaaaauga

SEQ ID NO: 2144537 - RNA, 18 nt, Human
uuucaauucaaaaaugua

SEQ ID NO: 2144538 - RNA, 16 nt, Human
uuucacauuaauauuu

SEQ ID NO: 2144539 - RNA, 15 nt, Human
uuuccuaaaagugua

SEQ ID NO: 2144540 - RNA, 22 nt, Human
uuucuacagcaaauuuauaauu

SEQ ID NO: 2144541 - RNA, 23 nt, Human
uuucuacagcaaauuuauaauuu

SEQ ID NO: 2144542 - RNA, 21 nt, Human
uuucuagcuaauggaaaauga

SEQ ID NO: 2144543 - RNA, 23 nt, Human
gcagagugcccagaacuggacuc

SEQ ID NO: 2144544 - RNA, 13 nt, Human
gccucacuccagg

SEQ ID NO: 2144545 - RNA, 15 nt, Human
gcaaguaaaaauaua

SEQ ID NO: 2144546 - RNA, 24 nt, Human
gcaauugugcucuucauuuaggau

SEQ ID NO: 2144547 - RNA, 19 nt, Human
gacuuuucgaccaauucaa

SEQ ID NO: 2144548 - RNA, 14 nt, Human
gacuucagcucugu

SEQ ID NO: 2144549 - RNA, 14 nt, Human
gaggucaacagaga

SEQ ID NO: 2144550 - RNA, 12 nt, Human
gaggucaagaga

SEQ ID NO: 2144551 - RNA, 17 nt, Human
gagguggaucacagagg

SEQ ID NO: 2144552 - RNA, 16 nt, Human
gagucgcaucucagug

SEQ ID NO: 2144553 - RNA, 19 nt, Human
gauaaggacgggaccauuu

SEQ ID NO: 2144554 - RNA, 17 nt, Human
aaaauuuuuguuuauaa

SEQ ID NO: 2144555 - RNA, 13 nt, Human
aaauuuucacaua

SEQ ID NO: 2144556 - RNA, 16 nt, Human
aacaaauaauuuuuaa

SEQ ID NO: 2144557 - RNA, 16 nt, Human
aacaaucuguauauaa

SEQ ID NO: 2144558 - RNA, 21 nt, Human
aacagaagcuuccauuccaag

SEQ ID NO: 2144559 - RNA, 12 nt, Human
aaauagaaauaa

SEQ ID NO: 2144560 - RNA, 22 nt, Human
aaaucagaguuuucauguauuu

SEQ ID NO: 2144561 - RNA, 13 nt, Human
aaaucuuuuuugu

SEQ ID NO: 2144562 - RNA, 23 nt, Human
aaauggcuggagugauucugaau

SEQ ID NO: 2144563 - RNA, 14 nt, Human
agaaauuuuucaga

SEQ ID NO: 2144564 - RNA, 14 nt, Human
agaaacuuguuaga

SEQ ID NO: 2144565 - RNA, 17 nt, Human
acucuucugaauugacu

SEQ ID NO: 2144566 - RNA, 16 nt, Human
accugcugagagaccc

SEQ ID NO: 2144567 - RNA, 14 nt, Human
acauuugaaaucua

SEQ ID NO: 2144568 - RNA, 22 nt, Human
aagcauaaaauucuuaaaauau

SEQ ID NO: 2144569 - RNA, 19 nt, Human
aagaucguucucugccuca

SEQ ID NO: 2144570 - RNA, 15 nt, Human
aacuuaauaguauuu

SEQ ID NO: 2144571 - RNA, 20 nt, Human
aacuuuaaaggauucuguau

SEQ ID NO: 2144572 - RNA, 11 nt, Human
aacuuuuaugc

SEQ ID NO: 2144573 - RNA, 17 nt, Human
aagaaagccagucuuaa

SEQ ID NO: 2144574 - RNA, 22 nt, Human
aagacaaugugaaaagaaaaau

SEQ ID NO: 2144575 - RNA, 19 nt, Human
aagauaugugaagaaaaau

SEQ ID NO: 2144576 - RNA, 15 nt, Human
aauaguguguucuga

SEQ ID NO: 2144577 - RNA, 13 nt, Human
aauaaaaaauaua

SEQ ID NO: 2144578 - RNA, 20 nt, Human
aacaugagaaacgcuuaugu

SEQ ID NO: 2144579 - RNA, 14 nt, Human
aacccaacaugacu

SEQ ID NO: 2144580 - RNA, 15 nt, Human
aacccuugcuugcaa

SEQ ID NO: 2144581 - RNA, 21 nt, Human
aagcagaauaguauuuuuaua

SEQ ID NO: 2144582 - RNA, 16 nt, Human
aagccacagacaauau

SEQ ID NO: 2144583 - RNA, 15 nt, Human
aagcuaauaaaauau

SEQ ID NO: 2144584 - RNA, 16 nt, Human
aaggacucuuccagag

SEQ ID NO: 2144585 - RNA, 20 nt, Human
aagucaugcguuuaaucaca

SEQ ID NO: 2144586 - RNA, 23 nt, Human
aagucucuauuuaaauucuuuuu

SEQ ID NO: 2144587 - RNA, 14 nt, Human
aagucucugugaau

SEQ ID NO: 2144588 - RNA, 14 nt, Human
aagugacuucacag

SEQ ID NO: 2144589 - RNA, 19 nt, Human
aaguguauuugaaaaauau

SEQ ID NO: 2144590 - RNA, 17 nt, Human
aacuuaaaaaaaugaca

SEQ ID NO: 2144591 - RNA, 17 nt, Human
aacuuauuuuaaaauau

SEQ ID NO: 2144592 - RNA, 21 nt, Human
aagaauguguuuaaacuuggu

SEQ ID NO: 2144593 - RNA, 15 nt, Human
aagaauuuuuuuuaa

SEQ ID NO: 2144594 - RNA, 23 nt, Human
aaccaccuggcccuuagaaauag

SEQ ID NO: 2144595 - RNA, 21 nt, Human
aaccgaaaggccaaauucccu

SEQ ID NO: 2144596 - RNA, 16 nt, Human
aaggcuuuauauuuuu

SEQ ID NO: 2144597 - RNA, 21 nt, Human
aagguuuccucaaacugugau

SEQ ID NO: 2144598 - RNA, 19 nt, Human
aaguaaugaauuuuuauga

SEQ ID NO: 2144599 - RNA, 21 nt, Human
aaguacauauuaggaaaauau

SEQ ID NO: 2144600 - RNA, 18 nt, Human
aaguacauuauuguuuau

SEQ ID NO: 2144601 - RNA, 21 nt, Human
aagucuuagacuugaaauacu

SEQ ID NO: 2144602 - RNA, 18 nt, Human
aaguguagguaucauuuu

SEQ ID NO: 2144603 - RNA, 22 nt, Human
aaguuuuguucuguccuggaau

SEQ ID NO: 2144604 - RNA, 20 nt, Human
aauguuuccuuuaauuuuuu

SEQ ID NO: 2144605 - RNA, 15 nt, Human
aauagcaaccuuuuu

SEQ ID NO: 2144606 - RNA, 22 nt, Human
aaucaaguuggcuucuaaucaa

SEQ ID NO: 2144607 - RNA, 16 nt, Human
aaucaggguuuuuaga

SEQ ID NO: 2144608 - RNA, 15 nt, Human
aaucuccuauuuuuu

SEQ ID NO: 2144609 - RNA, 14 nt, Human
aaucuucaguauuu

SEQ ID NO: 2144610 - RNA, 22 nt, Human
acaggauguuugcucagcuucu

SEQ ID NO: 2144611 - RNA, 15 nt, Human
acaguugggaaaaua

SEQ ID NO: 2144612 - RNA, 17 nt, Human
acaguugggaaaauaug

SEQ ID NO: 2144613 - RNA, 17 nt, Human
acauaugcaaaaauaua

SEQ ID NO: 2144614 - RNA, 20 nt, Human
acauauucauuuggaaauaa

SEQ ID NO: 2144615 - RNA, 20 nt, Human
acaucuuuuacauucugcaa

SEQ ID NO: 2144616 - RNA, 17 nt, Human
aauucagauauauuuuu

SEQ ID NO: 2144617 - RNA, 19 nt, Human
aauuccauaugcuguuuca

SEQ ID NO: 2144618 - RNA, 15 nt, Human
aauucucuauuuuuu

SEQ ID NO: 2144619 - RNA, 18 nt, Human
aauuguuuuuuaucuuuu

SEQ ID NO: 2144620 - RNA, 14 nt, Human
aauuuaaucuuuuu

SEQ ID NO: 2144621 - RNA, 14 nt, Human
aauuuuaucuguuu

SEQ ID NO: 2144622 - RNA, 17 nt, Human
acaaucaaaggaaaaua

SEQ ID NO: 2144623 - RNA, 14 nt, Human
uucccuuaaaauuu

SEQ ID NO: 2144624 - RNA, 21 nt, Human
uuaucacugacacaaaaagua

SEQ ID NO: 2144625 - RNA, 17 nt, Human
uuaucuuacaaagugua

SEQ ID NO: 2144626 - RNA, 21 nt, Human
uuauuaccagugaaucuuugu

SEQ ID NO: 2144627 - RNA, 13 nt, Human
uuauuauauaauu

SEQ ID NO: 2144628 - RNA, 15 nt, Human
uuccaugaaaaugca

SEQ ID NO: 2144629 - RNA, 21 nt, Human
ugaccucccagugaccccuga

SEQ ID NO: 2144630 - RNA, 16 nt, Human
ucuuuaacaucuucuu

SEQ ID NO: 2144631 - RNA, 19 nt, Human
ucuuuauugcucauuuuuu

SEQ ID NO: 2144632 - RNA, 20 nt, Human
ucuuuuaguuguaucucuuu

SEQ ID NO: 2144633 - RNA, 12 nt, Human
ugaaaucuuuuu

SEQ ID NO: 2144634 - RNA, 14 nt, Human
ucuuaggugcuucu

SEQ ID NO: 2144635 - RNA, 17 nt, Human
ucuugccacugccucuu

SEQ ID NO: 2144636 - RNA, 19 nt, Human
ugcuccagccaaccccugu

SEQ ID NO: 2144637 - RNA, 23 nt, Human
ugagcuccccaaaaaccucaccc

SEQ ID NO: 2144638 - RNA, 14 nt, Human
ugucuuuaaaagua

SEQ ID NO: 2144639 - RNA, 20 nt, Human
ugugaggagguggagagaca

SEQ ID NO: 2144640 - RNA, 21 nt, Human
uguucuggcccucaccccugc

SEQ ID NO: 2144641 - RNA, 16 nt, Human
uuacauuuuacuuuuu

SEQ ID NO: 2144642 - RNA, 14 nt, Human
uuagaguagcauga

SEQ ID NO: 2144643 - RNA, 13 nt, Human
uuaggagcaugag

SEQ ID NO: 2144644 - RNA, 15 nt, Human
uuauauaaauuuuuu

SEQ ID NO: 2144645 - RNA, 20 nt, Human
uuaauaaaacacuauuuuuu

SEQ ID NO: 2144646 - RNA, 23 nt, Human
uuaauugagaagcguauguuuuu

SEQ ID NO: 2144647 - RNA, 19 nt, Human
uggcaagaauguguuuaaa

SEQ ID NO: 2144648 - RNA, 17 nt, Human
ugggaaaauauguccau

SEQ ID NO: 2144649 - RNA, 15 nt, Human
ugggaugaugccuca

SEQ ID NO: 2144650 - RNA, 22 nt, Human
uguauuuuguuuuugucuuaaa

SEQ ID NO: 2144651 - RNA, 17 nt, Human
uguauuuuuaccuuuuu

SEQ ID NO: 2144652 - RNA, 13 nt, Human
cuuguuucagagu

SEQ ID NO: 2144653 - RNA, 17 nt, Human
auuuguuuucacuuuuu

SEQ ID NO: 2144654 - RNA, 14 nt, Human
auugcucauuuuuu

SEQ ID NO: 2144655 - RNA, 15 nt, Human
caaaaccauugcuuc

SEQ ID NO: 2144656 - RNA, 16 nt, Human
agaaauggugaaaaua

SEQ ID NO: 2144657 - RNA, 16 nt, Human
agaauguauuuuauau

SEQ ID NO: 2144658 - RNA, 17 nt, Human
agaaaauuuuuguuuau

SEQ ID NO: 2144659 - RNA, 21 nt, Human
agaaacaaacccguuuuauga

SEQ ID NO: 2144660 - RNA, 14 nt, Human
agauugcugcuucu

SEQ ID NO: 2144661 - RNA, 21 nt, Human
agauacaggaaaagcugcuga

SEQ ID NO: 2144662 - RNA, 14 nt, Human
aguuuuaguugcag

SEQ ID NO: 2144663 - RNA, 14 nt, Human
aguauccugcuucu

SEQ ID NO: 2144664 - RNA, 15 nt, Human
aguucagcugcuucu

SEQ ID NO: 2144665 - RNA, 13 nt, Human
aguucaucuuuug

SEQ ID NO: 2144666 - RNA, 14 nt, Human
auacauuuguaugu

SEQ ID NO: 2144667 - RNA, 18 nt, Human
auauguguuuuucacauu

SEQ ID NO: 2144668 - RNA, 15 nt, Human
aucuaauuucugaaa

SEQ ID NO: 2144669 - RNA, 20 nt, Human
aucuauauauguauaaauau

SEQ ID NO: 2144670 - RNA, 23 nt, Human
aggacccacuuccugaucccuca

SEQ ID NO: 2144671 - RNA, 20 nt, Human
agugaucugaacagaaauac

SEQ ID NO: 2144672 - RNA, 17 nt, Human
agugccguaacaacugu

SEQ ID NO: 2144673 - RNA, 18 nt, Human
aguggcuugaaaucuuuu

SEQ ID NO: 2144674 - RNA, 19 nt, Human
aguggcuugaaaucuuuuu

SEQ ID NO: 2144675 - RNA, 15 nt, Human
auuccauaauuccau

SEQ ID NO: 2144676 - RNA, 17 nt, Human
auugggauauucugaaa

SEQ ID NO: 2144677 - RNA, 19 nt, Human
auuuauugcacaaaauaua

SEQ ID NO: 2144678 - RNA, 17 nt, Human
auguauaaaauaaauau

SEQ ID NO: 2144679 - RNA, 18 nt, Human
auggcuggagugauucug

SEQ ID NO: 2144680 - RNA, 20 nt, Human
augaagacaauuuugauuua

SEQ ID NO: 2144681 - RNA, 13 nt, Human
augagugauucuu

SEQ ID NO: 2144682 - RNA, 20 nt, Human
augaucuggauccaccaaga

SEQ ID NO: 2144683 - RNA, 18 nt, Human
augcaaugccucuggaau

SEQ ID NO: 2144684 - RNA, 20 nt, Human
augcgcacaaggcugaccaa

SEQ ID NO: 2144685 - RNA, 12 nt, Human
caaagccuucau

SEQ ID NO: 2144686 - RNA, 21 nt, Human
caaagcguucacucccaaccu

SEQ ID NO: 2144687 - RNA, 16 nt, Human
augucuuauuuuuaga

SEQ ID NO: 2144688 - RNA, 23 nt, Human
ccauuuauaugugaucuuuguuu

SEQ ID NO: 2144689 - RNA, 21 nt, Human
cccaucaaaacuccugucuuu

SEQ ID NO: 2144690 - RNA, 12 nt, Human
ccuaucuucaua

SEQ ID NO: 2144691 - RNA, 20 nt, Human
ccuuguucuuuggaaauaca

SEQ ID NO: 2144692 - RNA, 22 nt, Human
cauauaguauguaaccuguuuu

SEQ ID NO: 2144693 - RNA, 13 nt, Human
cauauauuuguau

SEQ ID NO: 2144694 - RNA, 16 nt, Human
caggacagagaaauug

SEQ ID NO: 2144695 - RNA, 21 nt, Human
caggaguucgaggcugcaguc

SEQ ID NO: 2144696 - RNA, 23 nt, Human
cauugcuuguguaguagaaacua

SEQ ID NO: 2144697 - RNA, 23 nt, Human
cauuugaaaucuaugaaauauca

SEQ ID NO: 2144698 - RNA, 13 nt, Human
ccagccugcacua

SEQ ID NO: 2144699 - RNA, 13 nt, Human
ccaaguuccucua

SEQ ID NO: 2144700 - RNA, 22 nt, Human
cugagagcauguuuuaucauua

SEQ ID NO: 2144701 - RNA, 13 nt, Human
cugcaaagguaau

SEQ ID NO: 2144702 - RNA, 21 nt, Human
cuauagccuaggugacagagu

SEQ ID NO: 2144703 - RNA, 20 nt, Human
cucucaucacuuuucucuga

SEQ ID NO: 2144704 - RNA, 18 nt, Human
cuaauuuuuguauuuuuu

SEQ ID NO: 2144705 - RNA, 20 nt, Human
cuauuuuuacuaaucuuucu

SEQ ID NO: 2144706 - RNA, 16 nt, Human
cucaauaguaaaagau

SEQ ID NO: 2144707 - RNA, 15 nt, Human
cucaugcauugcuug

SEQ ID NO: 2144708 - RNA, 17 nt, Human
cuaacacuggccccuag

SEQ ID NO: 2144709 - RNA, 15 nt, Human
cguacauucaauguu

SEQ ID NO: 2144710 - RNA, 21 nt, Human
cgaauagcugggacuacaggu

SEQ ID NO: 2144711 - RNA, 21 nt, Human
ccuggugaggaagcuccaguc

SEQ ID NO: 2144712 - RNA, 22 nt, Human
ccuaaucccugggcauugcuuu

SEQ ID NO: 2144713 - RNA, 20 nt, Human
cuugacucuuguuuucaguu

SEQ ID NO: 2144714 - RNA, 23 nt, Human
cucaacccucccucagccccucu

SEQ ID NO: 2144715 - RNA, 19 nt, Human
cucuacagaggccaugggc

SEQ ID NO: 2144716 - RNA, 15 nt, Human
cucugcugccauggc

SEQ ID NO: 2144717 - RNA, 21 nt, Human
cuagggagggggaaagaagga

SEQ ID NO: 2144718 - RNA, 15 nt, Human
cuaguuccuucaugu

SEQ ID NO: 2144719 - RNA, 16 nt, Human
cuauggucaucuuuuu

SEQ ID NO: 2144720 - RNA, 15 nt, Human
cuaaauuaacuuuuu

SEQ ID NO: 2144721 - RNA, 14 nt, Human
cucuuuucaaugug

SEQ ID NO: 2144722 - RNA, 21 nt, Human
cucuccagaaagcucaucuca

SEQ ID NO: 2144723 - RNA, 23 nt, Human
cugcuaggugggccagccccucc

SEQ ID NO: 2144724 - RNA, 17 nt, Human
cuuuguccuuuuuguua

SEQ ID NO: 2144725 - RNA, 12 nt, Human
cuuuuguuguug

SEQ ID NO: 2144726 - RNA, 14 nt, Human
ccgugggccauggc

SEQ ID NO: 2144727 - RNA, 16 nt, Human
ccauguacuguaguuu

SEQ ID NO: 2144728 - RNA, 21 nt, Human
ccauuuuuauuucaaaauaua

SEQ ID NO: 2144729 - RNA, 12 nt, Human
cccaucuuguuu

SEQ ID NO: 2144730 - RNA, 19 nt, Human
cccaugcugaccuguguuu

SEQ ID NO: 2144731 - RNA, 19 nt, Human
ccacugaggagcuuuguuu

SEQ ID NO: 2144732 - RNA, 20 nt, Human
ccagcauaaauaucuucuga

SEQ ID NO: 2144733 - RNA, 14 nt, Human
cauuuuuaaauaca

SEQ ID NO: 2144734 - RNA, 20 nt, Human
cauuuuuauuucaaaauaua

SEQ ID NO: 2144735 - RNA, 18 nt, Human
cacagaucacagcuucag

SEQ ID NO: 2144736 - RNA, 19 nt, Human
caccuuucccaucuuccaa

SEQ ID NO: 2144737 - RNA, 15 nt, Human
cacagaaguagcucu

SEQ ID NO: 2144738 - RNA, 16 nt, Human
caacuaugauuuggaa

SEQ ID NO: 2144739 - RNA, 13 nt, Human
caauauuccugaa

SEQ ID NO: 2144740 - RNA, 16 nt, Human
cagaaaucuagaagac

SEQ ID NO: 2144741 - RNA, 16 nt, Human
cagaugauucuauguc

SEQ ID NO: 2144742 - RNA, 12 nt, Human
caugagaaauua

SEQ ID NO: 2144743 - RNA, 22 nt, Human
cauuaucuugucacuguaguuu

SEQ ID NO: 2144744 - RNA, 18 nt, Human
cauugcuuucugaaauua

SEQ ID NO: 2144745 - RNA, 20 nt, Human
cauuguaccaugaaauaucc

SEQ ID NO: 2144746 - RNA, 13 nt, Human
cauuuaaaauaua

SEQ ID NO: 2144747 - RNA, 23 nt, Human
cagggcucugugaccaggaagga

SEQ ID NO: 2144748 - RNA, 16 nt, Human
ccagcaauauaucuga

SEQ ID NO: 2144749 - RNA, 20 nt, Human
cagagggguggguuccucuu

SEQ ID NO: 2144750 - RNA, 21 nt, Human
caauuuauugcacaaaauaua

SEQ ID NO: 2144751 - RNA, 13 nt, Human
cacauucuuguuu

SEQ ID NO: 2144752 - RNA, 14 nt, Human
caaauaagaaauuu

SEQ ID NO: 2144753 - RNA, 11 nt, Human
ccacugcacuc

SEQ ID NO: 2144754 - RNA, 14 nt, Human
cacucaaucucuga

SEQ ID NO: 2144755 - RNA, 16 nt, Human
auuuucuacucuuuuu

SEQ ID NO: 2144756 - RNA, 17 nt, Human
cacacuccccugcacug

SEQ ID NO: 2144757 - RNA, 20 nt, Human
cacaaggugcaaaucaaugc

SEQ ID NO: 2144758 - RNA, 17 nt, Human
cagacaccuugacaggg

SEQ ID NO: 2144759 - RNA, 20 nt, Human
caauuuauaaaauagaaaua

SEQ ID NO: 2144760 - RNA, 15 nt, Human
caggagaauugcuug

SEQ ID NO: 2144761 - RNA, 15 nt, Human
ccagcauaaauaucu

SEQ ID NO: 2144762 - RNA, 17 nt, Human
ccauguugccugucuuu

SEQ ID NO: 2144763 - RNA, 12 nt, Human
cauuauuuggau

SEQ ID NO: 2144764 - RNA, 19 nt, Human
cauucaaaaguugaaauua

SEQ ID NO: 2144765 - RNA, 16 nt, Human
cauuuuacuguacaga

SEQ ID NO: 2144766 - RNA, 17 nt, Human
cauauaccagcaauaua

SEQ ID NO: 2144767 - RNA, 19 nt, Human
cauauaccagcaauauauc

SEQ ID NO: 2144768 - RNA, 14 nt, Human
cagugcaagaagga

SEQ ID NO: 2144769 - RNA, 14 nt, Human
caguucaucuuuug

SEQ ID NO: 2144770 - RNA, 16 nt, Human
auuguauggaaauaua

SEQ ID NO: 2144771 - RNA, 14 nt, Human
auugcgaaucuuuu

SEQ ID NO: 2144772 - RNA, 20 nt, Human
auucuuacauuuuacuuuuu

SEQ ID NO: 2144773 - RNA, 24 nt, Human
auuagagaaauauaguucacaaug

SEQ ID NO: 2144774 - RNA, 17 nt, Human
auuacaucuuucacauu

SEQ ID NO: 2144775 - RNA, 15 nt, Human
caauaaagccuucaa

SEQ ID NO: 2144776 - RNA, 15 nt, Human
caaauuuguaaacuu

SEQ ID NO: 2144777 - RNA, 15 nt, Human
caacaguuccuucag

SEQ ID NO: 2144778 - RNA, 18 nt, Human
ccauagcaagauugcuua

SEQ ID NO: 2144779 - RNA, 18 nt, Human
cacuuaccucucuguguu

SEQ ID NO: 2144780 - RNA, 20 nt, Human
cagacccccucuagaaauuu

SEQ ID NO: 2144781 - RNA, 15 nt, Human
cagaaucauugcuua

SEQ ID NO: 2144782 - RNA, 13 nt, Human
cagugcuuccaag

SEQ ID NO: 2144783 - RNA, 22 nt, Human
caucccugaggcuggacuccag

SEQ ID NO: 2144784 - RNA, 21 nt, Human
caucuaccuuuucucuucauu

SEQ ID NO: 2144785 - RNA, 17 nt, Human
cauggacagaagaaggc

SEQ ID NO: 2144786 - RNA, 16 nt, Human
cauggacuaagaacga

SEQ ID NO: 2144787 - RNA, 23 nt, Human
aauaguuuauaaaugugaacuua

SEQ ID NO: 2144788 - RNA, 14 nt, Human
aauauaauaaauau

SEQ ID NO: 2144789 - RNA, 16 nt, Human
aauauguauuuuaugu

SEQ ID NO: 2144790 - RNA, 16 nt, Human
aaucauugaaguauuu

SEQ ID NO: 2144791 - RNA, 15 nt, Human
aauccuggauuuuuu

SEQ ID NO: 2144792 - RNA, 12 nt, Human
aauuuugauuca

SEQ ID NO: 2144793 - RNA, 12 nt, Human
aaugaucuuuuc

SEQ ID NO: 2144794 - RNA, 15 nt, Human
aaugaugugauacaa

SEQ ID NO: 2144795 - RNA, 14 nt, Human
aauuagagaaauau

SEQ ID NO: 2144796 - RNA, 23 nt, Human
aauuauuaccagugaaucuuugu

SEQ ID NO: 2144797 - RNA, 17 nt, Human
aauuauuucagaaaugu

SEQ ID NO: 2144798 - RNA, 14 nt, Human
aauuccacuggacu

SEQ ID NO: 2144799 - RNA, 21 nt, Human
aauuccugguuugaagaaaua

SEQ ID NO: 2144800 - RNA, 14 nt, Human
aauucuaacuuuuu

SEQ ID NO: 2144801 - RNA, 14 nt, Human
aauugacuguauuu

SEQ ID NO: 2144802 - RNA, 21 nt, Human
aauugagaagcguauguuuuu

SEQ ID NO: 2144803 - RNA, 12 nt, Human
acuacuguguuc

SEQ ID NO: 2144804 - RNA, 16 nt, Human
acuaguguuuuuuaga

SEQ ID NO: 2144805 - RNA, 14 nt, Human
accuugacuugauu

SEQ ID NO: 2144806 - RNA, 20 nt, Human
aaaagugaucaauaaaaugu

SEQ ID NO: 2144807 - RNA, 17 nt, Human
aaaauguaggguuauaa

SEQ ID NO: 2144808 - RNA, 23 nt, Human
acaauuuauaaaauagaaauaua

SEQ ID NO: 2144809 - RNA, 12 nt, Human
acaguguacagu

SEQ ID NO: 2144810 - RNA, 23 nt, Human
acauacaggaagguagaaauauc

SEQ ID NO: 2144811 - RNA, 13 nt, Human
acauaugaaaaua

SEQ ID NO: 2144812 - RNA, 14 nt, Human
acauaugaaaauac

SEQ ID NO: 2144813 - RNA, 14 nt, Human
acaucuggaaaaua

SEQ ID NO: 2144814 - RNA, 17 nt, Human
accacagcaggugucau

SEQ ID NO: 2144815 - RNA, 20 nt, Human
acccuccgauuguuccugaa

SEQ ID NO: 2144816 - RNA, 13 nt, Human
acagcauugcuuu

SEQ ID NO: 2144817 - RNA, 15 nt, Human
ucuccucucucugua

SEQ ID NO: 2144818 - RNA, 20 nt, Human
ucuaagaauuuuaucuguuu

SEQ ID NO: 2144819 - RNA, 17 nt, Human
ucuauucugaucuuauu

SEQ ID NO: 2144820 - RNA, 18 nt, Human
ucuauuuaaauucuuuuu

SEQ ID NO: 2144821 - RNA, 17 nt, Human
uauugccugagagcaca

SEQ ID NO: 2144822 - RNA, 16 nt, Human
uaucucgaacauggaa

SEQ ID NO: 2144823 - RNA, 12 nt, Human
guuuuuuuuagu

SEQ ID NO: 2144824 - RNA, 22 nt, Human
uagccagguaaugugaauaaau

SEQ ID NO: 2144825 - RNA, 19 nt, Human
uagcuagaggaaccaaccc

SEQ ID NO: 2144826 - RNA, 16 nt, Human
ucauugcgaaucuuuu

SEQ ID NO: 2144827 - RNA, 19 nt, Human
uccauguuggcuagccucu

SEQ ID NO: 2144828 - RNA, 16 nt, Human
uccauuucaucuauuu

SEQ ID NO: 2144829 - RNA, 23 nt, Human
gucaucuuuuucucuaaaauagc

SEQ ID NO: 2144830 - RNA, 19 nt, Human
guuauuagggugguauuua

SEQ ID NO: 2144831 - RNA, 21 nt, Human
aucugcuuaguagagcuuuuu

SEQ ID NO: 2144832 - RNA, 22 nt, Human
aguuuagaggaaaaaaaugacu

SEQ ID NO: 2144833 - RNA, 22 nt, Human
auagaguugggacaauugcuua

SEQ ID NO: 2144834 - RNA, 15 nt, Human
auagauucaccugua

SEQ ID NO: 2144835 - RNA, 12 nt, Human
auuaugauucuu

SEQ ID NO: 2144836 - RNA, 16 nt, Human
auuauuuucaccuguu

SEQ ID NO: 2144837 - RNA, 23 nt, Human
auucuaaccagagcaagcuuuuu

SEQ ID NO: 2144838 - RNA, 14 nt, Human
auucugguuacaug

SEQ ID NO: 2144839 - RNA, 17 nt, Human
augcaccaaaucaucuc

SEQ ID NO: 2144840 - RNA, 17 nt, Human
augcauugcuaaaauau

SEQ ID NO: 2144841 - RNA, 20 nt, Human
augugcucuccaaauuuuuu

SEQ ID NO: 2144842 - RNA, 16 nt, Human
aaauuagagaaauaua

SEQ ID NO: 2144843 - RNA, 20 nt, Human
aaauuuguuacuuaaauaua

SEQ ID NO: 2144844 - RNA, 18 nt, Human
aacaaauaauuuuuuagu

SEQ ID NO: 2144845 - RNA, 16 nt, Human
aacaauagaaaccugu

SEQ ID NO: 2144846 - RNA, 14 nt, Human
aaagauacauuugu

SEQ ID NO: 2144847 - RNA, 21 nt, Human
aaagucaaucuuaucauauuu

SEQ ID NO: 2144848 - RNA, 14 nt, Human
aaauaaaaaauaua

SEQ ID NO: 2144849 - RNA, 16 nt, Human
aaauaaaauuguacau

SEQ ID NO: 2144850 - RNA, 22 nt, Human
aaauauguucuuuaaaaauaua

SEQ ID NO: 2144851 - RNA, 20 nt, Human
aaauauguugaugaaaaaua

SEQ ID NO: 2144852 - RNA, 16 nt, Human
aaauauuauucuuaau

SEQ ID NO: 2144853 - RNA, 16 nt, Human
agacuguagaagaaag

SEQ ID NO: 2144854 - RNA, 16 nt, Human
agaguuaagaagaaaa

SEQ ID NO: 2144855 - RNA, 16 nt, Human
agauaugugaagaaaa

SEQ ID NO: 2144856 - RNA, 17 nt, Human
agaucacuuugcucuga

SEQ ID NO: 2144857 - RNA, 22 nt, Human
aacuauuacaccaaauaaauau

SEQ ID NO: 2144858 - RNA, 13 nt, Human
aacucagaaauuu

SEQ ID NO: 2144859 - RNA, 15 nt, Human
aacuugagcgugaau

SEQ ID NO: 2144860 - RNA, 23 nt, Human
aaggagccaauugauuucaacag

SEQ ID NO: 2144861 - RNA, 19 nt, Human
aagggaagugguucuuaga

SEQ ID NO: 2144862 - RNA, 18 nt, Human
aagggucaacaucuuuua

SEQ ID NO: 2144863 - RNA, 16 nt, Human
aaguaacuugucuuaa

SEQ ID NO: 2144864 - RNA, 17 nt, Human
aaguaguggagccccug

SEQ ID NO: 2144865 - RNA, 21 nt, Human
agucugauucccaagcucugc

SEQ ID NO: 2144866 - RNA, 18 nt, Human
aggaaacuagcuuacaug

SEQ ID NO: 2144867 - RNA, 18 nt, Human
aguagauuagaucuuuua

SEQ ID NO: 2144868 - RNA, 17 nt, Human
agggauuccccuaaccu

SEQ ID NO: 2144869 - RNA, 12 nt, Human
agggucucuacc

SEQ ID NO: 2144870 - RNA, 21 nt, Human
aggucgaccccaaagccccuu

SEQ ID NO: 2144871 - RNA, 20 nt, Human
agcagcuaccagguguucua

SEQ ID NO: 2144872 - RNA, 18 nt, Human
agauuucugauuuuaugu

SEQ ID NO: 2144873 - RNA, 21 nt, Human
aggccuguugcuuuuuuaugg

SEQ ID NO: 2144874 - RNA, 17 nt, Human
agcucacugaaaagacu

SEQ ID NO: 2144875 - RNA, 17 nt, Human
agcuuagugaaauuacu

SEQ ID NO: 2144876 - RNA, 23 nt, Human
aacaugaaguguguuuccuucag

SEQ ID NO: 2144877 - RNA, 13 nt, Human
aacauuuuuaagu

SEQ ID NO: 2144878 - RNA, 18 nt, Human
aacuagggaagauaauau

SEQ ID NO: 2144879 - RNA, 23 nt, Human
aacuucagagggaaaguaaauau

SEQ ID NO: 2144880 - RNA, 20 nt, Human
aagaaucuucuguuccacau

SEQ ID NO: 2144881 - RNA, 17 nt, Human
aagccaaaucaaaauau

SEQ ID NO: 2144882 - RNA, 16 nt, Human
aagcccuuaaaaauau

SEQ ID NO: 2144883 - RNA, 18 nt, Human
aagcuacuuuguuuuuaa

SEQ ID NO: 2144884 - RNA, 22 nt, Human
aagcugucccucacuguugaau

SEQ ID NO: 2144885 - RNA, 15 nt, Human
aagcuguuuccauag

SEQ ID NO: 2144886 - RNA, 12 nt, Human
aagcuuuuuagu

SEQ ID NO: 2144887 - RNA, 22 nt, Human
aagggauggaagaaguaaauau

SEQ ID NO: 2144888 - RNA, 19 nt, Human
aagucagacugcugggacu

SEQ ID NO: 2144889 - RNA, 22 nt, Human
aauaaguaucacacuguauaua

SEQ ID NO: 2144890 - RNA, 17 nt, Human
aauuauuaccagugaau

SEQ ID NO: 2144891 - RNA, 15 nt, Human
aauucauaucuauuu

SEQ ID NO: 2144892 - RNA, 18 nt, Human
aauuucuuuuuucuuuuu

SEQ ID NO: 2144893 - RNA, 20 nt, Human
acaaauaauuuuuaaauaua

SEQ ID NO: 2144894 - RNA, 13 nt, Human
acaaggguggcau

SEQ ID NO: 2144895 - RNA, 12 nt, Human
acaaugaaauua

SEQ ID NO: 2144896 - RNA, 20 nt, Human
acaguuuagagugaaauaua

SEQ ID NO: 2144897 - RNA, 21 nt, Human
acauccacaugauaccucuga

SEQ ID NO: 2144898 - RNA, 18 nt, Human
acucaauaaaaucaugua

SEQ ID NO: 2144899 - RNA, 22 nt, Human
acagcauugcuuucugaaauua

SEQ ID NO: 2144900 - RNA, 15 nt, Human
accugucgcccagug

SEQ ID NO: 2144901 - RNA, 21 nt, Human
aaauccuggauuuuuuucugu

SEQ ID NO: 2144902 - RNA, 15 nt, Human
aaauuugguucuaau

SEQ ID NO: 2144903 - RNA, 11 nt, Human
aaauuuuaugu

SEQ ID NO: 2144904 - RNA, 21 nt, Human
aacaacaaauaauuuuuuagu

SEQ ID NO: 2144905 - RNA, 15 nt, Human
aacauacuuauaugu

SEQ ID NO: 2144906 - RNA, 15 nt, Human
auacaaguuuucaua

SEQ ID NO: 2144907 - RNA, 15 nt, Human
auagcuuuauuuuuu

SEQ ID NO: 2144908 - RNA, 20 nt, Human
auauauguauaugcaauaua

SEQ ID NO: 2144909 - RNA, 12 nt, Human
auaucugugaaa

SEQ ID NO: 2144910 - RNA, 13 nt, Human
aucagagagcuca

SEQ ID NO: 2144911 - RNA, 22 nt, Human
agauauuaaaugauguuuuauu

SEQ ID NO: 2144912 - RNA, 14 nt, Human
agauguuuuuaugu

SEQ ID NO: 2144913 - RNA, 17 nt, Human
agauuuuaauuuugaau

SEQ ID NO: 2144914 - RNA, 21 nt, Human
agcaaauuuauaauuuuaaga

SEQ ID NO: 2144915 - RNA, 23 nt, Human
agcaagcuuuuuuauuuuuuaua

SEQ ID NO: 2144916 - RNA, 14 nt, Human
aaucuuuuuuaugu

SEQ ID NO: 2144917 - RNA, 16 nt, Human
acuguggaaaaauauu

SEQ ID NO: 2144918 - RNA, 17 nt, Human
acuuauuuuaaaauauu

SEQ ID NO: 2144919 - RNA, 19 nt, Human
acuugauggcuccgaacac

SEQ ID NO: 2144920 - RNA, 18 nt, Human
acuuggggaaauugcuuu

SEQ ID NO: 2144921 - RNA, 12 nt, Human
aaauaaaauaua

SEQ ID NO: 2144922 - RNA, 23 nt, Human
aaauaucaugcuccauuguucag

SEQ ID NO: 2144923 - RNA, 21 nt, Human
aaacauuccguuuacauuuua

SEQ ID NO: 2144924 - RNA, 16 nt, Human
aaacauuuucuugaau

SEQ ID NO: 2144925 - RNA, 21 nt, Human
aucucuacgcaaaaaauaacu

SEQ ID NO: 2144926 - RNA, 15 nt, Human
augaagaugaugcua

SEQ ID NO: 2144927 - RNA, 19 nt, Human
augaggagugaacauuugg

SEQ ID NO: 2144928 - RNA, 13 nt, Human
augauuguacaga

SEQ ID NO: 2144929 - RNA, 21 nt, Human
auauuuucugugcagccacug

SEQ ID NO: 2144930 - RNA, 19 nt, Human
auagcugacccagccccuu

SEQ ID NO: 2144931 - RNA, 17 nt, Human
auguuuuguuucugaaa

SEQ ID NO: 2144932 - RNA, 14 nt, Human
auggucaucuuuuu

SEQ ID NO: 2144933 - RNA, 10 nt, Human
augucuauaa

SEQ ID NO: 2144934 - RNA, 18 nt, Human
augcuguauuuucuuuuu

SEQ ID NO: 2144935 - RNA, 19 nt, Human
augcuuauguuagaaauaa

SEQ ID NO: 2144936 - RNA, 23 nt, Human
auuaucaagcuaauaaaauauca

SEQ ID NO: 2144937 - RNA, 14 nt, Human
auucuccugccuca

SEQ ID NO: 2144938 - RNA, 23 nt, Human
auugccuuuuccuguaucuauuu

SEQ ID NO: 2144939 - RNA, 15 nt, Human
agcucagcuuuuugu

SEQ ID NO: 2144940 - RNA, 14 nt, Human
aguuaaauuuucau

SEQ ID NO: 2144941 - RNA, 15 nt, Human
aggggaggguggcag

SEQ ID NO: 2144942 - RNA, 20 nt, Human
auaaagccuucaaacucccu

SEQ ID NO: 2144943 - RNA, 18 nt, Human
aguucuuagauaucuuuu

SEQ ID NO: 2144944 - RNA, 16 nt, Human
aguugcccaucuuguu

SEQ ID NO: 2144945 - RNA, 20 nt, Human
auaauaaacaguggaauaua

SEQ ID NO: 2144946 - RNA, 17 nt, Human
auaaugaauggacucaa

SEQ ID NO: 2144947 - RNA, 20 nt, Human
agcacuaaggugugcucuga

SEQ ID NO: 2144948 - RNA, 16 nt, Human
aggccucccucaaccc

SEQ ID NO: 2144949 - RNA, 15 nt, Human
aggcuguccuuaccc

SEQ ID NO: 2144950 - RNA, 15 nt, Human
aggaguuccuaacca

SEQ ID NO: 2144951 - RNA, 13 nt, Human
aggacucccuccu

SEQ ID NO: 2144952 - RNA, 18 nt, Human
cuaaaucuccuauuuuuu

SEQ ID NO: 2144953 - RNA, 16 nt, Human
cuacaauaucuucaua

SEQ ID NO: 2144954 - RNA, 12 nt, Human
cucaaaaugaca

SEQ ID NO: 2144955 - RNA, 17 nt, Human
cucccagggccagggcc

SEQ ID NO: 2144956 - RNA, 12 nt, Human
cucauuccugaa

SEQ ID NO: 2144957 - RNA, 13 nt, Human
cugaauguucuga

SEQ ID NO: 2144958 - RNA, 19 nt, Human
cucuauauuuagauuguua

SEQ ID NO: 2144959 - RNA, 14 nt, Human
cugauggaguaaau

SEQ ID NO: 2144960 - RNA, 23 nt, Human
cuucaccaauaaguauucugugu

SEQ ID NO: 2144961 - RNA, 18 nt, Human
gaaaaugaaaauuaggau

SEQ ID NO: 2144962 - RNA, 17 nt, Human
cuuuguuuguguuguug

SEQ ID NO: 2144963 - RNA, 23 nt, Human
cuuuugcuuuuccuuuguuuuua

SEQ ID NO: 2144964 - RNA, 12 nt, Human
cuugauguguua

SEQ ID NO: 2144965 - RNA, 16 nt, Human
gaucuugugacauauu

SEQ ID NO: 2144966 - RNA, 15 nt, Human
gauaugaaaaauaug

SEQ ID NO: 2144967 - RNA, 13 nt, Human
gagggaaaauguu

SEQ ID NO: 2144968 - RNA, 14 nt, Human
gccaaagaccaaau

SEQ ID NO: 2144969 - RNA, 21 nt, Human
gcaccaauaaagccuucaaac

SEQ ID NO: 2144970 - RNA, 17 nt, Human
gaacauguugguauuua

SEQ ID NO: 2144971 - RNA, 20 nt, Human
gacaaggccccagagacuca

SEQ ID NO: 2144972 - RNA, 17 nt, Human
gacauggugaaaauauu

SEQ ID NO: 2144973 - RNA, 12 nt, Human
gacuggaauuuu

SEQ ID NO: 2144974 - RNA, 24 nt, Human
gaccucguccucccccugccagug

SEQ ID NO: 2144975 - RNA, 15 nt, Human
gcccuuaaaaauaug

SEQ ID NO: 2144976 - RNA, 15 nt, Human
gcccuucauuuggag

SEQ ID NO: 2144977 - RNA, 16 nt, Human
gcccagggagaggcca

SEQ ID NO: 2144978 - RNA, 16 nt, Human
gcgaaucuuuuuuagc

SEQ ID NO: 2144979 - RNA, 12 nt, Human herpesvirus 7
guuucaaaaagu

SEQ ID NO: 2144980 - RNA, 20 nt, Human herpesvirus 7
caaagcuucuacaaacaauu

SEQ ID NO: 2144981 - RNA, 16 nt, Human herpesvirus 7
augucuaaaaguacag

SEQ ID NO: 2144982 - RNA, 19 nt, Human herpesvirus 7
uucauauggagaaggcaug

SEQ ID NO: 2144983 - RNA, 18 nt, Human herpesvirus 7
auggaaaguuuauagaac

SEQ ID NO: 2144984 - RNA, 14 nt, Human herpesvirus 7
uuuucaggaaaauc

SEQ ID NO: 2144985 - RNA, 16 nt, Human herpesvirus 7
aauuugaugaaauugu

SEQ ID NO: 2144986 - RNA, 15 nt, Human herpesvirus 7
caucucuguggcugu

SEQ ID NO: 2144987 - RNA, 18 nt, Human herpesvirus 7
uuugaacggaauaaacaa

SEQ ID NO: 2144988 - RNA, 14 nt, Human herpesvirus 7
auaucuaaagugga

SEQ ID NO: 2144989 - RNA, 15 nt, Human herpesvirus 7
uauacgcuuaaaauu

SEQ ID NO: 2144990 - RNA, 17 nt, Human herpesvirus 7
uagaaaaugcuguuuuu

SEQ ID NO: 2144991 - RNA, 13 nt, Human herpesvirus 7
cauuaugagauuu

SEQ ID NO: 2144992 - RNA, 21 nt, Human herpesvirus 7
auuuugugccccaaacuguau

SEQ ID NO: 2144993 - RNA, 23 nt, Human herpesvirus 7
ggaucaaaagcugcagcugaaag

SEQ ID NO: 2144994 - RNA, 16 nt, Human herpesvirus 7
cauuuuaccaaauaug

SEQ ID NO: 2144995 - RNA, 17 nt, Human herpesvirus 7
gcauugcauaucaugau

SEQ ID NO: 2144996 - RNA, 12 nt, Human herpesvirus 7
guuguuggaaau

SEQ ID NO: 2144997 - RNA, 17 nt, Human herpesvirus 7
uaagcaaauaaauugug

SEQ ID NO: 2144998 - RNA, 14 nt, Human herpesvirus 7
uacacucuguuacu

SEQ ID NO: 2144999 - RNA, 17 nt, Human herpesvirus 7
ugaaaucauuuugcugu

SEQ ID NO: 2145000 - RNA, 13 nt, Human herpesvirus 7
cauaaaauguaca

SEQ ID NO: 2145001 - RNA, 21 nt, Human herpesvirus 7
aguuugucucauugacauguu

SEQ ID NO: 2145002 - RNA, 14 nt, Human herpesvirus 7
cucguguggccuuc

SEQ ID NO: 2145003 - RNA, 14 nt, Human herpesvirus 7
cggacuuaugucca

SEQ ID NO: 2145004 - RNA, 20 nt, Human herpesvirus 7
uccaugcauauuugaacaua

SEQ ID NO: 2145005 - RNA, 22 nt, Human herpesvirus 7
aaaauacaauagugaacaugug

SEQ ID NO: 2145006 - RNA, 14 nt, Human herpesvirus 7
uuaagauacauuuu

SEQ ID NO: 2145007 - RNA, 15 nt, Human herpesvirus 7
aguuaauuuugcaga

SEQ ID NO: 2145008 - RNA, 23 nt, Human herpesvirus 7
aacuauaucaucaucuuuuugaa

SEQ ID NO: 2145009 - RNA, 15 nt, Human herpesvirus 7
aaaagccauaaaaug

SEQ ID NO: 2145010 - RNA, 15 nt, Human herpesvirus 7
uugagcaauugauuc

SEQ ID NO: 2145011 - RNA, 17 nt, Human herpesvirus 7
gagguccaauagaaaac

SEQ ID NO: 2145012 - RNA, 20 nt, Human herpesvirus 7
cgauaugaauuugaaacugg

SEQ ID NO: 2145013 - RNA, 17 nt, Human herpesvirus 7
uaaaauuaauguaauuu

SEQ ID NO: 2145014 - RNA, 22 nt, Human herpesvirus 7
aaguguaagcuuuuucuuccgc

SEQ ID NO: 2145015 - RNA, 16 nt, Human herpesvirus 7
ugaguguguuaaaugc

SEQ ID NO: 2145016 - RNA, 16 nt, Human herpesvirus 7
acugauauaaaugcuu

SEQ ID NO: 2145017 - RNA, 13 nt, Human herpesvirus 7
guacaaauguuuu

SEQ ID NO: 2145018 - RNA, 15 nt, Human herpesvirus 7
uucgcugaagaacau

SEQ ID NO: 2145019 - RNA, 19 nt, Human herpesvirus 7
uccgaaaagacaacaaggg

SEQ ID NO: 2145020 - RNA, 15 nt, Human herpesvirus 7
acaaaauguauacaa

SEQ ID NO: 2145021 - RNA, 17 nt, Human herpesvirus 7
ccacucuggaaauguca

SEQ ID NO: 2145022 - RNA, 13 nt, Human herpesvirus 7
auggaugugcaca

SEQ ID NO: 2145023 - RNA, 17 nt, Human herpesvirus 7
uuuucaaugcaacuuua

SEQ ID NO: 2145024 - RNA, 16 nt, Human herpesvirus 7
aaauuauuauuaguau

SEQ ID NO: 2145025 - RNA, 22 nt, Human herpesvirus 7
aaaaucagaaauguuacuuaag

SEQ ID NO: 2145026 - RNA, 21 nt, Human herpesvirus 7
aguugagcgcauggagcacaa

SEQ ID NO: 2145027 - RNA, 17 nt, Human herpesvirus 7
gauuucagaauuuccag

SEQ ID NO: 2145028 - RNA, 20 nt, Human herpesvirus 7
uauuccagauaugacaaauu

SEQ ID NO: 2145029 - RNA, 16 nt, Human herpesvirus 7
auuaauucuagcagcu

SEQ ID NO: 2145030 - RNA, 16 nt, Human herpesvirus 7
aauuaaugcauuggaa

SEQ ID NO: 2145031 - RNA, 23 nt, Human herpesvirus 7
uuacguacauggacauaagaauc

SEQ ID NO: 2145032 - RNA, 14 nt, Human herpesvirus 7
cuggcaauauccca

SEQ ID NO: 2145033 - RNA, 22 nt, Human herpesvirus 7
cuucuuuuuuugaacuguugcc

SEQ ID NO: 2145034 - RNA, 22 nt, Human herpesvirus 7
aaguagguaaaaaauaaauaua

SEQ ID NO: 2145035 - RNA, 17 nt, Human herpesvirus 7
uaacucugccagucucu

SEQ ID NO: 2145036 - RNA, 19 nt, Human herpesvirus 7
aacacauucugucuuggaa

SEQ ID NO: 2145037 - RNA, 19 nt, Human herpesvirus 7
uguuacaucauguuaaaaa

SEQ ID NO: 2145038 - RNA, 19 nt, Human herpesvirus 7
aggaaucgcaguguucauu

SEQ ID NO: 2145039 - RNA, 18 nt, Human herpesvirus 7
aaucauuuuuaaaaauaa

SEQ ID NO: 2145040 - RNA, 18 nt, Human herpesvirus 7
auauaugcauuauaucca

SEQ ID NO: 2145041 - RNA, 14 nt, Human herpesvirus 7
uuuauauuaauuug

SEQ ID NO: 2145042 - RNA, 19 nt, Human herpesvirus 7
uauucaaauuccuccugaa

SEQ ID NO: 2145043 - RNA, 13 nt, Human herpesvirus 7
uguaaguaaauuu

SEQ ID NO: 2145044 - RNA, 22 nt, Human herpesvirus 7
ccaacugaccagagauguuuua

SEQ ID NO: 2145045 - RNA, 21 nt, Human herpesvirus 7
uacaaugcugucucugaggag

SEQ ID NO: 2145046 - RNA, 18 nt, Human herpesvirus 7
caugggauuucuguaaaa

SEQ ID NO: 2145047 - RNA, 13 nt, Human herpesvirus 7
uugugcaauuugg

SEQ ID NO: 2145048 - RNA, 18 nt, Human herpesvirus 7
acuccauucgguuuucaa

SEQ ID NO: 2145049 - RNA, 21 nt, Human herpesvirus 7
acaaucgcggggaaaaaauga

SEQ ID NO: 2145050 - RNA, 21 nt, Human herpesvirus 7
uuuucuuccuagcauuaauuu

SEQ ID NO: 2145051 - RNA, 20 nt, Human herpesvirus 7
cauacuaaauuucuuaaaga

SEQ ID NO: 2145052 - RNA, 17 nt, Human herpesvirus 7
uaugugaaaauaaacag

SEQ ID NO: 2145053 - RNA, 12 nt, Human herpesvirus 7
uuaauuaucuac

SEQ ID NO: 2145054 - RNA, 20 nt, Human herpesvirus 7
aucauguuuaagaaaaguug

SEQ ID NO: 2145055 - RNA, 14 nt, Human herpesvirus 7
gaaaauaaacagga

SEQ ID NO: 2145056 - RNA, 21 nt, Human herpesvirus 7
uauuaacaagcacacuaaaaa

SEQ ID NO: 2145057 - RNA, 15 nt, Human herpesvirus 7
cauuugcuucuucua

SEQ ID NO: 2145058 - RNA, 17 nt, Human herpesvirus 7
guagaaaaaaacaauga

SEQ ID NO: 2145059 - RNA, 11 nt, Human herpesvirus 7
acgaauuauuu

SEQ ID NO: 2145060 - RNA, 15 nt, Human herpesvirus 7
gcaugcuuacaguga

SEQ ID NO: 2145061 - RNA, 18 nt, Human herpesvirus 7
cauagcacucauacuaau

SEQ ID NO: 2145062 - RNA, 19 nt, Human herpesvirus 7
agaucaauugaguuuacug

SEQ ID NO: 2145063 - RNA, 13 nt, Human herpesvirus 7
gggacaauuauuu

SEQ ID NO: 2145064 - RNA, 13 nt, Human herpesvirus 7
gguugucuguucu

SEQ ID NO: 2145065 - RNA, 21 nt, Human herpesvirus 7
auuaaacaaucuggacauuuc

SEQ ID NO: 2145066 - RNA, 16 nt, Human herpesvirus 7
gcucagcuagaaugug

SEQ ID NO: 2145067 - RNA, 21 nt, Human herpesvirus 7
acgauuugguguacuacauau

SEQ ID NO: 2145068 - RNA, 20 nt, Human herpesvirus 7
acuuucuauuguaugggaaa

SEQ ID NO: 2145069 - RNA, 14 nt, Human herpesvirus 7
acagugcuguacuu

SEQ ID NO: 2145070 - RNA, 17 nt, Human herpesvirus 7
ugcaacucuucuucaga

SEQ ID NO: 2145071 - RNA, 20 nt, Human herpesvirus 7
auuuccguuguuaaaaauua

SEQ ID NO: 2145072 - RNA, 21 nt, Human herpesvirus 7
gacuuccucucguguggccuu

SEQ ID NO: 2145073 - RNA, 19 nt, Human herpesvirus 7
auuuuuuaaagaaaagcuu

SEQ ID NO: 2145074 - RNA, 16 nt, Human herpesvirus 7
acucaaaacagaacuu

SEQ ID NO: 2145075 - RNA, 15 nt, Human herpesvirus 7
acaguugcuugugaa

SEQ ID NO: 2145076 - RNA, 15 nt, Human herpesvirus 7
uucaguaaauucuuc

SEQ ID NO: 2145077 - RNA, 23 nt, Human herpesvirus 7
uuggaguaaucaauaaaauuaaa

SEQ ID NO: 2145078 - RNA, 18 nt, Human herpesvirus 7
cugcagcugaaagcgcaa

SEQ ID NO: 2145079 - RNA, 19 nt, Human herpesvirus 7
aacaaguagaaaaugcugu

SEQ ID NO: 2145080 - RNA, 22 nt, Human herpesvirus 7
acuguaauauaauuauuuuaaa

SEQ ID NO: 2145081 - RNA, 21 nt, Human herpesvirus 7
gcagacauugaagauuguuua

SEQ ID NO: 2145082 - RNA, 11 nt, Human herpesvirus 7
cuuacagugaa

SEQ ID NO: 2145083 - RNA, 24 nt, Human herpesvirus 7
cauuucaaaaucagaaauguuacu

SEQ ID NO: 2145084 - RNA, 21 nt, Human herpesvirus 7
uuucuggaauguugguuuaua

SEQ ID NO: 2145085 - RNA, 15 nt, Human herpesvirus 7
auguucaaauaugca

SEQ ID NO: 2145086 - RNA, 20 nt, Human herpesvirus 7
cuauccagaacauuuauuuu

SEQ ID NO: 2145087 - RNA, 15 nt, Human herpesvirus 7
uuugugcugugucaa

SEQ ID NO: 2145088 - RNA, 15 nt, Human herpesvirus 7
uauauguguacagau

SEQ ID NO: 2145089 - RNA, 23 nt, Human herpesvirus 7
ugaaaacauuagcauugaaauca

SEQ ID NO: 2145090 - RNA, 13 nt, Human herpesvirus 7
ugcaaaacaaaau

SEQ ID NO: 2145091 - RNA, 14 nt, Human herpesvirus 7
ugacaaauuucagg

SEQ ID NO: 2145092 - RNA, 14 nt, Human herpesvirus 7
auugcuuucuaagu

SEQ ID NO: 2145093 - RNA, 20 nt, Human herpesvirus 7
gucuauuucaauuaaugcau

SEQ ID NO: 2145094 - RNA, 22 nt, Human herpesvirus 7
ucucauaauaucgguuaucuua

SEQ ID NO: 2145095 - RNA, 12 nt, Human herpesvirus 7
aacuaaguugaa

SEQ ID NO: 2145096 - RNA, 19 nt, Human herpesvirus 7
ugcaauuuucacaauggaa

SEQ ID NO: 2145097 - RNA, 19 nt, Human herpesvirus 7
augcaaucaacaaaaugac

SEQ ID NO: 2145098 - RNA, 22 nt, Human herpesvirus 7
uaaaaaucucagcucuguaaua

SEQ ID NO: 2145099 - RNA, 12 nt, Human herpesvirus 7
aucuauuaaaua

SEQ ID NO: 2145100 - RNA, 21 nt, Human herpesvirus 7
uuccacgaucauuccguuuuu

SEQ ID NO: 2145101 - RNA, 15 nt, Human herpesvirus 7
ucaaguagaauacca

SEQ ID NO: 2145102 - RNA, 20 nt, Human herpesvirus 7
aauuuggugaagauucuuaa

SEQ ID NO: 2145103 - RNA, 18 nt, Human herpesvirus 7
cuauucucauagauuuca

SEQ ID NO: 2145104 - RNA, 13 nt, Human herpesvirus 7
aaguuuucuuaua

SEQ ID NO: 2145105 - RNA, 21 nt, Human herpesvirus 7
uguuacaaucgcggggaaaaa

SEQ ID NO: 2145106 - RNA, 17 nt, Human herpesvirus 7
uuaaauuauuauuagua

SEQ ID NO: 2145107 - RNA, 15 nt, Human herpesvirus 7
uaaaauagaaaaugu

SEQ ID NO: 2145108 - RNA, 20 nt, Human herpesvirus 7
uaaauuacgagauauuauua

SEQ ID NO: 2145109 - RNA, 10 nt, Human herpesvirus 7
acaaaacaag

SEQ ID NO: 2145110 - RNA, 23 nt, Human herpesvirus 7
uaacgugagggggacaauuauuu

SEQ ID NO: 2145111 - RNA, 20 nt, Human herpesvirus 7
gcugaaacucaucauugaag

SEQ ID NO: 2145112 - RNA, 18 nt, Human herpesvirus 7
aauuaagaaucauuugua

SEQ ID NO: 2145113 - RNA, 19 nt, Human herpesvirus 7
ucaaaagacgcuugcuauu

SEQ ID NO: 2145114 - RNA, 13 nt, Human herpesvirus 7
cuagaaaaacacu

SEQ ID NO: 2145115 - RNA, 17 nt, Human herpesvirus 7
uguaaugaauaaaaucu

SEQ ID NO: 2145116 - RNA, 20 nt, Human herpesvirus 7
uaaaaaaaccaggaacagau

SEQ ID NO: 2145117 - RNA, 13 nt, Human herpesvirus 7
aacagcgugucaa

SEQ ID NO: 2145118 - RNA, 19 nt, Human herpesvirus 7
acuaaauauggagcagcuu

SEQ ID NO: 2145119 - RNA, 13 nt, Human herpesvirus 7
aaaaaaacaauga

SEQ ID NO: 2145120 - RNA, 23 nt, Human herpesvirus 7
agaaauuguuccugugugcaaug

SEQ ID NO: 2145121 - RNA, 17 nt, Human herpesvirus 7
cauuagagcauauucca

SEQ ID NO: 2145122 - RNA, 18 nt, Human herpesvirus 7
auucauuugugaaauuga

SEQ ID NO: 2145123 - RNA, 21 nt, Human herpesvirus 7
gcugguaauaauaguggugaa

SEQ ID NO: 2145124 - RNA, 14 nt, Human herpesvirus 7
aaaacaacauacau

SEQ ID NO: 2145125 - RNA, 17 nt, Human herpesvirus 7
aguaacagguaaauugu

SEQ ID NO: 2145126 - RNA, 15 nt, Human herpesvirus 7
aauuuugauuccugu

SEQ ID NO: 2145127 - RNA, 23 nt, Human herpesvirus 7
guauuuauuuuuuccaugucaca

SEQ ID NO: 2145128 - RNA, 19 nt, Human herpesvirus 7
aguauuguaauaauuuaaa

SEQ ID NO: 2145129 - RNA, 16 nt, Human herpesvirus 7
uccaaucauaauuuuc

SEQ ID NO: 2145130 - RNA, 12 nt, Human herpesvirus 7
caaaacauuuca

SEQ ID NO: 2145131 - RNA, 21 nt, Human herpesvirus 7
ugaagagcuuuuuaaguaaau

SEQ ID NO: 2145132 - RNA, 14 nt, Human herpesvirus 7
acaaucaaacaugu

SEQ ID NO: 2145133 - RNA, 16 nt, Human herpesvirus 7
uacaauuacaaaaugu

SEQ ID NO: 2145134 - RNA, 19 nt, Human herpesvirus 7
ugacauuaguucuggccgu

SEQ ID NO: 2145135 - RNA, 14 nt, Human herpesvirus 7
agucaaucugugaa

SEQ ID NO: 2145136 - RNA, 15 nt, Human herpesvirus 7
acacuuauuugauua

SEQ ID NO: 2145137 - RNA, 15 nt, Human herpesvirus 7
gcaacaaugacuuua

SEQ ID NO: 2145138 - RNA, 23 nt, Human herpesvirus 7
agcuauuauaauguaagaaauuu

SEQ ID NO: 2145139 - RNA, 20 nt, Human herpesvirus 7
gccaguucuaucucaaaaca

SEQ ID NO: 2145140 - RNA, 19 nt, Human herpesvirus 7
uagcuuucaugauuucaau

SEQ ID NO: 2145141 - RNA, 22 nt, Human herpesvirus 7
aaacuauucgaaaauaucuucu

SEQ ID NO: 2145142 - RNA, 18 nt, Human herpesvirus 7
gugcguacacuguaagcu

SEQ ID NO: 2145143 - RNA, 18 nt, Human herpesvirus 7
auuuaaaguagcugaauu

SEQ ID NO: 2145144 - RNA, 18 nt, Human herpesvirus 7
uggaagacgccaauaaau

SEQ ID NO: 2145145 - RNA, 17 nt, Human herpesvirus 7
uaaaauagaaaauguca

SEQ ID NO: 2145146 - RNA, 14 nt, Human herpesvirus 7
auacuuuuuugguu

SEQ ID NO: 2145147 - RNA, 19 nt, Human herpesvirus 7
uucugagugauuuuucauu

SEQ ID NO: 2145148 - RNA, 15 nt, Human herpesvirus 7
augucagaguuuaaa

SEQ ID NO: 2145149 - RNA, 19 nt, Human herpesvirus 7
acuuacuuguguugugaaa

SEQ ID NO: 2145150 - RNA, 18 nt, Human herpesvirus 7
aaauaagaaaccagcuuu

SEQ ID NO: 2145151 - RNA, 17 nt, Human herpesvirus 7
aauuuuucgaucuguaa

SEQ ID NO: 2145152 - RNA, 23 nt, Human herpesvirus 7
acuaauaaaaauuacucaugaag

SEQ ID NO: 2145153 - RNA, 17 nt, Human herpesvirus 7
uaaugaaaaagccauaa

SEQ ID NO: 2145154 - RNA, 15 nt, Human herpesvirus 7
agguugcuucuucga

SEQ ID NO: 2145155 - RNA, 20 nt, Human herpesvirus 7
agauuuaaaguaagaaugga

SEQ ID NO: 2145156 - RNA, 16 nt, Human herpesvirus 7
agaacauguaguacaa

SEQ ID NO: 2145157 - RNA, 18 nt, Human herpesvirus 7
aaaaguuguuaagaaucu

SEQ ID NO: 2145158 - RNA, 15 nt, Human herpesvirus 7
gcaacagagaacacc

SEQ ID NO: 2145159 - RNA, 14 nt, Human herpesvirus 7
ugauaaucaagaaa

SEQ ID NO: 2145160 - RNA, 23 nt, Human herpesvirus 7
ucaguacaacgacauugaaacuc

SEQ ID NO: 2145161 - RNA, 13 nt, Human herpesvirus 7
caaucaaaaacug

SEQ ID NO: 2145162 - RNA, 13 nt, Human herpesvirus 7
aaaagaauuuucu

SEQ ID NO: 2145163 - RNA, 22 nt, Human herpesvirus 7
agacucacuccuugcauacuuu

SEQ ID NO: 2145164 - RNA, 22 nt, Human herpesvirus 7
aauaaauuuuucgaucuguaaa

SEQ ID NO: 2145165 - RNA, 13 nt, Human herpesvirus 7
cagaguuuaaagu

SEQ ID NO: 2145166 - RNA, 22 nt, Human herpesvirus 7
agcgugucaaaaaaaaaacaau

SEQ ID NO: 2145167 - RNA, 23 nt, Human herpesvirus 7
gaaaacaaaucugauaaauuaca

SEQ ID NO: 2145168 - RNA, 16 nt, Human herpesvirus 7
acauuccucauggcca

SEQ ID NO: 2145169 - RNA, 15 nt, Human herpesvirus 7
acuguccaacacaag

SEQ ID NO: 2145170 - RNA, 23 nt, Human herpesvirus 7
auuaauuuccacguuuuuuagcu

SEQ ID NO: 2145171 - RNA, 16 nt, Human herpesvirus 7
uauugaaaauuuauug

SEQ ID NO: 2145172 - RNA, 19 nt, Human herpesvirus 7
cauuaugagauuugccugc

SEQ ID NO: 2145173 - RNA, 17 nt, Human herpesvirus 7
uacauuaaacagcauuu

SEQ ID NO: 2145174 - RNA, 15 nt, Human herpesvirus 7
uuaauggaagaacaa

SEQ ID NO: 2145175 - RNA, 19 nt, Human herpesvirus 7
cacagaaacgucaggaaaa

SEQ ID NO: 2145176 - RNA, 20 nt, Human herpesvirus 7
aaucaagacgcuguaugcaa

SEQ ID NO: 2145177 - RNA, 22 nt, Human herpesvirus 7
aguguaggcaagaaggccacgc

SEQ ID NO: 2145178 - RNA, 16 nt, Human herpesvirus 7
ggacaauuauuuaaac

SEQ ID NO: 2145179 - RNA, 15 nt, Human herpesvirus 7
augcagacugcgcuu

SEQ ID NO: 2145180 - RNA, 14 nt, Human herpesvirus 7
cuucaaaaauguuu

SEQ ID NO: 2145181 - RNA, 17 nt, Human herpesvirus 7
caauauagaguaccaau

SEQ ID NO: 2145182 - RNA, 21 nt, Human herpesvirus 7
auuuuucauuuuuuucuuaua

SEQ ID NO: 2145183 - RNA, 23 nt, Human herpesvirus 7
cacauguacagacagaaugccag

SEQ ID NO: 2145184 - RNA, 17 nt, Human herpesvirus 7
gaaaaaaacaaaaucua

SEQ ID NO: 2145185 - RNA, 12 nt, Human herpesvirus 7
cgcuuucucaag

SEQ ID NO: 2145186 - RNA, 13 nt, Human herpesvirus 7
guucuaaauguac

SEQ ID NO: 2145187 - RNA, 22 nt, Human herpesvirus 7
aacaaagauugaagcacacacg

SEQ ID NO: 2145188 - RNA, 12 nt, Human herpesvirus 7
agauuucagaau

SEQ ID NO: 2145189 - RNA, 16 nt, Human herpesvirus 7
cuugacaccaacaucu

SEQ ID NO: 2145190 - RNA, 22 nt, Human herpesvirus 7
ucuacacaucuucaauguucga

SEQ ID NO: 2145191 - RNA, 14 nt, Human herpesvirus 7
cugaaucaaaaucc

SEQ ID NO: 2145192 - RNA, 14 nt, Human herpesvirus 7
uuuaauacaacaua

SEQ ID NO: 2145193 - RNA, 16 nt, Human herpesvirus 7
caaaucaaugugaagu

SEQ ID NO: 2145194 - RNA, 17 nt, Human herpesvirus 7
ucuuugacaaaaauguu

SEQ ID NO: 2145195 - RNA, 18 nt, Human herpesvirus 7
gcuucagaaauaacaaaa

SEQ ID NO: 2145196 - RNA, 13 nt, Human herpesvirus 7
ugaauuaauucuu

SEQ ID NO: 2145197 - RNA, 15 nt, Human herpesvirus 7
ugcguuacuucuguc

SEQ ID NO: 2145198 - RNA, 16 nt, Human herpesvirus 7
gaaacaaucccagaaa

SEQ ID NO: 2145199 - RNA, 19 nt, Human herpesvirus 7
acaugggauuucuguaaaa

SEQ ID NO: 2145200 - RNA, 20 nt, Human herpesvirus 7
cgguacauuuauguauuuua

SEQ ID NO: 2145201 - RNA, 23 nt, Human herpesvirus 7
aaugugucuuacaacuagaaaau

SEQ ID NO: 2145202 - RNA, 21 nt, Human herpesvirus 7
uuacgaaacaauuucacagac

SEQ ID NO: 2145203 - RNA, 13 nt, Human herpesvirus 7
acaaacuggauau

SEQ ID NO: 2145204 - RNA, 15 nt, Human herpesvirus 7
aaaauuugacauuug

SEQ ID NO: 2145205 - RNA, 16 nt, Human herpesvirus 7
auuucuaaauaugaug

SEQ ID NO: 2145206 - RNA, 15 nt, Human herpesvirus 7
gaacaucuugagaaa

SEQ ID NO: 2145207 - RNA, 20 nt, Human herpesvirus 7
acugcgcuuggcaaacaguc

SEQ ID NO: 2145208 - RNA, 13 nt, Human herpesvirus 7
guacuaaagccaa

SEQ ID NO: 2145209 - RNA, 16 nt, Human herpesvirus 7
cagugaguggaagcag

SEQ ID NO: 2145210 - RNA, 18 nt, Human herpesvirus 7
gcuauuauaauguaagaa

SEQ ID NO: 2145211 - RNA, 14 nt, Human herpesvirus 7
gugaaaauaacagg

SEQ ID NO: 2145212 - RNA, 21 nt, Human herpesvirus 7
uucgcuuaccuuuuuguuuuu

SEQ ID NO: 2145213 - RNA, 11 nt, Human herpesvirus 7
uauugcaauuu

SEQ ID NO: 2145214 - RNA, 22 nt, Human herpesvirus 7
caugauugguaaaaaauuacuu

SEQ ID NO: 2145215 - RNA, 12 nt, Human herpesvirus 7
accauuucugaa

SEQ ID NO: 2145216 - RNA, 22 nt, Human herpesvirus 7
ucaagaaauaaugaaggauggc

SEQ ID NO: 2145217 - RNA, 17 nt, Human herpesvirus 7
agugauugguagaaaug

SEQ ID NO: 2145218 - RNA, 13 nt, Human herpesvirus 7
uuaaaggaaauaa

SEQ ID NO: 2145219 - RNA, 14 nt, Human herpesvirus 7
cugauauaaaugcu

SEQ ID NO: 2145220 - RNA, 15 nt, Human herpesvirus 7
aauacaugaauuauc

SEQ ID NO: 2145221 - RNA, 13 nt, Human herpesvirus 7
caucuaugugcuc

SEQ ID NO: 2145222 - RNA, 22 nt, Human herpesvirus 7
auuucaaacguaaugcaaaaua

SEQ ID NO: 2145223 - RNA, 17 nt, Human herpesvirus 7
ucugauuuauauagcaa

SEQ ID NO: 2145224 - RNA, 15 nt, Human herpesvirus 7
auacguccaaaaauu

SEQ ID NO: 2145225 - RNA, 14 nt, Human herpesvirus 7
uuaagugaacuguu

SEQ ID NO: 2145226 - RNA, 17 nt, Human herpesvirus 7
caucauucuucucggag

SEQ ID NO: 2145227 - RNA, 11 nt, Human herpesvirus 7
auuucuguaaa

SEQ ID NO: 2145228 - RNA, 18 nt, Human herpesvirus 7
caaaagucgagaaaacac

SEQ ID NO: 2145229 - RNA, 21 nt, Human herpesvirus 7
auuuccucuggaaaagggaga

SEQ ID NO: 2145230 - RNA, 17 nt, Human herpesvirus 7
auagauuucagaauuuc

SEQ ID NO: 2145231 - RNA, 21 nt, Human herpesvirus 7
acagaaugugguaaaaaaguu

SEQ ID NO: 2145232 - RNA, 19 nt, Human herpesvirus 7
ugcucuuugucuuugcucu

SEQ ID NO: 2145233 - RNA, 16 nt, Human herpesvirus 7
gagucaacacauaucu

SEQ ID NO: 2145234 - RNA, 21 nt, Human herpesvirus 7
ucaucccaaaccaugauguua

SEQ ID NO: 2145235 - RNA, 18 nt, Human herpesvirus 7
gcaacuuuucuuaaacau

SEQ ID NO: 2145236 - RNA, 13 nt, Human herpesvirus 7
guucauaaaccug

SEQ ID NO: 2145237 - RNA, 15 nt, Human herpesvirus 7
aaaggauuugaaggu

SEQ ID NO: 2145238 - RNA, 12 nt, Human herpesvirus 7
uguguuggaaac

SEQ ID NO: 2145239 - RNA, 13 nt, Human herpesvirus 7
acauaucagauuu

SEQ ID NO: 2145240 - RNA, 20 nt, Human herpesvirus 7
cugcaaauuguaaauucucc

SEQ ID NO: 2145241 - RNA, 16 nt, Human herpesvirus 7
uacagacagaaugcca

SEQ ID NO: 2145242 - RNA, 17 nt, Human herpesvirus 7
uuauuuacccacauuuu

SEQ ID NO: 2145243 - RNA, 22 nt, Human herpesvirus 7
cuugaaaaagaauuuucugcuu

SEQ ID NO: 2145244 - RNA, 17 nt, Human herpesvirus 7
cgucuuuugauuuugcc

SEQ ID NO: 2145245 - RNA, 15 nt, Human herpesvirus 7
caaagauugaagcac

SEQ ID NO: 2145246 - RNA, 23 nt, Human herpesvirus 7
cugaucuaaaguauggaaaaaug

SEQ ID NO: 2145247 - RNA, 16 nt, Human herpesvirus 7
uuuacaaugcagccua

SEQ ID NO: 2145248 - RNA, 14 nt, Human herpesvirus 7
uaagccagauuuca

SEQ ID NO: 2145249 - RNA, 20 nt, Human herpesvirus 7
aucucucuuucuggaguuca

SEQ ID NO: 2145250 - RNA, 23 nt, Human herpesvirus 7
cuguuaguugggcaaacaguuuu

SEQ ID NO: 2145251 - RNA, 18 nt, Human herpesvirus 7
uggaucguagcaacagag

SEQ ID NO: 2145252 - RNA, 16 nt, Human herpesvirus 7
aacagagaacaccaua

SEQ ID NO: 2145253 - RNA, 17 nt, Human herpesvirus 7
guuccuauaugugaaau

SEQ ID NO: 2145254 - RNA, 14 nt, Human herpesvirus 7
cucucucuauuaca

SEQ ID NO: 2145255 - RNA, 24 nt, Human herpesvirus 7
caugcgaguuagacgucaacuuga

SEQ ID NO: 2145256 - RNA, 18 nt, Human herpesvirus 7
auaaaaagauauacauaa

SEQ ID NO: 2145257 - RNA, 21 nt, Human herpesvirus 7
cacuaucuccuaaaugaauuu

SEQ ID NO: 2145258 - RNA, 17 nt, Human herpesvirus 7
ccaauagaaaacaaauc

SEQ ID NO: 2145259 - RNA, 22 nt, Human herpesvirus 7
aaauuaaagcgagcuuucuuua

SEQ ID NO: 2145260 - RNA, 16 nt, Human herpesvirus 7
gacagcuguauaucua

SEQ ID NO: 2145261 - RNA, 16 nt, Human herpesvirus 7
uauuguaucuaugaaa

SEQ ID NO: 2145262 - RNA, 18 nt, Human herpesvirus 7
aaccgccauucuuuucaa

SEQ ID NO: 2145263 - RNA, 23 nt, Human herpesvirus 7
aauaguuuuacaaagaacaugua

SEQ ID NO: 2145264 - RNA, 19 nt, Human herpesvirus 7
aacuuugcaacaaaaucua

SEQ ID NO: 2145265 - RNA, 17 nt, Human herpesvirus 7
ugguguacuacauauua

SEQ ID NO: 2145266 - RNA, 13 nt, Human herpesvirus 7
uacauuuuucuau

SEQ ID NO: 2145267 - RNA, 15 nt, Human herpesvirus 7
agaauugauugaauu

SEQ ID NO: 2145268 - RNA, 12 nt, Human herpesvirus 7
acaaauacaguu

SEQ ID NO: 2145269 - RNA, 16 nt, Human herpesvirus 7
uguaaaaaaaaguugu

SEQ ID NO: 2145270 - RNA, 18 nt, Human herpesvirus 7
auaauccucugacauuug

SEQ ID NO: 2145271 - RNA, 17 nt, Human herpesvirus 7
cugacgaaaacugcaac

SEQ ID NO: 2145272 - RNA, 14 nt, Human herpesvirus 7
uuuucaaacaugau

SEQ ID NO: 2145273 - RNA, 23 nt, Human herpesvirus 7
uuuucuucuucuuuuuuugaacu

SEQ ID NO: 2145274 - RNA, 17 nt, Human herpesvirus 7
cccuggaacguccucug

SEQ ID NO: 2145275 - RNA, 13 nt, Human herpesvirus 7
uuuauccaucaaa

SEQ ID NO: 2145276 - RNA, 17 nt, Human herpesvirus 7
gaaaucaaaaauaccgg

SEQ ID NO: 2145277 - RNA, 12 nt, Human herpesvirus 7
aaauuaaauacu

SEQ ID NO: 2145278 - RNA, 17 nt, Human herpesvirus 7
aauucuucuacuucuag

SEQ ID NO: 2145279 - RNA, 22 nt, Human herpesvirus 7
uaagaaaaaucauuuuuaaaaa

SEQ ID NO: 2145280 - RNA, 16 nt, Human herpesvirus 7
auucugaauaaaagua

SEQ ID NO: 2145281 - RNA, 20 nt, Human herpesvirus 7
ucuauuagauaaugacaaac

SEQ ID NO: 2145282 - RNA, 13 nt, Human herpesvirus 7
auaccuguaugga

SEQ ID NO: 2145283 - RNA, 17 nt, Human herpesvirus 7
agaaacuaauaaaaauu

SEQ ID NO: 2145284 - RNA, 18 nt, Human herpesvirus 7
gacacaugcuuacagauc

SEQ ID NO: 2145285 - RNA, 15 nt, Human herpesvirus 7
cugaaauaaacauuu

SEQ ID NO: 2145286 - RNA, 22 nt, Human herpesvirus 7
aaaacacguccaagaaauaugc

SEQ ID NO: 2145287 - RNA, 20 nt, Human herpesvirus 7
uucaacugauauaaaugcuu

SEQ ID NO: 2145288 - RNA, 14 nt, Human herpesvirus 7
ucagaauuuccaga

SEQ ID NO: 2145289 - RNA, 22 nt, Human herpesvirus 7
uacaacuuuauggaacaugaaa

SEQ ID NO: 2145290 - RNA, 20 nt, Human herpesvirus 7
cuacaauuucuggcaauaaa

SEQ ID NO: 2145291 - RNA, 12 nt, Human herpesvirus 7
uuuuaauaaacg

SEQ ID NO: 2145292 - RNA, 17 nt, Human herpesvirus 7
auuauaaauguaacuuu

SEQ ID NO: 2145293 - RNA, 18 nt, Human herpesvirus 7
aucuucugaaucugcaaa

SEQ ID NO: 2145294 - RNA, 14 nt, Human herpesvirus 7
accuguauggaacc

SEQ ID NO: 2145295 - RNA, 13 nt, Human herpesvirus 7
caauuaaugcauu

SEQ ID NO: 2145296 - RNA, 20 nt, Human herpesvirus 7
acguucugaaacagucugaa

SEQ ID NO: 2145297 - RNA, 22 nt, Human herpesvirus 7
auuaacagcuccaagcuuaaau

SEQ ID NO: 2145298 - RNA, 13 nt, Human herpesvirus 7
auucuuuguacuu

SEQ ID NO: 2145299 - RNA, 21 nt, Human herpesvirus 7
aauuucaaacguaaugcaaaa

SEQ ID NO: 2145300 - RNA, 17 nt, Human herpesvirus 7
cuguucccacugggaca

SEQ ID NO: 2145301 - RNA, 21 nt, Human herpesvirus 7
cugcaauaugcauguguaaag

SEQ ID NO: 2145302 - RNA, 15 nt, Human herpesvirus 7
aaauauuuagagucg

SEQ ID NO: 2145303 - RNA, 15 nt, Human herpesvirus 7
cacguuuugcaaagu

SEQ ID NO: 2145304 - RNA, 21 nt, Human herpesvirus 7
ccaaauaaacguccauugauu

SEQ ID NO: 2145305 - RNA, 15 nt, Human herpesvirus 7
cacaucuucaauguu

SEQ ID NO: 2145306 - RNA, 22 nt, Human herpesvirus 7
acuauuugacuggguaggaaaa

SEQ ID NO: 2145307 - RNA, 16 nt, Human herpesvirus 7
caaugcauuggaaaaa

SEQ ID NO: 2145308 - RNA, 19 nt, Human herpesvirus 7
auauugucauaaaauuauc

SEQ ID NO: 2145309 - RNA, 21 nt, Human herpesvirus 7
auuuaaacagcguucaaucaa

SEQ ID NO: 2145310 - RNA, 16 nt, Human herpesvirus 7
aguucugacuaaagcu

SEQ ID NO: 2145311 - RNA, 18 nt, Human herpesvirus 7
ugaaaauguuuuugcuag

SEQ ID NO: 2145312 - RNA, 15 nt, Human herpesvirus 7
aggaugaaagugcau

SEQ ID NO: 2145313 - RNA, 19 nt, Human herpesvirus 7
accgauuauauucaaauaa

SEQ ID NO: 2145314 - RNA, 21 nt, Human herpesvirus 7
gcuugcauugcauaucaugau

SEQ ID NO: 2145315 - RNA, 15 nt, Human herpesvirus 7
aaauaauagaugucu

SEQ ID NO: 2145316 - RNA, 14 nt, Human herpesvirus 7
auuccauuuaaaug

SEQ ID NO: 2145317 - RNA, 14 nt, Human herpesvirus 7
gauuagcuuucagc

SEQ ID NO: 2145318 - RNA, 22 nt, Human herpesvirus 7
caaauugaaccuuaacauacug

SEQ ID NO: 2145319 - RNA, 14 nt, Human herpesvirus 7
auaaucaaaaaauu

SEQ ID NO: 2145320 - RNA, 22 nt, Human herpesvirus 7
auagucuacuaaggugucuucg

SEQ ID NO: 2145321 - RNA, 18 nt, Human herpesvirus 7
aacaucuuuauauguguu

SEQ ID NO: 2145322 - RNA, 13 nt, Human herpesvirus 7
gcacuccuagaaa

SEQ ID NO: 2145323 - RNA, 17 nt, Human herpesvirus 7
agaaccuaucaaaauuc

SEQ ID NO: 2145324 - RNA, 15 nt, Human herpesvirus 7
uuuguauacaacuuu

SEQ ID NO: 2145325 - RNA, 21 nt, Human herpesvirus 7
cucuuuuuuuuuauugccuug

SEQ ID NO: 2145326 - RNA, 13 nt, Human herpesvirus 7
cggauuaagagaa

SEQ ID NO: 2145327 - RNA, 12 nt, Human herpesvirus 7
guuuuauuccca

SEQ ID NO: 2145328 - RNA, 12 nt, Human herpesvirus 7
uagaaauuaaaa

SEQ ID NO: 2145329 - RNA, 14 nt, Human herpesvirus 7
uuacuuauuuuaaa

SEQ ID NO: 2145330 - RNA, 19 nt, Human herpesvirus 7
cuaauugcgcaguguuuaa

SEQ ID NO: 2145331 - RNA, 20 nt, Human herpesvirus 7
gaaucaucuuaaaaguacaa

SEQ ID NO: 2145332 - RNA, 18 nt, Human herpesvirus 7
acaagacagaaaugaauc

SEQ ID NO: 2145333 - RNA, 19 nt, Human herpesvirus 7
uggagauaguucgcaaugg

SEQ ID NO: 2145334 - RNA, 21 nt, Human herpesvirus 7
auaaucuugugaaguuugcug

SEQ ID NO: 2145335 - RNA, 21 nt, Human herpesvirus 7
agcaaauucacgcucucaauc

SEQ ID NO: 2145336 - RNA, 19 nt, Human herpesvirus 7
aacaucuuucauaacaaag

SEQ ID NO: 2145337 - RNA, 13 nt, Human herpesvirus 7
guccaagaaauau

SEQ ID NO: 2145338 - RNA, 23 nt, Human herpesvirus 7
uuuaaacagcguucaaucaaauu

SEQ ID NO: 2145339 - RNA, 20 nt, Human herpesvirus 7
guaucaugaaccauguuuua

SEQ ID NO: 2145340 - RNA, 16 nt, Human herpesvirus 7
agacauugaagauugu

SEQ ID NO: 2145341 - RNA, 12 nt, Human herpesvirus 7
uuguuaacauga

SEQ ID NO: 2145342 - RNA, 19 nt, Human herpesvirus 7
auauuagaacgagagacaa

SEQ ID NO: 2145343 - RNA, 18 nt, Human herpesvirus 7
gaaacuacgucaccaccg

SEQ ID NO: 2145344 - RNA, 16 nt, Human herpesvirus 7
uuauaauagaaauuaa

SEQ ID NO: 2145345 - RNA, 14 nt, Human herpesvirus 7
uuauauuuuaagua

SEQ ID NO: 2145346 - RNA, 19 nt, Human herpesvirus 7
aauaaaggaaagacaaacu

SEQ ID NO: 2145347 - RNA, 23 nt, Human herpesvirus 7
gccacuguugaugauuuaauaua

SEQ ID NO: 2145348 - RNA, 20 nt, Human herpesvirus 7
aaucuuuuauaaauaguuuc

SEQ ID NO: 2145349 - RNA, 23 nt, Human herpesvirus 7
agagucugugugugcaguguuuu

SEQ ID NO: 2145350 - RNA, 15 nt, Human herpesvirus 7
ucugccucuuggccu

SEQ ID NO: 2145351 - RNA, 18 nt, Human herpesvirus 7
auaacaauauuuaaagua

SEQ ID NO: 2145352 - RNA, 19 nt, Human herpesvirus 7
auuuuacaaaaagaauuga

SEQ ID NO: 2145353 - RNA, 22 nt, Human herpesvirus 7
auaucucuguuuugucucuuua

SEQ ID NO: 2145354 - RNA, 16 nt, Human herpesvirus 7
gaaaauaucuucugaa

SEQ ID NO: 2145355 - RNA, 15 nt, Human herpesvirus 7
acugagaaaaaugac

SEQ ID NO: 2145356 - RNA, 12 nt, Human herpesvirus 7
caaaagcuuacu

SEQ ID NO: 2145357 - RNA, 20 nt, Human herpesvirus 7
aaaauccuggauuucagcau

SEQ ID NO: 2145358 - RNA, 19 nt, Human herpesvirus 7
gauuuuuaaacuugugaaa

SEQ ID NO: 2145359 - RNA, 19 nt, Human herpesvirus 7
ucuccuugauaagauuucc

SEQ ID NO: 2145360 - RNA, 15 nt, Human herpesvirus 7
caucuucucuauacc

SEQ ID NO: 2145361 - RNA, 14 nt, Human herpesvirus 7
aucuuuaacgguaa

SEQ ID NO: 2145362 - RNA, 11 nt, Human herpesvirus 7
aacagaccucc

SEQ ID NO: 2145363 - RNA, 22 nt, Human herpesvirus 7
agcuaacgauccaguacuugca

SEQ ID NO: 2145364 - RNA, 15 nt, Human herpesvirus 7
agaauuagagugcuu

SEQ ID NO: 2145365 - RNA, 23 nt, Human herpesvirus 7
ucuuauaacaaaguucaaguuuu

SEQ ID NO: 2145366 - RNA, 18 nt, Human herpesvirus 7
aacagccaucuaauugca

SEQ ID NO: 2145367 - RNA, 20 nt, Human herpesvirus 7
gcuugguuuuacaaauuaaa

SEQ ID NO: 2145368 - RNA, 14 nt, Human herpesvirus 7
uacaaaaguucugu

SEQ ID NO: 2145369 - RNA, 21 nt, Human herpesvirus 7
uaacaucuuuuuuauauuucu

SEQ ID NO: 2145370 - RNA, 16 nt, Human herpesvirus 7
acuuaugauuggagua

SEQ ID NO: 2145371 - RNA, 19 nt, Human herpesvirus 7
accaugaaaaauaaauacu

SEQ ID NO: 2145372 - RNA, 12 nt, Human herpesvirus 7
cauuuguugcuu

SEQ ID NO: 2145373 - RNA, 16 nt, Human herpesvirus 7
aucuuucguauugccu

SEQ ID NO: 2145374 - RNA, 16 nt, Human herpesvirus 7
aagcaucgauguuuua

SEQ ID NO: 2145375 - RNA, 13 nt, Human herpesvirus 7
auuuucagaaaag

SEQ ID NO: 2145376 - RNA, 18 nt, Human herpesvirus 7
uucuuugacaaaaauguu

SEQ ID NO: 2145377 - RNA, 22 nt, Human herpesvirus 7
guggaaaucuuuaauaaaaaca

SEQ ID NO: 2145378 - RNA, 14 nt, Human herpesvirus 7
gaguauuuaagaac

SEQ ID NO: 2145379 - RNA, 16 nt, Human herpesvirus 7
uucaaucaaauuauac

SEQ ID NO: 2145380 - RNA, 14 nt, Human herpesvirus 7
gaaaucaaaaaugu

SEQ ID NO: 2145381 - RNA, 17 nt, Human herpesvirus 7
auucgacacuauuggac

SEQ ID NO: 2145382 - RNA, 16 nt, Human herpesvirus 7
ucuuuuucauuaacuu

SEQ ID NO: 2145383 - RNA, 14 nt, Human herpesvirus 7
gcaaaucugaaaau

SEQ ID NO: 2145384 - RNA, 21 nt, Human herpesvirus 7
uuaauuuggaaauuguuugau

SEQ ID NO: 2145385 - RNA, 17 nt, Human herpesvirus 7
uuaaggagcuucauuuu

SEQ ID NO: 2145386 - RNA, 13 nt, Human herpesvirus 7
aucauugaagaaa

SEQ ID NO: 2145387 - RNA, 15 nt, Human herpesvirus 7
aaauugguucagcgu

SEQ ID NO: 2145388 - RNA, 19 nt, Human herpesvirus 7
cugcaacuuugugccugaa

SEQ ID NO: 2145389 - RNA, 13 nt, Human herpesvirus 7
ucacacaaugccu

SEQ ID NO: 2145390 - RNA, 22 nt, Human herpesvirus 7
auagaacgcuuauucgacacua

SEQ ID NO: 2145391 - RNA, 18 nt, Human herpesvirus 7
aagagucuauugacauaa

SEQ ID NO: 2145392 - RNA, 13 nt, Human herpesvirus 7
uauaaucacgaaa

SEQ ID NO: 2145393 - RNA, 15 nt, Human herpesvirus 7
cuugcgguagcacua

SEQ ID NO: 2145394 - RNA, 21 nt, Human herpesvirus 7
gaacgacuccaacugaccaga

SEQ ID NO: 2145395 - RNA, 15 nt, Human herpesvirus 7
uugugaaaauaacag

SEQ ID NO: 2145396 - RNA, 15 nt, Human herpesvirus 7
cuauagaaaacaucc

SEQ ID NO: 2145397 - RNA, 17 nt, Human herpesvirus 7
uuagaaacaucuguuuu

SEQ ID NO: 2145398 - RNA, 13 nt, Human herpesvirus 7
gaagcgagauuua

SEQ ID NO: 2145399 - RNA, 17 nt, Human herpesvirus 7
auucaaugcuaguguuc

SEQ ID NO: 2145400 - RNA, 17 nt, Human herpesvirus 7
ucuuacagugcucuuug

SEQ ID NO: 2145401 - RNA, 21 nt, Human herpesvirus 7
agcauuauuguauaugaugac

SEQ ID NO: 2145402 - RNA, 17 nt, Human herpesvirus 7
ugucuuacaacuagaaa

SEQ ID NO: 2145403 - RNA, 20 nt, Human herpesvirus 7
aaugugucuuacaacuagaa

SEQ ID NO: 2145404 - RNA, 23 nt, Human herpesvirus 7
gaccucgacauucuccaguggca

SEQ ID NO: 2145405 - RNA, 16 nt, Human herpesvirus 7
ucucagaaguuucaau

SEQ ID NO: 2145406 - RNA, 15 nt, Human herpesvirus 7
uugaauauaaguuuu

SEQ ID NO: 2145407 - RNA, 20 nt, Human herpesvirus 7
caggcauuuaagaauuuaau

SEQ ID NO: 2145408 - RNA, 15 nt, Human herpesvirus 7
accaugaaaaauaug

SEQ ID NO: 2145409 - RNA, 14 nt, Human herpesvirus 7
gcugcaucuuuuca

SEQ ID NO: 2145410 - RNA, 19 nt, Human herpesvirus 7
uuucuuuaccgauucuaaa

SEQ ID NO: 2145411 - RNA, 19 nt, Human herpesvirus 7
uauaugaagaauguaugaa

SEQ ID NO: 2145412 - RNA, 15 nt, Human herpesvirus 7
aguugaaaauguuuu

SEQ ID NO: 2145413 - RNA, 15 nt, Human herpesvirus 7
gccauaauuugaauu

SEQ ID NO: 2145414 - RNA, 17 nt, Human herpesvirus 7
uucacccuuuguuugag

SEQ ID NO: 2145415 - RNA, 14 nt, Human herpesvirus 7
uauaugaaauuuca

SEQ ID NO: 2145416 - RNA, 13 nt, Human herpesvirus 7
uauuuuacauauu

SEQ ID NO: 2145417 - RNA, 18 nt, Human herpesvirus 7
uuucaauugguuguucaa

SEQ ID NO: 2145418 - RNA, 21 nt, Human herpesvirus 7
auaugcuagaagacugcaacc

SEQ ID NO: 2145419 - RNA, 17 nt, Human herpesvirus 7
gauugaucacuuugcau

SEQ ID NO: 2145420 - RNA, 18 nt, Human herpesvirus 7
ugauagccauaaaugcuu

SEQ ID NO: 2145421 - RNA, 14 nt, Human herpesvirus 7
gaaauucuguggag

SEQ ID NO: 2145422 - RNA, 18 nt, Human herpesvirus 7
agcucuaaacaaacaaug

SEQ ID NO: 2145423 - RNA, 17 nt, Human herpesvirus 7
gauaauguuuuuuucau

SEQ ID NO: 2145424 - RNA, 23 nt, Human herpesvirus 7
ucaaggggucgcauauugcaauu

SEQ ID NO: 2145425 - RNA, 16 nt, Human herpesvirus 7
uuggaaacaaauugug

SEQ ID NO: 2145426 - RNA, 23 nt, Human herpesvirus 7
aauuaccgauggaacugaaaaca

SEQ ID NO: 2145427 - RNA, 18 nt, Human herpesvirus 7
uaugauuuuuuaaaugug

SEQ ID NO: 2145428 - RNA, 16 nt, Human herpesvirus 7
uaauuucucaaaucaa

SEQ ID NO: 2145429 - RNA, 15 nt, Human herpesvirus 7
ucagaacauugucaa

SEQ ID NO: 2145430 - RNA, 16 nt, Human herpesvirus 7
acuaauaaaaauuacu

SEQ ID NO: 2145431 - RNA, 17 nt, Human herpesvirus 7
uaaaugauuuuaaauuu

SEQ ID NO: 2145432 - RNA, 17 nt, Human herpesvirus 7
auccguuaauggauaac

SEQ ID NO: 2145433 - RNA, 14 nt, Human herpesvirus 7
ucaguuguuggaaa

SEQ ID NO: 2145434 - RNA, 13 nt, Human herpesvirus 7
cuggaaagcucau

SEQ ID NO: 2145435 - RNA, 16 nt, Human herpesvirus 7
aagguuuaaaacauuu

SEQ ID NO: 2145436 - RNA, 15 nt, Human herpesvirus 7
guaaaggaaauuagu

SEQ ID NO: 2145437 - RNA, 20 nt, Human herpesvirus 7
uggauucaagaaaucagauu

SEQ ID NO: 2145438 - RNA, 20 nt, Human herpesvirus 7
gucugauucuuauucuacac

SEQ ID NO: 2145439 - RNA, 18 nt, Human herpesvirus 7
gcgcuuggcaaacagucu

SEQ ID NO: 2145440 - RNA, 16 nt, Human herpesvirus 7
aacacucaaaacagaa

SEQ ID NO: 2145441 - RNA, 19 nt, Human herpesvirus 7
uggcgccaaaaaaacacag

SEQ ID NO: 2145442 - RNA, 14 nt, Human herpesvirus 7
augcucgauauaca

SEQ ID NO: 2145443 - RNA, 20 nt, Human herpesvirus 7
ucuaauuaaucugcauauaa

SEQ ID NO: 2145444 - RNA, 16 nt, Human herpesvirus 7
augcuauuaaaugauu

SEQ ID NO: 2145445 - RNA, 19 nt, Human herpesvirus 7
gauuucacccuuuguuuga

SEQ ID NO: 2145446 - RNA, 22 nt, Human herpesvirus 7
gaguaucuccgugacaaagcau

SEQ ID NO: 2145447 - RNA, 13 nt, Human herpesvirus 7
caacucuuccuuu

SEQ ID NO: 2145448 - RNA, 18 nt, Human herpesvirus 7
caaauugauccugcuauu

SEQ ID NO: 2145449 - RNA, 15 nt, Human herpesvirus 7
acaacagccaaaugu

SEQ ID NO: 2145450 - RNA, 17 nt, Human herpesvirus 7
aaauucugcuugucucu

SEQ ID NO: 2145451 - RNA, 20 nt, Human herpesvirus 7
aauuguuuuucuuucuugca

SEQ ID NO: 2145452 - RNA, 19 nt, Human herpesvirus 7
uaacauggaaauucagaau

SEQ ID NO: 2145453 - RNA, 21 nt, Human herpesvirus 7
auuuugggcugacuuaauuga

SEQ ID NO: 2145454 - RNA, 12 nt, Human herpesvirus 7
accgauuacugu

SEQ ID NO: 2145455 - RNA, 20 nt, Human herpesvirus 7
gaacaugacuucagaaaaac

SEQ ID NO: 2145456 - RNA, 12 nt, Human herpesvirus 7
auagaagaggac

SEQ ID NO: 2145457 - RNA, 21 nt, Human herpesvirus 7
cuaauuuuggcgaaacaauac

SEQ ID NO: 2145458 - RNA, 21 nt, Human herpesvirus 7
uuucgcaacaaucaacauuug

SEQ ID NO: 2145459 - RNA, 15 nt, Human herpesvirus 7
uauggacaaauuugg

SEQ ID NO: 2145460 - RNA, 13 nt, Human herpesvirus 7
ugcugugagugaa

SEQ ID NO: 2145461 - RNA, 19 nt, Human herpesvirus 7
agauuuuuugaaaaagauu

SEQ ID NO: 2145462 - RNA, 15 nt, Human herpesvirus 7
cagaacaucugucag

SEQ ID NO: 2145463 - RNA, 18 nt, Human herpesvirus 7
uauuagauaaugacaaac

SEQ ID NO: 2145464 - RNA, 13 nt, Human herpesvirus 7
auucaguuucuuu

SEQ ID NO: 2145465 - RNA, 12 nt, Human herpesvirus 7
uucaauugccac

SEQ ID NO: 2145466 - RNA, 17 nt, Human herpesvirus 7
gaucguagcaacagaga

SEQ ID NO: 2145467 - RNA, 20 nt, Human herpesvirus 7
ugcaggcuagaaguuuagag

SEQ ID NO: 2145468 - RNA, 19 nt, Human herpesvirus 7
ggcaacaaacaaauaauuc

SEQ ID NO: 2145469 - RNA, 16 nt, Human herpesvirus 7
uugcaguuauuucuua

SEQ ID NO: 2145470 - RNA, 16 nt, Human herpesvirus 7
uaauacuccuuuccug

SEQ ID NO: 2145471 - RNA, 18 nt, Human herpesvirus 7
aaaaucuguagaaaaugu

SEQ ID NO: 2145472 - RNA, 20 nt, Human herpesvirus 7
accaaaaaccugaaaaacau

SEQ ID NO: 2145473 - RNA, 15 nt, Human herpesvirus 7
cugcuugucucuguc

SEQ ID NO: 2145474 - RNA, 16 nt, Human herpesvirus 7
ugaucuggauucaaga

SEQ ID NO: 2145475 - RNA, 23 nt, Human herpesvirus 7
aggucacaaaagcuuugaucuac

SEQ ID NO: 2145476 - RNA, 16 nt, Human herpesvirus 7
agaaaaaaacaaugaa

SEQ ID NO: 2145477 - RNA, 14 nt, Human herpesvirus 7
ugacuguaucucca

SEQ ID NO: 2145478 - RNA, 18 nt, Human herpesvirus 7
uugugaagacuacauaaa

SEQ ID NO: 2145479 - RNA, 20 nt, Human herpesvirus 7
uuucuuuaccgauucuaaau

SEQ ID NO: 2145480 - RNA, 14 nt, Human herpesvirus 7
aauaaauuuaaaau

SEQ ID NO: 2145481 - RNA, 14 nt, Human herpesvirus 7
uuaaaauuauuaau

SEQ ID NO: 2145482 - RNA, 18 nt, Human herpesvirus 7
ucauuaucaccacaauuu

SEQ ID NO: 2145483 - RNA, 12 nt, Human herpesvirus 7
aaagaaaagcuu

SEQ ID NO: 2145484 - RNA, 14 nt, Human herpesvirus 7
caaguuuuacagaa

SEQ ID NO: 2145485 - RNA, 20 nt, Human herpesvirus 7
agaacuuuuguaggaaauuu

SEQ ID NO: 2145486 - RNA, 14 nt, Human herpesvirus 7
gaaugcaucugaau

SEQ ID NO: 2145487 - RNA, 16 nt, Human herpesvirus 7
aucagacaauuucaca

SEQ ID NO: 2145488 - RNA, 23 nt, Human herpesvirus 7
agucaaucugugaacugauguuu

SEQ ID NO: 2145489 - RNA, 16 nt, Human herpesvirus 7
aacgugugaaaacaau

SEQ ID NO: 2145490 - RNA, 18 nt, Human herpesvirus 7
aaauguguaacaauugag

SEQ ID NO: 2145491 - RNA, 20 nt, Human herpesvirus 7
uuaagcuuuuguaaacauga

SEQ ID NO: 2145492 - RNA, 13 nt, Human herpesvirus 7
augguaagcaaaa

SEQ ID NO: 2145493 - RNA, 22 nt, Human herpesvirus 7
uauucaaacgcuugaacaaauu

SEQ ID NO: 2145494 - RNA, 19 nt, Human herpesvirus 7
uucacaauggaaagaagaa

SEQ ID NO: 2145495 - RNA, 14 nt, Human herpesvirus 7
uguaugguuucauu

SEQ ID NO: 2145496 - RNA, 22 nt, Human herpesvirus 7
uaacuuuuuuuuucuuuaguuu

SEQ ID NO: 2145497 - RNA, 12 nt, Human herpesvirus 7
cuuacagugaag

SEQ ID NO: 2145498 - RNA, 23 nt, Human herpesvirus 7
ucuaugaaauaaaauuuuucauu

SEQ ID NO: 2145499 - RNA, 20 nt, Human herpesvirus 7
aauuguuugauuaauuucca

SEQ ID NO: 2145500 - RNA, 17 nt, Human herpesvirus 7
aggcuuuuagaaaucuu

SEQ ID NO: 2145501 - RNA, 14 nt, Human herpesvirus 7
aacagugggaaagu

SEQ ID NO: 2145502 - RNA, 19 nt, Human herpesvirus 7
uaguugcaacucuucuuca

SEQ ID NO: 2145503 - RNA, 13 nt, Human herpesvirus 7
cauauuaacaagc

SEQ ID NO: 2145504 - RNA, 13 nt, Human herpesvirus 7
ucucucacacuca

SEQ ID NO: 2145505 - RNA, 14 nt, Human herpesvirus 7
uuaauugugcaucu

SEQ ID NO: 2145506 - RNA, 15 nt, Human herpesvirus 7
augaacaaauaauga

SEQ ID NO: 2145507 - RNA, 20 nt, Human herpesvirus 7
aggaagguacaucuuucgua

SEQ ID NO: 2145508 - RNA, 15 nt, Human herpesvirus 7
guacaacgacauuga

SEQ ID NO: 2145509 - RNA, 16 nt, Human herpesvirus 7
cauuccacuaaaagag

SEQ ID NO: 2145510 - RNA, 19 nt, Human herpesvirus 7
aagaaaagcaaaccuuaca

SEQ ID NO: 2145511 - RNA, 22 nt, Human herpesvirus 7
uuuuugcauauggacuuaucaa

SEQ ID NO: 2145512 - RNA, 19 nt, Human herpesvirus 7
cuauuucugucaucuuaua

SEQ ID NO: 2145513 - RNA, 19 nt, Human herpesvirus 7
aguuucugcauacucuugu

SEQ ID NO: 2145514 - RNA, 15 nt, Human herpesvirus 7
gcggauuaagagaaa

SEQ ID NO: 2145515 - RNA, 13 nt, Human herpesvirus 7
agcucauuucauc

SEQ ID NO: 2145516 - RNA, 12 nt, Human herpesvirus 7
aauaaaaugguu

SEQ ID NO: 2145517 - RNA, 20 nt, Human herpesvirus 7
gucuacuaugggcuguuuua

SEQ ID NO: 2145518 - RNA, 13 nt, Human herpesvirus 7
ugcuggaaaacau

SEQ ID NO: 2145519 - RNA, 18 nt, Human herpesvirus 7
cacaguugaauaaagauu

SEQ ID NO: 2145520 - RNA, 16 nt, Human herpesvirus 7
accguggacuuucuug

SEQ ID NO: 2145521 - RNA, 18 nt, Human herpesvirus 7
agauaaguauaaacaguc

SEQ ID NO: 2145522 - RNA, 22 nt, Human herpesvirus 7
ugaugauuauuauaacuuguaa

SEQ ID NO: 2145523 - RNA, 16 nt, Human herpesvirus 7
auauuccauuaagcca

SEQ ID NO: 2145524 - RNA, 16 nt, Human herpesvirus 7
auacagauauuuuaau

SEQ ID NO: 2145525 - RNA, 18 nt, Human herpesvirus 7
uucugguuucuguugacu

SEQ ID NO: 2145526 - RNA, 15 nt, Human herpesvirus 7
ugguuauccaaguuu

SEQ ID NO: 2145527 - RNA, 15 nt, Human herpesvirus 7
augaaaucuugaauu

SEQ ID NO: 2145528 - RNA, 18 nt, Human herpesvirus 7
uuauuagugaauuacaga

SEQ ID NO: 2145529 - RNA, 15 nt, Human herpesvirus 7
gaaacgucaggaaaa

SEQ ID NO: 2145530 - RNA, 19 nt, Human herpesvirus 7
cguaacgaauaaaaaguuu

SEQ ID NO: 2145531 - RNA, 14 nt, Human herpesvirus 7
gaaagcuugugaag

SEQ ID NO: 2145532 - RNA, 23 nt, Human herpesvirus 7
auucugacuccuuuuuuucugcu

SEQ ID NO: 2145533 - RNA, 16 nt, Human herpesvirus 7
auagcaggaagcacaa

SEQ ID NO: 2145534 - RNA, 16 nt, Human herpesvirus 7
acuaaagcuacagcuu

SEQ ID NO: 2145535 - RNA, 20 nt, Human herpesvirus 7
uuggaaagggauuuauuauu

SEQ ID NO: 2145536 - RNA, 14 nt, Human herpesvirus 7
uugcauacuuuuuu

SEQ ID NO: 2145537 - RNA, 13 nt, Human herpesvirus 7
gaaaauaaaagag

SEQ ID NO: 2145538 - RNA, 18 nt, Human herpesvirus 7
cgccaaaucuaauuuaug

SEQ ID NO: 2145539 - RNA, 22 nt, Human herpesvirus 7
cagagaucauaauuacauugca

SEQ ID NO: 2145540 - RNA, 16 nt, Human herpesvirus 7
uaaugcugugauuuuc

SEQ ID NO: 2145541 - RNA, 21 nt, Human herpesvirus 7
aauugaaauauuuaugccuuu

SEQ ID NO: 2145542 - RNA, 16 nt, Human herpesvirus 7
aaagauguuucuuucu

SEQ ID NO: 2145543 - RNA, 15 nt, Human herpesvirus 7
aaagcucauuucauc

SEQ ID NO: 2145544 - RNA, 21 nt, Human herpesvirus 7
ugacuccuuuuuuucugcucg

SEQ ID NO: 2145545 - RNA, 19 nt, Human herpesvirus 7
ucaugcggaagaacaagca

SEQ ID NO: 2145546 - RNA, 16 nt, Human herpesvirus 7
agcuugaugaaucaaa

SEQ ID NO: 2145547 - RNA, 20 nt, Human herpesvirus 7
cuuugcuaaccacuguguca

SEQ ID NO: 2145548 - RNA, 16 nt, Human herpesvirus 7
uuugguuauccaaguu

SEQ ID NO: 2145549 - RNA, 21 nt, Human herpesvirus 7
aaagcauacuuuaaaacuuug

SEQ ID NO: 2145550 - RNA, 12 nt, Human herpesvirus 7
uuugcuugcuga

SEQ ID NO: 2145551 - RNA, 15 nt, Human herpesvirus 7
aagaaugcucuuuug

SEQ ID NO: 2145552 - RNA, 13 nt, Human herpesvirus 7
uguuuaaaauguu

SEQ ID NO: 2145553 - RNA, 15 nt, Human herpesvirus 7
uguuucuuucuuuua

SEQ ID NO: 2145554 - RNA, 23 nt, Human herpesvirus 7
uaauuuccacguuuuuuagcuuu

SEQ ID NO: 2145555 - RNA, 22 nt, Human herpesvirus 7
ucgaaaccgucagcaucucaga

SEQ ID NO: 2145556 - RNA, 15 nt, Human herpesvirus 7
auuuuccaacgaaau

SEQ ID NO: 2145557 - RNA, 17 nt, Human herpesvirus 7
aaucauguuuaagaaaa

SEQ ID NO: 2145558 - RNA, 18 nt, Human herpesvirus 7
agaaacuuucuaugauuu

SEQ ID NO: 2145559 - RNA, 14 nt, Human herpesvirus 7
ugcuugugaaggag

SEQ ID NO: 2145560 - RNA, 20 nt, Human herpesvirus 7
acggaaaauuuccgaccuga

SEQ ID NO: 2145561 - RNA, 20 nt, Human herpesvirus 7
cguuuucuaaacgugcccuc

SEQ ID NO: 2145562 - RNA, 19 nt, Human herpesvirus 7
agaacagcugaaacucauc

SEQ ID NO: 2145563 - RNA, 18 nt, Human herpesvirus 7
acgucuagacauuuguuu

SEQ ID NO: 2145564 - RNA, 13 nt, Human herpesvirus 7
uuuuuuguucaaa

SEQ ID NO: 2145565 - RNA, 18 nt, Human herpesvirus 7
agucagaacauugucaaa

SEQ ID NO: 2145566 - RNA, 23 nt, Human herpesvirus 7
aaaauacaauagugaacaugugc

SEQ ID NO: 2145567 - RNA, 17 nt, Human herpesvirus 7
uuaugagauuugccugc

SEQ ID NO: 2145568 - RNA, 17 nt, Human herpesvirus 7
cuaacaaaaaaauaccu

SEQ ID NO: 2145569 - RNA, 21 nt, Human herpesvirus 7
aaucauaccauaaauaccaaa

SEQ ID NO: 2145570 - RNA, 19 nt, Human herpesvirus 7
cagacagcuguauaucuau

SEQ ID NO: 2145571 - RNA, 19 nt, Human herpesvirus 7
ugaaaaucaauccaaauaa

SEQ ID NO: 2145572 - RNA, 15 nt, Human herpesvirus 7
gcaucaagaaacaag

SEQ ID NO: 2145573 - RNA, 15 nt, Human herpesvirus 7
aacaauauuuaaagu

SEQ ID NO: 2145574 - RNA, 21 nt, Human herpesvirus 7
gcaacuggcauuccuuggaaa

SEQ ID NO: 2145575 - RNA, 21 nt, Human herpesvirus 7
uauuaaguguuugcucugaaa

SEQ ID NO: 2145576 - RNA, 20 nt, Human herpesvirus 7
uggaaaaacagaauguggua

SEQ ID NO: 2145577 - RNA, 17 nt, Human herpesvirus 7
cugggagcaaugcauga

SEQ ID NO: 2145578 - RNA, 16 nt, Human herpesvirus 7
cauaauuaugaaaugu

SEQ ID NO: 2145579 - RNA, 19 nt, Human herpesvirus 7
agcaucccuauugcaucaa

SEQ ID NO: 2145580 - RNA, 20 nt, Human herpesvirus 7
gaaaaagcaacaaauguuua

SEQ ID NO: 2145581 - RNA, 16 nt, Human herpesvirus 7
gcagacauugaagauu

SEQ ID NO: 2145582 - RNA, 22 nt, Human herpesvirus 7
cgaaagccacuguugaugauuu

SEQ ID NO: 2145583 - RNA, 20 nt, Human herpesvirus 7
cauaaaacaugcaacauaau

SEQ ID NO: 2145584 - RNA, 22 nt, Human herpesvirus 7
aguaagaagugaguuuuucagu

SEQ ID NO: 2145585 - RNA, 17 nt, Human herpesvirus 7
acaacuaaagagaaugu

SEQ ID NO: 2145586 - RNA, 16 nt, Human herpesvirus 7
gauucuauaaaacgug

SEQ ID NO: 2145587 - RNA, 20 nt, Human herpesvirus 7
uggcagcgauauauuggaaa

SEQ ID NO: 2145588 - RNA, 18 nt, Human herpesvirus 7
gaaggcaucaagaaacaa

SEQ ID NO: 2145589 - RNA, 20 nt, Human herpesvirus 7
gaaaauuuauauuugcuugc

SEQ ID NO: 2145590 - RNA, 19 nt, Human herpesvirus 7
gugaaacacauucugucuu

SEQ ID NO: 2145591 - RNA, 18 nt, Human herpesvirus 7
uuuguaaacauuuuugaa

SEQ ID NO: 2145592 - RNA, 23 nt, Human herpesvirus 7
gauuuuuuaaaugugucuuacaa

SEQ ID NO: 2145593 - RNA, 20 nt, Human herpesvirus 7
agcgcuuuuuaaaaaaucua

SEQ ID NO: 2145594 - RNA, 22 nt, Human herpesvirus 7
uugaagaaauugugaagucuuu

SEQ ID NO: 2145595 - RNA, 20 nt, Human herpesvirus 7
cuuuagagucugugugugca

SEQ ID NO: 2145596 - RNA, 18 nt, Human herpesvirus 7
aacaugaguacuguuucu

SEQ ID NO: 2145597 - RNA, 18 nt, Human herpesvirus 7
uagauuacgcacaaauuu

SEQ ID NO: 2145598 - RNA, 20 nt, Human herpesvirus 7
cauuuguacuucaaaguagc

SEQ ID NO: 2145599 - RNA, 13 nt, Human herpesvirus 7
uucaacuguguuu

SEQ ID NO: 2145600 - RNA, 12 nt, Human herpesvirus 7
aauuuuaaaacu

SEQ ID NO: 2145601 - RNA, 18 nt, Human herpesvirus 7
caaaauauuuaucugcau

SEQ ID NO: 2145602 - RNA, 18 nt, Human herpesvirus 7
uaauaaaacaaacuaugu

SEQ ID NO: 2145603 - RNA, 20 nt, Human herpesvirus 7
aaauaauaacaauuauagaa

SEQ ID NO: 2145604 - RNA, 15 nt, Human herpesvirus 7
uguuuggcaacucuu

SEQ ID NO: 2145605 - RNA, 19 nt, Human herpesvirus 7
uacaacgacauugaaacuc

SEQ ID NO: 2145606 - RNA, 13 nt, Human herpesvirus 7
acaucauguuaaa

SEQ ID NO: 2145607 - RNA, 18 nt, Human herpesvirus 7
uguaauuucucaaaucuu

SEQ ID NO: 2145608 - RNA, 15 nt, Human herpesvirus 7
cauuuguuguggauu

SEQ ID NO: 2145609 - RNA, 23 nt, Human herpesvirus 7
uuaacgaaggcaucaagaaacaa

SEQ ID NO: 2145610 - RNA, 20 nt, Human herpesvirus 7
auggacggcauuuaacucau

SEQ ID NO: 2145611 - RNA, 17 nt, Human herpesvirus 7
acagcaacugugcauga

SEQ ID NO: 2145612 - RNA, 15 nt, Human herpesvirus 7
aaauuguaaguaaau

SEQ ID NO: 2145613 - RNA, 22 nt, Human herpesvirus 7
ggaaauuuucauagcacucaua

SEQ ID NO: 2145614 - RNA, 21 nt, Human herpesvirus 7
aaaguagaggccgaaaaucua

SEQ ID NO: 2145615 - RNA, 19 nt, Human herpesvirus 7
gcaacugugcaugaaaucu

SEQ ID NO: 2145616 - RNA, 17 nt, Human herpesvirus 7
aggaagcuuuacagcag

SEQ ID NO: 2145617 - RNA, 17 nt, Human herpesvirus 7
aagaggagaauucugua

SEQ ID NO: 2145618 - RNA, 18 nt, Human herpesvirus 7
aauuuuuuacugucuuua

SEQ ID NO: 2145619 - RNA, 13 nt, Human herpesvirus 7
uacagcacuuuga

SEQ ID NO: 2145620 - RNA, 23 nt, Human herpesvirus 7
uuuaaaacaagacagaaaugaau

SEQ ID NO: 2145621 - RNA, 17 nt, Human herpesvirus 7
ugccagguuuuucaaag

SEQ ID NO: 2145622 - RNA, 20 nt, Human herpesvirus 7
cuuuaccccaaacgccuuau

SEQ ID NO: 2145623 - RNA, 18 nt, Human herpesvirus 7
auuccuauuaagcagcuu

SEQ ID NO: 2145624 - RNA, 20 nt, Human herpesvirus 7
cugaauaauaugcuuucacu

SEQ ID NO: 2145625 - RNA, 17 nt, Human herpesvirus 7
aaucuaugcaaagcaag

SEQ ID NO: 2145626 - RNA, 23 nt, Human herpesvirus 7
gauuacgcacaaauuucuuguaa

SEQ ID NO: 2145627 - RNA, 13 nt, Human herpesvirus 7
aauaaacaggaac

SEQ ID NO: 2145628 - RNA, 14 nt, Human herpesvirus 7
gaauagacaucuuc

SEQ ID NO: 2145629 - RNA, 20 nt, Human herpesvirus 7
aauaucuuuuucaaauggau

SEQ ID NO: 2145630 - RNA, 17 nt, Human herpesvirus 7
guagauuuagauuuaaa

SEQ ID NO: 2145631 - RNA, 14 nt, Human herpesvirus 7
auugacagcaccaa

SEQ ID NO: 2145632 - RNA, 19 nt, Human herpesvirus 7
uucagaaauaacaaaauug

SEQ ID NO: 2145633 - RNA, 20 nt, Human herpesvirus 7
auuuaugcuuuaacuggaau

SEQ ID NO: 2145634 - RNA, 16 nt, Human herpesvirus 7
caauaaaagauuuaaa

SEQ ID NO: 2145635 - RNA, 21 nt, Human herpesvirus 7
aucaguacaacgacauugaaa

SEQ ID NO: 2145636 - RNA, 16 nt, Human herpesvirus 7
uaaaaauccuaaauuu

SEQ ID NO: 2145637 - RNA, 14 nt, Human herpesvirus 7
cuggcucaagcaca

SEQ ID NO: 2145638 - RNA, 15 nt, Human herpesvirus 7
cugaaaaacaugagu

SEQ ID NO: 2145639 - RNA, 16 nt, Human herpesvirus 7
gccucugccucuuggc

SEQ ID NO: 2145640 - RNA, 16 nt, Human herpesvirus 7
agcaguuauaugaaau

SEQ ID NO: 2145641 - RNA, 17 nt, Human herpesvirus 7
aggaaauugcuuucuaa

SEQ ID NO: 2145642 - RNA, 22 nt, Human herpesvirus 7
ucauuuaucaggugcucuaaau

SEQ ID NO: 2145643 - RNA, 14 nt, Human herpesvirus 7
gugauugguagaaa

SEQ ID NO: 2145644 - RNA, 21 nt, Human herpesvirus 7
uggcacauaaguugacaaugu

SEQ ID NO: 2145645 - RNA, 18 nt, Human herpesvirus 7
uaacgauuccaaaccuau

SEQ ID NO: 2145646 - RNA, 16 nt, Human herpesvirus 7
uuaggggaagaaucaa

SEQ ID NO: 2145647 - RNA, 19 nt, Human herpesvirus 7
uacagaucauuuuucgacu

SEQ ID NO: 2145648 - RNA, 23 nt, Human herpesvirus 7
uguuaucauacguuuacaguuuu

SEQ ID NO: 2145649 - RNA, 16 nt, Human herpesvirus 7
agaaugggugucagcu

SEQ ID NO: 2145650 - RNA, 17 nt, Human herpesvirus 7
uuaaaggaaauaaacaa

SEQ ID NO: 2145651 - RNA, 15 nt, Human herpesvirus 7
agaaaaucucucaac

SEQ ID NO: 2145652 - RNA, 13 nt, Human herpesvirus 7
uuuaacaugugua

SEQ ID NO: 2145653 - RNA, 22 nt, Human herpesvirus 7
cuucuagaaacuaaagaaaaaa

SEQ ID NO: 2145654 - RNA, 13 nt, Human herpesvirus 7
auaaugaaacugu

SEQ ID NO: 2145655 - RNA, 21 nt, Human herpesvirus 7
cuauuaagcguucguaacaaa

SEQ ID NO: 2145656 - RNA, 18 nt, Human herpesvirus 7
agguaaaaaauaaauaua

SEQ ID NO: 2145657 - RNA, 18 nt, Human herpesvirus 7
uuugacaagcgcauuugu

SEQ ID NO: 2145658 - RNA, 15 nt, Human herpesvirus 7
ucugagaauuuaaag

SEQ ID NO: 2145659 - RNA, 16 nt, Human herpesvirus 7
uaaaaaaaauaaauuu

SEQ ID NO: 2145660 - RNA, 19 nt, Human herpesvirus 7
acaagguuuaaaacauuua

SEQ ID NO: 2145661 - RNA, 18 nt, Human herpesvirus 7
ugcagacuaauuacagcu

SEQ ID NO: 2145662 - RNA, 15 nt, Human herpesvirus 7
ggaaugauauaaagu

SEQ ID NO: 2145663 - RNA, 16 nt, Human herpesvirus 7
cauaaauaaaaacaug

SEQ ID NO: 2145664 - RNA, 23 nt, Human herpesvirus 7
auuguagauggcaccaauagaaa

SEQ ID NO: 2145665 - RNA, 18 nt, Human herpesvirus 7
ucuuaauaaaguuuaauu

SEQ ID NO: 2145666 - RNA, 23 nt, Human herpesvirus 7
aauguaaacgaagaaucauuuau

SEQ ID NO: 2145667 - RNA, 15 nt, Human herpesvirus 7
auugcgaaaaugaua

SEQ ID NO: 2145668 - RNA, 14 nt, Human herpesvirus 7
caacagccaaaugu

SEQ ID NO: 2145669 - RNA, 22 nt, Human herpesvirus 7
aaaauauguucagauugaaauu

SEQ ID NO: 2145670 - RNA, 17 nt, Human herpesvirus 7
uuauguccgcuuacaag

SEQ ID NO: 2145671 - RNA, 16 nt, Human herpesvirus 7
cuucuuuauaagcagu

SEQ ID NO: 2145672 - RNA, 22 nt, Human herpesvirus 7
uuaucauacguuuacaguuuuu

SEQ ID NO: 2145673 - RNA, 12 nt, Human herpesvirus 7
aguauuuaagaa

SEQ ID NO: 2145674 - RNA, 16 nt, Human herpesvirus 7
uuggaaaaaaaacggg

SEQ ID NO: 2145675 - RNA, 13 nt, Human herpesvirus 7
auauaaaaaauuu

SEQ ID NO: 2145676 - RNA, 22 nt, Human herpesvirus 7
ucuaaccccgcucuuuuauuuu

SEQ ID NO: 2145677 - RNA, 21 nt, Human herpesvirus 7
acgauaugguuugaaaaccau

SEQ ID NO: 2145678 - RNA, 16 nt, Human herpesvirus 7
acgagcgauuuaaugu

SEQ ID NO: 2145679 - RNA, 16 nt, Human herpesvirus 7
auuauauucaaauaag

SEQ ID NO: 2145680 - RNA, 18 nt, Human herpesvirus 7
ucucuugaggaaaugucu

SEQ ID NO: 2145681 - RNA, 22 nt, Human herpesvirus 7
aagaauuaauaaaaguaucauu

SEQ ID NO: 2145682 - RNA, 18 nt, Human herpesvirus 7
caauuuuuaacauuacgu

SEQ ID NO: 2145683 - RNA, 21 nt, Human herpesvirus 7
aucuaccccgauccucagaau

SEQ ID NO: 2145684 - RNA, 13 nt, Human herpesvirus 7
uacaaugcagccu

SEQ ID NO: 2145685 - RNA, 21 nt, Human herpesvirus 7
cuuauuccagauaugacaaau

SEQ ID NO: 2145686 - RNA, 14 nt, Human herpesvirus 7
auuacauugcaguc

SEQ ID NO: 2145687 - RNA, 15 nt, Human herpesvirus 7
aauuucuauuagaua

SEQ ID NO: 2145688 - RNA, 19 nt, Human herpesvirus 7
gacaugcccuuucucguga

SEQ ID NO: 2145689 - RNA, 18 nt, Human herpesvirus 7
acaaauaucacuggcaau

SEQ ID NO: 2145690 - RNA, 22 nt, Human herpesvirus 7
uugaaaaagcguugguugcuug

SEQ ID NO: 2145691 - RNA, 13 nt, Human herpesvirus 7
aucaaauuucaaa

SEQ ID NO: 2145692 - RNA, 12 nt, Human herpesvirus 7
aacauuucagau

SEQ ID NO: 2145693 - RNA, 14 nt, Human herpesvirus 7
uaauaacaauuuga

SEQ ID NO: 2145694 - RNA, 20 nt, Human herpesvirus 7
gcaaagcuuuugcgagaaaa

SEQ ID NO: 2145695 - RNA, 23 nt, Human herpesvirus 7
gcuauuuaaucuaugcaaagcaa

SEQ ID NO: 2145696 - RNA, 22 nt, Human herpesvirus 7
auaugaaucaaauuucaaacgu

SEQ ID NO: 2145697 - RNA, 17 nt, Human herpesvirus 7
accgccaccuucuuaua

SEQ ID NO: 2145698 - RNA, 15 nt, Human herpesvirus 7
acugucacuguccaa

SEQ ID NO: 2145699 - RNA, 20 nt, Human herpesvirus 7
cucuugaggaaaugucuuug

SEQ ID NO: 2145700 - RNA, 22 nt, Human herpesvirus 7
uuuaggaaauugcuuucuaagu

SEQ ID NO: 2145701 - RNA, 14 nt, Human herpesvirus 7
ugugaaaauaacag

SEQ ID NO: 2145702 - RNA, 21 nt, Human herpesvirus 7
uggaucuucugcuaacucaua

SEQ ID NO: 2145703 - RNA, 13 nt, Human herpesvirus 7
aaacauucuaaau

SEQ ID NO: 2145704 - RNA, 16 nt, Human herpesvirus 7
aaaacaaacuaugucc

SEQ ID NO: 2145705 - RNA, 23 nt, Human herpesvirus 7
acagcaccaauccuuuuaaaacc

SEQ ID NO: 2145706 - RNA, 12 nt, Human herpesvirus 7
ggcaacaucuuc

SEQ ID NO: 2145707 - RNA, 22 nt, Human herpesvirus 7
acgaauaaaaaguuuuugagua

SEQ ID NO: 2145708 - RNA, 21 nt, Human herpesvirus 7
uugaaagcguuucacugggaa

SEQ ID NO: 2145709 - RNA, 12 nt, Human herpesvirus 7
ugucuuggaaga

SEQ ID NO: 2145710 - RNA, 15 nt, Human herpesvirus 7
acuauguccaaaaau

SEQ ID NO: 2145711 - RNA, 13 nt, Human herpesvirus 7
cauuaauaucaau

SEQ ID NO: 2145712 - RNA, 18 nt, Human herpesvirus 7
uugauuuucaaguuucuu

SEQ ID NO: 2145713 - RNA, 14 nt, Human herpesvirus 7
uacuuucguuuucu

SEQ ID NO: 2145714 - RNA, 21 nt, Human herpesvirus 7
gucauuugcaguuauuucuua

SEQ ID NO: 2145715 - RNA, 15 nt, Human herpesvirus 7
uucuaaaaauucugg

SEQ ID NO: 2145716 - RNA, 15 nt, Human herpesvirus 7
agagaauuuagauua

SEQ ID NO: 2145717 - RNA, 16 nt, Human herpesvirus 7
ugugacuucauaucug

SEQ ID NO: 2145718 - RNA, 17 nt, Human herpesvirus 7
uccuucuaccucuuaca

SEQ ID NO: 2145719 - RNA, 23 nt, Human herpesvirus 7
ugacagacacaugcuuacagauc

SEQ ID NO: 2145720 - RNA, 15 nt, Human herpesvirus 7
guacauuccuugaga

SEQ ID NO: 2145721 - RNA, 20 nt, Human herpesvirus 7
cuaagaaaaaaacaaaaucu

SEQ ID NO: 2145722 - RNA, 21 nt, Human herpesvirus 7
acauuucagaugacaacucaa

SEQ ID NO: 2145723 - RNA, 17 nt, Human herpesvirus 7
guaaggcagugauuggu

SEQ ID NO: 2145724 - RNA, 20 nt, Human herpesvirus 7
uguucaaucacauacucuau

SEQ ID NO: 2145725 - RNA, 22 nt, Human herpesvirus 7
accucgacauucuccaguggca

SEQ ID NO: 2145726 - RNA, 13 nt, Human herpesvirus 7
gauguguuggaaa

SEQ ID NO: 2145727 - RNA, 22 nt, Human herpesvirus 7
ucaacagagcgcuuugcuuauu

SEQ ID NO: 2145728 - RNA, 15 nt, Human herpesvirus 7
auaccaaacaaaauu

SEQ ID NO: 2145729 - RNA, 11 nt, Human herpesvirus 7
uuacaacaaua

SEQ ID NO: 2145730 - RNA, 21 nt, Human herpesvirus 7
gauuauauucaaauaagggau

SEQ ID NO: 2145731 - RNA, 17 nt, Human herpesvirus 7
agguuacguguucauuu

SEQ ID NO: 2145732 - RNA, 23 nt, Human herpesvirus 7
uugcaauacaaauuccugcuugc

SEQ ID NO: 2145733 - RNA, 18 nt, Human herpesvirus 7
gcaguauucuuaugccag

SEQ ID NO: 2145734 - RNA, 19 nt, Human herpesvirus 7
auaaaccguuagagcaguu

SEQ ID NO: 2145735 - RNA, 21 nt, Human herpesvirus 7
ucuggaacuuuuaaauuaaaa

SEQ ID NO: 2145736 - RNA, 12 nt, Human herpesvirus 7
uaagccaaauau

SEQ ID NO: 2145737 - RNA, 16 nt, Human herpesvirus 7
accgcaugugaaaaug

SEQ ID NO: 2145738 - RNA, 15 nt, Human herpesvirus 7
gaugcauccaaagaa

SEQ ID NO: 2145739 - RNA, 14 nt, Human herpesvirus 7
uacuuguaugcuau

SEQ ID NO: 2145740 - RNA, 22 nt, Human herpesvirus 7
augaaaacuuggaaaacaauca

SEQ ID NO: 2145741 - RNA, 16 nt, Human herpesvirus 7
caacuugaaugagcug

SEQ ID NO: 2145742 - RNA, 14 nt, Human herpesvirus 7
aucgauuaaaucuu

SEQ ID NO: 2145743 - RNA, 22 nt, Human herpesvirus 7
auagacugauacgcuuucugaa

SEQ ID NO: 2145744 - RNA, 23 nt, Human herpesvirus 7
ugauguuauacauaaagagaaag

SEQ ID NO: 2145745 - RNA, 19 nt, Human herpesvirus 7
uagcagcuuuuauuccuuc

SEQ ID NO: 2145746 - RNA, 18 nt, Human herpesvirus 7
uuuauuuagaaguggcuu

SEQ ID NO: 2145747 - RNA, 23 nt, Human herpesvirus 7
uugugguacaacaaacauuccaa

SEQ ID NO: 2145748 - RNA, 18 nt, Human herpesvirus 7
uacucuagaacaaacugu

SEQ ID NO: 2145749 - RNA, 20 nt, Human herpesvirus 7
acaaauuuaagagacauuga

SEQ ID NO: 2145750 - RNA, 16 nt, Human herpesvirus 7
auaauagccuuucacu

SEQ ID NO: 2145751 - RNA, 16 nt, Human herpesvirus 7
ucuggauucaagaaau

SEQ ID NO: 2145752 - RNA, 12 nt, Human herpesvirus 7
gcgaaaaugaua

SEQ ID NO: 2145753 - RNA, 17 nt, Human herpesvirus 7
uuguacauuuuaccaaa

SEQ ID NO: 2145754 - RNA, 18 nt, Human herpesvirus 7
agguuuaggaaauugcuu

SEQ ID NO: 2145755 - RNA, 22 nt, Human herpesvirus 7
cacugagccaucaaaaaauuua

SEQ ID NO: 2145756 - RNA, 14 nt, Human herpesvirus 7
auguugcaaauguu

SEQ ID NO: 2145757 - RNA, 19 nt, Human herpesvirus 7
auugugcaucuccuguaac

SEQ ID NO: 2145758 - RNA, 14 nt, Human herpesvirus 7
uaugcaugcaauuu

SEQ ID NO: 2145759 - RNA, 14 nt, Human herpesvirus 7
uccuguucauguuu

SEQ ID NO: 2145760 - RNA, 20 nt, Human herpesvirus 7
guugcacuccuagaaacacg

SEQ ID NO: 2145761 - RNA, 17 nt, Human herpesvirus 7
uaaacuugugaaaauaa

SEQ ID NO: 2145762 - RNA, 18 nt, Human herpesvirus 7
gaagguugucuguucuca

SEQ ID NO: 2145763 - RNA, 16 nt, Human herpesvirus 7
uccgagacagagucaa

SEQ ID NO: 2145764 - RNA, 21 nt, Human herpesvirus 7
acucuggguccggaaguugag

SEQ ID NO: 2145765 - RNA, 16 nt, Human herpesvirus 7
auuauguguacacuuu

SEQ ID NO: 2145766 - RNA, 18 nt, Human herpesvirus 7
agauuaauauauuuuccu

SEQ ID NO: 2145767 - RNA, 18 nt, Human herpesvirus 7
auauugaaggugucuauu

SEQ ID NO: 2145768 - RNA, 17 nt, Human herpesvirus 7
uuuuuguuguuuucaua

SEQ ID NO: 2145769 - RNA, 19 nt, Human herpesvirus 7
gaauaagcaaauaaauugu

SEQ ID NO: 2145770 - RNA, 15 nt, Human herpesvirus 7
agaauacacauuuag

SEQ ID NO: 2145771 - RNA, 18 nt, Human herpesvirus 7
accaaacuauauugaauu

SEQ ID NO: 2145772 - RNA, 16 nt, Human herpesvirus 7
uauguauuuuacugga

SEQ ID NO: 2145773 - RNA, 18 nt, Human herpesvirus 7
cacguucuaaaaaacaaa

SEQ ID NO: 2145774 - RNA, 13 nt, Human herpesvirus 7
uaggauaccaaac

SEQ ID NO: 2145775 - RNA, 18 nt, Human herpesvirus 7
guacaauaauuucuauua

SEQ ID NO: 2145776 - RNA, 19 nt, Human herpesvirus 7
uugacaggugauauucuuu

SEQ ID NO: 2145777 - RNA, 19 nt, Human herpesvirus 7
cucaauuuuucgcugaaga

SEQ ID NO: 2145778 - RNA, 13 nt, Human herpesvirus 7
caaagugaugaaa

SEQ ID NO: 2145779 - RNA, 16 nt, Human herpesvirus 7
gaaguaauuuaugcuu

SEQ ID NO: 2145780 - RNA, 13 nt, Human herpesvirus 7
gucuuacagugcu

SEQ ID NO: 2145781 - RNA, 23 nt, Human herpesvirus 7
cacucugcauuccacuaaaagag

SEQ ID NO: 2145782 - RNA, 17 nt, Human herpesvirus 7
acauuauaaauguaacu

SEQ ID NO: 2145783 - RNA, 20 nt, Human herpesvirus 7
ucaugaacacaacauccaga

SEQ ID NO: 2145784 - RNA, 13 nt, Human herpesvirus 7
gcucucaaucaaa

SEQ ID NO: 2145785 - RNA, 19 nt, Human herpesvirus 7
agaacuugcgaauacuugu

SEQ ID NO: 2145786 - RNA, 11 nt, Human herpesvirus 7
cuguuaagaau

SEQ ID NO: 2145787 - RNA, 14 nt, Human herpesvirus 7
auggauacaaggaa

SEQ ID NO: 2145788 - RNA, 20 nt, Human herpesvirus 7
uuucgaacuugucaccuauu

SEQ ID NO: 2145789 - RNA, 10 nt, Human herpesvirus 7
caggaagcaa

SEQ ID NO: 2145790 - RNA, 16 nt, Human herpesvirus 7
caugauuucaauaauc

SEQ ID NO: 2145791 - RNA, 14 nt, Human herpesvirus 7
aaaaagcagacauu

SEQ ID NO: 2145792 - RNA, 16 nt, Human herpesvirus 7
auucugaaauaaacau

SEQ ID NO: 2145793 - RNA, 18 nt, Human herpesvirus 7
uuguuugcuauuauuaaa

SEQ ID NO: 2145794 - RNA, 12 nt, Human herpesvirus 7
agugaacauuug

SEQ ID NO: 2145795 - RNA, 14 nt, Human herpesvirus 7
auuuucguaucugu

SEQ ID NO: 2145796 - RNA, 14 nt, Human herpesvirus 7
cuuuauuuaauaac

SEQ ID NO: 2145797 - RNA, 20 nt, Human herpesvirus 7
uguuucuuugaaucuauuaa

SEQ ID NO: 2145798 - RNA, 19 nt, Human herpesvirus 7
uuaaaaaagugauugcaga

SEQ ID NO: 2145799 - RNA, 23 nt, Human herpesvirus 7
caaccuuuuaaaaucaaauguaa

SEQ ID NO: 2145800 - RNA, 16 nt, Human herpesvirus 7
auauuugcuugcugaa

SEQ ID NO: 2145801 - RNA, 19 nt, Human herpesvirus 7
auguacugcucaucaaaua

SEQ ID NO: 2145802 - RNA, 16 nt, Human herpesvirus 7
auaugccaaugaacaa

SEQ ID NO: 2145803 - RNA, 15 nt, Human herpesvirus 7
ugcuuuucaugcuuu

SEQ ID NO: 2145804 - RNA, 14 nt, Human herpesvirus 7
agugaauuacagau

SEQ ID NO: 2145805 - RNA, 22 nt, Human herpesvirus 7
acauucucaaaaaugauaugac

SEQ ID NO: 2145806 - RNA, 15 nt, Human herpesvirus 7
aaacauguugaaaga

SEQ ID NO: 2145807 - RNA, 22 nt, Human herpesvirus 7
guuuccacauccgcaccgacag

SEQ ID NO: 2145808 - RNA, 22 nt, Human herpesvirus 7
aauuuugauuccugucuugacc

SEQ ID NO: 2145809 - RNA, 16 nt, Human herpesvirus 7
ucuauuuaaaauauua

SEQ ID NO: 2145810 - RNA, 17 nt, Human herpesvirus 7
cauugaauauaaguuuu

SEQ ID NO: 2145811 - RNA, 12 nt, Human herpesvirus 7
ucaaaauuccau

SEQ ID NO: 2145812 - RNA, 15 nt, Human herpesvirus 7
gaaucacaacauaua

SEQ ID NO: 2145813 - RNA, 23 nt, Human herpesvirus 7
uuguaguuuuugcauauggacuu

SEQ ID NO: 2145814 - RNA, 15 nt, Human herpesvirus 7
aaagugauugcagau

SEQ ID NO: 2145815 - RNA, 16 nt, Human herpesvirus 7
uaaccaaaauguggga

SEQ ID NO: 2145816 - RNA, 19 nt, Human herpesvirus 7
aaaaacaugggauuucugu

SEQ ID NO: 2145817 - RNA, 14 nt, Human herpesvirus 7
cuugcuuugaaaaa

SEQ ID NO: 2145818 - RNA, 18 nt, Human herpesvirus 7
uuaaacuugugaaaauaa

SEQ ID NO: 2145819 - RNA, 20 nt, Human herpesvirus 7
ucuacacaaacgaguuucaa

SEQ ID NO: 2145820 - RNA, 18 nt, Human herpesvirus 7
cauuuauggaaauaggcg

SEQ ID NO: 2145821 - RNA, 15 nt, Human herpesvirus 7
aagauugcuugcacu

SEQ ID NO: 2145822 - RNA, 16 nt, Human herpesvirus 7
gauguauaaaucagaa

SEQ ID NO: 2145823 - RNA, 18 nt, Human herpesvirus 7
auuucuaauagacaaauu

SEQ ID NO: 2145824 - RNA, 22 nt, Human herpesvirus 7
aaauuauuaauauuaguauugu

SEQ ID NO: 2145825 - RNA, 16 nt, Human herpesvirus 7
aucuguagaaaauguu

SEQ ID NO: 2145826 - RNA, 18 nt, Human herpesvirus 7
caugaucuuguaauuucu

SEQ ID NO: 2145827 - RNA, 16 nt, Human herpesvirus 7
gaaaauacuacaguua

SEQ ID NO: 2145828 - RNA, 23 nt, Human herpesvirus 7
cacauacucuagaacaaacugua

SEQ ID NO: 2145829 - RNA, 16 nt, Human herpesvirus 7
caaaaucagaaauguu

SEQ ID NO: 2145830 - RNA, 22 nt, Human herpesvirus 7
agauagcauuuguuacagcuuu

SEQ ID NO: 2145831 - RNA, 14 nt, Human herpesvirus 7
auauaacaaaaaac

SEQ ID NO: 2145832 - RNA, 14 nt, Human herpesvirus 7
aauuagcuaaauaa

SEQ ID NO: 2145833 - RNA, 18 nt, Human herpesvirus 7
gggaaaaagcauaaagca

SEQ ID NO: 2145834 - RNA, 19 nt, Human herpesvirus 7
uaugccacaaaaaacuuug

SEQ ID NO: 2145835 - RNA, 22 nt, Human herpesvirus 7
cuaucaaauuuaucucauagcu

SEQ ID NO: 2145836 - RNA, 15 nt, Human herpesvirus 7
ugcauauuuugcuag

SEQ ID NO: 2145837 - RNA, 13 nt, Human herpesvirus 7
cuugcuagauucu

SEQ ID NO: 2145838 - RNA, 17 nt, Human herpesvirus 7
auuaaaugauuuuaaau

SEQ ID NO: 2145839 - RNA, 14 nt, Human herpesvirus 7
gaauuccaggguaa

SEQ ID NO: 2145840 - RNA, 12 nt, Human herpesvirus 7
gaauuacagaua

SEQ ID NO: 2145841 - RNA, 17 nt, Human herpesvirus 7
uguacgauuuauaucug

SEQ ID NO: 2145842 - RNA, 14 nt, Human herpesvirus 7
gaaauaaugaagga

SEQ ID NO: 2145843 - RNA, 16 nt, Human herpesvirus 7
aagagcucgauuuacu

SEQ ID NO: 2145844 - RNA, 12 nt, Human herpesvirus 7
ucuucuucugag

SEQ ID NO: 2145845 - RNA, 19 nt, Human herpesvirus 7
auguugccuucuaaaacag

SEQ ID NO: 2145846 - RNA, 17 nt, Human herpesvirus 7
uguuaaccaaaaugugg

SEQ ID NO: 2145847 - RNA, 23 nt, Human herpesvirus 7
ucuaacacugcaagcugauucaa

SEQ ID NO: 2145848 - RNA, 14 nt, Human herpesvirus 7
gaguauguugcaua

SEQ ID NO: 2145849 - RNA, 20 nt, Human herpesvirus 7
acaacuuuauggaacaugaa

SEQ ID NO: 2145850 - RNA, 13 nt, Human herpesvirus 7
cuuuaccgauucu

SEQ ID NO: 2145851 - RNA, 21 nt, Human herpesvirus 7
acaauguguuaaauaaagagu

SEQ ID NO: 2145852 - RNA, 20 nt, Human herpesvirus 7
gucagaacaucccuggacag

SEQ ID NO: 2145853 - RNA, 21 nt, Human herpesvirus 7
caaaauucugcuugucucugu

SEQ ID NO: 2145854 - RNA, 22 nt, Human herpesvirus 7
uaguauuguaauaauuuaaaau

SEQ ID NO: 2145855 - RNA, 18 nt, Human herpesvirus 7
guauuuguugaucuucaa

SEQ ID NO: 2145856 - RNA, 16 nt, Human herpesvirus 7
agccauaaaugcuuaa

SEQ ID NO: 2145857 - RNA, 15 nt, Human herpesvirus 7
guuuaaguauguuua

SEQ ID NO: 2145858 - RNA, 15 nt, Human herpesvirus 7
aguacaucuuucuag

SEQ ID NO: 2145859 - RNA, 17 nt, Human herpesvirus 7
auauauaagagaauugc

SEQ ID NO: 2145860 - RNA, 14 nt, Human herpesvirus 7
gagagacaagagga

SEQ ID NO: 2145861 - RNA, 18 nt, Human herpesvirus 7
aaaauuccaaaauguaaa

SEQ ID NO: 2145862 - RNA, 21 nt, Human herpesvirus 7
agcauaugugagaaaacauua

SEQ ID NO: 2145863 - RNA, 17 nt, Human herpesvirus 7
aagagcuuuugcaaagc

SEQ ID NO: 2145864 - RNA, 19 nt, Human herpesvirus 7
aaaccaaguuuuuugagau

SEQ ID NO: 2145865 - RNA, 20 nt, Human herpesvirus 7
uuucuggcaacaguucaaaa

SEQ ID NO: 2145866 - RNA, 16 nt, Human herpesvirus 7
aacuuugcaacaaaau

SEQ ID NO: 2145867 - RNA, 17 nt, Human herpesvirus 7
ucucuaaaauuuucuua

SEQ ID NO: 2145868 - RNA, 22 nt, Human herpesvirus 7
agauauuuuaauucuaaaaauu

SEQ ID NO: 2145869 - RNA, 18 nt, Human herpesvirus 7
gaccuaacaaaaaaauac

SEQ ID NO: 2145870 - RNA, 15 nt, Human herpesvirus 7
uugcucauguugacg

SEQ ID NO: 2145871 - RNA, 15 nt, Human herpesvirus 7
uuauucccaugccua

SEQ ID NO: 2145872 - RNA, 18 nt, Human herpesvirus 7
uuacacaggaauugcugu

SEQ ID NO: 2145873 - RNA, 19 nt, Human herpesvirus 7
aaaguuuauagaacaagua

SEQ ID NO: 2145874 - RNA, 12 nt, Human herpesvirus 7
aaaguacaaaug

SEQ ID NO: 2145875 - RNA, 13 nt, Human herpesvirus 7
uaccaauaaaagg

SEQ ID NO: 2145876 - RNA, 19 nt, Human herpesvirus 7
cuucaauaugcuuaguuuu

SEQ ID NO: 2145877 - RNA, 19 nt, Human herpesvirus 7
guaaauuuacuugauuuuc

SEQ ID NO: 2145878 - RNA, 16 nt, Human herpesvirus 7
cauugaaaucauuuug

SEQ ID NO: 2145879 - RNA, 15 nt, Human herpesvirus 7
acucugaauacguua

SEQ ID NO: 2145880 - RNA, 20 nt, Human herpesvirus 7
aaauagaguuuaauuguacu

SEQ ID NO: 2145881 - RNA, 22 nt, Human herpesvirus 7
caacaacuaaaacuacauuuaa

SEQ ID NO: 2145882 - RNA, 15 nt, Human herpesvirus 7
aauuacacaaauuga

SEQ ID NO: 2145883 - RNA, 12 nt, Human herpesvirus 7
uaaaaacaaugg

SEQ ID NO: 2145884 - RNA, 18 nt, Human herpesvirus 7
auaaauguucuucuguaa

SEQ ID NO: 2145885 - RNA, 16 nt, Human herpesvirus 7
cugugaaguacauucc

SEQ ID NO: 2145886 - RNA, 14 nt, Human herpesvirus 7
acuuuaaauuauua

SEQ ID NO: 2145887 - RNA, 15 nt, Human herpesvirus 7
cauaguaaacacgua

SEQ ID NO: 2145888 - RNA, 13 nt, Human herpesvirus 7
aauuagugaaaac

SEQ ID NO: 2145889 - RNA, 18 nt, Human herpesvirus 7
ucaauaacgaauuauuua

SEQ ID NO: 2145890 - RNA, 22 nt, Human herpesvirus 7
acaauaaugcugugauuuuccu

SEQ ID NO: 2145891 - RNA, 18 nt, Human herpesvirus 7
gacauuugaaauggguuu

SEQ ID NO: 2145892 - RNA, 19 nt, Human herpesvirus 7
acucagagaucauaauuac

SEQ ID NO: 2145893 - RNA, 17 nt, Human herpesvirus 7
ucaucaauguuuucauu

SEQ ID NO: 2145894 - RNA, 18 nt, Human herpesvirus 7
uaaguauuuuacaacaau

SEQ ID NO: 2145895 - RNA, 20 nt, Human herpesvirus 7
guuuggaaaaguugaagaaa

SEQ ID NO: 2145896 - RNA, 18 nt, Human herpesvirus 7
aagagguaaguguaagcu

SEQ ID NO: 2145897 - RNA, 19 nt, Human herpesvirus 7
cuaauucuggaaaauguga

SEQ ID NO: 2145898 - RNA, 16 nt, Human herpesvirus 7
uuguuccugugugcaa

SEQ ID NO: 2145899 - RNA, 13 nt, Human herpesvirus 7
auuucaaaggaag

SEQ ID NO: 2145900 - RNA, 13 nt, Human herpesvirus 7
ggcuuagaauauu

SEQ ID NO: 2145901 - RNA, 19 nt, Human herpesvirus 7
auuuagcaccaacugaauu

SEQ ID NO: 2145902 - RNA, 23 nt, Human herpesvirus 7
caggcauuuaagaauuuaaucau

SEQ ID NO: 2145903 - RNA, 14 nt, Human herpesvirus 7
aaauuuuuagcucu

SEQ ID NO: 2145904 - RNA, 11 nt, Human herpesvirus 7
aauuaaauacu

SEQ ID NO: 2145905 - RNA, 17 nt, Human herpesvirus 7
guuuccgcauaaaaaau

SEQ ID NO: 2145906 - RNA, 22 nt, Human herpesvirus 7
aguuauuuguuccaguugaaug

SEQ ID NO: 2145907 - RNA, 20 nt, Human herpesvirus 7
gauuuuaaaagguugacauc

SEQ ID NO: 2145908 - RNA, 20 nt, Human herpesvirus 7
uccagcaaagacuugcaaag

SEQ ID NO: 2145909 - RNA, 16 nt, Human herpesvirus 7
gaaacgucccugugac

SEQ ID NO: 2145910 - RNA, 20 nt, Human herpesvirus 7
aaaugcgauacuaguuuauu

SEQ ID NO: 2145911 - RNA, 17 nt, Human herpesvirus 7
agaaauaacaaaauugu

SEQ ID NO: 2145912 - RNA, 14 nt, Human herpesvirus 7
agaauuuucaagau

SEQ ID NO: 2145913 - RNA, 15 nt, Human herpesvirus 7
guucuuguuuggaaa

SEQ ID NO: 2145914 - RNA, 21 nt, Human herpesvirus 7
uuauaaaagauggaaaguuua

SEQ ID NO: 2145915 - RNA, 15 nt, Human herpesvirus 7
cauugaaaaugcauu

SEQ ID NO: 2145916 - RNA, 19 nt, Human herpesvirus 7
caaucugugaacugauguu

SEQ ID NO: 2145917 - RNA, 22 nt, Human herpesvirus 7
aaagagaacgaugaauuuuucu

SEQ ID NO: 2145918 - RNA, 13 nt, Human herpesvirus 7
uaauccauuccug

SEQ ID NO: 2145919 - RNA, 10 nt, Human herpesvirus 7
caacaucuuu

SEQ ID NO: 2145920 - RNA, 16 nt, Human herpesvirus 7
agcagacaaggggcau

SEQ ID NO: 2145921 - RNA, 19 nt, Human herpesvirus 7
ugcaacuuuaauuaacacu

SEQ ID NO: 2145922 - RNA, 13 nt, Human herpesvirus 7
aaauaauaacaau

SEQ ID NO: 2145923 - RNA, 23 nt, Human herpesvirus 7
gacauuguacaauuacaaaaugu

SEQ ID NO: 2145924 - RNA, 18 nt, Human herpesvirus 7
acuaucuccuaaaugaau

SEQ ID NO: 2145925 - RNA, 15 nt, Human herpesvirus 7
aaaacgguauguaaa

SEQ ID NO: 2145926 - RNA, 12 nt, Human herpesvirus 7
guuuccauugcu

SEQ ID NO: 2145927 - RNA, 15 nt, Human herpesvirus 7
uucugaaauaaacau

SEQ ID NO: 2145928 - RNA, 22 nt, Human herpesvirus 7
aaacgcuaaccaucugcuggaa

SEQ ID NO: 2145929 - RNA, 16 nt, Human herpesvirus 7
gaacagucccagauaa

SEQ ID NO: 2145930 - RNA, 17 nt, Human herpesvirus 7
uccagauaugacaaauu

SEQ ID NO: 2145931 - RNA, 18 nt, Human herpesvirus 7
acucggaaccgagaaugu

SEQ ID NO: 2145932 - RNA, 17 nt, Human herpesvirus 7
aacggaauaaacaaugu

SEQ ID NO: 2145933 - RNA, 17 nt, Human herpesvirus 7
aaaauaacuuuaaauua

SEQ ID NO: 2145934 - RNA, 15 nt, Human herpesvirus 7
uaaaaaaaaaaccac

SEQ ID NO: 2145935 - RNA, 16 nt, Human herpesvirus 7
aaacacuugcuagcug

SEQ ID NO: 2145936 - RNA, 18 nt, Human herpesvirus 7
cauuuaaaugugucuucc

SEQ ID NO: 2145937 - RNA, 17 nt, Human herpesvirus 7
cuguaucuccaaaguuu

SEQ ID NO: 2145938 - RNA, 19 nt, Human herpesvirus 7
caugaauuaauaaaacaaa

SEQ ID NO: 2145939 - RNA, 22 nt, Human herpesvirus 7
gaacuuuuaaaaaagaacuuac

SEQ ID NO: 2145940 - RNA, 22 nt, Human herpesvirus 7
cacaacauccagagucucuaaa

SEQ ID NO: 2145941 - RNA, 15 nt, Human herpesvirus 7
cgugaacaaauacug

SEQ ID NO: 2145942 - RNA, 19 nt, Human herpesvirus 7
cuacauauggacaaauuug

SEQ ID NO: 2145943 - RNA, 21 nt, Human herpesvirus 7
agcuggaauuguaauugaaag

SEQ ID NO: 2145944 - RNA, 18 nt, Human herpesvirus 7
aagagaaaguaaaagcua

SEQ ID NO: 2145945 - RNA, 22 nt, Human herpesvirus 7
aagucugugacagauuuaagug

SEQ ID NO: 2145946 - RNA, 12 nt, Human herpesvirus 7
cuaaaaaaauuc

SEQ ID NO: 2145947 - RNA, 17 nt, Human herpesvirus 7
acuacuaacauggaaau

SEQ ID NO: 2145948 - RNA, 16 nt, Human herpesvirus 7
cuaggauaccaaacaa

SEQ ID NO: 2145949 - RNA, 17 nt, Human herpesvirus 7
uaaauuaaaaagaaugc

SEQ ID NO: 2145950 - RNA, 17 nt, Human herpesvirus 7
uuuuaaacuugugaaaa

SEQ ID NO: 2145951 - RNA, 18 nt, Human herpesvirus 7
gcaauguauauaagcaga

SEQ ID NO: 2145952 - RNA, 22 nt, Human herpesvirus 7
caaugagacagcaacugugcau

SEQ ID NO: 2145953 - RNA, 18 nt, Human herpesvirus 7
aauuugagcuuugacaaa

SEQ ID NO: 2145954 - RNA, 19 nt, Human herpesvirus 7
acauauuuaauuucucguu

SEQ ID NO: 2145955 - RNA, 12 nt, Human herpesvirus 7
uauacaacuuua

SEQ ID NO: 2145956 - RNA, 17 nt, Human herpesvirus 7
agagaauauguuaucau

SEQ ID NO: 2145957 - RNA, 19 nt, Human herpesvirus 7
guuacccaaaauguaaaau

SEQ ID NO: 2145958 - RNA, 12 nt, Human herpesvirus 7
ugcaugaaaucu

SEQ ID NO: 2145959 - RNA, 19 nt, Human herpesvirus 7
aauagauacguuaguugca

SEQ ID NO: 2145960 - RNA, 22 nt, Human herpesvirus 7
uucgcaaauguacaauuugcau

SEQ ID NO: 2145961 - RNA, 14 nt, Human herpesvirus 7
cuauuacacaggaa

SEQ ID NO: 2145962 - RNA, 20 nt, Human herpesvirus 7
aagaaugaacaccgcaaaca

SEQ ID NO: 2145963 - RNA, 18 nt, Human herpesvirus 7
cuauugaaaauuuauuga

SEQ ID NO: 2145964 - RNA, 15 nt, Human herpesvirus 7
uacgaacgcuuaaua

SEQ ID NO: 2145965 - RNA, 15 nt, Human herpesvirus 7
aaauuauuaauauua

SEQ ID NO: 2145966 - RNA, 14 nt, Human herpesvirus 7
aaagcgagcuuucu

SEQ ID NO: 2145967 - RNA, 19 nt, Human herpesvirus 7
caaacaaugagcaauucau

SEQ ID NO: 2145968 - RNA, 23 nt, Human herpesvirus 7
acuuguuuugacuuauggugugg

SEQ ID NO: 2145969 - RNA, 23 nt, Human herpesvirus 7
uuugacaaucuuggcauugaaau

SEQ ID NO: 2145970 - RNA, 12 nt, Human herpesvirus 7
uacgguuuucag

SEQ ID NO: 2145971 - RNA, 16 nt, Human herpesvirus 7
uugcuguucuugcugg

SEQ ID NO: 2145972 - RNA, 13 nt, Human herpesvirus 7
augaacaaauaau

SEQ ID NO: 2145973 - RNA, 18 nt, Human herpesvirus 7
aacgauccaguacuugca

SEQ ID NO: 2145974 - RNA, 22 nt, Human herpesvirus 7
caucauguuaaaaaaucaacuu

SEQ ID NO: 2145975 - RNA, 21 nt, Human herpesvirus 7
cuaaaguauggaaaaauguua

SEQ ID NO: 2145976 - RNA, 13 nt, Human herpesvirus 7
aacaauguguuaa

SEQ ID NO: 2145977 - RNA, 23 nt, Human herpesvirus 7
gagcauauuccauuaagccagau

SEQ ID NO: 2145978 - RNA, 20 nt, Human herpesvirus 7
cuaagacggaacuucuuucu

SEQ ID NO: 2145979 - RNA, 12 nt, Human herpesvirus 7
ugcgucucuuug

SEQ ID NO: 2145980 - RNA, 14 nt, Human herpesvirus 7
uauuuuacauauua

SEQ ID NO: 2145981 - RNA, 15 nt, Human herpesvirus 7
auuguacauuuuacc

SEQ ID NO: 2145982 - RNA, 23 nt, Human herpesvirus 7
aauagaugucugcauagacagua

SEQ ID NO: 2145983 - RNA, 13 nt, Human herpesvirus 7
agauucuccagaa

SEQ ID NO: 2145984 - RNA, 13 nt, Human herpesvirus 7
ucgcugaugaaaa

SEQ ID NO: 2145985 - RNA, 12 nt, Human herpesvirus 7
gauuucuacaau

SEQ ID NO: 2145986 - RNA, 15 nt, Human herpesvirus 7
uuuaacgauuccaaa

SEQ ID NO: 2145987 - RNA, 18 nt, Human herpesvirus 7
uacauguuuaacaaacaa

SEQ ID NO: 2145988 - RNA, 19 nt, Human herpesvirus 7
gcuuugaucuacauauacu

SEQ ID NO: 2145989 - RNA, 23 nt, Human herpesvirus 7
aaaauaugaguguggugacagaa

SEQ ID NO: 2145990 - RNA, 21 nt, Human herpesvirus 7
auuccugcuugcacaaagauc

SEQ ID NO: 2145991 - RNA, 18 nt, Human herpesvirus 7
cauuuaaaaaaucugaau

SEQ ID NO: 2145992 - RNA, 19 nt, Human herpesvirus 7
aacuguacccaaaaauaag

SEQ ID NO: 2145993 - RNA, 15 nt, Human herpesvirus 7
auucucgcuucaaag

SEQ ID NO: 2145994 - RNA, 16 nt, Human herpesvirus 7
uggaaaugagauuucu

SEQ ID NO: 2145995 - RNA, 22 nt, Human herpesvirus 7
cacgugccgcguuuuaaaauug

SEQ ID NO: 2145996 - RNA, 21 nt, Human herpesvirus 7
uuuauccaucaaaagucuugu

SEQ ID NO: 2145997 - RNA, 19 nt, Human herpesvirus 7
uaauaaaaguaucauuaaa

SEQ ID NO: 2145998 - RNA, 16 nt, Human herpesvirus 7
aauguucgcaaaugua

SEQ ID NO: 2145999 - RNA, 17 nt, Human herpesvirus 7
caucccugcugauacaa

SEQ ID NO: 2146000 - RNA, 19 nt, Human herpesvirus 7
ugaacaccgcaaacauuuu

SEQ ID NO: 2146001 - RNA, 19 nt, Human herpesvirus 7
aucucagaaguuucaauug

SEQ ID NO: 2146002 - RNA, 16 nt, Human herpesvirus 7
aauggauuuaaucgau

SEQ ID NO: 2146003 - RNA, 17 nt, Human herpesvirus 7
aauguuuaaauuacagu

SEQ ID NO: 2146004 - RNA, 23 nt, Human herpesvirus 7
gaucguguguuacuauuugacug

SEQ ID NO: 2146005 - RNA, 18 nt, Human herpesvirus 7
aagcccaaacuguuuuua

SEQ ID NO: 2146006 - RNA, 15 nt, Human herpesvirus 7
uauaugaaauuucaa

SEQ ID NO: 2146007 - RNA, 21 nt, Human herpesvirus 7
gaauauggaacguuugaaucu

SEQ ID NO: 2146008 - RNA, 21 nt, Human herpesvirus 7
ucgaacccuggagagacauag

SEQ ID NO: 2146009 - RNA, 15 nt, Human herpesvirus 7
gagauuccaaagagc

SEQ ID NO: 2146010 - RNA, 16 nt, Human herpesvirus 7
gaaagggauuuauuau

SEQ ID NO: 2146011 - RNA, 19 nt, Human herpesvirus 7
agaacauuuauuuucuuaa

SEQ ID NO: 2146012 - RNA, 15 nt, Human herpesvirus 7
aagccauaaaaugua

SEQ ID NO: 2146013 - RNA, 12 nt, Human herpesvirus 7
caaagcaagcau

SEQ ID NO: 2146014 - RNA, 21 nt, Human herpesvirus 7
cagggaagaaacagcugaaaa

SEQ ID NO: 2146015 - RNA, 15 nt, Human herpesvirus 7
ucucaaaacaaacuc

SEQ ID NO: 2146016 - RNA, 20 nt, Human herpesvirus 7
uucuggaucugccucugccu

SEQ ID NO: 2146017 - RNA, 14 nt, Human herpesvirus 7
acgaugauauuguc

SEQ ID NO: 2146018 - RNA, 16 nt, Human herpesvirus 7
uuucauagcacucaua

SEQ ID NO: 2146019 - RNA, 16 nt, Human herpesvirus 7
auuaauauauuuuccu

SEQ ID NO: 2146020 - RNA, 17 nt, Human herpesvirus 7
ucuuacggcucuaacau

SEQ ID NO: 2146021 - RNA, 17 nt, Human herpesvirus 7
acaugggauuucuguaa

SEQ ID NO: 2146022 - RNA, 16 nt, Human herpesvirus 7
gaaaacgcgauaaugu

SEQ ID NO: 2146023 - RNA, 13 nt, Human herpesvirus 7
auuaugauguuuc

SEQ ID NO: 2146024 - RNA, 14 nt, Human herpesvirus 7
auuauuuuuaaaaa

SEQ ID NO: 2146025 - RNA, 23 nt, Human herpesvirus 7
auuccaaaaucaaguguuucuuu

SEQ ID NO: 2146026 - RNA, 19 nt, Human herpesvirus 7
uacucuucucgaagaauuc

SEQ ID NO: 2146027 - RNA, 20 nt, Human herpesvirus 7
uauaaaacgugugaaaacaa

SEQ ID NO: 2146028 - RNA, 22 nt, Human herpesvirus 7
gaaaaugaugguugcaauacaa

SEQ ID NO: 2146029 - RNA, 16 nt, Human herpesvirus 7
cauauuaacaagcaca

SEQ ID NO: 2146030 - RNA, 15 nt, Human herpesvirus 7
agacaaaaccaaacu

SEQ ID NO: 2146031 - RNA, 21 nt, Human herpesvirus 7
guugcuucuucgagucaguua

SEQ ID NO: 2146032 - RNA, 19 nt, Human herpesvirus 7
auuugguguacuacauauu

SEQ ID NO: 2146033 - RNA, 18 nt, Human herpesvirus 7
agaaauuaugaaaagcuu

SEQ ID NO: 2146034 - RNA, 20 nt, Human herpesvirus 7
cuucuuugugagaaauggaa

SEQ ID NO: 2146035 - RNA, 23 nt, Human herpesvirus 7
ggaaacuauucgaaaauaucuuc

SEQ ID NO: 2146036 - RNA, 22 nt, Human herpesvirus 7
auaaagagucuauugacauaau

SEQ ID NO: 2146037 - RNA, 23 nt, Human herpesvirus 7
caguuuguuguaugugaaaagaa

SEQ ID NO: 2146038 - RNA, 17 nt, Human herpesvirus 7
ucuucugaaucugcaaa

SEQ ID NO: 2146039 - RNA, 19 nt, Human herpesvirus 7
gcauuccuuggaaaaauga

SEQ ID NO: 2146040 - RNA, 17 nt, Human herpesvirus 7
uuacaugaucuuguaau

SEQ ID NO: 2146041 - RNA, 19 nt, Human herpesvirus 7
aauaccaugaaaaauauga

SEQ ID NO: 2146042 - RNA, 18 nt, Human herpesvirus 7
gaaacgucccugugacag

SEQ ID NO: 2146043 - RNA, 14 nt, Human herpesvirus 7
ggaaugcaucugaa

SEQ ID NO: 2146044 - RNA, 17 nt, Human herpesvirus 7
caugaguacuguuucua

SEQ ID NO: 2146045 - RNA, 18 nt, Human herpesvirus 7
ccauuccguuuuaaauag

SEQ ID NO: 2146046 - RNA, 23 nt, Human herpesvirus 7
uuaacacguagaaaaaaacaaug

SEQ ID NO: 2146047 - RNA, 19 nt, Human herpesvirus 7
acgcuuaauagaaauuauu

SEQ ID NO: 2146048 - RNA, 17 nt, Human herpesvirus 7
uguccagccaaaaucua

SEQ ID NO: 2146049 - RNA, 14 nt, Human herpesvirus 7
cucucuuucuggag

SEQ ID NO: 2146050 - RNA, 20 nt, Human herpesvirus 7
acaugucuuuuaguuuucau

SEQ ID NO: 2146051 - RNA, 20 nt, Human herpesvirus 7
acgugagggggacaauuauu

SEQ ID NO: 2146052 - RNA, 14 nt, Human herpesvirus 7
uagucugcguuacu

SEQ ID NO: 2146053 - RNA, 14 nt, Human herpesvirus 7
auuuuaacacuguu

SEQ ID NO: 2146054 - RNA, 22 nt, Human herpesvirus 7
agcauauaucuuugauuacucg

SEQ ID NO: 2146055 - RNA, 13 nt, Human herpesvirus 7
guuacauuauuau

SEQ ID NO: 2146056 - RNA, 16 nt, Human herpesvirus 7
aagauuuaacaugugu

SEQ ID NO: 2146057 - RNA, 19 nt, Human herpesvirus 7
cuguugauaaauuuaaaga

SEQ ID NO: 2146058 - RNA, 22 nt, Human herpesvirus 7
gcuaacgauccaguacuugcau

SEQ ID NO: 2146059 - RNA, 18 nt, Human herpesvirus 7
augugugugguaaggcag

SEQ ID NO: 2146060 - RNA, 15 nt, Human herpesvirus 7
aucaaggucuuucau

SEQ ID NO: 2146061 - RNA, 16 nt, Human herpesvirus 7
agcuucaaaaauguuu

SEQ ID NO: 2146062 - RNA, 12 nt, Human herpesvirus 7
uucaaguuucuu

SEQ ID NO: 2146063 - RNA, 16 nt, Human herpesvirus 7
cucuagaacaaacugu

SEQ ID NO: 2146064 - RNA, 13 nt, Human herpesvirus 7
augguuugaaaac

SEQ ID NO: 2146065 - RNA, 17 nt, Human herpesvirus 7
ugggcguaacugugacg

SEQ ID NO: 2146066 - RNA, 16 nt, Human herpesvirus 7
ucuaaauaugaugaaa

SEQ ID NO: 2146067 - RNA, 21 nt, Human herpesvirus 7
acuacauuuaaaaaaucugaa

SEQ ID NO: 2146068 - RNA, 15 nt, Human herpesvirus 7
uaauuacuucuuuga

SEQ ID NO: 2146069 - RNA, 19 nt, Human herpesvirus 7
ugaauuaagguggaaaucu

SEQ ID NO: 2146070 - RNA, 19 nt, Human herpesvirus 7
acacaagguacauuuugca

SEQ ID NO: 2146071 - RNA, 22 nt, Human herpesvirus 7
auuuaggacuuuacacggucuu

SEQ ID NO: 2146072 - RNA, 14 nt, Human herpesvirus 7
aaggaagacacgga

SEQ ID NO: 2146073 - RNA, 21 nt, Human herpesvirus 7
cugagacggacuuauguccag

SEQ ID NO: 2146074 - RNA, 19 nt, Human herpesvirus 7
uuuacaaacauguuccauu

SEQ ID NO: 2146075 - RNA, 21 nt, Human herpesvirus 7
gaaugccaucuauaaacauuc

SEQ ID NO: 2146076 - RNA, 17 nt, Human herpesvirus 7
uugacaaugucaauaau

SEQ ID NO: 2146077 - RNA, 21 nt, Human herpesvirus 7
cuuuaacuggaauuauacacu

SEQ ID NO: 2146078 - RNA, 20 nt, Human herpesvirus 7
gaagagcuuuuuaaguaaau

SEQ ID NO: 2146079 - RNA, 20 nt, Human herpesvirus 7
aguuuuggguuuaugaugca

SEQ ID NO: 2146080 - RNA, 20 nt, Human herpesvirus 7
uaauuuggaaauuguuugau

SEQ ID NO: 2146081 - RNA, 13 nt, Human herpesvirus 7
auuuuauuuuccc

SEQ ID NO: 2146082 - RNA, 16 nt, Human herpesvirus 7
auggacggcauuuaac

SEQ ID NO: 2146083 - RNA, 16 nt, Human herpesvirus 7
cucaauuaaaacaucu

SEQ ID NO: 2146084 - RNA, 13 nt, Human herpesvirus 7
guuuaugaacaag

SEQ ID NO: 2146085 - RNA, 12 nt, Human herpesvirus 7
aaugaugaugua

SEQ ID NO: 2146086 - RNA, 21 nt, Human herpesvirus 7
uuuucaugguauuuguuagaa

SEQ ID NO: 2146087 - RNA, 21 nt, Human herpesvirus 7
aaugaauucuuugcaaucauu

SEQ ID NO: 2146088 - RNA, 19 nt, Human herpesvirus 7
uggaguuagcgaggcauuu

SEQ ID NO: 2146089 - RNA, 20 nt, Human herpesvirus 7
aaaaaucaguguaacucugc

SEQ ID NO: 2146090 - RNA, 16 nt, Human herpesvirus 7
uggaaaaacagaaugu

SEQ ID NO: 2146091 - RNA, 22 nt, Human herpesvirus 7
cucaauaguuuuacaaagaaca

SEQ ID NO: 2146092 - RNA, 14 nt, Human herpesvirus 7
gaaucuauuaaaga

SEQ ID NO: 2146093 - RNA, 14 nt, Human herpesvirus 7
gcuugaugaaucaa

SEQ ID NO: 2146094 - RNA, 20 nt, Human herpesvirus 7
aaagauuuaaaguaagaaug

SEQ ID NO: 2146095 - RNA, 14 nt, Human herpesvirus 7
cugucuauuucaau

SEQ ID NO: 2146096 - RNA, 17 nt, Human herpesvirus 7
uagaaacgucccuguga

SEQ ID NO: 2146097 - RNA, 16 nt, Human herpesvirus 7
uuuuuaaaaaugauuu

SEQ ID NO: 2146098 - RNA, 13 nt, Human herpesvirus 7
aaauaaacaauau

SEQ ID NO: 2146099 - RNA, 20 nt, Human herpesvirus 7
auaucuguuuuuuuucucgu

SEQ ID NO: 2146100 - RNA, 22 nt, Human herpesvirus 7
uagauuuggaugacauuuugga

SEQ ID NO: 2146101 - RNA, 22 nt, Human herpesvirus 7
aaguucuccuuguuguguuuua

SEQ ID NO: 2146102 - RNA, 16 nt, Human herpesvirus 7
gucuaagucaauuaaa

SEQ ID NO: 2146103 - RNA, 23 nt, Human herpesvirus 7
gaaaauggagcauuauuggauaa

SEQ ID NO: 2146104 - RNA, 18 nt, Human herpesvirus 7
ugaauuauguauaucuuu

SEQ ID NO: 2146105 - RNA, 16 nt, Human herpesvirus 7
acuaagcauauugaag

SEQ ID NO: 2146106 - RNA, 17 nt, Human herpesvirus 7
acugagacgagcaucua

SEQ ID NO: 2146107 - RNA, 16 nt, Human herpesvirus 7
cuugauuuucuuacac

SEQ ID NO: 2146108 - RNA, 23 nt, Human herpesvirus 7
uccuuugauagggauucuuugaa

SEQ ID NO: 2146109 - RNA, 18 nt, Human herpesvirus 7
caauagcauaugcuggau

SEQ ID NO: 2146110 - RNA, 17 nt, Human herpesvirus 7
uagaagaaugcaagccu

SEQ ID NO: 2146111 - RNA, 15 nt, Human herpesvirus 7
cuacaaaaguucugu

SEQ ID NO: 2146112 - RNA, 23 nt, Human herpesvirus 7
uaauuucucaaaucuuuaagaau

SEQ ID NO: 2146113 - RNA, 15 nt, Human herpesvirus 7
auaaucaucuuucuu

SEQ ID NO: 2146114 - RNA, 17 nt, Human herpesvirus 7
aacaaaaugacaaaaag

SEQ ID NO: 2146115 - RNA, 13 nt, Human herpesvirus 7
uucuccaugcaua

SEQ ID NO: 2146116 - RNA, 20 nt, Human herpesvirus 7
aucuuuacuuucauagcuua

SEQ ID NO: 2146117 - RNA, 9 nt, Human herpesvirus 7
augaagaua

SEQ ID NO: 2146118 - RNA, 21 nt, Human herpesvirus 7
auuguaugggaaaaauaagaa

SEQ ID NO: 2146119 - RNA, 15 nt, Human herpesvirus 7
agugucugcccuuuu

SEQ ID NO: 2146120 - RNA, 13 nt, Human herpesvirus 7
auaucuaugaugc

SEQ ID NO: 2146121 - RNA, 17 nt, Human herpesvirus 7
ccaaaaucuauauuuga

SEQ ID NO: 2146122 - RNA, 17 nt, Human herpesvirus 7
uguguacuaaagccaau

SEQ ID NO: 2146123 - RNA, 15 nt, Human herpesvirus 7
uuugcuucuucuaau

SEQ ID NO: 2146124 - RNA, 20 nt, Human herpesvirus 7
aaaaugauaugacauggcca

SEQ ID NO: 2146125 - RNA, 16 nt, Human herpesvirus 7
aacugugcaugaaauc

SEQ ID NO: 2146126 - RNA, 13 nt, Human herpesvirus 7
uaauuaaaguugc

SEQ ID NO: 2146127 - RNA, 16 nt, Human herpesvirus 7
cagaccuaacaaaaaa

SEQ ID NO: 2146128 - RNA, 12 nt, Human herpesvirus 7
cugguauguuuu

SEQ ID NO: 2146129 - RNA, 18 nt, Human herpesvirus 7
uucugcuaauucuggaaa

SEQ ID NO: 2146130 - RNA, 11 nt, Human herpesvirus 7
auauuaaauga

SEQ ID NO: 2146131 - RNA, 14 nt, Human herpesvirus 7
gcauuccuuggaaa

SEQ ID NO: 2146132 - RNA, 18 nt, Human herpesvirus 7
agaauacuacucagaaga

SEQ ID NO: 2146133 - RNA, 17 nt, Human herpesvirus 7
gauuguuuaauuaacca

SEQ ID NO: 2146134 - RNA, 18 nt, Human herpesvirus 7
cuagcucaguccauuagu

SEQ ID NO: 2146135 - RNA, 23 nt, Human herpesvirus 7
cgagaauaaaucaaccaacauuc

SEQ ID NO: 2146136 - RNA, 17 nt, Human herpesvirus 7
cuuugacaaaaauguua

SEQ ID NO: 2146137 - RNA, 23 nt, Human herpesvirus 7
caagucugaaggcugcuuuuuca

SEQ ID NO: 2146138 - RNA, 17 nt, Human herpesvirus 7
ucaaaacagaacuuuug

SEQ ID NO: 2146139 - RNA, 18 nt, Human herpesvirus 7
aaaaaugaggauaauaaa

SEQ ID NO: 2146140 - RNA, 19 nt, Human herpesvirus 7
acagaaauugaugaagaca

SEQ ID NO: 2146141 - RNA, 18 nt, Human herpesvirus 7
auuucaauaaucaaugca

SEQ ID NO: 2146142 - RNA, 15 nt, Human herpesvirus 7
cuaaugguuggauuu

SEQ ID NO: 2146143 - RNA, 16 nt, Human herpesvirus 7
acugcaaauuguaaau

SEQ ID NO: 2146144 - RNA, 12 nt, Human herpesvirus 7
guuugaauaucu

SEQ ID NO: 2146145 - RNA, 16 nt, Human herpesvirus 7
uuccaucacaaaacuc

SEQ ID NO: 2146146 - RNA, 17 nt, Human herpesvirus 7
agucaacacauaucuag

SEQ ID NO: 2146147 - RNA, 13 nt, Human herpesvirus 7
gaaaaauuuguua

SEQ ID NO: 2146148 - RNA, 19 nt, Human herpesvirus 7
aaaaguucuuugaaauagu

SEQ ID NO: 2146149 - RNA, 20 nt, Human herpesvirus 7
acaauggugugucugugguu

SEQ ID NO: 2146150 - RNA, 14 nt, Human herpesvirus 7
cuauuguucuuuca

SEQ ID NO: 2146151 - RNA, 18 nt, Human herpesvirus 7
acccuggagagacauaga

SEQ ID NO: 2146152 - RNA, 12 nt, Human herpesvirus 7
auaucuaugaug

SEQ ID NO: 2146153 - RNA, 16 nt, Human herpesvirus 7
auuccgauuuaaguga

SEQ ID NO: 2146154 - RNA, 12 nt, Human herpesvirus 7
uuuaaaaguuug

SEQ ID NO: 2146155 - RNA, 19 nt, Human herpesvirus 7
uguaucaauauucgaauuu

SEQ ID NO: 2146156 - RNA, 14 nt, Human herpesvirus 7
ucuggaucugccuc

SEQ ID NO: 2146157 - RNA, 14 nt, Human herpesvirus 7
uccuucuaccucuu

SEQ ID NO: 2146158 - RNA, 22 nt, Human herpesvirus 7
cagcuagauugacuaugaauuu

SEQ ID NO: 2146159 - RNA, 15 nt, Human herpesvirus 7
acuguauaaucuuaa

SEQ ID NO: 2146160 - RNA, 13 nt, Human herpesvirus 7
aauauuuaugccu

SEQ ID NO: 2146161 - RNA, 22 nt, Human herpesvirus 7
cuaucacaaccuggauguaaug

SEQ ID NO: 2146162 - RNA, 16 nt, Human herpesvirus 7
aaaucuuuauugguaa

SEQ ID NO: 2146163 - RNA, 19 nt, Human herpesvirus 7
ggcuuaagcagcagacaag

SEQ ID NO: 2146164 - RNA, 20 nt, Human herpesvirus 7
auagugaaucauauuuuagu

SEQ ID NO: 2146165 - RNA, 19 nt, Human herpesvirus 7
ugcuuuuagaaaaucaaaa

SEQ ID NO: 2146166 - RNA, 17 nt, Human herpesvirus 7
ucagaaauguuacuuaa

SEQ ID NO: 2146167 - RNA, 14 nt, Human herpesvirus 7
aucaaaaaauaauu

SEQ ID NO: 2146168 - RNA, 18 nt, Human herpesvirus 7
ggaaaugagauuucugaa

SEQ ID NO: 2146169 - RNA, 18 nt, Human herpesvirus 7
ucuggaaucgaauacagu

SEQ ID NO: 2146170 - RNA, 23 nt, Human herpesvirus 7
auaaugucauucguguuaguaga

SEQ ID NO: 2146171 - RNA, 22 nt, Human herpesvirus 7
aaguaaaagagaaaaaauagug

SEQ ID NO: 2146172 - RNA, 15 nt, Human herpesvirus 7
cuguagauauuuuga

SEQ ID NO: 2146173 - RNA, 18 nt, Human herpesvirus 7
cagcuaucucuacaaaca

SEQ ID NO: 2146174 - RNA, 20 nt, Human herpesvirus 7
uucacaucuagaguaucuuu

SEQ ID NO: 2146175 - RNA, 19 nt, Human herpesvirus 7
gacaaggaaccguuugcag

SEQ ID NO: 2146176 - RNA, 14 nt, Human herpesvirus 7
ugauuuucuuacac

SEQ ID NO: 2146177 - RNA, 22 nt, Human herpesvirus 7
gccagaucguucauugauuaua

SEQ ID NO: 2146178 - RNA, 16 nt, Human herpesvirus 7
caucguaaaaaaugua

SEQ ID NO: 2146179 - RNA, 18 nt, Human herpesvirus 7
uuaucauuucaaauguag

SEQ ID NO: 2146180 - RNA, 14 nt, Human herpesvirus 7
agcacuacuagaaa

SEQ ID NO: 2146181 - RNA, 17 nt, Human herpesvirus 7
auaugcaaaacaaaaua

SEQ ID NO: 2146182 - RNA, 19 nt, Human herpesvirus 7
uugguuuuacaaauuaaag

SEQ ID NO: 2146183 - RNA, 21 nt, Human herpesvirus 7
cuuucuguuuaaguauguuua

SEQ ID NO: 2146184 - RNA, 18 nt, Human herpesvirus 7
acaccccaugcaagaaaa

SEQ ID NO: 2146185 - RNA, 18 nt, Human herpesvirus 7
auaaaaccauuuauugau

SEQ ID NO: 2146186 - RNA, 19 nt, Human herpesvirus 7
caugacuucagaaaaacca

SEQ ID NO: 2146187 - RNA, 14 nt, Human herpesvirus 7
cuucgcugcuguga

SEQ ID NO: 2146188 - RNA, 22 nt, Human herpesvirus 7
aaacauuucaaaaucagaaaug

SEQ ID NO: 2146189 - RNA, 18 nt, Human herpesvirus 7
caauagguuccacacagg

SEQ ID NO: 2146190 - RNA, 19 nt, Human herpesvirus 7
acuucuuugacaaaaaugu

SEQ ID NO: 2146191 - RNA, 20 nt, Human herpesvirus 7
uucggcugaguaaaacucaa

SEQ ID NO: 2146192 - RNA, 23 nt, Human herpesvirus 7
uuauguccgcuuacaagaugcga

SEQ ID NO: 2146193 - RNA, 22 nt, Human herpesvirus 7
agaauuuggauagauacauuau

SEQ ID NO: 2146194 - RNA, 18 nt, Human herpesvirus 7
ugucuucggccuugcuga

SEQ ID NO: 2146195 - RNA, 15 nt, Human herpesvirus 7
aaaacaucagaccua

SEQ ID NO: 2146196 - RNA, 15 nt, Human herpesvirus 7
gcaugcuugcuuugc

SEQ ID NO: 2146197 - RNA, 18 nt, Human herpesvirus 7
cauaugcuggaucuucug

SEQ ID NO: 2146198 - RNA, 22 nt, Human herpesvirus 7
ucaauaguuuuacaaagaacau

SEQ ID NO: 2146199 - RNA, 23 nt, Human herpesvirus 7
cgcagucuaaaaguaaagggaaa

SEQ ID NO: 2146200 - RNA, 23 nt, Human herpesvirus 7
uacuggaccacguuuuugcagag

SEQ ID NO: 2146201 - RNA, 20 nt, Human herpesvirus 7
guagaauguguuucagcuuu

SEQ ID NO: 2146202 - RNA, 17 nt, Human herpesvirus 7
gaugcauccaaagaaaa

SEQ ID NO: 2146203 - RNA, 19 nt, Human herpesvirus 7
gcaacaaacaaauaauuca

SEQ ID NO: 2146204 - RNA, 23 nt, Human herpesvirus 7
acauuuauuauuuuuaaaaauga

SEQ ID NO: 2146205 - RNA, 17 nt, Human herpesvirus 7
gcaauuuucauaaagau

SEQ ID NO: 2146206 - RNA, 15 nt, Human herpesvirus 7
guuugcucugaaaaa

SEQ ID NO: 2146207 - RNA, 19 nt, Human herpesvirus 7
cuuagaucgaacuguuaca

SEQ ID NO: 2146208 - RNA, 22 nt, Human herpesvirus 7
cucaauuuuucgcugaagaaca

SEQ ID NO: 2146209 - RNA, 14 nt, Human herpesvirus 7
caauuauagaaaca

SEQ ID NO: 2146210 - RNA, 21 nt, Human herpesvirus 7
augaacaaguuucaaaaagug

SEQ ID NO: 2146211 - RNA, 15 nt, Human herpesvirus 7
acagcaacugugcau

SEQ ID NO: 2146212 - RNA, 13 nt, Human herpesvirus 7
uaaagcuuucaau

SEQ ID NO: 2146213 - RNA, 14 nt, Human herpesvirus 7
cacuaaaagagaac

SEQ ID NO: 2146214 - RNA, 14 nt, Human herpesvirus 7
agauauuuugacaa

SEQ ID NO: 2146215 - RNA, 20 nt, Human herpesvirus 7
caaauguuuuaauuuggaaa

SEQ ID NO: 2146216 - RNA, 13 nt, Human herpesvirus 7
uguucuguuuauu

SEQ ID NO: 2146217 - RNA, 19 nt, Human herpesvirus 7
augccaucuauaaacauuc

SEQ ID NO: 2146218 - RNA, 20 nt, Human herpesvirus 7
cuuuucuuaaacaugauuua

SEQ ID NO: 2146219 - RNA, 18 nt, Human herpesvirus 7
guugggaugacaacggua

SEQ ID NO: 2146220 - RNA, 16 nt, Human herpesvirus 7
aauuuacccugaaaag

SEQ ID NO: 2146221 - RNA, 18 nt, Human herpesvirus 7
aucuggagaacaauuaga

SEQ ID NO: 2146222 - RNA, 20 nt, Human herpesvirus 7
aaucuuugacuguaucucca

SEQ ID NO: 2146223 - RNA, 17 nt, Human herpesvirus 7
caaaaaacguaaaacug

SEQ ID NO: 2146224 - RNA, 13 nt, Human herpesvirus 7
acucauugggagu

SEQ ID NO: 2146225 - RNA, 15 nt, Human herpesvirus 7
aagacauuauuugcu

SEQ ID NO: 2146226 - RNA, 16 nt, Human herpesvirus 7
agucucaauaguuuua

SEQ ID NO: 2146227 - RNA, 18 nt, Human herpesvirus 7
acuguaauauaauuauuu

SEQ ID NO: 2146228 - RNA, 13 nt, Human herpesvirus 7
ccaccguugggaa

SEQ ID NO: 2146229 - RNA, 18 nt, Human herpesvirus 7
cgaacugauauuaaauca

SEQ ID NO: 2146230 - RNA, 20 nt, Human herpesvirus 7
cuugugaaaauaacaggaaa

SEQ ID NO: 2146231 - RNA, 22 nt, Human herpesvirus 7
ccaggaacagauucuccagaaa

SEQ ID NO: 2146232 - RNA, 21 nt, Human herpesvirus 7
uccaaucauaauuuucaugaa

SEQ ID NO: 2146233 - RNA, 20 nt, Human herpesvirus 7
agacuauaaaaagugcucug

SEQ ID NO: 2146234 - RNA, 16 nt, Human herpesvirus 7
uuugaacuuguuuuga

SEQ ID NO: 2146235 - RNA, 22 nt, Human herpesvirus 7
uacgaaugccaucuauaaacau

SEQ ID NO: 2146236 - RNA, 19 nt, Human herpesvirus 7
caccccaaaaucaaaaaac

SEQ ID NO: 2146237 - RNA, 20 nt, Human herpesvirus 7
auguaugaaaaaaacauuau

SEQ ID NO: 2146238 - RNA, 14 nt, Human herpesvirus 7
guagaaaauguuuu

SEQ ID NO: 2146239 - RNA, 17 nt, Human herpesvirus 7
ccauuuccucuggaaaa

SEQ ID NO: 2146240 - RNA, 16 nt, Human herpesvirus 7
uaucgcgaaacagcgu

SEQ ID NO: 2146241 - RNA, 14 nt, Human herpesvirus 7
aaagaccuguacug

SEQ ID NO: 2146242 - RNA, 14 nt, Human herpesvirus 7
uaaaucauguuuaa

SEQ ID NO: 2146243 - RNA, 20 nt, Human herpesvirus 7
uuaacaugaguacuguuucu

SEQ ID NO: 2146244 - RNA, 20 nt, Human herpesvirus 7
cuucuuugacaaaaauguua

SEQ ID NO: 2146245 - RNA, 15 nt, Human herpesvirus 7
gugucucuagaaaau

SEQ ID NO: 2146246 - RNA, 15 nt, Human herpesvirus 7
ugugaaaauaaacag

SEQ ID NO: 2146247 - RNA, 15 nt, Human herpesvirus 7
uggaaaucaaaauuc

SEQ ID NO: 2146248 - RNA, 20 nt, Human herpesvirus 7
augaauugaaauuucuaaau

SEQ ID NO: 2146249 - RNA, 13 nt, Human herpesvirus 7
uaugaaaacagcu

SEQ ID NO: 2146250 - RNA, 13 nt, Human herpesvirus 7
ugcuucggaauuu

SEQ ID NO: 2146251 - RNA, 17 nt, Human herpesvirus 7
guaauauaauuauuuua

SEQ ID NO: 2146252 - RNA, 15 nt, Human herpesvirus 7
auuaguauuguaaua

SEQ ID NO: 2146253 - RNA, 13 nt, Human herpesvirus 7
cuuuguuugagac

SEQ ID NO: 2146254 - RNA, 22 nt, Human herpesvirus 7
agacuacauaaagguaaaaauu

SEQ ID NO: 2146255 - RNA, 16 nt, Human herpesvirus 7
cguugaguugcugcug

SEQ ID NO: 2146256 - RNA, 21 nt, Human herpesvirus 7
uuuucauuuuuuucuuauaaa

SEQ ID NO: 2146257 - RNA, 14 nt, Human herpesvirus 7
uacuuucauagcuu

SEQ ID NO: 2146258 - RNA, 16 nt, Human herpesvirus 7
uauuaauuuggugaag

SEQ ID NO: 2146259 - RNA, 15 nt, Human herpesvirus 7
gaaaaaauaaauucu

SEQ ID NO: 2146260 - RNA, 18 nt, Human herpesvirus 7
uaaucaaggacaugauug

SEQ ID NO: 2146261 - RNA, 15 nt, Human herpesvirus 7
augaaggaugcgugu

SEQ ID NO: 2146262 - RNA, 13 nt, Human herpesvirus 7
augcuuuaacugg

SEQ ID NO: 2146263 - RNA, 16 nt, Human herpesvirus 7
ggaagacaucgaagaa

SEQ ID NO: 2146264 - RNA, 22 nt, Human herpesvirus 7
caugauccugguuaaaaaaaug

SEQ ID NO: 2146265 - RNA, 15 nt, Human herpesvirus 7
aacugagaaaaauga

SEQ ID NO: 2146266 - RNA, 17 nt, Human herpesvirus 7
gcaguacuacuaaucau

SEQ ID NO: 2146267 - RNA, 22 nt, Human herpesvirus 7
uaaguucaucauguuuguugag

SEQ ID NO: 2146268 - RNA, 18 nt, Human herpesvirus 7
auuuaaugguuuuaaaau

SEQ ID NO: 2146269 - RNA, 16 nt, Human herpesvirus 7
aagcugcagcugaaag

SEQ ID NO: 2146270 - RNA, 14 nt, Human herpesvirus 7
uauguguacagauu

SEQ ID NO: 2146271 - RNA, 23 nt, Human herpesvirus 7
auuuuuuucuuauaaauaaaaug

SEQ ID NO: 2146272 - RNA, 18 nt, Human herpesvirus 7
aacaacuagcaaacagug

SEQ ID NO: 2146273 - RNA, 14 nt, Human herpesvirus 7
ucguuuguguagaa

SEQ ID NO: 2146274 - RNA, 20 nt, Human herpesvirus 7
aaggaagcuuuacagcagcc

SEQ ID NO: 2146275 - RNA, 23 nt, Human herpesvirus 7
uaaccaaaaugugggauguaucc

SEQ ID NO: 2146276 - RNA, 15 nt, Human herpesvirus 7
ugaacagaauuuuca

SEQ ID NO: 2146277 - RNA, 16 nt, Human herpesvirus 7
acauugaaaaugcauu

SEQ ID NO: 2146278 - RNA, 14 nt, Human herpesvirus 7
gacggaauuuguau

SEQ ID NO: 2146279 - RNA, 22 nt, Human herpesvirus 7
cucgaauuacguuauauauuua

SEQ ID NO: 2146280 - RNA, 15 nt, Human herpesvirus 7
accacaacugugaca

SEQ ID NO: 2146281 - RNA, 17 nt, Human herpesvirus 7
acaagacagaaaugaau

SEQ ID NO: 2146282 - RNA, 21 nt, Human herpesvirus 7
cacuaacuacagcuuuuggaa

SEQ ID NO: 2146283 - RNA, 19 nt, Human herpesvirus 7
uuuauguucaaauaugcau

SEQ ID NO: 2146284 - RNA, 13 nt, Human herpesvirus 7
caaucuauuucua

SEQ ID NO: 2146285 - RNA, 23 nt, Human herpesvirus 7
cuagauguuuuugauauuguacu

SEQ ID NO: 2146286 - RNA, 22 nt, Human herpesvirus 7
aauauuuugaaaauauauucca

SEQ ID NO: 2146287 - RNA, 22 nt, Human herpesvirus 7
auuuuggauuguguaauuauug

SEQ ID NO: 2146288 - RNA, 19 nt, Human herpesvirus 7
cuuacagugcucuuugucu

SEQ ID NO: 2146289 - RNA, 13 nt, Human herpesvirus 7
ucaaaaguauaac

SEQ ID NO: 2146290 - RNA, 16 nt, Human herpesvirus 7
aguauuuaagaacaga

SEQ ID NO: 2146291 - RNA, 19 nt, Human herpesvirus 7
uauccacucuccugaaaua

SEQ ID NO: 2146292 - RNA, 22 nt, Human herpesvirus 7
cugcaacuuugugccugaaaua

SEQ ID NO: 2146293 - RNA, 14 nt, Human herpesvirus 7
ugaauaaaaguaaa

SEQ ID NO: 2146294 - RNA, 20 nt, Human herpesvirus 7
uguuacagcuuucauuauuu

SEQ ID NO: 2146295 - RNA, 14 nt, Human herpesvirus 7
aaucaaaaacugaa

SEQ ID NO: 2146296 - RNA, 13 nt, Human herpesvirus 7
augggaauuacag

SEQ ID NO: 2146297 - RNA, 20 nt, Human herpesvirus 7
gaauuaauaaaacaaacuau

SEQ ID NO: 2146298 - RNA, 15 nt, Human herpesvirus 7
acauuaaacagcauu

SEQ ID NO: 2146299 - RNA, 18 nt, Human herpesvirus 7
aacaacagcagcugcuaa

SEQ ID NO: 2146300 - RNA, 16 nt, Human herpesvirus 7
ucugauucuuauucua

SEQ ID NO: 2146301 - RNA, 12 nt, Human herpesvirus 7
auaaaaaaagaa

SEQ ID NO: 2146302 - RNA, 18 nt, Human herpesvirus 7
cuuagcguucgacagcaa

SEQ ID NO: 2146303 - RNA, 23 nt, Human herpesvirus 7
cugagaagugggauuaaaaaucu

SEQ ID NO: 2146304 - RNA, 20 nt, Human herpesvirus 7
aguaaagauuuaacugauaa

SEQ ID NO: 2146305 - RNA, 23 nt, Human herpesvirus 7
auuuccugcaauaauaaacauug

SEQ ID NO: 2146306 - RNA, 19 nt, Human herpesvirus 7
acuaauccaugacagagaa

SEQ ID NO: 2146307 - RNA, 23 nt, Human herpesvirus 7
uugauuuuuaaguuguucucaau

SEQ ID NO: 2146308 - RNA, 15 nt, Human herpesvirus 7
ucuaccaauaaaagg

SEQ ID NO: 2146309 - RNA, 16 nt, Human herpesvirus 7
gaaaagaaaaagcaac

SEQ ID NO: 2146310 - RNA, 21 nt, Human herpesvirus 7
uuugaaauaaaggaucucucu

SEQ ID NO: 2146311 - RNA, 22 nt, Human herpesvirus 7
gcuaaaauuuugaaauaaagga

SEQ ID NO: 2146312 - RNA, 13 nt, Human herpesvirus 7
acuugaaaaauuu

SEQ ID NO: 2146313 - RNA, 12 nt, Human herpesvirus 7
uuguuuaagaca

SEQ ID NO: 2146314 - RNA, 12 nt, Human herpesvirus 7
acacuuauucca

SEQ ID NO: 2146315 - RNA, 19 nt, Human herpesvirus 7
auaaauguaacuuucaucu

SEQ ID NO: 2146316 - RNA, 21 nt, Human herpesvirus 7
acaaccauuuuuucccagaga

SEQ ID NO: 2146317 - RNA, 21 nt, Human herpesvirus 7
acguccauuuccucaauuuuu

SEQ ID NO: 2146318 - RNA, 13 nt, Human herpesvirus 7
aucuaugaaauaa

SEQ ID NO: 2146319 - RNA, 20 nt, Human herpesvirus 7
aaaacguggaaauuaaucaa

SEQ ID NO: 2146320 - RNA, 20 nt, Human herpesvirus 7
auuggauaauaucaguacaa

SEQ ID NO: 2146321 - RNA, 17 nt, Human herpesvirus 7
cugccucugccucuugg

SEQ ID NO: 2146322 - RNA, 13 nt, Human herpesvirus 7
auuuguguaaaua

SEQ ID NO: 2146323 - RNA, 19 nt, Human herpesvirus 7
caaauuguaaauucuccaa

SEQ ID NO: 2146324 - RNA, 17 nt, Human herpesvirus 7
caaugauuuuucugcuu

SEQ ID NO: 2146325 - RNA, 19 nt, Human herpesvirus 7
aaaauuuccuacaaaaguu

SEQ ID NO: 2146326 - RNA, 15 nt, Human herpesvirus 7
cuguagaaaauguuu

SEQ ID NO: 2146327 - RNA, 18 nt, Human herpesvirus 7
ugaaaaauaaauacuauu

SEQ ID NO: 2146328 - RNA, 18 nt, Human herpesvirus 7
uauuucagcuccaugucu

SEQ ID NO: 2146329 - RNA, 16 nt, Human herpesvirus 7
agaacagaaugauaau

SEQ ID NO: 2146330 - RNA, 17 nt, Human herpesvirus 7
auuauguccauaaaaca

SEQ ID NO: 2146331 - RNA, 20 nt, Human herpesvirus 7
uaauaaaaauuacucaugaa

SEQ ID NO: 2146332 - RNA, 13 nt, Human herpesvirus 7
ccacauuuaaaaa

SEQ ID NO: 2146333 - RNA, 14 nt, Human herpesvirus 7
acguuucaaaucaa

SEQ ID NO: 2146334 - RNA, 16 nt, Human herpesvirus 7
uauauaaguccuucaa

SEQ ID NO: 2146335 - RNA, 17 nt, Human herpesvirus 7
aagaauuuucugcuuua

SEQ ID NO: 2146336 - RNA, 15 nt, Human herpesvirus 7
aaguaaacaaaacag

SEQ ID NO: 2146337 - RNA, 16 nt, Human herpesvirus 7
aguucccauuuucaga

SEQ ID NO: 2146338 - RNA, 21 nt, Human herpesvirus 7
acuuaguucgaaugaauuuug

SEQ ID NO: 2146339 - RNA, 19 nt, Human herpesvirus 7
ucaauuuauccuaagcuuu

SEQ ID NO: 2146340 - RNA, 17 nt, Human herpesvirus 7
gugauguacugcucauc

SEQ ID NO: 2146341 - RNA, 17 nt, Human herpesvirus 7
auguaauguugcaaaug

SEQ ID NO: 2146342 - RNA, 13 nt, Human herpesvirus 7
ccuuguuugcugg

SEQ ID NO: 2146343 - RNA, 23 nt, Human herpesvirus 7
uucuggaucugccucugccucuu

SEQ ID NO: 2146344 - RNA, 15 nt, Human herpesvirus 7
cuuaacaauuauuuu

SEQ ID NO: 2146345 - RNA, 18 nt, Human herpesvirus 7
aucauagagaaaacauug

SEQ ID NO: 2146346 - RNA, 13 nt, Human herpesvirus 7
ucaguuaucaagu

SEQ ID NO: 2146347 - RNA, 19 nt, Human herpesvirus 7
cugaauugguaauguuacu

SEQ ID NO: 2146348 - RNA, 12 nt, Human herpesvirus 7
uauauuaaucuu

SEQ ID NO: 2146349 - RNA, 14 nt, Human herpesvirus 7
uccgaaaagacaac

SEQ ID NO: 2146350 - RNA, 19 nt, Human herpesvirus 7
gguaucacuuccuguccaa

SEQ ID NO: 2146351 - RNA, 15 nt, Human herpesvirus 7
aaaauacaacuucua

SEQ ID NO: 2146352 - RNA, 13 nt, Human herpesvirus 7
ucuaaauaaacaa

SEQ ID NO: 2146353 - RNA, 20 nt, Human herpesvirus 7
ucaccgcagauccaucuuug

SEQ ID NO: 2146354 - RNA, 17 nt, Human herpesvirus 7
ugaagcuaaaauuuuga

SEQ ID NO: 2146355 - RNA, 16 nt, Human herpesvirus 7
ucaacgacaaacuuug

SEQ ID NO: 2146356 - RNA, 13 nt, Human herpesvirus 7
cgucucuuugccu

SEQ ID NO: 2146357 - RNA, 17 nt, Human herpesvirus 7
ucucuuauuuugucugg

SEQ ID NO: 2146358 - RNA, 20 nt, Human herpesvirus 7
cugaguaaaacucaauguaa

SEQ ID NO: 2146359 - RNA, 19 nt, Human herpesvirus 7
uguuguagguaauuucuua

SEQ ID NO: 2146360 - RNA, 18 nt, Human herpesvirus 7
aaguauggaaaaauguua

SEQ ID NO: 2146361 - RNA, 23 nt, Human herpesvirus 7
auaaaaauuacucaugaagcugu

SEQ ID NO: 2146362 - RNA, 14 nt, Human herpesvirus 7
auaaauucugaaau

SEQ ID NO: 2146363 - RNA, 16 nt, Human herpesvirus 7
cuuugaaaaaaacacu

SEQ ID NO: 2146364 - RNA, 23 nt, Human herpesvirus 7
agaauauuuauguucaaauaugc

SEQ ID NO: 2146365 - RNA, 14 nt, Human herpesvirus 7
uuucuggcaauaaa

SEQ ID NO: 2146366 - RNA, 21 nt, Human herpesvirus 7
uccaucaaaagucuuguuuuu

SEQ ID NO: 2146367 - RNA, 19 nt, Human herpesvirus 7
aaauucgcaaaauuucauu

SEQ ID NO: 2146368 - RNA, 21 nt, Human herpesvirus 7
acaaucgauugcaguugaauu

SEQ ID NO: 2146369 - RNA, 18 nt, Human herpesvirus 7
aaauuacacucuguuacu

SEQ ID NO: 2146370 - RNA, 13 nt, Human herpesvirus 7
ugacccugucaca

SEQ ID NO: 2146371 - RNA, 17 nt, Human herpesvirus 7
uaauacucagaugugga

SEQ ID NO: 2146372 - RNA, 12 nt, Human herpesvirus 7
auuuuucauuua

SEQ ID NO: 2146373 - RNA, 16 nt, Human herpesvirus 7
ccaccauuucugaaac

SEQ ID NO: 2146374 - RNA, 20 nt, Human herpesvirus 7
ucuuagccagaucguucauu

SEQ ID NO: 2146375 - RNA, 15 nt, Human herpesvirus 7
gaagagguugcuucu

SEQ ID NO: 2146376 - RNA, 16 nt, Human herpesvirus 7
gacauuauuagacaga

SEQ ID NO: 2146377 - RNA, 21 nt, Human herpesvirus 7
agagaaaaaauuaugaguaaa

SEQ ID NO: 2146378 - RNA, 22 nt, Human herpesvirus 7
accuguauggaaccuacugaag

SEQ ID NO: 2146379 - RNA, 15 nt, Human herpesvirus 7
agucgagaaaacacg

SEQ ID NO: 2146380 - RNA, 15 nt, Human herpesvirus 7
uugaagaaauuguga

SEQ ID NO: 2146381 - RNA, 16 nt, Human herpesvirus 7
gggcuacgaaugggaa

SEQ ID NO: 2146382 - RNA, 14 nt, Human herpesvirus 7
aaauaucuucugaa

SEQ ID NO: 2146383 - RNA, 16 nt, Human herpesvirus 7
cagaguauuuaagaac

SEQ ID NO: 2146384 - RNA, 14 nt, Human herpesvirus 7
aacuuugcaacaaa

SEQ ID NO: 2146385 - RNA, 19 nt, Human herpesvirus 7
cauuuauuuucuuaacaau

SEQ ID NO: 2146386 - RNA, 23 nt, Human herpesvirus 7
agaauguuuauauauaaccgaua

SEQ ID NO: 2146387 - RNA, 13 nt, Human herpesvirus 7
caauguaaacgaa

SEQ ID NO: 2146388 - RNA, 15 nt, Human herpesvirus 7
gaaaauaacuuuaaa

SEQ ID NO: 2146389 - RNA, 13 nt, Human herpesvirus 7
aagcuugaaaacu

SEQ ID NO: 2146390 - RNA, 15 nt, Human herpesvirus 7
gugaaaauaaacagg

SEQ ID NO: 2146391 - RNA, 19 nt, Human herpesvirus 7
auccacgcgggguuaaaaa

SEQ ID NO: 2146392 - RNA, 23 nt, Human herpesvirus 7
uucaggucucuuucuaaaaagag

SEQ ID NO: 2146393 - RNA, 17 nt, Human herpesvirus 7
aauuucacacaaugccu

SEQ ID NO: 2146394 - RNA, 17 nt, Human herpesvirus 7
uacgguggcaauuaaau

SEQ ID NO: 2146395 - RNA, 23 nt, Human herpesvirus 7
acaaauuaugcguuaaugucucu

SEQ ID NO: 2146396 - RNA, 13 nt, Human herpesvirus 7
uauaauaaaucgu

SEQ ID NO: 2146397 - RNA, 13 nt, Human herpesvirus 7
agucuaaaaaugu

SEQ ID NO: 2146398 - RNA, 20 nt, Human herpesvirus 7
uacagauacgcgcagauuuu

SEQ ID NO: 2146399 - RNA, 15 nt, Human herpesvirus 7
ccuguacaaauuucu

SEQ ID NO: 2146400 - RNA, 22 nt, Human herpesvirus 7
caaggucuuucaugcauugcau

SEQ ID NO: 2146401 - RNA, 20 nt, Human herpesvirus 7
gaauaaucucaauuaaaaca

SEQ ID NO: 2146402 - RNA, 18 nt, Human herpesvirus 7
uguuauuuuucaugccuu

SEQ ID NO: 2146403 - RNA, 21 nt, Human herpesvirus 7
acacagggaagaaacagcuga

SEQ ID NO: 2146404 - RNA, 18 nt, Human herpesvirus 7
gcagcaucccuauugcau

SEQ ID NO: 2146405 - RNA, 14 nt, Human herpesvirus 7
acaaaagucgagaa

SEQ ID NO: 2146406 - RNA, 15 nt, Human herpesvirus 7
uucacacaaugccuu

SEQ ID NO: 2146407 - RNA, 16 nt, Human herpesvirus 7
uuucagaaaauaaaag

SEQ ID NO: 2146408 - RNA, 14 nt, Human herpesvirus 7
caauaaauuuugaa

SEQ ID NO: 2146409 - RNA, 15 nt, Human herpesvirus 7
auaauucacauuuau

SEQ ID NO: 2146410 - RNA, 16 nt, Human herpesvirus 7
aaaacacguccaagaa

SEQ ID NO: 2146411 - RNA, 19 nt, Human herpesvirus 7
aagauucuagcguuucguu

SEQ ID NO: 2146412 - RNA, 22 nt, Human herpesvirus 7
ugucuucggccuugcugaagau

SEQ ID NO: 2146413 - RNA, 16 nt, Human herpesvirus 7
aauccaugacagagaa

SEQ ID NO: 2146414 - RNA, 15 nt, Human herpesvirus 7
guguguuaaaugcga

SEQ ID NO: 2146415 - RNA, 19 nt, Human herpesvirus 7
uuuagagucugugugugca

SEQ ID NO: 2146416 - RNA, 14 nt, Human herpesvirus 7
uaucgcguuuucau

SEQ ID NO: 2146417 - RNA, 17 nt, Human herpesvirus 7
gaaauggguuugggaaa

SEQ ID NO: 2146418 - RNA, 13 nt, Human herpesvirus 7
uucgaucuguaaa

SEQ ID NO: 2146419 - RNA, 14 nt, Human herpesvirus 7
aauaaauguucuuc

SEQ ID NO: 2146420 - RNA, 22 nt, Human herpesvirus 7
auaugcuaagaaagaacauuuu

SEQ ID NO: 2146421 - RNA, 18 nt, Human herpesvirus 7
auguccaaucaaaaacug

SEQ ID NO: 2146422 - RNA, 22 nt, Human herpesvirus 7
uaugugaaaauaaacaggaacu

SEQ ID NO: 2146423 - RNA, 23 nt, Human herpesvirus 7
ucugguaaugucauaaaacuuuu

SEQ ID NO: 2146424 - RNA, 17 nt, Human herpesvirus 7
ucguucuauguaugaaa

SEQ ID NO: 2146425 - RNA, 15 nt, Human herpesvirus 7
ugauccugcuauuca

SEQ ID NO: 2146426 - RNA, 21 nt, Human herpesvirus 7
aacagcucuaucgucaucauc

SEQ ID NO: 2146427 - RNA, 18 nt, Human herpesvirus 7
aucauuagucauacuuua

SEQ ID NO: 2146428 - RNA, 16 nt, Human herpesvirus 7
cacauuaucuugacag

SEQ ID NO: 2146429 - RNA, 13 nt, Human herpesvirus 7
auucuaaaaauua

SEQ ID NO: 2146430 - RNA, 11 nt, Human herpesvirus 7
aguuaaaagau

SEQ ID NO: 2146431 - RNA, 15 nt, Human herpesvirus 7
uuaaaaugggaaugu

SEQ ID NO: 2146432 - RNA, 17 nt, Human herpesvirus 7
gcggaguuugaguuucu

SEQ ID NO: 2146433 - RNA, 14 nt, Human herpesvirus 7
ucaaagugugcccg

SEQ ID NO: 2146434 - RNA, 12 nt, Human herpesvirus 7
uuaaaugucaau

SEQ ID NO: 2146435 - RNA, 14 nt, Human herpesvirus 7
aaucuuuuuugaac

SEQ ID NO: 2146436 - RNA, 14 nt, Human herpesvirus 7
aaacagcauuuucu

SEQ ID NO: 2146437 - RNA, 13 nt, Human herpesvirus 7
aaauccaaaauca

SEQ ID NO: 2146438 - RNA, 22 nt, Human herpesvirus 7
cuucaauagcagagaauauguu

SEQ ID NO: 2146439 - RNA, 16 nt, Human herpesvirus 7
caacauucuugucaac

SEQ ID NO: 2146440 - RNA, 22 nt, Human herpesvirus 7
augucucuugaagaacaacaug

SEQ ID NO: 2146441 - RNA, 21 nt, Human herpesvirus 7
acuagaaaauaacuuuaaauu

SEQ ID NO: 2146442 - RNA, 22 nt, Human herpesvirus 7
auuucuuaaagaugucuuaauu

SEQ ID NO: 2146443 - RNA, 19 nt, Human herpesvirus 7
uugcagcccaauguugccu

SEQ ID NO: 2146444 - RNA, 17 nt, Human herpesvirus 7
uauuuugauaauuuaca

SEQ ID NO: 2146445 - RNA, 14 nt, Human herpesvirus 7
uaauugcagcuucg

SEQ ID NO: 2146446 - RNA, 22 nt, Human herpesvirus 7
gacaaagcauacuuuaaaacuu

SEQ ID NO: 2146447 - RNA, 20 nt, Human herpesvirus 7
agguuuguuuuuuggcauua

SEQ ID NO: 2146448 - RNA, 21 nt, Human herpesvirus 7
cuguugaaacauagcuagaaa

SEQ ID NO: 2146449 - RNA, 18 nt, Human herpesvirus 7
ccaaaaucuauauuugau

SEQ ID NO: 2146450 - RNA, 14 nt, Human herpesvirus 7
agagacaagaggac

SEQ ID NO: 2146451 - RNA, 17 nt, Human herpesvirus 7
agcuaauugagaaauuu

SEQ ID NO: 2146452 - RNA, 16 nt, Human herpesvirus 7
auaacucaaaagacag

SEQ ID NO: 2146453 - RNA, 19 nt, Human herpesvirus 7
uaaaaacuuuucuuucuua

SEQ ID NO: 2146454 - RNA, 15 nt, Human herpesvirus 7
acauagcuagaaauu

SEQ ID NO: 2146455 - RNA, 12 nt, Human herpesvirus 7
auaaauucugaa

SEQ ID NO: 2146456 - RNA, 21 nt, Human herpesvirus 7
gcuuagaauauuuauguucaa

SEQ ID NO: 2146457 - RNA, 23 nt, Human herpesvirus 7
acucggucuuuuuauuucuaaua

SEQ ID NO: 2146458 - RNA, 16 nt, Human herpesvirus 7
aauaaagauuacauuu

SEQ ID NO: 2146459 - RNA, 18 nt, Human herpesvirus 7
aaugugguaaauuugcuu

SEQ ID NO: 2146460 - RNA, 17 nt, Human herpesvirus 7
gccagagaaccacguga

SEQ ID NO: 2146461 - RNA, 14 nt, Human herpesvirus 7
uucuuuuucaagau

SEQ ID NO: 2146462 - RNA, 19 nt, Human herpesvirus 7
gaaaaucuaucaccaagaa

SEQ ID NO: 2146463 - RNA, 13 nt, Human herpesvirus 7
aaauguuuugauu

SEQ ID NO: 2146464 - RNA, 22 nt, Human herpesvirus 7
uaacugagaaaaaugacaaaac

SEQ ID NO: 2146465 - RNA, 11 nt, Human herpesvirus 7
acaaagaacau

SEQ ID NO: 2146466 - RNA, 14 nt, Human herpesvirus 7
agcauaaagcacca

SEQ ID NO: 2146467 - RNA, 17 nt, Human herpesvirus 7
gaugcauuuuuauugca

SEQ ID NO: 2146468 - RNA, 14 nt, Human herpesvirus 7
cuauaaauggaauu

SEQ ID NO: 2146469 - RNA, 19 nt, Human herpesvirus 7
aacaucgagauuccaaaga

SEQ ID NO: 2146470 - RNA, 20 nt, Human herpesvirus 7
gugaagacuacauaaaggua

SEQ ID NO: 2146471 - RNA, 12 nt, Human herpesvirus 7
acguccaaaaau

SEQ ID NO: 2146472 - RNA, 17 nt, Human herpesvirus 7
aggaauucugacuccuu

SEQ ID NO: 2146473 - RNA, 12 nt, Human herpesvirus 7
aaaaaaaaccac

SEQ ID NO: 2146474 - RNA, 19 nt, Human herpesvirus 7
uaauaaaggaaagacaaac

SEQ ID NO: 2146475 - RNA, 15 nt, Human herpesvirus 7
auauaacaaaaaacg

SEQ ID NO: 2146476 - RNA, 21 nt, Human herpesvirus 7
gguaagaaaaaucauuuuuaa

SEQ ID NO: 2146477 - RNA, 17 nt, Human herpesvirus 7
cuugccaaaagcuugaa

SEQ ID NO: 2146478 - RNA, 15 nt, Human herpesvirus 7
cauauauaagagaau

SEQ ID NO: 2146479 - RNA, 16 nt, Human herpesvirus 7
accaugauguuaaaga

SEQ ID NO: 2146480 - RNA, 13 nt, Human herpesvirus 7
guuguacucagag

SEQ ID NO: 2146481 - RNA, 17 nt, Human herpesvirus 7
uggaaccuacugaagag

SEQ ID NO: 2146482 - RNA, 19 nt, Human herpesvirus 7
aaagaaaaagcaacaaaug

SEQ ID NO: 2146483 - RNA, 20 nt, Human herpesvirus 7
augguaagcaaaaaaaggua

SEQ ID NO: 2146484 - RNA, 18 nt, Human herpesvirus 7
aauuuagcaccaacugaa

SEQ ID NO: 2146485 - RNA, 19 nt, Human herpesvirus 7
cagaaauaacaaaauugua

SEQ ID NO: 2146486 - RNA, 14 nt, Human herpesvirus 7
auuucucaaaucuu

SEQ ID NO: 2146487 - RNA, 15 nt, Human herpesvirus 7
gucaugcuguauguu

SEQ ID NO: 2146488 - RNA, 19 nt, Human herpesvirus 7
caaggggucgcauauugca

SEQ ID NO: 2146489 - RNA, 14 nt, Human herpesvirus 7
gugauuuuaaauaa

SEQ ID NO: 2146490 - RNA, 19 nt, Human herpesvirus 7
uaaugaaguuuaucuugga

SEQ ID NO: 2146491 - RNA, 22 nt, Human herpesvirus 7
uuauaauguaagaaauuuucuu

SEQ ID NO: 2146492 - RNA, 13 nt, Human herpesvirus 7
gccagaaauuaaa

SEQ ID NO: 2146493 - RNA, 14 nt, Human herpesvirus 7
aaaagagaaaaugu

SEQ ID NO: 2146494 - RNA, 16 nt, Human herpesvirus 7
cuagaaaaacacuagc

SEQ ID NO: 2146495 - RNA, 19 nt, Human herpesvirus 7
uugaaaguaaaaacuuuuc

SEQ ID NO: 2146496 - RNA, 20 nt, Human herpesvirus 7
auugugaguuucuacauguu

SEQ ID NO: 2146497 - RNA, 12 nt, Human herpesvirus 7
cuuugucaugau

SEQ ID NO: 2146498 - RNA, 15 nt, Human herpesvirus 7
acccagaagaaacuu

SEQ ID NO: 2146499 - RNA, 22 nt, Human herpesvirus 7
uugauucacauugucacugcaa

SEQ ID NO: 2146500 - RNA, 22 nt, Human herpesvirus 7
uuucuccacuaugccacaaaaa

SEQ ID NO: 2146501 - RNA, 17 nt, Human herpesvirus 7
uaaucauaguacaucuu

SEQ ID NO: 2146502 - RNA, 21 nt, Human herpesvirus 7
gaauaucuguggcuuuugcuu

SEQ ID NO: 2146503 - RNA, 14 nt, Human herpesvirus 7
uuccgguguggaaa

SEQ ID NO: 2146504 - RNA, 15 nt, Human herpesvirus 7
uuauguguacacuuu

SEQ ID NO: 2146505 - RNA, 15 nt, Human herpesvirus 7
aacuagcaaacagug

SEQ ID NO: 2146506 - RNA, 14 nt, Human herpesvirus 7
auugcagucaaaga

SEQ ID NO: 2146507 - RNA, 22 nt, Human herpesvirus 7
aaaguauaacauugcuucagaa

SEQ ID NO: 2146508 - RNA, 16 nt, Human herpesvirus 7
cuuuuauuacucgaaa

SEQ ID NO: 2146509 - RNA, 14 nt, Human herpesvirus 7
ggacagucaacaaa

SEQ ID NO: 2146510 - RNA, 12 nt, Human herpesvirus 7
uucuaaaaauuc

SEQ ID NO: 2146511 - RNA, 16 nt, Human herpesvirus 7
caaaggaaaaaugcug

SEQ ID NO: 2146512 - RNA, 13 nt, Human herpesvirus 7
uaaauuuaaaauu

SEQ ID NO: 2146513 - RNA, 18 nt, Human herpesvirus 7
agccacgaugacuuccaa

SEQ ID NO: 2146514 - RNA, 22 nt, Human herpesvirus 7
uguaugcaagaaaguccaaagu

SEQ ID NO: 2146515 - RNA, 13 nt, Human herpesvirus 7
uuugaauguaugu

SEQ ID NO: 2146516 - RNA, 15 nt, Human herpesvirus 7
cuauauuuuguuaag

SEQ ID NO: 2146517 - RNA, 22 nt, Human herpesvirus 7
uaacacuguuuucaguuaugau

SEQ ID NO: 2146518 - RNA, 21 nt, Human herpesvirus 7
aaccuggauguaaugaauaaa

SEQ ID NO: 2146519 - RNA, 20 nt, Human herpesvirus 7
caaaccaugauguuaaagaa

SEQ ID NO: 2146520 - RNA, 18 nt, Human herpesvirus 7
auaaaagggcagacacua

SEQ ID NO: 2146521 - RNA, 12 nt, Human herpesvirus 7
aauuaacagcuc

SEQ ID NO: 2146522 - RNA, 14 nt, Human herpesvirus 7
ugucuauuucaauu

SEQ ID NO: 2146523 - RNA, 23 nt, Human herpesvirus 7
agaauggcgguuguacuguaauu

SEQ ID NO: 2146524 - RNA, 23 nt, Human herpesvirus 7
aaaaggccguuuaugaacaaggu

SEQ ID NO: 2146525 - RNA, 18 nt, Human herpesvirus 7
cauccugcuaaggcgaaa

SEQ ID NO: 2146526 - RNA, 13 nt, Human herpesvirus 7
acuauaaauggaa

SEQ ID NO: 2146527 - RNA, 23 nt, Human herpesvirus 7
ugucacguguucaggcaacauua

SEQ ID NO: 2146528 - RNA, 21 nt, Human herpesvirus 7
auuugacuuuuucuguagaca

SEQ ID NO: 2146529 - RNA, 19 nt, Human herpesvirus 7
aauauuuggcuuagaauau

SEQ ID NO: 2146530 - RNA, 23 nt, Human herpesvirus 7
agucuguagaugcaugcuaauau

SEQ ID NO: 2146531 - RNA, 15 nt, Human herpesvirus 7
aagacacuuauuuga

SEQ ID NO: 2146532 - RNA, 20 nt, Human herpesvirus 7
uuuuguacauuuaauaaggu

SEQ ID NO: 2146533 - RNA, 18 nt, Human herpesvirus 7
aauuauguguauaagaau

SEQ ID NO: 2146534 - RNA, 22 nt, Human herpesvirus 7
uuccagagggguuugaacuugu

SEQ ID NO: 2146535 - RNA, 17 nt, Human herpesvirus 7
uauggauacaaggaaaa

SEQ ID NO: 2146536 - RNA, 24 nt, Human herpesvirus 7
uuguggaauccuaugacugagaaa

SEQ ID NO: 2146537 - RNA, 16 nt, Human herpesvirus 7
aauacaucuaggucuu

SEQ ID NO: 2146538 - RNA, 18 nt, Human herpesvirus 7
gguuuugaaauugacaug

SEQ ID NO: 2146539 - RNA, 19 nt, Human herpesvirus 7
acgucuuuuaagcuucgcu

SEQ ID NO: 2146540 - RNA, 20 nt, Human herpesvirus 7
cugaugauaaucgagaauaa

SEQ ID NO: 2146541 - RNA, 18 nt, Human herpesvirus 7
ugcaugcuaauauuucca

SEQ ID NO: 2146542 - RNA, 21 nt, Human herpesvirus 7
ccuacaaaaguucuguuuuga

SEQ ID NO: 2146543 - RNA, 17 nt, Human herpesvirus 7
augaaaaaaauuaugug

SEQ ID NO: 2146544 - RNA, 15 nt, Human herpesvirus 7
ucuacacaucuucaa

SEQ ID NO: 2146545 - RNA, 15 nt, Human herpesvirus 7
uuccaucucacuuau

SEQ ID NO: 2146546 - RNA, 20 nt, Human herpesvirus 7
cuggacacaaucagcauuua

SEQ ID NO: 2146547 - RNA, 16 nt, Human herpesvirus 7
aaaagcaacaaauguu

SEQ ID NO: 2146548 - RNA, 20 nt, Human herpesvirus 7
ucaaaaaaaaaacaauccac

SEQ ID NO: 2146549 - RNA, 20 nt, Human herpesvirus 7
gaucauagagaaaacauugu

SEQ ID NO: 2146550 - RNA, 15 nt, Human herpesvirus 7
augccagaaauuaaa

SEQ ID NO: 2146551 - RNA, 15 nt, Human herpesvirus 7
acgaaauaauuagaa

SEQ ID NO: 2146552 - RNA, 20 nt, Human herpesvirus 7
uauuacucgaaauuuaaaaa

SEQ ID NO: 2146553 - RNA, 23 nt, Human herpesvirus 7
cuaauauguaugaaauaauagau

SEQ ID NO: 2146554 - RNA, 16 nt, Human herpesvirus 7
uucuagcguuucguua

SEQ ID NO: 2146555 - RNA, 12 nt, Human herpesvirus 7
aucaaaaaauuc

SEQ ID NO: 2146556 - RNA, 17 nt, Human herpesvirus 7
aaaauaaauucugaaau

SEQ ID NO: 2146557 - RNA, 16 nt, Human herpesvirus 7
gauuucagaauuucca

SEQ ID NO: 2146558 - RNA, 19 nt, Human herpesvirus 7
aagagccaaauauggagac

SEQ ID NO: 2146559 - RNA, 14 nt, Human herpesvirus 7
aauaagcaaauaaa

SEQ ID NO: 2146560 - RNA, 20 nt, Human herpesvirus 7
auaauguuuccguguuuaug

SEQ ID NO: 2146561 - RNA, 12 nt, Human herpesvirus 7
cauaauuucagc

SEQ ID NO: 2146562 - RNA, 16 nt, Human herpesvirus 7
gcagauuguagagaau

SEQ ID NO: 2146563 - RNA, 17 nt, Human herpesvirus 7
uaagugauacugaaucu

SEQ ID NO: 2146564 - RNA, 23 nt, Human herpesvirus 7
cuuugagcccauauuuuuaaauu

SEQ ID NO: 2146565 - RNA, 14 nt, Human herpesvirus 7
auuuuuaaagagaa

SEQ ID NO: 2146566 - RNA, 17 nt, Human herpesvirus 7
gccuaggauaccaaaca

SEQ ID NO: 2146567 - RNA, 19 nt, Human herpesvirus 7
augccacaaaaaacuuuga

SEQ ID NO: 2146568 - RNA, 22 nt, Human herpesvirus 7
ugaaaaauuuuuuacugucuuu

SEQ ID NO: 2146569 - RNA, 14 nt, Human herpesvirus 7
auauuuaauuucuc

SEQ ID NO: 2146570 - RNA, 19 nt, Human herpesvirus 7
acgcucucaaucaaaaucu

SEQ ID NO: 2146571 - RNA, 17 nt, Human herpesvirus 7
gauuuagauuuaaaaca

SEQ ID NO: 2146572 - RNA, 19 nt, Human herpesvirus 7
guucaggucucuuucuaaa

SEQ ID NO: 2146573 - RNA, 17 nt, Human herpesvirus 7
acauauuaguuuaacuu

SEQ ID NO: 2146574 - RNA, 17 nt, Human herpesvirus 7
aacugauauaaaugcuu

SEQ ID NO: 2146575 - RNA, 13 nt, Human herpesvirus 7
acuuuuaaaauug

SEQ ID NO: 2146576 - RNA, 20 nt, Human herpesvirus 7
aaagcuuuggcagcuagccu

SEQ ID NO: 2146577 - RNA, 15 nt, Human herpesvirus 7
auucuuuguacuugu

SEQ ID NO: 2146578 - RNA, 14 nt, Human herpesvirus 7
agaguauacaaaag

SEQ ID NO: 2146579 - RNA, 16 nt, Human herpesvirus 7
uugaaccuuaacauac

SEQ ID NO: 2146580 - RNA, 19 nt, Human herpesvirus 7
ugguaauuaauaaacagcg

SEQ ID NO: 2146581 - RNA, 13 nt, Human herpesvirus 7
ugauaagauuucc

SEQ ID NO: 2146582 - RNA, 23 nt, Human herpesvirus 7
ccuuauauuaaaaaccacagagg

SEQ ID NO: 2146583 - RNA, 18 nt, Human herpesvirus 7
auaaauacgcguggaagu

SEQ ID NO: 2146584 - RNA, 20 nt, Human herpesvirus 7
acaucagaccuaacaaaaaa

SEQ ID NO: 2146585 - RNA, 13 nt, Human herpesvirus 7
uaagcuuuuucuu

SEQ ID NO: 2146586 - RNA, 18 nt, Human herpesvirus 7
ugcaauuuucacaaugga

SEQ ID NO: 2146587 - RNA, 17 nt, Human herpesvirus 7
uaaaaucuacuguaauc

SEQ ID NO: 2146588 - RNA, 17 nt, Human herpesvirus 7
guccaaagugaugaaag

SEQ ID NO: 2146589 - RNA, 15 nt, Human herpesvirus 7
agcaccgaaaauggu

SEQ ID NO: 2146590 - RNA, 17 nt, Human herpesvirus 7
auuccuucuaaauucuu

SEQ ID NO: 2146591 - RNA, 20 nt, Human herpesvirus 7
caaucacgugauuaagauuc

SEQ ID NO: 2146592 - RNA, 15 nt, Human herpesvirus 7
accagauuucuggca

SEQ ID NO: 2146593 - RNA, 19 nt, Human herpesvirus 7
aagacacuuauuugauuau

SEQ ID NO: 2146594 - RNA, 20 nt, Human herpesvirus 7
ugccaccgggacagauuuag

SEQ ID NO: 2146595 - RNA, 15 nt, Human herpesvirus 7
agaaauugaugaaga

SEQ ID NO: 2146596 - RNA, 13 nt, Human herpesvirus 7
uguuugaucaaaa

SEQ ID NO: 2146597 - RNA, 13 nt, Human herpesvirus 7
uaaaaaaaaguug

SEQ ID NO: 2146598 - RNA, 13 nt, Human herpesvirus 7
cauacuuuacagc

SEQ ID NO: 2146599 - RNA, 14 nt, Human herpesvirus 7
agaaaaacagacuu

SEQ ID NO: 2146600 - RNA, 22 nt, Human herpesvirus 7
uaacucauaauuaugaaauguu

SEQ ID NO: 2146601 - RNA, 21 nt, Human herpesvirus 7
acucuucguuugaagagggaa

SEQ ID NO: 2146602 - RNA, 20 nt, Human herpesvirus 7
acuuuuuguucaguuaauaa

SEQ ID NO: 2146603 - RNA, 17 nt, Human herpesvirus 7
agaaaaguugaaaaugu

SEQ ID NO: 2146604 - RNA, 23 nt, Human herpesvirus 7
gauuuuaguuccacgucaaucac

SEQ ID NO: 2146605 - RNA, 21 nt, Human herpesvirus 7
gacuuaucaaucuauuucuau

SEQ ID NO: 2146606 - RNA, 19 nt, Human herpesvirus 7
uauuaauacguccaaaaau

SEQ ID NO: 2146607 - RNA, 14 nt, Human herpesvirus 7
ccacuucuaaauaa

SEQ ID NO: 2146608 - RNA, 17 nt, Human herpesvirus 7
aaacgaagaaucauuua

SEQ ID NO: 2146609 - RNA, 24 nt, Human herpesvirus 7
uccugcaauaauaaacauuguguu

SEQ ID NO: 2146610 - RNA, 20 nt, Human herpesvirus 7
gugggacuugauaauguuuc

SEQ ID NO: 2146611 - RNA, 16 nt, Human herpesvirus 7
gaaucagacuaaauau

SEQ ID NO: 2146612 - RNA, 18 nt, Human herpesvirus 7
gacggcauuuaacucaug

SEQ ID NO: 2146613 - RNA, 18 nt, Human herpesvirus 7
gcagaaaugucuuuugau

SEQ ID NO: 2146614 - RNA, 16 nt, Human herpesvirus 7
acuucagaaaaaccau

SEQ ID NO: 2146615 - RNA, 12 nt, Human herpesvirus 7
ucugcuaauucu

SEQ ID NO: 2146616 - RNA, 17 nt, Human herpesvirus 7
uguuaaggagcuucauu

SEQ ID NO: 2146617 - RNA, 22 nt, Human herpesvirus 7
aucuuguaauuucucaaaucuu

SEQ ID NO: 2146618 - RNA, 19 nt, Human herpesvirus 7
gaaucauagcaggaagcac

SEQ ID NO: 2146619 - RNA, 22 nt, Human herpesvirus 7
uguacaauuugcauaauccucu

SEQ ID NO: 2146620 - RNA, 22 nt, Human herpesvirus 7
caaucaaacauguaaucaaaau

SEQ ID NO: 2146621 - RNA, 19 nt, Human herpesvirus 7
aaacacuugcuagcuguga

SEQ ID NO: 2146622 - RNA, 11 nt, Human herpesvirus 7
guagugucugc

SEQ ID NO: 2146623 - RNA, 17 nt, Human herpesvirus 7
ugcagaccguaaaacaa

SEQ ID NO: 2146624 - RNA, 14 nt, Human herpesvirus 7
uuagacuuuuuucu

SEQ ID NO: 2146625 - RNA, 14 nt, Human herpesvirus 7
acagagacaaccau

SEQ ID NO: 2146626 - RNA, 22 nt, Human herpesvirus 7
acuggauguauaaaucagaaua

SEQ ID NO: 2146627 - RNA, 16 nt, Human herpesvirus 7
cuuuauaagcaguuau

SEQ ID NO: 2146628 - RNA, 20 nt, Human herpesvirus 7
uuaaauuuuucgcugucuuu

SEQ ID NO: 2146629 - RNA, 15 nt, Human herpesvirus 7
augcuuuaacuggaa

SEQ ID NO: 2146630 - RNA, 16 nt, Human herpesvirus 7
acauaauccaaaccgg

SEQ ID NO: 2146631 - RNA, 16 nt, Human herpesvirus 7
guuuuaugacucagac

SEQ ID NO: 2146632 - RNA, 14 nt, Human herpesvirus 7
gaaaacuugauaaa

SEQ ID NO: 2146633 - RNA, 17 nt, Human herpesvirus 7
cauccaaaaagaaacuu

SEQ ID NO: 2146634 - RNA, 18 nt, Human herpesvirus 7
cuacaauuucuggcaaua

SEQ ID NO: 2146635 - RNA, 22 nt, Human herpesvirus 7
acugcuucucccauucaauaau

SEQ ID NO: 2146636 - RNA, 24 nt, Human herpesvirus 7
uguauaaaucagaauauuuccagc

SEQ ID NO: 2146637 - RNA, 13 nt, Human herpesvirus 7
aauaaacaaaauu

SEQ ID NO: 2146638 - RNA, 23 nt, Human herpesvirus 7
cuugauacaggccuguuucuuga

SEQ ID NO: 2146639 - RNA, 13 nt, Human herpesvirus 7
auacgaaaacggu

SEQ ID NO: 2146640 - RNA, 22 nt, Human herpesvirus 7
uuaauuauucggugucuucuug

SEQ ID NO: 2146641 - RNA, 12 nt, Human herpesvirus 7
cuuguauauacg

SEQ ID NO: 2146642 - RNA, 20 nt, Human herpesvirus 7
cuuuacgaaacaauuucaca

SEQ ID NO: 2146643 - RNA, 17 nt, Human herpesvirus 7
augugaaaauaaacagg

SEQ ID NO: 2146644 - RNA, 14 nt, Human herpesvirus 7
uucaagaaaucaga

SEQ ID NO: 2146645 - RNA, 16 nt, Human herpesvirus 7
aaaugguauuuugcgu

SEQ ID NO: 2146646 - RNA, 16 nt, Human herpesvirus 7
uacguucugaaacagu

SEQ ID NO: 2146647 - RNA, 16 nt, Human herpesvirus 7
ggaaaauuucauuuaa

SEQ ID NO: 2146648 - RNA, 20 nt, Human herpesvirus 7
aacaugauugguaaaaaauu

SEQ ID NO: 2146649 - RNA, 21 nt, Human herpesvirus 7
cuccacuaugccacaaaaaac

SEQ ID NO: 2146650 - RNA, 20 nt, Human herpesvirus 7
uaagagacauugaaaaugca

SEQ ID NO: 2146651 - RNA, 14 nt, Human herpesvirus 7
aaaacgauccuaaa

SEQ ID NO: 2146652 - RNA, 23 nt, Human herpesvirus 7
agaaucauagcaggaagcacaaa

SEQ ID NO: 2146653 - RNA, 14 nt, Human herpesvirus 7
aaauuuuuuacugu

SEQ ID NO: 2146654 - RNA, 23 nt, Human herpesvirus 7
ucuaccucuuacauuugauuuua

SEQ ID NO: 2146655 - RNA, 15 nt, Human herpesvirus 7
gcauauaugaaucaa

SEQ ID NO: 2146656 - RNA, 16 nt, Human herpesvirus 7
auccgcugaacgcaga

SEQ ID NO: 2146657 - RNA, 15 nt, Human herpesvirus 7
gcuugucucugucca

SEQ ID NO: 2146658 - RNA, 22 nt, Human herpesvirus 7
uauacauacuaaauuucuuaaa

SEQ ID NO: 2146659 - RNA, 23 nt, Human herpesvirus 7
ucacagauaaaaauuuauuuucu

SEQ ID NO: 2146660 - RNA, 16 nt, Human herpesvirus 7
acaucaauuuuaaugu

SEQ ID NO: 2146661 - RNA, 15 nt, Human herpesvirus 7
acuguauuuguugau

SEQ ID NO: 2146662 - RNA, 21 nt, Human herpesvirus 7
aaugaauaaaaucuauuuuau

SEQ ID NO: 2146663 - RNA, 23 nt, Human herpesvirus 7
ugcauuuuuauugcaguuuuuua

SEQ ID NO: 2146664 - RNA, 15 nt, Human herpesvirus 7
aaauuacuugcuaug

SEQ ID NO: 2146665 - RNA, 19 nt, Human herpesvirus 7
cauuccguuuuaaauagug

SEQ ID NO: 2146666 - RNA, 21 nt, Human herpesvirus 7
aacacguagaaaaaaacaaug

SEQ ID NO: 2146667 - RNA, 13 nt, Human herpesvirus 7
uuuuaaacuaagu

SEQ ID NO: 2146668 - RNA, 18 nt, Human herpesvirus 7
uuaaccagauauuaguuu

SEQ ID NO: 2146669 - RNA, 15 nt, Human herpesvirus 7
aauaaaauuuaaaau

SEQ ID NO: 2146670 - RNA, 16 nt, Human herpesvirus 7
aaggaaaauuucauuu

SEQ ID NO: 2146671 - RNA, 15 nt, Human herpesvirus 7
uuaaauagugaauca

SEQ ID NO: 2146672 - RNA, 13 nt, Human herpesvirus 7
gaaaauaacagga

SEQ ID NO: 2146673 - RNA, 18 nt, Human herpesvirus 7
ccguuuugaaaagucauu

SEQ ID NO: 2146674 - RNA, 19 nt, Human herpesvirus 7
ucuaauuuaugauacuugu

SEQ ID NO: 2146675 - RNA, 17 nt, Human herpesvirus 7
gaaaaaaauuaugugua

SEQ ID NO: 2146676 - RNA, 18 nt, Human herpesvirus 7
uaaggcuguaaaagaaaa

SEQ ID NO: 2146677 - RNA, 22 nt, Human herpesvirus 7
aucuuugaaaaucuugaauaaa

SEQ ID NO: 2146678 - RNA, 19 nt, Human herpesvirus 7
acuuuuuuuacuuaaauau

SEQ ID NO: 2146679 - RNA, 17 nt, Human herpesvirus 7
gugaaaacaguguugag

SEQ ID NO: 2146680 - RNA, 14 nt, Human herpesvirus 7
ugauauaaaugcuu

SEQ ID NO: 2146681 - RNA, 17 nt, Human herpesvirus 7
uguaacuguuuuucaaa

SEQ ID NO: 2146682 - RNA, 16 nt, Human herpesvirus 7
aacauacugauguaaa

SEQ ID NO: 2146683 - RNA, 18 nt, Human herpesvirus 7
cgaaauaauuagaaagcu

SEQ ID NO: 2146684 - RNA, 13 nt, Human herpesvirus 7
aauguaacuuuca

SEQ ID NO: 2146685 - RNA, 14 nt, Human herpesvirus 7
gaaugaacaaauaa

SEQ ID NO: 2146686 - RNA, 18 nt, Human herpesvirus 7
auuaauguaauuuaugau

SEQ ID NO: 2146687 - RNA, 21 nt, Human herpesvirus 7
uauauuacuacgguuuucaga

SEQ ID NO: 2146688 - RNA, 17 nt, Human herpesvirus 7
cuuuuuccaauagcacu

SEQ ID NO: 2146689 - RNA, 15 nt, Human herpesvirus 7
cgcugaaauuucaug

SEQ ID NO: 2146690 - RNA, 17 nt, Human herpesvirus 7
aaacggugauuguagau

SEQ ID NO: 2146691 - RNA, 17 nt, Human herpesvirus 7
ucuauuagauaaugaca

SEQ ID NO: 2146692 - RNA, 14 nt, Human herpesvirus 7
uuauuuugauugga

SEQ ID NO: 2146693 - RNA, 16 nt, Human herpesvirus 7
ugugagugaacauuug

SEQ ID NO: 2146694 - RNA, 22 nt, Human herpesvirus 7
auuuugaagagcguguuuugag

SEQ ID NO: 2146695 - RNA, 14 nt, Human herpesvirus 7
cuuauaacuucgua

SEQ ID NO: 2146696 - RNA, 14 nt, Human herpesvirus 7
agaaaaucucgaac

SEQ ID NO: 2146697 - RNA, 15 nt, Human herpesvirus 7
acuuuuuauaauaau

SEQ ID NO: 2146698 - RNA, 20 nt, Human herpesvirus 7
uuucuuagaucgaacuguua

SEQ ID NO: 2146699 - RNA, 17 nt, Human herpesvirus 7
gaaauuaaauacaaauu

SEQ ID NO: 2146700 - RNA, 20 nt, Human herpesvirus 7
auuuaccuuuaauugauauu

SEQ ID NO: 2146701 - RNA, 11 nt, Human herpesvirus 7
cuuucuuuacc

SEQ ID NO: 2146702 - RNA, 16 nt, Human herpesvirus 7
agaacauuaauaucaa

SEQ ID NO: 2146703 - RNA, 18 nt, Human herpesvirus 7
uuuaaagaaaagcuugua

SEQ ID NO: 2146704 - RNA, 19 nt, Human herpesvirus 7
cuccccaguaaauaaaaug

SEQ ID NO: 2146705 - RNA, 17 nt, Human herpesvirus 7
ggauacggcagcggaag

SEQ ID NO: 2146706 - RNA, 17 nt, Human herpesvirus 7
cuggauucaagaaauca

SEQ ID NO: 2146707 - RNA, 18 nt, Human herpesvirus 7
uuuaugaaaaacaaaaug

SEQ ID NO: 2146708 - RNA, 17 nt, Human herpesvirus 7
guacaagguguuccuua

SEQ ID NO: 2146709 - RNA, 16 nt, Human herpesvirus 7
aaccacaaaaaucaaa

SEQ ID NO: 2146710 - RNA, 23 nt, Human herpesvirus 7
gauuguauuugucucugugcauu

SEQ ID NO: 2146711 - RNA, 16 nt, Human herpesvirus 7
aacucaauaaaaaugu

SEQ ID NO: 2146712 - RNA, 19 nt, Human herpesvirus 7
uuaauacguccaaaaauug

SEQ ID NO: 2146713 - RNA, 14 nt, Human herpesvirus 7
gaaauuguuaaaaa

SEQ ID NO: 2146714 - RNA, 18 nt, Human herpesvirus 7
auacuaauagaaaaaugu

SEQ ID NO: 2146715 - RNA, 15 nt, Human herpesvirus 7
cgcguuuucaugcuc

SEQ ID NO: 2146716 - RNA, 14 nt, Human herpesvirus 7
ccgcguuggugugu

SEQ ID NO: 2146717 - RNA, 20 nt, Human herpesvirus 7
cagcuucagaugcuauggug

SEQ ID NO: 2146718 - RNA, 20 nt, Human herpesvirus 7
aucuugugaaguuugcugaa

SEQ ID NO: 2146719 - RNA, 17 nt, Human herpesvirus 7
acagaccuauguguuua

SEQ ID NO: 2146720 - RNA, 22 nt, Human herpesvirus 7
aaaauucaacgucuuacuugga

SEQ ID NO: 2146721 - RNA, 17 nt, Human herpesvirus 7
aaaaucaagucugaagg

SEQ ID NO: 2146722 - RNA, 20 nt, Human herpesvirus 7
acugugcaugaaaucuugaa

SEQ ID NO: 2146723 - RNA, 21 nt, Human herpesvirus 7
cauaggaaucgcaguguucau

SEQ ID NO: 2146724 - RNA, 9 nt, Human herpesvirus 7
uugccuuca

SEQ ID NO: 2146725 - RNA, 22 nt, Human herpesvirus 7
cuauccacucuccugaaauaaa

SEQ ID NO: 2146726 - RNA, 15 nt, Human herpesvirus 7
agacggaacuucuuu

SEQ ID NO: 2146727 - RNA, 16 nt, Human herpesvirus 7
uuacuugcuaugcuug

SEQ ID NO: 2146728 - RNA, 16 nt, Human herpesvirus 7
uaauaguggugaaauu

SEQ ID NO: 2146729 - RNA, 20 nt, Human herpesvirus 7
ugaaaccuucgcaacaauua

SEQ ID NO: 2146730 - RNA, 13 nt, Human herpesvirus 7
auuaauugcagcu

SEQ ID NO: 2146731 - RNA, 21 nt, Human herpesvirus 7
ucacuuagacucguaguaaga

SEQ ID NO: 2146732 - RNA, 19 nt, Human herpesvirus 7
aucuuuaucuuugucacuu

SEQ ID NO: 2146733 - RNA, 21 nt, Human herpesvirus 7
cggaauggacaaaaauaaagu

SEQ ID NO: 2146734 - RNA, 18 nt, Human herpesvirus 7
ugcuaaggcgaaaaacac

SEQ ID NO: 2146735 - RNA, 18 nt, Human herpesvirus 7
gaaaacugcaacuuugug

SEQ ID NO: 2146736 - RNA, 19 nt, Human herpesvirus 7
gaaaaguugaagaaaucuu

SEQ ID NO: 2146737 - RNA, 19 nt, Human herpesvirus 7
cuaaugguuggauuucaau

SEQ ID NO: 2146738 - RNA, 13 nt, Human herpesvirus 7
aagcacauguaca

SEQ ID NO: 2146739 - RNA, 18 nt, Human herpesvirus 7
caugauuauguuuucugc

SEQ ID NO: 2146740 - RNA, 17 nt, Human herpesvirus 7
uuauaauacuggcaugu

SEQ ID NO: 2146741 - RNA, 14 nt, Human herpesvirus 7
uucgccugaagaga

SEQ ID NO: 2146742 - RNA, 12 nt, Human herpesvirus 7
uugccagaaauc

SEQ ID NO: 2146743 - RNA, 18 nt, Human herpesvirus 7
aaaugggaauguuaacca

SEQ ID NO: 2146744 - RNA, 15 nt, Human herpesvirus 7
aacaguuuuuaaaau

SEQ ID NO: 2146745 - RNA, 14 nt, Human herpesvirus 7
auuuguucaaaaua

SEQ ID NO: 2146746 - RNA, 17 nt, Human herpesvirus 7
ucuaacacugcaagcug

SEQ ID NO: 2146747 - RNA, 16 nt, Human herpesvirus 7
caauugaguuuacugc

SEQ ID NO: 2146748 - RNA, 21 nt, Human herpesvirus 7
augacaacucaauaaaaaugu

SEQ ID NO: 2146749 - RNA, 16 nt, Human herpesvirus 7
ucuauuguucuuucaa

SEQ ID NO: 2146750 - RNA, 18 nt, Human herpesvirus 7
uuauauuugcuugcugaa

SEQ ID NO: 2146751 - RNA, 16 nt, Human herpesvirus 7
uuuauaaaauauggac

SEQ ID NO: 2146752 - RNA, 16 nt, Human herpesvirus 7
gucuacaauuucuggc

SEQ ID NO: 2146753 - RNA, 18 nt, Human herpesvirus 7
acuauuuacgauaauaau

SEQ ID NO: 2146754 - RNA, 22 nt, Human herpesvirus 7
ugauucuuauucuacacaucuu

SEQ ID NO: 2146755 - RNA, 21 nt, Human herpesvirus 7
accccaugcaagaaaaaaaug

SEQ ID NO: 2146756 - RNA, 19 nt, Human herpesvirus 7
cauacaugcaaucaacaaa

SEQ ID NO: 2146757 - RNA, 21 nt, Human herpesvirus 7
aaaucauuuuuaaaaauaaua

SEQ ID NO: 2146758 - RNA, 12 nt, Human herpesvirus 7
acuuuuaaauaa

SEQ ID NO: 2146759 - RNA, 22 nt, Human herpesvirus 7
auugcaguaaauuugagcuuug

SEQ ID NO: 2146760 - RNA, 14 nt, Human herpesvirus 7
uuuaaguaaauuuc

SEQ ID NO: 2146761 - RNA, 16 nt, Human herpesvirus 7
uaucuguggcuuuugc

SEQ ID NO: 2146762 - RNA, 18 nt, Human herpesvirus 7
gaaaagcaacuuuucuua

SEQ ID NO: 2146763 - RNA, 19 nt, Human herpesvirus 7
agauucuuaauuuguucaa

SEQ ID NO: 2146764 - RNA, 17 nt, Human herpesvirus 7
uaugaaauaauagaugu

SEQ ID NO: 2146765 - RNA, 14 nt, Human herpesvirus 7
uacaaaagacauaa

SEQ ID NO: 2146766 - RNA, 20 nt, Human herpesvirus 7
gaauagacacauuuauccau

SEQ ID NO: 2146767 - RNA, 22 nt, Human herpesvirus 7
aaggauuugcguaauggauuua

SEQ ID NO: 2146768 - RNA, 13 nt, Human herpesvirus 7
uaggauagcuuga

SEQ ID NO: 2146769 - RNA, 15 nt, Human herpesvirus 7
aauguuuuuuucaua

SEQ ID NO: 2146770 - RNA, 19 nt, Human herpesvirus 7
ucaauuuuucgcugaagaa

SEQ ID NO: 2146771 - RNA, 13 nt, Human herpesvirus 7
aauccaaguuuua

SEQ ID NO: 2146772 - RNA, 13 nt, Human herpesvirus 7
acucuccugaaau

SEQ ID NO: 2146773 - RNA, 21 nt, Human herpesvirus 7
ucuuaaaaguacaaauguuuu

SEQ ID NO: 2146774 - RNA, 20 nt, Human herpesvirus 7
aaauuauuagauuccauuua

SEQ ID NO: 2146775 - RNA, 22 nt, Human herpesvirus 7
ugaggaaaugucuuugucauga

SEQ ID NO: 2146776 - RNA, 22 nt, Human herpesvirus 7
aaauaauccauuccuguguucu

SEQ ID NO: 2146777 - RNA, 14 nt, Human herpesvirus 7
cuggaauauuugcu

SEQ ID NO: 2146778 - RNA, 15 nt, Human herpesvirus 7
cagaguuuaaaguaa

SEQ ID NO: 2146779 - RNA, 14 nt, Human herpesvirus 7
aauauuauaucuaa

SEQ ID NO: 2146780 - RNA, 12 nt, Human herpesvirus 7
gaaauuacagua

SEQ ID NO: 2146781 - RNA, 20 nt, Human herpesvirus 7
uaugguuucauuuggaagau

SEQ ID NO: 2146782 - RNA, 14 nt, Human herpesvirus 7
uuaauauuaguauu

SEQ ID NO: 2146783 - RNA, 20 nt, Human herpesvirus 7
auaugacuuguugaauuuuu

SEQ ID NO: 2146784 - RNA, 14 nt, Human herpesvirus 7
aacauugucaaaga

SEQ ID NO: 2146785 - RNA, 15 nt, Human herpesvirus 7
auuucagcuggaauu

SEQ ID NO: 2146786 - RNA, 15 nt, Human herpesvirus 7
caaguuaauuuugca

SEQ ID NO: 2146787 - RNA, 12 nt, Human herpesvirus 7
uucucaaaucuu

SEQ ID NO: 2146788 - RNA, 20 nt, Human herpesvirus 7
uauauuccaacucaaugaau

SEQ ID NO: 2146789 - RNA, 19 nt, Human herpesvirus 7
uuaaauuauuauuaguauu

SEQ ID NO: 2146790 - RNA, 23 nt, Human herpesvirus 7
cuucugggaacuagaaaaacacu

SEQ ID NO: 2146791 - RNA, 15 nt, Human herpesvirus 7
uuaucucauagcuua

SEQ ID NO: 2146792 - RNA, 19 nt, Human herpesvirus 7
ccugcaauaugcaugugua

SEQ ID NO: 2146793 - RNA, 15 nt, Human herpesvirus 7
auuuuccauucauuu

SEQ ID NO: 2146794 - RNA, 23 nt, Human herpesvirus 7
cagauuucauguuuuaugacuca

SEQ ID NO: 2146795 - RNA, 21 nt, Human herpesvirus 7
gguaauuuuaaaacugaagca

SEQ ID NO: 2146796 - RNA, 22 nt, Human herpesvirus 7
aauuuaugcuuuaacuggaauu

SEQ ID NO: 2146797 - RNA, 23 nt, Human herpesvirus 7
caucaaaagucuuguuuuuugga

SEQ ID NO: 2146798 - RNA, 20 nt, Human herpesvirus 7
uugcuauuuaaucuaugcaa

SEQ ID NO: 2146799 - RNA, 14 nt, Human herpesvirus 7
uuagcgaaucaucu

SEQ ID NO: 2146800 - RNA, 12 nt, Human herpesvirus 7
gcuguucaaaau

SEQ ID NO: 2146801 - RNA, 22 nt, Human herpesvirus 7
gcaugcaaaaaacaguggaaaa

SEQ ID NO: 2146802 - RNA, 22 nt, Human herpesvirus 7
uuuagaaguggcuucucuaguu

SEQ ID NO: 2146803 - RNA, 15 nt, Human herpesvirus 7
acauaaucauggaaa

SEQ ID NO: 2146804 - RNA, 15 nt, Human herpesvirus 7
uugaacagaauuuuc

SEQ ID NO: 2146805 - RNA, 20 nt, Human herpesvirus 7
auaaauuuuucgaucuguaa

SEQ ID NO: 2146806 - RNA, 20 nt, Human herpesvirus 7
ggagacgaugagcaugaaaa

SEQ ID NO: 2146807 - RNA, 20 nt, Human herpesvirus 7
ugaaaaaaucuugcaagcag

SEQ ID NO: 2146808 - RNA, 16 nt, Human herpesvirus 7
ggaaagcucauuucau

SEQ ID NO: 2146809 - RNA, 13 nt, Human herpesvirus 7
aaggaagguacau

SEQ ID NO: 2146810 - RNA, 20 nt, Human herpesvirus 7
aagaugucuaaaaguacagu

SEQ ID NO: 2146811 - RNA, 16 nt, Human herpesvirus 7
guugcuaguaugucag

SEQ ID NO: 2146812 - RNA, 17 nt, Human herpesvirus 7
uuuaaagaaaagcuugu

SEQ ID NO: 2146813 - RNA, 17 nt, Human herpesvirus 7
guaaaaaaucaagucug

SEQ ID NO: 2146814 - RNA, 22 nt, Human herpesvirus 7
aggcaucgcauauagcgcuuuu

SEQ ID NO: 2146815 - RNA, 22 nt, Human herpesvirus 7
auauacggaauggacaaaaaua

SEQ ID NO: 2146816 - RNA, 16 nt, Human herpesvirus 7
aaguuuuacagaaauu

SEQ ID NO: 2146817 - RNA, 12 nt, Human herpesvirus 7
uguuuacacauu

SEQ ID NO: 2146818 - RNA, 24 nt, Human herpesvirus 7
auuugcagcuucuaaaugugcuaa

SEQ ID NO: 2146819 - RNA, 16 nt, Human herpesvirus 7
uugaacauaaauauuc

SEQ ID NO: 2146820 - RNA, 18 nt, Human herpesvirus 7
aguauuuuuuaugaagag

SEQ ID NO: 2146821 - RNA, 15 nt, Human herpesvirus 7
acgucuacauuuaaa

SEQ ID NO: 2146822 - RNA, 22 nt, Human herpesvirus 7
cgcuucguaaauauaaucaaaa

SEQ ID NO: 2146823 - RNA, 20 nt, Human herpesvirus 7
aaaaucuuuaugugggauuu

SEQ ID NO: 2146824 - RNA, 16 nt, Human herpesvirus 7
agaccaaauucaucca

SEQ ID NO: 2146825 - RNA, 22 nt, Human herpesvirus 7
aacaugucuuuuaguuuucauu

SEQ ID NO: 2146826 - RNA, 15 nt, Human herpesvirus 7
auuccaacucaauga

SEQ ID NO: 2146827 - RNA, 15 nt, Human herpesvirus 7
aaaaguugaaaaugu

SEQ ID NO: 2146828 - RNA, 22 nt, Human herpesvirus 7
uuguagguaauuucuuauaauu

SEQ ID NO: 2146829 - RNA, 13 nt, Human herpesvirus 7
aaacuguuuguaa

SEQ ID NO: 2146830 - RNA, 17 nt, Human herpesvirus 7
uuacagaagaacauuua

SEQ ID NO: 2146831 - RNA, 13 nt, Human herpesvirus 7
gaugcucucuaau

SEQ ID NO: 2146832 - RNA, 19 nt, Human herpesvirus 7
uaaauauuuuuaaaaucua

SEQ ID NO: 2146833 - RNA, 17 nt, Human herpesvirus 7
cagcugugauauuuggu

SEQ ID NO: 2146834 - RNA, 22 nt, Human herpesvirus 7
agcaccaaaaaauaaaaacaag

SEQ ID NO: 2146835 - RNA, 22 nt, Human herpesvirus 7
augcuuccuaaaaaaaaaggaa

SEQ ID NO: 2146836 - RNA, 22 nt, Human herpesvirus 7
uacaaauuuuucggauaaaagg

SEQ ID NO: 2146837 - RNA, 17 nt, Human herpesvirus 7
agaaaguccaaagugau

SEQ ID NO: 2146838 - RNA, 17 nt, Human herpesvirus 7
caaacucaauaaagauu

SEQ ID NO: 2146839 - RNA, 23 nt, Human herpesvirus 7
uucugaaauaaacauuucaaaau

SEQ ID NO: 2146840 - RNA, 15 nt, Human herpesvirus 7
ucuggaugaaaacug

SEQ ID NO: 2146841 - RNA, 18 nt, Human herpesvirus 7
cuaaaaauccuaaauuuc

SEQ ID NO: 2146842 - RNA, 20 nt, Human herpesvirus 7
accgcagauccaucuuugaa

SEQ ID NO: 2146843 - RNA, 17 nt, Human herpesvirus 7
acccagaccgcauaacc

SEQ ID NO: 2146844 - RNA, 22 nt, Human herpesvirus 7
aaauguaucuuaaaauacuaau

SEQ ID NO: 2146845 - RNA, 19 nt, Human herpesvirus 7
cacccagucgucugcucaa

SEQ ID NO: 2146846 - RNA, 14 nt, Human herpesvirus 7
aguuccacgucaau

SEQ ID NO: 2146847 - RNA, 15 nt, Human herpesvirus 7
auaguugguuaauaa

SEQ ID NO: 2146848 - RNA, 21 nt, Human herpesvirus 7
ucuugcuugcgaucaucauug

SEQ ID NO: 2146849 - RNA, 20 nt, Human herpesvirus 7
cguucuauguaugaaaaaaa

SEQ ID NO: 2146850 - RNA, 15 nt, Human herpesvirus 7
gcagaaugcguaacu

SEQ ID NO: 2146851 - RNA, 18 nt, Human herpesvirus 7
auuuauauuugcuugcug

SEQ ID NO: 2146852 - RNA, 16 nt, Human herpesvirus 7
cagcagccuacuuuac

SEQ ID NO: 2146853 - RNA, 17 nt, Human herpesvirus 7
cugaauccgcauuugag

SEQ ID NO: 2146854 - RNA, 11 nt, Human herpesvirus 7
aaguugaacaa

SEQ ID NO: 2146855 - RNA, 11 nt, Human herpesvirus 7
cuguuuaagua

SEQ ID NO: 2146856 - RNA, 23 nt, Human herpesvirus 7
uucuucgucuaagucaauuaaag

SEQ ID NO: 2146857 - RNA, 13 nt, Human herpesvirus 7
agcaauugauuca

SEQ ID NO: 2146858 - RNA, 20 nt, Human herpesvirus 7
cgauccucagaauguacaca

SEQ ID NO: 2146859 - RNA, 22 nt, Human herpesvirus 7
uaacaacuagcaaacagugcug

SEQ ID NO: 2146860 - RNA, 14 nt, Human herpesvirus 7
agacagaaugccag

SEQ ID NO: 2146861 - RNA, 21 nt, Human herpesvirus 7
cugaaucaaaauccuggauuu

SEQ ID NO: 2146862 - RNA, 23 nt, Human herpesvirus 7
uuaauaaaaagcccaugaacacu

SEQ ID NO: 2146863 - RNA, 21 nt, Human herpesvirus 7
acucauacuaauagaaaaaug

SEQ ID NO: 2146864 - RNA, 20 nt, Human herpesvirus 7
caccaaaaaauaaaaacaag

SEQ ID NO: 2146865 - RNA, 13 nt, Human herpesvirus 7
ggagagauucaaa

SEQ ID NO: 2146866 - RNA, 17 nt, Human herpesvirus 7
gaugacuuccaaguuuu

SEQ ID NO: 2146867 - RNA, 13 nt, Human herpesvirus 7
aaaacuugccauc

SEQ ID NO: 2146868 - RNA, 20 nt, Human herpesvirus 7
accuuuuaaaaucaaaugua

SEQ ID NO: 2146869 - RNA, 14 nt, Human herpesvirus 7
acaauuugcauaau

SEQ ID NO: 2146870 - RNA, 17 nt, Human herpesvirus 7
auguacaauuugcauaa

SEQ ID NO: 2146871 - RNA, 17 nt, Human herpesvirus 7
uacagaaauugaugaag

SEQ ID NO: 2146872 - RNA, 16 nt, Human herpesvirus 7
auggacaaaaauaaag

SEQ ID NO: 2146873 - RNA, 15 nt, Human herpesvirus 7
cuuuuacagaagaac

SEQ ID NO: 2146874 - RNA, 22 nt, Human herpesvirus 7
ucaaaauucugcuugucucugu

SEQ ID NO: 2146875 - RNA, 18 nt, Human herpesvirus 7
ggcuagaaguuuagagac

SEQ ID NO: 2146876 - RNA, 23 nt, Human herpesvirus 7
caguuauuucuuauuggagaugu

SEQ ID NO: 2146877 - RNA, 16 nt, Human herpesvirus 7
cagcaauuuuaacgau

SEQ ID NO: 2146878 - RNA, 21 nt, Human herpesvirus 7
acguccaagaaauaugcuucc

SEQ ID NO: 2146879 - RNA, 21 nt, Human herpesvirus 7
gcuguucuugcuggcucaagc

SEQ ID NO: 2146880 - RNA, 19 nt, Human herpesvirus 7
uuuaaagaaaagcuuguau

SEQ ID NO: 2146881 - RNA, 23 nt, Human herpesvirus 7
auuauguauaucuuuuuauugaa

SEQ ID NO: 2146882 - RNA, 18 nt, Human herpesvirus 7
auuugaugaaauuguuaa

SEQ ID NO: 2146883 - RNA, 15 nt, Human herpesvirus 7
aguucguaaaaagaa

SEQ ID NO: 2146884 - RNA, 13 nt, Human herpesvirus 7
cauacaaugaauu

SEQ ID NO: 2146885 - RNA, 20 nt, Human herpesvirus 7
cauuagcauugaaaucauuu

SEQ ID NO: 2146886 - RNA, 16 nt, Human herpesvirus 7
cauuaaacagcauuuu

SEQ ID NO: 2146887 - RNA, 21 nt, Human herpesvirus 7
aauauacuuuagcgcugaaau

SEQ ID NO: 2146888 - RNA, 21 nt, Human herpesvirus 7
acuugaauagguaucuuuacu

SEQ ID NO: 2146889 - RNA, 19 nt, Human herpesvirus 7
uguaccacgaauaucguug

SEQ ID NO: 2146890 - RNA, 21 nt, Human herpesvirus 7
ucucuuggaguuugucucauu

SEQ ID NO: 2146891 - RNA, 20 nt, Human herpesvirus 7
uucuggcaacaguucaaaaa

SEQ ID NO: 2146892 - RNA, 20 nt, Human herpesvirus 7
ggaaacaaauuguggagaga

SEQ ID NO: 2146893 - RNA, 21 nt, Human herpesvirus 7
ucuggagaacaauuagaauuu

SEQ ID NO: 2146894 - RNA, 20 nt, Human herpesvirus 7
aagcagacauugaagauugu

SEQ ID NO: 2146895 - RNA, 17 nt, Human herpesvirus 7
cugccaccauuucugaa

SEQ ID NO: 2146896 - RNA, 17 nt, Human herpesvirus 7
aaauggguuugggaaac

SEQ ID NO: 2146897 - RNA, 15 nt, Human herpesvirus 7
gacaaacagaaaaac

SEQ ID NO: 2146898 - RNA, 16 nt, Human herpesvirus 7
ugcagucaaagauuuu

SEQ ID NO: 2146899 - RNA, 14 nt, Human herpesvirus 7
aaauguuuuugcua

SEQ ID NO: 2146900 - RNA, 17 nt, Human herpesvirus 7
gauuccaaagagccucc

SEQ ID NO: 2146901 - RNA, 15 nt, Human herpesvirus 7
uaaagacaugaauca

SEQ ID NO: 2146902 - RNA, 18 nt, Human herpesvirus 7
gaaacaagguuuaaaaca

SEQ ID NO: 2146903 - RNA, 13 nt, Human herpesvirus 7
aauuuuaaaacug

SEQ ID NO: 2146904 - RNA, 14 nt, Human herpesvirus 7
uucagcgugacaga

SEQ ID NO: 2146905 - RNA, 20 nt, Human herpesvirus 7
gaguuguuaaaauuaaaacu

SEQ ID NO: 2146906 - RNA, 20 nt, Human herpesvirus 7
cacaggauuugggaaaauau

SEQ ID NO: 2146907 - RNA, 17 nt, Human herpesvirus 7
caaugguauaaagugcu

SEQ ID NO: 2146908 - RNA, 18 nt, Human herpesvirus 7
cuguugagucgaaugcau

SEQ ID NO: 2146909 - RNA, 15 nt, Human herpesvirus 7
agguaagaaaaauuu

SEQ ID NO: 2146910 - RNA, 13 nt, Human herpesvirus 7
uaacaaauuggaa

SEQ ID NO: 2146911 - RNA, 17 nt, Human herpesvirus 7
uuagaaaaaaaacauua

SEQ ID NO: 2146912 - RNA, 20 nt, Human herpesvirus 7
uuccuaaaaaaaaaggaaaa

SEQ ID NO: 2146913 - RNA, 23 nt, Human herpesvirus 7
aguuuguuucaauaugcaugcaa

SEQ ID NO: 2146914 - RNA, 13 nt, Human herpesvirus 7
acaugaucuugua

SEQ ID NO: 2146915 - RNA, 21 nt, Human herpesvirus 7
agcacccggcuuaaugaagac

SEQ ID NO: 2146916 - RNA, 18 nt, Human herpesvirus 7
ugauugcgaccaaagauc

SEQ ID NO: 2146917 - RNA, 22 nt, Human herpesvirus 7
ugcaguguuuuuuucugguaaa

SEQ ID NO: 2146918 - RNA, 14 nt, Human herpesvirus 7
uuuucggauaaaag

SEQ ID NO: 2146919 - RNA, 15 nt, Human herpesvirus 7
aaucaauccaaauaa

SEQ ID NO: 2146920 - RNA, 17 nt, Human herpesvirus 7
agaugucuaaaaguaca

SEQ ID NO: 2146921 - RNA, 23 nt, Human herpesvirus 7
acauucuccaguggcaguacuac

SEQ ID NO: 2146922 - RNA, 13 nt, Human herpesvirus 7
uucaagaaaucag

SEQ ID NO: 2146923 - RNA, 14 nt, Human herpesvirus 7
ggaacguuggggau

SEQ ID NO: 2146924 - RNA, 20 nt, Human herpesvirus 7
cucaaguagccgaaaaagaa

SEQ ID NO: 2146925 - RNA, 16 nt, Human herpesvirus 7
uuuuuaugugguuaaa

SEQ ID NO: 2146926 - RNA, 19 nt, Human herpesvirus 7
uagucaggaucuccuggaa

SEQ ID NO: 2146927 - RNA, 21 nt, Human herpesvirus 7
auucuuuugcgggaaaaaacg

SEQ ID NO: 2146928 - RNA, 19 nt, Human herpesvirus 7
uuaaucauaucuugcuuag

SEQ ID NO: 2146929 - RNA, 13 nt, Human herpesvirus 7
uauuagaauuggg

SEQ ID NO: 2146930 - RNA, 12 nt, Human herpesvirus 7
cuuagaaucuuu

SEQ ID NO: 2146931 - RNA, 14 nt, Human herpesvirus 7
ugcuuuguugucau

SEQ ID NO: 2146932 - RNA, 22 nt, Human herpesvirus 7
ccaguucuaucucaaaacaaac

SEQ ID NO: 2146933 - RNA, 19 nt, Human herpesvirus 7
auuauauccaauaaugcau

SEQ ID NO: 2146934 - RNA, 22 nt, Human herpesvirus 7
ggcaacaguucaaaaaaagaag

SEQ ID NO: 2146935 - RNA, 22 nt, Human herpesvirus 7
uucagaaaauaaaaguaaaaac

SEQ ID NO: 2146936 - RNA, 23 nt, Human herpesvirus 7
agcuugcuuaaaacuuugaaaau

SEQ ID NO: 2146937 - RNA, 12 nt, Human herpesvirus 7
aauuuugaagag

SEQ ID NO: 2146938 - RNA, 17 nt, Human herpesvirus 7
uaggaaucagaccagca

SEQ ID NO: 2146939 - RNA, 13 nt, Human herpesvirus 7
agaaacuaauaaa

SEQ ID NO: 2146940 - RNA, 21 nt, Human herpesvirus 7
auuuauuuguguuuuguaaau

SEQ ID NO: 2146941 - RNA, 19 nt, Human herpesvirus 7
caagguucuaaaaauucug

SEQ ID NO: 2146942 - RNA, 15 nt, Human herpesvirus 7
gacaacgacuacagg

SEQ ID NO: 2146943 - RNA, 17 nt, Human herpesvirus 7
aaucuaauuaaucugca

SEQ ID NO: 2146944 - RNA, 17 nt, Human herpesvirus 7
gaacaucccuggacaga

SEQ ID NO: 2146945 - RNA, 17 nt, Human herpesvirus 7
cugugucaauaaacuua

SEQ ID NO: 2146946 - RNA, 13 nt, Human herpesvirus 7
cgaugauauuguc

SEQ ID NO: 2146947 - RNA, 22 nt, Human herpesvirus 7
acaaucgcggggaaaaaaugag

SEQ ID NO: 2146948 - RNA, 16 nt, Human herpesvirus 7
ucaauaaaugguuuua

SEQ ID NO: 2146949 - RNA, 16 nt, Human herpesvirus 7
cucagaacuguuuuaa

SEQ ID NO: 2146950 - RNA, 21 nt, Human herpesvirus 7
ugcuuuagaauuagagugcuu

SEQ ID NO: 2146951 - RNA, 17 nt, Human herpesvirus 7
cugagaaaaacagacuu

SEQ ID NO: 2146952 - RNA, 22 nt, Human herpesvirus 7
auuuuuagcucuaaacaaacaa

SEQ ID NO: 2146953 - RNA, 15 nt, Human herpesvirus 7
uugguaaucugcucg

SEQ ID NO: 2146954 - RNA, 14 nt, Human herpesvirus 7
uggucgagaauaca

SEQ ID NO: 2146955 - RNA, 20 nt, Human herpesvirus 7
ucuuuauuuaagcuucaaaa

SEQ ID NO: 2146956 - RNA, 11 nt, Human herpesvirus 7
ccuaacaaaaa

SEQ ID NO: 2146957 - RNA, 17 nt, Human herpesvirus 7
aaaagcuaaaaaacgug

SEQ ID NO: 2146958 - RNA, 23 nt, Human herpesvirus 7
agacacggaguuuuuacucugug

SEQ ID NO: 2146959 - RNA, 19 nt, Human herpesvirus 7
uaguaaucacauuaucuug

SEQ ID NO: 2146960 - RNA, 22 nt, Human herpesvirus 7
uguuuucaaauaucucuguuuu

SEQ ID NO: 2146961 - RNA, 20 nt, Human herpesvirus 7
aaagauuaaaaaaaaaagaa

SEQ ID NO: 2146962 - RNA, 12 nt, Human herpesvirus 7
aacucuucuuua

SEQ ID NO: 2146963 - RNA, 22 nt, Human herpesvirus 7
cugcuaauucuggaaaauguga

SEQ ID NO: 2146964 - RNA, 19 nt, Human herpesvirus 7
gauucacauugucacugca

SEQ ID NO: 2146965 - RNA, 19 nt, Human herpesvirus 7
uugcgcuguugguuaugca

SEQ ID NO: 2146966 - RNA, 19 nt, Human herpesvirus 7
caaaggaaaaaugcugcuc

SEQ ID NO: 2146967 - RNA, 20 nt, Human herpesvirus 7
guacauuuuaccaaauaugu

SEQ ID NO: 2146968 - RNA, 20 nt, Human herpesvirus 7
aauuauuuaaacagcguuca

SEQ ID NO: 2146969 - RNA, 20 nt, Human herpesvirus 7
auuucuauuagauaaugaca

SEQ ID NO: 2146970 - RNA, 13 nt, Human herpesvirus 7
aaaaugauaugac

SEQ ID NO: 2146971 - RNA, 19 nt, Human herpesvirus 7
uuuaacugauaauuucuac

SEQ ID NO: 2146972 - RNA, 14 nt, Human herpesvirus 7
ucauagguugcuau

SEQ ID NO: 2146973 - RNA, 20 nt, Human herpesvirus 7
auaguuugguuauccaaguu

SEQ ID NO: 2146974 - RNA, 15 nt, Human herpesvirus 7
caaugguaagcaaaa

SEQ ID NO: 2146975 - RNA, 13 nt, Human herpesvirus 7
caggcaaugcaag

SEQ ID NO: 2146976 - RNA, 19 nt, Human herpesvirus 7
aguuauaugaaauuucaaa

SEQ ID NO: 2146977 - RNA, 12 nt, Human herpesvirus 7
acagaaacaugu

SEQ ID NO: 2146978 - RNA, 18 nt, Human herpesvirus 7
acugauuuuuuuaauaau

SEQ ID NO: 2146979 - RNA, 17 nt, Human herpesvirus 7
accgguuaaaaugggaa

SEQ ID NO: 2146980 - RNA, 16 nt, Human herpesvirus 7
uugaauagguaucuuu

SEQ ID NO: 2146981 - RNA, 17 nt, Human herpesvirus 7
aaacaggcauuuaagaa

SEQ ID NO: 2146982 - RNA, 15 nt, Human herpesvirus 7
ucuauuaaauauuua

SEQ ID NO: 2146983 - RNA, 12 nt, Human herpesvirus 7
ugguaaaaagac

SEQ ID NO: 2146984 - RNA, 19 nt, Human herpesvirus 7
ucaauaugcaugcaauuuu

SEQ ID NO: 2146985 - RNA, 18 nt, Human herpesvirus 7
cuuugucaugacuggaca

SEQ ID NO: 2146986 - RNA, 22 nt, Human herpesvirus 7
aauuauuuccagaguaugaauu

SEQ ID NO: 2146987 - RNA, 22 nt, Human herpesvirus 7
uuuuauucagacaaguaaaagc

SEQ ID NO: 2146988 - RNA, 13 nt, Human herpesvirus 7
ucacauugucacu

SEQ ID NO: 2146989 - RNA, 15 nt, Human herpesvirus 7
ccagauuucuggcaa

SEQ ID NO: 2146990 - RNA, 17 nt, Human herpesvirus 7
ugcguuaaugucucugu

SEQ ID NO: 2146991 - RNA, 17 nt, Human herpesvirus 7
aguucuuugaaauagug

SEQ ID NO: 2146992 - RNA, 20 nt, Human herpesvirus 7
accgucauuuaauuggcaac

SEQ ID NO: 2146993 - RNA, 16 nt, Human herpesvirus 7
cuaagguuugaagagu

SEQ ID NO: 2146994 - RNA, 20 nt, Human herpesvirus 7
acagaucuugcuuuagaaca

SEQ ID NO: 2146995 - RNA, 18 nt, Human herpesvirus 7
aaaguaaaaacuuuucuu

SEQ ID NO: 2146996 - RNA, 17 nt, Human herpesvirus 7
ucaagaucgauuaaauc

SEQ ID NO: 2146997 - RNA, 16 nt, Human herpesvirus 7
aacuagaaaaacacua

SEQ ID NO: 2146998 - RNA, 19 nt, Human herpesvirus 7
uaacauauguugauucucu

SEQ ID NO: 2146999 - RNA, 21 nt, Human herpesvirus 7
caaaacgccuugggcacacca

SEQ ID NO: 2147000 - RNA, 18 nt, Human herpesvirus 7
aauauuuauuugcuuuua

SEQ ID NO: 2147001 - RNA, 23 nt, Human herpesvirus 7
uuacaaauuuuucggauaaaagg

SEQ ID NO: 2147002 - RNA, 14 nt, Human herpesvirus 7
cgaaaagacaacaa

SEQ ID NO: 2147003 - RNA, 13 nt, Human herpesvirus 7
cgagauuccaaag

SEQ ID NO: 2147004 - RNA, 19 nt, Human herpesvirus 7
uacaauaugacgacuuuga

SEQ ID NO: 2147005 - RNA, 16 nt, Human herpesvirus 7
augacaaacaaaaaua

SEQ ID NO: 2147006 - RNA, 18 nt, Human herpesvirus 7
agucaaucacaguugcuu

SEQ ID NO: 2147007 - RNA, 15 nt, Human herpesvirus 7
auucuaaauuaaaaa

SEQ ID NO: 2147008 - RNA, 14 nt, Human herpesvirus 7
aaugaccacaaccg

SEQ ID NO: 2147009 - RNA, 14 nt, Human herpesvirus 7
acuuaaauauuuua

SEQ ID NO: 2147010 - RNA, 16 nt, Human herpesvirus 7
gcauaucaugauuaua

SEQ ID NO: 2147011 - RNA, 14 nt, Human herpesvirus 7
uuacaaaaaguaga

SEQ ID NO: 2147012 - RNA, 13 nt, Human herpesvirus 7
gcuaucugauuua

SEQ ID NO: 2147013 - RNA, 14 nt, Human herpesvirus 7
ugcuuaaggacagg

SEQ ID NO: 2147014 - RNA, 14 nt, Human herpesvirus 7
cuacuguuaagaau

SEQ ID NO: 2147015 - RNA, 20 nt, Human herpesvirus 7
ggcaauagauuacgcacaaa

SEQ ID NO: 2147016 - RNA, 15 nt, Human herpesvirus 7
auuuaaaauuaauaa

SEQ ID NO: 2147017 - RNA, 22 nt, Human herpesvirus 7
aucuaccccgauccucagaaug

SEQ ID NO: 2147018 - RNA, 12 nt, Human herpesvirus 7
aggaaauugcuu

SEQ ID NO: 2147019 - RNA, 14 nt, Human herpesvirus 7
cuuucguuuucaaa

SEQ ID NO: 2147020 - RNA, 21 nt, Human herpesvirus 7
uaugaaaagcccaaacuguuu

SEQ ID NO: 2147021 - RNA, 16 nt, Human herpesvirus 7
uugucauacaaugaau

SEQ ID NO: 2147022 - RNA, 17 nt, Human herpesvirus 7
gcuuguuaaagaaaagc

SEQ ID NO: 2147023 - RNA, 23 nt, Human herpesvirus 7
uucuucaaagucuaagguuugaa

SEQ ID NO: 2147024 - RNA, 22 nt, Human herpesvirus 7
aauuguuuuucuuucuugcaua

SEQ ID NO: 2147025 - RNA, 16 nt, Human herpesvirus 7
uuucguaucugugacu

SEQ ID NO: 2147026 - RNA, 17 nt, Human herpesvirus 7
gucacaaaagcuuugau

SEQ ID NO: 2147027 - RNA, 18 nt, Human herpesvirus 7
gaucuaagucuacaucau

SEQ ID NO: 2147028 - RNA, 15 nt, Human herpesvirus 7
gucaaaaaaaauuaa

SEQ ID NO: 2147029 - RNA, 19 nt, Human herpesvirus 7
uuauccaaguuuuaacaau

SEQ ID NO: 2147030 - RNA, 13 nt, Human herpesvirus 7
aauucgaaaugaa

SEQ ID NO: 2147031 - RNA, 12 nt, Human herpesvirus 7
uucacagaaauc

SEQ ID NO: 2147032 - RNA, 16 nt, Human herpesvirus 7
ugcugauccgccgaca

SEQ ID NO: 2147033 - RNA, 15 nt, Human herpesvirus 7
uuaccgguacauuua

SEQ ID NO: 2147034 - RNA, 18 nt, Human herpesvirus 7
auaacccacuaacauuuu

SEQ ID NO: 2147035 - RNA, 14 nt, Human herpesvirus 7
ugccauuacugauc

SEQ ID NO: 2147036 - RNA, 13 nt, Human herpesvirus 7
auaaauaaaaugu

SEQ ID NO: 2147037 - RNA, 16 nt, Human herpesvirus 7
aaugucucuguuccca

SEQ ID NO: 2147038 - RNA, 16 nt, Human herpesvirus 7
uuggauuuucuguaau

SEQ ID NO: 2147039 - RNA, 18 nt, Human herpesvirus 7
aguaaaacucaauguaaa

SEQ ID NO: 2147040 - RNA, 22 nt, Human herpesvirus 7
auacaacugcagaaauuuuuaa

SEQ ID NO: 2147041 - RNA, 16 nt, Human herpesvirus 7
uauauagcaauauuua

SEQ ID NO: 2147042 - RNA, 13 nt, Human herpesvirus 7
aagacaucgaaga

SEQ ID NO: 2147043 - RNA, 16 nt, Human herpesvirus 7
auuguccuuucaacga

SEQ ID NO: 2147044 - RNA, 17 nt, Human herpesvirus 7
aguuuuacagaaauuga

SEQ ID NO: 2147045 - RNA, 17 nt, Human herpesvirus 7
uuccugcaauaauaaac

SEQ ID NO: 2147046 - RNA, 19 nt, Human herpesvirus 7
uuugaucaaaaucuguaga

SEQ ID NO: 2147047 - RNA, 20 nt, Human herpesvirus 7
cugcaacaaauuaaauacuu

SEQ ID NO: 2147048 - RNA, 23 nt, Human herpesvirus 7
uuaaguaaggaagguacaucuuu

SEQ ID NO: 2147049 - RNA, 14 nt, Human herpesvirus 7
uaaauaauaacaau

SEQ ID NO: 2147050 - RNA, 18 nt, Human herpesvirus 7
auuauuuugauuggaaau

SEQ ID NO: 2147051 - RNA, 19 nt, Human herpesvirus 7
ccacuaugccacaaaaaac

SEQ ID NO: 2147052 - RNA, 11 nt, Human herpesvirus 7
uugaaaaccau

SEQ ID NO: 2147053 - RNA, 21 nt, Human herpesvirus 7
ucagcacugggagcaaugcau

SEQ ID NO: 2147054 - RNA, 20 nt, Human herpesvirus 7
ccuacgcagcaauguauaua

SEQ ID NO: 2147055 - RNA, 17 nt, Human herpesvirus 7
gaacauuugaagauaag

SEQ ID NO: 2147056 - RNA, 16 nt, Human herpesvirus 7
uacucagaagacauau

SEQ ID NO: 2147057 - RNA, 15 nt, Human herpesvirus 7
uuaaaauauuagaac

SEQ ID NO: 2147058 - RNA, 13 nt, Human herpesvirus 7
agauaaugacaaa

SEQ ID NO: 2147059 - RNA, 23 nt, Human herpesvirus 7
uagaaaauaacuuuaaauuauua

SEQ ID NO: 2147060 - RNA, 11 nt, Human herpesvirus 7
aacaaugacuu

SEQ ID NO: 2147061 - RNA, 12 nt, Human herpesvirus 7
ugucaggaagca

SEQ ID NO: 2147062 - RNA, 19 nt, Human herpesvirus 7
ugugcaauuuggcucugau

SEQ ID NO: 2147063 - RNA, 18 nt, Human herpesvirus 7
ccacacucauauuuuuca

SEQ ID NO: 2147064 - RNA, 19 nt, Human herpesvirus 7
ugcuggaaaacauuucaga

SEQ ID NO: 2147065 - RNA, 23 nt, Human herpesvirus 7
auccaaguuuuaacaaucuaagg

SEQ ID NO: 2147066 - RNA, 18 nt, Human herpesvirus 7
cucagauucgacuucuaa

SEQ ID NO: 2147067 - RNA, 14 nt, Human herpesvirus 7
aaugucucuguucc

SEQ ID NO: 2147068 - RNA, 22 nt, Human herpesvirus 7
gucaucuuauauuccuuugaaa

SEQ ID NO: 2147069 - RNA, 21 nt, Human herpesvirus 7
guuuuaauugagauuauucaa

SEQ ID NO: 2147070 - RNA, 18 nt, Human herpesvirus 7
aauuguaguuuuugcaua

SEQ ID NO: 2147071 - RNA, 15 nt, Human herpesvirus 7
aaaauuuuagacgca

SEQ ID NO: 2147072 - RNA, 22 nt, Human herpesvirus 7
acgcaugcuugcuuugcauaga

SEQ ID NO: 2147073 - RNA, 21 nt, Human herpesvirus 7
auuguagagguccaauagaaa

SEQ ID NO: 2147074 - RNA, 11 nt, Human herpesvirus 7
uaaaacuguuu

SEQ ID NO: 2147075 - RNA, 13 nt, Human herpesvirus 7
augcuaaaguuaa

SEQ ID NO: 2147076 - RNA, 23 nt, Human herpesvirus 7
uaauugcagacuaauuacagcua

SEQ ID NO: 2147077 - RNA, 17 nt, Human herpesvirus 7
gucaaauuuauauuuua

SEQ ID NO: 2147078 - RNA, 22 nt, Human herpesvirus 7
cuggcucuuuacaaaauucaac

SEQ ID NO: 2147079 - RNA, 22 nt, Human herpesvirus 7
uggucagaacaucccuggacag

SEQ ID NO: 2147080 - RNA, 13 nt, Human herpesvirus 7
auuuuacaaaaag

SEQ ID NO: 2147081 - RNA, 16 nt, Human herpesvirus 7
aauaaauuaauuccuu

SEQ ID NO: 2147082 - RNA, 18 nt, Human herpesvirus 7
cauggggcauuaauucuu

SEQ ID NO: 2147083 - RNA, 14 nt, Human herpesvirus 7
aauuuggaaauugu

SEQ ID NO: 2147084 - RNA, 14 nt, Human herpesvirus 7
cgaaagccacuguu

SEQ ID NO: 2147085 - RNA, 18 nt, Human herpesvirus 7
aaaagccauaaaauguac

SEQ ID NO: 2147086 - RNA, 22 nt, Human herpesvirus 7
agcagcuuaagacaccccaaaa

SEQ ID NO: 2147087 - RNA, 24 nt, Human herpesvirus 7
aaaauuauaauaacaaacgauuug

SEQ ID NO: 2147088 - RNA, 19 nt, Human herpesvirus 7
uuggguagguuaagccuag

SEQ ID NO: 2147089 - RNA, 18 nt, Human herpesvirus 7
uaucucuguaaaacguuc

SEQ ID NO: 2147090 - RNA, 19 nt, Human herpesvirus 7
auuucaaaaucagaaaugu

SEQ ID NO: 2147091 - RNA, 13 nt, Human herpesvirus 7
cagaaaucccaaa

SEQ ID NO: 2147092 - RNA, 19 nt, Human herpesvirus 7
gauacguuaguugcagcug

SEQ ID NO: 2147093 - RNA, 23 nt, Human herpesvirus 7
aggacuuuacacggucuuaucua

SEQ ID NO: 2147094 - RNA, 13 nt, Human herpesvirus 7
aaacagcugaaaa

SEQ ID NO: 2147095 - RNA, 22 nt, Human herpesvirus 7
cuaacuauaauagccuuucacu

SEQ ID NO: 2147096 - RNA, 15 nt, Human herpesvirus 7
ugguuggauuucaau

SEQ ID NO: 2147097 - RNA, 19 nt, Human herpesvirus 7
aaugcaacaucuuaaaugu

SEQ ID NO: 2147098 - RNA, 20 nt, Human herpesvirus 7
ucuaaaguggagacaaucua

SEQ ID NO: 2147099 - RNA, 16 nt, Human herpesvirus 7
ggaggugcuguuucca

SEQ ID NO: 2147100 - RNA, 22 nt, Human herpesvirus 7
agcaagugucuuuuauuacucg

SEQ ID NO: 2147101 - RNA, 12 nt, Human herpesvirus 7
uuaaauuauuau

SEQ ID NO: 2147102 - RNA, 15 nt, Human herpesvirus 7
auuuauugaugucaa

SEQ ID NO: 2147103 - RNA, 19 nt, Human herpesvirus 7
guauugccuuucccagaag

SEQ ID NO: 2147104 - RNA, 15 nt, Human herpesvirus 7
agaaaguccaaagug

SEQ ID NO: 2147105 - RNA, 14 nt, Human herpesvirus 7
auugguaauuagug

SEQ ID NO: 2147106 - RNA, 16 nt, Human herpesvirus 7
ugguauugucuacaau

SEQ ID NO: 2147107 - RNA, 15 nt, Human herpesvirus 7
uguuccacgaucauu

SEQ ID NO: 2147108 - RNA, 15 nt, Human herpesvirus 7
uaugaguuugauugu

SEQ ID NO: 2147109 - RNA, 20 nt, Human herpesvirus 7
uguucuaucaagauaagcaa

SEQ ID NO: 2147110 - RNA, 22 nt, Human herpesvirus 7
aaucaaccaacauucuugucaa

SEQ ID NO: 2147111 - RNA, 14 nt, Human herpesvirus 7
augaaacuuccaau

SEQ ID NO: 2147112 - RNA, 13 nt, Human herpesvirus 7
agcuagaaauuga

SEQ ID NO: 2147113 - RNA, 20 nt, Human herpesvirus 7
ucagaaaaaccauuguauga

SEQ ID NO: 2147114 - RNA, 22 nt, Human herpesvirus 7
aaagaccuguacuguugcuaau

SEQ ID NO: 2147115 - RNA, 17 nt, Human herpesvirus 7
augcagaaaaauccaaa

SEQ ID NO: 2147116 - RNA, 22 nt, Human herpesvirus 7
cuuaucugucauggacggcauu

SEQ ID NO: 2147117 - RNA, 15 nt, Human herpesvirus 7
auuuauauuaaauga

SEQ ID NO: 2147118 - RNA, 18 nt, Human herpesvirus 7
gagauggauugagugcau

SEQ ID NO: 2147119 - RNA, 19 nt, Human herpesvirus 7
gcugaauuguacguucuga

SEQ ID NO: 2147120 - RNA, 18 nt, Human herpesvirus 7
gaaaugagauuucugaaa

SEQ ID NO: 2147121 - RNA, 21 nt, Human herpesvirus 7
ugugaacugauguuuggcaac

SEQ ID NO: 2147122 - RNA, 14 nt, Human herpesvirus 7
cuuuucaugcuuug

SEQ ID NO: 2147123 - RNA, 19 nt, Human herpesvirus 7
acuaucuccuaaaugaauu

SEQ ID NO: 2147124 - RNA, 17 nt, Human herpesvirus 7
uuucaaacaacauaucg

SEQ ID NO: 2147125 - RNA, 12 nt, Human herpesvirus 7
uauaauagccuu

SEQ ID NO: 2147126 - RNA, 16 nt, Human herpesvirus 7
cuggaacguccucugg

SEQ ID NO: 2147127 - RNA, 16 nt, Human herpesvirus 7
acgcagucuaaaagua

SEQ ID NO: 2147128 - RNA, 22 nt, Human herpesvirus 7
agcaauuuuaacgauuccaaac

SEQ ID NO: 2147129 - RNA, 21 nt, Human herpesvirus 7
cuugugaaaauaacaggaaac

SEQ ID NO: 2147130 - RNA, 20 nt, Human herpesvirus 7
uaaacacuugcuagcuguga

SEQ ID NO: 2147131 - RNA, 13 nt, Human herpesvirus 7
ugcuaugaaaauu

SEQ ID NO: 2147132 - RNA, 20 nt, Human herpesvirus 7
uguuuaaauuacaguaaauu

SEQ ID NO: 2147133 - RNA, 20 nt, Human herpesvirus 7
cugacauuggaacuuuaugc

SEQ ID NO: 2147134 - RNA, 21 nt, Human herpesvirus 7
acuuauuccagauaugacaaa

SEQ ID NO: 2147135 - RNA, 14 nt, Human herpesvirus 7
uaauguaauuuaug

SEQ ID NO: 2147136 - RNA, 14 nt, Human herpesvirus 7
aucuguagaaaaug

SEQ ID NO: 2147137 - RNA, 16 nt, Human herpesvirus 7
guuuacuuauguguua

SEQ ID NO: 2147138 - RNA, 20 nt, Human herpesvirus 7
uuagaugcauccaaagaaaa

SEQ ID NO: 2147139 - RNA, 17 nt, Human herpesvirus 7
aggcagcgcuugauaca

SEQ ID NO: 2147140 - RNA, 14 nt, Human herpesvirus 7
guacuguugcuaau

SEQ ID NO: 2147141 - RNA, 15 nt, Human herpesvirus 7
agaaacagcugaaaa

SEQ ID NO: 2147142 - RNA, 16 nt, Human herpesvirus 7
uuuguauacaacuuua

SEQ ID NO: 2147143 - RNA, 14 nt, Human herpesvirus 7
cuccaaucauaauu

SEQ ID NO: 2147144 - RNA, 15 nt, Human herpesvirus 7
auuuuacaaaaagaa

SEQ ID NO: 2147145 - RNA, 12 nt, Human herpesvirus 7
aaacuuugaaau

SEQ ID NO: 2147146 - RNA, 16 nt, Human herpesvirus 7
gaaugcucuuuugaaa

SEQ ID NO: 2147147 - RNA, 15 nt, Human herpesvirus 7
cuguuaaaaucuguu

SEQ ID NO: 2147148 - RNA, 19 nt, Human herpesvirus 7
cuugcuuguaggcagaaau

SEQ ID NO: 2147149 - RNA, 15 nt, Human herpesvirus 7
cagcuagauugacua

SEQ ID NO: 2147150 - RNA, 17 nt, Human herpesvirus 7
auuucugucuuugcaag

SEQ ID NO: 2147151 - RNA, 20 nt, Human herpesvirus 7
ugauucgcuaacuuugcuau

SEQ ID NO: 2147152 - RNA, 21 nt, Human herpesvirus 7
uaagcauacuuucgcaacaau

SEQ ID NO: 2147153 - RNA, 15 nt, Human herpesvirus 7
aucucucaacgacaa

SEQ ID NO: 2147154 - RNA, 15 nt, Human herpesvirus 7
auauaaaagaaacuu

SEQ ID NO: 2147155 - RNA, 13 nt, Human herpesvirus 7
auuuguaugucua

SEQ ID NO: 2147156 - RNA, 16 nt, Human herpesvirus 7
uuaccccaaacgccuu

SEQ ID NO: 2147157 - RNA, 12 nt, Human herpesvirus 7
accgauaaaagg

SEQ ID NO: 2147158 - RNA, 23 nt, Human herpesvirus 7
uaagugaacuguuacaguuaaag

SEQ ID NO: 2147159 - RNA, 17 nt, Human herpesvirus 7
ugagacucacuccuugc

SEQ ID NO: 2147160 - RNA, 15 nt, Human herpesvirus 7
aauguugcaaauguu

SEQ ID NO: 2147161 - RNA, 18 nt, Human herpesvirus 7
aguucuccgcacuaaaac

SEQ ID NO: 2147162 - RNA, 15 nt, Human herpesvirus 7
auuauguuuucugcu

SEQ ID NO: 2147163 - RNA, 21 nt, Human herpesvirus 7
auuauuuccagaguaugaauu

SEQ ID NO: 2147164 - RNA, 19 nt, Human herpesvirus 7
aauucucgcuucaaagaua

SEQ ID NO: 2147165 - RNA, 14 nt, Human herpesvirus 7
aaaaauaaacaaua

SEQ ID NO: 2147166 - RNA, 17 nt, Human herpesvirus 7
aauuuucuuagcuuuca

SEQ ID NO: 2147167 - RNA, 19 nt, Human herpesvirus 7
aagcgcugagaucuuccaa

SEQ ID NO: 2147168 - RNA, 15 nt, Human herpesvirus 7
guuuaaaggugguua

SEQ ID NO: 2147169 - RNA, 16 nt, Human herpesvirus 7
aagagacugucauaau

SEQ ID NO: 2147170 - RNA, 16 nt, Human herpesvirus 7
cugaauaauaugcuuu

SEQ ID NO: 2147171 - RNA, 12 nt, Human herpesvirus 7
aacauugugagu

SEQ ID NO: 2147172 - RNA, 22 nt, Human herpesvirus 7
uuugcagcuucuaaaugugcua

SEQ ID NO: 2147173 - RNA, 15 nt, Human herpesvirus 7
agugcuaugaaaauu

SEQ ID NO: 2147174 - RNA, 17 nt, Human herpesvirus 7
ugaugacaacaaagcau

SEQ ID NO: 2147175 - RNA, 14 nt, Human herpesvirus 7
cauuauuuguuaaa

SEQ ID NO: 2147176 - RNA, 19 nt, Human herpesvirus 7
agaaucagacuaaauaugg

SEQ ID NO: 2147177 - RNA, 15 nt, Human herpesvirus 7
aggcggacaaauaua

SEQ ID NO: 2147178 - RNA, 19 nt, Human herpesvirus 7
uucuagaaacuaaagaaaa

SEQ ID NO: 2147179 - RNA, 15 nt, Human herpesvirus 7
ugaacaaguuucaaa

SEQ ID NO: 2147180 - RNA, 13 nt, Human herpesvirus 7
auacaaaagacau

SEQ ID NO: 2147181 - RNA, 20 nt, Human herpesvirus 7
guuuugaaaagucauuauuu

SEQ ID NO: 2147182 - RNA, 16 nt, Human herpesvirus 7
agcauacuuucgcaac

SEQ ID NO: 2147183 - RNA, 16 nt, Human herpesvirus 7
cgguaacaugucuuca

SEQ ID NO: 2147184 - RNA, 20 nt, Human herpesvirus 7
agauuuaaaacaauuuccuu

SEQ ID NO: 2147185 - RNA, 16 nt, Human herpesvirus 7
aauaugcaugcaauuu

SEQ ID NO: 2147186 - RNA, 22 nt, Human herpesvirus 7
uggacggcauuuaacucaugcg

SEQ ID NO: 2147187 - RNA, 17 nt, Human herpesvirus 7
ugauuuuaaauuuacuu

SEQ ID NO: 2147188 - RNA, 21 nt, Human herpesvirus 7
uccuuucaacgaucucaaaau

SEQ ID NO: 2147189 - RNA, 22 nt, Human herpesvirus 7
aagcuugugaagacuacauaaa

SEQ ID NO: 2147190 - RNA, 22 nt, Human herpesvirus 7
acacuauuggacaaaagacugu

SEQ ID NO: 2147191 - RNA, 23 nt, Human herpesvirus 7
aacuguuacaguuaaagacggaa

SEQ ID NO: 2147192 - RNA, 13 nt, Human herpesvirus 7
uaacauauguuga

SEQ ID NO: 2147193 - RNA, 12 nt, Human herpesvirus 7
agcucaaaaagu

SEQ ID NO: 2147194 - RNA, 16 nt, Human herpesvirus 7
aguugacaaugucaau

SEQ ID NO: 2147195 - RNA, 15 nt, Human herpesvirus 7
ucaucaaaauuuuaa

SEQ ID NO: 2147196 - RNA, 14 nt, Human herpesvirus 7
auucucuacuuaau

SEQ ID NO: 2147197 - RNA, 17 nt, Human herpesvirus 7
acuccguuucauuuaaa

SEQ ID NO: 2147198 - RNA, 17 nt, Human herpesvirus 7
cauucuuuucaaugcaa

SEQ ID NO: 2147199 - RNA, 16 nt, Human herpesvirus 7
acucgaggcuuaaaau

SEQ ID NO: 2147200 - RNA, 23 nt, Human herpesvirus 7
cuaaccaucugcuggaaauuugu

SEQ ID NO: 2147201 - RNA, 15 nt, Human herpesvirus 7
ucguuuuuggcaaaa

SEQ ID NO: 2147202 - RNA, 18 nt, Human herpesvirus 7
accgacaauauaaaagaa

SEQ ID NO: 2147203 - RNA, 17 nt, Human herpesvirus 7
uauauccaauaaugcau

SEQ ID NO: 2147204 - RNA, 16 nt, Human herpesvirus 7
uugaagauaaguauaa

SEQ ID NO: 2147205 - RNA, 19 nt, Human herpesvirus 7
uaucuccgugacaaagcau

SEQ ID NO: 2147206 - RNA, 17 nt, Human herpesvirus 7
acuuuuaacuguuaaag

SEQ ID NO: 2147207 - RNA, 20 nt, Human herpesvirus 7
ucaaaaaauaauuccuucua

SEQ ID NO: 2147208 - RNA, 22 nt, Human herpesvirus 7
acagcuagauugacuaugaauu

SEQ ID NO: 2147209 - RNA, 22 nt, Human herpesvirus 7
agacuaaucacgagaaaaauau

SEQ ID NO: 2147210 - RNA, 14 nt, Human herpesvirus 7
acagcucaaaagua

SEQ ID NO: 2147211 - RNA, 16 nt, Human herpesvirus 7
ugguugauuugagcag

SEQ ID NO: 2147212 - RNA, 13 nt, Human herpesvirus 7
aauauaacaaaaa

SEQ ID NO: 2147213 - RNA, 17 nt, Human herpesvirus 7
auuagcgcgugaacaaa

SEQ ID NO: 2147214 - RNA, 18 nt, Human herpesvirus 7
auuguaaauauuauuaac

SEQ ID NO: 2147215 - RNA, 22 nt, Human herpesvirus 7
aauuguacguucugaaacaguc

SEQ ID NO: 2147216 - RNA, 16 nt, Human herpesvirus 7
aacugaauuaaggugg

SEQ ID NO: 2147217 - RNA, 15 nt, Human herpesvirus 7
auggagcagcuuaag

SEQ ID NO: 2147218 - RNA, 20 nt, Human herpesvirus 7
uacacaaauugauccugcua

SEQ ID NO: 2147219 - RNA, 19 nt, Human herpesvirus 7
gaaugauauaaaguuuaua

SEQ ID NO: 2147220 - RNA, 12 nt, Human herpesvirus 7
auaauagagcug

SEQ ID NO: 2147221 - RNA, 16 nt, Human herpesvirus 7
acuuacuguuuacaca

SEQ ID NO: 2147222 - RNA, 13 nt, Human herpesvirus 7
guuaaagauguuu

SEQ ID NO: 2147223 - RNA, 19 nt, Human herpesvirus 7
accaaugcugauuccuucu

SEQ ID NO: 2147224 - RNA, 18 nt, Human herpesvirus 7
acuuguuuguagcucuag

SEQ ID NO: 2147225 - RNA, 22 nt, Human herpesvirus 7
cauacuuuuuugguuauuggaa

SEQ ID NO: 2147226 - RNA, 17 nt, Human herpesvirus 7
gcauuauuggauaauau

SEQ ID NO: 2147227 - RNA, 11 nt, Human herpesvirus 7
ccuugggcaca

SEQ ID NO: 2147228 - RNA, 17 nt, Human herpesvirus 7
uuaaaauuaaaacuugg

SEQ ID NO: 2147229 - RNA, 23 nt, Human herpesvirus 7
uuuucaaguuucuucuggguuaa

SEQ ID NO: 2147230 - RNA, 20 nt, Human herpesvirus 7
aucuaauuaaucugcauaua

SEQ ID NO: 2147231 - RNA, 20 nt, Human herpesvirus 7
uuguuuccgaucuaaagaca

SEQ ID NO: 2147232 - RNA, 13 nt, Human herpesvirus 7
aauuuuuuacugu

SEQ ID NO: 2147233 - RNA, 15 nt, Human herpesvirus 7
cuuaaaaaaaggccu

SEQ ID NO: 2147234 - RNA, 22 nt, Human herpesvirus 7
auguggucuggucuucauauuu

SEQ ID NO: 2147235 - RNA, 23 nt, Human herpesvirus 7
cuagacauuuguuuuggauauaa

SEQ ID NO: 2147236 - RNA, 18 nt, Human herpesvirus 7
uacauaaguuaaaucagu

SEQ ID NO: 2147237 - RNA, 22 nt, Human herpesvirus 7
agauauugaugacguuaucuaa

SEQ ID NO: 2147238 - RNA, 14 nt, Human herpesvirus 7
ggcaaaagauuuaa

SEQ ID NO: 2147239 - RNA, 19 nt, Human herpesvirus 7
acuucugauaucuuaaaau

SEQ ID NO: 2147240 - RNA, 19 nt, Human herpesvirus 7
gccagaaauuaaauacaaa

SEQ ID NO: 2147241 - RNA, 18 nt, Human herpesvirus 7
agagaacuagaacagcug

SEQ ID NO: 2147242 - RNA, 21 nt, Human herpesvirus 7
gaagcgcugagaucuuccaau

SEQ ID NO: 2147243 - RNA, 15 nt, Human herpesvirus 7
aaaacucaauguaaa

SEQ ID NO: 2147244 - RNA, 15 nt, Human herpesvirus 7
aaacuguuuuuacuu

SEQ ID NO: 2147245 - RNA, 21 nt, Human herpesvirus 7
ugcacuuagcuaauugagaaa

SEQ ID NO: 2147246 - RNA, 21 nt, Human herpesvirus 7
ucguaacgaauaaaaaguuuu

SEQ ID NO: 2147247 - RNA, 22 nt, Human herpesvirus 7
cgaucuaaagacacuuauuuga

SEQ ID NO: 2147248 - RNA, 23 nt, Human herpesvirus 7
ucgauguuuuaucuaacacugca

SEQ ID NO: 2147249 - RNA, 17 nt, Human herpesvirus 7
uauacauguaacuguuu

SEQ ID NO: 2147250 - RNA, 21 nt, Human herpesvirus 7
uuucuaggcuucauuggcauu

SEQ ID NO: 2147251 - RNA, 11 nt, Human herpesvirus 7
cucauagcuua

SEQ ID NO: 2147252 - RNA, 22 nt, Human herpesvirus 7
uaugcuuccuaaaaaaaaagga

SEQ ID NO: 2147253 - RNA, 24 nt, Human herpesvirus 7
cuuuacagcugagacgauaugaau

SEQ ID NO: 2147254 - RNA, 22 nt, Human herpesvirus 7
cugcaaagaaaaaaaugcuuag

SEQ ID NO: 2147255 - RNA, 12 nt, Human herpesvirus 7
aucugagagaac

SEQ ID NO: 2147256 - RNA, 22 nt, Human herpesvirus 7
aaacugaauugguaauguuacu

SEQ ID NO: 2147257 - RNA, 14 nt, Human herpesvirus 7
ucagauugaaauuc

SEQ ID NO: 2147258 - RNA, 15 nt, Human herpesvirus 7
guacuguuucuagua

SEQ ID NO: 2147259 - RNA, 23 nt, Human herpesvirus 7
cuuuaauaaaaaacaaauaacug

SEQ ID NO: 2147260 - RNA, 15 nt, Human herpesvirus 7
ucacaucuagaguau

SEQ ID NO: 2147261 - RNA, 23 nt, Human herpesvirus 7
caugucucucgcaacuucugaua

SEQ ID NO: 2147262 - RNA, 19 nt, Human herpesvirus 7
uuggagagauagcauuugu

SEQ ID NO: 2147263 - RNA, 13 nt, Human herpesvirus 7
ugucugauucuua

SEQ ID NO: 2147264 - RNA, 14 nt, Human herpesvirus 7
accuauguguuuac

SEQ ID NO: 2147265 - RNA, 18 nt, Human herpesvirus 7
aaaaaggccuuguaaagu

SEQ ID NO: 2147266 - RNA, 21 nt, Human herpesvirus 7
caggugacgucuagacauuug

SEQ ID NO: 2147267 - RNA, 16 nt, Human herpesvirus 7
cagcuggaguuauuua

SEQ ID NO: 2147268 - RNA, 13 nt, Human herpesvirus 7
aucgaguucugac

SEQ ID NO: 2147269 - RNA, 21 nt, Human herpesvirus 7
augauugguaaaaaauuacuu

SEQ ID NO: 2147270 - RNA, 15 nt, Human herpesvirus 7
uaucuuaaaauacua

SEQ ID NO: 2147271 - RNA, 22 nt, Human herpesvirus 7
auaaaacgugugaaaacaauua

SEQ ID NO: 2147272 - RNA, 16 nt, Human herpesvirus 7
gucuaaggaauguggc

SEQ ID NO: 2147273 - RNA, 14 nt, Human herpesvirus 7
aaugagauuucuga

SEQ ID NO: 2147274 - RNA, 21 nt, Human herpesvirus 7
aagacagcucaaaaguauaac

SEQ ID NO: 2147275 - RNA, 22 nt, Human herpesvirus 7
uaccguuuaaugaaaaagccau

SEQ ID NO: 2147276 - RNA, 21 nt, Human herpesvirus 7
acugcaaauccaacagaauac

SEQ ID NO: 2147277 - RNA, 14 nt, Human herpesvirus 7
uauuauuaaagcuu

SEQ ID NO: 2147278 - RNA, 19 nt, Human herpesvirus 7
uaaauuaaaaagaaugcua

SEQ ID NO: 2147279 - RNA, 22 nt, Human herpesvirus 7
auacaaauuuaagagacauuga

SEQ ID NO: 2147280 - RNA, 18 nt, Human herpesvirus 7
aagggaucuuuuuucagu

SEQ ID NO: 2147281 - RNA, 20 nt, Human herpesvirus 7
uucagucuuacagugcucuu

SEQ ID NO: 2147282 - RNA, 14 nt, Human herpesvirus 7
uuuaaaacaauuuc

SEQ ID NO: 2147283 - RNA, 15 nt, Human herpesvirus 7
agcuauguuuaaaug

SEQ ID NO: 2147284 - RNA, 17 nt, Human herpesvirus 7
aaggucuuucaugcauu

SEQ ID NO: 2147285 - RNA, 17 nt, Human herpesvirus 7
cuagugaaacacauucu

SEQ ID NO: 2147286 - RNA, 14 nt, Human herpesvirus 7
gcauacaguuuauu

SEQ ID NO: 2147287 - RNA, 20 nt, Human herpesvirus 7
aaucuguaaaauuuaaauac

SEQ ID NO: 2147288 - RNA, 14 nt, Human herpesvirus 7
uccagcacuuuuuu

SEQ ID NO: 2147289 - RNA, 21 nt, Human herpesvirus 7
agguugcuucuucgagucagu

SEQ ID NO: 2147290 - RNA, 22 nt, Human herpesvirus 7
aacaaagugcauaaauaauaac

SEQ ID NO: 2147291 - RNA, 20 nt, Human herpesvirus 7
uauuggagaugucagcaaau

SEQ ID NO: 2147292 - RNA, 22 nt, Human herpesvirus 7
cacuaugccacaaaaaacuuug

SEQ ID NO: 2147293 - RNA, 14 nt, Human herpesvirus 7
uuuagaccuaucaa

SEQ ID NO: 2147294 - RNA, 17 nt, Human herpesvirus 7
cugcaaagaaaaaaaug

SEQ ID NO: 2147295 - RNA, 18 nt, Human herpesvirus 7
uguguaaaaaaaaguugu

SEQ ID NO: 2147296 - RNA, 17 nt, Human herpesvirus 7
uggagaccgcacaggcu

SEQ ID NO: 2147297 - RNA, 18 nt, Human herpesvirus 7
aaaacuccguuucauuua

SEQ ID NO: 2147298 - RNA, 16 nt, Human herpesvirus 7
accaucugcuggaaau

SEQ ID NO: 2147299 - RNA, 15 nt, Human herpesvirus 7
aaaacagaacuuuug

SEQ ID NO: 2147300 - RNA, 16 nt, Human herpesvirus 7
uugaucguguguuacu

SEQ ID NO: 2147301 - RNA, 16 nt, Human herpesvirus 7
aucaggaaucuuuuuu

SEQ ID NO: 2147302 - RNA, 17 nt, Human herpesvirus 7
cuggacauuucaagaag

SEQ ID NO: 2147303 - RNA, 15 nt, Human herpesvirus 7
gccuguuaaaaguga

SEQ ID NO: 2147304 - RNA, 14 nt, Human herpesvirus 7
caacuucaacauac

SEQ ID NO: 2147305 - RNA, 22 nt, Human herpesvirus 7
accaagagccggaaagcaaugu

SEQ ID NO: 2147306 - RNA, 20 nt, Human herpesvirus 7
auuugguauacacuauuuua

SEQ ID NO: 2147307 - RNA, 16 nt, Human herpesvirus 7
gaaacuuccaauaacc

SEQ ID NO: 2147308 - RNA, 21 nt, Human herpesvirus 7
auuuaugcgguaagaaaaauc

SEQ ID NO: 2147309 - RNA, 15 nt, Human herpesvirus 7
agaugauaaaaacuu

SEQ ID NO: 2147310 - RNA, 17 nt, Human herpesvirus 7
auuauaucuaaagugga

SEQ ID NO: 2147311 - RNA, 19 nt, Human herpesvirus 7
auuucacccuuuguuugag

SEQ ID NO: 2147312 - RNA, 15 nt, Human herpesvirus 7
cucaaaacaaacucu

SEQ ID NO: 2147313 - RNA, 19 nt, Human herpesvirus 7
acaucaauuuuaaugugcu

SEQ ID NO: 2147314 - RNA, 16 nt, Human herpesvirus 7
uucaguaucacuuaaa

SEQ ID NO: 2147315 - RNA, 15 nt, Human herpesvirus 7
aaguuagcgaaucau

SEQ ID NO: 2147316 - RNA, 17 nt, Human herpesvirus 7
auguuauacauaaagag

SEQ ID NO: 2147317 - RNA, 19 nt, Human herpesvirus 7
uauaugaaucaaauuucaa

SEQ ID NO: 2147318 - RNA, 17 nt, Human herpesvirus 7
uguccauuuuauucaaa

SEQ ID NO: 2147319 - RNA, 22 nt, Human herpesvirus 7
ucuuacgucuuuucuaccaaca

SEQ ID NO: 2147320 - RNA, 20 nt, Human herpesvirus 7
guaaauauuuuuaaaaucua

SEQ ID NO: 2147321 - RNA, 20 nt, Human herpesvirus 7
aauuuaagagacauugaaaa

SEQ ID NO: 2147322 - RNA, 15 nt, Human herpesvirus 7
gucuaaaaauguuuu

SEQ ID NO: 2147323 - RNA, 19 nt, Human herpesvirus 7
uguauuuguugaucuucaa

SEQ ID NO: 2147324 - RNA, 22 nt, Human herpesvirus 7
auuuagucggcacacguacaau

SEQ ID NO: 2147325 - RNA, 21 nt, Human herpesvirus 7
gaaaucuuucaucuucugaau

SEQ ID NO: 2147326 - RNA, 22 nt, Human herpesvirus 7
gaauucaucuuaaguaaggaag

SEQ ID NO: 2147327 - RNA, 16 nt, Human herpesvirus 7
uguaugaaaaaaacau

SEQ ID NO: 2147328 - RNA, 20 nt, Human herpesvirus 7
cagcacuuuuuugcguugcu

SEQ ID NO: 2147329 - RNA, 20 nt, Human herpesvirus 7
caagguuuaaaacauuuaca

SEQ ID NO: 2147330 - RNA, 13 nt, Human herpesvirus 7
uuuuauuucuaau

SEQ ID NO: 2147331 - RNA, 18 nt, Human herpesvirus 7
ggagaauucuguacccau

SEQ ID NO: 2147332 - RNA, 13 nt, Human herpesvirus 7
gccacugauuuuu

SEQ ID NO: 2147333 - RNA, 14 nt, Human herpesvirus 7
acagacagaaugcc

SEQ ID NO: 2147334 - RNA, 14 nt, Human herpesvirus 7
aaugcaucugaauu

SEQ ID NO: 2147335 - RNA, 12 nt, Human herpesvirus 7
aaaaaaacacag

SEQ ID NO: 2147336 - RNA, 21 nt, Human herpesvirus 7
acaacuaaaauugacagcacc

SEQ ID NO: 2147337 - RNA, 20 nt, Human herpesvirus 7
auaugcauguguaaagccaa

SEQ ID NO: 2147338 - RNA, 15 nt, Human herpesvirus 7
ucauuuguauauucu

SEQ ID NO: 2147339 - RNA, 16 nt, Human herpesvirus 7
auuucaauaaucaaug

SEQ ID NO: 2147340 - RNA, 16 nt, Human herpesvirus 7
caagauaagcaauaca

SEQ ID NO: 2147341 - RNA, 14 nt, Human herpesvirus 7
aagcugcagcugaa

SEQ ID NO: 2147342 - RNA, 17 nt, Human herpesvirus 7
uuguguggcaacaucuu

SEQ ID NO: 2147343 - RNA, 15 nt, Human herpesvirus 7
aaaauuucauaucua

SEQ ID NO: 2147344 - RNA, 15 nt, Human herpesvirus 7
aaaucuuuaagaaug

SEQ ID NO: 2147345 - RNA, 15 nt, Human herpesvirus 7
cauauagauaaugaa

SEQ ID NO: 2147346 - RNA, 17 nt, Human herpesvirus 7
caugcaagaaaaaaaug

SEQ ID NO: 2147347 - RNA, 16 nt, Human herpesvirus 7
gccaauaaaucuucau

SEQ ID NO: 2147348 - RNA, 23 nt, Human herpesvirus 7
cuuucacuacuacaugaauggau

SEQ ID NO: 2147349 - RNA, 11 nt, Human herpesvirus 7
gguaaauugua

SEQ ID NO: 2147350 - RNA, 13 nt, Human herpesvirus 7
acauauuaguuua

SEQ ID NO: 2147351 - RNA, 14 nt, Human herpesvirus 7
cauacgaaucaguu

SEQ ID NO: 2147352 - RNA, 22 nt, Human herpesvirus 7
uagauuacgcacaaauuucuug

SEQ ID NO: 2147353 - RNA, 16 nt, Human herpesvirus 7
gaaaucauucugaaua

SEQ ID NO: 2147354 - RNA, 20 nt, Human herpesvirus 7
uuccagauaugacaaauuuc

SEQ ID NO: 2147355 - RNA, 22 nt, Human herpesvirus 7
ucauuuaauuggcaacacaaau

SEQ ID NO: 2147356 - RNA, 21 nt, Human herpesvirus 7
ugucucuugaagaacaacaug

SEQ ID NO: 2147357 - RNA, 18 nt, Human herpesvirus 7
uuaaauccgugaaugcug

SEQ ID NO: 2147358 - RNA, 14 nt, Human herpesvirus 7
aaauuaucggaaau

SEQ ID NO: 2147359 - RNA, 15 nt, Human herpesvirus 7
aacugauaauuucuu

SEQ ID NO: 2147360 - RNA, 11 nt, Human herpesvirus 7
uuaauaaaagu

SEQ ID NO: 2147361 - RNA, 22 nt, Human herpesvirus 7
ucacaacauauagauaaugaag

SEQ ID NO: 2147362 - RNA, 14 nt, Human herpesvirus 7
ucaaaucaauguga

SEQ ID NO: 2147363 - RNA, 23 nt, Human herpesvirus 7
caaaaaagauuccugaugauaau

SEQ ID NO: 2147364 - RNA, 18 nt, Human herpesvirus 7
agaacuaggaaacacaau

SEQ ID NO: 2147365 - RNA, 19 nt, Human herpesvirus 7
aaaaugcccucagaacugu

SEQ ID NO: 2147366 - RNA, 20 nt, Human herpesvirus 7
ccgguuaaaaugggaauguu

SEQ ID NO: 2147367 - RNA, 13 nt, Human herpesvirus 7
cguaacugugacg

SEQ ID NO: 2147368 - RNA, 22 nt, Human herpesvirus 7
aaucaacagccaucuaauugca

SEQ ID NO: 2147369 - RNA, 19 nt, Human herpesvirus 7
cagacacaccauuguucaa

SEQ ID NO: 2147370 - RNA, 23 nt, Human herpesvirus 7
aaaacggucugagacggacuuau

SEQ ID NO: 2147371 - RNA, 14 nt, Human herpesvirus 7
agcaaaucugaaaa

SEQ ID NO: 2147372 - RNA, 12 nt, Human herpesvirus 7
aagcuuaaauaa

SEQ ID NO: 2147373 - RNA, 23 nt, Human herpesvirus 7
augcuuccuaaaaaaaaaggaaa

SEQ ID NO: 2147374 - RNA, 16 nt, Human herpesvirus 7
uaaauucaacaucuuu

SEQ ID NO: 2147375 - RNA, 15 nt, Human herpesvirus 7
cgagaaaacacgaca

SEQ ID NO: 2147376 - RNA, 19 nt, Human herpesvirus 7
guaauaauuuaaaauuaau

SEQ ID NO: 2147377 - RNA, 14 nt, Human herpesvirus 7
ggcucuuaauaauu

SEQ ID NO: 2147378 - RNA, 22 nt, Human herpesvirus 7
agcccauauuuuuaaauuuguc

SEQ ID NO: 2147379 - RNA, 18 nt, Human herpesvirus 7
uuaaaacauuuacaaaaa

SEQ ID NO: 2147380 - RNA, 17 nt, Human herpesvirus 7
cuauucggguaaugucu

SEQ ID NO: 2147381 - RNA, 13 nt, Human herpesvirus 7
auguauauaagca

SEQ ID NO: 2147382 - RNA, 17 nt, Human herpesvirus 7
aacccagaagaaacuug

SEQ ID NO: 2147383 - RNA, 15 nt, Human herpesvirus 7
agaucuugacucaga

SEQ ID NO: 2147384 - RNA, 13 nt, Human herpesvirus 7
aaauaccaugaaa

SEQ ID NO: 2147385 - RNA, 16 nt, Human herpesvirus 7
uuuaucauuucaaaug

SEQ ID NO: 2147386 - RNA, 15 nt, Human herpesvirus 7
uuuaaauuugucugu

SEQ ID NO: 2147387 - RNA, 18 nt, Human herpesvirus 7
ccguuggcgaucacaaaa

SEQ ID NO: 2147388 - RNA, 19 nt, Human herpesvirus 7
acaacaacuaaaacuacau

SEQ ID NO: 2147389 - RNA, 19 nt, Human herpesvirus 7
auguugacgggaaaaagga

SEQ ID NO: 2147390 - RNA, 19 nt, Human herpesvirus 7
aaugaccgcaugugaaaau

SEQ ID NO: 2147391 - RNA, 12 nt, Human herpesvirus 7
gaggacuugaaa

SEQ ID NO: 2147392 - RNA, 14 nt, Human herpesvirus 7
aauguaugaaaaug

SEQ ID NO: 2147393 - RNA, 13 nt, Human herpesvirus 7
cuuuuucuggaau

SEQ ID NO: 2147394 - RNA, 13 nt, Human herpesvirus 7
uuaaaaauauuca

SEQ ID NO: 2147395 - RNA, 15 nt, Human herpesvirus 7
ucuaauugcagacua

SEQ ID NO: 2147396 - RNA, 19 nt, Human herpesvirus 7
acauauaggaacaaaucua

SEQ ID NO: 2147397 - RNA, 12 nt, Human herpesvirus 7
cagagaugaaaa

SEQ ID NO: 2147398 - RNA, 14 nt, Human herpesvirus 7
aucgcuuucucaag

SEQ ID NO: 2147399 - RNA, 22 nt, Human herpesvirus 7
agucugaaagccgcugccuucg

SEQ ID NO: 2147400 - RNA, 14 nt, Human herpesvirus 7
uucuaaaucacuag

SEQ ID NO: 2147401 - RNA, 15 nt, Human herpesvirus 7
uguuuuuauuaauuu

SEQ ID NO: 2147402 - RNA, 16 nt, Human herpesvirus 7
gagaaaguaaaagcua

SEQ ID NO: 2147403 - RNA, 15 nt, Human herpesvirus 7
uaaauucaacaucuu

SEQ ID NO: 2147404 - RNA, 23 nt, Human herpesvirus 7
uacacuaugagauauuuaauggu

SEQ ID NO: 2147405 - RNA, 11 nt, Human herpesvirus 7
uucuuaauuug

SEQ ID NO: 2147406 - RNA, 16 nt, Human herpesvirus 7
acguuuauuuggauug

SEQ ID NO: 2147407 - RNA, 17 nt, Human herpesvirus 7
uaacaugccugcaauau

SEQ ID NO: 2147408 - RNA, 16 nt, Human herpesvirus 7
cagaaacaccccuugc

SEQ ID NO: 2147409 - RNA, 19 nt, Human herpesvirus 7
aaucuuuauuauuuacuga

SEQ ID NO: 2147410 - RNA, 14 nt, Human herpesvirus 7
auuacauccugcua

SEQ ID NO: 2147411 - RNA, 13 nt, Human herpesvirus 7
uacagaagaacau

SEQ ID NO: 2147412 - RNA, 15 nt, Human herpesvirus 7
agcaaugcaugaugc

SEQ ID NO: 2147413 - RNA, 17 nt, Human herpesvirus 7
aaucaagucugaaggcu

SEQ ID NO: 2147414 - RNA, 13 nt, Human herpesvirus 7
uacaauaaugcug

SEQ ID NO: 2147415 - RNA, 19 nt, Human herpesvirus 7
auuacauugcagucaaaga

SEQ ID NO: 2147416 - RNA, 11 nt, Human herpesvirus 7
aguacaugugu

SEQ ID NO: 2147417 - RNA, 22 nt, Human herpesvirus 7
aacuacauuuaaaaaaucugaa

SEQ ID NO: 2147418 - RNA, 21 nt, Human herpesvirus 7
aaacuugugaaaauaacagga

SEQ ID NO: 2147419 - RNA, 12 nt, Human herpesvirus 7
caauauauugaa

SEQ ID NO: 2147420 - RNA, 19 nt, Human herpesvirus 7
uggacaaaaauaaaguuua

SEQ ID NO: 2147421 - RNA, 15 nt, Human herpesvirus 7
uuugaucuacauaua

SEQ ID NO: 2147422 - RNA, 23 nt, Human herpesvirus 7
ugaauuaucgcaauuaauucagu

SEQ ID NO: 2147423 - RNA, 18 nt, Human herpesvirus 7
guuugcgagccugugauc

SEQ ID NO: 2147424 - RNA, 18 nt, Human herpesvirus 7
cuucauaucugacauuca

SEQ ID NO: 2147425 - RNA, 18 nt, Human herpesvirus 7
ugaauauaaguuuucuua

SEQ ID NO: 2147426 - RNA, 15 nt, Human herpesvirus 7
uuaaaaaccacagag

SEQ ID NO: 2147427 - RNA, 14 nt, Human herpesvirus 7
ugugacccugucac

SEQ ID NO: 2147428 - RNA, 16 nt, Human herpesvirus 7
cuuuuucuggaauguu

SEQ ID NO: 2147429 - RNA, 13 nt, Human herpesvirus 7
uuuaucuaacacu

SEQ ID NO: 2147430 - RNA, 14 nt, Human herpesvirus 7
aucguguuaagucg

SEQ ID NO: 2147431 - RNA, 18 nt, Human herpesvirus 7
aucaugaaaacaguggga

SEQ ID NO: 2147432 - RNA, 19 nt, Human herpesvirus 7
gcgaaagccacuguugaug

SEQ ID NO: 2147433 - RNA, 20 nt, Human herpesvirus 7
caaggaaaaucguguuaagu

SEQ ID NO: 2147434 - RNA, 16 nt, Human herpesvirus 7
aguguuuaaaauguua

SEQ ID NO: 2147435 - RNA, 14 nt, Human herpesvirus 7
ugacacgacacuga

SEQ ID NO: 2147436 - RNA, 13 nt, Human herpesvirus 7
ucagcauuuacca

SEQ ID NO: 2147437 - RNA, 18 nt, Human herpesvirus 7
guuuuuuauuuagcuaau

SEQ ID NO: 2147438 - RNA, 14 nt, Human herpesvirus 7
cauggcuuuucaca

SEQ ID NO: 2147439 - RNA, 18 nt, Human herpesvirus 7
gaacauuaauaucaauuu

SEQ ID NO: 2147440 - RNA, 19 nt, Human herpesvirus 7
uguguuuuaucuaccauca

SEQ ID NO: 2147441 - RNA, 14 nt, Human herpesvirus 7
aaacaaacaaugag

SEQ ID NO: 2147442 - RNA, 18 nt, Human herpesvirus 7
caguuguuggaaauaccg

SEQ ID NO: 2147443 - RNA, 20 nt, Human herpesvirus 7
acuccguuucauuuaaaagg

SEQ ID NO: 2147444 - RNA, 16 nt, Human herpesvirus 7
uugcuuaaaaacagua

SEQ ID NO: 2147445 - RNA, 18 nt, Human herpesvirus 7
aaggaucaaaagcugcag

SEQ ID NO: 2147446 - RNA, 18 nt, Human herpesvirus 7
auuauauucaaauaaggg

SEQ ID NO: 2147447 - RNA, 15 nt, Human herpesvirus 7
cuagaaguuuagaga

SEQ ID NO: 2147448 - RNA, 16 nt, Human herpesvirus 7
uaaaauagaaaauguc

SEQ ID NO: 2147449 - RNA, 16 nt, Human herpesvirus 7
acaguuuuuuaauaca

SEQ ID NO: 2147450 - RNA, 19 nt, Human herpesvirus 7
gcaugaauuaauaaaacaa

SEQ ID NO: 2147451 - RNA, 14 nt, Human herpesvirus 7
agccauaaaugcuu

SEQ ID NO: 2147452 - RNA, 16 nt, Human herpesvirus 7
auucuuuucaaugcaa

SEQ ID NO: 2147453 - RNA, 22 nt, Human herpesvirus 7
guuaacccagaagaaacuugaa

SEQ ID NO: 2147454 - RNA, 21 nt, Human herpesvirus 7
aaugguuuuaaaauagaaaau

SEQ ID NO: 2147455 - RNA, 14 nt, Human herpesvirus 7
uugcugucuuggag

SEQ ID NO: 2147456 - RNA, 23 nt, Human herpesvirus 7
aaauaaaaccauuuauugauguc

SEQ ID NO: 2147457 - RNA, 21 nt, Human herpesvirus 7
gaauagguaucuuuacuuuca

SEQ ID NO: 2147458 - RNA, 14 nt, Human herpesvirus 7
uaaaagguguuuuu

SEQ ID NO: 2147459 - RNA, 19 nt, Human herpesvirus 7
auuuuauugcgaaaaugau

SEQ ID NO: 2147460 - RNA, 21 nt, Human herpesvirus 7
auguuacuauaugaaaacagc

SEQ ID NO: 2147461 - RNA, 17 nt, Human herpesvirus 7
agaaaauguuuugauuu

SEQ ID NO: 2147462 - RNA, 13 nt, Human herpesvirus 7
gaaaguccaaagu

SEQ ID NO: 2147463 - RNA, 21 nt, Human herpesvirus 7
augucuaaaaguacaguguau

SEQ ID NO: 2147464 - RNA, 14 nt, Human herpesvirus 7
uugcauaucaugau

SEQ ID NO: 2147465 - RNA, 14 nt, Human herpesvirus 7
gauuauauucaaau

SEQ ID NO: 2147466 - RNA, 21 nt, Human herpesvirus 7
auaaucuuaauguuucugagu

SEQ ID NO: 2147467 - RNA, 15 nt, Human herpesvirus 7
ucacauugucacugc

SEQ ID NO: 2147468 - RNA, 18 nt, Human herpesvirus 7
uuguaaauucuccaauca

SEQ ID NO: 2147469 - RNA, 14 nt, Human herpesvirus 7
aaauuucaaacgua

SEQ ID NO: 2147470 - RNA, 15 nt, Human herpesvirus 7
uuaucucagaugcua

SEQ ID NO: 2147471 - RNA, 15 nt, Human herpesvirus 7
acguuucuagcaaaa

SEQ ID NO: 2147472 - RNA, 17 nt, Human herpesvirus 7
ggagaaagcuguuucca

SEQ ID NO: 2147473 - RNA, 19 nt, Human herpesvirus 7
uucacagacgcaucauucc

SEQ ID NO: 2147474 - RNA, 21 nt, Human herpesvirus 7
caauauuuaaaguagcugaau

SEQ ID NO: 2147475 - RNA, 22 nt, Human herpesvirus 7
aucugucaggucacaaaagcuu

SEQ ID NO: 2147476 - RNA, 18 nt, Human herpesvirus 7
acugcaaauccaacagaa

SEQ ID NO: 2147477 - RNA, 16 nt, Human herpesvirus 7
uaaggccaaagguaaa

SEQ ID NO: 2147478 - RNA, 19 nt, Human herpesvirus 7
acgcuuucugaauugcauc

SEQ ID NO: 2147479 - RNA, 19 nt, Human herpesvirus 7
auacauaaguuaaaucagu

SEQ ID NO: 2147480 - RNA, 15 nt, Human herpesvirus 7
agaaaacauuauauu

SEQ ID NO: 2147481 - RNA, 13 nt, Human herpesvirus 7
uugaaaagaaugg

SEQ ID NO: 2147482 - RNA, 22 nt, Human herpesvirus 7
guuucuagcaaaauaugcaaaa

SEQ ID NO: 2147483 - RNA, 17 nt, Human herpesvirus 7
aaacaagacagaaauga

SEQ ID NO: 2147484 - RNA, 19 nt, Human herpesvirus 7
gaacaaaagucgagaaaac

SEQ ID NO: 2147485 - RNA, 22 nt, Human herpesvirus 7
caaaucaaaaugagauuuuucc

SEQ ID NO: 2147486 - RNA, 20 nt, Human herpesvirus 7
augaguauaccuacgacuau

SEQ ID NO: 2147487 - RNA, 15 nt, Human herpesvirus 7
guucuaucucaaaac

SEQ ID NO: 2147488 - RNA, 22 nt, Human herpesvirus 7
caaaggaucgaucucugucaaa

SEQ ID NO: 2147489 - RNA, 16 nt, Human herpesvirus 7
uacagcauauaucuuu

SEQ ID NO: 2147490 - RNA, 20 nt, Human herpesvirus 7
gcagccagaacucaauuuuu

SEQ ID NO: 2147491 - RNA, 15 nt, Human herpesvirus 7
uaucuccauucuaaa

SEQ ID NO: 2147492 - RNA, 11 nt, Human herpesvirus 7
cgguuaaucuu

SEQ ID NO: 2147493 - RNA, 14 nt, Human herpesvirus 7
aaaacguaaaacug

SEQ ID NO: 2147494 - RNA, 21 nt, Human herpesvirus 7
ucaccaaagaguauacaaaag

SEQ ID NO: 2147495 - RNA, 22 nt, Human herpesvirus 7
gcgcaaaggaaaaaugcugcuc

SEQ ID NO: 2147496 - RNA, 12 nt, Human herpesvirus 7
agaaaagcaagu

SEQ ID NO: 2147497 - RNA, 14 nt, Human herpesvirus 7
cuucuugcauuucc

SEQ ID NO: 2147498 - RNA, 15 nt, Human herpesvirus 7
aagcauaugugagaa

SEQ ID NO: 2147499 - RNA, 14 nt, Human herpesvirus 7
uuauccaaguuuua

SEQ ID NO: 2147500 - RNA, 16 nt, Human herpesvirus 7
gaauccgcauuugagg

SEQ ID NO: 2147501 - RNA, 21 nt, Human herpesvirus 7
aauuugcagcuucuaaaugug

SEQ ID NO: 2147502 - RNA, 23 nt, Human herpesvirus 7
caaaugugguaaauuugcuugcu

SEQ ID NO: 2147503 - RNA, 14 nt, Human herpesvirus 7
auucuugucaacuu

SEQ ID NO: 2147504 - RNA, 15 nt, Human herpesvirus 7
auucguuaagcaccg

SEQ ID NO: 2147505 - RNA, 23 nt, Human herpesvirus 7
auugcugauccgccgacaagaaa

SEQ ID NO: 2147506 - RNA, 20 nt, Human herpesvirus 7
guuuugagaguuguggcaaa

SEQ ID NO: 2147507 - RNA, 22 nt, Human herpesvirus 7
auuucuaaauaugaugaaacuu

SEQ ID NO: 2147508 - RNA, 15 nt, Human herpesvirus 7
cuuaaaugucaauga

SEQ ID NO: 2147509 - RNA, 19 nt, Human herpesvirus 7
ugaauuuuaaguggaaucu

SEQ ID NO: 2147510 - RNA, 14 nt, Human herpesvirus 7
aaugcaugaugcac

SEQ ID NO: 2147511 - RNA, 18 nt, Human herpesvirus 7
guuaaaaagaauguauua

SEQ ID NO: 2147512 - RNA, 22 nt, Human herpesvirus 7
uguguuacaugaucuuguaauu

SEQ ID NO: 2147513 - RNA, 23 nt, Human herpesvirus 7
uucaaucaaauuauaccucagcu

SEQ ID NO: 2147514 - RNA, 18 nt, Human herpesvirus 7
gccacgaugacuuccaag

SEQ ID NO: 2147515 - RNA, 21 nt, Human herpesvirus 7
uaguaaaccuucgugugucuc

SEQ ID NO: 2147516 - RNA, 12 nt, Human herpesvirus 7
acugauguaaaa

SEQ ID NO: 2147517 - RNA, 14 nt, Human herpesvirus 7
uguuccauucaaua

SEQ ID NO: 2147518 - RNA, 16 nt, Human herpesvirus 7
auggauacaaggaaaa

SEQ ID NO: 2147519 - RNA, 16 nt, Human herpesvirus 7
uuccuucuaaauucuu

SEQ ID NO: 2147520 - RNA, 19 nt, Human herpesvirus 7
uuagacgacgucuucuucu

SEQ ID NO: 2147521 - RNA, 18 nt, Human herpesvirus 7
uguuccuuauauuaaaaa

SEQ ID NO: 2147522 - RNA, 16 nt, Human herpesvirus 7
uugcuuuagaacaauu

SEQ ID NO: 2147523 - RNA, 17 nt, Human herpesvirus 7
aauagcagagaauaugu

SEQ ID NO: 2147524 - RNA, 13 nt, Human herpesvirus 7
uucugaauaaaag

SEQ ID NO: 2147525 - RNA, 20 nt, Human herpesvirus 7
auaacaaaaaagguguugau

SEQ ID NO: 2147526 - RNA, 12 nt, Human herpesvirus 7
gccaauugaaga

SEQ ID NO: 2147527 - RNA, 16 nt, Human herpesvirus 7
caaggugacagagggc

SEQ ID NO: 2147528 - RNA, 14 nt, Human herpesvirus 7
ucuuucuauuggag

SEQ ID NO: 2147529 - RNA, 21 nt, Human herpesvirus 7
uucaagaaggaaaauuucauu

SEQ ID NO: 2147530 - RNA, 14 nt, Human herpesvirus 7
uccagacagcugua

SEQ ID NO: 2147531 - RNA, 22 nt, Human herpesvirus 7
uuguaggaaauuuucauagcac

SEQ ID NO: 2147532 - RNA, 17 nt, Human herpesvirus 7
aggggguucuaaaugua

SEQ ID NO: 2147533 - RNA, 16 nt, Human herpesvirus 7
ugauaaugaaacuguu

SEQ ID NO: 2147534 - RNA, 21 nt, Human herpesvirus 7
uaagaaauuuucuuuuggaag

SEQ ID NO: 2147535 - RNA, 16 nt, Human herpesvirus 7
uccauucgguuuucaa

SEQ ID NO: 2147536 - RNA, 23 nt, Human herpesvirus 7
cguuucucuguagauauuuugac

SEQ ID NO: 2147537 - RNA, 17 nt, Human herpesvirus 7
uguggagagauucaaac

SEQ ID NO: 2147538 - RNA, 13 nt, Human herpesvirus 7
gaaaagaacuuaa

SEQ ID NO: 2147539 - RNA, 15 nt, Human herpesvirus 7
cgacaauauaaaaga

SEQ ID NO: 2147540 - RNA, 19 nt, Human herpesvirus 7
gaaccaguuuuacuuuuga

SEQ ID NO: 2147541 - RNA, 19 nt, Human herpesvirus 7
ccaaaauguaaaccaaauu

SEQ ID NO: 2147542 - RNA, 19 nt, Human herpesvirus 7
auuuguuuaagacauuauu

SEQ ID NO: 2147543 - RNA, 23 nt, Human herpesvirus 7
aauuuuauuccgugcuguacuga

SEQ ID NO: 2147544 - RNA, 19 nt, Human herpesvirus 7
uaaaauugacagcaccaau

SEQ ID NO: 2147545 - RNA, 21 nt, Human herpesvirus 7
gaauuuuaacacuguuuucag

SEQ ID NO: 2147546 - RNA, 21 nt, Human herpesvirus 7
aauugugguacaacaaacauu

SEQ ID NO: 2147547 - RNA, 21 nt, Human herpesvirus 7
uuguaguuuuugcauauggac

SEQ ID NO: 2147548 - RNA, 19 nt, Human herpesvirus 7
uaaauucuaauauguauga

SEQ ID NO: 2147549 - RNA, 15 nt, Human herpesvirus 7
aauaucgauuuaaca

SEQ ID NO: 2147550 - RNA, 21 nt, Human herpesvirus 7
aaaacaauuaagaaucauuug

SEQ ID NO: 2147551 - RNA, 16 nt, Human herpesvirus 7
uggaaagcuugugaag

SEQ ID NO: 2147552 - RNA, 11 nt, Human herpesvirus 7
aucuaauuaau

SEQ ID NO: 2147553 - RNA, 15 nt, Human herpesvirus 7
agcuugguuuuacaa

SEQ ID NO: 2147554 - RNA, 13 nt, Human herpesvirus 7
uguauuaaagaag

SEQ ID NO: 2147555 - RNA, 14 nt, Human herpesvirus 7
cuguguauuucuua

SEQ ID NO: 2147556 - RNA, 15 nt, Human herpesvirus 7
uucaauuucugucuu

SEQ ID NO: 2147557 - RNA, 20 nt, Human herpesvirus 7
agaugacauuuuuaccucca

SEQ ID NO: 2147558 - RNA, 17 nt, Human herpesvirus 7
auguaauuuaaauaauu

SEQ ID NO: 2147559 - RNA, 18 nt, Human herpesvirus 7
gaggaaaaccgcacauac

SEQ ID NO: 2147560 - RNA, 19 nt, Human herpesvirus 7
auuggcaugcuuacaguga

SEQ ID NO: 2147561 - RNA, 19 nt, Human herpesvirus 7
uugaauuauguauaucuuu

SEQ ID NO: 2147562 - RNA, 13 nt, Human herpesvirus 7
uucaaucaaauua

SEQ ID NO: 2147563 - RNA, 12 nt, Human herpesvirus 7
auugaaaguaaa

SEQ ID NO: 2147564 - RNA, 18 nt, Human herpesvirus 7
agcaauacauucucaaaa

SEQ ID NO: 2147565 - RNA, 16 nt, Human herpesvirus 7
uccgaaucuguuggag

SEQ ID NO: 2147566 - RNA, 13 nt, Human herpesvirus 7
cuugaaaaaaucu

SEQ ID NO: 2147567 - RNA, 21 nt, Human herpesvirus 7
gcaauuuucacaauggaaaga

SEQ ID NO: 2147568 - RNA, 21 nt, Human herpesvirus 7
acaaagaacauguaguacaau

SEQ ID NO: 2147569 - RNA, 18 nt, Human herpesvirus 7
ucaaggucuuucaugcau

SEQ ID NO: 2147570 - RNA, 19 nt, Human herpesvirus 7
cuuacaacuagaaaauaac

SEQ ID NO: 2147571 - RNA, 20 nt, Human herpesvirus 7
aaaggaucucucuuucugga

SEQ ID NO: 2147572 - RNA, 22 nt, Human herpesvirus 7
acaaaaaaauaccucuggcuuc

SEQ ID NO: 2147573 - RNA, 19 nt, Human herpesvirus 7
aaaaucaaaaaacacgucc

SEQ ID NO: 2147574 - RNA, 14 nt, Human herpesvirus 7
gcuucagaugcuau

SEQ ID NO: 2147575 - RNA, 12 nt, Human herpesvirus 7
uuuacuuaaaua

SEQ ID NO: 2147576 - RNA, 14 nt, Human herpesvirus 7
aacaaacaaauaau

SEQ ID NO: 2147577 - RNA, 23 nt, Human herpesvirus 7
aucgauguuuuaucuaacacugc

SEQ ID NO: 2147578 - RNA, 20 nt, Human herpesvirus 7
cagauucuccgcuuuuggau

SEQ ID NO: 2147579 - RNA, 19 nt, Human herpesvirus 7
ucaugacuggacacaauca

SEQ ID NO: 2147580 - RNA, 18 nt, Human herpesvirus 7
ucucaauuaaaacaucuc

SEQ ID NO: 2147581 - RNA, 23 nt, Human herpesvirus 7
cuuuaauggaagaacaacaacua

SEQ ID NO: 2147582 - RNA, 12 nt, Human herpesvirus 7
gaaaagagaaaa

SEQ ID NO: 2147583 - RNA, 14 nt, Human herpesvirus 7
gaaagcuguuucca

SEQ ID NO: 2147584 - RNA, 15 nt, Human herpesvirus 7
uuaaaauacuaauca

SEQ ID NO: 2147585 - RNA, 22 nt, Human herpesvirus 7
gcaacuuuaauuaacacucaaa

SEQ ID NO: 2147586 - RNA, 14 nt, Human herpesvirus 7
gucuacaauuucug

SEQ ID NO: 2147587 - RNA, 20 nt, Human herpesvirus 7
cuugaaugagcugacagagg

SEQ ID NO: 2147588 - RNA, 20 nt, Human herpesvirus 7
cgauagcauuagagcauauu

SEQ ID NO: 2147589 - RNA, 14 nt, Human herpesvirus 7
gaacaaauaaugag

SEQ ID NO: 2147590 - RNA, 17 nt, Human herpesvirus 7
aaaucuguagaaaaugu

SEQ ID NO: 2147591 - RNA, 17 nt, Human herpesvirus 7
ucaacaaaaugacaaaa

SEQ ID NO: 2147592 - RNA, 14 nt, Human herpesvirus 7
aauucgcugaugaa

SEQ ID NO: 2147593 - RNA, 24 nt, Human herpesvirus 7
cuauuaaauauuuagagucgucuu

SEQ ID NO: 2147594 - RNA, 13 nt, Human herpesvirus 7
gaacccuggagag

SEQ ID NO: 2147595 - RNA, 22 nt, Human herpesvirus 7
aauaacauuuuguaugaaaagc

SEQ ID NO: 2147596 - RNA, 16 nt, Human herpesvirus 7
guaauuuaugauuuuu

SEQ ID NO: 2147597 - RNA, 17 nt, Human herpesvirus 7
ucaucucacuucagaag

SEQ ID NO: 2147598 - RNA, 17 nt, Human herpesvirus 7
ggacuugauaauguuuc

SEQ ID NO: 2147599 - RNA, 18 nt, Human herpesvirus 7
gaucaaaagcugcagcug

SEQ ID NO: 2147600 - RNA, 16 nt, Human herpesvirus 7
cagggagguuucuugc

SEQ ID NO: 2147601 - RNA, 16 nt, Human herpesvirus 7
cauugaaaaugcauug

SEQ ID NO: 2147602 - RNA, 13 nt, Human herpesvirus 7
ugcaucugaauuu

SEQ ID NO: 2147603 - RNA, 16 nt, Human herpesvirus 7
aaaaucaaaacauuuc

SEQ ID NO: 2147604 - RNA, 14 nt, Human herpesvirus 7
gcaaauaaauugug

SEQ ID NO: 2147605 - RNA, 21 nt, Human herpesvirus 7
gcauauugaagaucaacaaau

SEQ ID NO: 2147606 - RNA, 21 nt, Human herpesvirus 7
aaagacgcuugcuauuuucuu

SEQ ID NO: 2147607 - RNA, 21 nt, Human herpesvirus 7
ucacagcuagauugacuauga

SEQ ID NO: 2147608 - RNA, 16 nt, Human herpesvirus 7
cuucuugcauuuccga

SEQ ID NO: 2147609 - RNA, 16 nt, Human herpesvirus 7
uaaugauguaauguug

SEQ ID NO: 2147610 - RNA, 20 nt, Human herpesvirus 7
gaagaggaguauguugcaua

SEQ ID NO: 2147611 - RNA, 21 nt, Human herpesvirus 7
uauuuaagcuucaaaaauguu

SEQ ID NO: 2147612 - RNA, 13 nt, Human herpesvirus 7
uuaaacuuaucag

SEQ ID NO: 2147613 - RNA, 14 nt, Human herpesvirus 7
uuacagauugcuug

SEQ ID NO: 2147614 - RNA, 17 nt, Human herpesvirus 7
guaaaaaauuacuugcu

SEQ ID NO: 2147615 - RNA, 16 nt, Human herpesvirus 7
aaucuguagaaaaugu

SEQ ID NO: 2147616 - RNA, 18 nt, Human herpesvirus 7
aauguuagaaacaucugu

SEQ ID NO: 2147617 - RNA, 13 nt, Human herpesvirus 7
gaacuuuuaaaaa

SEQ ID NO: 2147618 - RNA, 14 nt, Human herpesvirus 7
aggucacaaaagcu

SEQ ID NO: 2147619 - RNA, 21 nt, Human herpesvirus 7
cugacuccuuuuuuucugcuc

SEQ ID NO: 2147620 - RNA, 16 nt, Human herpesvirus 7
agacaccccaaaauca

SEQ ID NO: 2147621 - RNA, 23 nt, Human herpesvirus 7
aaauugauccugcuauucauuuc

SEQ ID NO: 2147622 - RNA, 16 nt, Human herpesvirus 7
uggucagaacaucccu

SEQ ID NO: 2147623 - RNA, 15 nt, Human herpesvirus 7
ucgauauacauguaa

SEQ ID NO: 2147624 - RNA, 20 nt, Human herpesvirus 7
aaugccaucuauaaacauuc

SEQ ID NO: 2147625 - RNA, 23 nt, Human herpesvirus 7
aauuauguauaucuuuuuauuga

SEQ ID NO: 2147626 - RNA, 14 nt, Human herpesvirus 7
aacauuaaaacuac

SEQ ID NO: 2147627 - RNA, 18 nt, Human herpesvirus 7
auagaaauuauuguacau

SEQ ID NO: 2147628 - RNA, 22 nt, Human herpesvirus 7
agccugguuuuguucccugcuc

SEQ ID NO: 2147629 - RNA, 21 nt, Human herpesvirus 7
gaaauccgucaccgacaauau

SEQ ID NO: 2147630 - RNA, 21 nt, Human herpesvirus 7
uuaguacuuuuucuggaaugu

SEQ ID NO: 2147631 - RNA, 17 nt, Human herpesvirus 7
caaauuaaacaaucugg

SEQ ID NO: 2147632 - RNA, 20 nt, Human herpesvirus 7
uacaaaacaaagauugaagc

SEQ ID NO: 2147633 - RNA, 17 nt, Human herpesvirus 7
uuuggauaguucguaaa

SEQ ID NO: 2147634 - RNA, 19 nt, Human herpesvirus 7
aauuucuaaauaugaugaa

SEQ ID NO: 2147635 - RNA, 21 nt, Human herpesvirus 7
caugaugaauauaacaaaaaa

SEQ ID NO: 2147636 - RNA, 12 nt, Human herpesvirus 7
aauguuucugag

SEQ ID NO: 2147637 - RNA, 16 nt, Human herpesvirus 7
auucuaaaaauuauuu

SEQ ID NO: 2147638 - RNA, 14 nt, Human herpesvirus 7
aucauagagaaaac

SEQ ID NO: 2147639 - RNA, 14 nt, Human herpesvirus 7
cuguagacauuucu

SEQ ID NO: 2147640 - RNA, 14 nt, Human herpesvirus 7
agagaacuagaaca

SEQ ID NO: 2147641 - RNA, 15 nt, Human herpesvirus 7
gaaagaaaagaugua

SEQ ID NO: 2147642 - RNA, 24 nt, Human herpesvirus 7
auuuguacuucaaaguagccuuca

SEQ ID NO: 2147643 - RNA, 21 nt, Human herpesvirus 7
uguaugaaauaauagaugucu

SEQ ID NO: 2147644 - RNA, 16 nt, Human herpesvirus 7
cagaccguaaaacaau

SEQ ID NO: 2147645 - RNA, 15 nt, Human herpesvirus 7
cgggguauguauggc

SEQ ID NO: 2147646 - RNA, 15 nt, Human herpesvirus 7
uccaaagugaugaaa

SEQ ID NO: 2147647 - RNA, 18 nt, Human herpesvirus 7
aucauaauuacauugcag

SEQ ID NO: 2147648 - RNA, 13 nt, Human herpesvirus 7
ucauccaaaaaga

SEQ ID NO: 2147649 - RNA, 14 nt, Human herpesvirus 7
aaaagcugcagcug

SEQ ID NO: 2147650 - RNA, 16 nt, Human herpesvirus 7
cugcuaacucauaauu

SEQ ID NO: 2147651 - RNA, 22 nt, Human herpesvirus 7
gguaaacucacuucuaaaagcu

SEQ ID NO: 2147652 - RNA, 16 nt, Human herpesvirus 7
cacuaauccaugacag

SEQ ID NO: 2147653 - RNA, 15 nt, Human herpesvirus 7
uacuuuuacuccuca

SEQ ID NO: 2147654 - RNA, 11 nt, Human herpesvirus 7
ggaucucucuu

SEQ ID NO: 2147655 - RNA, 22 nt, Human herpesvirus 7
gcucagcuagaauguguagauu

SEQ ID NO: 2147656 - RNA, 24 nt, Human herpesvirus 7
uuguuuugcauauuuugcuagaaa

SEQ ID NO: 2147657 - RNA, 19 nt, Human herpesvirus 7
gccagauuucauguuuuau

SEQ ID NO: 2147658 - RNA, 13 nt, Human herpesvirus 7
uaaacauuucaaa

SEQ ID NO: 2147659 - RNA, 17 nt, Human herpesvirus 7
guuaagaauuccagauu

SEQ ID NO: 2147660 - RNA, 16 nt, Human herpesvirus 7
uaauaugugaaaauaa

SEQ ID NO: 2147661 - RNA, 18 nt, Human herpesvirus 7
aaaaaccugaaaaacaug

SEQ ID NO: 2147662 - RNA, 20 nt, Human herpesvirus 7
acugaaucugaagaagaguu

SEQ ID NO: 2147663 - RNA, 18 nt, Human herpesvirus 7
aauuuuucggauaaaagg

SEQ ID NO: 2147664 - RNA, 13 nt, Human herpesvirus 7
cgucaacuaaaau

SEQ ID NO: 2147665 - RNA, 19 nt, Human herpesvirus 7
cuuugucugcugguaauaa

SEQ ID NO: 2147666 - RNA, 22 nt, Human herpesvirus 7
ugcaucaaaacauaucagauuu

SEQ ID NO: 2147667 - RNA, 23 nt, Human herpesvirus 7
acauuuaaaaaaaaaaccacaaa

SEQ ID NO: 2147668 - RNA, 19 nt, Human herpesvirus 7
ucgcuuggguuugaucgag

SEQ ID NO: 2147669 - RNA, 19 nt, Human herpesvirus 7
ucaaaaguagaggccgaaa

SEQ ID NO: 2147670 - RNA, 15 nt, Human herpesvirus 7
aucccuggacagaga

SEQ ID NO: 2147671 - RNA, 22 nt, Human herpesvirus 7
aagaugauagccauaaaugcuu

SEQ ID NO: 2147672 - RNA, 19 nt, Human herpesvirus 7
aaauuaauaauauuaguau

SEQ ID NO: 2147673 - RNA, 15 nt, Human herpesvirus 7
gucaucacuuaugau

SEQ ID NO: 2147674 - RNA, 15 nt, Human herpesvirus 7
uggauacaaggaaaa

SEQ ID NO: 2147675 - RNA, 22 nt, Human herpesvirus 7
guuuauuugaacggaauaaaca

SEQ ID NO: 2147676 - RNA, 21 nt, Human herpesvirus 7
agcauugaaaucauuuugcug

SEQ ID NO: 2147677 - RNA, 13 nt, Human herpesvirus 7
gauucuccagaaa

SEQ ID NO: 2147678 - RNA, 19 nt, Human herpesvirus 7
aaaagaauugauugaauuu

SEQ ID NO: 2147679 - RNA, 21 nt, Human herpesvirus 7
augguuuuaaaauagaaaaug

SEQ ID NO: 2147680 - RNA, 20 nt, Human herpesvirus 7
caauauauugaaggugucua

SEQ ID NO: 2147681 - RNA, 19 nt, Human herpesvirus 7
aauaaaaagcccaugaaca

SEQ ID NO: 2147682 - RNA, 19 nt, Human herpesvirus 7
gugccccaaacuguauuug

SEQ ID NO: 2147683 - RNA, 23 nt, Human herpesvirus 7
auugaauggaacauguuuguaaa

SEQ ID NO: 2147684 - RNA, 14 nt, Human herpesvirus 7
aaacaauacaugaa

SEQ ID NO: 2147685 - RNA, 13 nt, Human herpesvirus 7
cauuuuuucugau

SEQ ID NO: 2147686 - RNA, 18 nt, Human herpesvirus 7
agauuaccugcauacuuu

SEQ ID NO: 2147687 - RNA, 19 nt, Human herpesvirus 7
gaaagcguuucacugggaa

SEQ ID NO: 2147688 - RNA, 19 nt, Human herpesvirus 7
aauauguagcaucucugug

SEQ ID NO: 2147689 - RNA, 23 nt, Human herpesvirus 7
auucucaaaaaugauaugacaug

SEQ ID NO: 2147690 - RNA, 20 nt, Human herpesvirus 7
aguaaagggcugucugaagu

SEQ ID NO: 2147691 - RNA, 14 nt, Human herpesvirus 7
ucaggaucuccugg

SEQ ID NO: 2147692 - RNA, 17 nt, Human herpesvirus 7
ucaacuugcagaggacc

SEQ ID NO: 2147693 - RNA, 19 nt, Human herpesvirus 7
cuuugauagggauucuuug

SEQ ID NO: 2147694 - RNA, 23 nt, Human herpesvirus 7
agcauggaucguagcaacagaga

SEQ ID NO: 2147695 - RNA, 16 nt, Human herpesvirus 7
aagcaacaaauguuua

SEQ ID NO: 2147696 - RNA, 19 nt, Human herpesvirus 7
uuugucuuacgucuuuucu

SEQ ID NO: 2147697 - RNA, 18 nt, Human herpesvirus 7
uccuguccagucuguaaa

SEQ ID NO: 2147698 - RNA, 15 nt, Human herpesvirus 7
ugguaaaaaaguuug

SEQ ID NO: 2147699 - RNA, 22 nt, Human herpesvirus 7
aaaaaccuuuuuuccauauucc

SEQ ID NO: 2147700 - RNA, 20 nt, Human herpesvirus 7
aagguuaagugaaugugcuu

SEQ ID NO: 2147701 - RNA, 16 nt, Human herpesvirus 7
cagauuuucuguuuca

SEQ ID NO: 2147702 - RNA, 14 nt, Human herpesvirus 7
cauguauugucuua

SEQ ID NO: 2147703 - RNA, 23 nt, Human herpesvirus 7
aucuuccacaaaaauuuaauagu

SEQ ID NO: 2147704 - RNA, 21 nt, Human herpesvirus 7
acaaacauuccaacagcuuca

SEQ ID NO: 2147705 - RNA, 18 nt, Human herpesvirus 7
ugaaaagcccaaacuguu

SEQ ID NO: 2147706 - RNA, 22 nt, Human herpesvirus 7
uuaaacaaucuggacauuucaa

SEQ ID NO: 2147707 - RNA, 12 nt, Human herpesvirus 7
cugccaauuuuu

SEQ ID NO: 2147708 - RNA, 22 nt, Human herpesvirus 7
guguccagauaauauagaugca

SEQ ID NO: 2147709 - RNA, 17 nt, Human herpesvirus 7
acagagucaaucuguga

SEQ ID NO: 2147710 - RNA, 18 nt, Human herpesvirus 7
gcuaugacuuugaaucaa

SEQ ID NO: 2147711 - RNA, 20 nt, Human herpesvirus 7
uguaaucaaaauuuuggauu

SEQ ID NO: 2147712 - RNA, 20 nt, Human herpesvirus 7
ugauacaggccuguuucuug

SEQ ID NO: 2147713 - RNA, 13 nt, Human herpesvirus 7
uucacagaaaucc

SEQ ID NO: 2147714 - RNA, 13 nt, Human herpesvirus 7
gauauuaguuuca

SEQ ID NO: 2147715 - RNA, 13 nt, Human herpesvirus 7
uaguuaauugugu

SEQ ID NO: 2147716 - RNA, 17 nt, Human herpesvirus 7
aaagucuaagguuugaa

SEQ ID NO: 2147717 - RNA, 16 nt, Human herpesvirus 7
uucgaucuguaaaaac

SEQ ID NO: 2147718 - RNA, 13 nt, Human herpesvirus 7
cauauuuugcuag

SEQ ID NO: 2147719 - RNA, 12 nt, Human herpesvirus 7
uaaaugauuuua

SEQ ID NO: 2147720 - RNA, 22 nt, Human herpesvirus 7
auggggcauuaauucuuucagu

SEQ ID NO: 2147721 - RNA, 22 nt, Human herpesvirus 7
ccacagauauucuaacaaauac

SEQ ID NO: 2147722 - RNA, 16 nt, Human herpesvirus 7
aaguuuuuugagauau

SEQ ID NO: 2147723 - RNA, 16 nt, Human herpesvirus 7
guaaaagaucuuuuaa

SEQ ID NO: 2147724 - RNA, 18 nt, Human herpesvirus 7
aucuagcuuguuaaagaa

SEQ ID NO: 2147725 - RNA, 17 nt, Human herpesvirus 7
aagagucuauugacaua

SEQ ID NO: 2147726 - RNA, 22 nt, Human herpesvirus 7
augauuuuucugcuuaaaugua

SEQ ID NO: 2147727 - RNA, 22 nt, Human herpesvirus 7
cgaguguaaucuagaacuguua

SEQ ID NO: 2147728 - RNA, 18 nt, Human herpesvirus 7
gcaaauccuauaaaagca

SEQ ID NO: 2147729 - RNA, 15 nt, Human herpesvirus 7
aagauuuaacaugug

SEQ ID NO: 2147730 - RNA, 12 nt, Human herpesvirus 7
aauaacaggaaa

SEQ ID NO: 2147731 - RNA, 22 nt, Human herpesvirus 7
gacucuuuuuuuuuauugccuu

SEQ ID NO: 2147732 - RNA, 13 nt, Human herpesvirus 7
uuaaugucucugu

SEQ ID NO: 2147733 - RNA, 15 nt, Human herpesvirus 7
uuacacucuguuacu

SEQ ID NO: 2147734 - RNA, 16 nt, Human herpesvirus 7
uacaauuucuggcaau

SEQ ID NO: 2147735 - RNA, 16 nt, Human herpesvirus 7
uuuaagagacauugaa

SEQ ID NO: 2147736 - RNA, 16 nt, Human herpesvirus 7
gcagaccguaaaacaa

SEQ ID NO: 2147737 - RNA, 11 nt, Human herpesvirus 7
gaucuuguaau

SEQ ID NO: 2147738 - RNA, 13 nt, Human herpesvirus 7
aucucauagcuua

SEQ ID NO: 2147739 - RNA, 12 nt, Human herpesvirus 7
uuaaaauauguu

SEQ ID NO: 2147740 - RNA, 13 nt, Human herpesvirus 7
gcugaaauuucau

SEQ ID NO: 2147741 - RNA, 17 nt, Human herpesvirus 7
uccauuaagccagauuu

SEQ ID NO: 2147742 - RNA, 23 nt, Human herpesvirus 7
aaauauguggcacauaaguugac

SEQ ID NO: 2147743 - RNA, 13 nt, Human herpesvirus 7
auucuagcguuuc

SEQ ID NO: 2147744 - RNA, 16 nt, Human herpesvirus 7
acuugcaaagacagaa

SEQ ID NO: 2147745 - RNA, 18 nt, Human herpesvirus 7
caaaagacauaacaaaaa

SEQ ID NO: 2147746 - RNA, 18 nt, Human herpesvirus 7
augauuuaauauagaaau

SEQ ID NO: 2147747 - RNA, 14 nt, Human herpesvirus 7
gugcugucuugcuu

SEQ ID NO: 2147748 - RNA, 14 nt, Human herpesvirus 7
aaaguacaaauguu

SEQ ID NO: 2147749 - RNA, 20 nt, Human herpesvirus 7
gugucuuacaacuagaaaau

SEQ ID NO: 2147750 - RNA, 14 nt, Human herpesvirus 7
auuuuauuucagcu

SEQ ID NO: 2147751 - RNA, 22 nt, Human herpesvirus 7
auuaucgcaauuaauucaguuu

SEQ ID NO: 2147752 - RNA, 16 nt, Human herpesvirus 7
augaagacagcucaaa

SEQ ID NO: 2147753 - RNA, 20 nt, Human herpesvirus 7
gaauaugaagaguucuuguu

SEQ ID NO: 2147754 - RNA, 22 nt, Human herpesvirus 7
ugcuggaucauagagaaaacau

SEQ ID NO: 2147755 - RNA, 14 nt, Human herpesvirus 7
aucuuuuuucagug

SEQ ID NO: 2147756 - RNA, 13 nt, Human herpesvirus 7
accguuugcagcc

SEQ ID NO: 2147757 - RNA, 14 nt, Human herpesvirus 7
aaaguaugcuuugu

SEQ ID NO: 2147758 - RNA, 23 nt, Human herpesvirus 7
agcauuugguaaaaaaaauggag

SEQ ID NO: 2147759 - RNA, 13 nt, Human herpesvirus 7
aacugaaaacaau

SEQ ID NO: 2147760 - RNA, 22 nt, Human herpesvirus 7
guaaugaauaaaaucuauuuua

SEQ ID NO: 2147761 - RNA, 17 nt, Human herpesvirus 7
agauacgcgcagauuuu

SEQ ID NO: 2147762 - RNA, 22 nt, Human herpesvirus 7
auuuaacaaagugcauaaauaa

SEQ ID NO: 2147763 - RNA, 14 nt, Human herpesvirus 7
ucaagcacaaucac

SEQ ID NO: 2147764 - RNA, 19 nt, Human herpesvirus 7
gcuuucguuuauaaacucu

SEQ ID NO: 2147765 - RNA, 15 nt, Human herpesvirus 7
ggaagaacaagcaaa

SEQ ID NO: 2147766 - RNA, 14 nt, Human herpesvirus 7
aacaguucaaaaaa

SEQ ID NO: 2147767 - RNA, 18 nt, Human herpesvirus 7
caggaaaaagcagacauu

SEQ ID NO: 2147768 - RNA, 20 nt, Human herpesvirus 7
acgguaacggauuuacauuu

SEQ ID NO: 2147769 - RNA, 16 nt, Human herpesvirus 7
auuauuuuuaaaaaug

SEQ ID NO: 2147770 - RNA, 15 nt, Human herpesvirus 7
cacuauuggacaaaa

SEQ ID NO: 2147771 - RNA, 19 nt, Human herpesvirus 7
uaauguuuuuuucauacau

SEQ ID NO: 2147772 - RNA, 17 nt, Human herpesvirus 7
augaaucaaauuucaaa

SEQ ID NO: 2147773 - RNA, 16 nt, Human herpesvirus 7
uugugaguuucuacau

SEQ ID NO: 2147774 - RNA, 21 nt, Human herpesvirus 7
aaguuuccauaaauaaaaaca

SEQ ID NO: 2147775 - RNA, 22 nt, Human herpesvirus 7
cauuucaaaaucagaaauguua

SEQ ID NO: 2147776 - RNA, 14 nt, Human herpesvirus 7
uccagagucucuaa

SEQ ID NO: 2147777 - RNA, 19 nt, Human herpesvirus 7
agaaaaguugaaaauguuu

SEQ ID NO: 2147778 - RNA, 20 nt, Human herpesvirus 7
aagacacguuucucuguaga

SEQ ID NO: 2147779 - RNA, 20 nt, Human herpesvirus 7
ucaacacaauuuucacaucu

SEQ ID NO: 2147780 - RNA, 20 nt, Human herpesvirus 7
uuacaacuuugccaaugcca

SEQ ID NO: 2147781 - RNA, 15 nt, Human herpesvirus 7
ugucucauugacaug

SEQ ID NO: 2147782 - RNA, 22 nt, Human herpesvirus 7
uccaaagaaaaaaggaugaaag

SEQ ID NO: 2147783 - RNA, 16 nt, Human herpesvirus 7
ucauaucugacauuca

SEQ ID NO: 2147784 - RNA, 17 nt, Human herpesvirus 7
uaauacaaaauaaagcc

SEQ ID NO: 2147785 - RNA, 17 nt, Human herpesvirus 7
cuaagagcuuuugcaaa

SEQ ID NO: 2147786 - RNA, 18 nt, Human herpesvirus 7
ugaaacauagcuagaaau

SEQ ID NO: 2147787 - RNA, 16 nt, Human herpesvirus 7
aguagccgaaaaagaa

SEQ ID NO: 2147788 - RNA, 19 nt, Human herpesvirus 7
agaaugggugucagcuucu

SEQ ID NO: 2147789 - RNA, 16 nt, Human herpesvirus 7
aaugaauuagcuaaau

SEQ ID NO: 2147790 - RNA, 16 nt, Human herpesvirus 7
acgucaggaaaaaaac

SEQ ID NO: 2147791 - RNA, 21 nt, Human herpesvirus 7
aauccgucaccgacaauauaa

SEQ ID NO: 2147792 - RNA, 19 nt, Human herpesvirus 7
uagaacaaguagaaaaugc

SEQ ID NO: 2147793 - RNA, 16 nt, Human herpesvirus 7
aagcaaaagccacaga

SEQ ID NO: 2147794 - RNA, 18 nt, Human herpesvirus 7
uuuauauauggcaauaaa

SEQ ID NO: 2147795 - RNA, 15 nt, Human herpesvirus 7
agaguauuuaagaac

SEQ ID NO: 2147796 - RNA, 19 nt, Human herpesvirus 7
auuaucgcguuuucaugcu

SEQ ID NO: 2147797 - RNA, 17 nt, Human herpesvirus 7
gguaaauccuucguaac

SEQ ID NO: 2147798 - RNA, 20 nt, Human herpesvirus 7
aagaauuuuguaagaaacau

SEQ ID NO: 2147799 - RNA, 20 nt, Human herpesvirus 7
agugucuguuguaacagauu

SEQ ID NO: 2147800 - RNA, 13 nt, Human herpesvirus 7
aaugaaguuuauc

SEQ ID NO: 2147801 - RNA, 16 nt, Human herpesvirus 7
caucgguagugucugg

SEQ ID NO: 2147802 - RNA, 12 nt, Human herpesvirus 7
guuguuaagaau

SEQ ID NO: 2147803 - RNA, 14 nt, Human herpesvirus 7
uguauguugaaguu

SEQ ID NO: 2147804 - RNA, 19 nt, Human herpesvirus 7
uaauuugaauuaauucuag

SEQ ID NO: 2147805 - RNA, 13 nt, Human herpesvirus 7
ucagcucuguaau

SEQ ID NO: 2147806 - RNA, 18 nt, Human herpesvirus 7
agagaucauaauuacauu

SEQ ID NO: 2147807 - RNA, 18 nt, Human herpesvirus 7
aauucgcugaugaaaaua

SEQ ID NO: 2147808 - RNA, 20 nt, Human herpesvirus 7
auaacaauuauagaaacauu

SEQ ID NO: 2147809 - RNA, 14 nt, Human herpesvirus 7
agccauaaaaugua

SEQ ID NO: 2147810 - RNA, 23 nt, Human herpesvirus 7
gauguuuggcaacaaacaaauaa

SEQ ID NO: 2147811 - RNA, 18 nt, Human herpesvirus 7
uuuccuacaaaaguucug

SEQ ID NO: 2147812 - RNA, 19 nt, Human herpesvirus 7
aagaauuuuguaagaaaca

SEQ ID NO: 2147813 - RNA, 14 nt, Human herpesvirus 7
caaaagccacagau

SEQ ID NO: 2147814 - RNA, 18 nt, Human herpesvirus 7
agcaacagagaacaccau

SEQ ID NO: 2147815 - RNA, 16 nt, Human herpesvirus 7
gcuucuauuauagaag

SEQ ID NO: 2147816 - RNA, 19 nt, Human herpesvirus 7
uuacacuuggaguuguguu

SEQ ID NO: 2147817 - RNA, 18 nt, Human herpesvirus 7
ugcuuguaggcagaaaug

SEQ ID NO: 2147818 - RNA, 20 nt, Human herpesvirus 7
guauuaaaggaaacauuucu

SEQ ID NO: 2147819 - RNA, 14 nt, Human herpesvirus 7
caccauuguucaac

SEQ ID NO: 2147820 - RNA, 18 nt, Human herpesvirus 7
acuaaaacuacauuuaaa

SEQ ID NO: 2147821 - RNA, 22 nt, Human herpesvirus 7
aauaguuguguuuuaaaagcua

SEQ ID NO: 2147822 - RNA, 22 nt, Human herpesvirus 7
cuucagguuguugucauugaaa

SEQ ID NO: 2147823 - RNA, 23 nt, Human herpesvirus 7
uauagaacaaguagaaaaugcug

SEQ ID NO: 2147824 - RNA, 23 nt, Human herpesvirus 7
ugcuuacagaucuugcuuuagaa

SEQ ID NO: 2147825 - RNA, 14 nt, Human herpesvirus 7
aaccgauacagauc

SEQ ID NO: 2147826 - RNA, 22 nt, Human herpesvirus 7
cagaaagaucaaugcacacauu

SEQ ID NO: 2147827 - RNA, 17 nt, Human herpesvirus 7
aaaggaaaaauuucuuc

SEQ ID NO: 2147828 - RNA, 21 nt, Human herpesvirus 7
uauucuacacaucuucaaugu

SEQ ID NO: 2147829 - RNA, 13 nt, Human herpesvirus 7
agaagaagauuuu

SEQ ID NO: 2147830 - RNA, 22 nt, Human herpesvirus 7
agcuucuaaaugugcuaaauaa

SEQ ID NO: 2147831 - RNA, 18 nt, Human herpesvirus 7
auuuuaaaacugaagcau

SEQ ID NO: 2147832 - RNA, 18 nt, Human herpesvirus 7
acagauucuccagaaauu

SEQ ID NO: 2147833 - RNA, 17 nt, Human herpesvirus 7
ugugcgaagguugucug

SEQ ID NO: 2147834 - RNA, 15 nt, Human herpesvirus 7
ucagaguuuaaagua

SEQ ID NO: 2147835 - RNA, 17 nt, Human herpesvirus 7
auuucuguaaaaacuug

SEQ ID NO: 2147836 - RNA, 23 nt, Human herpesvirus 7
caauauguagcaucucuguggcu

SEQ ID NO: 2147837 - RNA, 19 nt, Human herpesvirus 7
uugcugguggguuuugaaa

SEQ ID NO: 2147838 - RNA, 13 nt, Human herpesvirus 7
aaucgagaauaaa

SEQ ID NO: 2147839 - RNA, 12 nt, Human herpesvirus 7
acuuguuuugac

SEQ ID NO: 2147840 - RNA, 16 nt, Human herpesvirus 7
gaagaaugcaagccua

SEQ ID NO: 2147841 - RNA, 16 nt, Human herpesvirus 7
ccuucuaaauucuuua

SEQ ID NO: 2147842 - RNA, 17 nt, Human herpesvirus 7
cagggaagaaacagcug

SEQ ID NO: 2147843 - RNA, 17 nt, Human herpesvirus 7
aaauauuuuacauauua

SEQ ID NO: 2147844 - RNA, 13 nt, Human herpesvirus 7
caauuucacagac

SEQ ID NO: 2147845 - RNA, 14 nt, Human herpesvirus 7
gauuagaaucagac

SEQ ID NO: 2147846 - RNA, 23 nt, Human herpesvirus 7
cagucugaaagccgcugccuucg

SEQ ID NO: 2147847 - RNA, 23 nt, Human herpesvirus 7
ugaucuugucaaaaaaaauuaaa

SEQ ID NO: 2147848 - RNA, 23 nt, Human herpesvirus 7
uuuuaauaugugaaaauaaacag

SEQ ID NO: 2147849 - RNA, 14 nt, Human herpesvirus 7
agcacauguacaga

SEQ ID NO: 2147850 - RNA, 15 nt, Human herpesvirus 7
uaaugcgguuuugua

SEQ ID NO: 2147851 - RNA, 17 nt, Human herpesvirus 7
agauauucuaacaaaua

SEQ ID NO: 2147852 - RNA, 16 nt, Human herpesvirus 7
cagcaacugugcauga

SEQ ID NO: 2147853 - RNA, 17 nt, Human herpesvirus 7
auuucuggaugaaaacu

SEQ ID NO: 2147854 - RNA, 18 nt, Human herpesvirus 7
ucuuuuugaacagaauuu

SEQ ID NO: 2147855 - RNA, 16 nt, Human herpesvirus 7
cugcuggaaagcuugu

SEQ ID NO: 2147856 - RNA, 16 nt, Human herpesvirus 7
gagagaauaagcaaau

SEQ ID NO: 2147857 - RNA, 20 nt, Human herpesvirus 7
auauaugucauagugggaac

SEQ ID NO: 2147858 - RNA, 19 nt, Human herpesvirus 7
guugaaugaggacugcagu

SEQ ID NO: 2147859 - RNA, 22 nt, Human herpesvirus 7
caaaacugcaaauccaacagaa

SEQ ID NO: 2147860 - RNA, 21 nt, Human herpesvirus 7
aaaagauguuacccaaaaugu

SEQ ID NO: 2147861 - RNA, 15 nt, Human herpesvirus 7
uucaauuaaugcauu

SEQ ID NO: 2147862 - RNA, 20 nt, Human herpesvirus 7
agaauguugagcuaucugau

SEQ ID NO: 2147863 - RNA, 16 nt, Human herpesvirus 7
aaucuauauaaaauau

SEQ ID NO: 2147864 - RNA, 18 nt, Human herpesvirus 7
uauacuuauuauaucuua

SEQ ID NO: 2147865 - RNA, 23 nt, Human herpesvirus 7
caucgaagaaauucgaaacacuu

SEQ ID NO: 2147866 - RNA, 16 nt, Human herpesvirus 7
auuauuaaagcuuuca

SEQ ID NO: 2147867 - RNA, 20 nt, Human herpesvirus 7
agcgcaaaggaaaaaugcug

SEQ ID NO: 2147868 - RNA, 23 nt, Human herpesvirus 7
agagaugauguuuuuugucuuuu

SEQ ID NO: 2147869 - RNA, 23 nt, Human herpesvirus 7
gucggcacacguacaauauuaaa

SEQ ID NO: 2147870 - RNA, 13 nt, Human herpesvirus 7
uguuacccaaaau

SEQ ID NO: 2147871 - RNA, 17 nt, Human herpesvirus 7
cugggauagaaauguaa

SEQ ID NO: 2147872 - RNA, 14 nt, Human herpesvirus 7
uuaaauuauuauua

SEQ ID NO: 2147873 - RNA, 20 nt, Human herpesvirus 7
auuuugaucuugucaaaaaa

SEQ ID NO: 2147874 - RNA, 22 nt, Human herpesvirus 7
acagaauacuacucagaagaca

SEQ ID NO: 2147875 - RNA, 13 nt, Human herpesvirus 7
uugaaauaaagga

SEQ ID NO: 2147876 - RNA, 21 nt, Human herpesvirus 7
uaaagagaaaguaaaagcuau

SEQ ID NO: 2147877 - RNA, 15 nt, Human herpesvirus 7
caaauuuauauuuua

SEQ ID NO: 2147878 - RNA, 15 nt, Human herpesvirus 7
aaauuuaaauacuga

SEQ ID NO: 2147879 - RNA, 18 nt, Human herpesvirus 7
gguaaagaaccuaucaaa

SEQ ID NO: 2147880 - RNA, 14 nt, Human herpesvirus 7
cguaaguuguuaua

SEQ ID NO: 2147881 - RNA, 21 nt, Human herpesvirus 7
uuacacaaauugauccugcua

SEQ ID NO: 2147882 - RNA, 17 nt, Human herpesvirus 7
auaaucaagaaacaugu

SEQ ID NO: 2147883 - RNA, 20 nt, Human herpesvirus 7
gaaaagaaaaagcaacaaau

SEQ ID NO: 2147884 - RNA, 17 nt, Human herpesvirus 7
uaaaguuuauauuuucu

SEQ ID NO: 2147885 - RNA, 11 nt, Human herpesvirus 7
gugucuuacaa

SEQ ID NO: 2147886 - RNA, 12 nt, Human herpesvirus 7
aaaaauaauaaa

SEQ ID NO: 2147887 - RNA, 16 nt, Human herpesvirus 7
guacgagcgauuuaau

SEQ ID NO: 2147888 - RNA, 17 nt, Human herpesvirus 7
uagacguagugucauca

SEQ ID NO: 2147889 - RNA, 19 nt, Human herpesvirus 7
auuucaagaaggaaaauuu

SEQ ID NO: 2147890 - RNA, 17 nt, Human herpesvirus 7
aaagcuuacucuuucug

SEQ ID NO: 2147891 - RNA, 22 nt, Human herpesvirus 7
aauuuccgaccugagaugauaa

SEQ ID NO: 2147892 - RNA, 13 nt, Human herpesvirus 7
aauaauauaaaag

SEQ ID NO: 2147893 - RNA, 21 nt, Human herpesvirus 7
ggaguuugucucauugacaug

SEQ ID NO: 2147894 - RNA, 18 nt, Human herpesvirus 7
gauauauguguacagauu

SEQ ID NO: 2147895 - RNA, 19 nt, Human herpesvirus 7
gugauuguagauggcacca

SEQ ID NO: 2147896 - RNA, 22 nt, Human herpesvirus 7
cgaaucuuuauuauuuacugau

SEQ ID NO: 2147897 - RNA, 12 nt, Human herpesvirus 7
caaaucaaaguu

SEQ ID NO: 2147898 - RNA, 22 nt, Human herpesvirus 7
aaccacgcauaugcuaagaaag

SEQ ID NO: 2147899 - RNA, 19 nt, Human herpesvirus 7
uucaacacauaauguguau

SEQ ID NO: 2147900 - RNA, 16 nt, Human herpesvirus 7
cuuacacuauucucua

SEQ ID NO: 2147901 - RNA, 17 nt, Human herpesvirus 7
cuuauacuccacauuca

SEQ ID NO: 2147902 - RNA, 14 nt, Human herpesvirus 7
guaacuuucaucug

SEQ ID NO: 2147903 - RNA, 14 nt, Human herpesvirus 7
uacuuuuaaaauug

SEQ ID NO: 2147904 - RNA, 14 nt, Human herpesvirus 7
uaaaugcuuaaauu

SEQ ID NO: 2147905 - RNA, 20 nt, Human herpesvirus 7
agaucauaauuacauugcag

SEQ ID NO: 2147906 - RNA, 14 nt, Human herpesvirus 7
aguacaucuuucua

SEQ ID NO: 2147907 - RNA, 22 nt, Human herpesvirus 7
agagucugugugugcaguguuu

SEQ ID NO: 2147908 - RNA, 17 nt, Human herpesvirus 7
auuuccguuguuaaaaa

SEQ ID NO: 2147909 - RNA, 17 nt, Human herpesvirus 7
uaauuucucaaaucuuu

SEQ ID NO: 2147910 - RNA, 15 nt, Human herpesvirus 7
gauguuacccaaaau

SEQ ID NO: 2147911 - RNA, 19 nt, Human herpesvirus 7
cacgcucccauaaaacaag

SEQ ID NO: 2147912 - RNA, 20 nt, Human herpesvirus 7
ucugaguguguuaaaugcga

SEQ ID NO: 2147913 - RNA, 20 nt, Human herpesvirus 7
caauuauuuuaaauucuaau

SEQ ID NO: 2147914 - RNA, 17 nt, Human herpesvirus 7
aucaauuuuaaugugcu

SEQ ID NO: 2147915 - RNA, 15 nt, Human herpesvirus 7
ugcccucagaacugu

SEQ ID NO: 2147916 - RNA, 17 nt, Human herpesvirus 7
aucugauaaaaaaagaa

SEQ ID NO: 2147917 - RNA, 21 nt, Human herpesvirus 7
uaaaauguacauaacucuauc

SEQ ID NO: 2147918 - RNA, 13 nt, Human herpesvirus 7
aaaguacaaaugu

SEQ ID NO: 2147919 - RNA, 15 nt, Human herpesvirus 7
agaauauaaaaaauu

SEQ ID NO: 2147920 - RNA, 14 nt, Human herpesvirus 7
aggcagaaaugucu

SEQ ID NO: 2147921 - RNA, 15 nt, Human herpesvirus 7
agugucuaagguuuu

SEQ ID NO: 2147922 - RNA, 21 nt, Human herpesvirus 7
guggagcuauacguuuggagc

SEQ ID NO: 2147923 - RNA, 15 nt, Human herpesvirus 7
caaccacagacacac

SEQ ID NO: 2147924 - RNA, 20 nt, Human herpesvirus 7
aaacauuguguuuuuuguaa

SEQ ID NO: 2147925 - RNA, 15 nt, Human herpesvirus 7
aaauaucuucugaac

SEQ ID NO: 2147926 - RNA, 18 nt, Human herpesvirus 7
aaaaucucagcucuguaa

SEQ ID NO: 2147927 - RNA, 18 nt, Human herpesvirus 7
auaauaaaaaagauguua

SEQ ID NO: 2147928 - RNA, 12 nt, Human herpesvirus 7
uucugaaaaucu

SEQ ID NO: 2147929 - RNA, 18 nt, Human herpesvirus 7
aagcuauguauaaucaag

SEQ ID NO: 2147930 - RNA, 15 nt, Human herpesvirus 7
uauagaucuugacuc

SEQ ID NO: 2147931 - RNA, 13 nt, Human herpesvirus 7
aaaauguaucuua

SEQ ID NO: 2147932 - RNA, 17 nt, Human herpesvirus 7
cagaacauugucaaaga

SEQ ID NO: 2147933 - RNA, 18 nt, Human herpesvirus 7
gacaacaaagcaugaaaa

SEQ ID NO: 2147934 - RNA, 22 nt, Human herpesvirus 7
acaagaugcgaguccaaaaguu

SEQ ID NO: 2147935 - RNA, 21 nt, Human herpesvirus 7
cuguaaucauauaugcauuau

SEQ ID NO: 2147936 - RNA, 15 nt, Human herpesvirus 7
uuauacacugugaaa

SEQ ID NO: 2147937 - RNA, 18 nt, Human herpesvirus 7
uuguuuggucuauugaaa

SEQ ID NO: 2147938 - RNA, 14 nt, Human herpesvirus 7
cacagaaaucccaa

SEQ ID NO: 2147939 - RNA, 18 nt, Human herpesvirus 7
aaaauaaauucugaaaua

SEQ ID NO: 2147940 - RNA, 12 nt, Human herpesvirus 7
ucuuaaaauaug

SEQ ID NO: 2147941 - RNA, 13 nt, Human herpesvirus 7
agaacaaguagaa

SEQ ID NO: 2147942 - RNA, 23 nt, Human herpesvirus 7
aggaauuucgcgagcugugucca

SEQ ID NO: 2147943 - RNA, 15 nt, Human herpesvirus 7
gaaaacaucagaccu

SEQ ID NO: 2147944 - RNA, 22 nt, Human herpesvirus 7
gucauugucgugagauuugaaa

SEQ ID NO: 2147945 - RNA, 16 nt, Human herpesvirus 7
augccagaaauuaaau

SEQ ID NO: 2147946 - RNA, 20 nt, Human herpesvirus 7
caucgaauuuuacaaugcag

SEQ ID NO: 2147947 - RNA, 15 nt, Human herpesvirus 7
aucuuguaauuucuc

SEQ ID NO: 2147948 - RNA, 18 nt, Human herpesvirus 7
auuugaagauaaguauaa

SEQ ID NO: 2147949 - RNA, 18 nt, Human herpesvirus 7
uuguguggcaacaucuuc

SEQ ID NO: 2147950 - RNA, 18 nt, Human herpesvirus 7
cgggaggugcuguuucca

SEQ ID NO: 2147951 - RNA, 21 nt, Human herpesvirus 7
aaagacagagucaaucuguga

SEQ ID NO: 2147952 - RNA, 13 nt, Human herpesvirus 7
gcauaaagcacca

SEQ ID NO: 2147953 - RNA, 22 nt, Human herpesvirus 7
aagcuuuugcgagaaaauacua

SEQ ID NO: 2147954 - RNA, 14 nt, Human herpesvirus 7
gcuagaaucuuguu

SEQ ID NO: 2147955 - RNA, 17 nt, Human herpesvirus 7
ccaaaccggccaaugau

SEQ ID NO: 2147956 - RNA, 13 nt, Human herpesvirus 7
aaaacacaguaua

SEQ ID NO: 2147957 - RNA, 20 nt, Human herpesvirus 7
ucagaaaaaaucaaaacauu

SEQ ID NO: 2147958 - RNA, 13 nt, Human herpesvirus 7
cacaaauuucuug

SEQ ID NO: 2147959 - RNA, 16 nt, Human herpesvirus 7
uuacuuucauagcuua

SEQ ID NO: 2147960 - RNA, 13 nt, Human herpesvirus 7
aaacaacauaucg

SEQ ID NO: 2147961 - RNA, 15 nt, Human herpesvirus 7
augugcacauuccaa

SEQ ID NO: 2147962 - RNA, 18 nt, Human herpesvirus 7
cgagaaaauuuagcacca

SEQ ID NO: 2147963 - RNA, 19 nt, Human herpesvirus 7
agauguguuggaaacuauu

SEQ ID NO: 2147964 - RNA, 21 nt, Human herpesvirus 7
agugucuuuuauuacucgaaa

SEQ ID NO: 2147965 - RNA, 11 nt, Human herpesvirus 7
gaaauuucaug

SEQ ID NO: 2147966 - RNA, 21 nt, Human herpesvirus 7
uuugauacagauauuuuaauu

SEQ ID NO: 2147967 - RNA, 14 nt, Human herpesvirus 7
uuuuggaagguuua

SEQ ID NO: 2147968 - RNA, 22 nt, Human herpesvirus 7
guugaucgucuguugaaacaua

SEQ ID NO: 2147969 - RNA, 15 nt, Human herpesvirus 7
uucaauuguccauuu

SEQ ID NO: 2147970 - RNA, 14 nt, Human herpesvirus 7
uaaacaaacaauga

SEQ ID NO: 2147971 - RNA, 18 nt, Human herpesvirus 7
auucauuuguuuaagaca

SEQ ID NO: 2147972 - RNA, 18 nt, Human herpesvirus 7
accuuacaacaaagaaaa

SEQ ID NO: 2147973 - RNA, 17 nt, Human herpesvirus 7
uccaaagugaugaaagu

SEQ ID NO: 2147974 - RNA, 13 nt, Human herpesvirus 7
gaagaaaagaaaa

SEQ ID NO: 2147975 - RNA, 23 nt, Human herpesvirus 7
gugaacccauagaagaaugcaag

SEQ ID NO: 2147976 - RNA, 19 nt, Human herpesvirus 7
acaauacccaauacauaag

SEQ ID NO: 2147977 - RNA, 18 nt, Human herpesvirus 7
cuguuuuucaaaaacguu

SEQ ID NO: 2147978 - RNA, 19 nt, Human herpesvirus 7
gugcagagaugaaggaagc

SEQ ID NO: 2147979 - RNA, 21 nt, Human herpesvirus 7
gcaaagucucauucaugcaca

SEQ ID NO: 2147980 - RNA, 22 nt, Human herpesvirus 7
aaacuucugauuggucguugcu

SEQ ID NO: 2147981 - RNA, 17 nt, Human herpesvirus 7
aaccaauuaauauuaau

SEQ ID NO: 2147982 - RNA, 15 nt, Human herpesvirus 7
agcuuaaaaaauaca

SEQ ID NO: 2147983 - RNA, 14 nt, Human herpesvirus 7
acuauuugacuggg

SEQ ID NO: 2147984 - RNA, 15 nt, Human herpesvirus 7
ucccagaaauuucaa

SEQ ID NO: 2147985 - RNA, 18 nt, Human herpesvirus 7
cauaauucaaucugcaaa

SEQ ID NO: 2147986 - RNA, 12 nt, Human herpesvirus 7
auuuacuugauu

SEQ ID NO: 2147987 - RNA, 20 nt, Human herpesvirus 7
agacaucuuccacaaaaauu

SEQ ID NO: 2147988 - RNA, 12 nt, Human herpesvirus 7
uuauagaaguac

SEQ ID NO: 2147989 - RNA, 16 nt, Human herpesvirus 7
guuacccaaaauguaa

SEQ ID NO: 2147990 - RNA, 18 nt, Human herpesvirus 7
ugacaccguuuugaaaag

SEQ ID NO: 2147991 - RNA, 17 nt, Human herpesvirus 7
aucuuuuucaaauggau

SEQ ID NO: 2147992 - RNA, 21 nt, Human herpesvirus 7
aaugagauuuuucccaaaaua

SEQ ID NO: 2147993 - RNA, 21 nt, Human herpesvirus 7
ugaguguggugacagaaguaa

SEQ ID NO: 2147994 - RNA, 23 nt, Human herpesvirus 7
aucuaggucuuccacuguuguag

SEQ ID NO: 2147995 - RNA, 15 nt, Human herpesvirus 7
aaagucagaacauug

SEQ ID NO: 2147996 - RNA, 17 nt, Human herpesvirus 7
uccauuuccucaauuuu

SEQ ID NO: 2147997 - RNA, 15 nt, Human herpesvirus 7
auauaauaaaucguu

SEQ ID NO: 2147998 - RNA, 14 nt, Human herpesvirus 7
gacgacgucuucuu

SEQ ID NO: 2147999 - RNA, 22 nt, Human herpesvirus 7
gucagaacaucccuggacagag

SEQ ID NO: 2148000 - RNA, 20 nt, Human herpesvirus 7
caauuaauucaguuuacugu

SEQ ID NO: 2148001 - RNA, 20 nt, Human herpesvirus 7
ugccuuucccagaagaaugg

SEQ ID NO: 2148002 - RNA, 17 nt, Human herpesvirus 7
gaaaugucaagaacuuc

SEQ ID NO: 2148003 - RNA, 21 nt, Human herpesvirus 7
aaugugguaaauuugcuugcu

SEQ ID NO: 2148004 - RNA, 15 nt, Human herpesvirus 7
uaaauaaaaugguug

SEQ ID NO: 2148005 - RNA, 16 nt, Human herpesvirus 7
ccucagaacuguuuua

SEQ ID NO: 2148006 - RNA, 16 nt, Human herpesvirus 7
agugauugguagaaau

SEQ ID NO: 2148007 - RNA, 17 nt, Human herpesvirus 7
uuacuuacgugaguguu

SEQ ID NO: 2148008 - RNA, 15 nt, Human herpesvirus 7
caggcugcaucuuuu

SEQ ID NO: 2148009 - RNA, 15 nt, Human herpesvirus 7
acgcucucaaucaaa

SEQ ID NO: 2148010 - RNA, 14 nt, Human herpesvirus 7
aacuaggaaacaca

SEQ ID NO: 2148011 - RNA, 18 nt, Human herpesvirus 7
uagaacaaacuguaccca

SEQ ID NO: 2148012 - RNA, 16 nt, Human herpesvirus 7
uuaagguggaaaucuu

SEQ ID NO: 2148013 - RNA, 21 nt, Human herpesvirus 7
auuucguuuucuuuggguaca

SEQ ID NO: 2148014 - RNA, 21 nt, Human herpesvirus 7
uguguauuuuuuaaagaaaag

SEQ ID NO: 2148015 - RNA, 13 nt, Human herpesvirus 7
ugcggaagaacaa

SEQ ID NO: 2148016 - RNA, 18 nt, Human herpesvirus 7
uuuauuuucuuaacaauu

SEQ ID NO: 2148017 - RNA, 15 nt, Human herpesvirus 7
ugauuuuuuaaaugu

SEQ ID NO: 2148018 - RNA, 20 nt, Human herpesvirus 7
cuucaauucaccaauuucua

SEQ ID NO: 2148019 - RNA, 14 nt, Human herpesvirus 7
uaugcaagaaaguc

SEQ ID NO: 2148020 - RNA, 21 nt, Human herpesvirus 7
aaaaaagugauugcagauugu

SEQ ID NO: 2148021 - RNA, 20 nt, Human herpesvirus 7
auguuucaucaauguuuuca

SEQ ID NO: 2148022 - RNA, 13 nt, Human herpesvirus 7
aucgcucaacuua

SEQ ID NO: 2148023 - RNA, 17 nt, Human herpesvirus 7
gagauauuauuaaaaaa

SEQ ID NO: 2148024 - RNA, 13 nt, Human herpesvirus 7
ucauaccauaaau

SEQ ID NO: 2148025 - RNA, 15 nt, Human herpesvirus 7
gguaauagcuuuaaa

SEQ ID NO: 2148026 - RNA, 18 nt, Human herpesvirus 7
acauuuaugaaaaacaaa

SEQ ID NO: 2148027 - RNA, 16 nt, Human herpesvirus 7
ggaaccguuugcagcc

SEQ ID NO: 2148028 - RNA, 18 nt, Human herpesvirus 7
cugagacgauaugaauuu

SEQ ID NO: 2148029 - RNA, 20 nt, Human herpesvirus 7
aaucuuggcauugaaauucu

SEQ ID NO: 2148030 - RNA, 22 nt, Human herpesvirus 7
ucuuucaacugauauaaaugcu

SEQ ID NO: 2148031 - RNA, 21 nt, Human herpesvirus 7
uuaaugguaccuuagaaucac

SEQ ID NO: 2148032 - RNA, 14 nt, Human herpesvirus 7
cuucaaagauaccu

SEQ ID NO: 2148033 - RNA, 13 nt, Human herpesvirus 7
ugucauaaaauua

SEQ ID NO: 2148034 - RNA, 23 nt, Human herpesvirus 7
cuuuucaggcuaugacuuugaau

SEQ ID NO: 2148035 - RNA, 21 nt, Human herpesvirus 7
ucaaacaauugcccuuguguu

SEQ ID NO: 2148036 - RNA, 22 nt, Human herpesvirus 7
auacugauguaaaauuaauuca

SEQ ID NO: 2148037 - RNA, 15 nt, Human herpesvirus 7
cauuuaaaaaaucug

SEQ ID NO: 2148038 - RNA, 17 nt, Human herpesvirus 7
cuauguccaaaaauuua

SEQ ID NO: 2148039 - RNA, 17 nt, Human herpesvirus 7
agggauuucuucuucua

SEQ ID NO: 2148040 - RNA, 14 nt, Human herpesvirus 7
uguucuaucaagau

SEQ ID NO: 2148041 - RNA, 21 nt, Human herpesvirus 7
ccucagaacuguuuuaaugua

SEQ ID NO: 2148042 - RNA, 19 nt, Human herpesvirus 7
uuccaaaaucaaguguuuc

SEQ ID NO: 2148043 - RNA, 21 nt, Human herpesvirus 7
ugaucaaaaucuguagaaaau

SEQ ID NO: 2148044 - RNA, 21 nt, Human herpesvirus 7
acagcaaauucacgcucucaa

SEQ ID NO: 2148045 - RNA, 16 nt, Human herpesvirus 7
gggcuggagcuuuaaa

SEQ ID NO: 2148046 - RNA, 17 nt, Human herpesvirus 7
caaauucaaccacagac

SEQ ID NO: 2148047 - RNA, 14 nt, Human herpesvirus 7
acguagaaaaaaac

SEQ ID NO: 2148048 - RNA, 15 nt, Human herpesvirus 7
aucuuucauaacaaa

SEQ ID NO: 2148049 - RNA, 21 nt, Human herpesvirus 7
agcuugaaaacuuagugauga

SEQ ID NO: 2148050 - RNA, 14 nt, Human herpesvirus 7
aauaugcauggaga

SEQ ID NO: 2148051 - RNA, 13 nt, Human herpesvirus 7
cguaucugugacu

SEQ ID NO: 2148052 - RNA, 13 nt, Human herpesvirus 7
aaaaucagaaaug

SEQ ID NO: 2148053 - RNA, 19 nt, Human herpesvirus 7
aaauuauuaauauuaguau

SEQ ID NO: 2148054 - RNA, 20 nt, Human herpesvirus 7
uauuuuuuaaagaaaagcuu

SEQ ID NO: 2148055 - RNA, 13 nt, Human herpesvirus 7
ucacaauggaaag

SEQ ID NO: 2148056 - RNA, 15 nt, Human herpesvirus 7
caugauguuaaagaa

SEQ ID NO: 2148057 - RNA, 15 nt, Human herpesvirus 7
ccucugccucuuggc

SEQ ID NO: 2148058 - RNA, 19 nt, Human herpesvirus 7
aagaauuuucugcuuuaag

SEQ ID NO: 2148059 - RNA, 13 nt, Human herpesvirus 7
uauuaaaaaccac

SEQ ID NO: 2148060 - RNA, 17 nt, Human herpesvirus 7
gucagaacuuuuaaaaa

SEQ ID NO: 2148061 - RNA, 17 nt, Human herpesvirus 7
gauacauuuuugcaaua

SEQ ID NO: 2148062 - RNA, 17 nt, Human herpesvirus 7
caguaucacuuaaagca

SEQ ID NO: 2148063 - RNA, 17 nt, Human herpesvirus 7
aacucugucaucaaaau

SEQ ID NO: 2148064 - RNA, 14 nt, Human herpesvirus 7
aucauuaaaaugau

SEQ ID NO: 2148065 - RNA, 16 nt, Human herpesvirus 7
auuguuaccgguuaaa

SEQ ID NO: 2148066 - RNA, 19 nt, Human herpesvirus 7
aauaugaugaaacuuccaa

SEQ ID NO: 2148067 - RNA, 14 nt, Human herpesvirus 7
uggaacaugaaaac

SEQ ID NO: 2148068 - RNA, 22 nt, Human herpesvirus 7
caacauuuguguguaugugcag

SEQ ID NO: 2148069 - RNA, 18 nt, Human herpesvirus 7
cgguaacaugucuucaac

SEQ ID NO: 2148070 - RNA, 20 nt, Human herpesvirus 7
ugaaaaagccauaaaaugua

SEQ ID NO: 2148071 - RNA, 13 nt, Human herpesvirus 7
aaugcaugaugca

SEQ ID NO: 2148072 - RNA, 22 nt, Human herpesvirus 7
aguuuuuaaacuuaucagauuc

SEQ ID NO: 2148073 - RNA, 17 nt, Human herpesvirus 7
gacgcuugcuauuuucu

SEQ ID NO: 2148074 - RNA, 18 nt, Human herpesvirus 7
cacgaucgucaucuucuc

SEQ ID NO: 2148075 - RNA, 14 nt, Human herpesvirus 7
uaaauaaaaauuug

SEQ ID NO: 2148076 - RNA, 22 nt, Human herpesvirus 7
gugagaaauggaaaccuggaga

SEQ ID NO: 2148077 - RNA, 18 nt, Human herpesvirus 7
acuucuuugacaaaaaug

SEQ ID NO: 2148078 - RNA, 15 nt, Human herpesvirus 7
guaggauugaaagua

SEQ ID NO: 2148079 - RNA, 15 nt, Human herpesvirus 7
cuuucguuuucuaaa

SEQ ID NO: 2148080 - RNA, 22 nt, Human herpesvirus 7
gaagauuuguuccaaacucgag

SEQ ID NO: 2148081 - RNA, 14 nt, Human herpesvirus 7
aucaaaacauauca

SEQ ID NO: 2148082 - RNA, 13 nt, Human herpesvirus 7
uuguacuucugug

SEQ ID NO: 2148083 - RNA, 13 nt, Human herpesvirus 7
aauaagcaaauaa

SEQ ID NO: 2148084 - RNA, 16 nt, Human herpesvirus 7
aaauguguaacaauug

SEQ ID NO: 2148085 - RNA, 17 nt, Human herpesvirus 7
cacaauuguauuucagu

SEQ ID NO: 2148086 - RNA, 19 nt, Human herpesvirus 7
cauuccuauuaagcagcuu

SEQ ID NO: 2148087 - RNA, 23 nt, Human herpesvirus 7
uaauacauggggcauuaauucuu

SEQ ID NO: 2148088 - RNA, 20 nt, Human herpesvirus 7
agcuucaaaaauguuuacaa

SEQ ID NO: 2148089 - RNA, 20 nt, Human herpesvirus 7
caagucaucgguuuucugag

SEQ ID NO: 2148090 - RNA, 24 nt, Human herpesvirus 7
uuguuaggccaguucuaucucaaa

SEQ ID NO: 2148091 - RNA, 20 nt, Human herpesvirus 7
gcacugggagcaaugcauga

SEQ ID NO: 2148092 - RNA, 17 nt, Human herpesvirus 7
ccagaaauuaaauacaa

SEQ ID NO: 2148093 - RNA, 17 nt, Human herpesvirus 7
cuagcaccgaaaauggu

SEQ ID NO: 2148094 - RNA, 14 nt, Human herpesvirus 7
uuaagaaauaaaag

SEQ ID NO: 2148095 - RNA, 16 nt, Human herpesvirus 7
ugaacaaauaaugagu

SEQ ID NO: 2148096 - RNA, 20 nt, Human herpesvirus 7
uacacaggaauugcugucua

SEQ ID NO: 2148097 - RNA, 19 nt, Human herpesvirus 7
guuaauugugguacaacaa

SEQ ID NO: 2148098 - RNA, 15 nt, Human herpesvirus 7
acuacaugaauggau

SEQ ID NO: 2148099 - RNA, 15 nt, Human herpesvirus 7
cugaaaauaaaagag

SEQ ID NO: 2148100 - RNA, 19 nt, Human herpesvirus 7
auuaaacagcauuuucucu

SEQ ID NO: 2148101 - RNA, 21 nt, Human herpesvirus 7
uuaacaugccugcaauaugca

SEQ ID NO: 2148102 - RNA, 15 nt, Human herpesvirus 7
auauaucugauguag

SEQ ID NO: 2148103 - RNA, 20 nt, Human herpesvirus 7
gauccaucuguaacagaccu

SEQ ID NO: 2148104 - RNA, 16 nt, Human herpesvirus 7
cucccauucaauaaug

SEQ ID NO: 2148105 - RNA, 20 nt, Human herpesvirus 7
gacuuaucaaucuauuucua

SEQ ID NO: 2148106 - RNA, 17 nt, Human herpesvirus 7
uaaauuuaaaauuuaua

SEQ ID NO: 2148107 - RNA, 17 nt, Human herpesvirus 7
aguaucacuuaaagcag

SEQ ID NO: 2148108 - RNA, 23 nt, Human herpesvirus 7
auugcuucagaaauaacaaaauu

SEQ ID NO: 2148109 - RNA, 17 nt, Human herpesvirus 7
gauauaguuuguuucaa

SEQ ID NO: 2148110 - RNA, 14 nt, Human herpesvirus 7
gaauuaauaaaaca

SEQ ID NO: 2148111 - RNA, 16 nt, Human herpesvirus 7
aagguugaguugacaa

SEQ ID NO: 2148112 - RNA, 20 nt, Human herpesvirus 7
uaauucucgcuucaaagaua

SEQ ID NO: 2148113 - RNA, 16 nt, Human herpesvirus 7
augucugauucuuauu

SEQ ID NO: 2148114 - RNA, 11 nt, Human herpesvirus 7
auauaugaauc

SEQ ID NO: 2148115 - RNA, 12 nt, Human herpesvirus 7
aaaaucaaaugu

SEQ ID NO: 2148116 - RNA, 15 nt, Human herpesvirus 7
uuaaaaguucauaau

SEQ ID NO: 2148117 - RNA, 22 nt, Human herpesvirus 7
agaaaucccaaaaaaaauuagu

SEQ ID NO: 2148118 - RNA, 22 nt, Human herpesvirus 7
ugcuuguaggcagaaaugucuu

SEQ ID NO: 2148119 - RNA, 23 nt, Human herpesvirus 7
augacacgacacugaaugucaac

SEQ ID NO: 2148120 - RNA, 20 nt, Human herpesvirus 7
acaugauugguaaaaaauua

SEQ ID NO: 2148121 - RNA, 13 nt, Human herpesvirus 7
auuuaugcuuuaa

SEQ ID NO: 2148122 - RNA, 15 nt, Human herpesvirus 7
ucguuuucaaagugu

SEQ ID NO: 2148123 - RNA, 15 nt, Human herpesvirus 7
uuaauaauauuagua

SEQ ID NO: 2148124 - RNA, 21 nt, Human herpesvirus 7
uuaauuguuuuuuauuuagcu

SEQ ID NO: 2148125 - RNA, 21 nt, Human herpesvirus 7
uacuuaaggcggacaaauaua

SEQ ID NO: 2148126 - RNA, 16 nt, Human herpesvirus 7
aguccaauaguaaugu

SEQ ID NO: 2148127 - RNA, 13 nt, Human herpesvirus 7
cuguugccagaaa

SEQ ID NO: 2148128 - RNA, 14 nt, Human herpesvirus 7
aauuaugaguaaag

SEQ ID NO: 2148129 - RNA, 19 nt, Human herpesvirus 7
caaauagaguuuaauugua

SEQ ID NO: 2148130 - RNA, 13 nt, Human herpesvirus 7
ugaaugaacaaau

SEQ ID NO: 2148131 - RNA, 21 nt, Human herpesvirus 7
acaauuugaagaggagaauuc

SEQ ID NO: 2148132 - RNA, 17 nt, Human herpesvirus 7
agauggcacaauuguaa

SEQ ID NO: 2148133 - RNA, 19 nt, Human herpesvirus 7
ugcucauguugacgggaaa

SEQ ID NO: 2148134 - RNA, 16 nt, Human herpesvirus 7
aguauguccaaucaaa

SEQ ID NO: 2148135 - RNA, 23 nt, Human herpesvirus 7
ucuguacccaugggcacauuugu

SEQ ID NO: 2148136 - RNA, 23 nt, Human herpesvirus 7
agcugcauguguacuaaagccaa

SEQ ID NO: 2148137 - RNA, 14 nt, Human herpesvirus 7
aguugaaaauguuu

SEQ ID NO: 2148138 - RNA, 13 nt, Human herpesvirus 7
cgaacccuggaga

SEQ ID NO: 2148139 - RNA, 20 nt, Human herpesvirus 7
cuaauagaaaaauguacaau

SEQ ID NO: 2148140 - RNA, 19 nt, Human herpesvirus 7
gcaacuuugugccugaaau

SEQ ID NO: 2148141 - RNA, 16 nt, Human herpesvirus 7
cuacaccaauaguugu

SEQ ID NO: 2148142 - RNA, 23 nt, Human herpesvirus 7
gugaacuguuacaguuaaagacg

SEQ ID NO: 2148143 - RNA, 18 nt, Human herpesvirus 7
uucagaauagacaucuuc

SEQ ID NO: 2148144 - RNA, 19 nt, Human herpesvirus 7
cuuucuggaguucaguaaa

SEQ ID NO: 2148145 - RNA, 19 nt, Human herpesvirus 7
aauauuuaaaguagcugaa

SEQ ID NO: 2148146 - RNA, 16 nt, Human herpesvirus 7
acugaagcauggauuu

SEQ ID NO: 2148147 - RNA, 21 nt, Human herpesvirus 7
auuucagaaaauaaaaguaaa

SEQ ID NO: 2148148 - RNA, 20 nt, Human herpesvirus 7
caaagaacauguaguacaau

SEQ ID NO: 2148149 - RNA, 17 nt, Human herpesvirus 7
agcaauacauucucaaa

SEQ ID NO: 2148150 - RNA, 20 nt, Human herpesvirus 7
agggggacaauuauuuaaac

SEQ ID NO: 2148151 - RNA, 16 nt, Human herpesvirus 7
aucccugcugauacaa

SEQ ID NO: 2148152 - RNA, 17 nt, Human herpesvirus 7
ucaacuugaaugagcug

SEQ ID NO: 2148153 - RNA, 16 nt, Human herpesvirus 7
uugugaaguuugcuga

SEQ ID NO: 2148154 - RNA, 20 nt, Human herpesvirus 7
ucauccaaaaagaaacuuuc

SEQ ID NO: 2148155 - RNA, 17 nt, Human herpesvirus 7
uucauuggcauuauucu

SEQ ID NO: 2148156 - RNA, 21 nt, Human herpesvirus 7
uguguuggaaacuauucgaaa

SEQ ID NO: 2148157 - RNA, 18 nt, Human herpesvirus 7
gaacuucagauuuuaguu

SEQ ID NO: 2148158 - RNA, 18 nt, Human herpesvirus 7
gugaagacuacauaaagg

SEQ ID NO: 2148159 - RNA, 19 nt, Human herpesvirus 7
cauauuuuuaaauuugucu

SEQ ID NO: 2148160 - RNA, 13 nt, Human herpesvirus 7
gggaaacaucuuu

SEQ ID NO: 2148161 - RNA, 18 nt, Human herpesvirus 7
ugcaauuaaaauguacau

SEQ ID NO: 2148162 - RNA, 22 nt, Human herpesvirus 7
cacauuccaaaaucaaguguuu

SEQ ID NO: 2148163 - RNA, 19 nt, Human herpesvirus 7
acuuauuccagauaugaca

SEQ ID NO: 2148164 - RNA, 20 nt, Human herpesvirus 7
gcauggaucguagcaacaga

SEQ ID NO: 2148165 - RNA, 20 nt, Human herpesvirus 7
uaugccacaaaaaacuuuga

SEQ ID NO: 2148166 - RNA, 21 nt, Human herpesvirus 7
aaucuauauuugauugaucgu

SEQ ID NO: 2148167 - RNA, 18 nt, Human herpesvirus 7
uugaagaacaacaugaaa

SEQ ID NO: 2148168 - RNA, 23 nt, Human herpesvirus 7
cuaucuccuaaaugaauuuuaag

SEQ ID NO: 2148169 - RNA, 21 nt, Human herpesvirus 7
uaauuguuuuuuauuuagcua

SEQ ID NO: 2148170 - RNA, 23 nt, Human herpesvirus 7
aacagauuuuauuucagcuccau

SEQ ID NO: 2148171 - RNA, 19 nt, Human herpesvirus 7
ugauuuuuuaguauucuca

SEQ ID NO: 2148172 - RNA, 21 nt, Human herpesvirus 7
uuuagauuccagucuacauau

SEQ ID NO: 2148173 - RNA, 15 nt, Human herpesvirus 7
gccauaaaugcuuaa

SEQ ID NO: 2148174 - RNA, 12 nt, Human herpesvirus 7
aaaucuguaaaa

SEQ ID NO: 2148175 - RNA, 18 nt, Human herpesvirus 7
cuuugacuguaucuccaa

SEQ ID NO: 2148176 - RNA, 15 nt, Human herpesvirus 7
agaaaaaaacaauga

SEQ ID NO: 2148177 - RNA, 22 nt, Human herpesvirus 7
aaagaugauuggauuuucugua

SEQ ID NO: 2148178 - RNA, 20 nt, Human herpesvirus 7
acaaaacugcucauauuaac

SEQ ID NO: 2148179 - RNA, 24 nt, Human herpesvirus 7
cagcaauguauauaagcagacacc

SEQ ID NO: 2148180 - RNA, 15 nt, Human herpesvirus 7
aaaauguuuaaauua

SEQ ID NO: 2148181 - RNA, 18 nt, Human herpesvirus 7
gaagaaucaagacgcugu

SEQ ID NO: 2148182 - RNA, 14 nt, Human herpesvirus 7
cugcuugucucugu

SEQ ID NO: 2148183 - RNA, 21 nt, Human herpesvirus 7
caacuagagaagccacuucua

SEQ ID NO: 2148184 - RNA, 17 nt, Human herpesvirus 7
caauuuuaaugugcuua

SEQ ID NO: 2148185 - RNA, 17 nt, Human herpesvirus 7
uuggacuguuagacuuu

SEQ ID NO: 2148186 - RNA, 19 nt, Human herpesvirus 7
uagcauaugcuggaucuuc

SEQ ID NO: 2148187 - RNA, 19 nt, Human herpesvirus 7
aaauaaacauguugaaaga

SEQ ID NO: 2148188 - RNA, 20 nt, Human herpesvirus 7
uuaaaaguacaaauguuuua

SEQ ID NO: 2148189 - RNA, 22 nt, Human herpesvirus 7
guagauggcaccaauagaaaac

SEQ ID NO: 2148190 - RNA, 14 nt, Human herpesvirus 7
uaaaggaaacauuu

SEQ ID NO: 2148191 - RNA, 14 nt, Human herpesvirus 7
aucgaugagaaugu

SEQ ID NO: 2148192 - RNA, 18 nt, Human herpesvirus 7
uuaugcaaacucacuaau

SEQ ID NO: 2148193 - RNA, 19 nt, Human herpesvirus 7
cugagagaaccugaaagaa

SEQ ID NO: 2148194 - RNA, 18 nt, Human herpesvirus 7
ggauuucuucuucuaaau

SEQ ID NO: 2148195 - RNA, 17 nt, Human herpesvirus 7
ggagauaguucgcaaug

SEQ ID NO: 2148196 - RNA, 19 nt, Human herpesvirus 7
auuuaacauguguauauuu

SEQ ID NO: 2148197 - RNA, 11 nt, Human herpesvirus 7
cuaugauacaa

SEQ ID NO: 2148198 - RNA, 20 nt, Human herpesvirus 7
augauugguaaaaaauuacu

SEQ ID NO: 2148199 - RNA, 16 nt, Human herpesvirus 7
uuaugugguuaaagau

SEQ ID NO: 2148200 - RNA, 12 nt, Human herpesvirus 7
aauuuaaauacu

SEQ ID NO: 2148201 - RNA, 16 nt, Human herpesvirus 7
ucuuggguaauuuuaa

SEQ ID NO: 2148202 - RNA, 16 nt, Human herpesvirus 7
agaaugcucuuuugaa

SEQ ID NO: 2148203 - RNA, 20 nt, Human herpesvirus 7
ucuuauaaauaaaauguuuu

SEQ ID NO: 2148204 - RNA, 18 nt, Human herpesvirus 7
cuuucuauuguaugggaa

SEQ ID NO: 2148205 - RNA, 17 nt, Human herpesvirus 7
caaguguuucuuugaau

SEQ ID NO: 2148206 - RNA, 22 nt, Human herpesvirus 7
gaauggcgguuguacuguaauu

SEQ ID NO: 2148207 - RNA, 20 nt, Human herpesvirus 7
acagcauauaucuuugauua

SEQ ID NO: 2148208 - RNA, 15 nt, Human herpesvirus 7
cgacaaacagaaaaa

SEQ ID NO: 2148209 - RNA, 13 nt, Human herpesvirus 7
gcggcucucuguu

SEQ ID NO: 2148210 - RNA, 21 nt, Human herpesvirus 7
cuuagaauauuuauguucaaa

SEQ ID NO: 2148211 - RNA, 14 nt, Human herpesvirus 7
uaaaagcauaugug

SEQ ID NO: 2148212 - RNA, 17 nt, Human herpesvirus 7
aacuuugauuugagaaa

SEQ ID NO: 2148213 - RNA, 16 nt, Human herpesvirus 7
agcuuguuaaagaaaa

SEQ ID NO: 2148214 - RNA, 14 nt, Human herpesvirus 7
aacaguuaaugugu

SEQ ID NO: 2148215 - RNA, 16 nt, Human herpesvirus 7
gacgcuguaugcaaga

SEQ ID NO: 2148216 - RNA, 19 nt, Human herpesvirus 7
caaauguuuuaauuuggaa

SEQ ID NO: 2148217 - RNA, 17 nt, Human herpesvirus 7
gaauuccagauuuucug

SEQ ID NO: 2148218 - RNA, 22 nt, Human herpesvirus 7
uaaaguacccgcuuauuaguga

SEQ ID NO: 2148219 - RNA, 22 nt, Human herpesvirus 7
uuacugccaccauuucugaaac

SEQ ID NO: 2148220 - RNA, 21 nt, Human herpesvirus 7
aagauuuuaacauaccuaaag

SEQ ID NO: 2148221 - RNA, 22 nt, Human herpesvirus 7
agucgaaaugaaaagucuguga

SEQ ID NO: 2148222 - RNA, 19 nt, Human herpesvirus 7
cauuacuggauguauaaau

SEQ ID NO: 2148223 - RNA, 17 nt, Human herpesvirus 7
cuaguucccauuuucag

SEQ ID NO: 2148224 - RNA, 19 nt, Human herpesvirus 7
gauauuguacuucuguguu

SEQ ID NO: 2148225 - RNA, 24 nt, Human herpesvirus 7
caaaauucaacgucuuacuuggaa

SEQ ID NO: 2148226 - RNA, 13 nt, Human herpesvirus 7
ugaauuugaaacu

SEQ ID NO: 2148227 - RNA, 14 nt, Human herpesvirus 7
uaaauucugaaaua

SEQ ID NO: 2148228 - RNA, 14 nt, Human herpesvirus 7
cuauucuauuucaa

SEQ ID NO: 2148229 - RNA, 13 nt, Human herpesvirus 7
auuagugccugca

SEQ ID NO: 2148230 - RNA, 21 nt, Human herpesvirus 7
aacuguuaaaaucuguucccc

SEQ ID NO: 2148231 - RNA, 14 nt, Human herpesvirus 7
gauucuaaauuaaa

SEQ ID NO: 2148232 - RNA, 14 nt, Human herpesvirus 7
auugcuuuuagaaa

SEQ ID NO: 2148233 - RNA, 15 nt, Human herpesvirus 7
cacuguugaugauuu

SEQ ID NO: 2148234 - RNA, 15 nt, Human herpesvirus 7
augcugauuccuucu

SEQ ID NO: 2148235 - RNA, 21 nt, Human herpesvirus 7
ugagaaucauagcaggaagca

SEQ ID NO: 2148236 - RNA, 17 nt, Human herpesvirus 7
guuuucugagugcuaaa

SEQ ID NO: 2148237 - RNA, 18 nt, Human herpesvirus 7
uacuugauuuucuuacac

SEQ ID NO: 2148238 - RNA, 22 nt, Human herpesvirus 7
caaagaaaaaaggaugaaagug

SEQ ID NO: 2148239 - RNA, 21 nt, Human herpesvirus 7
uuuugcuacuauacucuugca

SEQ ID NO: 2148240 - RNA, 21 nt, Human herpesvirus 7
aagauuuguuccaaacucgag

SEQ ID NO: 2148241 - RNA, 18 nt, Human herpesvirus 7
cuauaucaucaucuuuuu

SEQ ID NO: 2148242 - RNA, 23 nt, Human herpesvirus 7
aauucuauuuuaaaaaccaugaa

SEQ ID NO: 2148243 - RNA, 19 nt, Human herpesvirus 7
acuacauuuaaaaaaucug

SEQ ID NO: 2148244 - RNA, 14 nt, Human herpesvirus 7
uuagaauuuuuucu

SEQ ID NO: 2148245 - RNA, 20 nt, Human herpesvirus 7
aauuguuugaucaaaaucug

SEQ ID NO: 2148246 - RNA, 20 nt, Human herpesvirus 7
agugaagcuugcuuaaaacu

SEQ ID NO: 2148247 - RNA, 17 nt, Human herpesvirus 7
cgaaaugaaaagucugu

SEQ ID NO: 2148248 - RNA, 20 nt, Human herpesvirus 7
aacucaauaaagauugauca

SEQ ID NO: 2148249 - RNA, 21 nt, Human herpesvirus 7
uuagaaucacaacauauagau

SEQ ID NO: 2148250 - RNA, 21 nt, Human herpesvirus 7
agaauguucgcaaauguacaa

SEQ ID NO: 2148251 - RNA, 15 nt, Human herpesvirus 7
gaugucaaccuuuua

SEQ ID NO: 2148252 - RNA, 12 nt, Human herpesvirus 7
aucaaaaaauuu

SEQ ID NO: 2148253 - RNA, 16 nt, Human herpesvirus 7
aaagcugcauguguac

SEQ ID NO: 2148254 - RNA, 22 nt, Human herpesvirus 7
uuguaacagauuuuauuucagc

SEQ ID NO: 2148255 - RNA, 15 nt, Human herpesvirus 7
ucauaaucaucuuuc

SEQ ID NO: 2148256 - RNA, 15 nt, Human herpesvirus 7
uagaaauuaugaaaa

SEQ ID NO: 2148257 - RNA, 12 nt, Human herpesvirus 7
aucuauaaacau

SEQ ID NO: 2148258 - RNA, 13 nt, Human herpesvirus 7
cagaucucgaacu

SEQ ID NO: 2148259 - RNA, 19 nt, Human herpesvirus 7
acucggaaccgagaauguu

SEQ ID NO: 2148260 - RNA, 17 nt, Human herpesvirus 7
gaaaaguugcuuuucau

SEQ ID NO: 2148261 - RNA, 15 nt, Human herpesvirus 7
ugauaugauuuccug

SEQ ID NO: 2148262 - RNA, 15 nt, Human herpesvirus 7
agcuucaaaaauguu

SEQ ID NO: 2148263 - RNA, 16 nt, Human herpesvirus 7
gaucuacauauacuuu

SEQ ID NO: 2148264 - RNA, 14 nt, Human herpesvirus 7
auacagauauuuua

SEQ ID NO: 2148265 - RNA, 16 nt, Human herpesvirus 7
caaauucaaccacaga

SEQ ID NO: 2148266 - RNA, 19 nt, Human herpesvirus 7
agauuuuccaacgaaauuu

SEQ ID NO: 2148267 - RNA, 13 nt, Human herpesvirus 7
cuuggcuguucaa

SEQ ID NO: 2148268 - RNA, 14 nt, Human herpesvirus 7
aagacagaaaugaa

SEQ ID NO: 2148269 - RNA, 18 nt, Human herpesvirus 7
ccuuauauuaaaaaccac

SEQ ID NO: 2148270 - RNA, 22 nt, Human herpesvirus 7
aacguuaccguuuaaugaaaaa

SEQ ID NO: 2148271 - RNA, 14 nt, Human herpesvirus 7
agagauuaagguga

SEQ ID NO: 2148272 - RNA, 14 nt, Human herpesvirus 7
ggucacguucuaaa

SEQ ID NO: 2148273 - RNA, 22 nt, Human herpesvirus 7
uucucccgcagagauuaccugc

SEQ ID NO: 2148274 - RNA, 20 nt, Human herpesvirus 7
uucaaaaaccgggcuuuuuu

SEQ ID NO: 2148275 - RNA, 13 nt, Human herpesvirus 7
auacacuauuuua

SEQ ID NO: 2148276 - RNA, 13 nt, Human herpesvirus 7
uuacaaagaacau

SEQ ID NO: 2148277 - RNA, 20 nt, Human herpesvirus 7
acuguuuuucaaaaacguua

SEQ ID NO: 2148278 - RNA, 18 nt, Human herpesvirus 7
ugucugauucuuauucua

SEQ ID NO: 2148279 - RNA, 22 nt, Human herpesvirus 7
gcaacaaacaaauaauucaaaa

SEQ ID NO: 2148280 - RNA, 20 nt, Human herpesvirus 7
aauaacaauuauagaaacau

SEQ ID NO: 2148281 - RNA, 22 nt, Human herpesvirus 7
uccaguacgucuugcuguuugu

SEQ ID NO: 2148282 - RNA, 18 nt, Human herpesvirus 7
ugaaaacuuagugaugac

SEQ ID NO: 2148283 - RNA, 19 nt, Human herpesvirus 7
aggaaacacaauuguauuu

SEQ ID NO: 2148284 - RNA, 21 nt, Human herpesvirus 7
gauuguagagaauauuuauca

SEQ ID NO: 2148285 - RNA, 16 nt, Human herpesvirus 7
aaaucaguuguuggaa

SEQ ID NO: 2148286 - RNA, 20 nt, Human herpesvirus 7
guucaaccuuuuucugaaaa

SEQ ID NO: 2148287 - RNA, 18 nt, Human herpesvirus 7
ccgcucuuuuauuuucag

SEQ ID NO: 2148288 - RNA, 23 nt, Human herpesvirus 7
cuagccuauaauucucacagcuu

SEQ ID NO: 2148289 - RNA, 13 nt, Human herpesvirus 7
aauaaaacaaacu

SEQ ID NO: 2148290 - RNA, 15 nt, Human herpesvirus 7
ugcucaucaaauaag

SEQ ID NO: 2148291 - RNA, 14 nt, Human herpesvirus 7
aacaaacauuccaa

SEQ ID NO: 2148292 - RNA, 11 nt, Human herpesvirus 7
uugcuguuuuu

SEQ ID NO: 2148293 - RNA, 17 nt, Human herpesvirus 7
gucuuugucaugaugaa

SEQ ID NO: 2148294 - RNA, 19 nt, Human herpesvirus 7
uuugaagagcguguuuuga

SEQ ID NO: 2148295 - RNA, 17 nt, Human herpesvirus 7
cuuccgcauuuuguauu

SEQ ID NO: 2148296 - RNA, 22 nt, Human herpesvirus 7
ucuauuauuucuacacaaacga

SEQ ID NO: 2148297 - RNA, 17 nt, Human herpesvirus 7
caguguuuaaaauguua

SEQ ID NO: 2148298 - RNA, 14 nt, Human herpesvirus 7
gcuaugacuuugaa

SEQ ID NO: 2148299 - RNA, 15 nt, Human herpesvirus 7
uucuuugcaaucauu

SEQ ID NO: 2148300 - RNA, 20 nt, Human herpesvirus 7
auuuaucaggugcucuaaau

SEQ ID NO: 2148301 - RNA, 18 nt, Human herpesvirus 7
caaauuccuccugaaaau

SEQ ID NO: 2148302 - RNA, 13 nt, Human herpesvirus 7
acgcauucaaugg

SEQ ID NO: 2148303 - RNA, 20 nt, Human herpesvirus 7
aaaccacaaaaaucaaagua

SEQ ID NO: 2148304 - RNA, 15 nt, Human herpesvirus 7
aauuaaauacaaauu

SEQ ID NO: 2148305 - RNA, 12 nt, Human herpesvirus 7
cucuaguuuaau

SEQ ID NO: 2148306 - RNA, 16 nt, Human herpesvirus 7
uuugcugagucucugg

SEQ ID NO: 2148307 - RNA, 22 nt, Human herpesvirus 7
cucugccagucucuaaacuucu

SEQ ID NO: 2148308 - RNA, 16 nt, Human herpesvirus 7
aaacucacaauguuuu

SEQ ID NO: 2148309 - RNA, 15 nt, Human herpesvirus 7
uuauucauacguaag

SEQ ID NO: 2148310 - RNA, 18 nt, Human herpesvirus 7
ucuguaaaaacuuguuug

SEQ ID NO: 2148311 - RNA, 17 nt, Human herpesvirus 7
aaaaucucgaacagucc

SEQ ID NO: 2148312 - RNA, 17 nt, Human herpesvirus 7
caauguuagaaacaucu

SEQ ID NO: 2148313 - RNA, 16 nt, Human herpesvirus 7
auucaaauaagggaua

SEQ ID NO: 2148314 - RNA, 14 nt, Human herpesvirus 7
uggauacggcagcg

SEQ ID NO: 2148315 - RNA, 14 nt, Human herpesvirus 7
acuauaugaaaaca

SEQ ID NO: 2148316 - RNA, 16 nt, Human herpesvirus 7
aggauucggaaguaaa

SEQ ID NO: 2148317 - RNA, 22 nt, Human herpesvirus 7
cuugaauuccgauuuaagugaa

SEQ ID NO: 2148318 - RNA, 19 nt, Human herpesvirus 7
gcuuuagaguaugaguuug

SEQ ID NO: 2148319 - RNA, 22 nt, Human herpesvirus 7
ucauguuuuaugacucagacga

SEQ ID NO: 2148320 - RNA, 15 nt, Human herpesvirus 7
ugcgcggauuaagag

SEQ ID NO: 2148321 - RNA, 15 nt, Human herpesvirus 7
acauuccuugagaaa

SEQ ID NO: 2148322 - RNA, 11 nt, Human herpesvirus 7
cuuugacaaag

SEQ ID NO: 2148323 - RNA, 14 nt, Human herpesvirus 7
guuccuaaauaauu

SEQ ID NO: 2148324 - RNA, 17 nt, Human herpesvirus 7
uuucauauuuagacuuu

SEQ ID NO: 2148325 - RNA, 22 nt, Human herpesvirus 7
guuuggcaacaaacaaauaauu

SEQ ID NO: 2148326 - RNA, 17 nt, Human herpesvirus 7
augccugcaauaugcau

SEQ ID NO: 2148327 - RNA, 9 nt, Human herpesvirus 7
aaauuuaaa

SEQ ID NO: 2148328 - RNA, 17 nt, Human herpesvirus 7
uuaccuuuguuaacaug

SEQ ID NO: 2148329 - RNA, 21 nt, Human herpesvirus 7
uuggagucguucuauguauga

SEQ ID NO: 2148330 - RNA, 19 nt, Human herpesvirus 7
acaucuuccacaaaaauuu

SEQ ID NO: 2148331 - RNA, 20 nt, Human herpesvirus 7
gcaugcguaaaaaaucaagu

SEQ ID NO: 2148332 - RNA, 20 nt, Human herpesvirus 7
cauuuuauucaaagcuucua

SEQ ID NO: 2148333 - RNA, 17 nt, Human herpesvirus 7
auuagagcauauuccau

SEQ ID NO: 2148334 - RNA, 15 nt, Human herpesvirus 7
uccuuucguuuucaa

SEQ ID NO: 2148335 - RNA, 14 nt, Human herpesvirus 7
ucacauuuaugaaa

SEQ ID NO: 2148336 - RNA, 19 nt, Human herpesvirus 7
cgaacaucgagauuccaaa

SEQ ID NO: 2148337 - RNA, 21 nt, Human herpesvirus 7
ucuuaugccagguuuuucaaa

SEQ ID NO: 2148338 - RNA, 20 nt, Human herpesvirus 7
uagaacagcugaaacucauc

SEQ ID NO: 2148339 - RNA, 17 nt, Human herpesvirus 7
augaugacaaaaaauuu

SEQ ID NO: 2148340 - RNA, 13 nt, Human herpesvirus 7
guuuuaaaguaug

SEQ ID NO: 2148341 - RNA, 19 nt, Human herpesvirus 7
cgauccucagaauguacac

SEQ ID NO: 2148342 - RNA, 19 nt, Human herpesvirus 7
uaauaauuuaaaauuauua

SEQ ID NO: 2148343 - RNA, 13 nt, Human herpesvirus 7
cagacagcuguau

SEQ ID NO: 2148344 - RNA, 17 nt, Human herpesvirus 7
ucugaaaaucuccuuga

SEQ ID NO: 2148345 - RNA, 18 nt, Human herpesvirus 7
auucuacauagaaaucuu

SEQ ID NO: 2148346 - RNA, 19 nt, Human herpesvirus 7
agucacaauuacacaaauu

SEQ ID NO: 2148347 - RNA, 16 nt, Human herpesvirus 7
ucggaaccgagaaugu

SEQ ID NO: 2148348 - RNA, 21 nt, Human herpesvirus 7
gaaaacaaucaauaagccucu

SEQ ID NO: 2148349 - RNA, 15 nt, Human herpesvirus 7
guaucuagagaaugu

SEQ ID NO: 2148350 - RNA, 23 nt, Human herpesvirus 7
uaagggauaucuuaaaaacaaug

SEQ ID NO: 2148351 - RNA, 22 nt, Human herpesvirus 7
caauauuuaaaguagcugaauu

SEQ ID NO: 2148352 - RNA, 19 nt, Human herpesvirus 7
auuucuuauaauuaugaug

SEQ ID NO: 2148353 - RNA, 18 nt, Human herpesvirus 7
caagaaggccacgcugua

SEQ ID NO: 2148354 - RNA, 18 nt, Human herpesvirus 7
agaaacucacaauguuuu

SEQ ID NO: 2148355 - RNA, 16 nt, Human herpesvirus 7
gcaauuuuagauuuua

SEQ ID NO: 2148356 - RNA, 21 nt, Human herpesvirus 7
gaaaauauauuccaacucaau

SEQ ID NO: 2148357 - RNA, 20 nt, Human herpesvirus 7
gcacaguauaaucuugugaa

SEQ ID NO: 2148358 - RNA, 15 nt, Human herpesvirus 7
aacugcaaauccaac

SEQ ID NO: 2148359 - RNA, 12 nt, Human herpesvirus 7
cguuacuucugu

SEQ ID NO: 2148360 - RNA, 12 nt, Human herpesvirus 7
guuaacauaugu

SEQ ID NO: 2148361 - RNA, 17 nt, Human herpesvirus 7
acaaucgauaaacuuug

SEQ ID NO: 2148362 - RNA, 22 nt, Human herpesvirus 7
auguacgaacuaagaaaaaaac

SEQ ID NO: 2148363 - RNA, 15 nt, Human herpesvirus 7
uauacaaaagacaua

SEQ ID NO: 2148364 - RNA, 20 nt, Human herpesvirus 7
ccaaaaguuguuaagaaucu

SEQ ID NO: 2148365 - RNA, 17 nt, Human herpesvirus 7
uuauaagaauuuggaua

SEQ ID NO: 2148366 - RNA, 19 nt, Human herpesvirus 7
cuagauugacuaugaauuu

SEQ ID NO: 2148367 - RNA, 21 nt, Human herpesvirus 7
uccauaaaacaugcaacauaa

SEQ ID NO: 2148368 - RNA, 20 nt, Human herpesvirus 7
ugauuguauuugucucugug

SEQ ID NO: 2148369 - RNA, 23 nt, Human herpesvirus 7
uaauuauucggugucuucuugca

SEQ ID NO: 2148370 - RNA, 19 nt, Human herpesvirus 7
uuaucaaguagaauaccag

SEQ ID NO: 2148371 - RNA, 23 nt, Human herpesvirus 7
ucuacacaaacgaguuucaaaau

SEQ ID NO: 2148372 - RNA, 22 nt, Human herpesvirus 7
cuacguguuuauacaaauuuua

SEQ ID NO: 2148373 - RNA, 21 nt, Human herpesvirus 7
cuuucuuuaccgauucuaaau

SEQ ID NO: 2148374 - RNA, 16 nt, Human herpesvirus 7
aaucaugaaaacagug

SEQ ID NO: 2148375 - RNA, 15 nt, Human herpesvirus 7
uacuacgguuuucag

SEQ ID NO: 2148376 - RNA, 14 nt, Human herpesvirus 7
guugaauucguuaa

SEQ ID NO: 2148377 - RNA, 15 nt, Human herpesvirus 7
aacaaguagugcuaa

SEQ ID NO: 2148378 - RNA, 22 nt, Human herpesvirus 7
uauuucgguuggaaaugaugau

SEQ ID NO: 2148379 - RNA, 18 nt, Human herpesvirus 7
aaagauuaaaaaaaaaag

SEQ ID NO: 2148380 - RNA, 20 nt, Human herpesvirus 7
gauagcauuagagcauauuc

SEQ ID NO: 2148381 - RNA, 15 nt, Human herpesvirus 7
gcucugaaaaaaucu

SEQ ID NO: 2148382 - RNA, 12 nt, Human herpesvirus 7
uccuauaaaagc

SEQ ID NO: 2148383 - RNA, 13 nt, Human herpesvirus 7
cuccuucuaccuc

SEQ ID NO: 2148384 - RNA, 17 nt, Human herpesvirus 7
agauuuaauaacaauuu

SEQ ID NO: 2148385 - RNA, 16 nt, Human herpesvirus 7
caaguagaaaaugcug

SEQ ID NO: 2148386 - RNA, 18 nt, Human herpesvirus 7
ucaggacaaucaaacaug

SEQ ID NO: 2148387 - RNA, 21 nt, Human herpesvirus 7
aaacaguagaacgagaaaacu

SEQ ID NO: 2148388 - RNA, 16 nt, Human herpesvirus 7
augauuuuuuaaaugu

SEQ ID NO: 2148389 - RNA, 14 nt, Human herpesvirus 7
ugugaacugauguu

SEQ ID NO: 2148390 - RNA, 12 nt, Human herpesvirus 7
uacauucucaaa

SEQ ID NO: 2148391 - RNA, 12 nt, Human herpesvirus 7
uuaauauuagua

SEQ ID NO: 2148392 - RNA, 14 nt, Human herpesvirus 7
ggaaccgagaaugu

SEQ ID NO: 2148393 - RNA, 22 nt, Human herpesvirus 7
cuaaccaucugcuggaaauuug

SEQ ID NO: 2148394 - RNA, 16 nt, Human herpesvirus 7
agaaguuuagagacug

SEQ ID NO: 2148395 - RNA, 16 nt, Human herpesvirus 7
auuccuuggaaaaaug

SEQ ID NO: 2148396 - RNA, 14 nt, Human herpesvirus 7
uucugaauaaaagu

SEQ ID NO: 2148397 - RNA, 23 nt, Human herpesvirus 7
aguggcuuaaguuuuuaaacuua

SEQ ID NO: 2148398 - RNA, 14 nt, Human herpesvirus 7
caaugcaaacuucu

SEQ ID NO: 2148399 - RNA, 18 nt, Human herpesvirus 7
uuauggauacaaggaaaa

SEQ ID NO: 2148400 - RNA, 20 nt, Human herpesvirus 7
acaguuuuuuaauacaaaau

SEQ ID NO: 2148401 - RNA, 16 nt, Human herpesvirus 7
gcuuacucuuucugac

SEQ ID NO: 2148402 - RNA, 22 nt, Human herpesvirus 7
ugcuuacgugaugccauaauuu

SEQ ID NO: 2148403 - RNA, 11 nt, Human herpesvirus 7
aaaaaauggag

SEQ ID NO: 2148404 - RNA, 12 nt, Human herpesvirus 7
gcuguuuggaaa

SEQ ID NO: 2148405 - RNA, 13 nt, Human herpesvirus 7
uaaacuugugaaa

SEQ ID NO: 2148406 - RNA, 20 nt, Human herpesvirus 7
aaaaauguuuacaaacaugu

SEQ ID NO: 2148407 - RNA, 21 nt, Human herpesvirus 7
uucgaauuuguucaauugcca

SEQ ID NO: 2148408 - RNA, 13 nt, Human herpesvirus 7
uacgucaucccug

SEQ ID NO: 2148409 - RNA, 21 nt, Human herpesvirus 7
uuacaagucaucgguuuucug

SEQ ID NO: 2148410 - RNA, 18 nt, Human herpesvirus 7
ucaaaaucagaaauguua

SEQ ID NO: 2148411 - RNA, 18 nt, Human herpesvirus 7
uuagcgaauuugugcugu

SEQ ID NO: 2148412 - RNA, 18 nt, Human herpesvirus 7
aucuguaaaauuuaaaua

SEQ ID NO: 2148413 - RNA, 16 nt, Human herpesvirus 7
agagaugaaaaaaauu

SEQ ID NO: 2148414 - RNA, 14 nt, Human herpesvirus 7
caugcaaaaaacag

SEQ ID NO: 2148415 - RNA, 15 nt, Human herpesvirus 7
auaaaaauuacucau

SEQ ID NO: 2148416 - RNA, 14 nt, Human herpesvirus 7
uaaagaacaucuug

SEQ ID NO: 2148417 - RNA, 22 nt, Human herpesvirus 7
uguauaaucuuaauguuucuga

SEQ ID NO: 2148418 - RNA, 13 nt, Human herpesvirus 7
uguauuugucucu

SEQ ID NO: 2148419 - RNA, 12 nt, Human herpesvirus 7
cauuuacaaaaa

SEQ ID NO: 2148420 - RNA, 14 nt, Human herpesvirus 7
agagaaaauguuua

SEQ ID NO: 2148421 - RNA, 15 nt, Human herpesvirus 7
gauguuaaagaacaa

SEQ ID NO: 2148422 - RNA, 15 nt, Human herpesvirus 7
uaacaugucuucaac

SEQ ID NO: 2148423 - RNA, 18 nt, Human herpesvirus 7
aauauggagcagcuuaag

SEQ ID NO: 2148424 - RNA, 17 nt, Human herpesvirus 7
cugaaaucaaaaaugug

SEQ ID NO: 2148425 - RNA, 17 nt, Human herpesvirus 7
aaagugacggaaguacu

SEQ ID NO: 2148426 - RNA, 17 nt, Human herpesvirus 7
uuuaaugcuuugucuua

SEQ ID NO: 2148427 - RNA, 15 nt, Human herpesvirus 7
gcaacacaaauuuag

SEQ ID NO: 2148428 - RNA, 23 nt, Human herpesvirus 7
aaagaaaaaaucuuuauguggga

SEQ ID NO: 2148429 - RNA, 15 nt, Human herpesvirus 7
guaaucauauaugca

SEQ ID NO: 2148430 - RNA, 14 nt, Human herpesvirus 7
cauugaaauucugu

SEQ ID NO: 2148431 - RNA, 14 nt, Human herpesvirus 7
ucuuagcaguaaac

SEQ ID NO: 2148432 - RNA, 21 nt, Human herpesvirus 7
cucaacgacaaacuuugcaac

SEQ ID NO: 2148433 - RNA, 22 nt, Human herpesvirus 7
aucuucugaaucugcaaagaaa

SEQ ID NO: 2148434 - RNA, 19 nt, Human herpesvirus 7
uuguaauuuggcuucuauu

SEQ ID NO: 2148435 - RNA, 12 nt, Human herpesvirus 7
cuggaauuguaa

SEQ ID NO: 2148436 - RNA, 17 nt, Human herpesvirus 7
accgugucuucugggaa

SEQ ID NO: 2148437 - RNA, 17 nt, Human herpesvirus 7
acucauacuaauagaaa

SEQ ID NO: 2148438 - RNA, 14 nt, Human herpesvirus 7
uucaaucuacugua

SEQ ID NO: 2148439 - RNA, 17 nt, Human herpesvirus 7
guaaguuguuauagcca

SEQ ID NO: 2148440 - RNA, 13 nt, Human herpesvirus 7
uuaauuccuuugg

SEQ ID NO: 2148441 - RNA, 22 nt, Human herpesvirus 7
agaaacuaaagaaaaaaaaagu

SEQ ID NO: 2148442 - RNA, 20 nt, Human herpesvirus 7
cacccuuuguuugagacaau

SEQ ID NO: 2148443 - RNA, 21 nt, Human herpesvirus 7
cuuaacuuuuggaaugauaua

SEQ ID NO: 2148444 - RNA, 13 nt, Human herpesvirus 7
gauuuuaaaggaa

SEQ ID NO: 2148445 - RNA, 16 nt, Human herpesvirus 7
ugaaagccgcugccuu

SEQ ID NO: 2148446 - RNA, 19 nt, Human herpesvirus 7
ccaugaaaaauaaauacua

SEQ ID NO: 2148447 - RNA, 15 nt, Human herpesvirus 7
gcucucagauuagcu

SEQ ID NO: 2148448 - RNA, 22 nt, Human herpesvirus 7
uguacagauuucauauuuagac

SEQ ID NO: 2148449 - RNA, 17 nt, Human herpesvirus 7
acaaccuggauguaaug

SEQ ID NO: 2148450 - RNA, 21 nt, Human herpesvirus 7
ugaaacucaucauugaagaaa

SEQ ID NO: 2148451 - RNA, 16 nt, Human herpesvirus 7
acucauaauagagcug

SEQ ID NO: 2148452 - RNA, 15 nt, Human herpesvirus 7
cucaaaucaaaguuu

SEQ ID NO: 2148453 - RNA, 20 nt, Human herpesvirus 7
gaugacaacaaagcaugaaa

SEQ ID NO: 2148454 - RNA, 16 nt, Human herpesvirus 7
cagacaccgucauuuc

SEQ ID NO: 2148455 - RNA, 17 nt, Human herpesvirus 7
caguauuuuuuaugaag

SEQ ID NO: 2148456 - RNA, 16 nt, Human herpesvirus 7
uagaugcauccaaaga

SEQ ID NO: 2148457 - RNA, 21 nt, Human herpesvirus 7
cguuuuaaggaauacaaacug

SEQ ID NO: 2148458 - RNA, 19 nt, Human herpesvirus 7
aaacaaucuggacauuuca

SEQ ID NO: 2148459 - RNA, 20 nt, Human herpesvirus 7
ccuaggauaccaaacaaaau

SEQ ID NO: 2148460 - RNA, 20 nt, Human herpesvirus 7
uuauguccgcuuacaagaug

SEQ ID NO: 2148461 - RNA, 13 nt, Human herpesvirus 7
uuuaauaugugaa

SEQ ID NO: 2148462 - RNA, 15 nt, Human herpesvirus 7
uucgcaaauguacaa

SEQ ID NO: 2148463 - RNA, 18 nt, Human herpesvirus 7
auaauaaaggaaagacaa

SEQ ID NO: 2148464 - RNA, 17 nt, Human herpesvirus 7
uguagaugcaugcuaau

SEQ ID NO: 2148465 - RNA, 17 nt, Human herpesvirus 7
gauguauaaaucagaau

SEQ ID NO: 2148466 - RNA, 13 nt, Human herpesvirus 7
aucggaaauuuug

SEQ ID NO: 2148467 - RNA, 17 nt, Human herpesvirus 7
caggaagcacaaaucaa

SEQ ID NO: 2148468 - RNA, 16 nt, Human herpesvirus 7
cuuuacuuucauagcu

SEQ ID NO: 2148469 - RNA, 13 nt, Human herpesvirus 7
gccgacaagaaac

SEQ ID NO: 2148470 - RNA, 15 nt, Human herpesvirus 7
auauacauguaacug

SEQ ID NO: 2148471 - RNA, 14 nt, Human herpesvirus 7
uuagugaaaacuug

SEQ ID NO: 2148472 - RNA, 22 nt, Human herpesvirus 7
aucuuuaugugggauuugaaug

SEQ ID NO: 2148473 - RNA, 16 nt, Human herpesvirus 7
gcuucaaaaauguuua

SEQ ID NO: 2148474 - RNA, 20 nt, Human herpesvirus 7
cuuauaaccgauauaguuug

SEQ ID NO: 2148475 - RNA, 18 nt, Human herpesvirus 7
uaacggauuuacauuuca

SEQ ID NO: 2148476 - RNA, 21 nt, Human herpesvirus 7
aucaccaaagaguauacaaaa

SEQ ID NO: 2148477 - RNA, 19 nt, Human herpesvirus 7
cuuucggagacguugcuca

SEQ ID NO: 2148478 - RNA, 17 nt, Human herpesvirus 7
agaucuugacucagauu

SEQ ID NO: 2148479 - RNA, 20 nt, Human herpesvirus 7
augcagaccguaaaacaauc

SEQ ID NO: 2148480 - RNA, 20 nt, Human herpesvirus 7
cuuaauaaaguuuaauucuc

SEQ ID NO: 2148481 - RNA, 13 nt, Human herpesvirus 7
uuguaacuuuuug

SEQ ID NO: 2148482 - RNA, 17 nt, Human herpesvirus 7
aauuaucuagacccuuu

SEQ ID NO: 2148483 - RNA, 15 nt, Human herpesvirus 7
ucaaaacauaucaga

SEQ ID NO: 2148484 - RNA, 23 nt, Human herpesvirus 7
caccgaagcagggaaaaagcaua

SEQ ID NO: 2148485 - RNA, 18 nt, Human herpesvirus 7
aagcuugcuuaaaacuuu

SEQ ID NO: 2148486 - RNA, 18 nt, Human herpesvirus 7
acauuuuaauaugugaaa

SEQ ID NO: 2148487 - RNA, 22 nt, Human herpesvirus 7
agaaaaguugcuuuucaugcuu

SEQ ID NO: 2148488 - RNA, 19 nt, Human herpesvirus 7
ccaaaaucaaguguuucuu

SEQ ID NO: 2148489 - RNA, 15 nt, Human herpesvirus 7
ucaacuugcagagga

SEQ ID NO: 2148490 - RNA, 14 nt, Human herpesvirus 7
uuaugaugcauuuu

SEQ ID NO: 2148491 - RNA, 15 nt, Human herpesvirus 7
uguuacaugaucuug

SEQ ID NO: 2148492 - RNA, 12 nt, Human herpesvirus 7
guuuuucaaaaa

SEQ ID NO: 2148493 - RNA, 19 nt, Human herpesvirus 7
uaguucugaaaucaaaaau

SEQ ID NO: 2148494 - RNA, 19 nt, Human herpesvirus 7
cugccagucucuaaacuuc

SEQ ID NO: 2148495 - RNA, 18 nt, Human herpesvirus 7
uuucagugaguggaagca

SEQ ID NO: 2148496 - RNA, 17 nt, Human herpesvirus 7
ucccaugccuauucaaa

SEQ ID NO: 2148497 - RNA, 15 nt, Human herpesvirus 7
uauugacagaaugau

SEQ ID NO: 2148498 - RNA, 22 nt, Human herpesvirus 7
acugauuuuuaaacuugugaaa

SEQ ID NO: 2148499 - RNA, 20 nt, Human herpesvirus 7
ucaauuugaauauugcuagu

SEQ ID NO: 2148500 - RNA, 14 nt, Human herpesvirus 7
cagaucuugcuuua

SEQ ID NO: 2148501 - RNA, 13 nt, Human herpesvirus 7
auuucuuugcgcu

SEQ ID NO: 2148502 - RNA, 18 nt, Human herpesvirus 7
acauauaaauagccauua

SEQ ID NO: 2148503 - RNA, 15 nt, Human herpesvirus 7
aaauauuuauuugcu

SEQ ID NO: 2148504 - RNA, 18 nt, Human herpesvirus 7
aggccguuuaugaacaag

SEQ ID NO: 2148505 - RNA, 13 nt, Human herpesvirus 7
ggcaaaaaacgua

SEQ ID NO: 2148506 - RNA, 16 nt, Human herpesvirus 7
uuuaagugaacuguua

SEQ ID NO: 2148507 - RNA, 14 nt, Human herpesvirus 7
acuaaguugaaauu

SEQ ID NO: 2148508 - RNA, 21 nt, Human herpesvirus 7
aauuccugcuugcacaaagau

SEQ ID NO: 2148509 - RNA, 22 nt, Human herpesvirus 7
augucugcauagacaguaaugc

SEQ ID NO: 2148510 - RNA, 21 nt, Human herpesvirus 7
auuuaguacuuuuucuggaau

SEQ ID NO: 2148511 - RNA, 17 nt, Human herpesvirus 7
uucuauucaguuucuuu

SEQ ID NO: 2148512 - RNA, 17 nt, Human herpesvirus 7
aaucgauaaacuuuguc

SEQ ID NO: 2148513 - RNA, 11 nt, Human herpesvirus 7
uccguaacugc

SEQ ID NO: 2148514 - RNA, 17 nt, Human herpesvirus 7
uuugaaaaaaacacuuu

SEQ ID NO: 2148515 - RNA, 20 nt, Human herpesvirus 7
cuuucacuacuacaugaaug

SEQ ID NO: 2148516 - RNA, 17 nt, Human herpesvirus 7
uuucacccuuuguuuga

SEQ ID NO: 2148517 - RNA, 20 nt, Human herpesvirus 7
aaacucacuucuaaaagcug

SEQ ID NO: 2148518 - RNA, 22 nt, Human herpesvirus 7
uguuugaacaaguagugcuaau

SEQ ID NO: 2148519 - RNA, 15 nt, Human herpesvirus 7
uaacuguuuuucaaa

SEQ ID NO: 2148520 - RNA, 20 nt, Human herpesvirus 7
uaucuuaucuggagaacaau

SEQ ID NO: 2148521 - RNA, 16 nt, Human herpesvirus 7
uaauaacaauuugaag

SEQ ID NO: 2148522 - RNA, 13 nt, Human herpesvirus 7
agguacuaucuau

SEQ ID NO: 2148523 - RNA, 18 nt, Human herpesvirus 7
aagugaacaugacuucag

SEQ ID NO: 2148524 - RNA, 21 nt, Human herpesvirus 7
accgaagcagggaaaaagcau

SEQ ID NO: 2148525 - RNA, 19 nt, Human herpesvirus 7
auccaucuuugaaaaucuu

SEQ ID NO: 2148526 - RNA, 18 nt, Human herpesvirus 7
agcacccggcuuaaugaa

SEQ ID NO: 2148527 - RNA, 23 nt, Human herpesvirus 7
guaaaugaucagagaugaucuua

SEQ ID NO: 2148528 - RNA, 18 nt, Human herpesvirus 7
aacacuguuuucaguuau

SEQ ID NO: 2148529 - RNA, 16 nt, Human herpesvirus 7
caauucaucaggacaa

SEQ ID NO: 2148530 - RNA, 22 nt, Human herpesvirus 7
accaaugauaauaagauguguu

SEQ ID NO: 2148531 - RNA, 13 nt, Human herpesvirus 7
uuugaaucuguaa

SEQ ID NO: 2148532 - RNA, 19 nt, Human herpesvirus 7
aauaucuuuuucaaaugga

SEQ ID NO: 2148533 - RNA, 21 nt, Human herpesvirus 7
aguaauguuauuuuucaugcc

SEQ ID NO: 2148534 - RNA, 14 nt, Human herpesvirus 7
ugucaucaaaauuu

SEQ ID NO: 2148535 - RNA, 18 nt, Human herpesvirus 7
uaacugagaaaaaugaca

SEQ ID NO: 2148536 - RNA, 14 nt, Human herpesvirus 7
ucuuauaacaaagu

SEQ ID NO: 2148537 - RNA, 19 nt, Human herpesvirus 7
caugaacacugcuucuccc

SEQ ID NO: 2148538 - RNA, 13 nt, Human herpesvirus 7
ugaagaacaacau

SEQ ID NO: 2148539 - RNA, 19 nt, Human herpesvirus 7
aaaugggcguaacugugac

SEQ ID NO: 2148540 - RNA, 21 nt, Human herpesvirus 7
guuggcaauuguaaaaauaaa

SEQ ID NO: 2148541 - RNA, 13 nt, Human herpesvirus 7
guggaaacggcug

SEQ ID NO: 2148542 - RNA, 14 nt, Human herpesvirus 7
aaugaaaaagccau

SEQ ID NO: 2148543 - RNA, 12 nt, Human herpesvirus 7
uaaugucucugu

SEQ ID NO: 2148544 - RNA, 22 nt, Human herpesvirus 7
uugcuauuauuaaagcuuucaa

SEQ ID NO: 2148545 - RNA, 23 nt, Human herpesvirus 7
uuugcaaucaugauccugguuaa

SEQ ID NO: 2148546 - RNA, 21 nt, Human herpesvirus 7
auaucuugcuuagaugcugaa

SEQ ID NO: 2148547 - RNA, 14 nt, Human herpesvirus 7
cacgaugacuucca

SEQ ID NO: 2148548 - RNA, 17 nt, Human herpesvirus 7
agccacagauauucuaa

SEQ ID NO: 2148549 - RNA, 12 nt, Human herpesvirus 7
aauuauuuccag

SEQ ID NO: 2148550 - RNA, 18 nt, Human herpesvirus 7
cugaauagacacauuuau

SEQ ID NO: 2148551 - RNA, 18 nt, Human herpesvirus 7
uucuaccggaaguuuuua

SEQ ID NO: 2148552 - RNA, 20 nt, Human herpesvirus 7
cuuaaguuuuuuauacuuuu

SEQ ID NO: 2148553 - RNA, 16 nt, Human herpesvirus 7
acaugggauuucugua

SEQ ID NO: 2148554 - RNA, 15 nt, Human herpesvirus 7
caaacgaguuucaaa

SEQ ID NO: 2148555 - RNA, 15 nt, Human herpesvirus 7
uuccuguuaauaucu

SEQ ID NO: 2148556 - RNA, 18 nt, Human herpesvirus 7
aucagucaagaacuguga

SEQ ID NO: 2148557 - RNA, 19 nt, Human herpesvirus 7
auuguaaaaauaaagacau

SEQ ID NO: 2148558 - RNA, 14 nt, Human herpesvirus 7
uuuguaaacauuuu

SEQ ID NO: 2148559 - RNA, 22 nt, Human herpesvirus 7
auguuucuggaucugccucugc

SEQ ID NO: 2148560 - RNA, 19 nt, Human herpesvirus 7
uuaaaggaaacauuucuaa

SEQ ID NO: 2148561 - RNA, 16 nt, Human herpesvirus 7
aauguuauuuggaauu

SEQ ID NO: 2148562 - RNA, 21 nt, Human herpesvirus 7
uaaucgauuaugauguuugua

SEQ ID NO: 2148563 - RNA, 18 nt, Human herpesvirus 7
guccagauccaucuguaa

SEQ ID NO: 2148564 - RNA, 22 nt, Human herpesvirus 7
caugggauuucuguaaaaacuu

SEQ ID NO: 2148565 - RNA, 16 nt, Human herpesvirus 7
acguuuccauuaaaaa

SEQ ID NO: 2148566 - RNA, 18 nt, Human herpesvirus 7
uucuacuugggaguguuu

SEQ ID NO: 2148567 - RNA, 11 nt, Human herpesvirus 7
aagugugcccg

SEQ ID NO: 2148568 - RNA, 17 nt, Human herpesvirus 7
uaaauaccaaaaaccug

SEQ ID NO: 2148569 - RNA, 19 nt, Human herpesvirus 7
augaugauuauuauaacuu

SEQ ID NO: 2148570 - RNA, 18 nt, Human herpesvirus 7
aagacgugagcaauacac

SEQ ID NO: 2148571 - RNA, 16 nt, Human herpesvirus 7
aaauuaaaaauauuca

SEQ ID NO: 2148572 - RNA, 13 nt, Human herpesvirus 7
aucaaaaacugaa

SEQ ID NO: 2148573 - RNA, 22 nt, Human herpesvirus 7
auuuugccguugaguugcugcu

SEQ ID NO: 2148574 - RNA, 17 nt, Human herpesvirus 7
gauaucuuaaaauaugu

SEQ ID NO: 2148575 - RNA, 13 nt, Human herpesvirus 7
cauuauuauuuga

SEQ ID NO: 2148576 - RNA, 22 nt, Human herpesvirus 7
cauuuccucuggaaaagggaga

SEQ ID NO: 2148577 - RNA, 20 nt, Human herpesvirus 7
guuauaugaaauuucaaaaa

SEQ ID NO: 2148578 - RNA, 14 nt, Human herpesvirus 7
caaagacuugcaaa

SEQ ID NO: 2148579 - RNA, 16 nt, Human herpesvirus 7
cuuugaaaucauucug

SEQ ID NO: 2148580 - RNA, 19 nt, Human herpesvirus 7
gacguuucuagcaaaauau

SEQ ID NO: 2148581 - RNA, 18 nt, Human herpesvirus 7
gaauuaagguggaaaucu

SEQ ID NO: 2148582 - RNA, 17 nt, Human herpesvirus 7
aacauugcuucagaaau

SEQ ID NO: 2148583 - RNA, 15 nt, Human herpesvirus 7
gcuuuagaauuagag

SEQ ID NO: 2148584 - RNA, 15 nt, Human herpesvirus 7
aauuauuuccagagu

SEQ ID NO: 2148585 - RNA, 19 nt, Human herpesvirus 7
aaucuguagaaaauguuuu

SEQ ID NO: 2148586 - RNA, 14 nt, Human herpesvirus 7
auuuaaaaaaggaa

SEQ ID NO: 2148587 - RNA, 21 nt, Human herpesvirus 7
cuguaaccauuuauuuacaga

SEQ ID NO: 2148588 - RNA, 19 nt, Human herpesvirus 7
caugcgauaucugacuggu

SEQ ID NO: 2148589 - RNA, 15 nt, Human herpesvirus 7
uaacaaaauuguaag

SEQ ID NO: 2148590 - RNA, 17 nt, Human herpesvirus 7
ugcuauuauuaaagcuu

SEQ ID NO: 2148591 - RNA, 22 nt, Human herpesvirus 7
aggaauugcugucuauuucaau

SEQ ID NO: 2148592 - RNA, 18 nt, Human herpesvirus 7
aaaaagugauugcagauu

SEQ ID NO: 2148593 - RNA, 18 nt, Human herpesvirus 7
ccaagagccggaaagcaa

SEQ ID NO: 2148594 - RNA, 23 nt, Human herpesvirus 7
uauuuagacuuuuuucuuuaaau

SEQ ID NO: 2148595 - RNA, 17 nt, Human herpesvirus 7
cuugugaaaauaacagg

SEQ ID NO: 2148596 - RNA, 21 nt, Human herpesvirus 7
cuucugauaucuuaaaauaug

SEQ ID NO: 2148597 - RNA, 23 nt, Human herpesvirus 7
agucucuaaacuucuagccugca

SEQ ID NO: 2148598 - RNA, 13 nt, Human herpesvirus 7
gcugcaucuuuuc

SEQ ID NO: 2148599 - RNA, 23 nt, Human herpesvirus 7
aaacagcgugucaaaaaaaaaac

SEQ ID NO: 2148600 - RNA, 19 nt, Human herpesvirus 7
cugaauuguacguucugaa

SEQ ID NO: 2148601 - RNA, 14 nt, Human herpesvirus 7
acuuacuguuuaca

SEQ ID NO: 2148602 - RNA, 19 nt, Human herpesvirus 7
caaaaaagguguugauaga

SEQ ID NO: 2148603 - RNA, 19 nt, Human herpesvirus 7
aacauacuuaaaaaaauga

SEQ ID NO: 2148604 - RNA, 14 nt, Human herpesvirus 7
ucauuguacauuuu

SEQ ID NO: 2148605 - RNA, 14 nt, Human herpesvirus 7
uaugguuugaaaac

SEQ ID NO: 2148606 - RNA, 16 nt, Human herpesvirus 7
uuggauuguguaauua

SEQ ID NO: 2148607 - RNA, 19 nt, Human herpesvirus 7
uuacaaggugacagagggc

SEQ ID NO: 2148608 - RNA, 24 nt, Human herpesvirus 7
uacgugaguguuguaacaacuagc

SEQ ID NO: 2148609 - RNA, 14 nt, Human herpesvirus 7
agauauuauuaaaa

SEQ ID NO: 2148610 - RNA, 13 nt, Human herpesvirus 7
cacuagcuuucug

SEQ ID NO: 2148611 - RNA, 19 nt, Human herpesvirus 7
auuuuuuuuagaaaugguu

SEQ ID NO: 2148612 - RNA, 15 nt, Human herpesvirus 7
ucugugacuuagaaa

SEQ ID NO: 2148613 - RNA, 17 nt, Human herpesvirus 7
agcagaucucgaacuuc

SEQ ID NO: 2148614 - RNA, 14 nt, Human herpesvirus 7
uaucaucaucuuuu

SEQ ID NO: 2148615 - RNA, 20 nt, Human herpesvirus 7
aacagauuuuauuucagcuc

SEQ ID NO: 2148616 - RNA, 21 nt, Human herpesvirus 7
ugcugucuuggaguauuacca

SEQ ID NO: 2148617 - RNA, 19 nt, Human herpesvirus 7
ggacacaaucagcauuuac

SEQ ID NO: 2148618 - RNA, 15 nt, Human herpesvirus 7
aacaaacuguaccca

SEQ ID NO: 2148619 - RNA, 12 nt, Human herpesvirus 7
uuaauaacagca

SEQ ID NO: 2148620 - RNA, 19 nt, Human herpesvirus 7
ugcuuaaaaacaguaauuu

SEQ ID NO: 2148621 - RNA, 22 nt, Human herpesvirus 7
aaaagcugcauguguacuaaag

SEQ ID NO: 2148622 - RNA, 14 nt, Human herpesvirus 7
aucgguuuucugag

SEQ ID NO: 2148623 - RNA, 22 nt, Human herpesvirus 7
aucaucuuaaaaguacaaaugu

SEQ ID NO: 2148624 - RNA, 16 nt, Human herpesvirus 7
cacguagaacaaacug

SEQ ID NO: 2148625 - RNA, 15 nt, Human herpesvirus 7
cuucugcuaacucau

SEQ ID NO: 2148626 - RNA, 16 nt, Human herpesvirus 7
uuuaccccaaacgccu

SEQ ID NO: 2148627 - RNA, 16 nt, Human herpesvirus 7
ucgugugucucuagaa

SEQ ID NO: 2148628 - RNA, 13 nt, Human herpesvirus 7
aaauaaacaggaa

SEQ ID NO: 2148629 - RNA, 22 nt, Human herpesvirus 7
auaacaauuugaagaggagaau

SEQ ID NO: 2148630 - RNA, 16 nt, Human herpesvirus 7
agguugucuguucuca

SEQ ID NO: 2148631 - RNA, 16 nt, Human herpesvirus 7
ugugaaguuugcugaa

SEQ ID NO: 2148632 - RNA, 23 nt, Human herpesvirus 7
uuuccaauagcacuacuagaaau

SEQ ID NO: 2148633 - RNA, 23 nt, Human herpesvirus 7
ucuucauaaaaaaaaagggagaa

SEQ ID NO: 2148634 - RNA, 14 nt, Human herpesvirus 7
ucuucuaauacauc

SEQ ID NO: 2148635 - RNA, 19 nt, Human herpesvirus 7
ucuccgugucacugucacu

SEQ ID NO: 2148636 - RNA, 15 nt, Human herpesvirus 7
cauuguacaauuaca

SEQ ID NO: 2148637 - RNA, 13 nt, Human herpesvirus 7
gcuuguuaaagaa

SEQ ID NO: 2148638 - RNA, 21 nt, Human herpesvirus 7
gcuaauugagaaauuuuacag

SEQ ID NO: 2148639 - RNA, 19 nt, Human herpesvirus 7
auuuugugacccugucaca

SEQ ID NO: 2148640 - RNA, 21 nt, Human herpesvirus 7
uuuaaauaaaccuuaaguuuu

SEQ ID NO: 2148641 - RNA, 21 nt, Human herpesvirus 7
cugacagucacguaaaagugu

SEQ ID NO: 2148642 - RNA, 19 nt, Human herpesvirus 7
aaaacuuugauuugagaaa

SEQ ID NO: 2148643 - RNA, 14 nt, Human herpesvirus 7
aacuugugaaaaua

SEQ ID NO: 2148644 - RNA, 17 nt, Human herpesvirus 7
caucuuuuugaacagaa

SEQ ID NO: 2148645 - RNA, 12 nt, Human herpesvirus 7
accaaaaugugg

SEQ ID NO: 2148646 - RNA, 20 nt, Human herpesvirus 7
auguuuuuccuaugauacaa

SEQ ID NO: 2148647 - RNA, 11 nt, Human herpesvirus 7
aggaugaaagu

SEQ ID NO: 2148648 - RNA, 11 nt, Human herpesvirus 7
uaaaaacagua

SEQ ID NO: 2148649 - RNA, 18 nt, Human herpesvirus 7
auuuccucuggaaaaggg

SEQ ID NO: 2148650 - RNA, 23 nt, Human herpesvirus 7
aaaggaucucucuuucuggaguu

SEQ ID NO: 2148651 - RNA, 23 nt, Human herpesvirus 7
aagagccucccaccauggcuuuu

SEQ ID NO: 2148652 - RNA, 23 nt, Human herpesvirus 7
uuuauugguaauuagugaaaacu

SEQ ID NO: 2148653 - RNA, 20 nt, Human herpesvirus 7
caacgucuuacuuggaaaca

SEQ ID NO: 2148654 - RNA, 13 nt, Human herpesvirus 7
augaaaaaaauua

SEQ ID NO: 2148655 - RNA, 14 nt, Human herpesvirus 7
uauguugcauauca

SEQ ID NO: 2148656 - RNA, 21 nt, Human herpesvirus 7
aucagaauauuuccagcauca

SEQ ID NO: 2148657 - RNA, 16 nt, Human herpesvirus 7
augcauauuugaacau

SEQ ID NO: 2148658 - RNA, 22 nt, Human herpesvirus 7
uucaucaggacaaucaaacaug

SEQ ID NO: 2148659 - RNA, 14 nt, Human herpesvirus 7
uuaaguagugucug

SEQ ID NO: 2148660 - RNA, 14 nt, Human herpesvirus 7
ugaaguuugcugaa

SEQ ID NO: 2148661 - RNA, 15 nt, Human herpesvirus 7
agucuacaucaucaa

SEQ ID NO: 2148662 - RNA, 14 nt, Human herpesvirus 7
auugauuauaugca

SEQ ID NO: 2148663 - RNA, 16 nt, Human herpesvirus 7
gaaauaaaagcuuucu

SEQ ID NO: 2148664 - RNA, 18 nt, Human herpesvirus 7
cgauaaaagguguuuuug

SEQ ID NO: 2148665 - RNA, 21 nt, Human herpesvirus 7
aaagcuuguauauacggaaug

SEQ ID NO: 2148666 - RNA, 21 nt, Human herpesvirus 7
gcgacauuauaaaagauggaa

SEQ ID NO: 2148667 - RNA, 18 nt, Human herpesvirus 7
ucuuuauuuaagcuucaa

SEQ ID NO: 2148668 - RNA, 16 nt, Human herpesvirus 7
auaugcuuccuaaaaa

SEQ ID NO: 2148669 - RNA, 13 nt, Human herpesvirus 7
uaauguuacuaua

SEQ ID NO: 2148670 - RNA, 17 nt, Human herpesvirus 7
acuuuuaaauuaaaaga

SEQ ID NO: 2148671 - RNA, 17 nt, Human herpesvirus 7
cuuucaugcauugcauu

SEQ ID NO: 2148672 - RNA, 18 nt, Human herpesvirus 7
uuccugugugcaaugaug

SEQ ID NO: 2148673 - RNA, 21 nt, Human herpesvirus 7
aaccaugaaaaauaaauacua

SEQ ID NO: 2148674 - RNA, 13 nt, Human herpesvirus 7
cggauaagaacaa

SEQ ID NO: 2148675 - RNA, 17 nt, Human herpesvirus 7
ggucucuuucuaaaaag

SEQ ID NO: 2148676 - RNA, 19 nt, Human herpesvirus 7
cugaaucaaaauccuggau

SEQ ID NO: 2148677 - RNA, 17 nt, Human herpesvirus 7
aagccauaaaauguaca

SEQ ID NO: 2148678 - RNA, 14 nt, Human herpesvirus 7
cuuguguugucaua

SEQ ID NO: 2148679 - RNA, 17 nt, Human herpesvirus 7
agaacauuuuucuugcu

SEQ ID NO: 2148680 - RNA, 14 nt, Human herpesvirus 7
cauuuguuuuggau

SEQ ID NO: 2148681 - RNA, 17 nt, Human herpesvirus 7
uuagacgacgucuucuu

SEQ ID NO: 2148682 - RNA, 19 nt, Human herpesvirus 7
aaacuaaagaaaaaaaaag

SEQ ID NO: 2148683 - RNA, 13 nt, Human herpesvirus 7
uguauguugaagu

SEQ ID NO: 2148684 - RNA, 14 nt, Human herpesvirus 7
ucuuccgcauuuug

SEQ ID NO: 2148685 - RNA, 14 nt, Human herpesvirus 7
aauucauuguauga

SEQ ID NO: 2148686 - RNA, 17 nt, Human herpesvirus 7
uguacuuuugaucaaaa

SEQ ID NO: 2148687 - RNA, 16 nt, Human herpesvirus 7
uaagaaagaacauuuu

SEQ ID NO: 2148688 - RNA, 18 nt, Human herpesvirus 7
uuguccauuuuauucaaa

SEQ ID NO: 2148689 - RNA, 23 nt, Human herpesvirus 7
cuuaaauaaagaguguuuucaaa

SEQ ID NO: 2148690 - RNA, 17 nt, Human herpesvirus 7
uuugagcuaaccuuuua

SEQ ID NO: 2148691 - RNA, 22 nt, Human herpesvirus 7
gcugaaacucaucauugaagaa

SEQ ID NO: 2148692 - RNA, 15 nt, Human herpesvirus 7
uggauuucagcauuu

SEQ ID NO: 2148693 - RNA, 16 nt, Human herpesvirus 7
aauuuuagauuuuacg

SEQ ID NO: 2148694 - RNA, 22 nt, Human herpesvirus 7
caacuaaaacuacauuuaaaaa

SEQ ID NO: 2148695 - RNA, 20 nt, Human herpesvirus 7
uuugauaagacugaagacaa

SEQ ID NO: 2148696 - RNA, 14 nt, Human herpesvirus 7
uugaucgucuguug

SEQ ID NO: 2148697 - RNA, 17 nt, Human herpesvirus 7
gacauaacaaaaaaggu

SEQ ID NO: 2148698 - RNA, 20 nt, Human herpesvirus 7
uuaacuauaucaucaucuuu

SEQ ID NO: 2148699 - RNA, 19 nt, Human herpesvirus 7
ucacugacgaaaacugcaa

SEQ ID NO: 2148700 - RNA, 20 nt, Human herpesvirus 7
aaauucaaggaauucugacu

SEQ ID NO: 2148701 - RNA, 23 nt, Human herpesvirus 7
ucaauaaaugguuuuauuucaca

SEQ ID NO: 2148702 - RNA, 12 nt, Human herpesvirus 7
agaaaaaaaugg

SEQ ID NO: 2148703 - RNA, 13 nt, Human herpesvirus 7
uaucaaaauucca

SEQ ID NO: 2148704 - RNA, 12 nt, Human herpesvirus 7
aaaaagaaugcu

SEQ ID NO: 2148705 - RNA, 22 nt, Human herpesvirus 7
acauugcuucagaaauaacaaa

SEQ ID NO: 2148706 - RNA, 13 nt, Human herpesvirus 7
auucgacacuauu

SEQ ID NO: 2148707 - RNA, 18 nt, Human herpesvirus 7
ugaguauaacucaaaaga

SEQ ID NO: 2148708 - RNA, 13 nt, Human herpesvirus 7
auauuuuacauau

SEQ ID NO: 2148709 - RNA, 14 nt, Human herpesvirus 7
augauggaaagcaa

SEQ ID NO: 2148710 - RNA, 22 nt, Human herpesvirus 7
uauuugucggugaauguagaag

SEQ ID NO: 2148711 - RNA, 22 nt, Human herpesvirus 7
ucuuuaucgccauuuucuugag

SEQ ID NO: 2148712 - RNA, 16 nt, Human herpesvirus 7
caucuugagaaauaug

SEQ ID NO: 2148713 - RNA, 15 nt, Human herpesvirus 7
uuagauuuaaaacaa

SEQ ID NO: 2148714 - RNA, 14 nt, Human herpesvirus 7
ugguugugcaauuu

SEQ ID NO: 2148715 - RNA, 22 nt, Human herpesvirus 7
uuaaaucaguuguuggaaauac

SEQ ID NO: 2148716 - RNA, 14 nt, Human herpesvirus 7
guuuuaaagcugau

SEQ ID NO: 2148717 - RNA, 15 nt, Human herpesvirus 7
guugcacuccuagaa

SEQ ID NO: 2148718 - RNA, 13 nt, Human herpesvirus 7
aucuaauugcaga

SEQ ID NO: 2148719 - RNA, 15 nt, Human herpesvirus 7
gaagaaugcaagccu

SEQ ID NO: 2148720 - RNA, 17 nt, Human herpesvirus 7
cauaauuaugaaauguu

SEQ ID NO: 2148721 - RNA, 19 nt, Human herpesvirus 7
uccuuauauuaaaaaccac

SEQ ID NO: 2148722 - RNA, 17 nt, Human herpesvirus 7
gccaacguugagaaaac

SEQ ID NO: 2148723 - RNA, 18 nt, Human herpesvirus 7
uauuagauuauacaaauc

SEQ ID NO: 2148724 - RNA, 21 nt, Human herpesvirus 7
gauuuugacauuaguucuggc

SEQ ID NO: 2148725 - RNA, 18 nt, Human herpesvirus 7
ugaggauuuugacaagcg

SEQ ID NO: 2148726 - RNA, 14 nt, Human herpesvirus 7
gaaccugaaucaaa

SEQ ID NO: 2148727 - RNA, 15 nt, Human herpesvirus 7
guugcagcugugaua

SEQ ID NO: 2148728 - RNA, 18 nt, Human herpesvirus 7
cgaaaaugguauuuugcg

SEQ ID NO: 2148729 - RNA, 20 nt, Human herpesvirus 7
agaaauggaaaccuggagaa

SEQ ID NO: 2148730 - RNA, 23 nt, Human herpesvirus 7
acucuucuuugugagaaauggaa

SEQ ID NO: 2148731 - RNA, 19 nt, Human herpesvirus 7
guaaaauucgcugaugaaa

SEQ ID NO: 2148732 - RNA, 18 nt, Human herpesvirus 7
cuauaaauggaauuuaac

SEQ ID NO: 2148733 - RNA, 17 nt, Human herpesvirus 7
acuccuugcauacuuuu

SEQ ID NO: 2148734 - RNA, 16 nt, Human herpesvirus 7
aaagcaacaaauguuu

SEQ ID NO: 2148735 - RNA, 16 nt, Human herpesvirus 7
gucauuauuuguuaaa

SEQ ID NO: 2148736 - RNA, 21 nt, Human herpesvirus 7
auacguuauuuuuauuguaaa

SEQ ID NO: 2148737 - RNA, 20 nt, Human herpesvirus 7
acuguuagaggauuaaaaca

SEQ ID NO: 2148738 - RNA, 16 nt, Human herpesvirus 7
uuaucugcauugauuu

SEQ ID NO: 2148739 - RNA, 22 nt, Human herpesvirus 7
caaaccuauccacucuccugaa

SEQ ID NO: 2148740 - RNA, 21 nt, Human herpesvirus 7
uuugggaugucuuaggaguuu

SEQ ID NO: 2148741 - RNA, 17 nt, Human herpesvirus 7
agacguugcucauuuug

SEQ ID NO: 2148742 - RNA, 12 nt, Human herpesvirus 7
cccccagaacuu

SEQ ID NO: 2148743 - RNA, 15 nt, Human herpesvirus 7
augguugugcaauuu

SEQ ID NO: 2148744 - RNA, 15 nt, Human herpesvirus 7
cuuaauuuguucaau

SEQ ID NO: 2148745 - RNA, 16 nt, Human herpesvirus 7
uaaauggcaaauccua

SEQ ID NO: 2148746 - RNA, 15 nt, Human herpesvirus 7
cuuuucuuucuuaau

SEQ ID NO: 2148747 - RNA, 17 nt, Human herpesvirus 7
auaagcucaaaaaguac

SEQ ID NO: 2148748 - RNA, 17 nt, Human herpesvirus 7
uaaaucagaauauuucc

SEQ ID NO: 2148749 - RNA, 21 nt, Human herpesvirus 7
gacuuaucaccauaugccaau

SEQ ID NO: 2148750 - RNA, 18 nt, Human herpesvirus 7
gaggauucggaaguaaac

SEQ ID NO: 2148751 - RNA, 16 nt, Human herpesvirus 7
aguugggcaaacaguu

SEQ ID NO: 2148752 - RNA, 22 nt, Human herpesvirus 7
uuaauugagauuauucaaaagc

SEQ ID NO: 2148753 - RNA, 14 nt, Human herpesvirus 7
aacaauauagagua

SEQ ID NO: 2148754 - RNA, 14 nt, Human herpesvirus 7
ugaaauaaacauuu

SEQ ID NO: 2148755 - RNA, 17 nt, Human herpesvirus 7
auguaugguuucauuug

SEQ ID NO: 2148756 - RNA, 21 nt, Human herpesvirus 7
acuggaauuauacacugugaa

SEQ ID NO: 2148757 - RNA, 20 nt, Human herpesvirus 7
uaagcaguuauaugaaauuu

SEQ ID NO: 2148758 - RNA, 19 nt, Human herpesvirus 7
agcauaugcuggaucuucu

SEQ ID NO: 2148759 - RNA, 21 nt, Human herpesvirus 7
uuaauacguccaaaaauugga

SEQ ID NO: 2148760 - RNA, 18 nt, Human herpesvirus 7
guuuucuuuguaaaaaug

SEQ ID NO: 2148761 - RNA, 14 nt, Human herpesvirus 7
auguuuacauguaa

SEQ ID NO: 2148762 - RNA, 14 nt, Human herpesvirus 7
acaauuguauuuca

SEQ ID NO: 2148763 - RNA, 16 nt, Human herpesvirus 7
cagcacaaaugucuua

SEQ ID NO: 2148764 - RNA, 19 nt, Human herpesvirus 7
gggcacaccaagauuuuaa

SEQ ID NO: 2148765 - RNA, 21 nt, Human herpesvirus 7
gcauuauauccaauaaugcau

SEQ ID NO: 2148766 - RNA, 15 nt, Human herpesvirus 7
cucuacuuaauggag

SEQ ID NO: 2148767 - RNA, 20 nt, Human herpesvirus 7
aauucuuuaauaaaaaacaa

SEQ ID NO: 2148768 - RNA, 20 nt, Human herpesvirus 7
aacauguuuucuuagaugca

SEQ ID NO: 2148769 - RNA, 12 nt, Human herpesvirus 7
uauguuaucauu

SEQ ID NO: 2148770 - RNA, 22 nt, Human herpesvirus 7
uuaaaauucucuauuguucuuu

SEQ ID NO: 2148771 - RNA, 22 nt, Human herpesvirus 7
accauguuuuaccgugucuucu

SEQ ID NO: 2148772 - RNA, 16 nt, Human herpesvirus 7
cacaauuacacaaauu

SEQ ID NO: 2148773 - RNA, 18 nt, Human herpesvirus 7
ucucaaucaaaaucuugu

SEQ ID NO: 2148774 - RNA, 22 nt, Human herpesvirus 7
uagaaaaucuaccaauaaaagg

SEQ ID NO: 2148775 - RNA, 17 nt, Human herpesvirus 7
gaaaaugcauugcuuuu

SEQ ID NO: 2148776 - RNA, 14 nt, Human herpesvirus 7
aucuagauaaagua

SEQ ID NO: 2148777 - RNA, 13 nt, Human herpesvirus 7
ucaauguuuucau

SEQ ID NO: 2148778 - RNA, 17 nt, Human herpesvirus 7
guccccuucgcugcugu

SEQ ID NO: 2148779 - RNA, 18 nt, Human herpesvirus 7
augccuugccaaaagcuu

SEQ ID NO: 2148780 - RNA, 20 nt, Human herpesvirus 7
aaccaugaaaaauaaauacu

SEQ ID NO: 2148781 - RNA, 16 nt, Human herpesvirus 7
augcauuggaaaaaug

SEQ ID NO: 2148782 - RNA, 23 nt, Human herpesvirus 7
auuuauuuguguuuuguaaauaa

SEQ ID NO: 2148783 - RNA, 20 nt, Human herpesvirus 7
agaagugaguuuuucaguga

SEQ ID NO: 2148784 - RNA, 22 nt, Human herpesvirus 7
uguaaccuuggcuguucaaaau

SEQ ID NO: 2148785 - RNA, 14 nt, Human herpesvirus 7
auacauuauaaaug

SEQ ID NO: 2148786 - RNA, 13 nt, Human herpesvirus 7
gccaauugaagaa

SEQ ID NO: 2148787 - RNA, 14 nt, Human herpesvirus 7
uugcuuaacuuuug

SEQ ID NO: 2148788 - RNA, 21 nt, Human herpesvirus 7
agauugaucacuuugcaucaa

SEQ ID NO: 2148789 - RNA, 16 nt, Human herpesvirus 7
ucuggaucugccucug

SEQ ID NO: 2148790 - RNA, 15 nt, Human herpesvirus 7
acggacuuaugucca

SEQ ID NO: 2148791 - RNA, 19 nt, Human herpesvirus 7
acaaacauuccaacagcuu

SEQ ID NO: 2148792 - RNA, 14 nt, Human herpesvirus 7
auuuuacaaugcag

SEQ ID NO: 2148793 - RNA, 19 nt, Human herpesvirus 7
cauuucauuccaaaauaca

SEQ ID NO: 2148794 - RNA, 15 nt, Human herpesvirus 7
auucuaauauguaug

SEQ ID NO: 2148795 - RNA, 21 nt, Human herpesvirus 7
caaaaguauaacauugcuuca

SEQ ID NO: 2148796 - RNA, 14 nt, Human herpesvirus 7
cacaauuacacaaa

SEQ ID NO: 2148797 - RNA, 15 nt, Human herpesvirus 7
aaauuaaaaagaaug

SEQ ID NO: 2148798 - RNA, 18 nt, Human herpesvirus 7
ucauaauuaugaaauguu

SEQ ID NO: 2148799 - RNA, 17 nt, Human herpesvirus 7
uagauguuuuugauauu

SEQ ID NO: 2148800 - RNA, 17 nt, Human herpesvirus 7
uugcuuaaaacuuugaa

SEQ ID NO: 2148801 - RNA, 19 nt, Human herpesvirus 7
aaaucuguagaaaauguuu

SEQ ID NO: 2148802 - RNA, 15 nt, Human herpesvirus 7
gaguuuaaaguaaaa

SEQ ID NO: 2148803 - RNA, 13 nt, Human herpesvirus 7
gauauuuugacaa

SEQ ID NO: 2148804 - RNA, 16 nt, Human herpesvirus 7
uuaaaguauuuauuuu

SEQ ID NO: 2148805 - RNA, 15 nt, Human herpesvirus 7
agucuaaaaauguuu

SEQ ID NO: 2148806 - RNA, 13 nt, Human herpesvirus 7
gguuauuggaaau

SEQ ID NO: 2148807 - RNA, 21 nt, Human herpesvirus 7
caaccuguacucgacucugaa

SEQ ID NO: 2148808 - RNA, 14 nt, Human herpesvirus 7
acguuuuugcagag

SEQ ID NO: 2148809 - RNA, 21 nt, Human herpesvirus 7
agauuuccauuucaaaagaaa

SEQ ID NO: 2148810 - RNA, 23 nt, Human herpesvirus 7
agggauacaaaugcaaauuaaaa

SEQ ID NO: 2148811 - RNA, 15 nt, Human herpesvirus 7
auuuaaaaaaggaaa

SEQ ID NO: 2148812 - RNA, 16 nt, Human herpesvirus 7
acuucugauaucuuaa

SEQ ID NO: 2148813 - RNA, 21 nt, Human herpesvirus 7
ccagagucucuaaaauuuucu

SEQ ID NO: 2148814 - RNA, 23 nt, Human herpesvirus 7
caccgaugaauuuuuuuugguaa

SEQ ID NO: 2148815 - RNA, 16 nt, Human herpesvirus 7
ugauaauaagaugugu

SEQ ID NO: 2148816 - RNA, 14 nt, Human herpesvirus 7
ucagucaacuuuuu

SEQ ID NO: 2148817 - RNA, 21 nt, Human herpesvirus 7
uuuucuccaugcauauuugaa

SEQ ID NO: 2148818 - RNA, 16 nt, Human herpesvirus 7
auuggcauuauucuuc

SEQ ID NO: 2148819 - RNA, 16 nt, Human herpesvirus 7
uauuucuaauagacaa

SEQ ID NO: 2148820 - RNA, 19 nt, Human herpesvirus 7
uaaaauuuauauuaaauga

SEQ ID NO: 2148821 - RNA, 23 nt, Human herpesvirus 7
guuacaucauguuaaaaaaucaa

SEQ ID NO: 2148822 - RNA, 15 nt, Human herpesvirus 7
aaauaauauuuuacc

SEQ ID NO: 2148823 - RNA, 19 nt, Human herpesvirus 7
acgcccacucuggaaaugu

SEQ ID NO: 2148824 - RNA, 18 nt, Human herpesvirus 7
caguuucugcauacucuu

SEQ ID NO: 2148825 - RNA, 21 nt, Human herpesvirus 7
cuuuucucuccccaguaaaua

SEQ ID NO: 2148826 - RNA, 13 nt, Human herpesvirus 7
aaccuaucaaaau

SEQ ID NO: 2148827 - RNA, 16 nt, Human herpesvirus 7
aaagcaaaagccacag

SEQ ID NO: 2148828 - RNA, 15 nt, Human herpesvirus 7
cuagaaaauaguugu

SEQ ID NO: 2148829 - RNA, 18 nt, Human herpesvirus 7
caaaucugauaaauuaca

SEQ ID NO: 2148830 - RNA, 12 nt, Human herpesvirus 7
auucgaugucag

SEQ ID NO: 2148831 - RNA, 16 nt, Human herpesvirus 7
uagauuuaaaacaauu

SEQ ID NO: 2148832 - RNA, 17 nt, Human herpesvirus 7
uuaucaaugccuguuuu

SEQ ID NO: 2148833 - RNA, 23 nt, Human herpesvirus 7
gcaucaaaacauaucagauuuua

SEQ ID NO: 2148834 - RNA, 14 nt, Human herpesvirus 7
aucuuaaaauacua

SEQ ID NO: 2148835 - RNA, 23 nt, Human herpesvirus 7
aguuacacugauuuuuuuaauaa

SEQ ID NO: 2148836 - RNA, 14 nt, Human herpesvirus 7
cuaaccaucugcug

SEQ ID NO: 2148837 - RNA, 17 nt, Human herpesvirus 7
aggacaugauuggccag

SEQ ID NO: 2148838 - RNA, 23 nt, Human herpesvirus 7
cugcagaaauuuuuaaagagaaa

SEQ ID NO: 2148839 - RNA, 19 nt, Human herpesvirus 7
acaaauuggaaauuacugg

SEQ ID NO: 2148840 - RNA, 21 nt, Human herpesvirus 7
uggaacugaaaacaaugcaga

SEQ ID NO: 2148841 - RNA, 11 nt, Human herpesvirus 7
ugaaauuguag

SEQ ID NO: 2148842 - RNA, 21 nt, Human herpesvirus 7
acggacaauaacauuuuguau

SEQ ID NO: 2148843 - RNA, 21 nt, Human herpesvirus 7
uucuagcaaaauaugcaaaac

SEQ ID NO: 2148844 - RNA, 13 nt, Human herpesvirus 7
aaagggggaaaga

SEQ ID NO: 2148845 - RNA, 19 nt, Human herpesvirus 7
auuuuaaugugcuuauuua

SEQ ID NO: 2148846 - RNA, 19 nt, Human herpesvirus 7
uguaaccuuggcuguucaa

SEQ ID NO: 2148847 - RNA, 15 nt, Human herpesvirus 7
cagauucgacuucua

SEQ ID NO: 2148848 - RNA, 11 nt, Human herpesvirus 7
auauggcaaua

SEQ ID NO: 2148849 - RNA, 16 nt, Human herpesvirus 7
acauuaguucuggccg

SEQ ID NO: 2148850 - RNA, 18 nt, Human herpesvirus 7
uugcugaaagaacuuuuc

SEQ ID NO: 2148851 - RNA, 13 nt, Human herpesvirus 7
uacaguaaauugc

SEQ ID NO: 2148852 - RNA, 19 nt, Human herpesvirus 7
ggaaacauugaaaaagcag

SEQ ID NO: 2148853 - RNA, 20 nt, Human herpesvirus 7
aaagugaucaaaauuaaugu

SEQ ID NO: 2148854 - RNA, 23 nt, Human herpesvirus 7
gcuuugaucuacauauacuuuua

SEQ ID NO: 2148855 - RNA, 23 nt, Human herpesvirus 7
cgaggaagcuuucguaaucauuc

SEQ ID NO: 2148856 - RNA, 16 nt, Human herpesvirus 7
auuauaaauguaacuu

SEQ ID NO: 2148857 - RNA, 19 nt, Human herpesvirus 7
uuuaaaaaugauuuuucuu

SEQ ID NO: 2148858 - RNA, 13 nt, Human herpesvirus 7
uguauaugccugu

SEQ ID NO: 2148859 - RNA, 23 nt, Human herpesvirus 7
uuccauauuccugcaaaacuugg

SEQ ID NO: 2148860 - RNA, 19 nt, Human herpesvirus 7
ugaauauugcuagucucaa

SEQ ID NO: 2148861 - RNA, 16 nt, Human herpesvirus 7
uucuguaaaaacuugu

SEQ ID NO: 2148862 - RNA, 11 nt, Human herpesvirus 7
aauuguuugau

SEQ ID NO: 2148863 - RNA, 21 nt, Human herpesvirus 7
aaagugaacaugacuucagaa

SEQ ID NO: 2148864 - RNA, 16 nt, Human herpesvirus 7
uaacuuuaaauuauua

SEQ ID NO: 2148865 - RNA, 18 nt, Human herpesvirus 7
ucaugcgauaucugacug

SEQ ID NO: 2148866 - RNA, 21 nt, Human herpesvirus 7
gauuaaaaacccuuuauucau

SEQ ID NO: 2148867 - RNA, 17 nt, Human herpesvirus 7
uaaucauggaaaaugga

SEQ ID NO: 2148868 - RNA, 16 nt, Human herpesvirus 7
ugguaccuuagaauca

SEQ ID NO: 2148869 - RNA, 18 nt, Human herpesvirus 7
augucuuguuaucuccac

SEQ ID NO: 2148870 - RNA, 18 nt, Human herpesvirus 7
uacagcauauaucuuuga

SEQ ID NO: 2148871 - RNA, 15 nt, Human herpesvirus 7
uaaucuuaauguuuc

SEQ ID NO: 2148872 - RNA, 16 nt, Human herpesvirus 7
uguacuuuuuauuguu

SEQ ID NO: 2148873 - RNA, 18 nt, Human herpesvirus 7
ugcuaaggcuaaacucgu

SEQ ID NO: 2148874 - RNA, 22 nt, Human herpesvirus 7
gugggauuugaaugaacaaaua

SEQ ID NO: 2148875 - RNA, 19 nt, Human herpesvirus 7
cuuagaugcugaaacauca

SEQ ID NO: 2148876 - RNA, 12 nt, Human herpesvirus 7
agugaugaaagu

SEQ ID NO: 2148877 - RNA, 13 nt, Human herpesvirus 7
cuuccuaaaaaaa

SEQ ID NO: 2148878 - RNA, 18 nt, Human herpesvirus 7
ugaaaccuucgcaacaau

SEQ ID NO: 2148879 - RNA, 15 nt, Human herpesvirus 7
cuugacucagauucg

SEQ ID NO: 2148880 - RNA, 20 nt, Human herpesvirus 7
aacuaagcauauugaagauc

SEQ ID NO: 2148881 - RNA, 17 nt, Human herpesvirus 7
uaccaaaaaccugaaaa

SEQ ID NO: 2148882 - RNA, 21 nt, Human herpesvirus 7
aaaugucuuugucaugaugaa

SEQ ID NO: 2148883 - RNA, 22 nt, Human herpesvirus 7
guaaacucacuucuaaaagcug

SEQ ID NO: 2148884 - RNA, 18 nt, Human herpesvirus 7
aaacuuagugaugaccac

SEQ ID NO: 2148885 - RNA, 22 nt, Human herpesvirus 7
uuuaccgauucuaaauuaaaaa

SEQ ID NO: 2148886 - RNA, 22 nt, Human herpesvirus 7
acagaucuugcuuuagaacaau

SEQ ID NO: 2148887 - RNA, 16 nt, Human herpesvirus 7
cuuucauaacaaagug

SEQ ID NO: 2148888 - RNA, 15 nt, Human herpesvirus 7
acuaauaaaaauuac

SEQ ID NO: 2148889 - RNA, 18 nt, Human herpesvirus 7
ugcaauaugcauguguaa

SEQ ID NO: 2148890 - RNA, 14 nt, Human herpesvirus 7
cugguugauuugag

SEQ ID NO: 2148891 - RNA, 15 nt, Human herpesvirus 7
aagauuaaaugggcu

SEQ ID NO: 2148892 - RNA, 19 nt, Human herpesvirus 7
cugcuggaaagcuugugaa

SEQ ID NO: 2148893 - RNA, 15 nt, Human herpesvirus 7
uagccauaaaugcuu

SEQ ID NO: 2148894 - RNA, 14 nt, Human herpesvirus 7
uauucuauuucaac

SEQ ID NO: 2148895 - RNA, 15 nt, Human herpesvirus 7
aguuuguuucaauau

SEQ ID NO: 2148896 - RNA, 17 nt, Human herpesvirus 7
aauuuuccauucauuuc

SEQ ID NO: 2148897 - RNA, 23 nt, Human herpesvirus 7
aauaaauuuuucgaucuguaaaa

SEQ ID NO: 2148898 - RNA, 13 nt, Human herpesvirus 7
aaaauugaaaaga

SEQ ID NO: 2148899 - RNA, 17 nt, Human herpesvirus 7
uguauugucuuacagca

SEQ ID NO: 2148900 - RNA, 23 nt, Human herpesvirus 7
aauuguuuuucuuucuugcauac

SEQ ID NO: 2148901 - RNA, 20 nt, Human herpesvirus 7
uaacaaaaaagguguugaua

SEQ ID NO: 2148902 - RNA, 14 nt, Human herpesvirus 7
aauuaaucaaacaa

SEQ ID NO: 2148903 - RNA, 12 nt, Human herpesvirus 7
auucuuucaguu

SEQ ID NO: 2148904 - RNA, 20 nt, Human herpesvirus 7
acggcucuaacauuaaaacu

SEQ ID NO: 2148905 - RNA, 13 nt, Human herpesvirus 7
caggauuugggaa

SEQ ID NO: 2148906 - RNA, 21 nt, Human herpesvirus 7
uuagucggcacacguacaaua

SEQ ID NO: 2148907 - RNA, 13 nt, Human herpesvirus 7
augugcuuuuuuc

SEQ ID NO: 2148908 - RNA, 13 nt, Human herpesvirus 7
aacauuuguugcu

SEQ ID NO: 2148909 - RNA, 22 nt, Human herpesvirus 7
aucuacauccuuaaauuuuaca

SEQ ID NO: 2148910 - RNA, 14 nt, Human herpesvirus 7
aggaucucucuuuc

SEQ ID NO: 2148911 - RNA, 21 nt, Human herpesvirus 7
uuaauaaaaaacaaauaacug

SEQ ID NO: 2148912 - RNA, 21 nt, Human herpesvirus 7
aaugcagccuacuuuuaaaau

SEQ ID NO: 2148913 - RNA, 20 nt, Human herpesvirus 7
uuacagccuguacaaauuuc

SEQ ID NO: 2148914 - RNA, 18 nt, Human herpesvirus 7
uucaauugguuguucaaa

SEQ ID NO: 2148915 - RNA, 15 nt, Human herpesvirus 7
uaacagguaaauugu

SEQ ID NO: 2148916 - RNA, 12 nt, Human herpesvirus 7
gcucuaaacaaa

SEQ ID NO: 2148917 - RNA, 20 nt, Human herpesvirus 7
acauuuacaaaaaaaagcuu

SEQ ID NO: 2148918 - RNA, 14 nt, Human herpesvirus 7
agcuuucuuucuca

SEQ ID NO: 2148919 - RNA, 20 nt, Human herpesvirus 7
auccaaaaagaaacuuucua

SEQ ID NO: 2148920 - RNA, 19 nt, Human herpesvirus 7
acuccauucgguuuucaaa

SEQ ID NO: 2148921 - RNA, 15 nt, Human herpesvirus 7
gugcuuccucuggau

SEQ ID NO: 2148922 - RNA, 22 nt, Human herpesvirus 7
aaauucgcugaugaaaauauga

SEQ ID NO: 2148923 - RNA, 17 nt, Human herpesvirus 7
aagaugcguagcuacag

SEQ ID NO: 2148924 - RNA, 20 nt, Human herpesvirus 7
ccguugaguugcugcugucu

SEQ ID NO: 2148925 - RNA, 11 nt, Human herpesvirus 7
gacauguuucu

SEQ ID NO: 2148926 - RNA, 19 nt, Human herpesvirus 7
ggaaaugucuuugucauga

SEQ ID NO: 2148927 - RNA, 17 nt, Human herpesvirus 7
accaaauauaugcuuua

SEQ ID NO: 2148928 - RNA, 18 nt, Human herpesvirus 7
ugaacaaguagugcuaau

SEQ ID NO: 2148929 - RNA, 17 nt, Human herpesvirus 7
gcauuauuguauaugau

SEQ ID NO: 2148930 - RNA, 14 nt, Human herpesvirus 7
agucucuaaacuuc

SEQ ID NO: 2148931 - RNA, 15 nt, Human herpesvirus 7
aaggaaaaauuucuu

SEQ ID NO: 2148932 - RNA, 16 nt, Human herpesvirus 7
cacugcaaauuguaaa

SEQ ID NO: 2148933 - RNA, 14 nt, Human herpesvirus 7
caaauccacucugg

SEQ ID NO: 2148934 - RNA, 21 nt, Human herpesvirus 7
aaaguauggaaaaauguuaug

SEQ ID NO: 2148935 - RNA, 13 nt, Human herpesvirus 7
aaauugaauagau

SEQ ID NO: 2148936 - RNA, 19 nt, Human herpesvirus 7
gaagacauauuagauuaua

SEQ ID NO: 2148937 - RNA, 22 nt, Human herpesvirus 7
acauucagaaaaaaucaaaaca

SEQ ID NO: 2148938 - RNA, 14 nt, Human herpesvirus 7
uucuuguuuggaaa

SEQ ID NO: 2148939 - RNA, 16 nt, Human herpesvirus 7
aauaucccagaauauc

SEQ ID NO: 2148940 - RNA, 17 nt, Human herpesvirus 7
aauguagacguaguguc

SEQ ID NO: 2148941 - RNA, 13 nt, Human herpesvirus 7
uacauuuugcaau

SEQ ID NO: 2148942 - RNA, 20 nt, Human herpesvirus 7
agaggacuugaaaaauuuuu

SEQ ID NO: 2148943 - RNA, 16 nt, Human herpesvirus 7
gaacuguugccagaaa

SEQ ID NO: 2148944 - RNA, 16 nt, Human herpesvirus 7
acagucauuugcaguu

SEQ ID NO: 2148945 - RNA, 23 nt, Human herpesvirus 7
gagaauguugagcuaucugauuu

SEQ ID NO: 2148946 - RNA, 16 nt, Human herpesvirus 7
acguccauugauuaaa

SEQ ID NO: 2148947 - RNA, 18 nt, Human herpesvirus 7
accuaaagugaacaugac

SEQ ID NO: 2148948 - RNA, 14 nt, Human herpesvirus 7
aaucaacaaaauga

SEQ ID NO: 2148949 - RNA, 22 nt, Human herpesvirus 7
uccaucuuaugauaaagaaaac

SEQ ID NO: 2148950 - RNA, 18 nt, Human herpesvirus 7
cagaauacuacucagaag

SEQ ID NO: 2148951 - RNA, 16 nt, Human herpesvirus 7
ugucuauuaaaugcgu

SEQ ID NO: 2148952 - RNA, 14 nt, Human herpesvirus 7
gauccguaacugca

SEQ ID NO: 2148953 - RNA, 13 nt, Human herpesvirus 7
agauucuuaauuu

SEQ ID NO: 2148954 - RNA, 20 nt, Human herpesvirus 7
acuggagagaauaagcaaau

SEQ ID NO: 2148955 - RNA, 14 nt, Human herpesvirus 7
guucguaacaaauu

SEQ ID NO: 2148956 - RNA, 22 nt, Human herpesvirus 7
augaaggaugcguguguucaaa

SEQ ID NO: 2148957 - RNA, 22 nt, Human herpesvirus 7
caucuuaaaaguacaaauguuu

SEQ ID NO: 2148958 - RNA, 14 nt, Human herpesvirus 7
ucauugugugucuu

SEQ ID NO: 2148959 - RNA, 19 nt, Human herpesvirus 7
aagaacuucagauuuuagu

SEQ ID NO: 2148960 - RNA, 12 nt, Human herpesvirus 7
auacuaauagaa

SEQ ID NO: 2148961 - RNA, 21 nt, Human herpesvirus 7
cugcaaccugauaaauacuca

SEQ ID NO: 2148962 - RNA, 15 nt, Human herpesvirus 7
cugaagcauggauuu

SEQ ID NO: 2148963 - RNA, 20 nt, Human herpesvirus 7
uuccgcgcgguauaaugcac

SEQ ID NO: 2148964 - RNA, 12 nt, Human herpesvirus 7
aaaauccuggau

SEQ ID NO: 2148965 - RNA, 15 nt, Human herpesvirus 7
gcuauucauuucacg

SEQ ID NO: 2148966 - RNA, 18 nt, Human herpesvirus 7
ugcagaaaaauccaaaau

SEQ ID NO: 2148967 - RNA, 21 nt, Human herpesvirus 7
uuuaauuuggaaauuguuuga

SEQ ID NO: 2148968 - RNA, 21 nt, Human herpesvirus 7
gguuaaaaaaaugaauaacua

SEQ ID NO: 2148969 - RNA, 18 nt, Human herpesvirus 7
ucgauuagguaauagcuu

SEQ ID NO: 2148970 - RNA, 20 nt, Human herpesvirus 7
uauugaauguggaauuaaau

SEQ ID NO: 2148971 - RNA, 14 nt, Human herpesvirus 7
aaaugcauugcuuu

SEQ ID NO: 2148972 - RNA, 22 nt, Human herpesvirus 7
aaagaaaaagcaacaaauguuu

SEQ ID NO: 2148973 - RNA, 13 nt, Human herpesvirus 7
caucccuggacag

SEQ ID NO: 2148974 - RNA, 12 nt, Human herpesvirus 7
aaaaguguucaa

SEQ ID NO: 2148975 - RNA, 18 nt, Human herpesvirus 7
gcugauuauucaugcaga

SEQ ID NO: 2148976 - RNA, 23 nt, Human herpesvirus 7
uaaauuuugaauguuuacaugua

SEQ ID NO: 2148977 - RNA, 19 nt, Human herpesvirus 7
gucagaacaucccuggaca

SEQ ID NO: 2148978 - RNA, 23 nt, Human herpesvirus 7
caccaaaaaauaaaaacaagcuu

SEQ ID NO: 2148979 - RNA, 23 nt, Human herpesvirus 7
aagucacaauuacacaaauugau

SEQ ID NO: 2148980 - RNA, 18 nt, Human herpesvirus 7
cuagaacuguuaaaaucu

SEQ ID NO: 2148981 - RNA, 14 nt, Human herpesvirus 7
augaauaucuguuu

SEQ ID NO: 2148982 - RNA, 19 nt, Human herpesvirus 7
uggguaauuuuaaaacuga

SEQ ID NO: 2148983 - RNA, 23 nt, Human herpesvirus 7
caaaaacguuaccguuuaaugaa

SEQ ID NO: 2148984 - RNA, 19 nt, Human herpesvirus 7
auauuaaaaaccacagagg

SEQ ID NO: 2148985 - RNA, 18 nt, Human herpesvirus 7
acggauuuacauuucauu

SEQ ID NO: 2148986 - RNA, 22 nt, Human herpesvirus 7
aaaacgugugaaaacaauuaag

SEQ ID NO: 2148987 - RNA, 15 nt, Human herpesvirus 7
ucagaauagacaucu

SEQ ID NO: 2148988 - RNA, 15 nt, Human herpesvirus 7
uauauggcaauaaau

SEQ ID NO: 2148989 - RNA, 23 nt, Human herpesvirus 7
caguaacuacaggcuuacacuau

SEQ ID NO: 2148990 - RNA, 13 nt, Human herpesvirus 7
uuccucuggaaaa

SEQ ID NO: 2148991 - RNA, 22 nt, Human herpesvirus 7
ugacucagauucgacuucuaaa

SEQ ID NO: 2148992 - RNA, 22 nt, Human herpesvirus 7
cuuauuuauauauggcaauaaa

SEQ ID NO: 2148993 - RNA, 17 nt, Human herpesvirus 7
acuucuaguucugaaau

SEQ ID NO: 2148994 - RNA, 13 nt, Human herpesvirus 7
cucuagaaaaucu

SEQ ID NO: 2148995 - RNA, 21 nt, Human herpesvirus 7
cagauaaaaauuuauuuucua

SEQ ID NO: 2148996 - RNA, 22 nt, Human herpesvirus 7
uggguuaacgaaacgcuagaau

SEQ ID NO: 2148997 - RNA, 16 nt, Human herpesvirus 7
cuuggaguuugucuca

SEQ ID NO: 2148998 - RNA, 20 nt, Human herpesvirus 7
uucagaaaauaaaaguaaaa

SEQ ID NO: 2148999 - RNA, 19 nt, Human herpesvirus 7
cccuggaacguccucugga

SEQ ID NO: 2149000 - RNA, 12 nt, Human herpesvirus 7
aaaauagccgau

SEQ ID NO: 2149001 - RNA, 19 nt, Human herpesvirus 7
caaaaccguuggaugcacu

SEQ ID NO: 2149002 - RNA, 21 nt, Human herpesvirus 7
uuaacacguagaaaaaaacaa

SEQ ID NO: 2149003 - RNA, 12 nt, Human herpesvirus 7
cuaaauuuccuu

SEQ ID NO: 2149004 - RNA, 15 nt, Human herpesvirus 7
cugauacgcuuucug

SEQ ID NO: 2149005 - RNA, 15 nt, Human herpesvirus 7
augcucgauauacau

SEQ ID NO: 2149006 - RNA, 23 nt, Human herpesvirus 7
uuuacuuuugagcgcugaaauaa

SEQ ID NO: 2149007 - RNA, 15 nt, Human herpesvirus 7
aauuauuagauucca

SEQ ID NO: 2149008 - RNA, 17 nt, Human herpesvirus 7
ggaaaaaggauuugaag

SEQ ID NO: 2149009 - RNA, 12 nt, Human herpesvirus 7
auagaguuuaau

SEQ ID NO: 2149010 - RNA, 14 nt, Human herpesvirus 7
auaaaauuuuucau

SEQ ID NO: 2149011 - RNA, 15 nt, Human herpesvirus 7
aaugucucuugaaga

SEQ ID NO: 2149012 - RNA, 15 nt, Human herpesvirus 7
caagaagaugacauu

SEQ ID NO: 2149013 - RNA, 20 nt, Human herpesvirus 7
gccugaagagauuaagguga

SEQ ID NO: 2149014 - RNA, 19 nt, Human herpesvirus 7
uugaauucguuaagcaccg

SEQ ID NO: 2149015 - RNA, 12 nt, Human herpesvirus 7
aucaaaauccug

SEQ ID NO: 2149016 - RNA, 19 nt, Human herpesvirus 7
uuuugauccgauuuaucaa

SEQ ID NO: 2149017 - RNA, 23 nt, Human herpesvirus 7
ugaaaauuuccuacaaaaguucu

SEQ ID NO: 2149018 - RNA, 19 nt, Human herpesvirus 7
aaugaauuuuaaguggaau

SEQ ID NO: 2149019 - RNA, 15 nt, Human herpesvirus 7
uuccauuucaaaaga

SEQ ID NO: 2149020 - RNA, 21 nt, Human herpesvirus 7
auguuuuagaccuaucaaauu

SEQ ID NO: 2149021 - RNA, 16 nt, Human herpesvirus 7
gaggucuacuggacca

SEQ ID NO: 2149022 - RNA, 17 nt, Human herpesvirus 7
uuauaaugauguaaugu

SEQ ID NO: 2149023 - RNA, 14 nt, Human herpesvirus 7
auuuuuuaaagaaa

SEQ ID NO: 2149024 - RNA, 23 nt, Human herpesvirus 7
acaaugguguuaacaaucuuaca

SEQ ID NO: 2149025 - RNA, 21 nt, Human herpesvirus 7
uuuuauaauacuggcaugucu

SEQ ID NO: 2149026 - RNA, 23 nt, Human herpesvirus 7
cuggaugaaaacugaauugguaa

SEQ ID NO: 2149027 - RNA, 17 nt, Human herpesvirus 7
ugaaauaagaugcuuaa

SEQ ID NO: 2149028 - RNA, 17 nt, Human herpesvirus 7
acuauguccaaaaauuu

SEQ ID NO: 2149029 - RNA, 16 nt, Human herpesvirus 7
gcaacuuugugccuga

SEQ ID NO: 2149030 - RNA, 18 nt, Human herpesvirus 7
ugcauacucuuguugacu

SEQ ID NO: 2149031 - RNA, 23 nt, Human herpesvirus 7
cggauagcggucaucucacuuca

SEQ ID NO: 2149032 - RNA, 13 nt, Human herpesvirus 7
cuacuaugggcug

SEQ ID NO: 2149033 - RNA, 16 nt, Human herpesvirus 7
gaaaauaacaggaaac

SEQ ID NO: 2149034 - RNA, 19 nt, Human herpesvirus 7
aacgauaugguuugaaaac

SEQ ID NO: 2149035 - RNA, 23 nt, Human herpesvirus 7
auuuacuaucgacaaacagaaaa

SEQ ID NO: 2149036 - RNA, 22 nt, Human herpesvirus 7
cauagacauuauuagacagaua

SEQ ID NO: 2149037 - RNA, 14 nt, Human herpesvirus 7
auaauuuaaaauua

SEQ ID NO: 2149038 - RNA, 18 nt, Human herpesvirus 7
aaaucacugcucaaauca

SEQ ID NO: 2149039 - RNA, 22 nt, Human herpesvirus 7
uaauauuuuaccgguacauuua

SEQ ID NO: 2149040 - RNA, 21 nt, Human herpesvirus 7
uuugaucuacauauacuuuua

SEQ ID NO: 2149041 - RNA, 20 nt, Human herpesvirus 7
uaaaauuaucggaaauuuug

SEQ ID NO: 2149042 - RNA, 16 nt, Human herpesvirus 7
uuuugaauguuuacau

SEQ ID NO: 2149043 - RNA, 16 nt, Human herpesvirus 7
acagguaaauuguaaa

SEQ ID NO: 2149044 - RNA, 17 nt, Human herpesvirus 7
caucuuaaaaguacaaa

SEQ ID NO: 2149045 - RNA, 20 nt, Human herpesvirus 7
acauuuauuauuuuuaaaaa

SEQ ID NO: 2149046 - RNA, 21 nt, Human herpesvirus 7
agacuaaauauggagcagcuu

SEQ ID NO: 2149047 - RNA, 22 nt, Human herpesvirus 7
aauuguaaguaaauuuacuuga

SEQ ID NO: 2149048 - RNA, 23 nt, Human herpesvirus 7
gucucagagaacuagaacagcug

SEQ ID NO: 2149049 - RNA, 20 nt, Human herpesvirus 7
acacaguugaauaaagauua

SEQ ID NO: 2149050 - RNA, 15 nt, Human herpesvirus 7
ccaaaaucaaaaaac

SEQ ID NO: 2149051 - RNA, 21 nt, Human herpesvirus 7
cugacauacgaaucaguucaa

SEQ ID NO: 2149052 - RNA, 14 nt, Human herpesvirus 7
ugagcgcugaaaua

SEQ ID NO: 2149053 - RNA, 18 nt, Human herpesvirus 7
agaaugugguaaaaaagu

SEQ ID NO: 2149054 - RNA, 20 nt, Human herpesvirus 7
acguucuuggucauuaaaaa

SEQ ID NO: 2149055 - RNA, 12 nt, Human herpesvirus 7
agaaacaagguu

SEQ ID NO: 2149056 - RNA, 20 nt, Human herpesvirus 7
caucuaauugcagacuaauu

SEQ ID NO: 2149057 - RNA, 22 nt, Human herpesvirus 7
uaaaucaguuguuggaaauacc

SEQ ID NO: 2149058 - RNA, 16 nt, Human herpesvirus 7
uuuggcaacucuuccu

SEQ ID NO: 2149059 - RNA, 15 nt, Human herpesvirus 7
cagagggcauuugua

SEQ ID NO: 2149060 - RNA, 23 nt, Human herpesvirus 7
uguuaaaacuuggauaaccaaac

SEQ ID NO: 2149061 - RNA, 22 nt, Human herpesvirus 7
auuugcagccagaacucaauuu

SEQ ID NO: 2149062 - RNA, 22 nt, Human herpesvirus 7
ugaacacuuuuacgugacuguc

SEQ ID NO: 2149063 - RNA, 21 nt, Human herpesvirus 7
cagacgaauuucuuugcgcug

SEQ ID NO: 2149064 - RNA, 13 nt, Human herpesvirus 7
aaaguugaaaaug

SEQ ID NO: 2149065 - RNA, 23 nt, Human herpesvirus 7
gcuugaugaaucaaaauuagacg

SEQ ID NO: 2149066 - RNA, 20 nt, Human herpesvirus 7
uuucuucgggguauguaugg

SEQ ID NO: 2149067 - RNA, 12 nt, Human herpesvirus 7
aauauuuagagu

SEQ ID NO: 2149068 - RNA, 17 nt, Human herpesvirus 7
uguccaaucaaaaacug

SEQ ID NO: 2149069 - RNA, 20 nt, Human herpesvirus 7
cgcauuuuguauuaaaggaa

SEQ ID NO: 2149070 - RNA, 23 nt, Human herpesvirus 7
agaauggcgaguuacauuucacu

SEQ ID NO: 2149071 - RNA, 11 nt, Human herpesvirus 7
acuuugaaauc

SEQ ID NO: 2149072 - RNA, 13 nt, Human herpesvirus 7
ugaauaaaaucua

SEQ ID NO: 2149073 - RNA, 13 nt, Human herpesvirus 7
uauguucaaauau

SEQ ID NO: 2149074 - RNA, 23 nt, Human herpesvirus 7
ggagugcgcggauuaagagaaaa

SEQ ID NO: 2149075 - RNA, 21 nt, Human herpesvirus 7
aggguauuguucacagcaauu

SEQ ID NO: 2149076 - RNA, 21 nt, Human herpesvirus 7
gaaagucagaacauugucaaa

SEQ ID NO: 2149077 - RNA, 15 nt, Human herpesvirus 7
caaaagcugcagcug

SEQ ID NO: 2149078 - RNA, 20 nt, Human herpesvirus 7
cauaauuuuaauaaacggug

SEQ ID NO: 2149079 - RNA, 22 nt, Human herpesvirus 7
gcacugauaaucaagaaacaug

SEQ ID NO: 2149080 - RNA, 21 nt, Human herpesvirus 7
uuuaaaaaaaaaaccacaaaa

SEQ ID NO: 2149081 - RNA, 12 nt, Human herpesvirus 7
ggcuucuucuaa

SEQ ID NO: 2149082 - RNA, 19 nt, Human herpesvirus 7
gaagcugacuuugucauga

SEQ ID NO: 2149083 - RNA, 15 nt, Human herpesvirus 7
cuuuuagaaaucuuu

SEQ ID NO: 2149084 - RNA, 21 nt, Human herpesvirus 7
guaaagauuuaacugauaauu

SEQ ID NO: 2149085 - RNA, 21 nt, Human herpesvirus 7
gcuaagaaagaacauuuuucu

SEQ ID NO: 2149086 - RNA, 21 nt, Human herpesvirus 7
cauuucaucauccgaaucugu

SEQ ID NO: 2149087 - RNA, 18 nt, Human herpesvirus 7
uaaauauuuuuaaaaucu

SEQ ID NO: 2149088 - RNA, 20 nt, Human herpesvirus 7
cuagcguuucguuaacccag

SEQ ID NO: 2149089 - RNA, 16 nt, Human herpesvirus 7
caggcugcaucuuuuc

SEQ ID NO: 2149090 - RNA, 19 nt, Human herpesvirus 7
ccccuggaacguccucugg

SEQ ID NO: 2149091 - RNA, 13 nt, Human herpesvirus 7
caagaacugugaa

SEQ ID NO: 2149092 - RNA, 16 nt, Human herpesvirus 7
augaacaaguuucaaa

SEQ ID NO: 2149093 - RNA, 20 nt, Human herpesvirus 7
ucuaucaaggucuuucaugc

SEQ ID NO: 2149094 - RNA, 12 nt, Human herpesvirus 7
cacuguuguagg

SEQ ID NO: 2149095 - RNA, 22 nt, Human herpesvirus 7
uguuugaucaaaaucuguagaa

SEQ ID NO: 2149096 - RNA, 22 nt, Human herpesvirus 7
aacauaaaaacuaaguuuugca

SEQ ID NO: 2149097 - RNA, 19 nt, Human herpesvirus 7
aacaccccuugcagaaacu

SEQ ID NO: 2149098 - RNA, 22 nt, Human herpesvirus 7
gagcuguguccacuacagauau

SEQ ID NO: 2149099 - RNA, 22 nt, Human herpesvirus 7
gcacuugcucugugaaacaaug

SEQ ID NO: 2149100 - RNA, 18 nt, Human herpesvirus 7
cuuauaacugugaaaaca

SEQ ID NO: 2149101 - RNA, 16 nt, Human herpesvirus 7
ucgacuuccucucgug

SEQ ID NO: 2149102 - RNA, 17 nt, Human herpesvirus 7
cuuugucacuuaaagaa

SEQ ID NO: 2149103 - RNA, 13 nt, Human herpesvirus 7
ucaaaaucagaaa

SEQ ID NO: 2149104 - RNA, 14 nt, Human herpesvirus 7
acuuuuaacuguua

SEQ ID NO: 2149105 - RNA, 16 nt, Human herpesvirus 7
uuuuaauaugugaaaa

SEQ ID NO: 2149106 - RNA, 11 nt, Human herpesvirus 7
aaauagcaaag

SEQ ID NO: 2149107 - RNA, 23 nt, Human herpesvirus 7
accacaaccgauaaaagguguuu

SEQ ID NO: 2149108 - RNA, 23 nt, Human herpesvirus 7
uuuacagaagaacauuuauuauu

SEQ ID NO: 2149109 - RNA, 15 nt, Human herpesvirus 7
ugauuuauauagcaa

SEQ ID NO: 2149110 - RNA, 19 nt, Human herpesvirus 7
agauguuuuugauauugua

SEQ ID NO: 2149111 - RNA, 17 nt, Human herpesvirus 7
uaugaauugaaauuucu

SEQ ID NO: 2149112 - RNA, 19 nt, Human herpesvirus 7
aaauuauuauuaguauugu

SEQ ID NO: 2149113 - RNA, 14 nt, Human herpesvirus 7
aaaugguugugcaa

SEQ ID NO: 2149114 - RNA, 14 nt, Human herpesvirus 7
gcaacauuaauaaa

SEQ ID NO: 2149115 - RNA, 17 nt, Human herpesvirus 7
aauccaaguuuuacaga

SEQ ID NO: 2149116 - RNA, 19 nt, Human herpesvirus 7
uaacgaauuuuuccaugug

SEQ ID NO: 2149117 - RNA, 20 nt, Human herpesvirus 7
aggaucaaaagcugcagcug

SEQ ID NO: 2149118 - RNA, 23 nt, Human herpesvirus 7
gaaguugaucgucuguugaaaca

SEQ ID NO: 2149119 - RNA, 12 nt, Human herpesvirus 7
uaggggaagaau

SEQ ID NO: 2149120 - RNA, 18 nt, Human herpesvirus 7
ugguugauuugagcagug

SEQ ID NO: 2149121 - RNA, 14 nt, Human herpesvirus 7
caguuguuggaaau

SEQ ID NO: 2149122 - RNA, 23 nt, Human herpesvirus 7
uuuauugaauggaacauguuugu

SEQ ID NO: 2149123 - RNA, 13 nt, Human herpesvirus 7
aaacaaacucugc

SEQ ID NO: 2149124 - RNA, 18 nt, Human herpesvirus 7
uaaauaucccuagaagau

SEQ ID NO: 2149125 - RNA, 14 nt, Human herpesvirus 7
aauaugugaaaaua

SEQ ID NO: 2149126 - RNA, 22 nt, Human herpesvirus 7
guucauauacuucuugccccca

SEQ ID NO: 2149127 - RNA, 17 nt, Human herpesvirus 7
uaguuaguguucuucua

SEQ ID NO: 2149128 - RNA, 20 nt, Human herpesvirus 7
ugaaauuguaguuuuugcau

SEQ ID NO: 2149129 - RNA, 20 nt, Human herpesvirus 7
cuaguugcaacucuucuuca

SEQ ID NO: 2149130 - RNA, 17 nt, Human herpesvirus 7
auaagcaaauaaauugu

SEQ ID NO: 2149131 - RNA, 15 nt, Human herpesvirus 7
caguguuuaaaaugu

SEQ ID NO: 2149132 - RNA, 16 nt, Human herpesvirus 7
cauauuuugcuagaaa

SEQ ID NO: 2149133 - RNA, 11 nt, Human herpesvirus 7
uuuugccuuca

SEQ ID NO: 2149134 - RNA, 13 nt, Human herpesvirus 7
uaaaguuuacuua

SEQ ID NO: 2149135 - RNA, 14 nt, Human herpesvirus 7
guugauucucucuc

SEQ ID NO: 2149136 - RNA, 23 nt, Human herpesvirus 7
aaauucuucagguuguugucauu

SEQ ID NO: 2149137 - RNA, 16 nt, Human herpesvirus 7
aaaguugaaaauguuu

SEQ ID NO: 2149138 - RNA, 18 nt, Human herpesvirus 7
cuuugaaucuauuaaaga

SEQ ID NO: 2149139 - RNA, 11 nt, Human herpesvirus 7
ucaugaaggau

SEQ ID NO: 2149140 - RNA, 14 nt, Human herpesvirus 7
aaauaaaguuuacu

SEQ ID NO: 2149141 - RNA, 13 nt, Human herpesvirus 7
aacauugcuucag

SEQ ID NO: 2149142 - RNA, 19 nt, Human herpesvirus 7
agguugaguugacaauauu

SEQ ID NO: 2149143 - RNA, 15 nt, Human herpesvirus 7
cacucuccugaaaua

SEQ ID NO: 2149144 - RNA, 23 nt, Human herpesvirus 7
cuaaccccgcucuuuuauuuuca

SEQ ID NO: 2149145 - RNA, 15 nt, Human herpesvirus 7
guuaaugucucuguu

SEQ ID NO: 2149146 - RNA, 15 nt, Human herpesvirus 7
cagaauuuccagaag

SEQ ID NO: 2149147 - RNA, 16 nt, Human herpesvirus 7
accgguuaaaauggga

SEQ ID NO: 2149148 - RNA, 14 nt, Human herpesvirus 7
cauuuccgagacag

SEQ ID NO: 2149149 - RNA, 17 nt, Human herpesvirus 7
ucuuaucuccauucuaa

SEQ ID NO: 2149150 - RNA, 13 nt, Human herpesvirus 7
aaugagccugaca

SEQ ID NO: 2149151 - RNA, 12 nt, Human herpesvirus 7
uuuuaacuuuuu

SEQ ID NO: 2149152 - RNA, 20 nt, Human herpesvirus 7
uaaaaacuaaguuuugcauu

SEQ ID NO: 2149153 - RNA, 15 nt, Human herpesvirus 7
uauaaaagaaacuuu

SEQ ID NO: 2149154 - RNA, 23 nt, Human herpesvirus 7
gugcaauuaaaauguacauaacu

SEQ ID NO: 2149155 - RNA, 15 nt, Human herpesvirus 7
aaccauuuauuuaca

SEQ ID NO: 2149156 - RNA, 16 nt, Human herpesvirus 7
auuccaaaauguaaac

SEQ ID NO: 2149157 - RNA, 16 nt, Human herpesvirus 7
aaaucauguuuaagaa

SEQ ID NO: 2149158 - RNA, 19 nt, Human herpesvirus 7
uagaacuugcgaauacuug

SEQ ID NO: 2149159 - RNA, 21 nt, Human herpesvirus 7
ugcaauaugcuagaagacugc

SEQ ID NO: 2149160 - RNA, 12 nt, Human herpesvirus 7
aaagacggaauu

SEQ ID NO: 2149161 - RNA, 21 nt, Human herpesvirus 7
uuucaaaauuuuauugucuaa

SEQ ID NO: 2149162 - RNA, 14 nt, Human herpesvirus 7
ucaaacauuauucg

SEQ ID NO: 2149163 - RNA, 17 nt, Human herpesvirus 7
cuggaugauguuauaca

SEQ ID NO: 2149164 - RNA, 12 nt, Human herpesvirus 7
gugugcaaugau

SEQ ID NO: 2149165 - RNA, 21 nt, Human herpesvirus 7
aauuuacuugauuuucuuaca

SEQ ID NO: 2149166 - RNA, 17 nt, Human herpesvirus 7
guugccagaaaucuggu

SEQ ID NO: 2149167 - RNA, 14 nt, Human herpesvirus 7
cugggauagaaaug

SEQ ID NO: 2149168 - RNA, 21 nt, Human herpesvirus 7
aaauuuagcaccaacugaauu

SEQ ID NO: 2149169 - RNA, 18 nt, Human herpesvirus 7
gguuuuaaaauagaaaau

SEQ ID NO: 2149170 - RNA, 18 nt, Human herpesvirus 7
aaucuggacauuucaaga

SEQ ID NO: 2149171 - RNA, 18 nt, Human herpesvirus 7
uagaaaaacacuagcuuu

SEQ ID NO: 2149172 - RNA, 22 nt, Human herpesvirus 7
aaaagaauggcgguuguacugu

SEQ ID NO: 2149173 - RNA, 21 nt, Human herpesvirus 7
uuccagauaugacaaauuuca

SEQ ID NO: 2149174 - RNA, 22 nt, Human herpesvirus 7
aacuggaauuauacacugugaa

SEQ ID NO: 2149175 - RNA, 20 nt, Human herpesvirus 7
uugguggauccguaacugca

SEQ ID NO: 2149176 - RNA, 19 nt, Human herpesvirus 7
aucuggaaucgaauacagu

SEQ ID NO: 2149177 - RNA, 21 nt, Human herpesvirus 7
aagaacauuaauaucaauuug

SEQ ID NO: 2149178 - RNA, 20 nt, Human herpesvirus 7
aaaagcuuacucuuucugac

SEQ ID NO: 2149179 - RNA, 18 nt, Human herpesvirus 7
ccuaaaaaaaaaggaaaa

SEQ ID NO: 2149180 - RNA, 19 nt, Human herpesvirus 7
acgccaaaucuaauuuaug

SEQ ID NO: 2149181 - RNA, 14 nt, Human herpesvirus 7
agcuucuaaaugug

SEQ ID NO: 2149182 - RNA, 16 nt, Human herpesvirus 7
uugaaauuguaguuuu

SEQ ID NO: 2149183 - RNA, 16 nt, Human herpesvirus 7
gcgccaaaaaaacaca

SEQ ID NO: 2149184 - RNA, 15 nt, Human herpesvirus 7
aagguugucuguucu

SEQ ID NO: 2149185 - RNA, 22 nt, Human herpesvirus 7
uaauaucaauuugaauauugcu

SEQ ID NO: 2149186 - RNA, 14 nt, Human herpesvirus 7
augcauccaaagaa

SEQ ID NO: 2149187 - RNA, 16 nt, Human herpesvirus 7
ucauagagaaaacauu

SEQ ID NO: 2149188 - RNA, 15 nt, Human herpesvirus 7
caauuaaaguauuua

SEQ ID NO: 2149189 - RNA, 15 nt, Human herpesvirus 7
acaacgacauugaaa

SEQ ID NO: 2149190 - RNA, 16 nt, Human herpesvirus 7
uucugacuccuuuuuu

SEQ ID NO: 2149191 - RNA, 22 nt, Human herpesvirus 7
acuaacauuuuaauaugugaaa

SEQ ID NO: 2149192 - RNA, 21 nt, Human herpesvirus 7
uuacucaugaagcuguacaac

SEQ ID NO: 2149193 - RNA, 18 nt, Human herpesvirus 7
auuuugucuuuagauaga

SEQ ID NO: 2149194 - RNA, 22 nt, Human herpesvirus 7
uuuuacuucgagaaaauuuagc

SEQ ID NO: 2149195 - RNA, 22 nt, Human herpesvirus 7
ugacauuguacaauuacaaaau

SEQ ID NO: 2149196 - RNA, 14 nt, Human herpesvirus 7
auaaaguuuuguaa

SEQ ID NO: 2149197 - RNA, 15 nt, Human herpesvirus 7
guaagaaaagcaagu

SEQ ID NO: 2149198 - RNA, 18 nt, Human herpesvirus 7
uaccgguuaaaaugggaa

SEQ ID NO: 2149199 - RNA, 14 nt, Human herpesvirus 7
guuuucuuuguaaa

SEQ ID NO: 2149200 - RNA, 17 nt, Human herpesvirus 7
auuuuuauuguaaagga

SEQ ID NO: 2149201 - RNA, 17 nt, Human herpesvirus 7
uaucucauagcuuaaaa

SEQ ID NO: 2149202 - RNA, 13 nt, Human herpesvirus 7
aaucaaauuucaa

SEQ ID NO: 2149203 - RNA, 13 nt, Human herpesvirus 7
auaacuuuaaauu

SEQ ID NO: 2149204 - RNA, 15 nt, Human herpesvirus 7
gauaaugaaacuguu

SEQ ID NO: 2149205 - RNA, 14 nt, Human herpesvirus 7
uucuaggcuucauu

SEQ ID NO: 2149206 - RNA, 18 nt, Human herpesvirus 7
uaaauaaaaaaaauugaa

SEQ ID NO: 2149207 - RNA, 15 nt, Human herpesvirus 7
aucaaauuauaccuc

SEQ ID NO: 2149208 - RNA, 16 nt, Human herpesvirus 7
aggccuuguaaaguaa

SEQ ID NO: 2149209 - RNA, 15 nt, Human herpesvirus 7
uuuaccgguacauuu

SEQ ID NO: 2149210 - RNA, 22 nt, Human herpesvirus 7
auaaacuuacucuucucgaaga

SEQ ID NO: 2149211 - RNA, 12 nt, Human herpesvirus 7
uaucugugacuu

SEQ ID NO: 2149212 - RNA, 19 nt, Human herpesvirus 7
uuuguagcucuagauguuu

SEQ ID NO: 2149213 - RNA, 18 nt, Human herpesvirus 7
caauaugcauguguaaag

SEQ ID NO: 2149214 - RNA, 16 nt, Human herpesvirus 7
uuucuguagacauuuc

SEQ ID NO: 2149215 - RNA, 17 nt, Human herpesvirus 7
uccuaagcuuuucaggc

SEQ ID NO: 2149216 - RNA, 16 nt, Human herpesvirus 7
acgucuucuucugagu

SEQ ID NO: 2149217 - RNA, 17 nt, Human herpesvirus 7
ugaaauaaaauuuuuca

SEQ ID NO: 2149218 - RNA, 14 nt, Human herpesvirus 7
uugauaaaauuugg

SEQ ID NO: 2149219 - RNA, 20 nt, Human herpesvirus 7
acaagcacacuaaaaaagag

SEQ ID NO: 2149220 - RNA, 17 nt, Human herpesvirus 7
cgaauuggaaaaaaaac

SEQ ID NO: 2149221 - RNA, 14 nt, Human herpesvirus 7
aguagaaaaugcug

SEQ ID NO: 2149222 - RNA, 15 nt, Human herpesvirus 7
gagcuuuugcaaagc

SEQ ID NO: 2149223 - RNA, 16 nt, Human herpesvirus 7
guuuucugagugcuaa

SEQ ID NO: 2149224 - RNA, 14 nt, Human herpesvirus 7
gcgcaguguuuaaa

SEQ ID NO: 2149225 - RNA, 16 nt, Human herpesvirus 7
ucuacuaaggugucuu

SEQ ID NO: 2149226 - RNA, 20 nt, Human herpesvirus 7
cauguuaaaaaaucaacuug

SEQ ID NO: 2149227 - RNA, 16 nt, Human herpesvirus 7
uuacauuacuggaugu

SEQ ID NO: 2149228 - RNA, 21 nt, Human herpesvirus 7
ucacaguugcuugugaaggag

SEQ ID NO: 2149229 - RNA, 19 nt, Human herpesvirus 7
uccuaacuauaauagccuu

SEQ ID NO: 2149230 - RNA, 18 nt, Human herpesvirus 7
ugugaaaauaaacaggaa

SEQ ID NO: 2149231 - RNA, 17 nt, Human herpesvirus 7
uuaauaauauuaguauu

SEQ ID NO: 2149232 - RNA, 16 nt, Human herpesvirus 7
uaucuuuacuuucaua

SEQ ID NO: 2149233 - RNA, 16 nt, Human herpesvirus 7
acauucaacaaagaca

SEQ ID NO: 2149234 - RNA, 16 nt, Human herpesvirus 7
cagauacccacggacg

SEQ ID NO: 2149235 - RNA, 18 nt, Human herpesvirus 7
aauauauuccaacucaau

SEQ ID NO: 2149236 - RNA, 18 nt, Human herpesvirus 7
uugaaauagugucuguug

SEQ ID NO: 2149237 - RNA, 23 nt, Human herpesvirus 7
guuaacaaucuuacaaaaaguag

SEQ ID NO: 2149238 - RNA, 19 nt, Human herpesvirus 7
cuuuuuucaguguguauuu

SEQ ID NO: 2149239 - RNA, 22 nt, Human herpesvirus 7
acaugagauaaacuuuuauuca

SEQ ID NO: 2149240 - RNA, 22 nt, Human herpesvirus 7
cugagagaauaaguucaucaug

SEQ ID NO: 2149241 - RNA, 14 nt, Human herpesvirus 7
ucucuaugauccag

SEQ ID NO: 2149242 - RNA, 16 nt, Human herpesvirus 7
guggcuuuugcuuucc

SEQ ID NO: 2149243 - RNA, 23 nt, Human herpesvirus 7
auauuuucuacaacuaaaauuga

SEQ ID NO: 2149244 - RNA, 13 nt, Human herpesvirus 7
acggaacuucuuu

SEQ ID NO: 2149245 - RNA, 13 nt, Human herpesvirus 7
ugaaaucaaaaau

SEQ ID NO: 2149246 - RNA, 17 nt, Human herpesvirus 7
ugucaggcucauuucaa

SEQ ID NO: 2149247 - RNA, 14 nt, Human herpesvirus 7
caauagaaaacaaa

SEQ ID NO: 2149248 - RNA, 16 nt, Human herpesvirus 7
aggucacaaaagcuuu

SEQ ID NO: 2149249 - RNA, 20 nt, Human herpesvirus 7
augcaagaaaguccaaagug

SEQ ID NO: 2149250 - RNA, 19 nt, Human herpesvirus 7
cugauaaauacucaugaag

SEQ ID NO: 2149251 - RNA, 20 nt, Human herpesvirus 7
uguauuuguugaucuucaau

SEQ ID NO: 2149252 - RNA, 17 nt, Human herpesvirus 7
ucaauagcagagaauau

SEQ ID NO: 2149253 - RNA, 17 nt, Human herpesvirus 7
uacaaugcugucucuga

SEQ ID NO: 2149254 - RNA, 15 nt, Human herpesvirus 7
gaauucauuugugaa

SEQ ID NO: 2149255 - RNA, 14 nt, Human herpesvirus 7
caugucacauaaug

SEQ ID NO: 2149256 - RNA, 14 nt, Human herpesvirus 7
uuauguauaucuuu

SEQ ID NO: 2149257 - RNA, 15 nt, Human herpesvirus 7
uaugaaaaaaacauu

SEQ ID NO: 2149258 - RNA, 16 nt, Human herpesvirus 7
aaacgguauguaaauu

SEQ ID NO: 2149259 - RNA, 21 nt, Human herpesvirus 7
gcauuugguaaaaaaaaugga

SEQ ID NO: 2149260 - RNA, 21 nt, Human herpesvirus 7
acacuuuaaccgcaaaagcca

SEQ ID NO: 2149261 - RNA, 23 nt, Human herpesvirus 7
aggaagaggaguauguugcauau

SEQ ID NO: 2149262 - RNA, 21 nt, Human herpesvirus 7
auuuggauugauuuucaaguu

SEQ ID NO: 2149263 - RNA, 22 nt, Human herpesvirus 7
acuguauuuguugaucuucaau

SEQ ID NO: 2149264 - RNA, 12 nt, Human herpesvirus 7
gccaaugaacaa

SEQ ID NO: 2149265 - RNA, 14 nt, Human herpesvirus 7
uuuagauuuaaaac

SEQ ID NO: 2149266 - RNA, 13 nt, Human herpesvirus 7
acaacuagcaaac

SEQ ID NO: 2149267 - RNA, 22 nt, Human herpesvirus 7
gaaaucugguugauuugagcag

SEQ ID NO: 2149268 - RNA, 20 nt, Human herpesvirus 7
uugucacugcaaauuguaaa

SEQ ID NO: 2149269 - RNA, 16 nt, Human herpesvirus 7
uuuaaagggggaaaga

SEQ ID NO: 2149270 - RNA, 19 nt, Human herpesvirus 7
aucaaaauccuggauuuca

SEQ ID NO: 2149271 - RNA, 18 nt, Human herpesvirus 7
uacuacgguuuucagaaa

SEQ ID NO: 2149272 - RNA, 13 nt, Human herpesvirus 7
uaugcuaagaaag

SEQ ID NO: 2149273 - RNA, 19 nt, Human herpesvirus 7
uuacagauuuuauuaaaag

SEQ ID NO: 2149274 - RNA, 21 nt, Human herpesvirus 7
gaaaauauauuaaucuugaaa

SEQ ID NO: 2149275 - RNA, 18 nt, Human herpesvirus 7
auacauucucaaaaauga

SEQ ID NO: 2149276 - RNA, 18 nt, Human herpesvirus 7
cauguguacuaaagccaa

SEQ ID NO: 2149277 - RNA, 16 nt, Human herpesvirus 7
uucuauucaguuucuu

SEQ ID NO: 2149278 - RNA, 20 nt, Human herpesvirus 7
aaauucuuuaauaaaaaaca

SEQ ID NO: 2149279 - RNA, 16 nt, Human herpesvirus 7
auuguaauaauuuaaa

SEQ ID NO: 2149280 - RNA, 23 nt, Human herpesvirus 7
uuccaucaucacgucaugcugua

SEQ ID NO: 2149281 - RNA, 19 nt, Human herpesvirus 7
ucaggacaaucaaacaugu

SEQ ID NO: 2149282 - RNA, 12 nt, Human herpesvirus 7
uuucuguugacu

SEQ ID NO: 2149283 - RNA, 15 nt, Human herpesvirus 7
uucuucuguaaaaga

SEQ ID NO: 2149284 - RNA, 18 nt, Human herpesvirus 7
acuuucuugaagaaauug

SEQ ID NO: 2149285 - RNA, 19 nt, Human herpesvirus 7
aagccacgaugacuuccaa

SEQ ID NO: 2149286 - RNA, 17 nt, Human herpesvirus 7
agauuaaauagcaaagu

SEQ ID NO: 2149287 - RNA, 14 nt, Human herpesvirus 7
uguuaaauaaagag

SEQ ID NO: 2149288 - RNA, 19 nt, Human herpesvirus 7
ggcucuaacauuaaaacua

SEQ ID NO: 2149289 - RNA, 15 nt, Human herpesvirus 7
aucuuugaaaaucuu

SEQ ID NO: 2149290 - RNA, 17 nt, Human herpesvirus 7
aguaaagggaaaaacuu

SEQ ID NO: 2149291 - RNA, 19 nt, Human herpesvirus 7
ucgaaagauuuaaaguuuu

SEQ ID NO: 2149292 - RNA, 20 nt, Human herpesvirus 7
uaaaauguacaauuccugaa

SEQ ID NO: 2149293 - RNA, 21 nt, Human herpesvirus 7
ugauaaauacucaugaaggau

SEQ ID NO: 2149294 - RNA, 13 nt, Human herpesvirus 7
cugaaaaaauaaa

SEQ ID NO: 2149295 - RNA, 15 nt, Human herpesvirus 7
gaguacaugugucgu

SEQ ID NO: 2149296 - RNA, 15 nt, Human herpesvirus 7
uacuuggaaacaaau

SEQ ID NO: 2149297 - RNA, 17 nt, Human herpesvirus 7
gaaauauaugaauaucu

SEQ ID NO: 2149298 - RNA, 22 nt, Human herpesvirus 7
ucuuuaauccguaucuagagaa

SEQ ID NO: 2149299 - RNA, 15 nt, Human herpesvirus 7
aaaauaucuucugaa

SEQ ID NO: 2149300 - RNA, 11 nt, Human herpesvirus 7
gagguggaaaa

SEQ ID NO: 2149301 - RNA, 15 nt, Human herpesvirus 7
uccauucauuuccuc

SEQ ID NO: 2149302 - RNA, 16 nt, Human herpesvirus 7
gucaucccaauaccgu

SEQ ID NO: 2149303 - RNA, 15 nt, Human herpesvirus 7
ccaucacaaaacucu

SEQ ID NO: 2149304 - RNA, 11 nt, Human herpesvirus 7
caaaaaaccau

SEQ ID NO: 2149305 - RNA, 15 nt, Human herpesvirus 7
aucugucuucuuauu

SEQ ID NO: 2149306 - RNA, 22 nt, Human herpesvirus 7
ugaauaaucucaauuaaaacau

SEQ ID NO: 2149307 - RNA, 12 nt, Human herpesvirus 7
augcaaaacaaa

SEQ ID NO: 2149308 - RNA, 19 nt, Human herpesvirus 7
cagaauauuuccagcauca

SEQ ID NO: 2149309 - RNA, 14 nt, Human herpesvirus 7
aagaacuuacauuu

SEQ ID NO: 2149310 - RNA, 23 nt, Human herpesvirus 7
gauauaaaguuuauauuuucuau

SEQ ID NO: 2149311 - RNA, 19 nt, Human herpesvirus 7
acgucaugcggaagaacaa

SEQ ID NO: 2149312 - RNA, 20 nt, Human herpesvirus 7
aaauuuuucgaucuguaaaa

SEQ ID NO: 2149313 - RNA, 21 nt, Human herpesvirus 7
acuacuaaucaugaaaacagu

SEQ ID NO: 2149314 - RNA, 21 nt, Human herpesvirus 7
agaucauaauuacauugcagu

SEQ ID NO: 2149315 - RNA, 21 nt, Human herpesvirus 7
acuauuuaaguauuuuacaac

SEQ ID NO: 2149316 - RNA, 18 nt, Human herpesvirus 7
acaagguuuaaaacauuu

SEQ ID NO: 2149317 - RNA, 16 nt, Human herpesvirus 7
aagauugaagcacaca

SEQ ID NO: 2149318 - RNA, 14 nt, Human herpesvirus 7
cgacauaauuuuaa

SEQ ID NO: 2149319 - RNA, 21 nt, Human herpesvirus 7
acauuucacucauuagaaaca

SEQ ID NO: 2149320 - RNA, 14 nt, Human herpesvirus 7
aaauuaauguaauu

SEQ ID NO: 2149321 - RNA, 19 nt, Human herpesvirus 7
auguuccuuauauuaaaaa

SEQ ID NO: 2149322 - RNA, 15 nt, Human herpesvirus 7
ugguaauaauagugg

SEQ ID NO: 2149323 - RNA, 17 nt, Human herpesvirus 7
ucgaacccuggagagac

SEQ ID NO: 2149324 - RNA, 19 nt, Human herpesvirus 7
ugacagauuuaagugcaca

SEQ ID NO: 2149325 - RNA, 17 nt, Human herpesvirus 7
cuaaaugugcuaaauaa

SEQ ID NO: 2149326 - RNA, 16 nt, Human herpesvirus 7
aggaucuccuggaaag

SEQ ID NO: 2149327 - RNA, 17 nt, Human herpesvirus 7
ugugaaaauaacaggaa

SEQ ID NO: 2149328 - RNA, 16 nt, Human herpesvirus 7
accaguaugaaaucaa

SEQ ID NO: 2149329 - RNA, 23 nt, Human herpesvirus 7
auaaaggaucucucuuucuggag

SEQ ID NO: 2149330 - RNA, 18 nt, Human herpesvirus 7
uacuuauguguuacauga

SEQ ID NO: 2149331 - RNA, 16 nt, Human herpesvirus 7
uaaacucacuucuaaa

SEQ ID NO: 2149332 - RNA, 20 nt, Human herpesvirus 7
auaacaaagugcgaaacgug

SEQ ID NO: 2149333 - RNA, 12 nt, Human herpesvirus 7
agcaaaauaugc

SEQ ID NO: 2149334 - RNA, 22 nt, Human herpesvirus 7
agcacauguacagacagaaugc

SEQ ID NO: 2149335 - RNA, 17 nt, Human herpesvirus 7
agaacuuuuguaggaaa

SEQ ID NO: 2149336 - RNA, 16 nt, Human herpesvirus 7
auucaauaaaaagaua

SEQ ID NO: 2149337 - RNA, 16 nt, Human herpesvirus 7
uucaaaggaaaaauuu

SEQ ID NO: 2149338 - RNA, 19 nt, Human herpesvirus 7
ugcaacauaaccaaugcug

SEQ ID NO: 2149339 - RNA, 16 nt, Human herpesvirus 7
acacuuauuccagaua

SEQ ID NO: 2149340 - RNA, 24 nt, Human herpesvirus 7
uuaagaaaaguugcuuuucaugcu

SEQ ID NO: 2149341 - RNA, 14 nt, Human herpesvirus 7
cgaaugacagacac

SEQ ID NO: 2149342 - RNA, 14 nt, Human herpesvirus 7
uguuuguaaacauu

SEQ ID NO: 2149343 - RNA, 14 nt, Human herpesvirus 7
caaagaaaaaacua

SEQ ID NO: 2149344 - RNA, 17 nt, Human herpesvirus 7
auacguuaguugcagcu

SEQ ID NO: 2149345 - RNA, 14 nt, Human herpesvirus 7
ccaagcuuaaauaa

SEQ ID NO: 2149346 - RNA, 14 nt, Human herpesvirus 7
uugaaagaccaaau

SEQ ID NO: 2149347 - RNA, 20 nt, Human herpesvirus 7
agaauuccaggguaaagaua

SEQ ID NO: 2149348 - RNA, 13 nt, Human herpesvirus 7
agagcauauacaa

SEQ ID NO: 2149349 - RNA, 22 nt, Human herpesvirus 7
aaucagcauuuaccauuucgaa

SEQ ID NO: 2149350 - RNA, 20 nt, Human herpesvirus 7
gaaaaucuccuugauaagau

SEQ ID NO: 2149351 - RNA, 14 nt, Human herpesvirus 7
acagagaacaccau

SEQ ID NO: 2149352 - RNA, 16 nt, Human herpesvirus 7
auuuucuuacacuaug

SEQ ID NO: 2149353 - RNA, 15 nt, Human herpesvirus 7
aaauuaaauacaaau

SEQ ID NO: 2149354 - RNA, 12 nt, Human herpesvirus 7
ugcaucgaauuu

SEQ ID NO: 2149355 - RNA, 15 nt, Human herpesvirus 7
ucuaaaaaacaaaaa

SEQ ID NO: 2149356 - RNA, 19 nt, Human herpesvirus 7
ggagacgaugagcaugaaa

SEQ ID NO: 2149357 - RNA, 15 nt, Human herpesvirus 7
uacacuuuuguccug

SEQ ID NO: 2149358 - RNA, 18 nt, Human herpesvirus 7
aaccacagacacaccauu

SEQ ID NO: 2149359 - RNA, 17 nt, Human herpesvirus 7
uuauaugaaauuucaaa

SEQ ID NO: 2149360 - RNA, 17 nt, Human herpesvirus 7
caauaaaucuguaaaau

SEQ ID NO: 2149361 - RNA, 22 nt, Human herpesvirus 7
uaaaacuuugauuugagaaauu

SEQ ID NO: 2149362 - RNA, 12 nt, Human herpesvirus 7
caacugugcaug

SEQ ID NO: 2149363 - RNA, 15 nt, Human herpesvirus 7
agcuuucuuuaccga

SEQ ID NO: 2149364 - RNA, 14 nt, Human herpesvirus 7
augugaaaaugaug

SEQ ID NO: 2149365 - RNA, 14 nt, Human herpesvirus 7
guaaagauaauguu

SEQ ID NO: 2149366 - RNA, 22 nt, Human herpesvirus 7
ccauguauugucuuacagcacu

SEQ ID NO: 2149367 - RNA, 21 nt, Human herpesvirus 7
cugcuggaaagcuugugaaga

SEQ ID NO: 2149368 - RNA, 19 nt, Human herpesvirus 7
gcucugucuccaaaucaaa

SEQ ID NO: 2149369 - RNA, 19 nt, Human herpesvirus 7
acuuauuauaucuuaauaa

SEQ ID NO: 2149370 - RNA, 23 nt, Human herpesvirus 7
uuacuauuugacuggguaggaaa

SEQ ID NO: 2149371 - RNA, 15 nt, Human herpesvirus 7
gcaaaagccacugau

SEQ ID NO: 2149372 - RNA, 13 nt, Human herpesvirus 7
agacauugaagau

SEQ ID NO: 2149373 - RNA, 15 nt, Human herpesvirus 7
uuuaaaaaaucugaa

SEQ ID NO: 2149374 - RNA, 17 nt, Human herpesvirus 7
aaugaguguaauugguu

SEQ ID NO: 2149375 - RNA, 17 nt, Human herpesvirus 7
uuuucaaguuucuucug

SEQ ID NO: 2149376 - RNA, 15 nt, Human herpesvirus 7
uaaguaaauuuacuu

SEQ ID NO: 2149377 - RNA, 19 nt, Human herpesvirus 7
cacagggacguuucuagca

SEQ ID NO: 2149378 - RNA, 13 nt, Human herpesvirus 7
gccaaugauuuuu

SEQ ID NO: 2149379 - RNA, 12 nt, Human herpesvirus 7
acaacucaauaa

SEQ ID NO: 2149380 - RNA, 10 nt, Human herpesvirus 7
gcaacuuuuc

SEQ ID NO: 2149381 - RNA, 23 nt, Human herpesvirus 7
aaaauuuccuacaaaaguucugu

SEQ ID NO: 2149382 - RNA, 22 nt, Human herpesvirus 7
agccucuaagagcuuuugcaaa

SEQ ID NO: 2149383 - RNA, 16 nt, Human herpesvirus 7
agucaagaacugugaa

SEQ ID NO: 2149384 - RNA, 13 nt, Human herpesvirus 7
aaaagaaaaucuc

SEQ ID NO: 2149385 - RNA, 17 nt, Human herpesvirus 7
aucucauagcuuaaaaa

SEQ ID NO: 2149386 - RNA, 14 nt, Human herpesvirus 7
cuuuauaugucaaa

SEQ ID NO: 2149387 - RNA, 16 nt, Human herpesvirus 7
uccauugauuaaaaac

SEQ ID NO: 2149388 - RNA, 23 nt, Human herpesvirus 7
acgucuuacuuggaaacaaauug

SEQ ID NO: 2149389 - RNA, 21 nt, Human herpesvirus 7
gaaacaucuuuauauguguuc

SEQ ID NO: 2149390 - RNA, 18 nt, Human herpesvirus 7
aaacuguuuguaaggcca

SEQ ID NO: 2149391 - RNA, 13 nt, Human herpesvirus 7
aauaauuuaaaau

SEQ ID NO: 2149392 - RNA, 23 nt, Human herpesvirus 7
uauaauaaaggaaagacaaacua

SEQ ID NO: 2149393 - RNA, 22 nt, Human herpesvirus 7
aaacaccccuugcagaaacugg

SEQ ID NO: 2149394 - RNA, 20 nt, Human herpesvirus 7
cuguuagaggauuaaaacaa

SEQ ID NO: 2149395 - RNA, 15 nt, Human herpesvirus 7
cuuacauuugauuuu

SEQ ID NO: 2149396 - RNA, 14 nt, Human herpesvirus 7
gcaugucucauaau

SEQ ID NO: 2149397 - RNA, 15 nt, Human herpesvirus 7
ugcauauuugaacau

SEQ ID NO: 2149398 - RNA, 22 nt, Human herpesvirus 7
aaauucuggcucuuuacaaaau

SEQ ID NO: 2149399 - RNA, 21 nt, Human herpesvirus 7
uucgagaaaauuuagcaccaa

SEQ ID NO: 2149400 - RNA, 13 nt, Human herpesvirus 7
uugggaaacaucu

SEQ ID NO: 2149401 - RNA, 16 nt, Human herpesvirus 7
uuaaagauguuucuuu

SEQ ID NO: 2149402 - RNA, 16 nt, Human herpesvirus 7
uaaguagguaagaaaa

SEQ ID NO: 2149403 - RNA, 14 nt, Human herpesvirus 7
acuaaaaaaaauua

SEQ ID NO: 2149404 - RNA, 21 nt, Human herpesvirus 7
uuuagcuaauucauuguauga

SEQ ID NO: 2149405 - RNA, 14 nt, Human herpesvirus 7
gcaacaaauguuua

SEQ ID NO: 2149406 - RNA, 16 nt, Human herpesvirus 7
cuugcuagcugugaua

SEQ ID NO: 2149407 - RNA, 17 nt, Human herpesvirus 7
auuucaaaggaagacau

SEQ ID NO: 2149408 - RNA, 17 nt, Human herpesvirus 7
uuaguuccacgucaauc

SEQ ID NO: 2149409 - RNA, 18 nt, Human herpesvirus 7
agcgcaaaggaaaaaugc

SEQ ID NO: 2149410 - RNA, 12 nt, Human herpesvirus 7
uuucauuuaauu

SEQ ID NO: 2149411 - RNA, 22 nt, Human herpesvirus 7
auauaaacacuugcuagcugug

SEQ ID NO: 2149412 - RNA, 16 nt, Human herpesvirus 7
uuuaagugauacugaa

SEQ ID NO: 2149413 - RNA, 17 nt, Human herpesvirus 7
cacugggagcaaugcau

SEQ ID NO: 2149414 - RNA, 23 nt, Human herpesvirus 7
auggcauuacuacaguggaugcu

SEQ ID NO: 2149415 - RNA, 22 nt, Human herpesvirus 7
uauuuugauuggaaaucaaaau

SEQ ID NO: 2149416 - RNA, 19 nt, Human herpesvirus 7
uuagaacaauuaucucaga

SEQ ID NO: 2149417 - RNA, 19 nt, Human herpesvirus 7
gucuaaccccgcucuuuua

SEQ ID NO: 2149418 - RNA, 15 nt, Human herpesvirus 7
agaaaaucuaccaau

SEQ ID NO: 2149419 - RNA, 14 nt, Human herpesvirus 7
cucuguaaaacguu

SEQ ID NO: 2149420 - RNA, 13 nt, Human herpesvirus 7
uucaacaucuuuc

SEQ ID NO: 2149421 - RNA, 13 nt, Human herpesvirus 7
gccauucuuuuca

SEQ ID NO: 2149422 - RNA, 15 nt, Human herpesvirus 7
aaugucagaguuuaa

SEQ ID NO: 2149423 - RNA, 14 nt, Human herpesvirus 7
agggauuucuucuu

SEQ ID NO: 2149424 - RNA, 21 nt, Human herpesvirus 7
aagcaacuuuucuuaaacaug

SEQ ID NO: 2149425 - RNA, 23 nt, Human herpesvirus 7
uuaacaacagccaaaugugguaa

SEQ ID NO: 2149426 - RNA, 23 nt, Human herpesvirus 7
ggaugcacugauaaucaagaaac

SEQ ID NO: 2149427 - RNA, 14 nt, Human herpesvirus 7
uaauaucaauuuga

SEQ ID NO: 2149428 - RNA, 23 nt, Human herpesvirus 7
ucagacaauuucacacaaugccu

SEQ ID NO: 2149429 - RNA, 20 nt, Human herpesvirus 7
ugcaacuuugugccugaaau

SEQ ID NO: 2149430 - RNA, 17 nt, Human herpesvirus 7
agaaucacauuuuugcu

SEQ ID NO: 2149431 - RNA, 15 nt, Human herpesvirus 7
gcacacuaaaaaaga

SEQ ID NO: 2149432 - RNA, 14 nt, Human herpesvirus 7
aagaauuuggauuu

SEQ ID NO: 2149433 - RNA, 23 nt, Human herpesvirus 7
acgaauauucuaggcuugcauuc

SEQ ID NO: 2149434 - RNA, 12 nt, Human herpesvirus 7
ggcgccaaaaaa

SEQ ID NO: 2149435 - RNA, 12 nt, Human herpesvirus 7
ugguugugcaau

SEQ ID NO: 2149436 - RNA, 21 nt, Human herpesvirus 7
uuuaaucaauggacguuuauu

SEQ ID NO: 2149437 - RNA, 20 nt, Human herpesvirus 7
agauuauucaaaagcuaaaa

SEQ ID NO: 2149438 - RNA, 19 nt, Human herpesvirus 7
aaauuaaguuuuucaugua

SEQ ID NO: 2149439 - RNA, 17 nt, Human herpesvirus 7
ucuuggaguuugucuca

SEQ ID NO: 2149440 - RNA, 12 nt, Human herpesvirus 7
auuuuguuuugc

SEQ ID NO: 2149441 - RNA, 13 nt, Human herpesvirus 7
ucugaauaaaagu

SEQ ID NO: 2149442 - RNA, 17 nt, Human herpesvirus 7
aacaaucuuacaaaaag

SEQ ID NO: 2149443 - RNA, 14 nt, Human herpesvirus 7
caaggggcauuuuu

SEQ ID NO: 2149444 - RNA, 20 nt, Human herpesvirus 7
uuuaagauacauuuuugcaa

SEQ ID NO: 2149445 - RNA, 16 nt, Human herpesvirus 7
cuugcuuugcauagau

SEQ ID NO: 2149446 - RNA, 17 nt, Human herpesvirus 7
gauauucuaacaaauac

SEQ ID NO: 2149447 - RNA, 12 nt, Human herpesvirus 7
auuaaguguuug

SEQ ID NO: 2149448 - RNA, 18 nt, Human herpesvirus 7
uacaaaaguucuguuuug

SEQ ID NO: 2149449 - RNA, 15 nt, Human herpesvirus 7
gauuuacauuucauu

SEQ ID NO: 2149450 - RNA, 21 nt, Human herpesvirus 7
uaugacgaagcuaaacuuuua

SEQ ID NO: 2149451 - RNA, 15 nt, Human herpesvirus 7
agagaugaucuuacu

SEQ ID NO: 2149452 - RNA, 12 nt, Human herpesvirus 7
guugaaauuaag

SEQ ID NO: 2149453 - RNA, 20 nt, Human herpesvirus 7
ugaaggugucuauuaaaugc

SEQ ID NO: 2149454 - RNA, 10 nt, Human herpesvirus 7
ggugaagauc

SEQ ID NO: 2149455 - RNA, 16 nt, Human herpesvirus 7
cagagaacuagaacag

SEQ ID NO: 2149456 - RNA, 15 nt, Human herpesvirus 7
agccagguauucaaa

SEQ ID NO: 2149457 - RNA, 15 nt, Human herpesvirus 7
gaaagacaaacuaug

SEQ ID NO: 2149458 - RNA, 22 nt, Human herpesvirus 7
gaacuguuuuaauguauuuuuc

SEQ ID NO: 2149459 - RNA, 22 nt, Human herpesvirus 7
uugugacccugucacacuuauu

SEQ ID NO: 2149460 - RNA, 20 nt, Human herpesvirus 7
cugauaaucaagaaacaugu

SEQ ID NO: 2149461 - RNA, 20 nt, Human herpesvirus 7
ugaaaaucuugaauaaauuu

SEQ ID NO: 2149462 - RNA, 13 nt, Human herpesvirus 7
ugauccuccuugc

SEQ ID NO: 2149463 - RNA, 20 nt, Human herpesvirus 7
gaaacucaucauugaagaaa

SEQ ID NO: 2149464 - RNA, 15 nt, Human herpesvirus 7
uugaaauucugugga

SEQ ID NO: 2149465 - RNA, 16 nt, Human herpesvirus 7
caagauagcagaauau

SEQ ID NO: 2149466 - RNA, 14 nt, Human herpesvirus 7
aaaugaugauguau

SEQ ID NO: 2149467 - RNA, 15 nt, Human herpesvirus 7
uaggggaagaaucaa

SEQ ID NO: 2149468 - RNA, 22 nt, Human herpesvirus 7
aaguuuuguaacuauaaaugga

SEQ ID NO: 2149469 - RNA, 22 nt, Human herpesvirus 7
cuuuugcgggaaaaaacgucua

SEQ ID NO: 2149470 - RNA, 21 nt, Human herpesvirus 7
uaggcaagaaggccacgcugu

SEQ ID NO: 2149471 - RNA, 18 nt, Human herpesvirus 7
aaauuuuggauuguguaa

SEQ ID NO: 2149472 - RNA, 14 nt, Human herpesvirus 7
ucagaacuguuuua

SEQ ID NO: 2149473 - RNA, 15 nt, Human herpesvirus 7
cugacauuguacaau

SEQ ID NO: 2149474 - RNA, 15 nt, Human herpesvirus 7
auuaaacgaacucuu

SEQ ID NO: 2149475 - RNA, 19 nt, Human herpesvirus 7
gucugaaggcugcuuuuuc

SEQ ID NO: 2149476 - RNA, 19 nt, Human herpesvirus 7
uuucaagaaggaaaauuuc

SEQ ID NO: 2149477 - RNA, 18 nt, Human herpesvirus 7
aaauguaauuuaaauaau

SEQ ID NO: 2149478 - RNA, 17 nt, Human herpesvirus 7
caauagaaaacauuaua

SEQ ID NO: 2149479 - RNA, 15 nt, Human herpesvirus 7
gaaauggcucuaguu

SEQ ID NO: 2149480 - RNA, 18 nt, Human herpesvirus 7
aucuaccgcgaugaaaac

SEQ ID NO: 2149481 - RNA, 14 nt, Human herpesvirus 7
aaauaugaauugau

SEQ ID NO: 2149482 - RNA, 16 nt, Human herpesvirus 7
aaaucaaaacauuuca

SEQ ID NO: 2149483 - RNA, 14 nt, Human herpesvirus 7
auauaaacaaaauu

SEQ ID NO: 2149484 - RNA, 14 nt, Human herpesvirus 7
aaaauacuaaucaa

SEQ ID NO: 2149485 - RNA, 21 nt, Human herpesvirus 7
caaauagaguuuaauuguacu

SEQ ID NO: 2149486 - RNA, 12 nt, Human herpesvirus 7
uucuuugucugc

SEQ ID NO: 2149487 - RNA, 18 nt, Human herpesvirus 7
uggaaagaagaagauuuu

SEQ ID NO: 2149488 - RNA, 13 nt, Human herpesvirus 7
gagauuccaaaga

SEQ ID NO: 2149489 - RNA, 14 nt, Human herpesvirus 7
caucaggaaucuuu

SEQ ID NO: 2149490 - RNA, 19 nt, Human herpesvirus 7
aagacaccccaaaaucaaa

SEQ ID NO: 2149491 - RNA, 15 nt, Human herpesvirus 7
gucuuacuuggaaac

SEQ ID NO: 2149492 - RNA, 17 nt, Human herpesvirus 7
aaaauguaaaauucgcu

SEQ ID NO: 2149493 - RNA, 16 nt, Human herpesvirus 7
auuauaacuuguaauu

SEQ ID NO: 2149494 - RNA, 16 nt, Human herpesvirus 7
caacgguauacauuaa

SEQ ID NO: 2149495 - RNA, 10 nt, Human herpesvirus 7
ugucauacaa

SEQ ID NO: 2149496 - RNA, 17 nt, Human herpesvirus 7
aagaacuuacauuucaa

SEQ ID NO: 2149497 - RNA, 21 nt, Human herpesvirus 7
ugccacguuuuuuucuucaau

SEQ ID NO: 2149498 - RNA, 12 nt, Human herpesvirus 7
gaacauaaaaaa

SEQ ID NO: 2149499 - RNA, 20 nt, Human herpesvirus 7
uuucucgcguuucuucaaag

SEQ ID NO: 2149500 - RNA, 18 nt, Human herpesvirus 7
agugaaugauuuugacau

SEQ ID NO: 2149501 - RNA, 22 nt, Human herpesvirus 7
auuuuacauauuaguuuaacuu

SEQ ID NO: 2149502 - RNA, 21 nt, Human herpesvirus 7
cauguuucaagaauggcugau

SEQ ID NO: 2149503 - RNA, 23 nt, Human herpesvirus 7
accauuucugaaaccuucgcaac

SEQ ID NO: 2149504 - RNA, 18 nt, Human herpesvirus 7
agauucuccagaaauuau

SEQ ID NO: 2149505 - RNA, 19 nt, Human herpesvirus 7
auaugcuggaucuucugcu

SEQ ID NO: 2149506 - RNA, 18 nt, Human herpesvirus 7
uggaaaaauaaacaauau

SEQ ID NO: 2149507 - RNA, 21 nt, Human herpesvirus 7
uuuauuauuuguuuguucugu

SEQ ID NO: 2149508 - RNA, 21 nt, Human herpesvirus 7
agaacaucuugagaaauauga

SEQ ID NO: 2149509 - RNA, 15 nt, Human herpesvirus 7
gugaaacaauguuua

SEQ ID NO: 2149510 - RNA, 12 nt, Human herpesvirus 7
aaauccuggauu

SEQ ID NO: 2149511 - RNA, 21 nt, Human herpesvirus 7
guucuaaaaaacaaaaaagug

SEQ ID NO: 2149512 - RNA, 15 nt, Human herpesvirus 7
ugucuaagguuuuua

SEQ ID NO: 2149513 - RNA, 22 nt, Human herpesvirus 7
uuuccaauagcacuacuagaaa

SEQ ID NO: 2149514 - RNA, 18 nt, Human herpesvirus 7
uucauuuauauuaauuug

SEQ ID NO: 2149515 - RNA, 15 nt, Human herpesvirus 7
gaauuguacguucug

SEQ ID NO: 2149516 - RNA, 18 nt, Human herpesvirus 7
ucuuaaaauauguucaga

SEQ ID NO: 2149517 - RNA, 21 nt, Human herpesvirus 7
uggauaaccaaacuauauuga

SEQ ID NO: 2149518 - RNA, 17 nt, Human herpesvirus 7
acuuacuguuuacacau

SEQ ID NO: 2149519 - RNA, 12 nt, Human herpesvirus 7
caauuuaucaau

SEQ ID NO: 2149520 - RNA, 18 nt, Human herpesvirus 7
cugcaaagaaaaaaaugc

SEQ ID NO: 2149521 - RNA, 17 nt, Human herpesvirus 7
cuucaacuucucuugga

SEQ ID NO: 2149522 - RNA, 13 nt, Human herpesvirus 7
ugcaugaaaucuu

SEQ ID NO: 2149523 - RNA, 18 nt, Human herpesvirus 7
uuaaguauuuuacaacaa

SEQ ID NO: 2149524 - RNA, 20 nt, Human herpesvirus 7
uauccacgcgggguuaaaaa

SEQ ID NO: 2149525 - RNA, 16 nt, Human herpesvirus 7
acuuauuauaucuuaa

SEQ ID NO: 2149526 - RNA, 13 nt, Human herpesvirus 7
gugcaucacgaaa

SEQ ID NO: 2149527 - RNA, 22 nt, Human herpesvirus 7
aauagguaucuuuacuuucaua

SEQ ID NO: 2149528 - RNA, 13 nt, Human herpesvirus 7
acuuguugaaaua

SEQ ID NO: 2149529 - RNA, 17 nt, Human herpesvirus 7
gcaaauccuauaaaagc

SEQ ID NO: 2149530 - RNA, 18 nt, Human herpesvirus 7
ucugccucugccucuugg

SEQ ID NO: 2149531 - RNA, 16 nt, Human herpesvirus 7
uguuuaagacauuauu

SEQ ID NO: 2149532 - RNA, 23 nt, Human herpesvirus 7
auaaauacgcguggaaguguuaa

SEQ ID NO: 2149533 - RNA, 21 nt, Human herpesvirus 7
acgucuugcuguuugucaucg

SEQ ID NO: 2149534 - RNA, 16 nt, Human herpesvirus 7
uguugccuucuaaaac

SEQ ID NO: 2149535 - RNA, 18 nt, Human herpesvirus 7
aauuaauguaauuuauga

SEQ ID NO: 2149536 - RNA, 20 nt, Human herpesvirus 7
acaggcugcaucuuuucagu

SEQ ID NO: 2149537 - RNA, 23 nt, Human herpesvirus 7
uuuacaaagaacauguaguacaa

SEQ ID NO: 2149538 - RNA, 22 nt, Human herpesvirus 7
auuagaaacaaucccagaaauu

SEQ ID NO: 2149539 - RNA, 22 nt, Human herpesvirus 7
auauauggcaauaaaucuguaa

SEQ ID NO: 2149540 - RNA, 18 nt, Human herpesvirus 7
augccagaaauuaaauac

SEQ ID NO: 2149541 - RNA, 16 nt, Human herpesvirus 7
uuuacuugaucuaauu

SEQ ID NO: 2149542 - RNA, 15 nt, Human herpesvirus 7
uaucaugauuauaua

SEQ ID NO: 2149543 - RNA, 23 nt, Human herpesvirus 7
uuaaugcuuugucuuacgucuuu

SEQ ID NO: 2149544 - RNA, 18 nt, Human herpesvirus 7
augaauuaauaaaacaaa

SEQ ID NO: 2149545 - RNA, 18 nt, Human herpesvirus 7
ucuauuaaauauuuagag

SEQ ID NO: 2149546 - RNA, 17 nt, Human herpesvirus 7
uuaucuggagaacaauu

SEQ ID NO: 2149547 - RNA, 19 nt, Human herpesvirus 7
aagaauuuggauagauaca

SEQ ID NO: 2149548 - RNA, 19 nt, Human herpesvirus 7
ucaaaaucuguagaaaaug

SEQ ID NO: 2149549 - RNA, 20 nt, Human herpesvirus 7
gaauucaacaccagucucug

SEQ ID NO: 2149550 - RNA, 14 nt, Human herpesvirus 7
augagauuucugaa

SEQ ID NO: 2149551 - RNA, 22 nt, Human herpesvirus 7
cugaaagcgcaaaggaaaaaug

SEQ ID NO: 2149552 - RNA, 14 nt, Human herpesvirus 7
uuguucaaacucaa

SEQ ID NO: 2149553 - RNA, 16 nt, Human herpesvirus 7
uuaauagucauuuuca

SEQ ID NO: 2149554 - RNA, 21 nt, Human herpesvirus 7
auucauuuccucccaaaaauu

SEQ ID NO: 2149555 - RNA, 20 nt, Human herpesvirus 7
cuuugaaucuauuaaagaca

SEQ ID NO: 2149556 - RNA, 18 nt, Human herpesvirus 7
caacuuugugccugaaau

SEQ ID NO: 2149557 - RNA, 19 nt, Human herpesvirus 7
uguacaauuacaaaaugua

SEQ ID NO: 2149558 - RNA, 13 nt, Human herpesvirus 7
auaaccaaugcug

SEQ ID NO: 2149559 - RNA, 13 nt, Human herpesvirus 7
uugcauacaguuu

SEQ ID NO: 2149560 - RNA, 17 nt, Human herpesvirus 7
uaaaccaaauauaugcu

SEQ ID NO: 2149561 - RNA, 13 nt, Human herpesvirus 7
guaacagauuuua

SEQ ID NO: 2149562 - RNA, 22 nt, Human herpesvirus 7
gauuucauguuuuaugacucag

SEQ ID NO: 2149563 - RNA, 20 nt, Human herpesvirus 7
aggaaaccaauuaauauuaa

SEQ ID NO: 2149564 - RNA, 15 nt, Human herpesvirus 7
gcagguaaguauaaa

SEQ ID NO: 2149565 - RNA, 14 nt, Human herpesvirus 7
aguacaaauguuuu

SEQ ID NO: 2149566 - RNA, 13 nt, Human herpesvirus 7
uuuauugccuugu

SEQ ID NO: 2149567 - RNA, 19 nt, Human herpesvirus 7
ugaaaaaaauuauguguau

SEQ ID NO: 2149568 - RNA, 15 nt, Human herpesvirus 7
aaagccgcugccuuc

SEQ ID NO: 2149569 - RNA, 12 nt, Human herpesvirus 7
auggaagaacaa

SEQ ID NO: 2149570 - RNA, 11 nt, Human herpesvirus 7
aggaauugcug

SEQ ID NO: 2149571 - RNA, 15 nt, Human herpesvirus 7
agaaauguuacuuaa

SEQ ID NO: 2149572 - RNA, 13 nt, Human herpesvirus 7
gcuuaaaaacagu

SEQ ID NO: 2149573 - RNA, 20 nt, Human herpesvirus 7
agugaacaugacuucagaaa

SEQ ID NO: 2149574 - RNA, 22 nt, Human herpesvirus 7
caaguagugcuaauauuccuuu

SEQ ID NO: 2149575 - RNA, 23 nt, Human herpesvirus 7
uucauccaaaaagaaacuuucua

SEQ ID NO: 2149576 - RNA, 23 nt, Human herpesvirus 7
aagcgagauuuauuuuuaaaaau

SEQ ID NO: 2149577 - RNA, 16 nt, Human herpesvirus 7
aggugacagagggcau

SEQ ID NO: 2149578 - RNA, 17 nt, Human herpesvirus 7
ggagaaggaaaauuaua

SEQ ID NO: 2149579 - RNA, 19 nt, Human herpesvirus 7
cguuggggauguucuauuc

SEQ ID NO: 2149580 - RNA, 16 nt, Human herpesvirus 7
agcacauguacagaca

SEQ ID NO: 2149581 - RNA, 17 nt, Human herpesvirus 7
gaaauaaauucaaggaa

SEQ ID NO: 2149582 - RNA, 12 nt, Human herpesvirus 7
caauacaugaau

SEQ ID NO: 2149583 - RNA, 19 nt, Human herpesvirus 7
aggggucgcauauugcaau

SEQ ID NO: 2149584 - RNA, 16 nt, Human herpesvirus 7
uuuaacgauuccaaac

SEQ ID NO: 2149585 - RNA, 16 nt, Human herpesvirus 7
cuaaaauugacagcac

SEQ ID NO: 2149586 - RNA, 21 nt, Human herpesvirus 7
ucuauuucaauuaaugcauug

SEQ ID NO: 2149587 - RNA, 20 nt, Human herpesvirus 7
auaaaggaaagacaaacuau

SEQ ID NO: 2149588 - RNA, 17 nt, Human herpesvirus 7
aauacugagagaauaag

SEQ ID NO: 2149589 - RNA, 21 nt, Human herpesvirus 7
aaauuauuauuaguauuguaa

SEQ ID NO: 2149590 - RNA, 17 nt, Human herpesvirus 7
uucuugauguaacaaag

SEQ ID NO: 2149591 - RNA, 21 nt, Human herpesvirus 7
gcauugcuuuuagaaaaucaa

SEQ ID NO: 2149592 - RNA, 22 nt, Human herpesvirus 7
uagauuuuuugaaaaagauuua

SEQ ID NO: 2149593 - RNA, 20 nt, Human herpesvirus 7
ggggucugacuucaauuuug

SEQ ID NO: 2149594 - RNA, 22 nt, Human herpesvirus 7
caaucaacaaaaugacaaaaag

SEQ ID NO: 2149595 - RNA, 13 nt, Human herpesvirus 7
gauuccaaagagc

SEQ ID NO: 2149596 - RNA, 17 nt, Human herpesvirus 7
uacauggacauaagaau

SEQ ID NO: 2149597 - RNA, 18 nt, Human herpesvirus 7
agauucggcugaguaaaa

SEQ ID NO: 2149598 - RNA, 23 nt, Human herpesvirus 7
gacguuaucuaauauuauaucua

SEQ ID NO: 2149599 - RNA, 13 nt, Human herpesvirus 7
ugguaaugucaua

SEQ ID NO: 2149600 - RNA, 14 nt, Human herpesvirus 7
uacaauuccugaaa

SEQ ID NO: 2149601 - RNA, 20 nt, Human herpesvirus 7
uuuacaguuuuuuaauacaa

SEQ ID NO: 2149602 - RNA, 20 nt, Human herpesvirus 7
agugcgcggauuaagagaaa

SEQ ID NO: 2149603 - RNA, 21 nt, Human herpesvirus 7
uagaacaaguagaaaaugcug

SEQ ID NO: 2149604 - RNA, 14 nt, Human herpesvirus 7
auugucuacaauuu

SEQ ID NO: 2149605 - RNA, 22 nt, Human herpesvirus 7
cagaguuuaaaguaaaauuaau

SEQ ID NO: 2149606 - RNA, 16 nt, Human herpesvirus 7
ucuguggagugagaaa

SEQ ID NO: 2149607 - RNA, 14 nt, Human herpesvirus 7
cggagguuugcuau

SEQ ID NO: 2149608 - RNA, 13 nt, Human herpesvirus 7
acauguuuguaaa

SEQ ID NO: 2149609 - RNA, 22 nt, Human herpesvirus 7
caauugcccuuguguugucaua

SEQ ID NO: 2149610 - RNA, 23 nt, Human herpesvirus 7
gucuguugaaacauagcuagaaa

SEQ ID NO: 2149611 - RNA, 18 nt, Human herpesvirus 7
auaacuucguaguguaga

SEQ ID NO: 2149612 - RNA, 23 nt, Human herpesvirus 7
ucguuuuuauuuuuuucugaaau

SEQ ID NO: 2149613 - RNA, 13 nt, Human herpesvirus 7
acaucuaugugcu

SEQ ID NO: 2149614 - RNA, 14 nt, Human herpesvirus 7
auacuuguugagcu

SEQ ID NO: 2149615 - RNA, 20 nt, Human herpesvirus 7
uuaauggaggauucggaagu

SEQ ID NO: 2149616 - RNA, 20 nt, Human herpesvirus 7
cuaugauugcaguaaauuug

SEQ ID NO: 2149617 - RNA, 12 nt, Human herpesvirus 7
gaaacaaauugu

SEQ ID NO: 2149618 - RNA, 13 nt, Human herpesvirus 7
uuacauugcaguc

SEQ ID NO: 2149619 - RNA, 17 nt, Human herpesvirus 7
acauauagauaaugaag

SEQ ID NO: 2149620 - RNA, 17 nt, Human herpesvirus 7
cugacuucaauuuugaa

SEQ ID NO: 2149621 - RNA, 15 nt, Human herpesvirus 7
gccgccaaacuaugu

SEQ ID NO: 2149622 - RNA, 16 nt, Human herpesvirus 7
ugaaucaaauuucaaa

SEQ ID NO: 2149623 - RNA, 21 nt, Human herpesvirus 7
gaacuguuacaacuuugccaa

SEQ ID NO: 2149624 - RNA, 19 nt, Human herpesvirus 7
gcauuuuguauuaaaggaa

SEQ ID NO: 2149625 - RNA, 23 nt, Human herpesvirus 7
ugucagaguuuaaaguaaaauua

SEQ ID NO: 2149626 - RNA, 15 nt, Human herpesvirus 7
uccacucuccugaaa

SEQ ID NO: 2149627 - RNA, 23 nt, Human herpesvirus 7
auaaagaguguuuucaaauaucu

SEQ ID NO: 2149628 - RNA, 18 nt, Human herpesvirus 7
cuuuacuuucauagcuua

SEQ ID NO: 2149629 - RNA, 21 nt, Human herpesvirus 7
aauugguuuucgguguguaaa

SEQ ID NO: 2149630 - RNA, 13 nt, Human herpesvirus 7
gauuauucaaaag

SEQ ID NO: 2149631 - RNA, 19 nt, Human herpesvirus 7
aaggaucauaguaaacacg

SEQ ID NO: 2149632 - RNA, 22 nt, Human herpesvirus 7
aucugcaaagaaaaaaaugcuu

SEQ ID NO: 2149633 - RNA, 15 nt, Human herpesvirus 7
guauacaacuuuaug

SEQ ID NO: 2149634 - RNA, 15 nt, Human herpesvirus 7
auugcuucagaaaua

SEQ ID NO: 2149635 - RNA, 15 nt, Human herpesvirus 7
ugcugucuauuucaa

SEQ ID NO: 2149636 - RNA, 13 nt, Human herpesvirus 7
caagaaacauguu

SEQ ID NO: 2149637 - RNA, 18 nt, Human herpesvirus 7
agauuauacaaauccaag

SEQ ID NO: 2149638 - RNA, 16 nt, Human herpesvirus 7
agcaauacacccaguc

SEQ ID NO: 2149639 - RNA, 22 nt, Human herpesvirus 7
aaucauaauucaaucugcaaaa

SEQ ID NO: 2149640 - RNA, 14 nt, Human herpesvirus 7
uagaaaccaaguuu

SEQ ID NO: 2149641 - RNA, 13 nt, Human herpesvirus 7
aaacaaacaauga

SEQ ID NO: 2149642 - RNA, 15 nt, Human herpesvirus 7
aaauugaaauauuua

SEQ ID NO: 2149643 - RNA, 17 nt, Human herpesvirus 7
acuuaaauauuuuacau

SEQ ID NO: 2149644 - RNA, 18 nt, Human herpesvirus 7
aaaucagaaauguuacuu

SEQ ID NO: 2149645 - RNA, 22 nt, Human herpesvirus 7
caaacguaaugcaaaauagauu

SEQ ID NO: 2149646 - RNA, 19 nt, Human herpesvirus 7
cucauggccagugaaugau

SEQ ID NO: 2149647 - RNA, 21 nt, Human herpesvirus 7
cagaacaucccuggacagaga

SEQ ID NO: 2149648 - RNA, 19 nt, Human herpesvirus 7
auuguacaauuacaaaaug

SEQ ID NO: 2149649 - RNA, 14 nt, Human herpesvirus 7
aaacauguaaucaa

SEQ ID NO: 2149650 - RNA, 18 nt, Human herpesvirus 7
aucaagccacgaugacuu

SEQ ID NO: 2149651 - RNA, 22 nt, Human herpesvirus 7
uguauaugcucuagaaaaucua

SEQ ID NO: 2149652 - RNA, 13 nt, Human herpesvirus 7
gaucauuugcaug

SEQ ID NO: 2149653 - RNA, 12 nt, Human herpesvirus 7
uaugacucagac

SEQ ID NO: 2149654 - RNA, 21 nt, Human herpesvirus 7
aaccuacuguuaagaauucca

SEQ ID NO: 2149655 - RNA, 18 nt, Human herpesvirus 7
cuucucuauaccgcuucu

SEQ ID NO: 2149656 - RNA, 20 nt, Human herpesvirus 7
acgcucucaaucaaaaucuu

SEQ ID NO: 2149657 - RNA, 21 nt, Human herpesvirus 7
aacauuccaacagcuucagau

SEQ ID NO: 2149658 - RNA, 19 nt, Human herpesvirus 7
uaccgauucuaaauuaaaa

SEQ ID NO: 2149659 - RNA, 18 nt, Human herpesvirus 7
uuuaacuuuuuuuuucuu

SEQ ID NO: 2149660 - RNA, 16 nt, Human herpesvirus 7
gccagguauucaaaca

SEQ ID NO: 2149661 - RNA, 19 nt, Human herpesvirus 7
gauuauguuuucugcuaau

SEQ ID NO: 2149662 - RNA, 19 nt, Human herpesvirus 7
acaagggcaauuguuugau

SEQ ID NO: 2149663 - RNA, 15 nt, Human herpesvirus 7
auacauuauaaaugu

SEQ ID NO: 2149664 - RNA, 13 nt, Human herpesvirus 7
aagcacaaaucaa

SEQ ID NO: 2149665 - RNA, 16 nt, Human herpesvirus 7
uauaugaugacaacaa

SEQ ID NO: 2149666 - RNA, 20 nt, Human herpesvirus 7
cuguuaagaauuccagauuu

SEQ ID NO: 2149667 - RNA, 12 nt, Human herpesvirus 7
aaaaaaaaaaca

SEQ ID NO: 2149668 - RNA, 12 nt, Human herpesvirus 7
gcugaagaacau

SEQ ID NO: 2149669 - RNA, 22 nt, Human herpesvirus 7
auauuuaaggcuguaaaagaaa

SEQ ID NO: 2149670 - RNA, 16 nt, Human herpesvirus 7
aguuucuuuuucauua

SEQ ID NO: 2149671 - RNA, 13 nt, Human herpesvirus 7
uuaaaaaaaugaa

SEQ ID NO: 2149672 - RNA, 16 nt, Human herpesvirus 7
ugacgaagcuaaacuu

SEQ ID NO: 2149673 - RNA, 19 nt, Human herpesvirus 7
cauugcagucaaagauuuu

SEQ ID NO: 2149674 - RNA, 14 nt, Human herpesvirus 7
uacauccuuaaauu

SEQ ID NO: 2149675 - RNA, 15 nt, Human herpesvirus 7
aaauuaauaauauua

SEQ ID NO: 2149676 - RNA, 20 nt, Human herpesvirus 7
uuaauucuaaaaauuauuua

SEQ ID NO: 2149677 - RNA, 21 nt, Human herpesvirus 7
ccugguuuuguucccugcucg

SEQ ID NO: 2149678 - RNA, 17 nt, Human herpesvirus 7
uugaacuuguuuugacu

SEQ ID NO: 2149679 - RNA, 15 nt, Human herpesvirus 7
aguucaaaaaaagaa

SEQ ID NO: 2149680 - RNA, 16 nt, Human herpesvirus 7
cacaagguacauuuug

SEQ ID NO: 2149681 - RNA, 14 nt, Human herpesvirus 7
aaaguccaaaguga

SEQ ID NO: 2149682 - RNA, 15 nt, Human herpesvirus 7
agagcuuuugcaaag

SEQ ID NO: 2149683 - RNA, 16 nt, Human herpesvirus 7
aucaaauuuaucucau

SEQ ID NO: 2149684 - RNA, 17 nt, Human herpesvirus 7
uguugaaguugaacaau

SEQ ID NO: 2149685 - RNA, 19 nt, Human herpesvirus 7
ucugaaauaaacauuucaa

SEQ ID NO: 2149686 - RNA, 20 nt, Human herpesvirus 7
caauaaaguuuuguaacuau

SEQ ID NO: 2149687 - RNA, 13 nt, Human herpesvirus 7
caugcaaaaaaca

SEQ ID NO: 2149688 - RNA, 21 nt, Human herpesvirus 7
cacguguucaggcaacauuaa

SEQ ID NO: 2149689 - RNA, 14 nt, Human herpesvirus 7
guuuucaugcucau

SEQ ID NO: 2149690 - RNA, 16 nt, Human herpesvirus 7
gcaucaaaacauauca

SEQ ID NO: 2149691 - RNA, 13 nt, Human herpesvirus 7
aacuaacaucuuu

SEQ ID NO: 2149692 - RNA, 23 nt, Human herpesvirus 7
aagcugcauguguacuaaagcca

SEQ ID NO: 2149693 - RNA, 18 nt, Human herpesvirus 7
cuagaguaucuuuucaaa

SEQ ID NO: 2149694 - RNA, 23 nt, Human herpesvirus 7
aauuuuucgcugucuuuaacuga

SEQ ID NO: 2149695 - RNA, 19 nt, Human herpesvirus 7
ucaaauuuaucucauagcu

SEQ ID NO: 2149696 - RNA, 15 nt, Human herpesvirus 7
uucaggcaacauuaa

SEQ ID NO: 2149697 - RNA, 16 nt, Human herpesvirus 7
cuacaugaauggaucu

SEQ ID NO: 2149698 - RNA, 18 nt, Human herpesvirus 7
uuagaugcugaaacauca

SEQ ID NO: 2149699 - RNA, 13 nt, Human herpesvirus 7
gcaagccuagaau

SEQ ID NO: 2149700 - RNA, 12 nt, Human herpesvirus 7
gcauccaaagaa

SEQ ID NO: 2149701 - RNA, 18 nt, Human herpesvirus 7
aacuuacauuucaaacaa

SEQ ID NO: 2149702 - RNA, 21 nt, Human herpesvirus 7
acauuucauuccaaaauacaa

SEQ ID NO: 2149703 - RNA, 15 nt, Human herpesvirus 7
gcauauaauaaagga

SEQ ID NO: 2149704 - RNA, 23 nt, Human herpesvirus 7
ugagaauguugagcuaucugauu

SEQ ID NO: 2149705 - RNA, 20 nt, Human herpesvirus 7
auggccaucgcuuucucaag

SEQ ID NO: 2149706 - RNA, 15 nt, Human herpesvirus 7
uaaugaaaaagccau

SEQ ID NO: 2149707 - RNA, 19 nt, Human herpesvirus 7
ccgcuguacaaugcugucu

SEQ ID NO: 2149708 - RNA, 14 nt, Human herpesvirus 7
agaaaaauauuuaa

SEQ ID NO: 2149709 - RNA, 15 nt, Human herpesvirus 7
ucaggaaucuuuuuu

SEQ ID NO: 2149710 - RNA, 20 nt, Human herpesvirus 7
uacauugcagucaaagauuu

SEQ ID NO: 2149711 - RNA, 13 nt, Human herpesvirus 7
cguuguuuguccu

SEQ ID NO: 2149712 - RNA, 18 nt, Human herpesvirus 7
gacauuauuagacagaua

SEQ ID NO: 2149713 - RNA, 15 nt, Human herpesvirus 7
uaagaugcuuaagga

SEQ ID NO: 2149714 - RNA, 19 nt, Human herpesvirus 7
gagcuugguuuuacaaauu

SEQ ID NO: 2149715 - RNA, 22 nt, Human herpesvirus 7
gaaaguaaaaacuuuucuuucu

SEQ ID NO: 2149716 - RNA, 22 nt, Human herpesvirus 7
augauuagcgcgugaacaaaua

SEQ ID NO: 2149717 - RNA, 11 nt, Human herpesvirus 7
gcgcugaaaua

SEQ ID NO: 2149718 - RNA, 16 nt, Human herpesvirus 7
uuacacugauuucuac

SEQ ID NO: 2149719 - RNA, 15 nt, Human herpesvirus 7
cugggaacuagaaaa

SEQ ID NO: 2149720 - RNA, 14 nt, Human herpesvirus 7
caauggaacagcaa

SEQ ID NO: 2149721 - RNA, 19 nt, Human herpesvirus 7
auuuggcuucuauuauaga

SEQ ID NO: 2149722 - RNA, 18 nt, Human herpesvirus 7
caugauguuaaagaacaa

SEQ ID NO: 2149723 - RNA, 19 nt, Human herpesvirus 7
uuuacaaagaacauguagu

SEQ ID NO: 2149724 - RNA, 17 nt, Human herpesvirus 7
cagccaucuaauugcag

SEQ ID NO: 2149725 - RNA, 16 nt, Human herpesvirus 7
caauuuuaaugugcuu

SEQ ID NO: 2149726 - RNA, 13 nt, Human herpesvirus 7
auaauuuaaaauu

SEQ ID NO: 2149727 - RNA, 16 nt, Human herpesvirus 7
uugaaauagugucugu

SEQ ID NO: 2149728 - RNA, 13 nt, Human herpesvirus 7
aacauauguugau

SEQ ID NO: 2149729 - RNA, 18 nt, Human herpesvirus 7
agauacauuuuugcaaua

SEQ ID NO: 2149730 - RNA, 14 nt, Human herpesvirus 7
ugauucaacacucg

SEQ ID NO: 2149731 - RNA, 17 nt, Human herpesvirus 7
agacauugaaaaugcau

SEQ ID NO: 2149732 - RNA, 21 nt, Human herpesvirus 7
uggugcucaaacguucuuggu

SEQ ID NO: 2149733 - RNA, 22 nt, Human herpesvirus 7
aauccguaucuagagaauguac

SEQ ID NO: 2149734 - RNA, 15 nt, Human herpesvirus 7
ucugcuugucucugu

SEQ ID NO: 2149735 - RNA, 13 nt, Human herpesvirus 7
aaaauaugcaaaa

SEQ ID NO: 2149736 - RNA, 17 nt, Human herpesvirus 7
augugugugguaaggca

SEQ ID NO: 2149737 - RNA, 16 nt, Human herpesvirus 7
acauauagauaaugaa

SEQ ID NO: 2149738 - RNA, 22 nt, Human herpesvirus 7
cuuagaaaaacgcuaaccaucu

SEQ ID NO: 2149739 - RNA, 16 nt, Human herpesvirus 7
uagucauccaauauca

SEQ ID NO: 2149740 - RNA, 21 nt, Human herpesvirus 7
uguuguagguaauuucuuaua

SEQ ID NO: 2149741 - RNA, 22 nt, Human herpesvirus 7
acacuuggaguuguguucuuua

SEQ ID NO: 2149742 - RNA, 19 nt, Human herpesvirus 7
gccgcugccuucgcucugu

SEQ ID NO: 2149743 - RNA, 19 nt, Human herpesvirus 7
uggcaaauccuauaaaagc

SEQ ID NO: 2149744 - RNA, 17 nt, Human herpesvirus 7
gggaaaaaggauuugaa

SEQ ID NO: 2149745 - RNA, 16 nt, Human herpesvirus 7
uuugggaaacaucuuu

SEQ ID NO: 2149746 - RNA, 20 nt, Human herpesvirus 7
uuugauuccaucucacuuau

SEQ ID NO: 2149747 - RNA, 12 nt, Human herpesvirus 7
caacaaauguuu

SEQ ID NO: 2149748 - RNA, 14 nt, Human herpesvirus 7
gaugacuuccaagu

SEQ ID NO: 2149749 - RNA, 24 nt, Human herpesvirus 7
cuuaaggcggacaaauauacgaau

SEQ ID NO: 2149750 - RNA, 20 nt, Human herpesvirus 7
cagaaguaacgcagacuaau

SEQ ID NO: 2149751 - RNA, 14 nt, Human herpesvirus 7
auuugcuucuucua

SEQ ID NO: 2149752 - RNA, 17 nt, Human herpesvirus 7
uugcugaacucugucau

SEQ ID NO: 2149753 - RNA, 15 nt, Human herpesvirus 7
ugucuggaacuuuua

SEQ ID NO: 2149754 - RNA, 17 nt, Human herpesvirus 7
aguggcuuaaguuuuua

SEQ ID NO: 2149755 - RNA, 22 nt, Human herpesvirus 7
uugguguguuacaucauguuaa

SEQ ID NO: 2149756 - RNA, 19 nt, Human herpesvirus 7
agaaucauuuguauauucu

SEQ ID NO: 2149757 - RNA, 17 nt, Human herpesvirus 7
auaugcaucaaaacaua

SEQ ID NO: 2149758 - RNA, 22 nt, Human herpesvirus 7
uaaacacuugcuagcugugaua

SEQ ID NO: 2149759 - RNA, 21 nt, Human herpesvirus 7
gcaguacuacuaaucaugaaa

SEQ ID NO: 2149760 - RNA, 13 nt, Human herpesvirus 7
aucauauaugcau

SEQ ID NO: 2149761 - RNA, 19 nt, Human herpesvirus 7
caagaaggaaaauuucauu

SEQ ID NO: 2149762 - RNA, 22 nt, Human herpesvirus 7
gaaaugcacuugcucugugaaa

SEQ ID NO: 2149763 - RNA, 17 nt, Human herpesvirus 7
uguugagucgaaugcau

SEQ ID NO: 2149764 - RNA, 15 nt, Human herpesvirus 7
acgugcuuagacuua

SEQ ID NO: 2149765 - RNA, 14 nt, Human herpesvirus 7
aaucagaaauguua

SEQ ID NO: 2149766 - RNA, 17 nt, Human herpesvirus 7
uugauaaaauuuggaga

SEQ ID NO: 2149767 - RNA, 19 nt, Human herpesvirus 7
aaaauguuuuuguuucuga

SEQ ID NO: 2149768 - RNA, 14 nt, Human herpesvirus 7
ugacaucaauaaau

SEQ ID NO: 2149769 - RNA, 17 nt, Human herpesvirus 7
agcuucaaaaauguuua

SEQ ID NO: 2149770 - RNA, 18 nt, Human herpesvirus 7
augugcuuauaucuuaua

SEQ ID NO: 2149771 - RNA, 16 nt, Human herpesvirus 7
uggauuuucuguaauc

SEQ ID NO: 2149772 - RNA, 17 nt, Human herpesvirus 7
aucuuuauugguaauua

SEQ ID NO: 2149773 - RNA, 17 nt, Human herpesvirus 7
aaaugagauuucugaaa

SEQ ID NO: 2149774 - RNA, 18 nt, Human herpesvirus 7
uuccuuggaaaaaugaug

SEQ ID NO: 2149775 - RNA, 24 nt, Human herpesvirus 7
aaacaauugcccuuguguugucau

SEQ ID NO: 2149776 - RNA, 15 nt, Human herpesvirus 7
uguaguuuuugcaua

SEQ ID NO: 2149777 - RNA, 13 nt, Human herpesvirus 7
cgggacagauuua

SEQ ID NO: 2149778 - RNA, 18 nt, Human herpesvirus 7
auugaaaaugcauugcuu

SEQ ID NO: 2149779 - RNA, 12 nt, Human herpesvirus 7
caaaauagcaca

SEQ ID NO: 2149780 - RNA, 15 nt, Human herpesvirus 7
ccuucccaacuaaaa

SEQ ID NO: 2149781 - RNA, 21 nt, Human herpesvirus 7
auucacauaccuguauggaac

SEQ ID NO: 2149782 - RNA, 22 nt, Human herpesvirus 7
acuggcaaucguccgaaaagac

SEQ ID NO: 2149783 - RNA, 20 nt, Human herpesvirus 7
aaauuccuccugaaaauuug

SEQ ID NO: 2149784 - RNA, 19 nt, Human herpesvirus 7
agucuauugacauaaucau

SEQ ID NO: 2149785 - RNA, 22 nt, Human herpesvirus 7
guguauuuuuuaaagaaaagcu

SEQ ID NO: 2149786 - RNA, 23 nt, Human herpesvirus 7
gcuuucuaaguacuucuggcuua

SEQ ID NO: 2149787 - RNA, 12 nt, Human herpesvirus 7
augugaaaagaa

SEQ ID NO: 2149788 - RNA, 17 nt, Human herpesvirus 7
uuuaaaaaagaauuugg

SEQ ID NO: 2149789 - RNA, 19 nt, Human herpesvirus 7
uaggauaccaaacaaaauu

SEQ ID NO: 2149790 - RNA, 20 nt, Human herpesvirus 7
auuucgcaggggguucuaaa

SEQ ID NO: 2149791 - RNA, 14 nt, Human herpesvirus 7
aauuaauaaaagua

SEQ ID NO: 2149792 - RNA, 14 nt, Human herpesvirus 7
gcaacaaacaaaua

SEQ ID NO: 2149793 - RNA, 18 nt, Human herpesvirus 7
gacgcuguaugcaagaaa

SEQ ID NO: 2149794 - RNA, 18 nt, Human herpesvirus 7
uaugauacuuguucaauu

SEQ ID NO: 2149795 - RNA, 18 nt, Human herpesvirus 7
agcuaaaauuuugaaaua

SEQ ID NO: 2149796 - RNA, 14 nt, Human herpesvirus 7
uacuaaucaugaaa

SEQ ID NO: 2149797 - RNA, 24 nt, Human herpesvirus 7
augaucuccguugaaagcguuuca

SEQ ID NO: 2149798 - RNA, 17 nt, Human herpesvirus 7
cgccuacgcagcaaugu

SEQ ID NO: 2149799 - RNA, 22 nt, Human herpesvirus 7
cugcauuccacuaaaagagaac

SEQ ID NO: 2149800 - RNA, 19 nt, Human herpesvirus 7
acuuaaggcggacaaauau

SEQ ID NO: 2149801 - RNA, 14 nt, Human herpesvirus 7
uucguaaacauuug

SEQ ID NO: 2149802 - RNA, 23 nt, Human herpesvirus 7
ucugcacuaucuccuaaaugaau

SEQ ID NO: 2149803 - RNA, 18 nt, Human herpesvirus 7
auguaaccugaauuaaaa

SEQ ID NO: 2149804 - RNA, 20 nt, Human herpesvirus 7
gcucaaaacuugccauccaa

SEQ ID NO: 2149805 - RNA, 14 nt, Human herpesvirus 7
auuaucaccacaau

SEQ ID NO: 2149806 - RNA, 20 nt, Human herpesvirus 7
cauuuaaaaaaaaaaccaca

SEQ ID NO: 2149807 - RNA, 19 nt, Human herpesvirus 7
aaugucuuugucaugauga

SEQ ID NO: 2149808 - RNA, 14 nt, Human herpesvirus 7
uuccgguauuuugu

SEQ ID NO: 2149809 - RNA, 20 nt, Human herpesvirus 7
caaaaucuguagaaaauguu

SEQ ID NO: 2149810 - RNA, 17 nt, Human herpesvirus 7
uggacauuucaagaagg

SEQ ID NO: 2149811 - RNA, 15 nt, Human herpesvirus 7
ucuuaauuuguucaa

SEQ ID NO: 2149812 - RNA, 17 nt, Human herpesvirus 7
aauaagauguguuggaa

SEQ ID NO: 2149813 - RNA, 12 nt, Human herpesvirus 7
auuacacaggaa

SEQ ID NO: 2149814 - RNA, 12 nt, Human herpesvirus 7
gacauugaagau

SEQ ID NO: 2149815 - RNA, 14 nt, Human herpesvirus 7
guugaaaauguuuu

SEQ ID NO: 2149816 - RNA, 18 nt, Human herpesvirus 7
gauuucauggacuucaga

SEQ ID NO: 2149817 - RNA, 17 nt, Human herpesvirus 7
ugaauuaauucuuucca

SEQ ID NO: 2149818 - RNA, 17 nt, Human herpesvirus 7
guuuauauauaaccgau

SEQ ID NO: 2149819 - RNA, 15 nt, Human herpesvirus 7
ugugacccugucaca

SEQ ID NO: 2149820 - RNA, 13 nt, Human herpesvirus 7
guagaaaugugcg

SEQ ID NO: 2149821 - RNA, 19 nt, Human herpesvirus 7
agaagccacuucuaaauaa

SEQ ID NO: 2149822 - RNA, 22 nt, Human herpesvirus 7
cugucagucaacuuuuuguuca

SEQ ID NO: 2149823 - RNA, 13 nt, Human herpesvirus 7
gcauuuguuacag

SEQ ID NO: 2149824 - RNA, 20 nt, Human herpesvirus 7
aauuuuguaagaaacaucua

SEQ ID NO: 2149825 - RNA, 16 nt, Human herpesvirus 7
auuuuaaauuuacuua

SEQ ID NO: 2149826 - RNA, 14 nt, Human herpesvirus 7
ugaacaaauaauga

SEQ ID NO: 2149827 - RNA, 22 nt, Human herpesvirus 7
auuucaaaagaaaaaaucuuua

SEQ ID NO: 2149828 - RNA, 12 nt, Human herpesvirus 7
aggcagaaaugu

SEQ ID NO: 2149829 - RNA, 20 nt, Human herpesvirus 7
aaaucacagcauuauuguau

SEQ ID NO: 2149830 - RNA, 13 nt, Human herpesvirus 7
aguggcuucucua

SEQ ID NO: 2149831 - RNA, 15 nt, Human herpesvirus 7
uugcagauuguagag

SEQ ID NO: 2149832 - RNA, 18 nt, Human herpesvirus 7
cuuagaugcugaaacauc

SEQ ID NO: 2149833 - RNA, 18 nt, Human herpesvirus 7
acacuauuggacaaaaga

SEQ ID NO: 2149834 - RNA, 17 nt, Human herpesvirus 7
uguagacguagugucau

SEQ ID NO: 2149835 - RNA, 13 nt, Human herpesvirus 7
auuucugucaucu

SEQ ID NO: 2149836 - RNA, 14 nt, Human herpesvirus 7
uaaaaucaaaugua

SEQ ID NO: 2149837 - RNA, 12 nt, Human herpesvirus 7
uagaugcaucca

SEQ ID NO: 2149838 - RNA, 21 nt, Human herpesvirus 7
agaccaggugacgucuagaca

SEQ ID NO: 2149839 - RNA, 18 nt, Human herpesvirus 7
auuucagaauuuccagaa

SEQ ID NO: 2149840 - RNA, 14 nt, Human herpesvirus 7
guugcugcugucuu

SEQ ID NO: 2149841 - RNA, 18 nt, Human herpesvirus 7
aaucucagcucuguaaua

SEQ ID NO: 2149842 - RNA, 15 nt, Human herpesvirus 7
guggaaauuaaucaa

SEQ ID NO: 2149843 - RNA, 16 nt, Human herpesvirus 7
caacaucuuaaauguc

SEQ ID NO: 2149844 - RNA, 19 nt, Human herpesvirus 7
caaugauaauaagaugugu

SEQ ID NO: 2149845 - RNA, 22 nt, Human herpesvirus 7
aagacauaacaaaaaagguguu

SEQ ID NO: 2149846 - RNA, 21 nt, Human herpesvirus 7
cuugcauacaguuuauuugaa

SEQ ID NO: 2149847 - RNA, 15 nt, Human herpesvirus 7
cauaaaauguacaau

SEQ ID NO: 2149848 - RNA, 19 nt, Human herpesvirus 7
gaacaauggugugucugug

SEQ ID NO: 2149849 - RNA, 17 nt, Human herpesvirus 7
acaaucuuacaaaaagu

SEQ ID NO: 2149850 - RNA, 15 nt, Human herpesvirus 7
auaauuaugaaaugu

SEQ ID NO: 2149851 - RNA, 21 nt, Human herpesvirus 7
ugcuauuauuaaagcuuucaa

SEQ ID NO: 2149852 - RNA, 18 nt, Human herpesvirus 7
agaaucagacuaaauaug

SEQ ID NO: 2149853 - RNA, 12 nt, Human herpesvirus 7
aauuaaauacuu

SEQ ID NO: 2149854 - RNA, 18 nt, Human herpesvirus 7
acuuaaauauuuuacaua

SEQ ID NO: 2149855 - RNA, 13 nt, Human herpesvirus 7
aguguguuaaaug

SEQ ID NO: 2149856 - RNA, 22 nt, Human herpesvirus 7
uguaucuucaagcucuugaaga

SEQ ID NO: 2149857 - RNA, 22 nt, Human herpesvirus 7
aaaucuauuuuauccguuaaug

SEQ ID NO: 2149858 - RNA, 16 nt, Human herpesvirus 7
gcccugaauuuuacac

SEQ ID NO: 2149859 - RNA, 20 nt, Human herpesvirus 7
cugacuuaauugauugcacu

SEQ ID NO: 2149860 - RNA, 11 nt, Human herpesvirus 7
aacuuugcuau

SEQ ID NO: 2149861 - RNA, 15 nt, Human herpesvirus 7
ucaugaaaacagugg

SEQ ID NO: 2149862 - RNA, 16 nt, Human herpesvirus 7
aauuuaaagauugcuu

SEQ ID NO: 2149863 - RNA, 16 nt, Human herpesvirus 7
auugcuugcacuguaa

SEQ ID NO: 2149864 - RNA, 21 nt, Human herpesvirus 7
aauuacaguacaaccgccauu

SEQ ID NO: 2149865 - RNA, 19 nt, Human herpesvirus 7
cauuaauaucaauuugaau

SEQ ID NO: 2149866 - RNA, 14 nt, Human herpesvirus 7
auuugcuugcugaa

SEQ ID NO: 2149867 - RNA, 19 nt, Human herpesvirus 7
aaggaaaaaugcugcucag

SEQ ID NO: 2149868 - RNA, 21 nt, Human herpesvirus 7
aauuauuaaucuuuuugccuu

SEQ ID NO: 2149869 - RNA, 22 nt, Human herpesvirus 7
acauugugaguuucuacauguu

SEQ ID NO: 2149870 - RNA, 18 nt, Human herpesvirus 7
cugggaaaaaaaaaucac

SEQ ID NO: 2149871 - RNA, 17 nt, Human herpesvirus 7
caaauaugcauggagaa

SEQ ID NO: 2149872 - RNA, 15 nt, Human herpesvirus 7
aaaggaugaaagugc

SEQ ID NO: 2149873 - RNA, 16 nt, Human herpesvirus 7
ggugauuguggggcau

SEQ ID NO: 2149874 - RNA, 13 nt, Human herpesvirus 7
uuauuauguguac

SEQ ID NO: 2149875 - RNA, 14 nt, Human herpesvirus 7
gauauuauuaaaaa

SEQ ID NO: 2149876 - RNA, 18 nt, Human herpesvirus 7
uuuucuuaaacaugauuu

SEQ ID NO: 2149877 - RNA, 16 nt, Human herpesvirus 7
cauggagcacaauuac

SEQ ID NO: 2149878 - RNA, 24 nt, Human herpesvirus 7
uggaguauuaccauuuauggaaau

SEQ ID NO: 2149879 - RNA, 14 nt, Human herpesvirus 7
uuacuuucauagcu

SEQ ID NO: 2149880 - RNA, 13 nt, Human herpesvirus 7
gcauauaugaauc

SEQ ID NO: 2149881 - RNA, 11 nt, Human herpesvirus 7
cgcugucuuua

SEQ ID NO: 2149882 - RNA, 18 nt, Human herpesvirus 7
aucgacaaacagaaaaac

SEQ ID NO: 2149883 - RNA, 20 nt, Human herpesvirus 7
gcuucauuuuaaaaaagaca

SEQ ID NO: 2149884 - RNA, 15 nt, Human herpesvirus 7
caaaauuauaacuuu

SEQ ID NO: 2149885 - RNA, 13 nt, Human herpesvirus 7
uggaaaaacagaa

SEQ ID NO: 2149886 - RNA, 18 nt, Human herpesvirus 7
aaaagacaccuuucuuaa

SEQ ID NO: 2149887 - RNA, 20 nt, Human herpesvirus 7
auaccucuggcuucagacgu

SEQ ID NO: 2149888 - RNA, 20 nt, Human herpesvirus 7
gcugauuccuucuaaauucu

SEQ ID NO: 2149889 - RNA, 15 nt, Human herpesvirus 7
cuauaguuuguauuu

SEQ ID NO: 2149890 - RNA, 14 nt, Human herpesvirus 7
acaucgaagaaauu

SEQ ID NO: 2149891 - RNA, 19 nt, Human herpesvirus 7
gacacuauuggacaaaaga

SEQ ID NO: 2149892 - RNA, 16 nt, Human herpesvirus 7
agauuugacaaaacaa

SEQ ID NO: 2149893 - RNA, 12 nt, Human herpesvirus 7
ugaaugugcuuu

SEQ ID NO: 2149894 - RNA, 19 nt, Human herpesvirus 7
aauucauuugugaaauuga

SEQ ID NO: 2149895 - RNA, 21 nt, Human herpesvirus 7
aguucauaaugacacgacacu

SEQ ID NO: 2149896 - RNA, 12 nt, Human herpesvirus 7
acauaaaaauuu

SEQ ID NO: 2149897 - RNA, 17 nt, Human herpesvirus 7
ucuuucuaguucccauu

SEQ ID NO: 2149898 - RNA, 23 nt, Human herpesvirus 7
caacgauaugguuugaaaaccau

SEQ ID NO: 2149899 - RNA, 15 nt, Human herpesvirus 7
auguugcaaauguuc

SEQ ID NO: 2149900 - RNA, 13 nt, Human herpesvirus 7
uugaauaaauuuu

SEQ ID NO: 2149901 - RNA, 18 nt, Human herpesvirus 7
ugaaauaaacauuucaaa

SEQ ID NO: 2149902 - RNA, 18 nt, Human herpesvirus 7
uuuaaaacuuauguacuc

SEQ ID NO: 2149903 - RNA, 21 nt, Human herpesvirus 7
aacugaauuaagguggaaauc

SEQ ID NO: 2149904 - RNA, 15 nt, Human herpesvirus 7
aguuguacucagaga

SEQ ID NO: 2149905 - RNA, 22 nt, Human herpesvirus 7
cuuaccgcauaaaucauguuua

SEQ ID NO: 2149906 - RNA, 14 nt, Human herpesvirus 7
uuuccaugucuugu

SEQ ID NO: 2149907 - RNA, 14 nt, Human herpesvirus 7
auugccgauuccua

SEQ ID NO: 2149908 - RNA, 15 nt, Human herpesvirus 7
cagucaagaacugug

SEQ ID NO: 2149909 - RNA, 20 nt, Human herpesvirus 7
ugugaagucuuuauaaagga

SEQ ID NO: 2149910 - RNA, 22 nt, Human herpesvirus 7
uuuggaaaacaacauacauauu

SEQ ID NO: 2149911 - RNA, 13 nt, Human herpesvirus 7
ucuuaaaugucaa

SEQ ID NO: 2149912 - RNA, 22 nt, Human herpesvirus 7
ccuuuuauugguagauuuucua

SEQ ID NO: 2149913 - RNA, 24 nt, Human herpesvirus 7
ugccgccauguauugucuuacagc

SEQ ID NO: 2149914 - RNA, 14 nt, Human herpesvirus 7
auuaaauacaaauu

SEQ ID NO: 2149915 - RNA, 15 nt, Human herpesvirus 7
aauccaacagaauac

SEQ ID NO: 2149916 - RNA, 17 nt, Human herpesvirus 7
auagcuuaaaaaauaca

SEQ ID NO: 2149917 - RNA, 12 nt, Human herpesvirus 7
uuaaaauuauua

SEQ ID NO: 2149918 - RNA, 13 nt, Human herpesvirus 7
gcaauaugcucac

SEQ ID NO: 2149919 - RNA, 19 nt, Human herpesvirus 7
auuauaucuuaauaaaguu

SEQ ID NO: 2149920 - RNA, 14 nt, Human herpesvirus 7
auuuauugcuuaac

SEQ ID NO: 2149921 - RNA, 15 nt, Human herpesvirus 7
aaggaucaaaagcug

SEQ ID NO: 2149922 - RNA, 13 nt, Human herpesvirus 7
ugauaauuucuau

SEQ ID NO: 2149923 - RNA, 11 nt, Human herpesvirus 7
aauaaauacua

SEQ ID NO: 2149924 - RNA, 14 nt, Human herpesvirus 7
aaaucuacuguaau

SEQ ID NO: 2149925 - RNA, 14 nt, Human herpesvirus 7
ggacauuuguugug

SEQ ID NO: 2149926 - RNA, 16 nt, Human herpesvirus 7
gauaugguuugaaaac

SEQ ID NO: 2149927 - RNA, 22 nt, Human herpesvirus 7
cuuaaugcccguuuucggaaau

SEQ ID NO: 2149928 - RNA, 21 nt, Human herpesvirus 7
aguuuuacaaagaacauguag

SEQ ID NO: 2149929 - RNA, 21 nt, Human herpesvirus 7
ccugaaaaaauaaauucugaa

SEQ ID NO: 2149930 - RNA, 21 nt, Human herpesvirus 7
agauaaaaauuuauuuucuaa

SEQ ID NO: 2149931 - RNA, 22 nt, Human herpesvirus 7
auggauucaaucuacuguacuu

SEQ ID NO: 2149932 - RNA, 19 nt, Human herpesvirus 7
aacgucaggaaaaaaacgu

SEQ ID NO: 2149933 - RNA, 16 nt, Human herpesvirus 7
acuuugccaaugccaa

SEQ ID NO: 2149934 - RNA, 14 nt, Human herpesvirus 7
gagcgcuuugcuua

SEQ ID NO: 2149935 - RNA, 20 nt, Human herpesvirus 7
guccuucaauagcagagaau

SEQ ID NO: 2149936 - RNA, 23 nt, Human herpesvirus 7
acuguuguagguaauuucuuaua

SEQ ID NO: 2149937 - RNA, 14 nt, Human herpesvirus 7
caagauccuuaucc

SEQ ID NO: 2149938 - RNA, 14 nt, Human herpesvirus 7
guaucuaugaaaua

SEQ ID NO: 2149939 - RNA, 21 nt, Human herpesvirus 7
gaaauuaaguuuuucauguau

SEQ ID NO: 2149940 - RNA, 16 nt, Human herpesvirus 7
aauaugcauguguaaa

SEQ ID NO: 2149941 - RNA, 22 nt, Human herpesvirus 7
cugaacgcagacacaauggaac

SEQ ID NO: 2149942 - RNA, 22 nt, Human herpesvirus 7
aaaggugguuacauauccaaug

SEQ ID NO: 2149943 - RNA, 18 nt, Human herpesvirus 7
aaauguacaauuugcaua

SEQ ID NO: 2149944 - RNA, 15 nt, Human herpesvirus 7
uauaacuuguaauuu

SEQ ID NO: 2149945 - RNA, 18 nt, Human herpesvirus 7
ucaauaaaugguuuuauu

SEQ ID NO: 2149946 - RNA, 13 nt, Human herpesvirus 7
auauaugcuuuau

SEQ ID NO: 2149947 - RNA, 20 nt, Human herpesvirus 7
gaauauuuauguucaaauau

SEQ ID NO: 2149948 - RNA, 15 nt, Human herpesvirus 7
gaguaaagauuuaac

SEQ ID NO: 2149949 - RNA, 18 nt, Human herpesvirus 7
aaacaugggauuucugua

SEQ ID NO: 2149950 - RNA, 19 nt, Human herpesvirus 7
uuucaaauagaguuuaauu

SEQ ID NO: 2149951 - RNA, 23 nt, Human herpesvirus 7
guaacaaaggaucgaucucuguc

SEQ ID NO: 2149952 - RNA, 20 nt, Human herpesvirus 7
auuagucauacuuuacagcu

SEQ ID NO: 2149953 - RNA, 21 nt, Human herpesvirus 7
uucuucuaauugcgcaguguu

SEQ ID NO: 2149954 - RNA, 13 nt, Human herpesvirus 7
uggcaccaauaga

SEQ ID NO: 2149955 - RNA, 14 nt, Human herpesvirus 7
ugccaaaagcuuga

SEQ ID NO: 2149956 - RNA, 13 nt, Human herpesvirus 7
ccucacagauuuu

SEQ ID NO: 2149957 - RNA, 13 nt, Human herpesvirus 7
aaaaacaaaaaag

SEQ ID NO: 2149958 - RNA, 18 nt, Human herpesvirus 7
uucuuugaaauagugucu

SEQ ID NO: 2149959 - RNA, 18 nt, Human herpesvirus 7
agcgcugagaucuuccaa

SEQ ID NO: 2149960 - RNA, 22 nt, Human herpesvirus 7
uccaaaaucagacaauuucaca

SEQ ID NO: 2149961 - RNA, 16 nt, Human herpesvirus 7
aacagccaaauguggu

SEQ ID NO: 2149962 - RNA, 18 nt, Human herpesvirus 7
acaaagauccucugagaa

SEQ ID NO: 2149963 - RNA, 19 nt, Human herpesvirus 7
aaucaaaaaauaauuccuu

SEQ ID NO: 2149964 - RNA, 19 nt, Human herpesvirus 7
auguuuuaccgugucuucu

SEQ ID NO: 2149965 - RNA, 21 nt, Human herpesvirus 7
uuuucuuagcuuucaugauuu

SEQ ID NO: 2149966 - RNA, 13 nt, Human herpesvirus 7
cuaaaguggagac

SEQ ID NO: 2149967 - RNA, 15 nt, Human herpesvirus 7
cguuuauaaacucua

SEQ ID NO: 2149968 - RNA, 19 nt, Human herpesvirus 7
ugcaacuggcauuccuugg

SEQ ID NO: 2149969 - RNA, 14 nt, Human herpesvirus 7
cugaaaauugcgua

SEQ ID NO: 2149970 - RNA, 13 nt, Human herpesvirus 7
auaaaauguacaa

SEQ ID NO: 2149971 - RNA, 20 nt, Human herpesvirus 7
agacuaaauauggagcagcu

SEQ ID NO: 2149972 - RNA, 19 nt, Human herpesvirus 7
cuaaagacacuuauuugau

SEQ ID NO: 2149973 - RNA, 14 nt, Human herpesvirus 7
gacgaugagcauga

SEQ ID NO: 2149974 - RNA, 17 nt, Human herpesvirus 7
ugcgaauacuuguugag

SEQ ID NO: 2149975 - RNA, 19 nt, Human herpesvirus 7
acguguuuuugaugugcaa

SEQ ID NO: 2149976 - RNA, 18 nt, Human herpesvirus 7
aacuaaguuuugcauuuu

SEQ ID NO: 2149977 - RNA, 12 nt, Human herpesvirus 7
uaagaaacaucu

SEQ ID NO: 2149978 - RNA, 14 nt, Human herpesvirus 7
acuacauuuaaaaa

SEQ ID NO: 2149979 - RNA, 14 nt, Human herpesvirus 7
aucgacaaacagaa

SEQ ID NO: 2149980 - RNA, 18 nt, Human herpesvirus 7
uucaacuucuaguucuga

SEQ ID NO: 2149981 - RNA, 12 nt, Human herpesvirus 7
ucuaaacaaaca

SEQ ID NO: 2149982 - RNA, 14 nt, Human herpesvirus 7
caaauuaaauacuu

SEQ ID NO: 2149983 - RNA, 24 nt, Human herpesvirus 7
cagauugaaauuccauacaaagaa

SEQ ID NO: 2149984 - RNA, 18 nt, Human herpesvirus 7
uguugaguacgaaagaau

SEQ ID NO: 2149985 - RNA, 20 nt, Human herpesvirus 7
gaaucaagacgcuguaugca

SEQ ID NO: 2149986 - RNA, 17 nt, Human herpesvirus 7
guuuagugauagaguac

SEQ ID NO: 2149987 - RNA, 15 nt, Human herpesvirus 7
aucaagaaacaaggu

SEQ ID NO: 2149988 - RNA, 17 nt, Human herpesvirus 7
agaaacaaucccagaaa

SEQ ID NO: 2149989 - RNA, 15 nt, Human herpesvirus 7
uagccuuucggacac

SEQ ID NO: 2149990 - RNA, 13 nt, Human herpesvirus 7
gaauuuccagaag

SEQ ID NO: 2149991 - RNA, 18 nt, Human herpesvirus 7
ugauuugagcagugauuu

SEQ ID NO: 2149992 - RNA, 18 nt, Human herpesvirus 7
uaaacguuuaguuaacau

SEQ ID NO: 2149993 - RNA, 12 nt, Human herpesvirus 7
ugcucaaaucaa

SEQ ID NO: 2149994 - RNA, 22 nt, Human herpesvirus 7
cuuuaucagucaagaacuguga

SEQ ID NO: 2149995 - RNA, 17 nt, Human herpesvirus 7
auacaggccuguuucuu

SEQ ID NO: 2149996 - RNA, 19 nt, Human herpesvirus 7
caaaaugacaaaaagguug

SEQ ID NO: 2149997 - RNA, 18 nt, Human herpesvirus 7
auuaaaauguacauaacu

SEQ ID NO: 2149998 - RNA, 17 nt, Human herpesvirus 7
uaaaaguacaaauguuu

SEQ ID NO: 2149999 - RNA, 22 nt, Human herpesvirus 7
gccacagauauucuaacaaaua

SEQ ID NO: 2150000 - RNA, 23 nt, Human herpesvirus 7
agaacaacaacuaaaacuacauu

SEQ ID NO: 2150001 - RNA, 19 nt, Human herpesvirus 7
auuuuaaaagguugacauc

SEQ ID NO: 2150002 - RNA, 14 nt, Human herpesvirus 7
gcacaaucacguga

SEQ ID NO: 2150003 - RNA, 12 nt, Human herpesvirus 7
ugugucuuacaa

SEQ ID NO: 2150004 - RNA, 14 nt, Human herpesvirus 7
cuagaaaauaguug

SEQ ID NO: 2150005 - RNA, 19 nt, Human herpesvirus 7
cugcaaauccaacagaaua

SEQ ID NO: 2150006 - RNA, 16 nt, Human herpesvirus 7
uugcaauuuuagauuu

SEQ ID NO: 2150007 - RNA, 21 nt, Human herpesvirus 7
caaaggaaaaaugcugcucag

SEQ ID NO: 2150008 - RNA, 22 nt, Human herpesvirus 7
cucuugcacaggauuugggaaa

SEQ ID NO: 2150009 - RNA, 23 nt, Human herpesvirus 7
ggauuugaaugaacaaauaauga

SEQ ID NO: 2150010 - RNA, 22 nt, Human herpesvirus 7
auucaaauaagggauaucuuaa

SEQ ID NO: 2150011 - RNA, 15 nt, Human herpesvirus 7
uuucauaucuaugau

SEQ ID NO: 2150012 - RNA, 17 nt, Human herpesvirus 7
gacaaauuaaacaaucu

SEQ ID NO: 2150013 - RNA, 17 nt, Human herpesvirus 7
acuucaacauacagcau

SEQ ID NO: 2150014 - RNA, 13 nt, Human herpesvirus 7
aacaaauugugga

SEQ ID NO: 2150015 - RNA, 17 nt, Human herpesvirus 7
uaauuccgggagaaagc

SEQ ID NO: 2150016 - RNA, 15 nt, Human herpesvirus 7
uaaugaauaaaaucu

SEQ ID NO: 2150017 - RNA, 17 nt, Human herpesvirus 7
aauaaguccgugugcaa

SEQ ID NO: 2150018 - RNA, 12 nt, Human herpesvirus 7
aagaaauuuucu

SEQ ID NO: 2150019 - RNA, 18 nt, Human herpesvirus 7
cuuuucaaugcaacuuua

SEQ ID NO: 2150020 - RNA, 15 nt, Human herpesvirus 7
auguuacccaaaaug

SEQ ID NO: 2150021 - RNA, 18 nt, Human herpesvirus 7
gagucucuaaaauuuucu

SEQ ID NO: 2150022 - RNA, 19 nt, Human herpesvirus 7
uuauuaauuuuuaauucuu

SEQ ID NO: 2150023 - RNA, 16 nt, Human herpesvirus 7
acacuagcuuucuguu

SEQ ID NO: 2150024 - RNA, 11 nt, Human herpesvirus 7
aaaaaggaaaa

SEQ ID NO: 2150025 - RNA, 16 nt, Human herpesvirus 7
augggauuucuguaaa

SEQ ID NO: 2150026 - RNA, 12 nt, Human herpesvirus 7
aaacaucuguuu

SEQ ID NO: 2150027 - RNA, 14 nt, Human herpesvirus 7
aacucuaucuccua

SEQ ID NO: 2150028 - RNA, 16 nt, Human herpesvirus 7
gacaccaguaugaaau

SEQ ID NO: 2150029 - RNA, 21 nt, Human herpesvirus 7
cgugagggggacaauuauuua

SEQ ID NO: 2150030 - RNA, 15 nt, Human herpesvirus 7
aucucucuuucugga

SEQ ID NO: 2150031 - RNA, 19 nt, Human herpesvirus 7
ucguaucugugacuuagaa

SEQ ID NO: 2150032 - RNA, 18 nt, Human herpesvirus 7
aaacauuagcauugaaau

SEQ ID NO: 2150033 - RNA, 14 nt, Human herpesvirus 7
ucucguaauuuaag

SEQ ID NO: 2150034 - RNA, 17 nt, Human herpesvirus 7
ccugucuugaccuggag

SEQ ID NO: 2150035 - RNA, 16 nt, Human herpesvirus 7
ucaucgguuuucugag

SEQ ID NO: 2150036 - RNA, 18 nt, Human herpesvirus 7
cguuucuagcaaaauaug

SEQ ID NO: 2150037 - RNA, 17 nt, Human herpesvirus 7
ugauuguggggcauuca

SEQ ID NO: 2150038 - RNA, 19 nt, Human herpesvirus 7
auaaucaaaaaauucuucu

SEQ ID NO: 2150039 - RNA, 12 nt, Human herpesvirus 7
cugcaaagaaaa

SEQ ID NO: 2150040 - RNA, 15 nt, Human herpesvirus 7
uuuguaugucuacaa

SEQ ID NO: 2150041 - RNA, 15 nt, Human herpesvirus 7
acgcgggguuaaaaa

SEQ ID NO: 2150042 - RNA, 15 nt, Human herpesvirus 7
uuuccucacagauuu

SEQ ID NO: 2150043 - RNA, 15 nt, Human herpesvirus 7
uucauuuuuuucuua

SEQ ID NO: 2150044 - RNA, 19 nt, Human herpesvirus 7
aauuauuagauuccauuua

SEQ ID NO: 2150045 - RNA, 20 nt, Human herpesvirus 7
guaauguaagaaaagcaagu

SEQ ID NO: 2150046 - RNA, 18 nt, Human herpesvirus 7
agaagacauauuagauua

SEQ ID NO: 2150047 - RNA, 22 nt, Human herpesvirus 7
aaggaaauuaguucuugugacg

SEQ ID NO: 2150048 - RNA, 15 nt, Human herpesvirus 7
auagacacauuuauc

SEQ ID NO: 2150049 - RNA, 16 nt, Human herpesvirus 7
acaagguuuaaaacau

SEQ ID NO: 2150050 - RNA, 15 nt, Human herpesvirus 7
gauaugaauuugaaa

SEQ ID NO: 2150051 - RNA, 21 nt, Human herpesvirus 7
uagugauagaguacauguguc

SEQ ID NO: 2150052 - RNA, 15 nt, Human herpesvirus 7
aaaauaaacauguug

SEQ ID NO: 2150053 - RNA, 21 nt, Human herpesvirus 7
ugcuggcucaagcacaaucac

SEQ ID NO: 2150054 - RNA, 18 nt, Human herpesvirus 7
aaauauaugcuuuauuua

SEQ ID NO: 2150055 - RNA, 23 nt, Human herpesvirus 7
auccagaacauuuauuuucuuaa

SEQ ID NO: 2150056 - RNA, 14 nt, Human herpesvirus 7
acagaaaucccaaa

SEQ ID NO: 2150057 - RNA, 19 nt, Human herpesvirus 7
augaagcuguacaacaguc

SEQ ID NO: 2150058 - RNA, 18 nt, Human herpesvirus 7
aucugauuuauauagcaa

SEQ ID NO: 2150059 - RNA, 22 nt, Human herpesvirus 7
cauuuuuacucaauauaaagaa

SEQ ID NO: 2150060 - RNA, 15 nt, Human herpesvirus 7
uaauuuuuuuuugag

SEQ ID NO: 2150061 - RNA, 19 nt, Human herpesvirus 7
acuugaauagguaucuuua

SEQ ID NO: 2150062 - RNA, 15 nt, Human herpesvirus 7
guacuguaauuucuc

SEQ ID NO: 2150063 - RNA, 22 nt, Human herpesvirus 7
uauaaaggaccaugggaaaaga

SEQ ID NO: 2150064 - RNA, 15 nt, Human herpesvirus 7
ucaauaaaaaguuug

SEQ ID NO: 2150065 - RNA, 23 nt, Human herpesvirus 7
uggcauugaaauucuguggagug

SEQ ID NO: 2150066 - RNA, 19 nt, Human herpesvirus 7
aucuuugucacuuaaagaa

SEQ ID NO: 2150067 - RNA, 21 nt, Human herpesvirus 7
acugcuucucccauucaauaa

SEQ ID NO: 2150068 - RNA, 14 nt, Human herpesvirus 7
ucuauuauuucuac

SEQ ID NO: 2150069 - RNA, 18 nt, Human herpesvirus 7
agcuccaagcuuaaauaa

SEQ ID NO: 2150070 - RNA, 15 nt, Human herpesvirus 7
uucagaaaaaccauu

SEQ ID NO: 2150071 - RNA, 15 nt, Human herpesvirus 7
ggcuaacagugggaa

SEQ ID NO: 2150072 - RNA, 16 nt, Human herpesvirus 7
auaauucaaucugcaa

SEQ ID NO: 2150073 - RNA, 12 nt, Human herpesvirus 7
uaagaaucuauu

SEQ ID NO: 2150074 - RNA, 23 nt, Human herpesvirus 7
gcauaaaaaaucuaauuaaucug

SEQ ID NO: 2150075 - RNA, 21 nt, Human herpesvirus 7
aaauaaaggaucucucuuucu

SEQ ID NO: 2150076 - RNA, 16 nt, Human herpesvirus 7
uucaucuucugaaucu

SEQ ID NO: 2150077 - RNA, 13 nt, Human herpesvirus 7
aguguuuaaaaug

SEQ ID NO: 2150078 - RNA, 20 nt, Human herpesvirus 7
gaugaauuaauucuuuccac

SEQ ID NO: 2150079 - RNA, 16 nt, Human herpesvirus 7
cguuugaauguauguc

SEQ ID NO: 2150080 - RNA, 17 nt, Human herpesvirus 7
caguauauaaugguuug

SEQ ID NO: 2150081 - RNA, 20 nt, Human herpesvirus 7
uucguuaacccagaagaaac

SEQ ID NO: 2150082 - RNA, 13 nt, Human herpesvirus 7
uaggcuucuucua

SEQ ID NO: 2150083 - RNA, 15 nt, Human herpesvirus 7
ugaacucugucauca

SEQ ID NO: 2150084 - RNA, 20 nt, Human herpesvirus 7
acaguuuggggcacaaaaua

SEQ ID NO: 2150085 - RNA, 23 nt, Human herpesvirus 7
ggagcuucauuuuaaaaaagaca

SEQ ID NO: 2150086 - RNA, 15 nt, Human herpesvirus 7
uaacaagcacacuaa

SEQ ID NO: 2150087 - RNA, 21 nt, Human herpesvirus 7
augaagauaucuuaucuggag

SEQ ID NO: 2150088 - RNA, 14 nt, Human herpesvirus 7
cuguaaaauuuaaa

SEQ ID NO: 2150089 - RNA, 22 nt, Human herpesvirus 7
agaaauuuuacagccuguacaa

SEQ ID NO: 2150090 - RNA, 12 nt, Human herpesvirus 7
caaaguagccuu

SEQ ID NO: 2150091 - RNA, 13 nt, Human herpesvirus 7
cuuuucagugaag

SEQ ID NO: 2150092 - RNA, 14 nt, Human herpesvirus 7
guaauagcuuuaaa

SEQ ID NO: 2150093 - RNA, 14 nt, Human herpesvirus 7
uguuuugcauauuu

SEQ ID NO: 2150094 - RNA, 16 nt, Human herpesvirus 7
aacuuuucuuaaacau

SEQ ID NO: 2150095 - RNA, 22 nt, Human herpesvirus 7
uuguuugcugguggguuuugaa

SEQ ID NO: 2150096 - RNA, 21 nt, Human herpesvirus 7
ugucuuaauugccgauuccua

SEQ ID NO: 2150097 - RNA, 20 nt, Human herpesvirus 7
agcuugguuuuacaaauuaa

SEQ ID NO: 2150098 - RNA, 22 nt, Human herpesvirus 7
cguuauuauguguacacuuuug

SEQ ID NO: 2150099 - RNA, 22 nt, Human herpesvirus 7
aaguuaaaagaucuuuuacaga

SEQ ID NO: 2150100 - RNA, 15 nt, Human herpesvirus 7
auccagcaaagacuu

SEQ ID NO: 2150101 - RNA, 14 nt, Human herpesvirus 7
accauuucugaaac

SEQ ID NO: 2150102 - RNA, 15 nt, Human herpesvirus 7
aaugauuucagaaaa

SEQ ID NO: 2150103 - RNA, 22 nt, Human herpesvirus 7
augauuuuuuaaaugugucuua

SEQ ID NO: 2150104 - RNA, 19 nt, Human herpesvirus 7
uggacagagacaaccaucg

SEQ ID NO: 2150105 - RNA, 14 nt, Human herpesvirus 7
uuaacgaaugacag

SEQ ID NO: 2150106 - RNA, 19 nt, Human herpesvirus 7
ugaacaauggugugucugu

SEQ ID NO: 2150107 - RNA, 19 nt, Human herpesvirus 7
uuggauugauuuucaaguu

SEQ ID NO: 2150108 - RNA, 17 nt, Human herpesvirus 7
aaaaagccauaaaaugu

SEQ ID NO: 2150109 - RNA, 15 nt, Human herpesvirus 7
aucacaaaacucuuc

SEQ ID NO: 2150110 - RNA, 14 nt, Human herpesvirus 7
uaaaaaugauuuuu

SEQ ID NO: 2150111 - RNA, 20 nt, Human herpesvirus 7
aucuuaaaaguacaaauguu

SEQ ID NO: 2150112 - RNA, 14 nt, Human herpesvirus 7
auuauaagaaucug

SEQ ID NO: 2150113 - RNA, 16 nt, Human herpesvirus 7
aucaaauuuugauucc

SEQ ID NO: 2150114 - RNA, 20 nt, Human herpesvirus 7
cuauuagauaaugacaaaca

SEQ ID NO: 2150115 - RNA, 23 nt, Human herpesvirus 7
auucuauaaaacgugugaaaaca

SEQ ID NO: 2150116 - RNA, 20 nt, Human herpesvirus 7
uaucuccuaaaugaauuuua

SEQ ID NO: 2150117 - RNA, 19 nt, Human herpesvirus 7
cuuuagauagaaauaguug

SEQ ID NO: 2150118 - RNA, 17 nt, Human herpesvirus 7
aaugcugcucagcuaga

SEQ ID NO: 2150119 - RNA, 23 nt, Human herpesvirus 7
uacaaauguuuuaauuuggaaau

SEQ ID NO: 2150120 - RNA, 20 nt, Human herpesvirus 7
gcuugcuuaaaacuuugaaa

SEQ ID NO: 2150121 - RNA, 20 nt, Human herpesvirus 7
caguucaagaaauaaugaag

SEQ ID NO: 2150122 - RNA, 21 nt, Human herpesvirus 7
uguaacaacuagcaaacagug

SEQ ID NO: 2150123 - RNA, 21 nt, Human herpesvirus 7
auguuaaaggaucaaaagcug

SEQ ID NO: 2150124 - RNA, 19 nt, Human herpesvirus 7
gaacuuuuaaauuaaaaga

SEQ ID NO: 2150125 - RNA, 14 nt, Human herpesvirus 7
uauggacuccugua

SEQ ID NO: 2150126 - RNA, 16 nt, Human herpesvirus 7
aggaccaauucuuuua

SEQ ID NO: 2150127 - RNA, 23 nt, Human herpesvirus 7
ugaagaagaguugcaacuagaga

SEQ ID NO: 2150128 - RNA, 23 nt, Human herpesvirus 7
cgauguauuacuacuaacaugga

SEQ ID NO: 2150129 - RNA, 16 nt, Human herpesvirus 7
caauagugaacaugug

SEQ ID NO: 2150130 - RNA, 15 nt, Human herpesvirus 7
gcaauuaauucaguu

SEQ ID NO: 2150131 - RNA, 17 nt, Human herpesvirus 7
gcagauuuggggucuga

SEQ ID NO: 2150132 - RNA, 14 nt, Human herpesvirus 7
ucguaucugugacu

SEQ ID NO: 2150133 - RNA, 16 nt, Human herpesvirus 7
uuaauagaaauuauug

SEQ ID NO: 2150134 - RNA, 12 nt, Human herpesvirus 7
uuuaugaacaag

SEQ ID NO: 2150135 - RNA, 23 nt, Human herpesvirus 7
cgcaaugguauaaagugcugucu

SEQ ID NO: 2150136 - RNA, 16 nt, Human herpesvirus 7
uucaauuucugucuuu

SEQ ID NO: 2150137 - RNA, 21 nt, Human herpesvirus 7
augucaggaaaaaauugaaaa

SEQ ID NO: 2150138 - RNA, 19 nt, Human herpesvirus 7
ugaaauuguaguuuuugca

SEQ ID NO: 2150139 - RNA, 16 nt, Human herpesvirus 7
agaaugcguaacuuug

SEQ ID NO: 2150140 - RNA, 21 nt, Human herpesvirus 7
gaugcauuuuuauugcaguuu

SEQ ID NO: 2150141 - RNA, 13 nt, Human herpesvirus 7
uuucuuucucauc

SEQ ID NO: 2150142 - RNA, 16 nt, Human herpesvirus 7
uuaaaauuaaaacuug

SEQ ID NO: 2150143 - RNA, 19 nt, Human herpesvirus 7
agcaugcguaaaaaaucaa

SEQ ID NO: 2150144 - RNA, 16 nt, Human herpesvirus 7
ugauuuuuuauuccca

SEQ ID NO: 2150145 - RNA, 12 nt, Human herpesvirus 7
uguugcuuuuuc

SEQ ID NO: 2150146 - RNA, 15 nt, Human herpesvirus 7
gugugucucuagaaa

SEQ ID NO: 2150147 - RNA, 17 nt, Human herpesvirus 7
uuuaaguaaauuucuca

SEQ ID NO: 2150148 - RNA, 13 nt, Human herpesvirus 7
gcauauugaagau

SEQ ID NO: 2150149 - RNA, 24 nt, Human herpesvirus 7
gaaaauuuauauuugcuugcugaa

SEQ ID NO: 2150150 - RNA, 15 nt, Human herpesvirus 7
acaaggacgaaucua

SEQ ID NO: 2150151 - RNA, 20 nt, Human herpesvirus 7
cgcuguugguuaugcacauc

SEQ ID NO: 2150152 - RNA, 19 nt, Human herpesvirus 7
cuuacuuuuaauucuucua

SEQ ID NO: 2150153 - RNA, 20 nt, Human herpesvirus 7
auccaaguuuuacagaaauu

SEQ ID NO: 2150154 - RNA, 19 nt, Human herpesvirus 7
cagaagcugacuuugucau

SEQ ID NO: 2150155 - RNA, 18 nt, Human herpesvirus 7
auuagauuccauuuaaau

SEQ ID NO: 2150156 - RNA, 20 nt, Human herpesvirus 7
aagauguuacccaaaaugua

SEQ ID NO: 2150157 - RNA, 14 nt, Human herpesvirus 7
guguuguaauaauu

SEQ ID NO: 2150158 - RNA, 21 nt, Human herpesvirus 7
cuagcaccgaaaaugguauuu

SEQ ID NO: 2150159 - RNA, 23 nt, Human herpesvirus 7
uugcauauuuugcuagaaacguc

SEQ ID NO: 2150160 - RNA, 17 nt, Human herpesvirus 7
uguuacaugaucuugua

SEQ ID NO: 2150161 - RNA, 17 nt, Human herpesvirus 7
ugugcagagaugaagga

SEQ ID NO: 2150162 - RNA, 15 nt, Human herpesvirus 7
ucaaugcaucuuuaa

SEQ ID NO: 2150163 - RNA, 21 nt, Human herpesvirus 7
auacuaauagaaaaauguaca

SEQ ID NO: 2150164 - RNA, 14 nt, Human herpesvirus 7
gagaauuuaaagcu

SEQ ID NO: 2150165 - RNA, 14 nt, Human herpesvirus 7
gaaaagcuuguaua

SEQ ID NO: 2150166 - RNA, 22 nt, Human herpesvirus 7
aaagucagaacauugucaaaga

SEQ ID NO: 2150167 - RNA, 15 nt, Human herpesvirus 7
cagcguucaaucaaa

SEQ ID NO: 2150168 - RNA, 14 nt, Human herpesvirus 7
uagagaaaacauug

SEQ ID NO: 2150169 - RNA, 22 nt, Human herpesvirus 7
cuaaagugaacaugacuucaga

SEQ ID NO: 2150170 - RNA, 21 nt, Human herpesvirus 7
cagucugaaagccgcugccuu

SEQ ID NO: 2150171 - RNA, 17 nt, Human herpesvirus 7
agauaauauagaugcag

SEQ ID NO: 2150172 - RNA, 15 nt, Human herpesvirus 7
caccacaauuuuaac

SEQ ID NO: 2150173 - RNA, 17 nt, Human herpesvirus 7
ucuucaacuucucuugg

SEQ ID NO: 2150174 - RNA, 23 nt, Human herpesvirus 7
uaaaggaucaaaagcugcagcug

SEQ ID NO: 2150175 - RNA, 15 nt, Human herpesvirus 7
accauugcugauccg

SEQ ID NO: 2150176 - RNA, 11 nt, Human herpesvirus 7
gcaacuucuga

SEQ ID NO: 2150177 - RNA, 19 nt, Human herpesvirus 7
uaaaaugguugugcaauuu

SEQ ID NO: 2150178 - RNA, 14 nt, Human herpesvirus 7
guuucuuucuuuua

SEQ ID NO: 2150179 - RNA, 16 nt, Human herpesvirus 7
cuagaguaucuuuuca

SEQ ID NO: 2150180 - RNA, 16 nt, Human herpesvirus 7
uucuuguuuggaaaac

SEQ ID NO: 2150181 - RNA, 14 nt, Human herpesvirus 7
auaauaagaugugu

SEQ ID NO: 2150182 - RNA, 23 nt, Human herpesvirus 7
auuaacauuaaccacaacuguga

SEQ ID NO: 2150183 - RNA, 17 nt, Human herpesvirus 7
ucuguagaaaauguuuu

SEQ ID NO: 2150184 - RNA, 14 nt, Human herpesvirus 7
ucacagacgcauca

SEQ ID NO: 2150185 - RNA, 14 nt, Human herpesvirus 7
cuuucgcaacaauc

SEQ ID NO: 2150186 - RNA, 22 nt, Human herpesvirus 7
cuuucuuugagcuaaccuuuua

SEQ ID NO: 2150187 - RNA, 17 nt, Human herpesvirus 7
ugaaaaaaacacuuugc

SEQ ID NO: 2150188 - RNA, 14 nt, Human herpesvirus 7
guaugaaaaaaaca

SEQ ID NO: 2150189 - RNA, 16 nt, Human herpesvirus 7
cugccucugccucuug

SEQ ID NO: 2150190 - RNA, 13 nt, Human herpesvirus 7
uaagaaaaauuug

SEQ ID NO: 2150191 - RNA, 23 nt, Human herpesvirus 7
auaaaacaaacuauguccaaaaa

SEQ ID NO: 2150192 - RNA, 14 nt, Human herpesvirus 7
acuuguaauuuuug

SEQ ID NO: 2150193 - RNA, 23 nt, Human herpesvirus 7
uuguaucuaugaaauaaaauuuu

SEQ ID NO: 2150194 - RNA, 14 nt, Human herpesvirus 7
cagauucuccagaa

SEQ ID NO: 2150195 - RNA, 12 nt, Human herpesvirus 7
acagacagaaug

SEQ ID NO: 2150196 - RNA, 13 nt, Human herpesvirus 7
agaugcaugcuaa

SEQ ID NO: 2150197 - RNA, 20 nt, Human herpesvirus 7
auucaaucaccaaagaguau

SEQ ID NO: 2150198 - RNA, 17 nt, Human herpesvirus 7
gcuguguccacuacaga

SEQ ID NO: 2150199 - RNA, 16 nt, Human herpesvirus 7
aggaaauugcuuucua

SEQ ID NO: 2150200 - RNA, 13 nt, Human herpesvirus 7
ccaaauauaugcu

SEQ ID NO: 2150201 - RNA, 21 nt, Human herpesvirus 7
augcaagaaaguccaaaguga

SEQ ID NO: 2150202 - RNA, 16 nt, Human herpesvirus 7
aaacauuauauuccca

SEQ ID NO: 2150203 - RNA, 16 nt, Human herpesvirus 7
aagcaauguaugucaa

SEQ ID NO: 2150204 - RNA, 15 nt, Human herpesvirus 7
accgucauuuaauug

SEQ ID NO: 2150205 - RNA, 16 nt, Human herpesvirus 7
ucaaauuauuuccaga

SEQ ID NO: 2150206 - RNA, 14 nt, Human herpesvirus 7
gaagauuugacaaa

SEQ ID NO: 2150207 - RNA, 21 nt, Human herpesvirus 7
gaaucauuuguauauucuagu

SEQ ID NO: 2150208 - RNA, 18 nt, Human herpesvirus 7
cugaaaacauugcuguuc

SEQ ID NO: 2150209 - RNA, 18 nt, Human herpesvirus 7
acaccgcaaacauuuuga

SEQ ID NO: 2150210 - RNA, 22 nt, Human herpesvirus 7
ucaaauauauauuaagaaauaa

SEQ ID NO: 2150211 - RNA, 16 nt, Human herpesvirus 7
aacuauucgaaaauau

SEQ ID NO: 2150212 - RNA, 20 nt, Human herpesvirus 7
guaagaaacaucuaugugcu

SEQ ID NO: 2150213 - RNA, 14 nt, Human herpesvirus 7
aguagugcuaauau

SEQ ID NO: 2150214 - RNA, 11 nt, Human herpesvirus 7
aaaaaacacuu

SEQ ID NO: 2150215 - RNA, 20 nt, Human herpesvirus 7
gaaaaaaaaaguuaaaagau

SEQ ID NO: 2150216 - RNA, 18 nt, Human herpesvirus 7
guuucuuuuucauuaacu

SEQ ID NO: 2150217 - RNA, 16 nt, Human herpesvirus 7
acaauuguauuucagu

SEQ ID NO: 2150218 - RNA, 12 nt, Human herpesvirus 7
cagucuguaaac

SEQ ID NO: 2150219 - RNA, 16 nt, Human herpesvirus 7
agauuuguuccaaacu

SEQ ID NO: 2150220 - RNA, 16 nt, Human herpesvirus 7
cauuuuguuuugcaau

SEQ ID NO: 2150221 - RNA, 14 nt, Human herpesvirus 7
acagauaaaaauuu

SEQ ID NO: 2150222 - RNA, 21 nt, Human herpesvirus 7
acgcagacuaaucacgagaaa

SEQ ID NO: 2150223 - RNA, 13 nt, Human herpesvirus 7
uuacacugauuuu

SEQ ID NO: 2150224 - RNA, 15 nt, Human herpesvirus 7
acuguuguagguaau

SEQ ID NO: 2150225 - RNA, 22 nt, Human herpesvirus 7
aauaauuuuuuuuugagugugc

SEQ ID NO: 2150226 - RNA, 15 nt, Human herpesvirus 7
gaaaaauguacaaua

SEQ ID NO: 2150227 - RNA, 21 nt, Human herpesvirus 7
aucuugagaaauaugaauuga

SEQ ID NO: 2150228 - RNA, 23 nt, Human herpesvirus 7
gaaucagacuaaauauggagcag

SEQ ID NO: 2150229 - RNA, 14 nt, Human herpesvirus 7
ucuaaaauuuucuu

SEQ ID NO: 2150230 - RNA, 19 nt, Human herpesvirus 7
uguauuaaguguuugcucu

SEQ ID NO: 2150231 - RNA, 23 nt, Human herpesvirus 7
ucuaaaaauguuuuuguuucuga

SEQ ID NO: 2150232 - RNA, 15 nt, Human herpesvirus 7
aaggugguuacauau

SEQ ID NO: 2150233 - RNA, 16 nt, Human herpesvirus 7
gcaugaaaucuugaau

SEQ ID NO: 2150234 - RNA, 19 nt, Human herpesvirus 7
caguuauuucuuauuggag

SEQ ID NO: 2150235 - RNA, 17 nt, Human herpesvirus 7
cuaggucuuccacuguu

SEQ ID NO: 2150236 - RNA, 14 nt, Human herpesvirus 7
auucaaucugcaaa

SEQ ID NO: 2150237 - RNA, 15 nt, Human herpesvirus 7
gauuccaaaccuauc

SEQ ID NO: 2150238 - RNA, 21 nt, Human herpesvirus 7
ucacugggaaguauguuucau

SEQ ID NO: 2150239 - RNA, 21 nt, Human herpesvirus 7
cuacaauuucuggcaauaaag

SEQ ID NO: 2150240 - RNA, 22 nt, Human herpesvirus 7
ugcaguuauuucuuauuggaga

SEQ ID NO: 2150241 - RNA, 20 nt, Human herpesvirus 7
uuucggacacaaauaucacu

SEQ ID NO: 2150242 - RNA, 20 nt, Human herpesvirus 7
uagauacauuauaaauguaa

SEQ ID NO: 2150243 - RNA, 19 nt, Human herpesvirus 7
auggaacugaaaacaaugc

SEQ ID NO: 2150244 - RNA, 13 nt, Human herpesvirus 7
uggaaaacaacau

SEQ ID NO: 2150245 - RNA, 13 nt, Human herpesvirus 7
augucuucaacuu

SEQ ID NO: 2150246 - RNA, 15 nt, Human herpesvirus 7
guuagaauaucugug

SEQ ID NO: 2150247 - RNA, 16 nt, Human herpesvirus 7
gauauuguacuucugu

SEQ ID NO: 2150248 - RNA, 18 nt, Human herpesvirus 7
auauuuaaggcuguaaaa

SEQ ID NO: 2150249 - RNA, 22 nt, Human herpesvirus 7
ccaaaaucaaguguuucuuuga

SEQ ID NO: 2150250 - RNA, 20 nt, Human herpesvirus 7
uugaagauaaguauaaacag

SEQ ID NO: 2150251 - RNA, 13 nt, Human herpesvirus 7
uagagagaaacua

SEQ ID NO: 2150252 - RNA, 17 nt, Human herpesvirus 7
acucgauuagguaauag

SEQ ID NO: 2150253 - RNA, 11 nt, Human herpesvirus 7
uguugaaauug

SEQ ID NO: 2150254 - RNA, 15 nt, Human herpesvirus 7
cagauucuccagaaa

SEQ ID NO: 2150255 - RNA, 22 nt, Human herpesvirus 7
guuaucuuaugucugauucuua

SEQ ID NO: 2150256 - RNA, 23 nt, Human herpesvirus 7
gcaacaaacaaauaauucaaaaa

SEQ ID NO: 2150257 - RNA, 19 nt, Human herpesvirus 7
cuucuagaaacuaaagaaa

SEQ ID NO: 2150258 - RNA, 18 nt, Human herpesvirus 7
gucaggaucuccuggaaa

SEQ ID NO: 2150259 - RNA, 16 nt, Human herpesvirus 7
auugaagauuguuuaa

SEQ ID NO: 2150260 - RNA, 21 nt, Human herpesvirus 7
agcuauuuuuaauaaaaugau

SEQ ID NO: 2150261 - RNA, 15 nt, Human herpesvirus 7
auuguaaauggcaaa

SEQ ID NO: 2150262 - RNA, 21 nt, Human herpesvirus 7
ucuguuaguugggcaaacagu

SEQ ID NO: 2150263 - RNA, 15 nt, Human herpesvirus 7
agcuagccuauaauu

SEQ ID NO: 2150264 - RNA, 12 nt, Human herpesvirus 7
uagagcugaaua

SEQ ID NO: 2150265 - RNA, 23 nt, Human herpesvirus 7
ucaaauuccuccugaaaauuugu

SEQ ID NO: 2150266 - RNA, 22 nt, Human herpesvirus 7
acauuuaaaaaaucugaauaga

SEQ ID NO: 2150267 - RNA, 18 nt, Human herpesvirus 7
auguaaucaaaauuuugg

SEQ ID NO: 2150268 - RNA, 23 nt, Human herpesvirus 7
ugcuuccuaaaaaaaaaggaaaa

SEQ ID NO: 2150269 - RNA, 23 nt, Human herpesvirus 7
aaaccuauccacucuccugaaau

SEQ ID NO: 2150270 - RNA, 17 nt, Human herpesvirus 7
cgcaaggaauaugaaga

SEQ ID NO: 2150271 - RNA, 16 nt, Human herpesvirus 7
aaucuauuucuauuca

SEQ ID NO: 2150272 - RNA, 23 nt, Human herpesvirus 7
cauauuaacaagcacacuaaaaa

SEQ ID NO: 2150273 - RNA, 19 nt, Human herpesvirus 7
cguuggucgagaauacaca

SEQ ID NO: 2150274 - RNA, 17 nt, Human herpesvirus 7
acuaagaaaaaaacaaa

SEQ ID NO: 2150275 - RNA, 13 nt, Human herpesvirus 7
uuuuuaugaagau

SEQ ID NO: 2150276 - RNA, 14 nt, Human herpesvirus 7
uguauacaacuuua

SEQ ID NO: 2150277 - RNA, 16 nt, Human herpesvirus 7
uuaaaguagcugaauu

SEQ ID NO: 2150278 - RNA, 24 nt, Human herpesvirus 7
aagcuaaacuuuuaacuguuaaag

SEQ ID NO: 2150279 - RNA, 17 nt, Human herpesvirus 7
cuccaugcauauuugaa

SEQ ID NO: 2150280 - RNA, 19 nt, Human herpesvirus 7
ccgaagagggacuuuuaua

SEQ ID NO: 2150281 - RNA, 14 nt, Human herpesvirus 7
cgcagacacaaugg

SEQ ID NO: 2150282 - RNA, 15 nt, Human herpesvirus 7
ucgaucuaagagauu

SEQ ID NO: 2150283 - RNA, 18 nt, Human herpesvirus 7
aagcacaaaucaaaacga

SEQ ID NO: 2150284 - RNA, 13 nt, Human herpesvirus 7
uugaucaaaaucu

SEQ ID NO: 2150285 - RNA, 22 nt, Human herpesvirus 7
uuaacgaaacgcuagaaucuug

SEQ ID NO: 2150286 - RNA, 14 nt, Human herpesvirus 7
uuucaaauagaguu

SEQ ID NO: 2150287 - RNA, 14 nt, Human herpesvirus 7
uuccauuucaaaag

SEQ ID NO: 2150288 - RNA, 16 nt, Human herpesvirus 7
aagcauauugaagauc

SEQ ID NO: 2150289 - RNA, 14 nt, Human herpesvirus 7
gugacuuagaaaaa

SEQ ID NO: 2150290 - RNA, 20 nt, Human herpesvirus 7
ccaggaacagauucuccaga

SEQ ID NO: 2150291 - RNA, 19 nt, Human herpesvirus 7
aaucaaccaacauucuugu

SEQ ID NO: 2150292 - RNA, 17 nt, Human herpesvirus 7
aauuuaagagacauuga

SEQ ID NO: 2150293 - RNA, 14 nt, Human herpesvirus 7
aaaguugggaugac

SEQ ID NO: 2150294 - RNA, 19 nt, Human herpesvirus 7
uauuuaaugguuuuaaaau

SEQ ID NO: 2150295 - RNA, 14 nt, Human herpesvirus 7
caaauuaaagcgag

SEQ ID NO: 2150296 - RNA, 20 nt, Human herpesvirus 7
cacuugaauagguaucuuua

SEQ ID NO: 2150297 - RNA, 14 nt, Human herpesvirus 7
acagucugaaagcc

SEQ ID NO: 2150298 - RNA, 19 nt, Human herpesvirus 7
aauuucaaacguaaugcaa

SEQ ID NO: 2150299 - RNA, 19 nt, Human herpesvirus 7
aacugagaaaaaugacaaa

SEQ ID NO: 2150300 - RNA, 16 nt, Human herpesvirus 7
aaguacacguagacug

SEQ ID NO: 2150301 - RNA, 19 nt, Human herpesvirus 7
aacacugcaagcugauuca

SEQ ID NO: 2150302 - RNA, 14 nt, Human herpesvirus 7
aaaucacuuagacu

SEQ ID NO: 2150303 - RNA, 22 nt, Human herpesvirus 7
aaaucguuuuuggcaaaauauc

SEQ ID NO: 2150304 - RNA, 22 nt, Human herpesvirus 7
cgcuguacaaugcugucucuga

SEQ ID NO: 2150305 - RNA, 16 nt, Human herpesvirus 7
augcuuuaacuggaau

SEQ ID NO: 2150306 - RNA, 15 nt, Human herpesvirus 7
caaaaaauucuucua

SEQ ID NO: 2150307 - RNA, 16 nt, Human herpesvirus 7
caaaucugauaaauua

SEQ ID NO: 2150308 - RNA, 21 nt, Human herpesvirus 7
caaauaaacguccauugauua

SEQ ID NO: 2150309 - RNA, 16 nt, Human herpesvirus 7
cauugcuucagaaaua

SEQ ID NO: 2150310 - RNA, 22 nt, Human herpesvirus 7
cauuucaagaaggaaaauuuca

SEQ ID NO: 2150311 - RNA, 13 nt, Human herpesvirus 7
ccauaaaugcuua

SEQ ID NO: 2150312 - RNA, 20 nt, Human herpesvirus 7
cagaaauuauacuagcagau

SEQ ID NO: 2150313 - RNA, 22 nt, Human herpesvirus 7
cacuguuguagguaauuucuua

SEQ ID NO: 2150314 - RNA, 22 nt, Human herpesvirus 7
cuaagguuuaggaaauugcuuu

SEQ ID NO: 2150315 - RNA, 19 nt, Human herpesvirus 7
agaagcuugcuagauucua

SEQ ID NO: 2150316 - RNA, 20 nt, Human herpesvirus 7
agaaucauuuguauauucua

SEQ ID NO: 2150317 - RNA, 15 nt, Human herpesvirus 7
caccgugagaaauuu

SEQ ID NO: 2150318 - RNA, 12 nt, Human herpesvirus 7
aagaauuuggau

SEQ ID NO: 2150319 - RNA, 13 nt, Human herpesvirus 7
aagaacugugaag

SEQ ID NO: 2150320 - RNA, 22 nt, Human herpesvirus 7
aacugugcaugaaaucuugaau

SEQ ID NO: 2150321 - RNA, 17 nt, Human herpesvirus 7
aacugagaaaaaugaca

SEQ ID NO: 2150322 - RNA, 17 nt, Human herpesvirus 7
aacuaaaacuacauuua

SEQ ID NO: 2150323 - RNA, 15 nt, Human herpesvirus 7
aacuagaaaauaacu

SEQ ID NO: 2150324 - RNA, 16 nt, Human herpesvirus 7
aacucuuccuguuaau

SEQ ID NO: 2150325 - RNA, 17 nt, Human herpesvirus 7
aucuaugugcucugaau

SEQ ID NO: 2150326 - RNA, 16 nt, Human herpesvirus 7
cagucccagauaauua

SEQ ID NO: 2150327 - RNA, 16 nt, Human herpesvirus 7
cgacauuauaaaagau

SEQ ID NO: 2150328 - RNA, 12 nt, Human herpesvirus 7
cggaucuucauu

SEQ ID NO: 2150329 - RNA, 13 nt, Human herpesvirus 7
guaauuauuggau

SEQ ID NO: 2150330 - RNA, 18 nt, Human herpesvirus 7
gcucauuucaucauccga

SEQ ID NO: 2150331 - RNA, 22 nt, Human herpesvirus 7
gcgaaaaacacuuuaaccgcaa

SEQ ID NO: 2150332 - RNA, 20 nt, Human herpesvirus 7
gccaaaucuaauuuaugaua

SEQ ID NO: 2150333 - RNA, 18 nt, Human herpesvirus 7
gcauuauuggauaauauc

SEQ ID NO: 2150334 - RNA, 20 nt, Human herpesvirus 7
gaccucgacauucuccagug

SEQ ID NO: 2150335 - RNA, 14 nt, Human herpesvirus 7
gcagacaccgucau

SEQ ID NO: 2150336 - RNA, 18 nt, Human herpesvirus 7
uuugacaaucuuggcauu

SEQ ID NO: 2150337 - RNA, 20 nt, Human herpesvirus 7
uuuccaucuaccgcgaugaa

SEQ ID NO: 2150338 - RNA, 17 nt, Human herpesvirus 7
gcaauaugcuagaagac

SEQ ID NO: 2150339 - RNA, 16 nt, Human herpesvirus 7
gcaaauuaaaaauauu

SEQ ID NO: 2150340 - RNA, 23 nt, Human herpesvirus 7
gauuauaugcaucaaaacauauc

SEQ ID NO: 2150341 - RNA, 18 nt, Human herpesvirus 7
cagauucuccagaaauua

SEQ ID NO: 2150342 - RNA, 15 nt, Human herpesvirus 7
cacguccaagaaaua

SEQ ID NO: 2150343 - RNA, 16 nt, Human herpesvirus 7
acuauucgaaaauauc

SEQ ID NO: 2150344 - RNA, 18 nt, Human herpesvirus 7
uucgcuaacuuugcuauu

SEQ ID NO: 2150345 - RNA, 22 nt, Human herpesvirus 7
ucuuuauaaaggaccaugggaa

SEQ ID NO: 2150346 - RNA, 15 nt, Human herpesvirus 7
ucuauuacacaggaa

SEQ ID NO: 2150347 - RNA, 15 nt, Human herpesvirus 7
uauccaguacgucuu

SEQ ID NO: 2150348 - RNA, 18 nt, Human herpesvirus 7
guaugguuucauuuggaa

SEQ ID NO: 2150349 - RNA, 22 nt, Human herpesvirus 7
gacuaaucacgagaaaaauauu

SEQ ID NO: 2150350 - RNA, 16 nt, Human herpesvirus 7
cggugaauguagaagu

SEQ ID NO: 2150351 - RNA, 23 nt, Human herpesvirus 7
gacauuucaagaaggaaaauuuc

SEQ ID NO: 2150352 - RNA, 23 nt, Human herpesvirus 7
aaaaagauuuaauaacaauuuga

SEQ ID NO: 2150353 - RNA, 20 nt, Human herpesvirus 7
ccauuguguuaaaaauauca

SEQ ID NO: 2150354 - RNA, 15 nt, Human herpesvirus 7
caaucccagaaauuu

SEQ ID NO: 2150355 - RNA, 18 nt, Human herpesvirus 7
caauuguuaguuaugacg

SEQ ID NO: 2150356 - RNA, 15 nt, Human herpesvirus 7
auauagaaauuguua

SEQ ID NO: 2150357 - RNA, 16 nt, Human herpesvirus 7
aaguguuucuuugaau

SEQ ID NO: 2150358 - RNA, 16 nt, Human herpesvirus 7
aauaucccagaauauc

SEQ ID NO: 2150359 - RNA, 14 nt, Human herpesvirus 7
aauaucucugugau

SEQ ID NO: 2150360 - RNA, 17 nt, Human herpesvirus 7
acacguagacugagacg

SEQ ID NO: 2150361 - RNA, 16 nt, Human herpesvirus 7
aaucaacaaaaugaca

SEQ ID NO: 2150362 - RNA, 16 nt, Human herpesvirus 7
aauauaaaaaauuuga

SEQ ID NO: 2150363 - RNA, 22 nt, Human herpesvirus 7
aauccaaguuuuacagaaauug

SEQ ID NO: 2150364 - RNA, 20 nt, Human herpesvirus 7
acacuauuggacaaaagacu

SEQ ID NO: 2150365 - RNA, 14 nt, Human herpesvirus 7
acauuuaaaaaauc

SEQ ID NO: 2150366 - RNA, 19 nt, Human herpesvirus 7
acauuucauuccaaaauac

SEQ ID NO: 2150367 - RNA, 16 nt, Human herpesvirus 7
acauucagaaaaaauc

SEQ ID NO: 2150368 - RNA, 13 nt, Human herpesvirus 7
acauaaaaauuuc

SEQ ID NO: 2150369 - RNA, 20 nt, Human herpesvirus 7
acauaaagguaaaaauuuga

SEQ ID NO: 2150370 - RNA, 17 nt, Human herpesvirus 7
acauacgugcuuagacu

SEQ ID NO: 2150371 - RNA, 12 nt, Human herpesvirus 7
acagcugagacg

SEQ ID NO: 2150372 - RNA, 15 nt, Human herpesvirus 7
cuauuuaaaauauua

SEQ ID NO: 2150373 - RNA, 18 nt, Human herpesvirus 7
ucaauuaaugcauuggaa

SEQ ID NO: 2150374 - RNA, 16 nt, Human herpesvirus 7
uaucuuuucaaaggaa

SEQ ID NO: 2150375 - RNA, 16 nt, Human herpesvirus 7
uauuuagagucgucuu

SEQ ID NO: 2150376 - RNA, 14 nt, Human herpesvirus 7
gucauaaaauuauc

SEQ ID NO: 2150377 - RNA, 20 nt, Human herpesvirus 7
gacaaucuauauaaaauauc

SEQ ID NO: 2150378 - RNA, 20 nt, Human herpesvirus 7
gaauuuuacaaugcagccua

SEQ ID NO: 2150379 - RNA, 17 nt, Human herpesvirus 7
gaauuaauaaaaguauc

SEQ ID NO: 2150380 - RNA, 16 nt, Human herpesvirus 7
gaaucauuuauuugau

SEQ ID NO: 2150381 - RNA, 18 nt, Human herpesvirus 7
gaaucuauuuaaaauauu

SEQ ID NO: 2150382 - RNA, 15 nt, Human herpesvirus 7
gaaagugaaaauauu

SEQ ID NO: 2150383 - RNA, 17 nt, Human herpesvirus 7
gaaauucgcaaaauuuc

SEQ ID NO: 2150384 - RNA, 16 nt, Human herpesvirus 7
gaaauuucaaaaauuc

SEQ ID NO: 2150385 - RNA, 13 nt, Human herpesvirus 7
gccaauaaaaauc

SEQ ID NO: 2150386 - RNA, 17 nt, Human herpesvirus 7
cauauuagaauugggau

SEQ ID NO: 2150387 - RNA, 15 nt, Human herpesvirus 7
cauagcuagaaauug

SEQ ID NO: 2150388 - RNA, 14 nt, Human herpesvirus 7
caucgaagaaauuc

SEQ ID NO: 2150389 - RNA, 12 nt, Human herpesvirus 7
auaacugugaaa

SEQ ID NO: 2150390 - RNA, 14 nt, Human herpesvirus 7
aauuaacagcucua

SEQ ID NO: 2150391 - RNA, 21 nt, Human herpesvirus 7
acaaauaauucaaaaacuauc

SEQ ID NO: 2150392 - RNA, 21 nt, Human herpesvirus 7
acaaauaccaugaaaaauaug

SEQ ID NO: 2150393 - RNA, 14 nt, Human herpesvirus 7
aauuccugcuugca

SEQ ID NO: 2150394 - RNA, 22 nt, Human herpesvirus 7
aauucuguggagugagaaauua

SEQ ID NO: 2150395 - RNA, 13 nt, Human herpesvirus 7
aauugagaaauuu

SEQ ID NO: 2150396 - RNA, 18 nt, Human herpesvirus 7
acccaugggcacauuugu

SEQ ID NO: 2150397 - RNA, 21 nt, Human herpesvirus 7
aguuuuacuuuugagcgcuga

SEQ ID NO: 2150398 - RNA, 21 nt, Human herpesvirus 7
aaccuguacucgacucugaau

SEQ ID NO: 2150399 - RNA, 18 nt, Human herpesvirus 7
aaccaguuuuacuuuuga

SEQ ID NO: 2150400 - RNA, 19 nt, Human herpesvirus 7
aacauuaauaucaauuuga

SEQ ID NO: 2150401 - RNA, 23 nt, Human herpesvirus 7
aacauuccucauggccagugaau

SEQ ID NO: 2150402 - RNA, 17 nt, Human herpesvirus 7
aacccacuaacauuuua

SEQ ID NO: 2150403 - RNA, 18 nt, Human herpesvirus 7
gagauuucugaaaaucuc

SEQ ID NO: 2150404 - RNA, 14 nt, Human herpesvirus 7
gauaaaauuuggag

SEQ ID NO: 2150405 - RNA, 16 nt, Human herpesvirus 7
gauaucuuaaaauaug

SEQ ID NO: 2150406 - RNA, 22 nt, Human herpesvirus 8 [Kaposi`s sarcoma-associated h
cagaagagcauuuuucccuccu

SEQ ID NO: 2150407 - RNA, 18 nt, Human herpesvirus 8 [Kaposi`s sarcoma-associated h
cccaauuaauuggagcuc

SEQ ID NO: 2150408 - RNA, 22 nt, Human herpesvirus 8 [Kaposi`s sarcoma-associated h
agacauucguaagaggacccag

SEQ ID NO: 2150409 - RNA, 14 nt, Human herpesvirus 8 [Kaposi`s sarcoma-associated h
ugugaaguuuacau

SEQ ID NO: 2150410 - RNA, 20 nt, Human herpesvirus 8 [Kaposi`s sarcoma-associated h
aggaucugugugugaagcag

SEQ ID NO: 2150411 - RNA, 16 nt, Human herpesvirus 8 [Kaposi`s sarcoma-associated h
caucccgccugcgguc

SEQ ID NO: 2150412 - RNA, 22 nt, Human herpesvirus 8 [Kaposi`s sarcoma-associated h
cggcccaccgcguguucgaggg

SEQ ID NO: 2150413 - RNA, 16 nt, Human herpesvirus 8 [Kaposi`s sarcoma-associated h
accgugggaacuguga

SEQ ID NO: 2150414 - RNA, 15 nt, Human herpesvirus 8 [Kaposi`s sarcoma-associated h
cgggagaaccaugcc

SEQ ID NO: 2150415 - RNA, 14 nt, Human herpesvirus 8 [Kaposi`s sarcoma-associated h
guggauuuuaugga

SEQ ID NO: 2150416 - RNA, 14 nt, Human herpesvirus 8 [Kaposi`s sarcoma-associated h
caugaugcagagag

SEQ ID NO: 2150417 - RNA, 17 nt, Human herpesvirus 8 [Kaposi`s sarcoma-associated h
ccaguauuaugccaggg

SEQ ID NO: 2150418 - RNA, 14 nt, Human herpesvirus 8 [Kaposi`s sarcoma-associated h
cuuugcagccaggu

SEQ ID NO: 2150419 - RNA, 12 nt, Human herpesvirus 8 [Kaposi`s sarcoma-associated h
cgccccucuugg

SEQ ID NO: 2150420 - RNA, 18 nt, Human herpesvirus 8 [Kaposi`s sarcoma-associated h
cagaguuuuaugggcuca

SEQ ID NO: 2150421 - RNA, 13 nt, Human herpesvirus 8 [Kaposi`s sarcoma-associated h
cggacggagccgg

SEQ ID NO: 2150422 - RNA, 19 nt, Human herpesvirus 8 [Kaposi`s sarcoma-associated h
cugcucuaaauagaacagg

SEQ ID NO: 2150423 - RNA, 15 nt, Human herpesvirus 8 [Kaposi`s sarcoma-associated h
gcaugguugcaacag

SEQ ID NO: 2150424 - RNA, 21 nt, Human herpesvirus 8 [Kaposi`s sarcoma-associated h
cgugccuucgaggccaggccc

SEQ ID NO: 2150425 - RNA, 14 nt, Human herpesvirus 8 [Kaposi`s sarcoma-associated h
gucuaccugccgga

SEQ ID NO: 2150426 - RNA, 17 nt, Human herpesvirus 8 [Kaposi`s sarcoma-associated h
ccagugccucagcaacu

SEQ ID NO: 2150427 - RNA, 18 nt, Human herpesvirus 8 [Kaposi`s sarcoma-associated h
cuagcguacaugugacug

SEQ ID NO: 2150428 - RNA, 15 nt, Human herpesvirus 8 [Kaposi`s sarcoma-associated h
ccacaaaacugccaa

SEQ ID NO: 2150429 - RNA, 11 nt, Human herpesvirus 8 [Kaposi`s sarcoma-associated h
cgauguccuga

SEQ ID NO: 2150430 - RNA, 15 nt, Human herpesvirus 8 [Kaposi`s sarcoma-associated h
cgucagcagcaagca

SEQ ID NO: 2150431 - RNA, 22 nt, Human herpesvirus 8 [Kaposi`s sarcoma-associated h
accucgggccuugggugcgaug

SEQ ID NO: 2150432 - RNA, 22 nt, Human herpesvirus 8 [Kaposi`s sarcoma-associated h
agccugcaguguggggauuaug

SEQ ID NO: 2150433 - RNA, 17 nt, Human herpesvirus 8 [Kaposi`s sarcoma-associated h
ugaaugugaucacggag

SEQ ID NO: 2150434 - RNA, 13 nt, Human herpesvirus 8 [Kaposi`s sarcoma-associated h
gacucucaagcag

SEQ ID NO: 2150435 - RNA, 21 nt, Human herpesvirus 8 [Kaposi`s sarcoma-associated h
gggugacaccuuucagacguc

SEQ ID NO: 2150436 - RNA, 13 nt, Human herpesvirus 8 [Kaposi`s sarcoma-associated h
aggagggcagcug

SEQ ID NO: 2150437 - RNA, 14 nt, Human herpesvirus 8 [Kaposi`s sarcoma-associated h
gauuuuccagggac

SEQ ID NO: 2150438 - RNA, 18 nt, Human herpesvirus 8 [Kaposi`s sarcoma-associated h
aucuuagucuuacuguca

SEQ ID NO: 2150439 - RNA, 19 nt, Human herpesvirus 8 [Kaposi`s sarcoma-associated h
gcaaggagcagccugcagg

SEQ ID NO: 2150440 - RNA, 20 nt, Human herpesvirus 8 [Kaposi`s sarcoma-associated h
cgccaacuguccccucggag

SEQ ID NO: 2150441 - RNA, 22 nt, Human herpesvirus 8 [Kaposi`s sarcoma-associated h
cacauacacuagacuggcucug

SEQ ID NO: 2150442 - RNA, 20 nt, Human herpesvirus 8 [Kaposi`s sarcoma-associated h
ugguggacggcuccguccug

SEQ ID NO: 2150443 - RNA, 15 nt, Human herpesvirus 8 [Kaposi`s sarcoma-associated h
caaaccccauggcag

SEQ ID NO: 2150444 - RNA, 21 nt, Human herpesvirus 8 [Kaposi`s sarcoma-associated h
cggguugggucgcugcaccug

SEQ ID NO: 2150445 - RNA, 22 nt, Human herpesvirus 8 [Kaposi`s sarcoma-associated h
uggcgcggaaacugggcacgga

SEQ ID NO: 2150446 - RNA, 18 nt, Human herpesvirus 8 [Kaposi`s sarcoma-associated h
uccugugauuucucugug

SEQ ID NO: 2150447 - RNA, 15 nt, Human herpesvirus 8 [Kaposi`s sarcoma-associated h
gcagcgccaguggau

SEQ ID NO: 2150448 - RNA, 13 nt, Human herpesvirus 8 [Kaposi`s sarcoma-associated h
gaauggugucaau

SEQ ID NO: 2150449 - RNA, 17 nt, Human herpesvirus 8 [Kaposi`s sarcoma-associated h
cugucagauuucucuau

SEQ ID NO: 2150450 - RNA, 17 nt, Human herpesvirus 8 [Kaposi`s sarcoma-associated h
cuugauaaucuccugga

SEQ ID NO: 2150451 - RNA, 18 nt, Human herpesvirus 8 [Kaposi`s sarcoma-associated h
uguacauggagggaaugg

SEQ ID NO: 2150452 - RNA, 21 nt, Human herpesvirus 8 [Kaposi`s sarcoma-associated h
aagucguguaagaacauugga

SEQ ID NO: 2150453 - RNA, 14 nt, Human herpesvirus 8 [Kaposi`s sarcoma-associated h
cggcgagcccgugu

SEQ ID NO: 2150454 - RNA, 19 nt, Human herpesvirus 8 [Kaposi`s sarcoma-associated h
acggaggauccuagguggg

SEQ ID NO: 2150455 - RNA, 21 nt, Human herpesvirus 8 [Kaposi`s sarcoma-associated h
uaaacagccuuggugcuaggc

SEQ ID NO: 2150456 - RNA, 21 nt, Human herpesvirus 8 [Kaposi`s sarcoma-associated h
ggcuugcacgccaacccucag

SEQ ID NO: 2150457 - RNA, 23 nt, Human herpesvirus 8 [Kaposi`s sarcoma-associated h
uggcaccugaggugcucuuccca

SEQ ID NO: 2150458 - RNA, 23 nt, Human herpesvirus 8 [Kaposi`s sarcoma-associated h
ucaaggucuuuaacgccugcacc

SEQ ID NO: 2150459 - RNA, 16 nt, Human herpesvirus 8 [Kaposi`s sarcoma-associated h
acagucgagccgccag

SEQ ID NO: 2150460 - RNA, 18 nt, Human herpesvirus 8 [Kaposi`s sarcoma-associated h
agcacgaagacaugguga

SEQ ID NO: 2150461 - RNA, 21 nt, Human herpesvirus 8 [Kaposi`s sarcoma-associated h
ugugggaaacguguccugcca

SEQ ID NO: 2150462 - RNA, 15 nt, Human herpesvirus 8 [Kaposi`s sarcoma-associated h
acacacacaaagaca

SEQ ID NO: 2150463 - RNA, 14 nt, Human herpesvirus 8 [Kaposi`s sarcoma-associated h
auuauugcaccauu

SEQ ID NO: 2150464 - RNA, 22 nt, Human herpesvirus 8 [Kaposi`s sarcoma-associated h
agcguagaugaaugucucaaac

SEQ ID NO: 2150465 - RNA, 20 nt, Human herpesvirus 8 [Kaposi`s sarcoma-associated h
caugcaggcaguccaagguc

SEQ ID NO: 2150466 - RNA, 12 nt, Human herpesvirus 8 [Kaposi`s sarcoma-associated h
auaaaacaggaa

SEQ ID NO: 2150467 - RNA, 17 nt, Human herpesvirus 8 [Kaposi`s sarcoma-associated h
cagaguccgccaucacc

SEQ ID NO: 2150468 - RNA, 21 nt, Human herpesvirus 8 [Kaposi`s sarcoma-associated h
cgccgaggacacgccaucgcc

SEQ ID NO: 2150469 - RNA, 17 nt, Human herpesvirus 8 [Kaposi`s sarcoma-associated h
gaaccagaaucaguggu

SEQ ID NO: 2150470 - RNA, 17 nt, Human herpesvirus 8 [Kaposi`s sarcoma-associated h
cagccggucgccagggu

SEQ ID NO: 2150471 - RNA, 14 nt, Human herpesvirus 8 [Kaposi`s sarcoma-associated h
uucauuuguguaua

SEQ ID NO: 2150472 - RNA, 20 nt, Human herpesvirus 8 [Kaposi`s sarcoma-associated h
guccaaagcuuacgaggaca

SEQ ID NO: 2150473 - RNA, 19 nt, Human herpesvirus 8 [Kaposi`s sarcoma-associated h
gcggaagauugguguccag

SEQ ID NO: 2150474 - RNA, 12 nt, Human herpesvirus 8 [Kaposi`s sarcoma-associated h
ggacagcuuuca

SEQ ID NO: 2150475 - RNA, 20 nt, Human herpesvirus 8 [Kaposi`s sarcoma-associated h
acucacugggggucucggga

SEQ ID NO: 2150476 - RNA, 11 nt, Human herpesvirus 8 [Kaposi`s sarcoma-associated h
gcguugugaag

SEQ ID NO: 2150477 - RNA, 16 nt, Human herpesvirus 8 [Kaposi`s sarcoma-associated h
aucaggagggucaaug

SEQ ID NO: 2150478 - RNA, 15 nt, Human herpesvirus 8 [Kaposi`s sarcoma-associated h
cauuuccacccaccu

SEQ ID NO: 2150479 - RNA, 19 nt, Human herpesvirus 8 [Kaposi`s sarcoma-associated h
gccauggcagcccagccuc

SEQ ID NO: 2150480 - RNA, 19 nt, Human herpesvirus 8 [Kaposi`s sarcoma-associated h
augucuguguuuuguaaac

SEQ ID NO: 2150481 - RNA, 19 nt, Human herpesvirus 8 [Kaposi`s sarcoma-associated h
augaccaacaggcuguccu

SEQ ID NO: 2150482 - RNA, 16 nt, Human herpesvirus 8 [Kaposi`s sarcoma-associated h
ggccaggcaccuguug

SEQ ID NO: 2150483 - RNA, 17 nt, Human herpesvirus 8 [Kaposi`s sarcoma-associated h
cguccaguucccccaca

SEQ ID NO: 2150484 - RNA, 18 nt, Human herpesvirus 8 [Kaposi`s sarcoma-associated h
gcaugugucugugcccug

SEQ ID NO: 2150485 - RNA, 22 nt, Human herpesvirus 8 [Kaposi`s sarcoma-associated h
cugcaaaauaaagucugagugg

SEQ ID NO: 2150486 - RNA, 22 nt, Human herpesvirus 8 [Kaposi`s sarcoma-associated h
augccuacaccguauuguuaug

SEQ ID NO: 2150487 - RNA, 13 nt, Human herpesvirus 8 [Kaposi`s sarcoma-associated h
uuuacuugcagca

SEQ ID NO: 2150488 - RNA, 14 nt, Human herpesvirus 8 [Kaposi`s sarcoma-associated h
gagcucugcugccu

SEQ ID NO: 2150489 - RNA, 21 nt, Human herpesvirus 8 [Kaposi`s sarcoma-associated h
gaaaacagucuguaaagaaag

SEQ ID NO: 2150490 - RNA, 13 nt, Human herpesvirus 8 [Kaposi`s sarcoma-associated h
caccuucuggcuu

SEQ ID NO: 2150491 - RNA, 16 nt, Human herpesvirus 8 [Kaposi`s sarcoma-associated h
cuagacuggcucugau

SEQ ID NO: 2150492 - RNA, 19 nt, Human herpesvirus 8 [Kaposi`s sarcoma-associated h
cucaagcaacaugcccuuu

SEQ ID NO: 2150493 - RNA, 18 nt, Human herpesvirus 8 [Kaposi`s sarcoma-associated h
gcugucccgugcccaggc

SEQ ID NO: 2150494 - RNA, 13 nt, Human herpesvirus 8 [Kaposi`s sarcoma-associated h
cucucacacccug

SEQ ID NO: 2150495 - RNA, 13 nt, Human herpesvirus 8 [Kaposi`s sarcoma-associated h
ucuguuacuggca

SEQ ID NO: 2150496 - RNA, 19 nt, Human herpesvirus 8 [Kaposi`s sarcoma-associated h
ccucccaacauguaaauug

SEQ ID NO: 2150497 - RNA, 23 nt, Human herpesvirus 8 [Kaposi`s sarcoma-associated h
aguugccugugggguuucuggga

SEQ ID NO: 2150498 - RNA, 20 nt, Human herpesvirus 8 [Kaposi`s sarcoma-associated h
caccaagguaggccagcugc

SEQ ID NO: 2150499 - RNA, 14 nt, Human herpesvirus 8 [Kaposi`s sarcoma-associated h
aacugcgucaugua

SEQ ID NO: 2150500 - RNA, 22 nt, Human herpesvirus 8 [Kaposi`s sarcoma-associated h
ucauccuaggugacugggagau

SEQ ID NO: 2150501 - RNA, 22 nt, Human herpesvirus 8 [Kaposi`s sarcoma-associated h
gcccacuauuaugccgaacagg

SEQ ID NO: 2150502 - RNA, 12 nt, Human herpesvirus 8 [Kaposi`s sarcoma-associated h
aauguuuugguc

SEQ ID NO: 2150503 - RNA, 21 nt, Human herpesvirus 8 [Kaposi`s sarcoma-associated h
ccgagaaacacugugaggcaa

SEQ ID NO: 2150504 - RNA, 12 nt, Human herpesvirus 8 [Kaposi`s sarcoma-associated h
gaggauggugcu

SEQ ID NO: 2150505 - RNA, 16 nt, Human herpesvirus 8 [Kaposi`s sarcoma-associated h
uccugucuaaaaucag

SEQ ID NO: 2150506 - RNA, 20 nt, Human herpesvirus 8 [Kaposi`s sarcoma-associated h
gccgcaaucaugccugugga

SEQ ID NO: 2150507 - RNA, 23 nt, Human herpesvirus 8 [Kaposi`s sarcoma-associated h
gagccgcgcuuuuuaacuucuga

SEQ ID NO: 2150508 - RNA, 20 nt, Human herpesvirus 8 [Kaposi`s sarcoma-associated h
caugucuguccggacauuuu

SEQ ID NO: 2150509 - RNA, 16 nt, Human herpesvirus 8 [Kaposi`s sarcoma-associated h
cguuuuuuuauuuggg

SEQ ID NO: 2150510 - RNA, 22 nt, Human herpesvirus 8 [Kaposi`s sarcoma-associated h
cgauguccugauuuuccaggga

SEQ ID NO: 2150511 - RNA, 20 nt, Human herpesvirus 8 [Kaposi`s sarcoma-associated h
gaauuguuauccggcagcaa

SEQ ID NO: 2150512 - RNA, 16 nt, Human herpesvirus 8 [Kaposi`s sarcoma-associated h
aucuaucucugguggu

SEQ ID NO: 2150513 - RNA, 19 nt, Human herpesvirus 8 [Kaposi`s sarcoma-associated h
caaccgucuccgccaggga

SEQ ID NO: 2150514 - RNA, 15 nt, Human herpesvirus 8 [Kaposi`s sarcoma-associated h
aagucucuuggacaa

SEQ ID NO: 2150515 - RNA, 14 nt, Human herpesvirus 8 [Kaposi`s sarcoma-associated h
cguaggcgaagaga

SEQ ID NO: 2150516 - RNA, 14 nt, Human herpesvirus 8 [Kaposi`s sarcoma-associated h
ucccacgugcacca

SEQ ID NO: 2150517 - RNA, 22 nt, Human herpesvirus 8 [Kaposi`s sarcoma-associated h
aacccgcccucgggacuucugg

SEQ ID NO: 2150518 - RNA, 11 nt, Human herpesvirus 8 [Kaposi`s sarcoma-associated h
accugcacucc

SEQ ID NO: 2150519 - RNA, 18 nt, Human herpesvirus 8 [Kaposi`s sarcoma-associated h
ccaccgcaacggcggugu

SEQ ID NO: 2150520 - RNA, 21 nt, Human herpesvirus 8 [Kaposi`s sarcoma-associated h
uuggacuagagcgacugcugg

SEQ ID NO: 2150521 - RNA, 17 nt, Human herpesvirus 8 [Kaposi`s sarcoma-associated h
cuauugcaacugaccau

SEQ ID NO: 2150522 - RNA, 21 nt, Human herpesvirus 8 [Kaposi`s sarcoma-associated h
acaggaagcggguuggacugg

SEQ ID NO: 2150523 - RNA, 20 nt, Human herpesvirus 8 [Kaposi`s sarcoma-associated h
ggacuuucuccgugagaugg

SEQ ID NO: 2150524 - RNA, 20 nt, Human herpesvirus 8 [Kaposi`s sarcoma-associated h
gaguccaaccuggcaagcag

SEQ ID NO: 2150525 - RNA, 15 nt, Human herpesvirus 8 [Kaposi`s sarcoma-associated h
gccuugggugcgaug

SEQ ID NO: 2150526 - RNA, 13 nt, Human herpesvirus 8 [Kaposi`s sarcoma-associated h
cgauuacaggaaa

SEQ ID NO: 2150527 - RNA, 13 nt, Human herpesvirus 8 [Kaposi`s sarcoma-associated h
cugguaccagaga

SEQ ID NO: 2150528 - RNA, 18 nt, Human herpesvirus 8 [Kaposi`s sarcoma-associated h
accgucgcacccggccgc

SEQ ID NO: 2150529 - RNA, 16 nt, Human herpesvirus 8 [Kaposi`s sarcoma-associated h
aaaaugggccaugaca

SEQ ID NO: 2150530 - RNA, 18 nt, Human herpesvirus 8 [Kaposi`s sarcoma-associated h
gacaccaccgucuggcug

SEQ ID NO: 2150531 - RNA, 20 nt, Human herpesvirus 8 [Kaposi`s sarcoma-associated h
uuguauaaccgugcuacuua

SEQ ID NO: 2150532 - RNA, 13 nt, Human herpesvirus 8 [Kaposi`s sarcoma-associated h
ggcggggcggcug

SEQ ID NO: 2150533 - RNA, 22 nt, Human herpesvirus 8 [Kaposi`s sarcoma-associated h
cucuaucagcugcagccaggaa

SEQ ID NO: 2150534 - RNA, 21 nt, Human herpesvirus 8 [Kaposi`s sarcoma-associated h
augucuuuccgugucuccuug

SEQ ID NO: 2150535 - RNA, 18 nt, Human herpesvirus 8 [Kaposi`s sarcoma-associated h
uccacccauccuccucag

SEQ ID NO: 2150536 - RNA, 16 nt, Human herpesvirus 8 [Kaposi`s sarcoma-associated h
ugaggccaauggauuc

SEQ ID NO: 2150537 - RNA, 17 nt, Human herpesvirus 8 [Kaposi`s sarcoma-associated h
agagcguagaugaaugu

SEQ ID NO: 2150538 - RNA, 17 nt, Human herpesvirus 8 [Kaposi`s sarcoma-associated h
ggcucaucggacaggac

SEQ ID NO: 2150539 - RNA, 19 nt, Human herpesvirus 8 [Kaposi`s sarcoma-associated h
acauaauccccggcagcac

SEQ ID NO: 2150540 - RNA, 19 nt, Human herpesvirus 8 [Kaposi`s sarcoma-associated h
cauggcuuacaacuauuuc

SEQ ID NO: 2150541 - RNA, 15 nt, Human herpesvirus 8 [Kaposi`s sarcoma-associated h
cagcuacgcacugag

SEQ ID NO: 2150542 - RNA, 21 nt, Human herpesvirus 8 [Kaposi`s sarcoma-associated h
ugcaugcaauacccuguuuca

SEQ ID NO: 2150543 - RNA, 17 nt, Human herpesvirus 8 [Kaposi`s sarcoma-associated h
uccacccuaauacauaa

SEQ ID NO: 2150544 - RNA, 17 nt, Human herpesvirus 8 [Kaposi`s sarcoma-associated h
gacagaguuguggaccu

SEQ ID NO: 2150545 - RNA, 20 nt, Human herpesvirus 8 [Kaposi`s sarcoma-associated h
ggacacuaaaagucuggccc

SEQ ID NO: 2150546 - RNA, 20 nt, Human herpesvirus 8 [Kaposi`s sarcoma-associated h
uaggaaacacggcccgccuc

SEQ ID NO: 2150547 - RNA, 11 nt, Human herpesvirus 8 [Kaposi`s sarcoma-associated h
uggcaugcugg

SEQ ID NO: 2150548 - RNA, 22 nt, Human herpesvirus 8 [Kaposi`s sarcoma-associated h
aggagaaaucccauuugauaua

SEQ ID NO: 2150549 - RNA, 16 nt, Human herpesvirus 8 [Kaposi`s sarcoma-associated h
caccucuacagagggc

SEQ ID NO: 2150550 - RNA, 16 nt, Human herpesvirus 8 [Kaposi`s sarcoma-associated h
ggaagucgguggggau

SEQ ID NO: 2150551 - RNA, 18 nt, Human herpesvirus 8 [Kaposi`s sarcoma-associated h
uggccggcacgcgguguc

SEQ ID NO: 2150552 - RNA, 14 nt, Human herpesvirus 8 [Kaposi`s sarcoma-associated h
aaagcugagccaca

SEQ ID NO: 2150553 - RNA, 17 nt, Human herpesvirus 8 [Kaposi`s sarcoma-associated h
guuaagcuuugcagcca

SEQ ID NO: 2150554 - RNA, 18 nt, Human herpesvirus 8 [Kaposi`s sarcoma-associated h
guguuuuuugccauggua

SEQ ID NO: 2150555 - RNA, 13 nt, Human herpesvirus 8 [Kaposi`s sarcoma-associated h
auaacagcaacau

SEQ ID NO: 2150556 - RNA, 14 nt, Human herpesvirus 8 [Kaposi`s sarcoma-associated h
agacacgcaaagua

SEQ ID NO: 2150557 - RNA, 20 nt, Human herpesvirus 8 [Kaposi`s sarcoma-associated h
gaacugucgagacaugucac

SEQ ID NO: 2150558 - RNA, 24 nt, Human herpesvirus 8 [Kaposi`s sarcoma-associated h
acuauagugcgcgguguggcagaa

SEQ ID NO: 2150559 - RNA, 19 nt, Human herpesvirus 8 [Kaposi`s sarcoma-associated h
cuaggaggaagagcacugu

SEQ ID NO: 2150560 - RNA, 22 nt, Human herpesvirus 8 [Kaposi`s sarcoma-associated h
ugcaacccucuacucuuccggg

SEQ ID NO: 2150561 - RNA, 17 nt, Human herpesvirus 8 [Kaposi`s sarcoma-associated h
auguguguaacuuuuuc

SEQ ID NO: 2150562 - RNA, 18 nt, Human herpesvirus 8 [Kaposi`s sarcoma-associated h
cugucaaccuccuccggg

SEQ ID NO: 2150563 - RNA, 21 nt, Human herpesvirus 8 [Kaposi`s sarcoma-associated h
uacuagugagcccggaggagg

SEQ ID NO: 2150564 - RNA, 19 nt, Human herpesvirus 8 [Kaposi`s sarcoma-associated h
cgcacccggccgcugcguc

SEQ ID NO: 2150565 - RNA, 16 nt, Human herpesvirus 8 [Kaposi`s sarcoma-associated h
gcacuccuguuagcac

SEQ ID NO: 2150566 - RNA, 17 nt, Human herpesvirus 8 [Kaposi`s sarcoma-associated h
aacuguuuacugcuguu

SEQ ID NO: 2150567 - RNA, 13 nt, Human herpesvirus 8 [Kaposi`s sarcoma-associated h
ugugugaagcagu

SEQ ID NO: 2150568 - RNA, 15 nt, Human herpesvirus 8 [Kaposi`s sarcoma-associated h
acagguaugaccggc

SEQ ID NO: 2150569 - RNA, 23 nt, Human herpesvirus 8 [Kaposi`s sarcoma-associated h
cuuuacagaucuagcggcgacua

SEQ ID NO: 2150570 - RNA, 18 nt, Human herpesvirus 8 [Kaposi`s sarcoma-associated h
cucuuggcguuuaccugc

SEQ ID NO: 2150571 - RNA, 21 nt, Human herpesvirus 8 [Kaposi`s sarcoma-associated h
cggcgucaccgacaccaucuc

SEQ ID NO: 2150572 - RNA, 14 nt, Human herpesvirus 8 [Kaposi`s sarcoma-associated h
uggcuguuacaaua

SEQ ID NO: 2150573 - RNA, 19 nt, Human herpesvirus 8 [Kaposi`s sarcoma-associated h
gagucgccgguagcugccu

SEQ ID NO: 2150574 - RNA, 22 nt, Human herpesvirus 8 [Kaposi`s sarcoma-associated h
cgggacaauugucggauuuuga

SEQ ID NO: 2150575 - RNA, 15 nt, Human herpesvirus 8 [Kaposi`s sarcoma-associated h
acacccuggaugggu

SEQ ID NO: 2150576 - RNA, 21 nt, Human herpesvirus 8 [Kaposi`s sarcoma-associated h
ggcgagauuggaggcacauaa

SEQ ID NO: 2150577 - RNA, 12 nt, Human herpesvirus 8 [Kaposi`s sarcoma-associated h
uggcgccaccuu

SEQ ID NO: 2150578 - RNA, 23 nt, Human herpesvirus 8 [Kaposi`s sarcoma-associated h
gauggguuaacaguggaugacca

SEQ ID NO: 2150579 - RNA, 16 nt, Human herpesvirus 8 [Kaposi`s sarcoma-associated h
ugaggccaagugcauu

SEQ ID NO: 2150580 - RNA, 16 nt, Human herpesvirus 8 [Kaposi`s sarcoma-associated h
ccgguagcugccuggu

SEQ ID NO: 2150581 - RNA, 14 nt, Human herpesvirus 8 [Kaposi`s sarcoma-associated h
uuguggcugccugg

SEQ ID NO: 2150582 - RNA, 15 nt, Human herpesvirus 8 [Kaposi`s sarcoma-associated h
auggcgucaucugau

SEQ ID NO: 2150583 - RNA, 20 nt, Human herpesvirus 8 [Kaposi`s sarcoma-associated h
auaaaauacgcgugugggaa

SEQ ID NO: 2150584 - RNA, 22 nt, Human herpesvirus 8 [Kaposi`s sarcoma-associated h
ccauuuuccaaggccugugccc

SEQ ID NO: 2150585 - RNA, 12 nt, Human herpesvirus 8 [Kaposi`s sarcoma-associated h
gacccagggugc

SEQ ID NO: 2150586 - RNA, 22 nt, Human herpesvirus 8 [Kaposi`s sarcoma-associated h
uggaggcacauaaggaacagau

SEQ ID NO: 2150587 - RNA, 15 nt, Human herpesvirus 8 [Kaposi`s sarcoma-associated h
gacauacaugagaga

SEQ ID NO: 2150588 - RNA, 20 nt, Human herpesvirus 8 [Kaposi`s sarcoma-associated h
cugguggaacaugcugccac

SEQ ID NO: 2150589 - RNA, 12 nt, Human herpesvirus 8 [Kaposi`s sarcoma-associated h
ggugggugugca

SEQ ID NO: 2150590 - RNA, 19 nt, Human herpesvirus 8 [Kaposi`s sarcoma-associated h
uggcgcggaaacugggcac

SEQ ID NO: 2150591 - RNA, 14 nt, Human herpesvirus 8 [Kaposi`s sarcoma-associated h
ugcagugugcagua

SEQ ID NO: 2150592 - RNA, 17 nt, Human herpesvirus 8 [Kaposi`s sarcoma-associated h
acuuugcccuaaaugug

SEQ ID NO: 2150593 - RNA, 19 nt, Human herpesvirus 8 [Kaposi`s sarcoma-associated h
cccguacaaggccauggcg

SEQ ID NO: 2150594 - RNA, 15 nt, Human herpesvirus 8 [Kaposi`s sarcoma-associated h
cuuugcagugucuau

SEQ ID NO: 2150595 - RNA, 12 nt, Human herpesvirus 8 [Kaposi`s sarcoma-associated h
uauuaaagggac

SEQ ID NO: 2150596 - RNA, 20 nt, Human herpesvirus 8 [Kaposi`s sarcoma-associated h
gagggcauacccguggcuca

SEQ ID NO: 2150597 - RNA, 15 nt, Human herpesvirus 8 [Kaposi`s sarcoma-associated h
ucccgagacccccag

SEQ ID NO: 2150598 - RNA, 13 nt, Human herpesvirus 8 [Kaposi`s sarcoma-associated h
aacaugugggcuu

SEQ ID NO: 2150599 - RNA, 15 nt, Human herpesvirus 8 [Kaposi`s sarcoma-associated h
auggaccucugucuu

SEQ ID NO: 2150600 - RNA, 21 nt, Human herpesvirus 8 [Kaposi`s sarcoma-associated h
ccacccuauuggucacaucuc

SEQ ID NO: 2150601 - RNA, 11 nt, Human herpesvirus 8 [Kaposi`s sarcoma-associated h
cugagccacaa

SEQ ID NO: 2150602 - RNA, 12 nt, Human herpesvirus 8 [Kaposi`s sarcoma-associated h
gaacaugcugga

SEQ ID NO: 2150603 - RNA, 21 nt, Human herpesvirus 8 [Kaposi`s sarcoma-associated h
gcgcuguacagugccugcagu

SEQ ID NO: 2150604 - RNA, 22 nt, Human herpesvirus 8 [Kaposi`s sarcoma-associated h
gauuuccuuucugagccucuca

SEQ ID NO: 2150605 - RNA, 13 nt, Human herpesvirus 8 [Kaposi`s sarcoma-associated h
caggcgccuauga

SEQ ID NO: 2150606 - RNA, 18 nt, Human herpesvirus 8 [Kaposi`s sarcoma-associated h
ccacauaauuggaugggg

SEQ ID NO: 2150607 - RNA, 21 nt, Human herpesvirus 8 [Kaposi`s sarcoma-associated h
uccgcggaaguaugucguggg

SEQ ID NO: 2150608 - RNA, 15 nt, Human herpesvirus 8 [Kaposi`s sarcoma-associated h
ugggggauccacuca

SEQ ID NO: 2150609 - RNA, 13 nt, Human herpesvirus 8 [Kaposi`s sarcoma-associated h
cuuauuaaaagca

SEQ ID NO: 2150610 - RNA, 15 nt, Human herpesvirus 8 [Kaposi`s sarcoma-associated h
cgaaugugccagcag

SEQ ID NO: 2150611 - RNA, 19 nt, Human herpesvirus 8 [Kaposi`s sarcoma-associated h
agcccgagaucaucuuuuc

SEQ ID NO: 2150612 - RNA, 20 nt, Human herpesvirus 8 [Kaposi`s sarcoma-associated h
gagggcuguucucgccugga

SEQ ID NO: 2150613 - RNA, 13 nt, Human herpesvirus 8 [Kaposi`s sarcoma-associated h
agcaaaacacaaa

SEQ ID NO: 2150614 - RNA, 10 nt, Human herpesvirus 8 [Kaposi`s sarcoma-associated h
ccgcaucucu

SEQ ID NO: 2150615 - RNA, 12 nt, Human herpesvirus 8 [Kaposi`s sarcoma-associated h
ccaugguaccau

SEQ ID NO: 2150616 - RNA, 18 nt, Human herpesvirus 8 [Kaposi`s sarcoma-associated h
gcaguaguaaacgacagc

SEQ ID NO: 2150617 - RNA, 20 nt, Human herpesvirus 8 [Kaposi`s sarcoma-associated h
gcggaccuguucuaccaggu

SEQ ID NO: 2150618 - RNA, 17 nt, Human herpesvirus 8 [Kaposi`s sarcoma-associated h
ccuaaguggauuuccuu

SEQ ID NO: 2150619 - RNA, 20 nt, Human herpesvirus 8 [Kaposi`s sarcoma-associated h
cgccgcggaaacucggucag

SEQ ID NO: 2150620 - RNA, 16 nt, Human herpesvirus 8 [Kaposi`s sarcoma-associated h
cuuacaacuauuuccu

SEQ ID NO: 2150621 - RNA, 19 nt, Human herpesvirus 8 [Kaposi`s sarcoma-associated h
cagucgagccgccaggaac

SEQ ID NO: 2150622 - RNA, 22 nt, Human herpesvirus 8 [Kaposi`s sarcoma-associated h
gguagcaaaugaaaagcuucug

SEQ ID NO: 2150623 - RNA, 20 nt, Human herpesvirus 8 [Kaposi`s sarcoma-associated h
cggauccggagggaaggaag

SEQ ID NO: 2150624 - RNA, 17 nt, Human herpesvirus 8 [Kaposi`s sarcoma-associated h
cggaaacugggcacgga

SEQ ID NO: 2150625 - RNA, 22 nt, Human herpesvirus 8 [Kaposi`s sarcoma-associated h
agccuaacccacgucacaucac

SEQ ID NO: 2150626 - RNA, 16 nt, Human herpesvirus 8 [Kaposi`s sarcoma-associated h
uuugggcaaaacacau

SEQ ID NO: 2150627 - RNA, 21 nt, Human herpesvirus 8 [Kaposi`s sarcoma-associated h
ggccauccgcgagccauucau

SEQ ID NO: 2150628 - RNA, 12 nt, Human herpesvirus 8 [Kaposi`s sarcoma-associated h
guccaggccucu

SEQ ID NO: 2150629 - RNA, 17 nt, Human herpesvirus 8 [Kaposi`s sarcoma-associated h
ugauaccguaguccccu

SEQ ID NO: 2150630 - RNA, 20 nt, Human herpesvirus 8 [Kaposi`s sarcoma-associated h
ccugaggugcucuucccaca

SEQ ID NO: 2150631 - RNA, 13 nt, Human herpesvirus 8 [Kaposi`s sarcoma-associated h
cagcaucccccaa

SEQ ID NO: 2150632 - RNA, 22 nt, Human herpesvirus 8 [Kaposi`s sarcoma-associated h
caagccagucguacgcggccac

SEQ ID NO: 2150633 - RNA, 19 nt, Human herpesvirus 8 [Kaposi`s sarcoma-associated h
acacuguggauuuuaugga

SEQ ID NO: 2150634 - RNA, 23 nt, Human herpesvirus 8 [Kaposi`s sarcoma-associated h
cauaauuggauggggcaugggca

SEQ ID NO: 2150635 - RNA, 22 nt, Human herpesvirus 8 [Kaposi`s sarcoma-associated h
uggauuuucacuauggggucag

SEQ ID NO: 2150636 - RNA, 16 nt, Human herpesvirus 8 [Kaposi`s sarcoma-associated h
aggauguguguaacuu

SEQ ID NO: 2150637 - RNA, 12 nt, Human herpesvirus 8 [Kaposi`s sarcoma-associated h
cccgccucugaa

SEQ ID NO: 2150638 - RNA, 13 nt, Human herpesvirus 8 [Kaposi`s sarcoma-associated h
acuuuauuacagg

SEQ ID NO: 2150639 - RNA, 21 nt, Human herpesvirus 8 [Kaposi`s sarcoma-associated h
acccugcucuggacaauggga

SEQ ID NO: 2150640 - RNA, 20 nt, Human herpesvirus 8 [Kaposi`s sarcoma-associated h
acuuaacgugucugaaugug

SEQ ID NO: 2150641 - RNA, 21 nt, Human herpesvirus 8 [Kaposi`s sarcoma-associated h
cuccacguagacggggagcug

SEQ ID NO: 2150642 - RNA, 14 nt, Human herpesvirus 8 [Kaposi`s sarcoma-associated h
uccuucgcacuucu

SEQ ID NO: 2150643 - RNA, 19 nt, Human herpesvirus 8 [Kaposi`s sarcoma-associated h
ccauggcagcccagccucu

SEQ ID NO: 2150644 - RNA, 18 nt, Human herpesvirus 8 [Kaposi`s sarcoma-associated h
uagcagucgccaguuuuu

SEQ ID NO: 2150645 - RNA, 16 nt, Human herpesvirus 8 [Kaposi`s sarcoma-associated h
auaauggauggcuaug

SEQ ID NO: 2150646 - RNA, 21 nt, Human herpesvirus 8 [Kaposi`s sarcoma-associated h
cccacacauuugucuuuauug

SEQ ID NO: 2150647 - RNA, 21 nt, Human herpesvirus 8 [Kaposi`s sarcoma-associated h
uggaugaccaacaggcugucc

SEQ ID NO: 2150648 - RNA, 17 nt, Human herpesvirus 8 [Kaposi`s sarcoma-associated h
aggugucugcgggacaa

SEQ ID NO: 2150649 - RNA, 20 nt, Human herpesvirus 8 [Kaposi`s sarcoma-associated h
gaucucccaauuacaggaga

SEQ ID NO: 2150650 - RNA, 14 nt, Human herpesvirus 8 [Kaposi`s sarcoma-associated h
aggcuggaccuccu

SEQ ID NO: 2150651 - RNA, 19 nt, Human herpesvirus 8 [Kaposi`s sarcoma-associated h
auguaccuggcguccagcu

SEQ ID NO: 2150652 - RNA, 14 nt, Human herpesvirus 8 [Kaposi`s sarcoma-associated h
gggccuggccucga

SEQ ID NO: 2150653 - RNA, 22 nt, Human herpesvirus 8 [Kaposi`s sarcoma-associated h
cuagcagaaaacugucuccaga

SEQ ID NO: 2150654 - RNA, 15 nt, Human herpesvirus 8 [Kaposi`s sarcoma-associated h
gccaggacucacugg

SEQ ID NO: 2150655 - RNA, 15 nt, Human herpesvirus 8 [Kaposi`s sarcoma-associated h
ucgggggaucuugua

SEQ ID NO: 2150656 - RNA, 19 nt, Human herpesvirus 8 [Kaposi`s sarcoma-associated h
cgacugggccaccaagauc

SEQ ID NO: 2150657 - RNA, 14 nt, Human herpesvirus 8 [Kaposi`s sarcoma-associated h
aucgccgccagcaa

SEQ ID NO: 2150658 - RNA, 18 nt, Human herpesvirus 8 [Kaposi`s sarcoma-associated h
gguugcauagggcuuuga

SEQ ID NO: 2150659 - RNA, 15 nt, Human herpesvirus 8 [Kaposi`s sarcoma-associated h
cagaaccgaugguuu

SEQ ID NO: 2150660 - RNA, 16 nt, Human herpesvirus 8 [Kaposi`s sarcoma-associated h
uauuaggguggauagg

SEQ ID NO: 2150661 - RNA, 21 nt, Human herpesvirus 8 [Kaposi`s sarcoma-associated h
acuaugggugaccacauaauu

SEQ ID NO: 2150662 - RNA, 22 nt, Human herpesvirus 8 [Kaposi`s sarcoma-associated h
ccaagaucuuccagucuccaga

SEQ ID NO: 2150663 - RNA, 18 nt, Human herpesvirus 8 [Kaposi`s sarcoma-associated h
uaacuguuuacugcuguu

SEQ ID NO: 2150664 - RNA, 20 nt, Human herpesvirus 8 [Kaposi`s sarcoma-associated h
ugugacaaucuggaugugua

SEQ ID NO: 2150665 - RNA, 21 nt, Human herpesvirus 8 [Kaposi`s sarcoma-associated h
cucuccggcgguggcggccau

SEQ ID NO: 2150666 - RNA, 13 nt, Human herpesvirus 8 [Kaposi`s sarcoma-associated h
ugcauauggacug

SEQ ID NO: 2150667 - RNA, 17 nt, Human herpesvirus 8 [Kaposi`s sarcoma-associated h
gccucgagggcggccag

SEQ ID NO: 2150668 - RNA, 14 nt, Human herpesvirus 8 [Kaposi`s sarcoma-associated h
uuaauaaauugcuu

SEQ ID NO: 2150669 - RNA, 21 nt, Human herpesvirus 8 [Kaposi`s sarcoma-associated h
gaaagcuucaucguggugccc

SEQ ID NO: 2150670 - RNA, 12 nt, Human herpesvirus 8 [Kaposi`s sarcoma-associated h
ggagggcagcug

SEQ ID NO: 2150671 - RNA, 18 nt, Human herpesvirus 8 [Kaposi`s sarcoma-associated h
cuugauaaucuccuggag

SEQ ID NO: 2150672 - RNA, 16 nt, Human herpesvirus 8 [Kaposi`s sarcoma-associated h
uacucguugcacacag

SEQ ID NO: 2150673 - RNA, 18 nt, Human herpesvirus 8 [Kaposi`s sarcoma-associated h
cugcaccucgccgcaaag

SEQ ID NO: 2150674 - RNA, 19 nt, Human herpesvirus 8 [Kaposi`s sarcoma-associated h
ugccaccguuuacaaaaua

SEQ ID NO: 2150675 - RNA, 17 nt, Human herpesvirus 8 [Kaposi`s sarcoma-associated h
agcauugucuuaaguac

SEQ ID NO: 2150676 - RNA, 14 nt, Human herpesvirus 8 [Kaposi`s sarcoma-associated h
uacgucccucuugg

SEQ ID NO: 2150677 - RNA, 17 nt, Human herpesvirus 8 [Kaposi`s sarcoma-associated h
agcccgauggcccuuca

SEQ ID NO: 2150678 - RNA, 20 nt, Human herpesvirus 8 [Kaposi`s sarcoma-associated h
ccugcccucaaauucucaca

SEQ ID NO: 2150679 - RNA, 17 nt, Human herpesvirus 8 [Kaposi`s sarcoma-associated h
cucgaaagcuucaucgu

SEQ ID NO: 2150680 - RNA, 18 nt, Human herpesvirus 8 [Kaposi`s sarcoma-associated h
cuuggcguuuaccugcac

SEQ ID NO: 2150681 - RNA, 22 nt, Human herpesvirus 8 [Kaposi`s sarcoma-associated h
accguuuggcccacguggugcu

SEQ ID NO: 2150682 - RNA, 22 nt, Human herpesvirus 8 [Kaposi`s sarcoma-associated h
cgucaagaccgagcguauucuc

SEQ ID NO: 2150683 - RNA, 21 nt, Human herpesvirus 8 [Kaposi`s sarcoma-associated h
ucuugauguuuaaauuuuugg

SEQ ID NO: 2150684 - RNA, 16 nt, Human herpesvirus 8 [Kaposi`s sarcoma-associated h
auuagaagaaaaggau

SEQ ID NO: 2150685 - RNA, 16 nt, Human herpesvirus 8 [Kaposi`s sarcoma-associated h
ugagugggacaucauu

SEQ ID NO: 2150686 - RNA, 15 nt, Human herpesvirus 8 [Kaposi`s sarcoma-associated h
acugaacccugggug

SEQ ID NO: 2150687 - RNA, 20 nt, Human herpesvirus 8 [Kaposi`s sarcoma-associated h
agcuguuacccugcucugga

SEQ ID NO: 2150688 - RNA, 12 nt, Human herpesvirus 8 [Kaposi`s sarcoma-associated h
auacuuggcaag

SEQ ID NO: 2150689 - RNA, 16 nt, Human herpesvirus 8 [Kaposi`s sarcoma-associated h
aagucucccugcgugg

SEQ ID NO: 2150690 - RNA, 13 nt, Human herpesvirus 8 [Kaposi`s sarcoma-associated h
caugccuguggau

SEQ ID NO: 2150691 - RNA, 15 nt, Human herpesvirus 8 [Kaposi`s sarcoma-associated h
gcggugcugcccagg

SEQ ID NO: 2150692 - RNA, 20 nt, Human herpesvirus 8 [Kaposi`s sarcoma-associated h
guacauuaaaaggacauugu

SEQ ID NO: 2150693 - RNA, 12 nt, Human herpesvirus 8 [Kaposi`s sarcoma-associated h
aggaguggcuga

SEQ ID NO: 2150694 - RNA, 17 nt, Human herpesvirus 8 [Kaposi`s sarcoma-associated h
cguaagaggacccaggg

SEQ ID NO: 2150695 - RNA, 16 nt, Human herpesvirus 8 [Kaposi`s sarcoma-associated h
cgcgaccucccacggg

SEQ ID NO: 2150696 - RNA, 15 nt, Human herpesvirus 8 [Kaposi`s sarcoma-associated h
gcaugccgucagggc

SEQ ID NO: 2150697 - RNA, 22 nt, Human herpesvirus 8 [Kaposi`s sarcoma-associated h
auuuauuuuuuacuacagguau

SEQ ID NO: 2150698 - RNA, 14 nt, Human herpesvirus 8 [Kaposi`s sarcoma-associated h
gcugcagccaggaa

SEQ ID NO: 2150699 - RNA, 11 nt, Human herpesvirus 8 [Kaposi`s sarcoma-associated h
cgccagacagc

SEQ ID NO: 2150700 - RNA, 21 nt, Human herpesvirus 8 [Kaposi`s sarcoma-associated h
caugugcuuuugcuuggcgcu

SEQ ID NO: 2150701 - RNA, 21 nt, Human herpesvirus 8 [Kaposi`s sarcoma-associated h
ccagguaggucaccgggucaa

SEQ ID NO: 2150702 - RNA, 16 nt, Human herpesvirus 8 [Kaposi`s sarcoma-associated h
cgaauaaaacaggaag

SEQ ID NO: 2150703 - RNA, 17 nt, Human herpesvirus 8 [Kaposi`s sarcoma-associated h
uuccuccguugucgacu

SEQ ID NO: 2150704 - RNA, 17 nt, Human herpesvirus 8 [Kaposi`s sarcoma-associated h
gccacgguggcccugcc

SEQ ID NO: 2150705 - RNA, 18 nt, Human herpesvirus 8 [Kaposi`s sarcoma-associated h
ugcccuccugggccaggc

SEQ ID NO: 2150706 - RNA, 14 nt, Human herpesvirus 8 [Kaposi`s sarcoma-associated h
aucagaacaguggu

SEQ ID NO: 2150707 - RNA, 12 nt, Human herpesvirus 8 [Kaposi`s sarcoma-associated h
cagugugcagua

SEQ ID NO: 2150708 - RNA, 20 nt, Human herpesvirus 8 [Kaposi`s sarcoma-associated h
aggaguggacuuucuccgug

SEQ ID NO: 2150709 - RNA, 19 nt, Human herpesvirus 8 [Kaposi`s sarcoma-associated h
cugggagauuggguuggga

SEQ ID NO: 2150710 - RNA, 15 nt, Human herpesvirus 8 [Kaposi`s sarcoma-associated h
cguggaugagagggu

SEQ ID NO: 2150711 - RNA, 21 nt, Human herpesvirus 8 [Kaposi`s sarcoma-associated h
acgauguacuugaacagggca

SEQ ID NO: 2150712 - RNA, 17 nt, Human herpesvirus 8 [Kaposi`s sarcoma-associated h
cccgugcguuugcagug

SEQ ID NO: 2150713 - RNA, 17 nt, Human herpesvirus 8 [Kaposi`s sarcoma-associated h
ccagauuuaagauuaag

SEQ ID NO: 2150714 - RNA, 15 nt, Human herpesvirus 8 [Kaposi`s sarcoma-associated h
ccagugggguugggg

SEQ ID NO: 2150715 - RNA, 20 nt, Human herpesvirus 8 [Kaposi`s sarcoma-associated h
cuaaacguguucauaccuca

SEQ ID NO: 2150716 - RNA, 22 nt, Human herpesvirus 8 [Kaposi`s sarcoma-associated h
auguuuauuuuuuuucaaacag

SEQ ID NO: 2150717 - RNA, 16 nt, Human herpesvirus 8 [Kaposi`s sarcoma-associated h
cgccagcgucgccucc

SEQ ID NO: 2150718 - RNA, 22 nt, Human herpesvirus 8 [Kaposi`s sarcoma-associated h
acgaaugcucaggucugucacu

SEQ ID NO: 2150719 - RNA, 23 nt, Human herpesvirus 8 [Kaposi`s sarcoma-associated h
uaacucacguagccuuucucuaa

SEQ ID NO: 2150720 - RNA, 19 nt, Human herpesvirus 8 [Kaposi`s sarcoma-associated h
ucccccacacccccaggau

SEQ ID NO: 2150721 - RNA, 22 nt, Human herpesvirus 8 [Kaposi`s sarcoma-associated h
uugcacucagaacauaaaacga

SEQ ID NO: 2150722 - RNA, 18 nt, Human herpesvirus 8 [Kaposi`s sarcoma-associated h
uaugcaugugucugugcc

SEQ ID NO: 2150723 - RNA, 16 nt, Human herpesvirus 8 [Kaposi`s sarcoma-associated h
cguggcgaucgucccc

SEQ ID NO: 2150724 - RNA, 22 nt, Human herpesvirus 8 [Kaposi`s sarcoma-associated h
ucacaaauuuuaacagccacga

SEQ ID NO: 2150725 - RNA, 14 nt, Human herpesvirus 8 [Kaposi`s sarcoma-associated h
gcuguccaccuuaa

SEQ ID NO: 2150726 - RNA, 22 nt, Human herpesvirus 8 [Kaposi`s sarcoma-associated h
uaaacauacguuuugaacaaug

SEQ ID NO: 2150727 - RNA, 20 nt, Human herpesvirus 8 [Kaposi`s sarcoma-associated h
ggcgacaggcgcguauggga

SEQ ID NO: 2150728 - RNA, 16 nt, Human herpesvirus 8 [Kaposi`s sarcoma-associated h
gguuccguucuccuuc

SEQ ID NO: 2150729 - RNA, 21 nt, Human herpesvirus 8 [Kaposi`s sarcoma-associated h
gguaaccagcuacgcacugag

SEQ ID NO: 2150730 - RNA, 12 nt, Human herpesvirus 8 [Kaposi`s sarcoma-associated h
cgccccuggugg

SEQ ID NO: 2150731 - RNA, 23 nt, Human herpesvirus 8 [Kaposi`s sarcoma-associated h
cugccgcucggagauugccaccg

SEQ ID NO: 2150732 - RNA, 19 nt, Human herpesvirus 8 [Kaposi`s sarcoma-associated h
caggcccucuucuguugcc

SEQ ID NO: 2150733 - RNA, 20 nt, Human herpesvirus 8 [Kaposi`s sarcoma-associated h
ccuauggcgcaagcacuuuu

SEQ ID NO: 2150734 - RNA, 19 nt, Human herpesvirus 8 [Kaposi`s sarcoma-associated h
cuggauggguuaacagugg

SEQ ID NO: 2150735 - RNA, 22 nt, Human herpesvirus 8 [Kaposi`s sarcoma-associated h
acuacagggaaguuucagagcc

SEQ ID NO: 2150736 - RNA, 17 nt, Human herpesvirus 8 [Kaposi`s sarcoma-associated h
cccucuacucuuccggg

SEQ ID NO: 2150737 - RNA, 18 nt, Human herpesvirus 8 [Kaposi`s sarcoma-associated h
uaacaugcaacccucuac

SEQ ID NO: 2150738 - RNA, 21 nt, Human herpesvirus 8 [Kaposi`s sarcoma-associated h
uguucuuaauugcccaucauu

SEQ ID NO: 2150739 - RNA, 18 nt, Human herpesvirus 8 [Kaposi`s sarcoma-associated h
gcagacgugcccagacac

SEQ ID NO: 2150740 - RNA, 23 nt, Human herpesvirus 8 [Kaposi`s sarcoma-associated h
ggucccacugcugcgauccagag

SEQ ID NO: 2150741 - RNA, 21 nt, Human herpesvirus 8 [Kaposi`s sarcoma-associated h
ccguguuuuucuggucgcugc

SEQ ID NO: 2150742 - RNA, 13 nt, Human herpesvirus 8 [Kaposi`s sarcoma-associated h
ggcagucaaaugg

SEQ ID NO: 2150743 - RNA, 17 nt, Human herpesvirus 8 [Kaposi`s sarcoma-associated h
ggcggcuguggcaccaa

SEQ ID NO: 2150744 - RNA, 17 nt, Human herpesvirus 8 [Kaposi`s sarcoma-associated h
cguggaguugccugugg

SEQ ID NO: 2150745 - RNA, 13 nt, Human herpesvirus 8 [Kaposi`s sarcoma-associated h
aagaggacccagg

SEQ ID NO: 2150746 - RNA, 13 nt, Human herpesvirus 8 [Kaposi`s sarcoma-associated h
gaccucccacggg

SEQ ID NO: 2150747 - RNA, 11 nt, Human herpesvirus 8 [Kaposi`s sarcoma-associated h
cgacaaaguga

SEQ ID NO: 2150748 - RNA, 16 nt, Human herpesvirus 8 [Kaposi`s sarcoma-associated h
acaaauguuuuaugca

SEQ ID NO: 2150749 - RNA, 12 nt, Human herpesvirus 8 [Kaposi`s sarcoma-associated h
gcgugcuucugu

SEQ ID NO: 2150750 - RNA, 17 nt, Human herpesvirus 8 [Kaposi`s sarcoma-associated h
gcaaccugcugcagcug

SEQ ID NO: 2150751 - RNA, 22 nt, Human herpesvirus 8 [Kaposi`s sarcoma-associated h
ucagcauauacagguguccaag

SEQ ID NO: 2150752 - RNA, 14 nt, Human herpesvirus 8 [Kaposi`s sarcoma-associated h
ccaggauccagacu

SEQ ID NO: 2150753 - RNA, 13 nt, Human herpesvirus 8 [Kaposi`s sarcoma-associated h
gcgacugcuggcu

SEQ ID NO: 2150754 - RNA, 18 nt, Human herpesvirus 8 [Kaposi`s sarcoma-associated h
guggauccgcaaugucag

SEQ ID NO: 2150755 - RNA, 16 nt, Human herpesvirus 8 [Kaposi`s sarcoma-associated h
uauagcagcugucccg

SEQ ID NO: 2150756 - RNA, 15 nt, Human herpesvirus 8 [Kaposi`s sarcoma-associated h
cagcaguagacgcag

SEQ ID NO: 2150757 - RNA, 23 nt, Human herpesvirus 8 [Kaposi`s sarcoma-associated h
ugugcuguccagcguggggacag

SEQ ID NO: 2150758 - RNA, 17 nt, Human herpesvirus 8 [Kaposi`s sarcoma-associated h
gauuugauacagggaca

SEQ ID NO: 2150759 - RNA, 13 nt, Human herpesvirus 8 [Kaposi`s sarcoma-associated h
ccccuucuucugg

SEQ ID NO: 2150760 - RNA, 19 nt, Human herpesvirus 8 [Kaposi`s sarcoma-associated h
gcuacugcuuguucaggag

SEQ ID NO: 2150761 - RNA, 23 nt, Human herpesvirus 8 [Kaposi`s sarcoma-associated h
gcacgugaaaucucgccuguccu

SEQ ID NO: 2150762 - RNA, 19 nt, Human herpesvirus 8 [Kaposi`s sarcoma-associated h
uccuggaugguuccccaga

SEQ ID NO: 2150763 - RNA, 13 nt, Human herpesvirus 8 [Kaposi`s sarcoma-associated h
uguguagguuguu

SEQ ID NO: 2150764 - RNA, 19 nt, Human herpesvirus 8 [Kaposi`s sarcoma-associated h
accaauaacgaagguaugu

SEQ ID NO: 2150765 - RNA, 22 nt, Human herpesvirus 8 [Kaposi`s sarcoma-associated h
aaagcagcgcccacugguguau

SEQ ID NO: 2150766 - RNA, 21 nt, Human herpesvirus 8 [Kaposi`s sarcoma-associated h
ccaccuacacccgguucagcc

SEQ ID NO: 2150767 - RNA, 19 nt, Human herpesvirus 8 [Kaposi`s sarcoma-associated h
cuaauauuaaccauagugu

SEQ ID NO: 2150768 - RNA, 22 nt, Human herpesvirus 8 [Kaposi`s sarcoma-associated h
ucgugcuuacccacccccuucu

SEQ ID NO: 2150769 - RNA, 18 nt, Human herpesvirus 8 [Kaposi`s sarcoma-associated h
uggcucacggacuuuauu

SEQ ID NO: 2150770 - RNA, 15 nt, Human herpesvirus 8 [Kaposi`s sarcoma-associated h
augggugugugccag

SEQ ID NO: 2150771 - RNA, 13 nt, Human herpesvirus 8 [Kaposi`s sarcoma-associated h
acuacagguauac

SEQ ID NO: 2150772 - RNA, 13 nt, Human herpesvirus 8 [Kaposi`s sarcoma-associated h
acacacacaaaga

SEQ ID NO: 2150773 - RNA, 20 nt, Human herpesvirus 8 [Kaposi`s sarcoma-associated h
ggaagggggcucccugggga

SEQ ID NO: 2150774 - RNA, 13 nt, Human herpesvirus 8 [Kaposi`s sarcoma-associated h
uugcgauugcuca

SEQ ID NO: 2150775 - RNA, 21 nt, Human herpesvirus 8 [Kaposi`s sarcoma-associated h
auuaugguuccguucuccuuc

SEQ ID NO: 2150776 - RNA, 18 nt, Human herpesvirus 8 [Kaposi`s sarcoma-associated h
caggucugucacuagaau

SEQ ID NO: 2150777 - RNA, 13 nt, Human herpesvirus 8 [Kaposi`s sarcoma-associated h
acugcccuccauc

SEQ ID NO: 2150778 - RNA, 15 nt, Human herpesvirus 8 [Kaposi`s sarcoma-associated h
gggaaggaagggcgg

SEQ ID NO: 2150779 - RNA, 15 nt, Human herpesvirus 8 [Kaposi`s sarcoma-associated h
uccacccaguuugag

SEQ ID NO: 2150780 - RNA, 12 nt, Human herpesvirus 8 [Kaposi`s sarcoma-associated h
cggacauuuugu

SEQ ID NO: 2150781 - RNA, 19 nt, Human herpesvirus 8 [Kaposi`s sarcoma-associated h
cuagaacuaaccacucaua

SEQ ID NO: 2150782 - RNA, 13 nt, Human herpesvirus 8 [Kaposi`s sarcoma-associated h
acaaaaacacaau

SEQ ID NO: 2150783 - RNA, 17 nt, Human herpesvirus 8 [Kaposi`s sarcoma-associated h
agggugcggugcugccc

SEQ ID NO: 2150784 - RNA, 16 nt, Human herpesvirus 8 [Kaposi`s sarcoma-associated h
uaggauucgugcagcc

SEQ ID NO: 2150785 - RNA, 14 nt, Human herpesvirus 8 [Kaposi`s sarcoma-associated h
ucagagucugaacc

SEQ ID NO: 2150786 - RNA, 19 nt, Human herpesvirus 8 [Kaposi`s sarcoma-associated h
cggggauggacgcggccuu

SEQ ID NO: 2150787 - RNA, 21 nt, Human herpesvirus 8 [Kaposi`s sarcoma-associated h
cagcccagccucuguacaugg

SEQ ID NO: 2150788 - RNA, 14 nt, Human herpesvirus 8 [Kaposi`s sarcoma-associated h
ucaccggggagcuu

SEQ ID NO: 2150789 - RNA, 22 nt, Human herpesvirus 8 [Kaposi`s sarcoma-associated h
cacucgaggggugacaccuuuc

SEQ ID NO: 2150790 - RNA, 21 nt, Human herpesvirus 8 [Kaposi`s sarcoma-associated h
ccauuuuuguggcugccugga

SEQ ID NO: 2150791 - RNA, 23 nt, Human herpesvirus 8 [Kaposi`s sarcoma-associated h
gaauuccacccauccuccucaga

SEQ ID NO: 2150792 - RNA, 20 nt, Human herpesvirus 8 [Kaposi`s sarcoma-associated h
gauuagccugcagugugggg

SEQ ID NO: 2150793 - RNA, 15 nt, Human herpesvirus 8 [Kaposi`s sarcoma-associated h
ggagcuguggggcag

SEQ ID NO: 2150794 - RNA, 16 nt, Human herpesvirus 8 [Kaposi`s sarcoma-associated h
gggggaugagccagaa

SEQ ID NO: 2150795 - RNA, 16 nt, Human herpesvirus 8 [Kaposi`s sarcoma-associated h
ccucgucuagcacaca

SEQ ID NO: 2150796 - RNA, 14 nt, Human herpesvirus 8 [Kaposi`s sarcoma-associated h
gugcuuugcuggag

SEQ ID NO: 2150797 - RNA, 20 nt, Human herpesvirus 8 [Kaposi`s sarcoma-associated h
uuguuaugggagggaguaua

SEQ ID NO: 2150798 - RNA, 15 nt, Human herpesvirus 8 [Kaposi`s sarcoma-associated h
gccaugaaagguggu

SEQ ID NO: 2150799 - RNA, 13 nt, Human herpesvirus 8 [Kaposi`s sarcoma-associated h
cagcaacugcguc

SEQ ID NO: 2150800 - RNA, 18 nt, Human herpesvirus 8 [Kaposi`s sarcoma-associated h
uucaaaacguauguuuau

SEQ ID NO: 2150801 - RNA, 17 nt, Human herpesvirus 8 [Kaposi`s sarcoma-associated h
acgcguuaagaagccac

SEQ ID NO: 2150802 - RNA, 18 nt, Human herpesvirus 8 [Kaposi`s sarcoma-associated h
aaguccggccaccgugga

SEQ ID NO: 2150803 - RNA, 16 nt, Human herpesvirus 8 [Kaposi`s sarcoma-associated h
cuacuaugucccaaag

SEQ ID NO: 2150804 - RNA, 20 nt, Human herpesvirus 8 [Kaposi`s sarcoma-associated h
gcauuuggacacaacaugca

SEQ ID NO: 2150805 - RNA, 17 nt, Human herpesvirus 8 [Kaposi`s sarcoma-associated h
cgcaccgcaagcagcaa

SEQ ID NO: 2150806 - RNA, 14 nt, Human herpesvirus 8 [Kaposi`s sarcoma-associated h
cuaaucaggguaga

SEQ ID NO: 2150807 - RNA, 21 nt, Human herpesvirus 8 [Kaposi`s sarcoma-associated h
uuaacgugucugaauguggaa

SEQ ID NO: 2150808 - RNA, 18 nt, Human herpesvirus 8 [Kaposi`s sarcoma-associated h
caucucgguacugcgcau

SEQ ID NO: 2150809 - RNA, 18 nt, Human herpesvirus 8 [Kaposi`s sarcoma-associated h
gccugcgucuacugcugc

SEQ ID NO: 2150810 - RNA, 20 nt, Human herpesvirus 8 [Kaposi`s sarcoma-associated h
gauuuacgguggugugccug

SEQ ID NO: 2150811 - RNA, 23 nt, Human herpesvirus 8 [Kaposi`s sarcoma-associated h
cgaugaagagagaaugcuuccaa

SEQ ID NO: 2150812 - RNA, 13 nt, Human herpesvirus 8 [Kaposi`s sarcoma-associated h
uaucaaagaaagg

SEQ ID NO: 2150813 - RNA, 20 nt, Human herpesvirus 8 [Kaposi`s sarcoma-associated h
gaccccgauaugcaccucca

SEQ ID NO: 2150814 - RNA, 23 nt, Human herpesvirus 8 [Kaposi`s sarcoma-associated h
gcaguagcccgccgcaaggagca

SEQ ID NO: 2150815 - RNA, 14 nt, Human herpesvirus 8 [Kaposi`s sarcoma-associated h
gcacgguauagaga

SEQ ID NO: 2150816 - RNA, 22 nt, Human herpesvirus 8 [Kaposi`s sarcoma-associated h
cagccaccguaacuucaccgug

SEQ ID NO: 2150817 - RNA, 12 nt, Human herpesvirus 8 [Kaposi`s sarcoma-associated h
cuggacacuaaa

SEQ ID NO: 2150818 - RNA, 14 nt, Human herpesvirus 8 [Kaposi`s sarcoma-associated h
gcuccucgagcgug

SEQ ID NO: 2150819 - RNA, 17 nt, Human herpesvirus 8 [Kaposi`s sarcoma-associated h
ccagccgcgcgaccucc

SEQ ID NO: 2150820 - RNA, 13 nt, Human herpesvirus 8 [Kaposi`s sarcoma-associated h
uggcgucaucuga

SEQ ID NO: 2150821 - RNA, 16 nt, Human herpesvirus 8 [Kaposi`s sarcoma-associated h
aguuucagagccuuca

SEQ ID NO: 2150822 - RNA, 21 nt, Human herpesvirus 8 [Kaposi`s sarcoma-associated h
cuccggacucgucuacccugc

SEQ ID NO: 2150823 - RNA, 13 nt, Human herpesvirus 8 [Kaposi`s sarcoma-associated h
gucgacagagcca

SEQ ID NO: 2150824 - RNA, 18 nt, Human herpesvirus 8 [Kaposi`s sarcoma-associated h
cacgcccgggggccagga

SEQ ID NO: 2150825 - RNA, 10 nt, Human herpesvirus 8 [Kaposi`s sarcoma-associated h
accaguaaag

SEQ ID NO: 2150826 - RNA, 14 nt, Human herpesvirus 8 [Kaposi`s sarcoma-associated h
caacauuaaacaca

SEQ ID NO: 2150827 - RNA, 14 nt, Human herpesvirus 8 [Kaposi`s sarcoma-associated h
accuagcgggcaca

SEQ ID NO: 2150828 - RNA, 22 nt, Human herpesvirus 8 [Kaposi`s sarcoma-associated h
ggccacgaauucgaggacacgc

SEQ ID NO: 2150829 - RNA, 15 nt, Human herpesvirus 8 [Kaposi`s sarcoma-associated h
agcgucaucugcgaa

SEQ ID NO: 2150830 - RNA, 16 nt, Human herpesvirus 8 [Kaposi`s sarcoma-associated h
cgccgcaaggagcagc

SEQ ID NO: 2150831 - RNA, 18 nt, Human herpesvirus 8 [Kaposi`s sarcoma-associated h
auucaugccuuucuguaa

SEQ ID NO: 2150832 - RNA, 18 nt, Human herpesvirus 8 [Kaposi`s sarcoma-associated h
agauccuccacagagccu

SEQ ID NO: 2150833 - RNA, 16 nt, Human herpesvirus 8 [Kaposi`s sarcoma-associated h
guuucgucgauuucac

SEQ ID NO: 2150834 - RNA, 16 nt, Human herpesvirus 8 [Kaposi`s sarcoma-associated h
cacauauggcgcagga

SEQ ID NO: 2150835 - RNA, 19 nt, Human herpesvirus 8 [Kaposi`s sarcoma-associated h
uccuacccuacuccccugu

SEQ ID NO: 2150836 - RNA, 17 nt, Human herpesvirus 8 [Kaposi`s sarcoma-associated h
caaaauucgcagggaga

SEQ ID NO: 2150837 - RNA, 13 nt, Human herpesvirus 8 [Kaposi`s sarcoma-associated h
agggaauggccuc

SEQ ID NO: 2150838 - RNA, 13 nt, Human herpesvirus 8 [Kaposi`s sarcoma-associated h
cccaugugggcuu

SEQ ID NO: 2150839 - RNA, 16 nt, Human herpesvirus 8 [Kaposi`s sarcoma-associated h
gucaaccagauuuaag

SEQ ID NO: 2150840 - RNA, 18 nt, Human herpesvirus 8 [Kaposi`s sarcoma-associated h
cuacucccccuccucaga

SEQ ID NO: 2150841 - RNA, 16 nt, Human herpesvirus 8 [Kaposi`s sarcoma-associated h
guagcuaugcccaccg

SEQ ID NO: 2150842 - RNA, 20 nt, Human herpesvirus 8 [Kaposi`s sarcoma-associated h
cugggguccgauugcuucau

SEQ ID NO: 2150843 - RNA, 23 nt, Human herpesvirus 8 [Kaposi`s sarcoma-associated h
caugcuggaucccagugccucag

SEQ ID NO: 2150844 - RNA, 20 nt, Human herpesvirus 8 [Kaposi`s sarcoma-associated h
acauuuucucgugugcccuu

SEQ ID NO: 2150845 - RNA, 15 nt, Human herpesvirus 8 [Kaposi`s sarcoma-associated h
cgugucuagacaaua

SEQ ID NO: 2150846 - RNA, 20 nt, Human herpesvirus 8 [Kaposi`s sarcoma-associated h
gaggugacccuuugugcucg

SEQ ID NO: 2150847 - RNA, 14 nt, Human herpesvirus 8 [Kaposi`s sarcoma-associated h
cgagacuuggcaga

SEQ ID NO: 2150848 - RNA, 19 nt, Human herpesvirus 8 [Kaposi`s sarcoma-associated h
auuucucuaucuaucucug

SEQ ID NO: 2150849 - RNA, 17 nt, Human herpesvirus 8 [Kaposi`s sarcoma-associated h
ggcugaugcucuggcca

SEQ ID NO: 2150850 - RNA, 13 nt, Human herpesvirus 8 [Kaposi`s sarcoma-associated h
uccaugcaggcag

SEQ ID NO: 2150851 - RNA, 22 nt, Human herpesvirus 8 [Kaposi`s sarcoma-associated h
aaaugaggggucugaucccaaa

SEQ ID NO: 2150852 - RNA, 18 nt, Human herpesvirus 8 [Kaposi`s sarcoma-associated h
aauauaacagcaacaugu

SEQ ID NO: 2150853 - RNA, 16 nt, Human herpesvirus 8 [Kaposi`s sarcoma-associated h
aaacuaaucaguguua

SEQ ID NO: 2150854 - RNA, 11 nt, Human herpesvirus 8 [Kaposi`s sarcoma-associated h
cacacuggccc

SEQ ID NO: 2150855 - RNA, 17 nt, Human herpesvirus 8 [Kaposi`s sarcoma-associated h
agcuuaaccacaugcau

SEQ ID NO: 2150856 - RNA, 15 nt, Human herpesvirus 8 [Kaposi`s sarcoma-associated h
gguaggccagcugcg

SEQ ID NO: 2150857 - RNA, 21 nt, Human herpesvirus 8 [Kaposi`s sarcoma-associated h
ucugggauagugucuggcugg

SEQ ID NO: 2150858 - RNA, 23 nt, Human herpesvirus 8 [Kaposi`s sarcoma-associated h
ugagguggcgcggaaacugggca

SEQ ID NO: 2150859 - RNA, 14 nt, Human herpesvirus 8 [Kaposi`s sarcoma-associated h
ucuuccuccauccc

SEQ ID NO: 2150860 - RNA, 18 nt, Human herpesvirus 8 [Kaposi`s sarcoma-associated h
ggaagcauccggacugag

SEQ ID NO: 2150861 - RNA, 13 nt, Human herpesvirus 8 [Kaposi`s sarcoma-associated h
auguguguaacuu

SEQ ID NO: 2150862 - RNA, 12 nt, Human herpesvirus 8 [Kaposi`s sarcoma-associated h
cguguccaggaa

SEQ ID NO: 2150863 - RNA, 19 nt, Human herpesvirus 8 [Kaposi`s sarcoma-associated h
ccgacugugccccuggaaa

SEQ ID NO: 2150864 - RNA, 21 nt, Human herpesvirus 8 [Kaposi`s sarcoma-associated h
ccucuaucagcugcagccagg

SEQ ID NO: 2150865 - RNA, 16 nt, Human herpesvirus 8 [Kaposi`s sarcoma-associated h
gcggucagaguggugg

SEQ ID NO: 2150866 - RNA, 20 nt, Human herpesvirus 8 [Kaposi`s sarcoma-associated h
caauaacgaagguauguuuu

SEQ ID NO: 2150867 - RNA, 22 nt, Human herpesvirus 8 [Kaposi`s sarcoma-associated h
ccuaauaaacuggccgcauuug

SEQ ID NO: 2150868 - RNA, 22 nt, Human herpesvirus 8 [Kaposi`s sarcoma-associated h
agcggcaccacaucugcugucu

SEQ ID NO: 2150869 - RNA, 12 nt, Human herpesvirus 8 [Kaposi`s sarcoma-associated h
acgcacugagcg

SEQ ID NO: 2150870 - RNA, 19 nt, Human herpesvirus 8 [Kaposi`s sarcoma-associated h
ucuuacuaagagaacagca

SEQ ID NO: 2150871 - RNA, 23 nt, Human herpesvirus 8 [Kaposi`s sarcoma-associated h
ugagccacaaacgccccucuugg

SEQ ID NO: 2150872 - RNA, 23 nt, Human herpesvirus 8 [Kaposi`s sarcoma-associated h
ucaccgugccuucgaggccaggc

SEQ ID NO: 2150873 - RNA, 17 nt, Human herpesvirus 8 [Kaposi`s sarcoma-associated h
uggcguggaggccagga

SEQ ID NO: 2150874 - RNA, 19 nt, Human herpesvirus 8 [Kaposi`s sarcoma-associated h
ggaugcacaguauagggau

SEQ ID NO: 2150875 - RNA, 15 nt, Human herpesvirus 8 [Kaposi`s sarcoma-associated h
augaauacccuggau

SEQ ID NO: 2150876 - RNA, 22 nt, Human herpesvirus 8 [Kaposi`s sarcoma-associated h
uuaccugcacuccaagccaguc

SEQ ID NO: 2150877 - RNA, 21 nt, Human herpesvirus 8 [Kaposi`s sarcoma-associated h
cggcacacuacucccccuccu

SEQ ID NO: 2150878 - RNA, 19 nt, Human herpesvirus 8 [Kaposi`s sarcoma-associated h
gccaauaaugcaaugcuuc

SEQ ID NO: 2150879 - RNA, 21 nt, Human herpesvirus 8 [Kaposi`s sarcoma-associated h
gcggccacgaauucgaggaca

SEQ ID NO: 2150880 - RNA, 17 nt, Human herpesvirus 8 [Kaposi`s sarcoma-associated h
cagggcaugaggcugga

SEQ ID NO: 2150881 - RNA, 19 nt, Human herpesvirus 8 [Kaposi`s sarcoma-associated h
augucacgucgcucuuuac

SEQ ID NO: 2150882 - RNA, 12 nt, Human herpesvirus 8 [Kaposi`s sarcoma-associated h
auaacagugcuc

SEQ ID NO: 2150883 - RNA, 19 nt, Human herpesvirus 8 [Kaposi`s sarcoma-associated h
gaucacgcccgugugcaug

SEQ ID NO: 2150884 - RNA, 17 nt, Human herpesvirus 8 [Kaposi`s sarcoma-associated h
gccauucgcaccaggac

SEQ ID NO: 2150885 - RNA, 14 nt, Human herpesvirus 8 [Kaposi`s sarcoma-associated h
ucccgugcccaggc

SEQ ID NO: 2150886 - RNA, 17 nt, Human herpesvirus 8 [Kaposi`s sarcoma-associated h
gacggacggcaccaagg

SEQ ID NO: 2150887 - RNA, 14 nt, Human herpesvirus 8 [Kaposi`s sarcoma-associated h
caucgccgccagca

SEQ ID NO: 2150888 - RNA, 21 nt, Human herpesvirus 8 [Kaposi`s sarcoma-associated h
ggaucucuaacgauacccaug

SEQ ID NO: 2150889 - RNA, 21 nt, Human herpesvirus 8 [Kaposi`s sarcoma-associated h
guaaugcugccccuagaccug

SEQ ID NO: 2150890 - RNA, 18 nt, Human herpesvirus 8 [Kaposi`s sarcoma-associated h
ccacccuaauacauaaca

SEQ ID NO: 2150891 - RNA, 23 nt, Human herpesvirus 8 [Kaposi`s sarcoma-associated h
cccucuuggcuguuacaauaaag

SEQ ID NO: 2150892 - RNA, 16 nt, Human herpesvirus 8 [Kaposi`s sarcoma-associated h
ugaaugcuuccgcgac

SEQ ID NO: 2150893 - RNA, 14 nt, Human herpesvirus 8 [Kaposi`s sarcoma-associated h
agaauacagugcua

SEQ ID NO: 2150894 - RNA, 21 nt, Human herpesvirus 8 [Kaposi`s sarcoma-associated h
cgaacagaagacccagaaaau

SEQ ID NO: 2150895 - RNA, 21 nt, Human herpesvirus 8 [Kaposi`s sarcoma-associated h
gaaguucauauucccaccucc

SEQ ID NO: 2150896 - RNA, 19 nt, Human herpesvirus 8 [Kaposi`s sarcoma-associated h
cgauauguccuucacuuug

SEQ ID NO: 2150897 - RNA, 16 nt, Human herpesvirus 8 [Kaposi`s sarcoma-associated h
cauggcaaaaaacacu

SEQ ID NO: 2150898 - RNA, 17 nt, Human herpesvirus 8 [Kaposi`s sarcoma-associated h
gauccaggagcgacugg

SEQ ID NO: 2150899 - RNA, 21 nt, Human herpesvirus 8 [Kaposi`s sarcoma-associated h
gaucucagaggcccauauuac

SEQ ID NO: 2150900 - RNA, 16 nt, Human herpesvirus 8 [Kaposi`s sarcoma-associated h
accacggcacaggacc

SEQ ID NO: 2150901 - RNA, 18 nt, Human herpesvirus 8 [Kaposi`s sarcoma-associated h
ccgagccacaaaguacau

SEQ ID NO: 2150902 - RNA, 14 nt, Human herpesvirus 8 [Kaposi`s sarcoma-associated h
acccugauuagcac

SEQ ID NO: 2150903 - RNA, 22 nt, Human herpesvirus 8 [Kaposi`s sarcoma-associated h
agcguucguguucaucgcugcc

SEQ ID NO: 2150904 - RNA, 20 nt, Human herpesvirus 8 [Kaposi`s sarcoma-associated h
gcucagcgaugccgacaagg

SEQ ID NO: 2150905 - RNA, 19 nt, Human herpesvirus 8 [Kaposi`s sarcoma-associated h
ugagagcuggagggcacag

SEQ ID NO: 2150906 - RNA, 18 nt, Human herpesvirus 8 [Kaposi`s sarcoma-associated h
aggcgcugaaaagggaac

SEQ ID NO: 2150907 - RNA, 14 nt, Human herpesvirus 8 [Kaposi`s sarcoma-associated h
cgagcuaggagugg

SEQ ID NO: 2150908 - RNA, 16 nt, Human herpesvirus 8 [Kaposi`s sarcoma-associated h
uugggaauggccgaac

SEQ ID NO: 2150909 - RNA, 22 nt, Human herpesvirus 8 [Kaposi`s sarcoma-associated h
agaguuccccgggaacggacaa

SEQ ID NO: 2150910 - RNA, 17 nt, Human herpesvirus 8 [Kaposi`s sarcoma-associated h
agagccagccuggacga

SEQ ID NO: 2150911 - RNA, 21 nt, Human herpesvirus 8 [Kaposi`s sarcoma-associated h
cugaugcucuggccacguugg

SEQ ID NO: 2150912 - RNA, 15 nt, Human herpesvirus 8 [Kaposi`s sarcoma-associated h
agccacaaaguacau

SEQ ID NO: 2150913 - RNA, 18 nt, Human herpesvirus 8 [Kaposi`s sarcoma-associated h
agucugaaccccgugugg

SEQ ID NO: 2150914 - RNA, 21 nt, Human herpesvirus 8 [Kaposi`s sarcoma-associated h
caacaauagggauacuguuua

SEQ ID NO: 2150915 - RNA, 21 nt, Human herpesvirus 8 [Kaposi`s sarcoma-associated h
gaugccaguagcaugcugaug

SEQ ID NO: 2150916 - RNA, 17 nt, Human herpesvirus 8 [Kaposi`s sarcoma-associated h
acgcaccgcaagcagca

SEQ ID NO: 2150917 - RNA, 20 nt, Human herpesvirus 8 [Kaposi`s sarcoma-associated h
gcucgagaacugucgagaca

SEQ ID NO: 2150918 - RNA, 17 nt, Human herpesvirus 8 [Kaposi`s sarcoma-associated h
caagcuacuggccuggc

SEQ ID NO: 2150919 - RNA, 21 nt, Human herpesvirus 8 [Kaposi`s sarcoma-associated h
uaacgagcgucgauggcccug

SEQ ID NO: 2150920 - RNA, 19 nt, Human herpesvirus 8 [Kaposi`s sarcoma-associated h
gccucugaagcaccacaua

SEQ ID NO: 2150921 - RNA, 15 nt, Human herpesvirus 8 [Kaposi`s sarcoma-associated h
acuguucuccacgua

SEQ ID NO: 2150922 - RNA, 19 nt, Human herpesvirus 8 [Kaposi`s sarcoma-associated h
gacgauguucaggaggaag

SEQ ID NO: 2150923 - RNA, 19 nt, Human herpesvirus 8 [Kaposi`s sarcoma-associated h
augcccaacuucaucacau

SEQ ID NO: 2150924 - RNA, 16 nt, Human herpesvirus 8 [Kaposi`s sarcoma-associated h
gggacgugcgggccaa

SEQ ID NO: 2150925 - RNA, 21 nt, Human herpesvirus 8 [Kaposi`s sarcoma-associated h
acaguugugaucucuggagac

SEQ ID NO: 2150926 - RNA, 14 nt, Human herpesvirus 8 [Kaposi`s sarcoma-associated h
cgcagaacaguacc

SEQ ID NO: 2150927 - RNA, 19 nt, Human herpesvirus 8 [Kaposi`s sarcoma-associated h
auucuacuuaaaauagcuc

SEQ ID NO: 2150928 - RNA, 21 nt, Human herpesvirus 8 [Kaposi`s sarcoma-associated h
ugugguuaagcuuugcagcca

SEQ ID NO: 2150929 - RNA, 13 nt, Human herpesvirus 8 [Kaposi`s sarcoma-associated h
ucuacgugcccuu

SEQ ID NO: 2150930 - RNA, 12 nt, Human herpesvirus 8 [Kaposi`s sarcoma-associated h
aauacagugcua

SEQ ID NO: 2150931 - RNA, 18 nt, Human herpesvirus 8 [Kaposi`s sarcoma-associated h
agacuggugcgcacaggc

SEQ ID NO: 2150932 - RNA, 24 nt, Human herpesvirus 8 [Kaposi`s sarcoma-associated h
ccccgggcguggugccggaugcag

SEQ ID NO: 2150933 - RNA, 14 nt, Human herpesvirus 8 [Kaposi`s sarcoma-associated h
gcggauaggcuggg

SEQ ID NO: 2150934 - RNA, 16 nt, Human herpesvirus 8 [Kaposi`s sarcoma-associated h
ucuaguggagagggcc

SEQ ID NO: 2150935 - RNA, 11 nt, Human herpesvirus 8 [Kaposi`s sarcoma-associated h
ccugugcauuc

SEQ ID NO: 2150936 - RNA, 14 nt, Human herpesvirus 8 [Kaposi`s sarcoma-associated h
uuaaaugaacauug

SEQ ID NO: 2150937 - RNA, 13 nt, Human herpesvirus 8 [Kaposi`s sarcoma-associated h
gccugguggagca

SEQ ID NO: 2150938 - RNA, 15 nt, Human herpesvirus 8 [Kaposi`s sarcoma-associated h
caaaugauauuuuga

SEQ ID NO: 2150939 - RNA, 13 nt, Human herpesvirus 8 [Kaposi`s sarcoma-associated h
uggcagcgcacca

SEQ ID NO: 2150940 - RNA, 19 nt, Human herpesvirus 8 [Kaposi`s sarcoma-associated h
cggaucaugcucucaccgc

SEQ ID NO: 2150941 - RNA, 13 nt, Human herpesvirus 8 [Kaposi`s sarcoma-associated h
uuaggggcacccu

SEQ ID NO: 2150942 - RNA, 17 nt, Human herpesvirus 8 [Kaposi`s sarcoma-associated h
augaggccaagugcauu

SEQ ID NO: 2150943 - RNA, 13 nt, Human herpesvirus 8 [Kaposi`s sarcoma-associated h
auuggagcucuua

SEQ ID NO: 2150944 - RNA, 21 nt, Human herpesvirus 8 [Kaposi`s sarcoma-associated h
cccuggauggguuaacagugg

SEQ ID NO: 2150945 - RNA, 23 nt, Human herpesvirus 8 [Kaposi`s sarcoma-associated h
gugauuggucuuauaacagugcu

SEQ ID NO: 2150946 - RNA, 15 nt, Human herpesvirus 8 [Kaposi`s sarcoma-associated h
acacggaaggcagug

SEQ ID NO: 2150947 - RNA, 18 nt, Human herpesvirus 8 [Kaposi`s sarcoma-associated h
ccaaaugcccagaaugaa

SEQ ID NO: 2150948 - RNA, 17 nt, Human herpesvirus 8 [Kaposi`s sarcoma-associated h
acggcguguuuugccug

SEQ ID NO: 2150949 - RNA, 19 nt, Human herpesvirus 8 [Kaposi`s sarcoma-associated h
gcgacggaaguuggccucc

SEQ ID NO: 2150950 - RNA, 17 nt, Human herpesvirus 8 [Kaposi`s sarcoma-associated h
aagaaauccgagcaccu

SEQ ID NO: 2150951 - RNA, 14 nt, Human herpesvirus 8 [Kaposi`s sarcoma-associated h
aagcuguacauaau

SEQ ID NO: 2150952 - RNA, 15 nt, Human herpesvirus 8 [Kaposi`s sarcoma-associated h
ccuccagcaaagcac

SEQ ID NO: 2150953 - RNA, 18 nt, Human herpesvirus 8 [Kaposi`s sarcoma-associated h
auguacuugaacagggca

SEQ ID NO: 2150954 - RNA, 12 nt, Human herpesvirus 8 [Kaposi`s sarcoma-associated h
aaagcugucacu

SEQ ID NO: 2150955 - RNA, 15 nt, Human herpesvirus 8 [Kaposi`s sarcoma-associated h
ggcguccgcucuccc

SEQ ID NO: 2150956 - RNA, 18 nt, Human herpesvirus 8 [Kaposi`s sarcoma-associated h
aucccccacaggacaagc

SEQ ID NO: 2150957 - RNA, 14 nt, Human herpesvirus 8 [Kaposi`s sarcoma-associated h
ucgccgcuccgcac

SEQ ID NO: 2150958 - RNA, 22 nt, Human herpesvirus 8 [Kaposi`s sarcoma-associated h
gcaucgucgcgccuggcgugau

SEQ ID NO: 2150959 - RNA, 17 nt, Human herpesvirus 8 [Kaposi`s sarcoma-associated h
acacuuccaccuccccu

SEQ ID NO: 2150960 - RNA, 20 nt, Human herpesvirus 8 [Kaposi`s sarcoma-associated h
acauugugucaaccagggca

SEQ ID NO: 2150961 - RNA, 16 nt, Human herpesvirus 8 [Kaposi`s sarcoma-associated h
uggaauauaaugugaa

SEQ ID NO: 2150962 - RNA, 12 nt, Human herpesvirus 8 [Kaposi`s sarcoma-associated h
gagagacugcag

SEQ ID NO: 2150963 - RNA, 16 nt, Human herpesvirus 8 [Kaposi`s sarcoma-associated h
aguuaaagcugucacu

SEQ ID NO: 2150964 - RNA, 14 nt, Human herpesvirus 8 [Kaposi`s sarcoma-associated h
gaggaagaugaaga

SEQ ID NO: 2150965 - RNA, 21 nt, Human herpesvirus 8 [Kaposi`s sarcoma-associated h
aagcauccggacugagauuuc

SEQ ID NO: 2150966 - RNA, 18 nt, Human herpesvirus 8 [Kaposi`s sarcoma-associated h
gccgucagggcccacggu

SEQ ID NO: 2150967 - RNA, 22 nt, Human herpesvirus 8 [Kaposi`s sarcoma-associated h
cauccacgcggauaggcugggg

SEQ ID NO: 2150968 - RNA, 21 nt, Human herpesvirus 8 [Kaposi`s sarcoma-associated h
gauucuuuuaaucuguuuauu

SEQ ID NO: 2150969 - RNA, 12 nt, Human herpesvirus 8 [Kaposi`s sarcoma-associated h
uuaugucaguuc

SEQ ID NO: 2150970 - RNA, 19 nt, Human herpesvirus 8 [Kaposi`s sarcoma-associated h
gggauggaggaagagggau

SEQ ID NO: 2150971 - RNA, 14 nt, Human herpesvirus 8 [Kaposi`s sarcoma-associated h
caauugacugugga

SEQ ID NO: 2150972 - RNA, 22 nt, Human herpesvirus 8 [Kaposi`s sarcoma-associated h
gcgaauucgcgugguccuggau

SEQ ID NO: 2150973 - RNA, 16 nt, Human herpesvirus 8 [Kaposi`s sarcoma-associated h
cagugaguccuggccc

SEQ ID NO: 2150974 - RNA, 19 nt, Human herpesvirus 8 [Kaposi`s sarcoma-associated h
uguccccugcaaugcaagg

SEQ ID NO: 2150975 - RNA, 17 nt, Human herpesvirus 8 [Kaposi`s sarcoma-associated h
cuaugacuaggaggaag

SEQ ID NO: 2150976 - RNA, 18 nt, Human herpesvirus 8 [Kaposi`s sarcoma-associated h
augacaccccucccucgc

SEQ ID NO: 2150977 - RNA, 18 nt, Human herpesvirus 8 [Kaposi`s sarcoma-associated h
cucccccuuuuuccuccc

SEQ ID NO: 2150978 - RNA, 13 nt, Human herpesvirus 8 [Kaposi`s sarcoma-associated h
cguuuccauauga

SEQ ID NO: 2150979 - RNA, 21 nt, Human herpesvirus 8 [Kaposi`s sarcoma-associated h
uggguguaagcuguacauaau

SEQ ID NO: 2150980 - RNA, 18 nt, Human herpesvirus 8 [Kaposi`s sarcoma-associated h
aggcggggaggagggggu

SEQ ID NO: 2150981 - RNA, 20 nt, Human herpesvirus 8 [Kaposi`s sarcoma-associated h
agaacugucgagacauguca

SEQ ID NO: 2150982 - RNA, 22 nt, Human herpesvirus 8 [Kaposi`s sarcoma-associated h
acgugcguggggguuggguggc

SEQ ID NO: 2150983 - RNA, 16 nt, Human herpesvirus 8 [Kaposi`s sarcoma-associated h
aaacaugcccuccugg

SEQ ID NO: 2150984 - RNA, 18 nt, Human herpesvirus 8 [Kaposi`s sarcoma-associated h
ucccgugcguuugcagug

SEQ ID NO: 2150985 - RNA, 15 nt, Human herpesvirus 8 [Kaposi`s sarcoma-associated h
augaguuccacacag

SEQ ID NO: 2150986 - RNA, 16 nt, Human herpesvirus 8 [Kaposi`s sarcoma-associated h
uugggauucacucagc

SEQ ID NO: 2150987 - RNA, 22 nt, Human herpesvirus 8 [Kaposi`s sarcoma-associated h
ggcagaaaauggcacacgguua

SEQ ID NO: 2150988 - RNA, 21 nt, Human herpesvirus 8 [Kaposi`s sarcoma-associated h
ugauuugauacagggacagau

SEQ ID NO: 2150989 - RNA, 12 nt, Human herpesvirus 8 [Kaposi`s sarcoma-associated h
gcaaaacacaaa

SEQ ID NO: 2150990 - RNA, 20 nt, Human herpesvirus 8 [Kaposi`s sarcoma-associated h
gccaccgucgccgcuccgca

SEQ ID NO: 2150991 - RNA, 15 nt, Human herpesvirus 8 [Kaposi`s sarcoma-associated h
cccagugccucagca

SEQ ID NO: 2150992 - RNA, 21 nt, Human herpesvirus 8 [Kaposi`s sarcoma-associated h
cuccagacucuucgcugauga

SEQ ID NO: 2150993 - RNA, 12 nt, Human herpesvirus 8 [Kaposi`s sarcoma-associated h
cuggcagggugg

SEQ ID NO: 2150994 - RNA, 18 nt, Human herpesvirus 8 [Kaposi`s sarcoma-associated h
agucgccgguagcugccu

SEQ ID NO: 2150995 - RNA, 12 nt, Human herpesvirus 8 [Kaposi`s sarcoma-associated h
gacgccacugcu

SEQ ID NO: 2150996 - RNA, 20 nt, Human herpesvirus 8 [Kaposi`s sarcoma-associated h
gacaccgucgccaaacaggc

SEQ ID NO: 2150997 - RNA, 14 nt, Human herpesvirus 8 [Kaposi`s sarcoma-associated h
caaagccguuccca

SEQ ID NO: 2150998 - RNA, 21 nt, Human herpesvirus 8 [Kaposi`s sarcoma-associated h
aaugagucaggcguggucucu

SEQ ID NO: 2150999 - RNA, 14 nt, Human herpesvirus 8 [Kaposi`s sarcoma-associated h
ccauccgcgagcca

SEQ ID NO: 2151000 - RNA, 20 nt, Human herpesvirus 8 [Kaposi`s sarcoma-associated h
ucguguucaucgcugcccca

SEQ ID NO: 2151001 - RNA, 18 nt, Human herpesvirus 8 [Kaposi`s sarcoma-associated h
ccguucccaugagccucc

SEQ ID NO: 2151002 - RNA, 21 nt, Human herpesvirus 8 [Kaposi`s sarcoma-associated h
aggggcagacccaaaaaggac

SEQ ID NO: 2151003 - RNA, 17 nt, Human herpesvirus 8 [Kaposi`s sarcoma-associated h
agcuuugcagccaggua

SEQ ID NO: 2151004 - RNA, 21 nt, Human herpesvirus 8 [Kaposi`s sarcoma-associated h
ccucagugugcuguccagcgu

SEQ ID NO: 2151005 - RNA, 19 nt, Human herpesvirus 8 [Kaposi`s sarcoma-associated h
ugcccugguugacacaaug

SEQ ID NO: 2151006 - RNA, 17 nt, Human herpesvirus 8 [Kaposi`s sarcoma-associated h
cugcgcauuuccugccc

SEQ ID NO: 2151007 - RNA, 22 nt, Human herpesvirus 8 [Kaposi`s sarcoma-associated h
cugcgcauuuccugcccugguu

SEQ ID NO: 2151008 - RNA, 12 nt, Human herpesvirus 8 [Kaposi`s sarcoma-associated h
ugcagccaggaa

SEQ ID NO: 2151009 - RNA, 20 nt, Human herpesvirus 8 [Kaposi`s sarcoma-associated h
guucgaccaccccugcaccu

SEQ ID NO: 2151010 - RNA, 16 nt, Human herpesvirus 8 [Kaposi`s sarcoma-associated h
caucauaaaguacuuu

SEQ ID NO: 2151011 - RNA, 21 nt, Human herpesvirus 8 [Kaposi`s sarcoma-associated h
cugcggcgcaaaaacagcugg

SEQ ID NO: 2151012 - RNA, 16 nt, Human herpesvirus 8 [Kaposi`s sarcoma-associated h
cauguaaauuggccac

SEQ ID NO: 2151013 - RNA, 18 nt, Human herpesvirus 8 [Kaposi`s sarcoma-associated h
gucaaccagauuuaagau

SEQ ID NO: 2151014 - RNA, 16 nt, Human herpesvirus 8 [Kaposi`s sarcoma-associated h
uuaagaagccacuugu

SEQ ID NO: 2151015 - RNA, 20 nt, Human herpesvirus 8 [Kaposi`s sarcoma-associated h
cauugccacccagcuacugg

SEQ ID NO: 2151016 - RNA, 19 nt, Human herpesvirus 8 [Kaposi`s sarcoma-associated h
uaugucuguguuuuguaaa

SEQ ID NO: 2151017 - RNA, 12 nt, Human herpesvirus 8 [Kaposi`s sarcoma-associated h
aagagggauggg

SEQ ID NO: 2151018 - RNA, 17 nt, Human herpesvirus 8 [Kaposi`s sarcoma-associated h
uagcuaugcccaccguc

SEQ ID NO: 2151019 - RNA, 17 nt, Human herpesvirus 8 [Kaposi`s sarcoma-associated h
cccacguggugcugccu

SEQ ID NO: 2151020 - RNA, 16 nt, Human herpesvirus 8 [Kaposi`s sarcoma-associated h
agguccccggaagagu

SEQ ID NO: 2151021 - RNA, 22 nt, Human herpesvirus 8 [Kaposi`s sarcoma-associated h
cuggagaaggguggguggggau

SEQ ID NO: 2151022 - RNA, 13 nt, Human herpesvirus 8 [Kaposi`s sarcoma-associated h
uccaggagcgacu

SEQ ID NO: 2151023 - RNA, 21 nt, Human herpesvirus 8 [Kaposi`s sarcoma-associated h
uuucagacguccaguuccccc

SEQ ID NO: 2151024 - RNA, 16 nt, Human herpesvirus 8 [Kaposi`s sarcoma-associated h
gcauaccacgugugug

SEQ ID NO: 2151025 - RNA, 22 nt, Human herpesvirus 8 [Kaposi`s sarcoma-associated h
aaggcuacgugaguuacaugga

SEQ ID NO: 2151026 - RNA, 11 nt, Human herpesvirus 8 [Kaposi`s sarcoma-associated h
ggcguguccag

SEQ ID NO: 2151027 - RNA, 21 nt, Human herpesvirus 8 [Kaposi`s sarcoma-associated h
caucaacaggagggcagcugu

SEQ ID NO: 2151028 - RNA, 16 nt, Human herpesvirus 8 [Kaposi`s sarcoma-associated h
ugugcggcgcagcagc

SEQ ID NO: 2151029 - RNA, 15 nt, Human herpesvirus 8 [Kaposi`s sarcoma-associated h
acgcguuaagaagcc

SEQ ID NO: 2151030 - RNA, 22 nt, Human herpesvirus 8 [Kaposi`s sarcoma-associated h
ccauccccggcguccucucaug

SEQ ID NO: 2151031 - RNA, 15 nt, Human herpesvirus 8 [Kaposi`s sarcoma-associated h
uuguggaccuccgcc

SEQ ID NO: 2151032 - RNA, 18 nt, Human herpesvirus 8 [Kaposi`s sarcoma-associated h
gcccucuucuguugccag

SEQ ID NO: 2151033 - RNA, 22 nt, Human herpesvirus 8 [Kaposi`s sarcoma-associated h
ccuggauggguuaacaguggau

SEQ ID NO: 2151034 - RNA, 16 nt, Human herpesvirus 8 [Kaposi`s sarcoma-associated h
uggggggaggaggaaa

SEQ ID NO: 2151035 - RNA, 19 nt, Human herpesvirus 8 [Kaposi`s sarcoma-associated h
cuguuugcuuaauaaauug

SEQ ID NO: 2151036 - RNA, 13 nt, Human herpesvirus 8 [Kaposi`s sarcoma-associated h
gagaacagcacau

SEQ ID NO: 2151037 - RNA, 16 nt, Human herpesvirus 8 [Kaposi`s sarcoma-associated h
gggccuucgcacccca

SEQ ID NO: 2151038 - RNA, 18 nt, Human herpesvirus 8 [Kaposi`s sarcoma-associated h
agcgggguuuccagggaa

SEQ ID NO: 2151039 - RNA, 13 nt, Human herpesvirus 8 [Kaposi`s sarcoma-associated h
gcaccuggacccc

SEQ ID NO: 2151040 - RNA, 15 nt, Human herpesvirus 8 [Kaposi`s sarcoma-associated h
aaagcugagccacaa

SEQ ID NO: 2151041 - RNA, 18 nt, Human herpesvirus 8 [Kaposi`s sarcoma-associated h
auaaucuaaauauucucu

SEQ ID NO: 2151042 - RNA, 19 nt, Human herpesvirus 8 [Kaposi`s sarcoma-associated h
ugcgaacuugcucuuuuca

SEQ ID NO: 2151043 - RNA, 19 nt, Human herpesvirus 8 [Kaposi`s sarcoma-associated h
caagcuugagcuuuucaaa

SEQ ID NO: 2151044 - RNA, 17 nt, Human herpesvirus 8 [Kaposi`s sarcoma-associated h
ccagcuccuauugcaac

SEQ ID NO: 2151045 - RNA, 23 nt, Human herpesvirus 8 [Kaposi`s sarcoma-associated h
ccggguuguuugugggacacggu

SEQ ID NO: 2151046 - RNA, 14 nt, Human herpesvirus 8 [Kaposi`s sarcoma-associated h
gcaccgcaagcagc

SEQ ID NO: 2151047 - RNA, 11 nt, Human herpesvirus 8 [Kaposi`s sarcoma-associated h
augcucucacc

SEQ ID NO: 2151048 - RNA, 20 nt, Human herpesvirus 8 [Kaposi`s sarcoma-associated h
aucgccguguugcgcgcugg

SEQ ID NO: 2151049 - RNA, 18 nt, Human herpesvirus 8 [Kaposi`s sarcoma-associated h
uaaagauuaacugucuac

SEQ ID NO: 2151050 - RNA, 12 nt, Human herpesvirus 8 [Kaposi`s sarcoma-associated h
aucuccuggaga

SEQ ID NO: 2151051 - RNA, 19 nt, Human herpesvirus 8 [Kaposi`s sarcoma-associated h
gagcaagacgccagacagc

SEQ ID NO: 2151052 - RNA, 21 nt, Human herpesvirus 8 [Kaposi`s sarcoma-associated h
aggggaguaggguaggaaggg

SEQ ID NO: 2151053 - RNA, 19 nt, Human herpesvirus 8 [Kaposi`s sarcoma-associated h
ccggacugagauuucccua

SEQ ID NO: 2151054 - RNA, 18 nt, Human herpesvirus 8 [Kaposi`s sarcoma-associated h
uggcccgucuguauacgu

SEQ ID NO: 2151055 - RNA, 13 nt, Human herpesvirus 8 [Kaposi`s sarcoma-associated h
gauucugacagac

SEQ ID NO: 2151056 - RNA, 11 nt, Human herpesvirus 8 [Kaposi`s sarcoma-associated h
acaauaaagcu

SEQ ID NO: 2151057 - RNA, 18 nt, Human herpesvirus 8 [Kaposi`s sarcoma-associated h
cgugaaugggggcagugc

SEQ ID NO: 2151058 - RNA, 23 nt, Human herpesvirus 8 [Kaposi`s sarcoma-associated h
agauuggguugggaggugacccu

SEQ ID NO: 2151059 - RNA, 22 nt, Human herpesvirus 8 [Kaposi`s sarcoma-associated h
aaacauuggcgggugugucuug

SEQ ID NO: 2151060 - RNA, 12 nt, Human herpesvirus 8 [Kaposi`s sarcoma-associated h
ucuauguuuccu

SEQ ID NO: 2151061 - RNA, 19 nt, Human herpesvirus 8 [Kaposi`s sarcoma-associated h
acgcccgggggccaggacu

SEQ ID NO: 2151062 - RNA, 22 nt, Human herpesvirus 8 [Kaposi`s sarcoma-associated h
uccaguagauuuaguacguggu

SEQ ID NO: 2151063 - RNA, 21 nt, Human herpesvirus 8 [Kaposi`s sarcoma-associated h
ggccaggcccugcauccggca

SEQ ID NO: 2151064 - RNA, 19 nt, Human herpesvirus 8 [Kaposi`s sarcoma-associated h
cggugaacguccccgcguc

SEQ ID NO: 2151065 - RNA, 13 nt, Human herpesvirus 8 [Kaposi`s sarcoma-associated h
cggaugacaggga

SEQ ID NO: 2151066 - RNA, 23 nt, Human herpesvirus 8 [Kaposi`s sarcoma-associated h
gagcguuucgugaaacgugccug

SEQ ID NO: 2151067 - RNA, 18 nt, Human herpesvirus 8 [Kaposi`s sarcoma-associated h
cuaucagcugcagccagg

SEQ ID NO: 2151068 - RNA, 18 nt, Human herpesvirus 8 [Kaposi`s sarcoma-associated h
agcucaucaaugggagaa

SEQ ID NO: 2151069 - RNA, 15 nt, Human herpesvirus 8 [Kaposi`s sarcoma-associated h
gucgcuggcgcaggc

SEQ ID NO: 2151070 - RNA, 15 nt, Human herpesvirus 8 [Kaposi`s sarcoma-associated h
uggccugugcccaaa

SEQ ID NO: 2151071 - RNA, 23 nt, Human herpesvirus 8 [Kaposi`s sarcoma-associated h
gccguguugcgcgcuggcucaga

SEQ ID NO: 2151072 - RNA, 20 nt, Human herpesvirus 8 [Kaposi`s sarcoma-associated h
aagcuucaucguggugcccu

SEQ ID NO: 2151073 - RNA, 23 nt, Human herpesvirus 8 [Kaposi`s sarcoma-associated h
gccacagucgagccgccaggaac

SEQ ID NO: 2151074 - RNA, 15 nt, Human herpesvirus 8 [Kaposi`s sarcoma-associated h
gguagauugacugga

SEQ ID NO: 2151075 - RNA, 15 nt, Human herpesvirus 8 [Kaposi`s sarcoma-associated h
ccaccacgccacaac

SEQ ID NO: 2151076 - RNA, 22 nt, Human herpesvirus 8 [Kaposi`s sarcoma-associated h
gaauaaaauacguacagaaaac

SEQ ID NO: 2151077 - RNA, 14 nt, Human herpesvirus 8 [Kaposi`s sarcoma-associated h
uccucaaacauggg

SEQ ID NO: 2151078 - RNA, 23 nt, Human herpesvirus 8 [Kaposi`s sarcoma-associated h
ccacggugucguguaugccaaua

SEQ ID NO: 2151079 - RNA, 20 nt, Human herpesvirus 8 [Kaposi`s sarcoma-associated h
cuagaauuggagcacuuuug

SEQ ID NO: 2151080 - RNA, 20 nt, Human herpesvirus 8 [Kaposi`s sarcoma-associated h
gagcauuuuucccuccugca

SEQ ID NO: 2151081 - RNA, 13 nt, Human herpesvirus 8 [Kaposi`s sarcoma-associated h
cuuguacaugugu

SEQ ID NO: 2151082 - RNA, 18 nt, Human herpesvirus 8 [Kaposi`s sarcoma-associated h
gggcacccuauccaucag

SEQ ID NO: 2151083 - RNA, 16 nt, Human herpesvirus 8 [Kaposi`s sarcoma-associated h
aacccucuacucuucc

SEQ ID NO: 2151084 - RNA, 23 nt, Human herpesvirus 8 [Kaposi`s sarcoma-associated h
uagugggguggcgcgccacaguc

SEQ ID NO: 2151085 - RNA, 23 nt, Human herpesvirus 8 [Kaposi`s sarcoma-associated h
gacgccauuugcgugcaaaaugu

SEQ ID NO: 2151086 - RNA, 13 nt, Human herpesvirus 8 [Kaposi`s sarcoma-associated h
ccacaaaguacau

SEQ ID NO: 2151087 - RNA, 16 nt, Human herpesvirus 8 [Kaposi`s sarcoma-associated h
acuuaacuguuuacug

SEQ ID NO: 2151088 - RNA, 12 nt, Human herpesvirus 8 [Kaposi`s sarcoma-associated h
auaauggauggc

SEQ ID NO: 2151089 - RNA, 22 nt, Human herpesvirus 8 [Kaposi`s sarcoma-associated h
gagcuguuacccugcucuggac

SEQ ID NO: 2151090 - RNA, 15 nt, Human herpesvirus 8 [Kaposi`s sarcoma-associated h
ggagucagagcagug

SEQ ID NO: 2151091 - RNA, 19 nt, Human herpesvirus 8 [Kaposi`s sarcoma-associated h
uaggccaauacugcccaag

SEQ ID NO: 2151092 - RNA, 11 nt, Human herpesvirus 8 [Kaposi`s sarcoma-associated h
uaggugucaag

SEQ ID NO: 2151093 - RNA, 13 nt, Human herpesvirus 8 [Kaposi`s sarcoma-associated h
ccacgguggcccu

SEQ ID NO: 2151094 - RNA, 20 nt, Human herpesvirus 8 [Kaposi`s sarcoma-associated h
uguaaaucgggccacuuugc

SEQ ID NO: 2151095 - RNA, 17 nt, Human herpesvirus 8 [Kaposi`s sarcoma-associated h
gaagccgagcucgggac

SEQ ID NO: 2151096 - RNA, 12 nt, Human herpesvirus 8 [Kaposi`s sarcoma-associated h
aagcacuggcug

SEQ ID NO: 2151097 - RNA, 14 nt, Human herpesvirus 8 [Kaposi`s sarcoma-associated h
cccgcccggggcgc

SEQ ID NO: 2151098 - RNA, 20 nt, Human herpesvirus 8 [Kaposi`s sarcoma-associated h
accucgaugggauauuuccu

SEQ ID NO: 2151099 - RNA, 16 nt, Human herpesvirus 8 [Kaposi`s sarcoma-associated h
ccucaacccacacugg

SEQ ID NO: 2151100 - RNA, 22 nt, Human herpesvirus 8 [Kaposi`s sarcoma-associated h
aagucagugccacaauuucauu

SEQ ID NO: 2151101 - RNA, 16 nt, Human herpesvirus 8 [Kaposi`s sarcoma-associated h
cuuucaucacuuccag

SEQ ID NO: 2151102 - RNA, 13 nt, Human herpesvirus 8 [Kaposi`s sarcoma-associated h
aagcgcugacgaa

SEQ ID NO: 2151103 - RNA, 20 nt, Human herpesvirus 8 [Kaposi`s sarcoma-associated h
aggggcagacccaaaaagga

SEQ ID NO: 2151104 - RNA, 17 nt, Human herpesvirus 8 [Kaposi`s sarcoma-associated h
ggaaguaugucguggga

SEQ ID NO: 2151105 - RNA, 15 nt, Human herpesvirus 8 [Kaposi`s sarcoma-associated h
gaaucaaugugguuc

SEQ ID NO: 2151106 - RNA, 20 nt, Human herpesvirus 8 [Kaposi`s sarcoma-associated h
ggacccagggugccuuggac

SEQ ID NO: 2151107 - RNA, 15 nt, Human herpesvirus 8 [Kaposi`s sarcoma-associated h
gcuuggcgaccucaa

SEQ ID NO: 2151108 - RNA, 16 nt, Human herpesvirus 8 [Kaposi`s sarcoma-associated h
caguuaaucuuuauug

SEQ ID NO: 2151109 - RNA, 13 nt, Human herpesvirus 8 [Kaposi`s sarcoma-associated h
ugagccagaauga

SEQ ID NO: 2151110 - RNA, 21 nt, Human herpesvirus 8 [Kaposi`s sarcoma-associated h
cucuaucagcugcagccagga

SEQ ID NO: 2151111 - RNA, 22 nt, Human herpesvirus 8 [Kaposi`s sarcoma-associated h
cgggagcuucggaaagcacugg

SEQ ID NO: 2151112 - RNA, 17 nt, Human herpesvirus 8 [Kaposi`s sarcoma-associated h
agccgcuugcugauaua

SEQ ID NO: 2151113 - RNA, 19 nt, Human herpesvirus 8 [Kaposi`s sarcoma-associated h
auuuauuuuuuacuacagg

SEQ ID NO: 2151114 - RNA, 14 nt, Human herpesvirus 8 [Kaposi`s sarcoma-associated h
uguaagcugcuggu

SEQ ID NO: 2151115 - RNA, 18 nt, Human herpesvirus 8 [Kaposi`s sarcoma-associated h
cccaauguuaauguucuc

SEQ ID NO: 2151116 - RNA, 21 nt, Human herpesvirus 8 [Kaposi`s sarcoma-associated h
ucgcaggccgaauaccucgug

SEQ ID NO: 2151117 - RNA, 12 nt, Human herpesvirus 8 [Kaposi`s sarcoma-associated h
agaacaugcugg

SEQ ID NO: 2151118 - RNA, 21 nt, Human herpesvirus 8 [Kaposi`s sarcoma-associated h
acguggcugaugcucuggcca

SEQ ID NO: 2151119 - RNA, 16 nt, Human herpesvirus 8 [Kaposi`s sarcoma-associated h
auuuuuuuccuaggcg

SEQ ID NO: 2151120 - RNA, 11 nt, Human herpesvirus 8 [Kaposi`s sarcoma-associated h
ugauagcugga

SEQ ID NO: 2151121 - RNA, 16 nt, Human herpesvirus 8 [Kaposi`s sarcoma-associated h
ugagcgcgcucugucg

SEQ ID NO: 2151122 - RNA, 12 nt, Human herpesvirus 8 [Kaposi`s sarcoma-associated h
ugagggugagug

SEQ ID NO: 2151123 - RNA, 20 nt, Human herpesvirus 8 [Kaposi`s sarcoma-associated h
agucacgcacuuggcccuga

SEQ ID NO: 2151124 - RNA, 17 nt, Human herpesvirus 8 [Kaposi`s sarcoma-associated h
ggacauggacaggggug

SEQ ID NO: 2151125 - RNA, 15 nt, Human herpesvirus 8 [Kaposi`s sarcoma-associated h
guaagaggacccagg

SEQ ID NO: 2151126 - RNA, 18 nt, Human herpesvirus 8 [Kaposi`s sarcoma-associated h
gcuguucucgccuggagc

SEQ ID NO: 2151127 - RNA, 18 nt, Human herpesvirus 8 [Kaposi`s sarcoma-associated h
cccguuguggcaccugag

SEQ ID NO: 2151128 - RNA, 22 nt, Human herpesvirus 8 [Kaposi`s sarcoma-associated h
uuaccaguauagugguuuacau

SEQ ID NO: 2151129 - RNA, 17 nt, Human herpesvirus 8 [Kaposi`s sarcoma-associated h
cgcagauaucgacgcgg

SEQ ID NO: 2151130 - RNA, 20 nt, Human herpesvirus 8 [Kaposi`s sarcoma-associated h
augcagcagcgugacacuac

SEQ ID NO: 2151131 - RNA, 18 nt, Human herpesvirus 8 [Kaposi`s sarcoma-associated h
gucagagaauacagugcu

SEQ ID NO: 2151132 - RNA, 17 nt, Human herpesvirus 8 [Kaposi`s sarcoma-associated h
auuuuuuacuacaggua

SEQ ID NO: 2151133 - RNA, 21 nt, Human herpesvirus 8 [Kaposi`s sarcoma-associated h
uagaucuggauacacuacuua

SEQ ID NO: 2151134 - RNA, 19 nt, Human herpesvirus 8 [Kaposi`s sarcoma-associated h
uaugucauuuuuacuuuua

SEQ ID NO: 2151135 - RNA, 12 nt, Human herpesvirus 8 [Kaposi`s sarcoma-associated h
uguaaaaaacuu

SEQ ID NO: 2151136 - RNA, 20 nt, Human herpesvirus 8 [Kaposi`s sarcoma-associated h
gccaccagguggcacccaac

SEQ ID NO: 2151137 - RNA, 13 nt, Human herpesvirus 8 [Kaposi`s sarcoma-associated h
aagucggcucugg

SEQ ID NO: 2151138 - RNA, 18 nt, Human herpesvirus 8 [Kaposi`s sarcoma-associated h
cuuaacgugucugaaugu

SEQ ID NO: 2151139 - RNA, 14 nt, Human herpesvirus 8 [Kaposi`s sarcoma-associated h
caguaaugcugccc

SEQ ID NO: 2151140 - RNA, 19 nt, Human herpesvirus 8 [Kaposi`s sarcoma-associated h
agcuuaccgcuacuguggg

SEQ ID NO: 2151141 - RNA, 19 nt, Human herpesvirus 8 [Kaposi`s sarcoma-associated h
cagucuaucgucuccagau

SEQ ID NO: 2151142 - RNA, 13 nt, Human herpesvirus 8 [Kaposi`s sarcoma-associated h
gcacuuuuggaaa

SEQ ID NO: 2151143 - RNA, 20 nt, Human herpesvirus 8 [Kaposi`s sarcoma-associated h
acuuugcccuaaaugugaca

SEQ ID NO: 2151144 - RNA, 20 nt, Human herpesvirus 8 [Kaposi`s sarcoma-associated h
ccagauccuccacagagccu

SEQ ID NO: 2151145 - RNA, 14 nt, Human herpesvirus 8 [Kaposi`s sarcoma-associated h
ccugcugcagcugg

SEQ ID NO: 2151146 - RNA, 24 nt, Human herpesvirus 8 [Kaposi`s sarcoma-associated h
auccacaggaagcgaaaagccugc

SEQ ID NO: 2151147 - RNA, 16 nt, Human herpesvirus 8 [Kaposi`s sarcoma-associated h
caaaauaccugucgcu

SEQ ID NO: 2151148 - RNA, 19 nt, Human herpesvirus 8 [Kaposi`s sarcoma-associated h
gaagaaaaggaugcacaac

SEQ ID NO: 2151149 - RNA, 14 nt, Human herpesvirus 8 [Kaposi`s sarcoma-associated h
gcaauaaagacaaa

SEQ ID NO: 2151150 - RNA, 15 nt, Human herpesvirus 8 [Kaposi`s sarcoma-associated h
caauagcgcugucau

SEQ ID NO: 2151151 - RNA, 20 nt, Human herpesvirus 8 [Kaposi`s sarcoma-associated h
guguacaaaaaaaacauagu

SEQ ID NO: 2151152 - RNA, 12 nt, Human herpesvirus 8 [Kaposi`s sarcoma-associated h
ggcuguggcacc

SEQ ID NO: 2151153 - RNA, 19 nt, Human herpesvirus 8 [Kaposi`s sarcoma-associated h
cugaaacgucgcccaaauc

SEQ ID NO: 2151154 - RNA, 17 nt, Human herpesvirus 8 [Kaposi`s sarcoma-associated h
uuaagcgccaagccauu

SEQ ID NO: 2151155 - RNA, 16 nt, Human herpesvirus 8 [Kaposi`s sarcoma-associated h
agugcucuuccuccua

SEQ ID NO: 2151156 - RNA, 16 nt, Human herpesvirus 8 [Kaposi`s sarcoma-associated h
cacucuacgcggcuag

SEQ ID NO: 2151157 - RNA, 19 nt, Human herpesvirus 8 [Kaposi`s sarcoma-associated h
caaucucucauagacuuuc

SEQ ID NO: 2151158 - RNA, 15 nt, Human herpesvirus 8 [Kaposi`s sarcoma-associated h
uaucagcugcagcca

SEQ ID NO: 2151159 - RNA, 20 nt, Human herpesvirus 8 [Kaposi`s sarcoma-associated h
gacaaacacuguggauuuua

SEQ ID NO: 2151160 - RNA, 18 nt, Human herpesvirus 8 [Kaposi`s sarcoma-associated h
gcauccuaucgcacagac

SEQ ID NO: 2151161 - RNA, 21 nt, Human herpesvirus 8 [Kaposi`s sarcoma-associated h
gcaccaagguaggccagcugc

SEQ ID NO: 2151162 - RNA, 14 nt, Human herpesvirus 8 [Kaposi`s sarcoma-associated h
gcugaucucagagg

SEQ ID NO: 2151163 - RNA, 15 nt, Human herpesvirus 8 [Kaposi`s sarcoma-associated h
ccagugaguccuggc

SEQ ID NO: 2151164 - RNA, 22 nt, Human herpesvirus 8 [Kaposi`s sarcoma-associated h
cuuggguuggcgagaagcccag

SEQ ID NO: 2151165 - RNA, 18 nt, Human herpesvirus 8 [Kaposi`s sarcoma-associated h
cgaccccagccccuuggu

SEQ ID NO: 2151166 - RNA, 17 nt, Human herpesvirus 8 [Kaposi`s sarcoma-associated h
caagcaaccggagcguu

SEQ ID NO: 2151167 - RNA, 18 nt, Human herpesvirus 8 [Kaposi`s sarcoma-associated h
ucugugucacuccccgag

SEQ ID NO: 2151168 - RNA, 16 nt, Human herpesvirus 8 [Kaposi`s sarcoma-associated h
caccuagcgggcacaa

SEQ ID NO: 2151169 - RNA, 21 nt, Human herpesvirus 8 [Kaposi`s sarcoma-associated h
uccucgcgucggccaccgcgg

SEQ ID NO: 2151170 - RNA, 19 nt, Human herpesvirus 8 [Kaposi`s sarcoma-associated h
caugauuugauacagggac

SEQ ID NO: 2151171 - RNA, 14 nt, Human herpesvirus 8 [Kaposi`s sarcoma-associated h
acuucgcuaacugu

SEQ ID NO: 2151172 - RNA, 11 nt, Human herpesvirus 8 [Kaposi`s sarcoma-associated h
caucagcggca

SEQ ID NO: 2151173 - RNA, 17 nt, Human herpesvirus 8 [Kaposi`s sarcoma-associated h
gugccugggugcugucc

SEQ ID NO: 2151174 - RNA, 19 nt, Human herpesvirus 8 [Kaposi`s sarcoma-associated h
agggugcgaaggaccugau

SEQ ID NO: 2151175 - RNA, 16 nt, Human herpesvirus 8 [Kaposi`s sarcoma-associated h
gcaaccugcugcagcu

SEQ ID NO: 2151176 - RNA, 15 nt, Human herpesvirus 8 [Kaposi`s sarcoma-associated h
caccugaggugcucu

SEQ ID NO: 2151177 - RNA, 18 nt, Human herpesvirus 8 [Kaposi`s sarcoma-associated h
uggcuucuauaagcaccu

SEQ ID NO: 2151178 - RNA, 23 nt, Human herpesvirus 8 [Kaposi`s sarcoma-associated h
aaaccccccucgucgacagagcc

SEQ ID NO: 2151179 - RNA, 19 nt, Human herpesvirus 8 [Kaposi`s sarcoma-associated h
ggagccggcccugacagag

SEQ ID NO: 2151180 - RNA, 15 nt, Human herpesvirus 8 [Kaposi`s sarcoma-associated h
uaaaagguuuccugu

SEQ ID NO: 2151181 - RNA, 21 nt, Human herpesvirus 8 [Kaposi`s sarcoma-associated h
gcaguguuugcugcuguaguu

SEQ ID NO: 2151182 - RNA, 15 nt, Human herpesvirus 8 [Kaposi`s sarcoma-associated h
ugcgugaacccucac

SEQ ID NO: 2151183 - RNA, 14 nt, Human herpesvirus 8 [Kaposi`s sarcoma-associated h
auuaagggggaagg

SEQ ID NO: 2151184 - RNA, 13 nt, Human herpesvirus 8 [Kaposi`s sarcoma-associated h
cccuagaagccac

SEQ ID NO: 2151185 - RNA, 14 nt, Human herpesvirus 8 [Kaposi`s sarcoma-associated h
aaagccgagccaca

SEQ ID NO: 2151186 - RNA, 18 nt, Human herpesvirus 8 [Kaposi`s sarcoma-associated h
ugcaaccugcugcagcug

SEQ ID NO: 2151187 - RNA, 17 nt, Human herpesvirus 8 [Kaposi`s sarcoma-associated h
cuugguaacucccucaa

SEQ ID NO: 2151188 - RNA, 22 nt, Human herpesvirus 8 [Kaposi`s sarcoma-associated h
cuauaaacagccuuggugcuag

SEQ ID NO: 2151189 - RNA, 15 nt, Human herpesvirus 8 [Kaposi`s sarcoma-associated h
cuguuuccagugacc

SEQ ID NO: 2151190 - RNA, 19 nt, Human herpesvirus 8 [Kaposi`s sarcoma-associated h
ggccagagguuugaggcgc

SEQ ID NO: 2151191 - RNA, 21 nt, Human herpesvirus 8 [Kaposi`s sarcoma-associated h
ucgccaacggacgcgccacuc

SEQ ID NO: 2151192 - RNA, 21 nt, Human herpesvirus 8 [Kaposi`s sarcoma-associated h
cauauacagguguccaagacu

SEQ ID NO: 2151193 - RNA, 17 nt, Human herpesvirus 8 [Kaposi`s sarcoma-associated h
caguauuaugccaggga

SEQ ID NO: 2151194 - RNA, 15 nt, Human herpesvirus 8 [Kaposi`s sarcoma-associated h
caaauaaaccagaca

SEQ ID NO: 2151195 - RNA, 22 nt, Human herpesvirus 8 [Kaposi`s sarcoma-associated h
aguugaucgauuucuguauaca

SEQ ID NO: 2151196 - RNA, 12 nt, Human herpesvirus 8 [Kaposi`s sarcoma-associated h
gaugagccagaa

SEQ ID NO: 2151197 - RNA, 23 nt, Human herpesvirus 8 [Kaposi`s sarcoma-associated h
ugacaaucuggauguguaucuua

SEQ ID NO: 2151198 - RNA, 21 nt, Human herpesvirus 8 [Kaposi`s sarcoma-associated h
gacagggcuaugauugcuucu

SEQ ID NO: 2151199 - RNA, 18 nt, Human herpesvirus 8 [Kaposi`s sarcoma-associated h
cuucuugaccaaaaguug

SEQ ID NO: 2151200 - RNA, 14 nt, Human herpesvirus 8 [Kaposi`s sarcoma-associated h
aggguaacucugaa

SEQ ID NO: 2151201 - RNA, 16 nt, Human herpesvirus 8 [Kaposi`s sarcoma-associated h
aauaacccgcuccgcc

SEQ ID NO: 2151202 - RNA, 12 nt, Human herpesvirus 8 [Kaposi`s sarcoma-associated h
cugcaauguacu

SEQ ID NO: 2151203 - RNA, 14 nt, Human herpesvirus 8 [Kaposi`s sarcoma-associated h
ccuagaugcgcugg

SEQ ID NO: 2151204 - RNA, 18 nt, Human herpesvirus 8 [Kaposi`s sarcoma-associated h
gggcuuguacaugugucu

SEQ ID NO: 2151205 - RNA, 13 nt, Human herpesvirus 8 [Kaposi`s sarcoma-associated h
ucaggucugucac

SEQ ID NO: 2151206 - RNA, 18 nt, Human herpesvirus 8 [Kaposi`s sarcoma-associated h
caacccacacuggcccaa

SEQ ID NO: 2151207 - RNA, 13 nt, Human herpesvirus 8 [Kaposi`s sarcoma-associated h
cuacccugccacu

SEQ ID NO: 2151208 - RNA, 13 nt, Human herpesvirus 8 [Kaposi`s sarcoma-associated h
ggccgcauuuggc

SEQ ID NO: 2151209 - RNA, 21 nt, Human herpesvirus 8 [Kaposi`s sarcoma-associated h
cagagcacccugaaacuccag

SEQ ID NO: 2151210 - RNA, 13 nt, Human herpesvirus 8 [Kaposi`s sarcoma-associated h
agacaaacacugu

SEQ ID NO: 2151211 - RNA, 15 nt, Human herpesvirus 8 [Kaposi`s sarcoma-associated h
gacccuagucacucc

SEQ ID NO: 2151212 - RNA, 12 nt, Human herpesvirus 8 [Kaposi`s sarcoma-associated h
cgagcucgggac

SEQ ID NO: 2151213 - RNA, 23 nt, Human herpesvirus 8 [Kaposi`s sarcoma-associated h
acgcucaccauccccugguggcu

SEQ ID NO: 2151214 - RNA, 14 nt, Human herpesvirus 8 [Kaposi`s sarcoma-associated h
gcuuauaccggccu

SEQ ID NO: 2151215 - RNA, 15 nt, Human herpesvirus 8 [Kaposi`s sarcoma-associated h
ucucgguacugcgca

SEQ ID NO: 2151216 - RNA, 15 nt, Human herpesvirus 8 [Kaposi`s sarcoma-associated h
ugaacguccccgcgu

SEQ ID NO: 2151217 - RNA, 17 nt, Human herpesvirus 8 [Kaposi`s sarcoma-associated h
gcccgggggccaggacu

SEQ ID NO: 2151218 - RNA, 12 nt, Human herpesvirus 8 [Kaposi`s sarcoma-associated h
agauagccacau

SEQ ID NO: 2151219 - RNA, 21 nt, Human herpesvirus 8 [Kaposi`s sarcoma-associated h
uggcgcaggagucagagcagu

SEQ ID NO: 2151220 - RNA, 21 nt, Human herpesvirus 8 [Kaposi`s sarcoma-associated h
gaaacugcucucgcugcucag

SEQ ID NO: 2151221 - RNA, 23 nt, Human herpesvirus 8 [Kaposi`s sarcoma-associated h
cagagccuucacggcacacuacu

SEQ ID NO: 2151222 - RNA, 19 nt, Human herpesvirus 8 [Kaposi`s sarcoma-associated h
ucaucguggugcccugccc

SEQ ID NO: 2151223 - RNA, 12 nt, Human herpesvirus 8 [Kaposi`s sarcoma-associated h
cuaccugcaaac

SEQ ID NO: 2151224 - RNA, 18 nt, Human herpesvirus 8 [Kaposi`s sarcoma-associated h
gccauucgcaccaggacg

SEQ ID NO: 2151225 - RNA, 17 nt, Human herpesvirus 8 [Kaposi`s sarcoma-associated h
gccguguugcgcgcugg

SEQ ID NO: 2151226 - RNA, 14 nt, Human herpesvirus 8 [Kaposi`s sarcoma-associated h
gauccggagggaag

SEQ ID NO: 2151227 - RNA, 16 nt, Human herpesvirus 8 [Kaposi`s sarcoma-associated h
acuuauuaaaagcauu

SEQ ID NO: 2151228 - RNA, 23 nt, Human herpesvirus 8 [Kaposi`s sarcoma-associated h
gcuuuccugugauuucucugugc

SEQ ID NO: 2151229 - RNA, 19 nt, Human herpesvirus 8 [Kaposi`s sarcoma-associated h
cugggcgaagaagcgcacc

SEQ ID NO: 2151230 - RNA, 16 nt, Human herpesvirus 8 [Kaposi`s sarcoma-associated h
agggcuaugauugcuu

SEQ ID NO: 2151231 - RNA, 15 nt, Human herpesvirus 8 [Kaposi`s sarcoma-associated h
agccaugugcugguu

SEQ ID NO: 2151232 - RNA, 12 nt, Human herpesvirus 8 [Kaposi`s sarcoma-associated h
gcugcagccagg

SEQ ID NO: 2151233 - RNA, 15 nt, Human herpesvirus 8 [Kaposi`s sarcoma-associated h
agcagacgugcccag

SEQ ID NO: 2151234 - RNA, 20 nt, Human herpesvirus 8 [Kaposi`s sarcoma-associated h
cgucugugaagucucccugc

SEQ ID NO: 2151235 - RNA, 16 nt, Human herpesvirus 8 [Kaposi`s sarcoma-associated h
ccagcaauaaacccac

SEQ ID NO: 2151236 - RNA, 15 nt, Human herpesvirus 8 [Kaposi`s sarcoma-associated h
agauuucgcaccagc

SEQ ID NO: 2151237 - RNA, 15 nt, Human herpesvirus 8 [Kaposi`s sarcoma-associated h
acugggccaccaaga

SEQ ID NO: 2151238 - RNA, 15 nt, Human herpesvirus 8 [Kaposi`s sarcoma-associated h
ccugcugcagcugga

SEQ ID NO: 2151239 - RNA, 20 nt, Human herpesvirus 8 [Kaposi`s sarcoma-associated h
cgagaaagucgcccacggaa

SEQ ID NO: 2151240 - RNA, 21 nt, Human herpesvirus 8 [Kaposi`s sarcoma-associated h
gacgcccuggguguuaugcac

SEQ ID NO: 2151241 - RNA, 14 nt, Human herpesvirus 8 [Kaposi`s sarcoma-associated h
cggugaaacagaua

SEQ ID NO: 2151242 - RNA, 13 nt, Human herpesvirus 8 [Kaposi`s sarcoma-associated h
agcaugcugauga

SEQ ID NO: 2151243 - RNA, 22 nt, Human herpesvirus 8 [Kaposi`s sarcoma-associated h
cgcagaacaguacccacgaaau

SEQ ID NO: 2151244 - RNA, 21 nt, Human herpesvirus 8 [Kaposi`s sarcoma-associated h
caauuuauuaagcaaacagua

SEQ ID NO: 2151245 - RNA, 22 nt, Human herpesvirus 8 [Kaposi`s sarcoma-associated h
ggacgcggccuucgucaugcac

SEQ ID NO: 2151246 - RNA, 20 nt, Human herpesvirus 8 [Kaposi`s sarcoma-associated h
agggcucguucaaugcaugu

SEQ ID NO: 2151247 - RNA, 22 nt, Human herpesvirus 8 [Kaposi`s sarcoma-associated h
ccaugguuauuggccaggacaa

SEQ ID NO: 2151248 - RNA, 15 nt, Human herpesvirus 8 [Kaposi`s sarcoma-associated h
gguuccagugcgcuc

SEQ ID NO: 2151249 - RNA, 23 nt, Human herpesvirus 8 [Kaposi`s sarcoma-associated h
acucuguguccuccucugaguuu

SEQ ID NO: 2151250 - RNA, 14 nt, Human herpesvirus 8 [Kaposi`s sarcoma-associated h
ucccacccacacau

SEQ ID NO: 2151251 - RNA, 18 nt, Human herpesvirus 8 [Kaposi`s sarcoma-associated h
gcccucgggacuucugga

SEQ ID NO: 2151252 - RNA, 18 nt, Human herpesvirus 8 [Kaposi`s sarcoma-associated h
cggcaggcgugagaggca

SEQ ID NO: 2151253 - RNA, 13 nt, Human herpesvirus 8 [Kaposi`s sarcoma-associated h
gacaugugcuuuu

SEQ ID NO: 2151254 - RNA, 13 nt, Human herpesvirus 8 [Kaposi`s sarcoma-associated h
gagauagccacau

SEQ ID NO: 2151255 - RNA, 12 nt, Human herpesvirus 8 [Kaposi`s sarcoma-associated h
ccugggccaggc

SEQ ID NO: 2151256 - RNA, 18 nt, Human herpesvirus 8 [Kaposi`s sarcoma-associated h
ccacuuugcccuaaaugu

SEQ ID NO: 2151257 - RNA, 16 nt, Human herpesvirus 8 [Kaposi`s sarcoma-associated h
cgugcuacuuacagca

SEQ ID NO: 2151258 - RNA, 11 nt, Human herpesvirus 8 [Kaposi`s sarcoma-associated h
caucagagaug

SEQ ID NO: 2151259 - RNA, 14 nt, Human herpesvirus 8 [Kaposi`s sarcoma-associated h
caugccgucagggc

SEQ ID NO: 2151260 - RNA, 22 nt, Human herpesvirus 8 [Kaposi`s sarcoma-associated h
aaguggugaucuuaggccagga

SEQ ID NO: 2151261 - RNA, 13 nt, Human herpesvirus 8 [Kaposi`s sarcoma-associated h
gaagaugaagaug

SEQ ID NO: 2151262 - RNA, 17 nt, Human herpesvirus 8 [Kaposi`s sarcoma-associated h
caaaguauauuaguguu

SEQ ID NO: 2151263 - RNA, 14 nt, Human herpesvirus 8 [Kaposi`s sarcoma-associated h
cguacaaggccaug

SEQ ID NO: 2151264 - RNA, 22 nt, Human herpesvirus 8 [Kaposi`s sarcoma-associated h
gguugacuuuuuaaaggggacg

SEQ ID NO: 2151265 - RNA, 23 nt, Human herpesvirus 8 [Kaposi`s sarcoma-associated h
cugggcguccacauggcagcuga

SEQ ID NO: 2151266 - RNA, 17 nt, Human herpesvirus 8 [Kaposi`s sarcoma-associated h
uauaauggauggcuaug

SEQ ID NO: 2151267 - RNA, 13 nt, Human herpesvirus 8 [Kaposi`s sarcoma-associated h
cauuccucuccgc

SEQ ID NO: 2151268 - RNA, 22 nt, Human herpesvirus 8 [Kaposi`s sarcoma-associated h
aaucuguuuauuguuuuugaac

SEQ ID NO: 2151269 - RNA, 13 nt, Human herpesvirus 8 [Kaposi`s sarcoma-associated h
ggcaccauggcca

SEQ ID NO: 2151270 - RNA, 22 nt, Human herpesvirus 8 [Kaposi`s sarcoma-associated h
acccacgucacaucaccggacc

SEQ ID NO: 2151271 - RNA, 18 nt, Human herpesvirus 8 [Kaposi`s sarcoma-associated h
agcaugacuuccccgucu

SEQ ID NO: 2151272 - RNA, 14 nt, Human herpesvirus 8 [Kaposi`s sarcoma-associated h
ucuacccugccacu

SEQ ID NO: 2151273 - RNA, 14 nt, Human herpesvirus 8 [Kaposi`s sarcoma-associated h
cauuaaaaggacau

SEQ ID NO: 2151274 - RNA, 20 nt, Human herpesvirus 8 [Kaposi`s sarcoma-associated h
uacccuuccuacccuacucc

SEQ ID NO: 2151275 - RNA, 17 nt, Human herpesvirus 8 [Kaposi`s sarcoma-associated h
gcccggagacuaucagg

SEQ ID NO: 2151276 - RNA, 21 nt, Human herpesvirus 8 [Kaposi`s sarcoma-associated h
aaaacugucuccagaagagca

SEQ ID NO: 2151277 - RNA, 17 nt, Human herpesvirus 8 [Kaposi`s sarcoma-associated h
gcguaugggaacacaau

SEQ ID NO: 2151278 - RNA, 13 nt, Human herpesvirus 8 [Kaposi`s sarcoma-associated h
cuguaaaacacug

SEQ ID NO: 2151279 - RNA, 13 nt, Human herpesvirus 8 [Kaposi`s sarcoma-associated h
cucggagacaaga

SEQ ID NO: 2151280 - RNA, 18 nt, Human herpesvirus 8 [Kaposi`s sarcoma-associated h
ccauuugauauauggaaa

SEQ ID NO: 2151281 - RNA, 14 nt, Human herpesvirus 8 [Kaposi`s sarcoma-associated h
cagggccuggccuc

SEQ ID NO: 2151282 - RNA, 16 nt, Human herpesvirus 8 [Kaposi`s sarcoma-associated h
caccgaaccaggcaac

SEQ ID NO: 2151283 - RNA, 13 nt, Human herpesvirus 8 [Kaposi`s sarcoma-associated h
cgcuccgccacgc

SEQ ID NO: 2151284 - RNA, 20 nt, Human herpesvirus 8 [Kaposi`s sarcoma-associated h
ccauggcagcccagccucug

SEQ ID NO: 2151285 - RNA, 17 nt, Human herpesvirus 8 [Kaposi`s sarcoma-associated h
uccgcaaugucagguuc

SEQ ID NO: 2151286 - RNA, 18 nt, Human herpesvirus 8 [Kaposi`s sarcoma-associated h
agcacuccuguuagcaca

SEQ ID NO: 2151287 - RNA, 16 nt, Human herpesvirus 8 [Kaposi`s sarcoma-associated h
uucguaagaggaccca

SEQ ID NO: 2151288 - RNA, 14 nt, Human herpesvirus 8 [Kaposi`s sarcoma-associated h
cacaaaacugccaa

SEQ ID NO: 2151289 - RNA, 22 nt, Human herpesvirus 8 [Kaposi`s sarcoma-associated h
auacauugugagggaguguuuu

SEQ ID NO: 2151290 - RNA, 16 nt, Human herpesvirus 8 [Kaposi`s sarcoma-associated h
ccacggugcacugaag

SEQ ID NO: 2151291 - RNA, 13 nt, Human herpesvirus 8 [Kaposi`s sarcoma-associated h
cgcaagcacuuuu

SEQ ID NO: 2151292 - RNA, 21 nt, Human herpesvirus 8 [Kaposi`s sarcoma-associated h
accacucuuuaucaugugaac

SEQ ID NO: 2151293 - RNA, 13 nt, Human herpesvirus 8 [Kaposi`s sarcoma-associated h
guuccacggcgug

SEQ ID NO: 2151294 - RNA, 12 nt, Human herpesvirus 8 [Kaposi`s sarcoma-associated h
gaacggacaauu

SEQ ID NO: 2151295 - RNA, 15 nt, Human herpesvirus 8 [Kaposi`s sarcoma-associated h
ggucgguucacugcu

SEQ ID NO: 2151296 - RNA, 16 nt, Human herpesvirus 8 [Kaposi`s sarcoma-associated h
ccgcaggccagccacc

SEQ ID NO: 2151297 - RNA, 23 nt, Human herpesvirus 8 [Kaposi`s sarcoma-associated h
aauggccuccacccaccaagcua

SEQ ID NO: 2151298 - RNA, 15 nt, Human herpesvirus 8 [Kaposi`s sarcoma-associated h
guccgacaugugcuu

SEQ ID NO: 2151299 - RNA, 17 nt, Human herpesvirus 8 [Kaposi`s sarcoma-associated h
ggcgcggaaacugggca

SEQ ID NO: 2151300 - RNA, 18 nt, Human herpesvirus 8 [Kaposi`s sarcoma-associated h
aaacguguccugccaggg

SEQ ID NO: 2151301 - RNA, 18 nt, Human herpesvirus 8 [Kaposi`s sarcoma-associated h
gcagcaguagacgcaggc

SEQ ID NO: 2151302 - RNA, 17 nt, Human herpesvirus 8 [Kaposi`s sarcoma-associated h
uaacuuuauuacaggua

SEQ ID NO: 2151303 - RNA, 17 nt, Human herpesvirus 8 [Kaposi`s sarcoma-associated h
gcgugucucagggagca

SEQ ID NO: 2151304 - RNA, 15 nt, Human herpesvirus 8 [Kaposi`s sarcoma-associated h
acucgcuguccugga

SEQ ID NO: 2151305 - RNA, 15 nt, Human herpesvirus 8 [Kaposi`s sarcoma-associated h
uaagcuuugcagcca

SEQ ID NO: 2151306 - RNA, 12 nt, Human herpesvirus 8 [Kaposi`s sarcoma-associated h
uuuaauaaacac

SEQ ID NO: 2151307 - RNA, 10 nt, Human herpesvirus 8 [Kaposi`s sarcoma-associated h
caaggcccug

SEQ ID NO: 2151308 - RNA, 13 nt, Human herpesvirus 8 [Kaposi`s sarcoma-associated h
uacgcguguggga

SEQ ID NO: 2151309 - RNA, 16 nt, Human herpesvirus 8 [Kaposi`s sarcoma-associated h
ucggcagccucuaccc

SEQ ID NO: 2151310 - RNA, 20 nt, Human herpesvirus 8 [Kaposi`s sarcoma-associated h
uggcccaaacuagcagagac

SEQ ID NO: 2151311 - RNA, 23 nt, Human herpesvirus 8 [Kaposi`s sarcoma-associated h
ccggacucgucuacccugccacu

SEQ ID NO: 2151312 - RNA, 21 nt, Human herpesvirus 8 [Kaposi`s sarcoma-associated h
uagcagcugucccggauccag

SEQ ID NO: 2151313 - RNA, 17 nt, Human herpesvirus 8 [Kaposi`s sarcoma-associated h
aaguccgucaaccagau

SEQ ID NO: 2151314 - RNA, 18 nt, Human herpesvirus 8 [Kaposi`s sarcoma-associated h
caaucucuuacuucgcau

SEQ ID NO: 2151315 - RNA, 17 nt, Human herpesvirus 8 [Kaposi`s sarcoma-associated h
auacccuggaucaggga

SEQ ID NO: 2151316 - RNA, 11 nt, Human herpesvirus 8 [Kaposi`s sarcoma-associated h
ccugccagggg

SEQ ID NO: 2151317 - RNA, 16 nt, Human herpesvirus 8 [Kaposi`s sarcoma-associated h
gacucuguauuuggga

SEQ ID NO: 2151318 - RNA, 23 nt, Human herpesvirus 8 [Kaposi`s sarcoma-associated h
ugcccacuguuguggaaagcucc

SEQ ID NO: 2151319 - RNA, 20 nt, Human herpesvirus 8 [Kaposi`s sarcoma-associated h
aacauauguuaaacacgucg

SEQ ID NO: 2151320 - RNA, 21 nt, Human herpesvirus 8 [Kaposi`s sarcoma-associated h
guggcccgucuguauacguga

SEQ ID NO: 2151321 - RNA, 12 nt, Human herpesvirus 8 [Kaposi`s sarcoma-associated h
aauuggagcacu

SEQ ID NO: 2151322 - RNA, 21 nt, Human herpesvirus 8 [Kaposi`s sarcoma-associated h
cuuggcgcuuagccugccucu

SEQ ID NO: 2151323 - RNA, 14 nt, Human herpesvirus 8 [Kaposi`s sarcoma-associated h
uggcgcgccacagu

SEQ ID NO: 2151324 - RNA, 17 nt, Human herpesvirus 8 [Kaposi`s sarcoma-associated h
cucuacagguaggccac

SEQ ID NO: 2151325 - RNA, 12 nt, Human herpesvirus 8 [Kaposi`s sarcoma-associated h
cuucuguuugaa

SEQ ID NO: 2151326 - RNA, 22 nt, Human herpesvirus 8 [Kaposi`s sarcoma-associated h
ggcaucguggaacgcacaggua

SEQ ID NO: 2151327 - RNA, 16 nt, Human herpesvirus 8 [Kaposi`s sarcoma-associated h
gcucugcgugcuggag

SEQ ID NO: 2151328 - RNA, 16 nt, Human herpesvirus 8 [Kaposi`s sarcoma-associated h
gauuuuccagggacau

SEQ ID NO: 2151329 - RNA, 21 nt, Human herpesvirus 8 [Kaposi`s sarcoma-associated h
cagccgcgcgaccucccacgg

SEQ ID NO: 2151330 - RNA, 20 nt, Human herpesvirus 8 [Kaposi`s sarcoma-associated h
ccugucgaggaagaaauggg

SEQ ID NO: 2151331 - RNA, 12 nt, Human herpesvirus 8 [Kaposi`s sarcoma-associated h
cuggcuggcgcu

SEQ ID NO: 2151332 - RNA, 20 nt, Human herpesvirus 8 [Kaposi`s sarcoma-associated h
ccuacgcguuaagaagccac

SEQ ID NO: 2151333 - RNA, 16 nt, Human herpesvirus 8 [Kaposi`s sarcoma-associated h
uaagccucaacgggca

SEQ ID NO: 2151334 - RNA, 23 nt, Human herpesvirus 8 [Kaposi`s sarcoma-associated h
uggcacacgguuacuagcaccac

SEQ ID NO: 2151335 - RNA, 20 nt, Human herpesvirus 8 [Kaposi`s sarcoma-associated h
guacugcgcauuuccugccc

SEQ ID NO: 2151336 - RNA, 14 nt, Human herpesvirus 8 [Kaposi`s sarcoma-associated h
cuaugaucagggca

SEQ ID NO: 2151337 - RNA, 17 nt, Human herpesvirus 8 [Kaposi`s sarcoma-associated h
cucuuggcuguuacaau

SEQ ID NO: 2151338 - RNA, 14 nt, Human herpesvirus 8 [Kaposi`s sarcoma-associated h
cuacccugccacuc

SEQ ID NO: 2151339 - RNA, 16 nt, Human herpesvirus 8 [Kaposi`s sarcoma-associated h
ggaguccauggcagug

SEQ ID NO: 2151340 - RNA, 20 nt, Human herpesvirus 8 [Kaposi`s sarcoma-associated h
gcggagaggggguggugcga

SEQ ID NO: 2151341 - RNA, 15 nt, Human herpesvirus 8 [Kaposi`s sarcoma-associated h
aauguuuuggucucu

SEQ ID NO: 2151342 - RNA, 18 nt, Human herpesvirus 8 [Kaposi`s sarcoma-associated h
gccucugaagcaccacau

SEQ ID NO: 2151343 - RNA, 15 nt, Human herpesvirus 8 [Kaposi`s sarcoma-associated h
cuaaucuggcaugua

SEQ ID NO: 2151344 - RNA, 19 nt, Human herpesvirus 8 [Kaposi`s sarcoma-associated h
agcagggcggccacucuug

SEQ ID NO: 2151345 - RNA, 22 nt, Human herpesvirus 8 [Kaposi`s sarcoma-associated h
agauaaucuaaauauucucuau

SEQ ID NO: 2151346 - RNA, 14 nt, Human herpesvirus 8 [Kaposi`s sarcoma-associated h
auugacuguggaga

SEQ ID NO: 2151347 - RNA, 23 nt, Human herpesvirus 8 [Kaposi`s sarcoma-associated h
gucagguuacuggacguggccag

SEQ ID NO: 2151348 - RNA, 14 nt, Human herpesvirus 8 [Kaposi`s sarcoma-associated h
aucuggcaugcugg

SEQ ID NO: 2151349 - RNA, 14 nt, Human herpesvirus 8 [Kaposi`s sarcoma-associated h
ugaaagcaauaaag

SEQ ID NO: 2151350 - RNA, 17 nt, Human herpesvirus 8 [Kaposi`s sarcoma-associated h
ucucccuucgugcccca

SEQ ID NO: 2151351 - RNA, 20 nt, Human herpesvirus 8 [Kaposi`s sarcoma-associated h
uuaccgcuacugugggugca

SEQ ID NO: 2151352 - RNA, 18 nt, Human herpesvirus 8 [Kaposi`s sarcoma-associated h
uggccaaacucacugagu

SEQ ID NO: 2151353 - RNA, 15 nt, Human herpesvirus 8 [Kaposi`s sarcoma-associated h
guccgauugcuucau

SEQ ID NO: 2151354 - RNA, 18 nt, Human herpesvirus 8 [Kaposi`s sarcoma-associated h
gcaguguuugcugcugua

SEQ ID NO: 2151355 - RNA, 21 nt, Human herpesvirus 8 [Kaposi`s sarcoma-associated h
cggaagauugguguccagaca

SEQ ID NO: 2151356 - RNA, 18 nt, Human herpesvirus 8 [Kaposi`s sarcoma-associated h
agguauguuuuuaccagu

SEQ ID NO: 2151357 - RNA, 17 nt, Human herpesvirus 8 [Kaposi`s sarcoma-associated h
ugauaugcaugugucug

SEQ ID NO: 2151358 - RNA, 16 nt, Human herpesvirus 8 [Kaposi`s sarcoma-associated h
uaagauuauaaugggu

SEQ ID NO: 2151359 - RNA, 20 nt, Human herpesvirus 8 [Kaposi`s sarcoma-associated h
ggaucgaacagaagacccag

SEQ ID NO: 2151360 - RNA, 16 nt, Human herpesvirus 8 [Kaposi`s sarcoma-associated h
cuguuacaauaaagcu

SEQ ID NO: 2151361 - RNA, 14 nt, Human herpesvirus 8 [Kaposi`s sarcoma-associated h
aggcgccugcgucu

SEQ ID NO: 2151362 - RNA, 19 nt, Human herpesvirus 8 [Kaposi`s sarcoma-associated h
gacacugauguguuuggga

SEQ ID NO: 2151363 - RNA, 20 nt, Human herpesvirus 8 [Kaposi`s sarcoma-associated h
gugagccuaacccacgucac

SEQ ID NO: 2151364 - RNA, 17 nt, Human herpesvirus 8 [Kaposi`s sarcoma-associated h
ggcagcaauauuaaagg

SEQ ID NO: 2151365 - RNA, 18 nt, Human herpesvirus 8 [Kaposi`s sarcoma-associated h
aaaauaacgggggaugga

SEQ ID NO: 2151366 - RNA, 11 nt, Human herpesvirus 8 [Kaposi`s sarcoma-associated h
acaauaaagcc

SEQ ID NO: 2151367 - RNA, 20 nt, Human herpesvirus 8 [Kaposi`s sarcoma-associated h
augccgcguuagcagccaug

SEQ ID NO: 2151368 - RNA, 17 nt, Human herpesvirus 8 [Kaposi`s sarcoma-associated h
cauauggcgcaggaguc

SEQ ID NO: 2151369 - RNA, 19 nt, Human herpesvirus 8 [Kaposi`s sarcoma-associated h
cccucuucuguugccaggc

SEQ ID NO: 2151370 - RNA, 12 nt, Human herpesvirus 8 [Kaposi`s sarcoma-associated h
accaaaccuggu

SEQ ID NO: 2151371 - RNA, 19 nt, Human herpesvirus 8 [Kaposi`s sarcoma-associated h
aacacagucacaguucaga

SEQ ID NO: 2151372 - RNA, 19 nt, Human herpesvirus 8 [Kaposi`s sarcoma-associated h
acguuagcuucagcuucag

SEQ ID NO: 2151373 - RNA, 17 nt, Human herpesvirus 8 [Kaposi`s sarcoma-associated h
ugcgguauuugcagaca

SEQ ID NO: 2151374 - RNA, 15 nt, Human herpesvirus 8 [Kaposi`s sarcoma-associated h
gccgguugguggugu

SEQ ID NO: 2151375 - RNA, 13 nt, Human herpesvirus 8 [Kaposi`s sarcoma-associated h
auugccaccucug

SEQ ID NO: 2151376 - RNA, 17 nt, Human herpesvirus 8 [Kaposi`s sarcoma-associated h
ccaaucacgggaggcuu

SEQ ID NO: 2151377 - RNA, 18 nt, Human herpesvirus 8 [Kaposi`s sarcoma-associated h
aucuuugcagugucuaug

SEQ ID NO: 2151378 - RNA, 23 nt, Human herpesvirus 8 [Kaposi`s sarcoma-associated h
cacagcaugccgucagggcccac

SEQ ID NO: 2151379 - RNA, 18 nt, Human herpesvirus 8 [Kaposi`s sarcoma-associated h
uggcauuugucagaaguu

SEQ ID NO: 2151380 - RNA, 16 nt, Human herpesvirus 8 [Kaposi`s sarcoma-associated h
cguugacauguggagc

SEQ ID NO: 2151381 - RNA, 20 nt, Human herpesvirus 8 [Kaposi`s sarcoma-associated h
guuucugaucccuaaggguc

SEQ ID NO: 2151382 - RNA, 19 nt, Human herpesvirus 8 [Kaposi`s sarcoma-associated h
uuuguaaugaauaacuuua

SEQ ID NO: 2151383 - RNA, 23 nt, Human herpesvirus 8 [Kaposi`s sarcoma-associated h
uacgucccucuuggcuguuacaa

SEQ ID NO: 2151384 - RNA, 16 nt, Human herpesvirus 8 [Kaposi`s sarcoma-associated h
ugucccgugcccaggc

SEQ ID NO: 2151385 - RNA, 18 nt, Human herpesvirus 8 [Kaposi`s sarcoma-associated h
caaacacaggcggagagc

SEQ ID NO: 2151386 - RNA, 21 nt, Human herpesvirus 8 [Kaposi`s sarcoma-associated h
caaauggcguccgcucuccca

SEQ ID NO: 2151387 - RNA, 13 nt, Human herpesvirus 8 [Kaposi`s sarcoma-associated h
gacaaccuucaga

SEQ ID NO: 2151388 - RNA, 22 nt, Human herpesvirus 8 [Kaposi`s sarcoma-associated h
ucuugcgccauuuuuguggcug

SEQ ID NO: 2151389 - RNA, 21 nt, Human herpesvirus 8 [Kaposi`s sarcoma-associated h
gagugggcggaaguacuggga

SEQ ID NO: 2151390 - RNA, 21 nt, Human herpesvirus 8 [Kaposi`s sarcoma-associated h
uucccuccugcauuuggacac

SEQ ID NO: 2151391 - RNA, 16 nt, Human herpesvirus 8 [Kaposi`s sarcoma-associated h
agcauaugcugccaag

SEQ ID NO: 2151392 - RNA, 15 nt, Human herpesvirus 8 [Kaposi`s sarcoma-associated h
ugcugaccacggcac

SEQ ID NO: 2151393 - RNA, 14 nt, Human herpesvirus 8 [Kaposi`s sarcoma-associated h
aaggcaacaccggc

SEQ ID NO: 2151394 - RNA, 19 nt, Human herpesvirus 8 [Kaposi`s sarcoma-associated h
ccaagagcgagugugccuc

SEQ ID NO: 2151395 - RNA, 22 nt, Human herpesvirus 8 [Kaposi`s sarcoma-associated h
ggaccuuacgauggaagaccua

SEQ ID NO: 2151396 - RNA, 17 nt, Human herpesvirus 8 [Kaposi`s sarcoma-associated h
gacagcaacacccagcu

SEQ ID NO: 2151397 - RNA, 23 nt, Human herpesvirus 8 [Kaposi`s sarcoma-associated h
gaaugaagugcaaccugcugcag

SEQ ID NO: 2151398 - RNA, 20 nt, Human herpesvirus 8 [Kaposi`s sarcoma-associated h
ucgcaagggcgucugugccu

SEQ ID NO: 2151399 - RNA, 15 nt, Human herpesvirus 8 [Kaposi`s sarcoma-associated h
ugcaaccugcugcag

SEQ ID NO: 2151400 - RNA, 21 nt, Human herpesvirus 8 [Kaposi`s sarcoma-associated h
gcaagccgggugaggccaaug

SEQ ID NO: 2151401 - RNA, 15 nt, Human herpesvirus 8 [Kaposi`s sarcoma-associated h
guggaugagaggguu

SEQ ID NO: 2151402 - RNA, 21 nt, Human herpesvirus 8 [Kaposi`s sarcoma-associated h
cccuucauaccgggucugugc

SEQ ID NO: 2151403 - RNA, 13 nt, Human herpesvirus 8 [Kaposi`s sarcoma-associated h
gcgcacccagcgu

SEQ ID NO: 2151404 - RNA, 14 nt, Human herpesvirus 8 [Kaposi`s sarcoma-associated h
agauaggagaaauc

SEQ ID NO: 2151405 - RNA, 18 nt, Human herpesvirus 8 [Kaposi`s sarcoma-associated h
gucgacagagccagccug

SEQ ID NO: 2151406 - RNA, 19 nt, Human herpesvirus 8 [Kaposi`s sarcoma-associated h
uuacauuugacaacacgca

SEQ ID NO: 2151407 - RNA, 20 nt, Human herpesvirus 8 [Kaposi`s sarcoma-associated h
cuuacuaagagaacagcaca

SEQ ID NO: 2151408 - RNA, 15 nt, Human herpesvirus 8 [Kaposi`s sarcoma-associated h
gaccugcuucacuua

SEQ ID NO: 2151409 - RNA, 17 nt, Human herpesvirus 8 [Kaposi`s sarcoma-associated h
gacugccacggccgccu

SEQ ID NO: 2151410 - RNA, 22 nt, Human herpesvirus 8 [Kaposi`s sarcoma-associated h
uucuaaucuuagucuuacuguc

SEQ ID NO: 2151411 - RNA, 21 nt, Human herpesvirus 8 [Kaposi`s sarcoma-associated h
uuacuugcaaaauugugugua

SEQ ID NO: 2151412 - RNA, 21 nt, Human herpesvirus 8 [Kaposi`s sarcoma-associated h
acaccauucuuuuauuuauca

SEQ ID NO: 2151413 - RNA, 19 nt, Human herpesvirus 8 [Kaposi`s sarcoma-associated h
cccuuacgccccugguggg

SEQ ID NO: 2151414 - RNA, 17 nt, Human herpesvirus 8 [Kaposi`s sarcoma-associated h
ucaccgcgguccauuag

SEQ ID NO: 2151415 - RNA, 23 nt, Human herpesvirus 8 [Kaposi`s sarcoma-associated h
ggacuugauaaucuccuggagaa

SEQ ID NO: 2151416 - RNA, 13 nt, Human herpesvirus 8 [Kaposi`s sarcoma-associated h
aucaaagaaaggu

SEQ ID NO: 2151417 - RNA, 14 nt, Human herpesvirus 8 [Kaposi`s sarcoma-associated h
ccuaucgcacagac

SEQ ID NO: 2151418 - RNA, 12 nt, Human herpesvirus 8 [Kaposi`s sarcoma-associated h
acugcagcacua

SEQ ID NO: 2151419 - RNA, 19 nt, Human herpesvirus 8 [Kaposi`s sarcoma-associated h
guuaagcuuugcagccagg

SEQ ID NO: 2151420 - RNA, 18 nt, Human herpesvirus 8 [Kaposi`s sarcoma-associated h
cuagaauuggagcacuuu

SEQ ID NO: 2151421 - RNA, 21 nt, Human herpesvirus 8 [Kaposi`s sarcoma-associated h
aacugucuccagaagagcauu

SEQ ID NO: 2151422 - RNA, 16 nt, Human herpesvirus 8 [Kaposi`s sarcoma-associated h
ccgaggacacgccauc

SEQ ID NO: 2151423 - RNA, 24 nt, Human herpesvirus 8 [Kaposi`s sarcoma-associated h
caucauaaaguacuuuuccauggc

SEQ ID NO: 2151424 - RNA, 19 nt, Human herpesvirus 8 [Kaposi`s sarcoma-associated h
auggcuucuauaagcaccu

SEQ ID NO: 2151425 - RNA, 21 nt, Human herpesvirus 8 [Kaposi`s sarcoma-associated h
gcuacguacccaauguuaaug

SEQ ID NO: 2151426 - RNA, 14 nt, Human herpesvirus 8 [Kaposi`s sarcoma-associated h
uggacguggccagc

SEQ ID NO: 2151427 - RNA, 19 nt, Human herpesvirus 8 [Kaposi`s sarcoma-associated h
uguccucgcccaacuuugu

SEQ ID NO: 2151428 - RNA, 18 nt, Human herpesvirus 8 [Kaposi`s sarcoma-associated h
aacggcuagcguacucuc

SEQ ID NO: 2151429 - RNA, 21 nt, Human herpesvirus 8 [Kaposi`s sarcoma-associated h
acugcuaggauucgugcagcc

SEQ ID NO: 2151430 - RNA, 13 nt, Human herpesvirus 8 [Kaposi`s sarcoma-associated h
gcaguggacacag

SEQ ID NO: 2151431 - RNA, 14 nt, Human herpesvirus 8 [Kaposi`s sarcoma-associated h
ggcccgagaaacac

SEQ ID NO: 2151432 - RNA, 15 nt, Human herpesvirus 8 [Kaposi`s sarcoma-associated h
gcuacaaauguuuua

SEQ ID NO: 2151433 - RNA, 16 nt, Human herpesvirus 8 [Kaposi`s sarcoma-associated h
uaaaguacuuuuccau

SEQ ID NO: 2151434 - RNA, 16 nt, Human herpesvirus 8 [Kaposi`s sarcoma-associated h
gaggggguggugcgag

SEQ ID NO: 2151435 - RNA, 13 nt, Human herpesvirus 8 [Kaposi`s sarcoma-associated h
aaugugccagcag

SEQ ID NO: 2151436 - RNA, 22 nt, Human herpesvirus 8 [Kaposi`s sarcoma-associated h
cuacagggaaguuucagagccu

SEQ ID NO: 2151437 - RNA, 18 nt, Human herpesvirus 8 [Kaposi`s sarcoma-associated h
agcacuuuuugaagcccu

SEQ ID NO: 2151438 - RNA, 16 nt, Human herpesvirus 8 [Kaposi`s sarcoma-associated h
accauguucagguggu

SEQ ID NO: 2151439 - RNA, 14 nt, Human herpesvirus 8 [Kaposi`s sarcoma-associated h
augacagggaagug

SEQ ID NO: 2151440 - RNA, 22 nt, Human herpesvirus 8 [Kaposi`s sarcoma-associated h
uccuccgggcucacuaguauug

SEQ ID NO: 2151441 - RNA, 21 nt, Human herpesvirus 8 [Kaposi`s sarcoma-associated h
accaggcaacacaagggugaa

SEQ ID NO: 2151442 - RNA, 18 nt, Human herpesvirus 8 [Kaposi`s sarcoma-associated h
cagagguuugaggcgcug

SEQ ID NO: 2151443 - RNA, 19 nt, Human herpesvirus 8 [Kaposi`s sarcoma-associated h
cgacacgauguuuuccagc

SEQ ID NO: 2151444 - RNA, 17 nt, Human herpesvirus 8 [Kaposi`s sarcoma-associated h
uccaccucuuucaucac

SEQ ID NO: 2151445 - RNA, 22 nt, Human herpesvirus 8 [Kaposi`s sarcoma-associated h
uggguguuaugcaccgugcagg

SEQ ID NO: 2151446 - RNA, 18 nt, Human herpesvirus 8 [Kaposi`s sarcoma-associated h
cuuuaacauugaggaccu

SEQ ID NO: 2151447 - RNA, 17 nt, Human herpesvirus 8 [Kaposi`s sarcoma-associated h
agcauccggacugagau

SEQ ID NO: 2151448 - RNA, 22 nt, Human herpesvirus 8 [Kaposi`s sarcoma-associated h
gggcguccacauggcagcugaa

SEQ ID NO: 2151449 - RNA, 16 nt, Human herpesvirus 8 [Kaposi`s sarcoma-associated h
acaugugcuuuugcuu

SEQ ID NO: 2151450 - RNA, 16 nt, Human herpesvirus 8 [Kaposi`s sarcoma-associated h
ucacuaguauuguguu

SEQ ID NO: 2151451 - RNA, 16 nt, Human herpesvirus 8 [Kaposi`s sarcoma-associated h
ugacuccggggagcug

SEQ ID NO: 2151452 - RNA, 15 nt, Human herpesvirus 8 [Kaposi`s sarcoma-associated h
gauacacuacuuaug

SEQ ID NO: 2151453 - RNA, 23 nt, Human herpesvirus 8 [Kaposi`s sarcoma-associated h
ggcuacacaucauaaaguacuuu

SEQ ID NO: 2151454 - RNA, 20 nt, Human herpesvirus 8 [Kaposi`s sarcoma-associated h
ucugccgaagucagugccac

SEQ ID NO: 2151455 - RNA, 12 nt, Human herpesvirus 8 [Kaposi`s sarcoma-associated h
uggcggccaugg

SEQ ID NO: 2151456 - RNA, 17 nt, Human herpesvirus 8 [Kaposi`s sarcoma-associated h
acgucuugaccucuccg

SEQ ID NO: 2151457 - RNA, 20 nt, Human herpesvirus 8 [Kaposi`s sarcoma-associated h
ggcuccuggguagcuaugcc

SEQ ID NO: 2151458 - RNA, 16 nt, Human herpesvirus 8 [Kaposi`s sarcoma-associated h
gauacugaucacugcg

SEQ ID NO: 2151459 - RNA, 22 nt, Human herpesvirus 8 [Kaposi`s sarcoma-associated h
aggugccgucgucgagcacucc

SEQ ID NO: 2151460 - RNA, 16 nt, Human herpesvirus 8 [Kaposi`s sarcoma-associated h
guacgacgcaggcguc

SEQ ID NO: 2151461 - RNA, 21 nt, Human herpesvirus 8 [Kaposi`s sarcoma-associated h
caacuauuuccuuuuuucaaa

SEQ ID NO: 2151462 - RNA, 21 nt, Human herpesvirus 8 [Kaposi`s sarcoma-associated h
ugugaaugucagacacacacu

SEQ ID NO: 2151463 - RNA, 14 nt, Human herpesvirus 8 [Kaposi`s sarcoma-associated h
gcacacagacacaa

SEQ ID NO: 2151464 - RNA, 24 nt, Human herpesvirus 8 [Kaposi`s sarcoma-associated h
gagggcuguucucgccuggagcag

SEQ ID NO: 2151465 - RNA, 17 nt, Human herpesvirus 8 [Kaposi`s sarcoma-associated h
auuucuuuuugccagag

SEQ ID NO: 2151466 - RNA, 17 nt, Human herpesvirus 8 [Kaposi`s sarcoma-associated h
uagcguuggcuagucau

SEQ ID NO: 2151467 - RNA, 16 nt, Human herpesvirus 8 [Kaposi`s sarcoma-associated h
aguauuaugccaggga

SEQ ID NO: 2151468 - RNA, 16 nt, Human herpesvirus 8 [Kaposi`s sarcoma-associated h
caaacuucggaauuuc

SEQ ID NO: 2151469 - RNA, 16 nt, Human herpesvirus 8 [Kaposi`s sarcoma-associated h
auguccugauuuucca

SEQ ID NO: 2151470 - RNA, 14 nt, Human herpesvirus 8 [Kaposi`s sarcoma-associated h
gcgacaugcugaug

SEQ ID NO: 2151471 - RNA, 19 nt, Human herpesvirus 8 [Kaposi`s sarcoma-associated h
gccgagccacaaaguacau

SEQ ID NO: 2151472 - RNA, 17 nt, Human herpesvirus 8 [Kaposi`s sarcoma-associated h
acacauuugucuuuauu

SEQ ID NO: 2151473 - RNA, 23 nt, Human herpesvirus 8 [Kaposi`s sarcoma-associated h
cgaaagcuucaucguggugcccu

SEQ ID NO: 2151474 - RNA, 19 nt, Human herpesvirus 8 [Kaposi`s sarcoma-associated h
cuucaucguggugcccugc

SEQ ID NO: 2151475 - RNA, 15 nt, Human herpesvirus 8 [Kaposi`s sarcoma-associated h
cccgauggcccuuca

SEQ ID NO: 2151476 - RNA, 12 nt, Human herpesvirus 8 [Kaposi`s sarcoma-associated h
acaaaccaaauu

SEQ ID NO: 2151477 - RNA, 14 nt, Human herpesvirus 8 [Kaposi`s sarcoma-associated h
ucaguguccagcca

SEQ ID NO: 2151478 - RNA, 22 nt, Human herpesvirus 8 [Kaposi`s sarcoma-associated h
acagccuuggugcuaggcaguc

SEQ ID NO: 2151479 - RNA, 19 nt, Human herpesvirus 8 [Kaposi`s sarcoma-associated h
ccacgcccgggggccagga

SEQ ID NO: 2151480 - RNA, 22 nt, Human herpesvirus 8 [Kaposi`s sarcoma-associated h
gggccagagguuugaggcgcug

SEQ ID NO: 2151481 - RNA, 12 nt, Human herpesvirus 8 [Kaposi`s sarcoma-associated h
cucacugagugg

SEQ ID NO: 2151482 - RNA, 23 nt, Human herpesvirus 8 [Kaposi`s sarcoma-associated h
gcgacggaaguuggccuccagca

SEQ ID NO: 2151483 - RNA, 18 nt, Human herpesvirus 8 [Kaposi`s sarcoma-associated h
cucccuucgugccccagc

SEQ ID NO: 2151484 - RNA, 16 nt, Human herpesvirus 8 [Kaposi`s sarcoma-associated h
aucucgguacugcgca

SEQ ID NO: 2151485 - RNA, 15 nt, Human herpesvirus 8 [Kaposi`s sarcoma-associated h
cuggugggacacacg

SEQ ID NO: 2151486 - RNA, 18 nt, Human herpesvirus 8 [Kaposi`s sarcoma-associated h
gcgucuucuauacaugcc

SEQ ID NO: 2151487 - RNA, 15 nt, Human herpesvirus 8 [Kaposi`s sarcoma-associated h
aaacagccuuggugc

SEQ ID NO: 2151488 - RNA, 14 nt, Human herpesvirus 8 [Kaposi`s sarcoma-associated h
gcggccuuuucugg

SEQ ID NO: 2151489 - RNA, 23 nt, Human herpesvirus 8 [Kaposi`s sarcoma-associated h
auuccucuccgcauuaaagcacu

SEQ ID NO: 2151490 - RNA, 15 nt, Human herpesvirus 8 [Kaposi`s sarcoma-associated h
ucccgaugccacugu

SEQ ID NO: 2151491 - RNA, 21 nt, Human herpesvirus 8 [Kaposi`s sarcoma-associated h
ugugagggacguuugcagaua

SEQ ID NO: 2151492 - RNA, 16 nt, Human herpesvirus 8 [Kaposi`s sarcoma-associated h
uucggacgcuauuugu

SEQ ID NO: 2151493 - RNA, 16 nt, Human herpesvirus 8 [Kaposi`s sarcoma-associated h
ugcauagggcuuugau

SEQ ID NO: 2151494 - RNA, 19 nt, Human herpesvirus 8 [Kaposi`s sarcoma-associated h
cgcaggagucagagcagug

SEQ ID NO: 2151495 - RNA, 17 nt, Human herpesvirus 8 [Kaposi`s sarcoma-associated h
acucagcugccaaggca

SEQ ID NO: 2151496 - RNA, 13 nt, Human herpesvirus 8 [Kaposi`s sarcoma-associated h
acucccucaagca

SEQ ID NO: 2151497 - RNA, 17 nt, Human herpesvirus 8 [Kaposi`s sarcoma-associated h
ucucacccaauacuuaa

SEQ ID NO: 2151498 - RNA, 21 nt, Human herpesvirus 8 [Kaposi`s sarcoma-associated h
guuuauaacaaugaaacgaca

SEQ ID NO: 2151499 - RNA, 17 nt, Human herpesvirus 8 [Kaposi`s sarcoma-associated h
uaacccgcccucgggac

SEQ ID NO: 2151500 - RNA, 12 nt, Human herpesvirus 8 [Kaposi`s sarcoma-associated h
uuacuugcagca

SEQ ID NO: 2151501 - RNA, 22 nt, Human herpesvirus 8 [Kaposi`s sarcoma-associated h
cccugaaaugaucguccacgga

SEQ ID NO: 2151502 - RNA, 15 nt, Human herpesvirus 8 [Kaposi`s sarcoma-associated h
gcaacugaccauguu

SEQ ID NO: 2151503 - RNA, 16 nt, Human herpesvirus 8 [Kaposi`s sarcoma-associated h
uacguauuagacguac

SEQ ID NO: 2151504 - RNA, 23 nt, Human herpesvirus 8 [Kaposi`s sarcoma-associated h
cucaagcauugaguuugccgagc

SEQ ID NO: 2151505 - RNA, 13 nt, Human herpesvirus 8 [Kaposi`s sarcoma-associated h
gcucugcugccug

SEQ ID NO: 2151506 - RNA, 16 nt, Human herpesvirus 8 [Kaposi`s sarcoma-associated h
ggggaagucaugcuca

SEQ ID NO: 2151507 - RNA, 14 nt, Human herpesvirus 8 [Kaposi`s sarcoma-associated h
agaauggcgugcca

SEQ ID NO: 2151508 - RNA, 19 nt, Human herpesvirus 8 [Kaposi`s sarcoma-associated h
cuaacggguaacugcaugc

SEQ ID NO: 2151509 - RNA, 16 nt, Human herpesvirus 8 [Kaposi`s sarcoma-associated h
cacgcacuuggcccug

SEQ ID NO: 2151510 - RNA, 16 nt, Human herpesvirus 8 [Kaposi`s sarcoma-associated h
cugcccugguucuaau

SEQ ID NO: 2151511 - RNA, 18 nt, Human herpesvirus 8 [Kaposi`s sarcoma-associated h
ucccuucgugccccagcg

SEQ ID NO: 2151512 - RNA, 14 nt, Human herpesvirus 8 [Kaposi`s sarcoma-associated h
ggguggacagugcc

SEQ ID NO: 2151513 - RNA, 17 nt, Human herpesvirus 8 [Kaposi`s sarcoma-associated h
cgggacguuggcggcga

SEQ ID NO: 2151514 - RNA, 18 nt, Human herpesvirus 8 [Kaposi`s sarcoma-associated h
aggccaccauuccucucc

SEQ ID NO: 2151515 - RNA, 16 nt, Human herpesvirus 8 [Kaposi`s sarcoma-associated h
agggucgggugggacg

SEQ ID NO: 2151516 - RNA, 17 nt, Human herpesvirus 8 [Kaposi`s sarcoma-associated h
uaaaguacuuuuccaug

SEQ ID NO: 2151517 - RNA, 17 nt, Human herpesvirus 8 [Kaposi`s sarcoma-associated h
ccaggaugcggguuggg

SEQ ID NO: 2151518 - RNA, 15 nt, Human herpesvirus 8 [Kaposi`s sarcoma-associated h
gaccugucgaggaag

SEQ ID NO: 2151519 - RNA, 17 nt, Human herpesvirus 8 [Kaposi`s sarcoma-associated h
gaguccauggcagugga

SEQ ID NO: 2151520 - RNA, 11 nt, Human herpesvirus 8 [Kaposi`s sarcoma-associated h
ugagccagaau

SEQ ID NO: 2151521 - RNA, 17 nt, Human herpesvirus 8 [Kaposi`s sarcoma-associated h
ucuuagucuuacuguca

SEQ ID NO: 2151522 - RNA, 17 nt, Human herpesvirus 8 [Kaposi`s sarcoma-associated h
ccuagaaaguuuccucu

SEQ ID NO: 2151523 - RNA, 16 nt, Human herpesvirus 8 [Kaposi`s sarcoma-associated h
gcugaugaucgccacc

SEQ ID NO: 2151524 - RNA, 21 nt, Human herpesvirus 8 [Kaposi`s sarcoma-associated h
gacaccuauaauggucuguau

SEQ ID NO: 2151525 - RNA, 13 nt, Human herpesvirus 8 [Kaposi`s sarcoma-associated h
ccgugaugggcca

SEQ ID NO: 2151526 - RNA, 15 nt, Human herpesvirus 8 [Kaposi`s sarcoma-associated h
uggcugccuggacag

SEQ ID NO: 2151527 - RNA, 23 nt, Human herpesvirus 8 [Kaposi`s sarcoma-associated h
aagggccaagcuacuggccuggc

SEQ ID NO: 2151528 - RNA, 18 nt, Human herpesvirus 8 [Kaposi`s sarcoma-associated h
cucaugauuacagaguca

SEQ ID NO: 2151529 - RNA, 14 nt, Human herpesvirus 8 [Kaposi`s sarcoma-associated h
ggugcguugugaag

SEQ ID NO: 2151530 - RNA, 14 nt, Human herpesvirus 8 [Kaposi`s sarcoma-associated h
ucucgccuggagca

SEQ ID NO: 2151531 - RNA, 15 nt, Human herpesvirus 8 [Kaposi`s sarcoma-associated h
aaugcagcaguagac

SEQ ID NO: 2151532 - RNA, 22 nt, Human herpesvirus 8 [Kaposi`s sarcoma-associated h
caauauaacagcaacauguuua

SEQ ID NO: 2151533 - RNA, 20 nt, Human herpesvirus 8 [Kaposi`s sarcoma-associated h
gacaaaugugugggugggaa

SEQ ID NO: 2151534 - RNA, 15 nt, Human herpesvirus 8 [Kaposi`s sarcoma-associated h
acguuagcuucagcu

SEQ ID NO: 2151535 - RNA, 19 nt, Human herpesvirus 8 [Kaposi`s sarcoma-associated h
auagacuuaaaaugucucg

SEQ ID NO: 2151536 - RNA, 22 nt, Human herpesvirus 8 [Kaposi`s sarcoma-associated h
cacaguguaucccccacaggac

SEQ ID NO: 2151537 - RNA, 22 nt, Human herpesvirus 8 [Kaposi`s sarcoma-associated h
cacagagucuacgugccagugg

SEQ ID NO: 2151538 - RNA, 18 nt, Human herpesvirus 8 [Kaposi`s sarcoma-associated h
agguucacuugggagcug

SEQ ID NO: 2151539 - RNA, 13 nt, Human herpesvirus 8 [Kaposi`s sarcoma-associated h
gaucacggagccg

SEQ ID NO: 2151540 - RNA, 13 nt, Human herpesvirus 8 [Kaposi`s sarcoma-associated h
auacaugagagac

SEQ ID NO: 2151541 - RNA, 15 nt, Human herpesvirus 8 [Kaposi`s sarcoma-associated h
guuuaccugcacucc

SEQ ID NO: 2151542 - RNA, 14 nt, Human herpesvirus 8 [Kaposi`s sarcoma-associated h
gagaccucuguggc

SEQ ID NO: 2151543 - RNA, 18 nt, Human herpesvirus 8 [Kaposi`s sarcoma-associated h
uacacagccaauguuuuu

SEQ ID NO: 2151544 - RNA, 14 nt, Human herpesvirus 8 [Kaposi`s sarcoma-associated h
ucaggucugucacu

SEQ ID NO: 2151545 - RNA, 18 nt, Human herpesvirus 8 [Kaposi`s sarcoma-associated h
gaccccgauaugcaccuc

SEQ ID NO: 2151546 - RNA, 16 nt, Human herpesvirus 8 [Kaposi`s sarcoma-associated h
gaagcaguuucaggac

SEQ ID NO: 2151547 - RNA, 20 nt, Human herpesvirus 8 [Kaposi`s sarcoma-associated h
cacgacauuucgccaauuau

SEQ ID NO: 2151548 - RNA, 15 nt, Human herpesvirus 8 [Kaposi`s sarcoma-associated h
cuguugaaugugauc

SEQ ID NO: 2151549 - RNA, 14 nt, Human herpesvirus 8 [Kaposi`s sarcoma-associated h
cguccgacaugugc

SEQ ID NO: 2151550 - RNA, 12 nt, Human herpesvirus 8 [Kaposi`s sarcoma-associated h
cgggacuucugg

SEQ ID NO: 2151551 - RNA, 14 nt, Human herpesvirus 8 [Kaposi`s sarcoma-associated h
cagacgguccaaag

SEQ ID NO: 2151552 - RNA, 14 nt, Human herpesvirus 8 [Kaposi`s sarcoma-associated h
ugccugguggagca

SEQ ID NO: 2151553 - RNA, 15 nt, Human herpesvirus 8 [Kaposi`s sarcoma-associated h
guagacggggagcug

SEQ ID NO: 2151554 - RNA, 14 nt, Human herpesvirus 8 [Kaposi`s sarcoma-associated h
uacucaaaugggaa

SEQ ID NO: 2151555 - RNA, 19 nt, Human herpesvirus 8 [Kaposi`s sarcoma-associated h
gcagccagguaacaaagcc

SEQ ID NO: 2151556 - RNA, 20 nt, Human herpesvirus 8 [Kaposi`s sarcoma-associated h
agcgugucgcccgucacugg

SEQ ID NO: 2151557 - RNA, 17 nt, Human herpesvirus 8 [Kaposi`s sarcoma-associated h
cuagaauuggagcacuu

SEQ ID NO: 2151558 - RNA, 16 nt, Human herpesvirus 8 [Kaposi`s sarcoma-associated h
cgcggauaggcugggg

SEQ ID NO: 2151559 - RNA, 16 nt, Human herpesvirus 8 [Kaposi`s sarcoma-associated h
gucgccgaggaccuca

SEQ ID NO: 2151560 - RNA, 18 nt, Human herpesvirus 8 [Kaposi`s sarcoma-associated h
uaucaggcuagugcugua

SEQ ID NO: 2151561 - RNA, 17 nt, Human herpesvirus 8 [Kaposi`s sarcoma-associated h
aagaggacccagggugc

SEQ ID NO: 2151562 - RNA, 22 nt, Human herpesvirus 8 [Kaposi`s sarcoma-associated h
cacauuuccacccaccuacuuc

SEQ ID NO: 2151563 - RNA, 17 nt, Human herpesvirus 8 [Kaposi`s sarcoma-associated h
ggcgcagcagcugcuug

SEQ ID NO: 2151564 - RNA, 16 nt, Human herpesvirus 8 [Kaposi`s sarcoma-associated h
auaaagccgagccaca

SEQ ID NO: 2151565 - RNA, 13 nt, Human herpesvirus 8 [Kaposi`s sarcoma-associated h
uccucuugcgcua

SEQ ID NO: 2151566 - RNA, 16 nt, Human herpesvirus 8 [Kaposi`s sarcoma-associated h
acccuacuuagugaaa

SEQ ID NO: 2151567 - RNA, 22 nt, Human herpesvirus 8 [Kaposi`s sarcoma-associated h
gcaguggaccgcgagacaucag

SEQ ID NO: 2151568 - RNA, 15 nt, Human herpesvirus 8 [Kaposi`s sarcoma-associated h
uuauaacagugcucu

SEQ ID NO: 2151569 - RNA, 21 nt, Human herpesvirus 8 [Kaposi`s sarcoma-associated h
gcccugguucuaaucuuaguc

SEQ ID NO: 2151570 - RNA, 14 nt, Human herpesvirus 8 [Kaposi`s sarcoma-associated h
auuuuauggacauu

SEQ ID NO: 2151571 - RNA, 15 nt, Human herpesvirus 8 [Kaposi`s sarcoma-associated h
gagcgagugugccuc

SEQ ID NO: 2151572 - RNA, 15 nt, Human herpesvirus 8 [Kaposi`s sarcoma-associated h
auuaacauccacagg

SEQ ID NO: 2151573 - RNA, 22 nt, Human herpesvirus 8 [Kaposi`s sarcoma-associated h
cgcgguuguuuacgcagggugc

SEQ ID NO: 2151574 - RNA, 15 nt, Human herpesvirus 8 [Kaposi`s sarcoma-associated h
gaccugaugcaggcc

SEQ ID NO: 2151575 - RNA, 12 nt, Human herpesvirus 8 [Kaposi`s sarcoma-associated h
guggcaccugag

SEQ ID NO: 2151576 - RNA, 23 nt, Human herpesvirus 8 [Kaposi`s sarcoma-associated h
cgcuggaagagaauggagaggag

SEQ ID NO: 2151577 - RNA, 18 nt, Human herpesvirus 8 [Kaposi`s sarcoma-associated h
uagucagagucugaaccc

SEQ ID NO: 2151578 - RNA, 20 nt, Human herpesvirus 8 [Kaposi`s sarcoma-associated h
agaauggcgugccaguggag

SEQ ID NO: 2151579 - RNA, 17 nt, Human herpesvirus 8 [Kaposi`s sarcoma-associated h
cgaaugguaccauggca

SEQ ID NO: 2151580 - RNA, 20 nt, Human herpesvirus 8 [Kaposi`s sarcoma-associated h
cuaagaauccccuucucucu

SEQ ID NO: 2151581 - RNA, 17 nt, Human herpesvirus 8 [Kaposi`s sarcoma-associated h
gcacuauaaauaucauu

SEQ ID NO: 2151582 - RNA, 14 nt, Human herpesvirus 8 [Kaposi`s sarcoma-associated h
gaacaucagagaug

SEQ ID NO: 2151583 - RNA, 18 nt, Human herpesvirus 8 [Kaposi`s sarcoma-associated h
aucguugacauguggagc

SEQ ID NO: 2151584 - RNA, 15 nt, Human herpesvirus 8 [Kaposi`s sarcoma-associated h
ccagacugguccaag

SEQ ID NO: 2151585 - RNA, 13 nt, Human herpesvirus 8 [Kaposi`s sarcoma-associated h
uaguagucagagu

SEQ ID NO: 2151586 - RNA, 22 nt, Human herpesvirus 8 [Kaposi`s sarcoma-associated h
ugggcuucauuaugcaugcaau

SEQ ID NO: 2151587 - RNA, 14 nt, Human herpesvirus 8 [Kaposi`s sarcoma-associated h
uggauggggcaugg

SEQ ID NO: 2151588 - RNA, 18 nt, Human herpesvirus 8 [Kaposi`s sarcoma-associated h
ccaguagauuuaguacgu

SEQ ID NO: 2151589 - RNA, 20 nt, Human herpesvirus 8 [Kaposi`s sarcoma-associated h
caauagggauacuguuuaua

SEQ ID NO: 2151590 - RNA, 20 nt, Human herpesvirus 8 [Kaposi`s sarcoma-associated h
uuugaaggcgaauaaaacag

SEQ ID NO: 2151591 - RNA, 17 nt, Human herpesvirus 8 [Kaposi`s sarcoma-associated h
gcccuccugggccaggc

SEQ ID NO: 2151592 - RNA, 23 nt, Human herpesvirus 8 [Kaposi`s sarcoma-associated h
caacauguaaauuggccacugca

SEQ ID NO: 2151593 - RNA, 23 nt, Human herpesvirus 8 [Kaposi`s sarcoma-associated h
gugguagagaccgacgccaucaa

SEQ ID NO: 2151594 - RNA, 20 nt, Human herpesvirus 8 [Kaposi`s sarcoma-associated h
gugcucuucccacacccggc

SEQ ID NO: 2151595 - RNA, 15 nt, Human herpesvirus 8 [Kaposi`s sarcoma-associated h
ugagcgcugugcuuu

SEQ ID NO: 2151596 - RNA, 19 nt, Human herpesvirus 8 [Kaposi`s sarcoma-associated h
acaacuuguccggagcugc

SEQ ID NO: 2151597 - RNA, 13 nt, Human herpesvirus 8 [Kaposi`s sarcoma-associated h
guugacagggacg

SEQ ID NO: 2151598 - RNA, 12 nt, Human herpesvirus 8 [Kaposi`s sarcoma-associated h
auauaaugugaa

SEQ ID NO: 2151599 - RNA, 19 nt, Human herpesvirus 8 [Kaposi`s sarcoma-associated h
aaucuuuauugucuagaca

SEQ ID NO: 2151600 - RNA, 13 nt, Human herpesvirus 8 [Kaposi`s sarcoma-associated h
gcucccgugcguu

SEQ ID NO: 2151601 - RNA, 20 nt, Human herpesvirus 8 [Kaposi`s sarcoma-associated h
caggcgccuaugacuaggag

SEQ ID NO: 2151602 - RNA, 21 nt, Human herpesvirus 8 [Kaposi`s sarcoma-associated h
agaccccgauaugcaccucca

SEQ ID NO: 2151603 - RNA, 17 nt, Human herpesvirus 8 [Kaposi`s sarcoma-associated h
cagcugcagccaggaag

SEQ ID NO: 2151604 - RNA, 12 nt, Human herpesvirus 8 [Kaposi`s sarcoma-associated h
ccuucacagugc

SEQ ID NO: 2151605 - RNA, 20 nt, Human herpesvirus 8 [Kaposi`s sarcoma-associated h
accuguccaugucgcacacu

SEQ ID NO: 2151606 - RNA, 15 nt, Human herpesvirus 8 [Kaposi`s sarcoma-associated h
ccaggaaguucaaug

SEQ ID NO: 2151607 - RNA, 17 nt, Human herpesvirus 8 [Kaposi`s sarcoma-associated h
uucaagagggccaguuu

SEQ ID NO: 2151608 - RNA, 24 nt, Human herpesvirus 8 [Kaposi`s sarcoma-associated h
cugaagucccgaugccacuguugu

SEQ ID NO: 2151609 - RNA, 21 nt, Human herpesvirus 8 [Kaposi`s sarcoma-associated h
uggcccugauaugcauguguc

SEQ ID NO: 2151610 - RNA, 22 nt, Human herpesvirus 8 [Kaposi`s sarcoma-associated h
uauugcuuucaaauaaaacggu

SEQ ID NO: 2151611 - RNA, 20 nt, Human herpesvirus 8 [Kaposi`s sarcoma-associated h
ccacgcccgggggccaggac

SEQ ID NO: 2151612 - RNA, 12 nt, Human herpesvirus 8 [Kaposi`s sarcoma-associated h
aucggcuugcac

SEQ ID NO: 2151613 - RNA, 19 nt, Human herpesvirus 8 [Kaposi`s sarcoma-associated h
gucaugcacgguauagaga

SEQ ID NO: 2151614 - RNA, 23 nt, Human herpesvirus 8 [Kaposi`s sarcoma-associated h
uacauccaaauuaugcaguaucu

SEQ ID NO: 2151615 - RNA, 20 nt, Human herpesvirus 8 [Kaposi`s sarcoma-associated h
ccggaugcagggccuggccu

SEQ ID NO: 2151616 - RNA, 23 nt, Human herpesvirus 8 [Kaposi`s sarcoma-associated h
acauauugguauaugacuacugu

SEQ ID NO: 2151617 - RNA, 15 nt, Human herpesvirus 8 [Kaposi`s sarcoma-associated h
ccgacaaccggcugg

SEQ ID NO: 2151618 - RNA, 20 nt, Human herpesvirus 8 [Kaposi`s sarcoma-associated h
ccuucgcaccccauccaccg

SEQ ID NO: 2151619 - RNA, 17 nt, Human herpesvirus 8 [Kaposi`s sarcoma-associated h
acacuaaaagucuggcc

SEQ ID NO: 2151620 - RNA, 14 nt, Human herpesvirus 8 [Kaposi`s sarcoma-associated h
cgucgacagagcca

SEQ ID NO: 2151621 - RNA, 12 nt, Human herpesvirus 8 [Kaposi`s sarcoma-associated h
agugccuggcau

SEQ ID NO: 2151622 - RNA, 17 nt, Human herpesvirus 8 [Kaposi`s sarcoma-associated h
aggggcagacccaaaaa

SEQ ID NO: 2151623 - RNA, 16 nt, Human herpesvirus 8 [Kaposi`s sarcoma-associated h
acccacgccgucacag

SEQ ID NO: 2151624 - RNA, 23 nt, Human herpesvirus 8 [Kaposi`s sarcoma-associated h
gcagaagaccgcguccuccaccc

SEQ ID NO: 2151625 - RNA, 23 nt, Human herpesvirus 8 [Kaposi`s sarcoma-associated h
aucguaggccaauacugcccaag

SEQ ID NO: 2151626 - RNA, 16 nt, Human herpesvirus 8 [Kaposi`s sarcoma-associated h
cuguucucgccuggag

SEQ ID NO: 2151627 - RNA, 14 nt, Human herpesvirus 8 [Kaposi`s sarcoma-associated h
uacaugugucuauc

SEQ ID NO: 2151628 - RNA, 22 nt, Human herpesvirus 8 [Kaposi`s sarcoma-associated h
aaaaucuggcaugcugggauuu

SEQ ID NO: 2151629 - RNA, 21 nt, Human herpesvirus 8 [Kaposi`s sarcoma-associated h
cagccucacggacaacgccau

SEQ ID NO: 2151630 - RNA, 17 nt, Human herpesvirus 8 [Kaposi`s sarcoma-associated h
uuggcuguuacaauaaa

SEQ ID NO: 2151631 - RNA, 24 nt, Human herpesvirus 8 [Kaposi`s sarcoma-associated h
ucggauuuugauaugugugcccaa

SEQ ID NO: 2151632 - RNA, 21 nt, Human herpesvirus 8 [Kaposi`s sarcoma-associated h
gacgcggccauccgcgagcca

SEQ ID NO: 2151633 - RNA, 14 nt, Human herpesvirus 8 [Kaposi`s sarcoma-associated h
caauacugcccaag

SEQ ID NO: 2151634 - RNA, 17 nt, Human herpesvirus 8 [Kaposi`s sarcoma-associated h
cacagacgacugggcca

SEQ ID NO: 2151635 - RNA, 18 nt, Human herpesvirus 8 [Kaposi`s sarcoma-associated h
aucaaucugagaaaaguu

SEQ ID NO: 2151636 - RNA, 24 nt, Human herpesvirus 8 [Kaposi`s sarcoma-associated h
cagcgcgacggaaguuggccucca

SEQ ID NO: 2151637 - RNA, 20 nt, Human herpesvirus 8 [Kaposi`s sarcoma-associated h
uaacgagguuacugccagac

SEQ ID NO: 2151638 - RNA, 19 nt, Human herpesvirus 8 [Kaposi`s sarcoma-associated h
gccagaaagacacaugaga

SEQ ID NO: 2151639 - RNA, 22 nt, Human herpesvirus 8 [Kaposi`s sarcoma-associated h
gccuuggaagauauguugugcg

SEQ ID NO: 2151640 - RNA, 14 nt, Human herpesvirus 8 [Kaposi`s sarcoma-associated h
ggaggagggcaggu

SEQ ID NO: 2151641 - RNA, 13 nt, Human herpesvirus 8 [Kaposi`s sarcoma-associated h
cucccucacaaug

SEQ ID NO: 2151642 - RNA, 23 nt, Human herpesvirus 8 [Kaposi`s sarcoma-associated h
ccagcaauaaacccacagcccau

SEQ ID NO: 2151643 - RNA, 19 nt, Human herpesvirus 8 [Kaposi`s sarcoma-associated h
cguguguuuggugguguca

SEQ ID NO: 2151644 - RNA, 16 nt, Human herpesvirus 8 [Kaposi`s sarcoma-associated h
aaggucaccuggccca

SEQ ID NO: 2151645 - RNA, 23 nt, Human herpesvirus 8 [Kaposi`s sarcoma-associated h
uccgaggaucugugugugaagca

SEQ ID NO: 2151646 - RNA, 18 nt, Human herpesvirus 8 [Kaposi`s sarcoma-associated h
ugacucuguauuugggac

SEQ ID NO: 2151647 - RNA, 15 nt, Human herpesvirus 8 [Kaposi`s sarcoma-associated h
caauguacugccaug

SEQ ID NO: 2151648 - RNA, 14 nt, Human herpesvirus 8 [Kaposi`s sarcoma-associated h
uuggagaaacagug

SEQ ID NO: 2151649 - RNA, 15 nt, Human herpesvirus 8 [Kaposi`s sarcoma-associated h
gccaagcuacuggcc

SEQ ID NO: 2151650 - RNA, 14 nt, Human herpesvirus 8 [Kaposi`s sarcoma-associated h
aguacgugguaagg

SEQ ID NO: 2151651 - RNA, 20 nt, Human herpesvirus 8 [Kaposi`s sarcoma-associated h
auaugggcuuguacaugugu

SEQ ID NO: 2151652 - RNA, 20 nt, Human herpesvirus 8 [Kaposi`s sarcoma-associated h
ucuagcauaugcugccaaga

SEQ ID NO: 2151653 - RNA, 23 nt, Human herpesvirus 8 [Kaposi`s sarcoma-associated h
ucaaugggagaaccaaccucucc

SEQ ID NO: 2151654 - RNA, 18 nt, Human herpesvirus 8 [Kaposi`s sarcoma-associated h
acacuaaaagucuggccc

SEQ ID NO: 2151655 - RNA, 13 nt, Human herpesvirus 8 [Kaposi`s sarcoma-associated h
auagcgcucugcc

SEQ ID NO: 2151656 - RNA, 20 nt, Human herpesvirus 8 [Kaposi`s sarcoma-associated h
acauugaggaccuugucaca

SEQ ID NO: 2151657 - RNA, 19 nt, Human herpesvirus 8 [Kaposi`s sarcoma-associated h
acagucuguaaagaaagua

SEQ ID NO: 2151658 - RNA, 23 nt, Human herpesvirus 8 [Kaposi`s sarcoma-associated h
cuggacaaugggaucgaacagaa

SEQ ID NO: 2151659 - RNA, 20 nt, Human herpesvirus 8 [Kaposi`s sarcoma-associated h
gagucgccgguagcugccug

SEQ ID NO: 2151660 - RNA, 20 nt, Human herpesvirus 8 [Kaposi`s sarcoma-associated h
ggaucuucucauucagagac

SEQ ID NO: 2151661 - RNA, 17 nt, Human herpesvirus 8 [Kaposi`s sarcoma-associated h
cuaugggaaugugccua

SEQ ID NO: 2151662 - RNA, 22 nt, Human herpesvirus 8 [Kaposi`s sarcoma-associated h
cucugcggcuuuguuaccuggc

SEQ ID NO: 2151663 - RNA, 13 nt, Human herpesvirus 8 [Kaposi`s sarcoma-associated h
ggauccacucagg

SEQ ID NO: 2151664 - RNA, 22 nt, Human herpesvirus 8 [Kaposi`s sarcoma-associated h
cccagugaguccuggcccccgg

SEQ ID NO: 2151665 - RNA, 18 nt, Human herpesvirus 8 [Kaposi`s sarcoma-associated h
cagggugcggugcugccc

SEQ ID NO: 2151666 - RNA, 15 nt, Human herpesvirus 8 [Kaposi`s sarcoma-associated h
cauccuaggugacug

SEQ ID NO: 2151667 - RNA, 17 nt, Human herpesvirus 8 [Kaposi`s sarcoma-associated h
guagaggggguggaaaa

SEQ ID NO: 2151668 - RNA, 14 nt, Human herpesvirus 8 [Kaposi`s sarcoma-associated h
gcccuccugggcca

SEQ ID NO: 2151669 - RNA, 19 nt, Human herpesvirus 8 [Kaposi`s sarcoma-associated h
ugucgcaggccgaauaccu

SEQ ID NO: 2151670 - RNA, 14 nt, Human herpesvirus 8 [Kaposi`s sarcoma-associated h
agagacccugggcg

SEQ ID NO: 2151671 - RNA, 13 nt, Human herpesvirus 8 [Kaposi`s sarcoma-associated h
gccucugaagcac

SEQ ID NO: 2151672 - RNA, 21 nt, Human herpesvirus 8 [Kaposi`s sarcoma-associated h
cacagaaacucccccaaccuc

SEQ ID NO: 2151673 - RNA, 13 nt, Human herpesvirus 8 [Kaposi`s sarcoma-associated h
uggccgcauuugg

SEQ ID NO: 2151674 - RNA, 15 nt, Human herpesvirus 8 [Kaposi`s sarcoma-associated h
cgcugcgucucccuc

SEQ ID NO: 2151675 - RNA, 23 nt, Human herpesvirus 8 [Kaposi`s sarcoma-associated h
ugagggaguguuuuuugccaugg

SEQ ID NO: 2151676 - RNA, 14 nt, Human herpesvirus 8 [Kaposi`s sarcoma-associated h
cagguggaggcuug

SEQ ID NO: 2151677 - RNA, 18 nt, Human herpesvirus 8 [Kaposi`s sarcoma-associated h
gggcuguucucgccugga

SEQ ID NO: 2151678 - RNA, 17 nt, Human herpesvirus 8 [Kaposi`s sarcoma-associated h
auuuccugcugucuauc

SEQ ID NO: 2151679 - RNA, 17 nt, Human herpesvirus 8 [Kaposi`s sarcoma-associated h
ggacacugaacccuggg

SEQ ID NO: 2151680 - RNA, 20 nt, Human herpesvirus 8 [Kaposi`s sarcoma-associated h
caagcuugagcuuuucaaag

SEQ ID NO: 2151681 - RNA, 18 nt, Human herpesvirus 8 [Kaposi`s sarcoma-associated h
caaucuggauguguaucu

SEQ ID NO: 2151682 - RNA, 14 nt, Human herpesvirus 8 [Kaposi`s sarcoma-associated h
cacaucugcugucu

SEQ ID NO: 2151683 - RNA, 14 nt, Human herpesvirus 8 [Kaposi`s sarcoma-associated h
cauucccgguccca

SEQ ID NO: 2151684 - RNA, 21 nt, Human herpesvirus 8 [Kaposi`s sarcoma-associated h
ucaaccgucuccgccagggac

SEQ ID NO: 2151685 - RNA, 17 nt, Human herpesvirus 8 [Kaposi`s sarcoma-associated h
aggcaucggcagccucu

SEQ ID NO: 2151686 - RNA, 22 nt, Human herpesvirus 8 [Kaposi`s sarcoma-associated h
cgccuggagcagcgccagugga

SEQ ID NO: 2151687 - RNA, 18 nt, Human herpesvirus 8 [Kaposi`s sarcoma-associated h
aguggcugaucucagagg

SEQ ID NO: 2151688 - RNA, 16 nt, Human herpesvirus 8 [Kaposi`s sarcoma-associated h
gacuacgcucaccauc

SEQ ID NO: 2151689 - RNA, 22 nt, Human herpesvirus 8 [Kaposi`s sarcoma-associated h
uccucuaucagcugcagccagg

SEQ ID NO: 2151690 - RNA, 18 nt, Human herpesvirus 8 [Kaposi`s sarcoma-associated h
ugcuggaucccagugccu

SEQ ID NO: 2151691 - RNA, 13 nt, Human herpesvirus 8 [Kaposi`s sarcoma-associated h
gcuguggcaccaa

SEQ ID NO: 2151692 - RNA, 22 nt, Human herpesvirus 8 [Kaposi`s sarcoma-associated h
guagggcuuuacccucuggccu

SEQ ID NO: 2151693 - RNA, 15 nt, Human herpesvirus 8 [Kaposi`s sarcoma-associated h
ccacccagcuacugg

SEQ ID NO: 2151694 - RNA, 14 nt, Human herpesvirus 8 [Kaposi`s sarcoma-associated h
cccagcgacucuca

SEQ ID NO: 2151695 - RNA, 13 nt, Human herpesvirus 8 [Kaposi`s sarcoma-associated h
uccccaauuucag

SEQ ID NO: 2151696 - RNA, 14 nt, Human herpesvirus 8 [Kaposi`s sarcoma-associated h
cauccgcugccacc

SEQ ID NO: 2151697 - RNA, 21 nt, Human herpesvirus 8 [Kaposi`s sarcoma-associated h
aaagcagcgcccacuggugua

SEQ ID NO: 2151698 - RNA, 23 nt, Human herpesvirus 8 [Kaposi`s sarcoma-associated h
gcgccacucccaccauguugaag

SEQ ID NO: 2151699 - RNA, 14 nt, Human herpesvirus 8 [Kaposi`s sarcoma-associated h
ggagaacaugcugg

SEQ ID NO: 2151700 - RNA, 18 nt, Human herpesvirus 8 [Kaposi`s sarcoma-associated h
ugcaaagcuuaaccacau

SEQ ID NO: 2151701 - RNA, 20 nt, Human herpesvirus 8 [Kaposi`s sarcoma-associated h
cugugcccccuuaauccuua

SEQ ID NO: 2151702 - RNA, 13 nt, Human herpesvirus 8 [Kaposi`s sarcoma-associated h
auacaaaaacaca

SEQ ID NO: 2151703 - RNA, 21 nt, Human herpesvirus 8 [Kaposi`s sarcoma-associated h
auacgguguaggcauuuugua

SEQ ID NO: 2151704 - RNA, 22 nt, Human herpesvirus 8 [Kaposi`s sarcoma-associated h
gguggcucgcaugaauacccug

SEQ ID NO: 2151705 - RNA, 21 nt, Human herpesvirus 8 [Kaposi`s sarcoma-associated h
aggaacagauuauuuuccuuc

SEQ ID NO: 2151706 - RNA, 14 nt, Human herpesvirus 8 [Kaposi`s sarcoma-associated h
gccgggugaggcca

SEQ ID NO: 2151707 - RNA, 15 nt, Human herpesvirus 8 [Kaposi`s sarcoma-associated h
uaguucaacugcauu

SEQ ID NO: 2151708 - RNA, 13 nt, Human herpesvirus 8 [Kaposi`s sarcoma-associated h
caaggcgggccag

SEQ ID NO: 2151709 - RNA, 16 nt, Human herpesvirus 8 [Kaposi`s sarcoma-associated h
accugauacgccacgg

SEQ ID NO: 2151710 - RNA, 19 nt, Human herpesvirus 8 [Kaposi`s sarcoma-associated h
gauuugccccauggggauc

SEQ ID NO: 2151711 - RNA, 23 nt, Human herpesvirus 8 [Kaposi`s sarcoma-associated h
caucugcugucuaguggagaggg

SEQ ID NO: 2151712 - RNA, 17 nt, Human herpesvirus 8 [Kaposi`s sarcoma-associated h
gucacaguucagauggc

SEQ ID NO: 2151713 - RNA, 15 nt, Human herpesvirus 8 [Kaposi`s sarcoma-associated h
gcuuugcagccaggu

SEQ ID NO: 2151714 - RNA, 18 nt, Human herpesvirus 8 [Kaposi`s sarcoma-associated h
gcccuccugggccaggca

SEQ ID NO: 2151715 - RNA, 17 nt, Human herpesvirus 8 [Kaposi`s sarcoma-associated h
caaggcgcggacaggca

SEQ ID NO: 2151716 - RNA, 12 nt, Human herpesvirus 8 [Kaposi`s sarcoma-associated h
uggcaugcuggg

SEQ ID NO: 2151717 - RNA, 20 nt, Human herpesvirus 8 [Kaposi`s sarcoma-associated h
gaaacuggguguaagcugua

SEQ ID NO: 2151718 - RNA, 13 nt, Human herpesvirus 8 [Kaposi`s sarcoma-associated h
ccuaucgcacaga

SEQ ID NO: 2151719 - RNA, 19 nt, Human herpesvirus 8 [Kaposi`s sarcoma-associated h
uggcagcuuggugaagcag

SEQ ID NO: 2151720 - RNA, 19 nt, Human herpesvirus 8 [Kaposi`s sarcoma-associated h
auacaaacaacauaaacau

SEQ ID NO: 2151721 - RNA, 16 nt, Human herpesvirus 8 [Kaposi`s sarcoma-associated h
cccgugcccaggccgc

SEQ ID NO: 2151722 - RNA, 19 nt, Human herpesvirus 8 [Kaposi`s sarcoma-associated h
gcgcguaugggaacacaau

SEQ ID NO: 2151723 - RNA, 14 nt, Human herpesvirus 8 [Kaposi`s sarcoma-associated h
aacagaagacccag

SEQ ID NO: 2151724 - RNA, 17 nt, Human herpesvirus 8 [Kaposi`s sarcoma-associated h
gcggcuaggcacccgga

SEQ ID NO: 2151725 - RNA, 15 nt, Human herpesvirus 8 [Kaposi`s sarcoma-associated h
uaccucccuuugucu

SEQ ID NO: 2151726 - RNA, 18 nt, Human herpesvirus 8 [Kaposi`s sarcoma-associated h
gccucgagggcggccagu

SEQ ID NO: 2151727 - RNA, 15 nt, Human herpesvirus 8 [Kaposi`s sarcoma-associated h
cagcgaaaccccccu

SEQ ID NO: 2151728 - RNA, 16 nt, Human herpesvirus 8 [Kaposi`s sarcoma-associated h
cccgugauccaggagc

SEQ ID NO: 2151729 - RNA, 20 nt, Human herpesvirus 8 [Kaposi`s sarcoma-associated h
uuggaguuaaagcugucacu

SEQ ID NO: 2151730 - RNA, 21 nt, Human herpesvirus 8 [Kaposi`s sarcoma-associated h
ugucacaaauuuuaacagcca

SEQ ID NO: 2151731 - RNA, 14 nt, Human herpesvirus 8 [Kaposi`s sarcoma-associated h
gcaguggacacagu

SEQ ID NO: 2151732 - RNA, 21 nt, Human herpesvirus 8 [Kaposi`s sarcoma-associated h
aggaagugucgggaggcaugu

SEQ ID NO: 2151733 - RNA, 23 nt, Human herpesvirus 8 [Kaposi`s sarcoma-associated h
ggacagcaacacccagcuagcag

SEQ ID NO: 2151734 - RNA, 22 nt, Human herpesvirus 8 [Kaposi`s sarcoma-associated h
cgccauuuuuguggcugccugg

SEQ ID NO: 2151735 - RNA, 17 nt, Human herpesvirus 8 [Kaposi`s sarcoma-associated h
acagugccugggugcug

SEQ ID NO: 2151736 - RNA, 20 nt, Human herpesvirus 8 [Kaposi`s sarcoma-associated h
ucuauccaagugcacacucg

SEQ ID NO: 2151737 - RNA, 18 nt, Human herpesvirus 8 [Kaposi`s sarcoma-associated h
gcucgagaacugucgaga

SEQ ID NO: 2151738 - RNA, 21 nt, Human herpesvirus 8 [Kaposi`s sarcoma-associated h
cugcagcuggacuggagucag

SEQ ID NO: 2151739 - RNA, 21 nt, Human herpesvirus 8 [Kaposi`s sarcoma-associated h
uccacagagccuaccccaacu

SEQ ID NO: 2151740 - RNA, 20 nt, Human herpesvirus 8 [Kaposi`s sarcoma-associated h
gcgcaggagucagagcagug

SEQ ID NO: 2151741 - RNA, 15 nt, Human herpesvirus 8 [Kaposi`s sarcoma-associated h
gcugcagccaggaag

SEQ ID NO: 2151742 - RNA, 15 nt, Human herpesvirus 8 [Kaposi`s sarcoma-associated h
ccaugagccucccuu

SEQ ID NO: 2151743 - RNA, 16 nt, Human herpesvirus 8 [Kaposi`s sarcoma-associated h
agccucuguacaugga

SEQ ID NO: 2151744 - RNA, 18 nt, Human herpesvirus 8 [Kaposi`s sarcoma-associated h
gcggggacguucaccgug

SEQ ID NO: 2151745 - RNA, 16 nt, Human herpesvirus 8 [Kaposi`s sarcoma-associated h
augggucaugcgucgc

SEQ ID NO: 2151746 - RNA, 17 nt, Human herpesvirus 8 [Kaposi`s sarcoma-associated h
cgucuugaccucuccgg

SEQ ID NO: 2151747 - RNA, 20 nt, Human herpesvirus 8 [Kaposi`s sarcoma-associated h
ugggccaugacaacugccac

SEQ ID NO: 2151748 - RNA, 13 nt, Human herpesvirus 8 [Kaposi`s sarcoma-associated h
gguuacugccaga

SEQ ID NO: 2151749 - RNA, 18 nt, Human herpesvirus 8 [Kaposi`s sarcoma-associated h
caagcagcaaacggagac

SEQ ID NO: 2151750 - RNA, 16 nt, Human herpesvirus 8 [Kaposi`s sarcoma-associated h
cgacagagccagccug

SEQ ID NO: 2151751 - RNA, 13 nt, Human herpesvirus 8 [Kaposi`s sarcoma-associated h
gucccacugcugc

SEQ ID NO: 2151752 - RNA, 13 nt, Human herpesvirus 8 [Kaposi`s sarcoma-associated h
ccuggugaggaag

SEQ ID NO: 2151753 - RNA, 17 nt, Human herpesvirus 8 [Kaposi`s sarcoma-associated h
ugagagacugcaggcca

SEQ ID NO: 2151754 - RNA, 17 nt, Human herpesvirus 8 [Kaposi`s sarcoma-associated h
gcucaucggacaggacg

SEQ ID NO: 2151755 - RNA, 20 nt, Human herpesvirus 8 [Kaposi`s sarcoma-associated h
cgaacagguugccauggaga

SEQ ID NO: 2151756 - RNA, 13 nt, Human herpesvirus 8 [Kaposi`s sarcoma-associated h
agucuucuuguca

SEQ ID NO: 2151757 - RNA, 21 nt, Human herpesvirus 8 [Kaposi`s sarcoma-associated h
ucgcugcaccuggaccccgcg

SEQ ID NO: 2151758 - RNA, 18 nt, Human herpesvirus 8 [Kaposi`s sarcoma-associated h
cucgccucccaacaugua

SEQ ID NO: 2151759 - RNA, 18 nt, Human herpesvirus 8 [Kaposi`s sarcoma-associated h
gcggggacggggggugag

SEQ ID NO: 2151760 - RNA, 22 nt, Human herpesvirus 8 [Kaposi`s sarcoma-associated h
uugcaccaagcacaacauuaaa

SEQ ID NO: 2151761 - RNA, 20 nt, Human herpesvirus 8 [Kaposi`s sarcoma-associated h
agguuguaacacaaaagcaa

SEQ ID NO: 2151762 - RNA, 23 nt, Human herpesvirus 8 [Kaposi`s sarcoma-associated h
guuuauaaugccaauauaucagc

SEQ ID NO: 2151763 - RNA, 17 nt, Human herpesvirus 8 [Kaposi`s sarcoma-associated h
cuuccauuuuccaaggc

SEQ ID NO: 2151764 - RNA, 16 nt, Human herpesvirus 8 [Kaposi`s sarcoma-associated h
gcaccuuaaacacaac

SEQ ID NO: 2151765 - RNA, 15 nt, Human herpesvirus 8 [Kaposi`s sarcoma-associated h
cuguaugacugcccu

SEQ ID NO: 2151766 - RNA, 21 nt, Human herpesvirus 8 [Kaposi`s sarcoma-associated h
acgcagacccggcaacacugg

SEQ ID NO: 2151767 - RNA, 13 nt, Human herpesvirus 8 [Kaposi`s sarcoma-associated h
guggacaccacau

SEQ ID NO: 2151768 - RNA, 15 nt, Human herpesvirus 8 [Kaposi`s sarcoma-associated h
auaaaaugggccaug

SEQ ID NO: 2151769 - RNA, 14 nt, Human herpesvirus 8 [Kaposi`s sarcoma-associated h
cuaccgucuaccug

SEQ ID NO: 2151770 - RNA, 18 nt, Human herpesvirus 8 [Kaposi`s sarcoma-associated h
ugcuuccaauugaaggag

SEQ ID NO: 2151771 - RNA, 22 nt, Human herpesvirus 8 [Kaposi`s sarcoma-associated h
agggcggaaaaauaaauuuucc

SEQ ID NO: 2151772 - RNA, 15 nt, Human herpesvirus 8 [Kaposi`s sarcoma-associated h
ccuccugggccaggc

SEQ ID NO: 2151773 - RNA, 18 nt, Human herpesvirus 8 [Kaposi`s sarcoma-associated h
guggauuuccuuucugag

SEQ ID NO: 2151774 - RNA, 23 nt, Human herpesvirus 8 [Kaposi`s sarcoma-associated h
gaaaauggcacacgguuacuagc

SEQ ID NO: 2151775 - RNA, 17 nt, Human herpesvirus 8 [Kaposi`s sarcoma-associated h
acgccggcaucguggaa

SEQ ID NO: 2151776 - RNA, 20 nt, Human herpesvirus 8 [Kaposi`s sarcoma-associated h
cuuacugucagauuucucua

SEQ ID NO: 2151777 - RNA, 18 nt, Human herpesvirus 8 [Kaposi`s sarcoma-associated h
cgguaguugugcuuccug

SEQ ID NO: 2151778 - RNA, 13 nt, Human herpesvirus 8 [Kaposi`s sarcoma-associated h
ccagcaugccugc

SEQ ID NO: 2151779 - RNA, 12 nt, Human herpesvirus 8 [Kaposi`s sarcoma-associated h
ggugggugggga

SEQ ID NO: 2151780 - RNA, 18 nt, Human herpesvirus 8 [Kaposi`s sarcoma-associated h
ucagggugccggaguuca

SEQ ID NO: 2151781 - RNA, 20 nt, Human herpesvirus 8 [Kaposi`s sarcoma-associated h
uaacccgcuccgccacgcag

SEQ ID NO: 2151782 - RNA, 19 nt, Human herpesvirus 8 [Kaposi`s sarcoma-associated h
ccacauuucccccaucguc

SEQ ID NO: 2151783 - RNA, 14 nt, Human herpesvirus 8 [Kaposi`s sarcoma-associated h
caggcaucggcagc

SEQ ID NO: 2151784 - RNA, 19 nt, Human herpesvirus 8 [Kaposi`s sarcoma-associated h
uaaccagcuacgcacugag

SEQ ID NO: 2151785 - RNA, 20 nt, Human herpesvirus 8 [Kaposi`s sarcoma-associated h
acgggaggcuugguggccau

SEQ ID NO: 2151786 - RNA, 21 nt, Human herpesvirus 8 [Kaposi`s sarcoma-associated h
cacccaccuacuuccagggcc

SEQ ID NO: 2151787 - RNA, 15 nt, Human herpesvirus 8 [Kaposi`s sarcoma-associated h
uccugcauuuggaca

SEQ ID NO: 2151788 - RNA, 22 nt, Human herpesvirus 8 [Kaposi`s sarcoma-associated h
ggccagagguuugaggcgcuga

SEQ ID NO: 2151789 - RNA, 19 nt, Human herpesvirus 8 [Kaposi`s sarcoma-associated h
gaacuggccgcccuucagu

SEQ ID NO: 2151790 - RNA, 21 nt, Human herpesvirus 8 [Kaposi`s sarcoma-associated h
gggacuugauaaucuccugga

SEQ ID NO: 2151791 - RNA, 19 nt, Human herpesvirus 8 [Kaposi`s sarcoma-associated h
cgcggaccucaaagaagag

SEQ ID NO: 2151792 - RNA, 16 nt, Human herpesvirus 8 [Kaposi`s sarcoma-associated h
gacgaggaugaggaag

SEQ ID NO: 2151793 - RNA, 18 nt, Human herpesvirus 8 [Kaposi`s sarcoma-associated h
gaaaaucuggcaugcugg

SEQ ID NO: 2151794 - RNA, 18 nt, Human herpesvirus 8 [Kaposi`s sarcoma-associated h
ccgcaaggagcagccugc

SEQ ID NO: 2151795 - RNA, 10 nt, Human herpesvirus 8 [Kaposi`s sarcoma-associated h
gauuaagcaa

SEQ ID NO: 2151796 - RNA, 23 nt, Human herpesvirus 8 [Kaposi`s sarcoma-associated h
gcauccuaucgcacagacacgag

SEQ ID NO: 2151797 - RNA, 15 nt, Human herpesvirus 8 [Kaposi`s sarcoma-associated h
aacagaagacccaga

SEQ ID NO: 2151798 - RNA, 15 nt, Human herpesvirus 8 [Kaposi`s sarcoma-associated h
uuaagacaaacacug

SEQ ID NO: 2151799 - RNA, 21 nt, Human herpesvirus 8 [Kaposi`s sarcoma-associated h
cccacguggugcugccuagga

SEQ ID NO: 2151800 - RNA, 15 nt, Human herpesvirus 8 [Kaposi`s sarcoma-associated h
ucgcccgccugugug

SEQ ID NO: 2151801 - RNA, 19 nt, Human herpesvirus 8 [Kaposi`s sarcoma-associated h
agugcacacucgcuguccu

SEQ ID NO: 2151802 - RNA, 14 nt, Human herpesvirus 8 [Kaposi`s sarcoma-associated h
acauuaaacacaua

SEQ ID NO: 2151803 - RNA, 19 nt, Human herpesvirus 8 [Kaposi`s sarcoma-associated h
caaaccuggugaggaagca

SEQ ID NO: 2151804 - RNA, 21 nt, Human herpesvirus 8 [Kaposi`s sarcoma-associated h
gggaggcauguuuagggcucg

SEQ ID NO: 2151805 - RNA, 18 nt, Human herpesvirus 8 [Kaposi`s sarcoma-associated h
ccauggcagcccagccuc

SEQ ID NO: 2151806 - RNA, 23 nt, Human herpesvirus 8 [Kaposi`s sarcoma-associated h
ccagggaagaugaaggacacggg

SEQ ID NO: 2151807 - RNA, 17 nt, Human herpesvirus 8 [Kaposi`s sarcoma-associated h
gcuaacuugccggacag

SEQ ID NO: 2151808 - RNA, 23 nt, Human herpesvirus 8 [Kaposi`s sarcoma-associated h
gcgcagauuugugcggcgcagca

SEQ ID NO: 2151809 - RNA, 15 nt, Human herpesvirus 8 [Kaposi`s sarcoma-associated h
gacauguggagccac

SEQ ID NO: 2151810 - RNA, 23 nt, Human herpesvirus 8 [Kaposi`s sarcoma-associated h
ugacgggguaucgccgccagagg

SEQ ID NO: 2151811 - RNA, 20 nt, Human herpesvirus 8 [Kaposi`s sarcoma-associated h
uccucuaguuuucgggugau

SEQ ID NO: 2151812 - RNA, 12 nt, Human herpesvirus 8 [Kaposi`s sarcoma-associated h
gggugcacugag

SEQ ID NO: 2151813 - RNA, 15 nt, Human herpesvirus 8 [Kaposi`s sarcoma-associated h
cuuauaacagugcuc

SEQ ID NO: 2151814 - RNA, 12 nt, Human herpesvirus 8 [Kaposi`s sarcoma-associated h
cgcucugugccc

SEQ ID NO: 2151815 - RNA, 18 nt, Human herpesvirus 8 [Kaposi`s sarcoma-associated h
aguguuaucuuugcagug

SEQ ID NO: 2151816 - RNA, 12 nt, Human herpesvirus 8 [Kaposi`s sarcoma-associated h
cuuuuauugugg

SEQ ID NO: 2151817 - RNA, 14 nt, Human herpesvirus 8 [Kaposi`s sarcoma-associated h
caggccaagaucca

SEQ ID NO: 2151818 - RNA, 16 nt, Human herpesvirus 8 [Kaposi`s sarcoma-associated h
gucgcucuucaguuau

SEQ ID NO: 2151819 - RNA, 13 nt, Human herpesvirus 8 [Kaposi`s sarcoma-associated h
guucaucagccuc

SEQ ID NO: 2151820 - RNA, 17 nt, Human herpesvirus 8 [Kaposi`s sarcoma-associated h
gcugccacugccacgga

SEQ ID NO: 2151821 - RNA, 17 nt, Human herpesvirus 8 [Kaposi`s sarcoma-associated h
agcucaucaaugggaga

SEQ ID NO: 2151822 - RNA, 19 nt, Human herpesvirus 8 [Kaposi`s sarcoma-associated h
agggcaugaggcuggaccu

SEQ ID NO: 2151823 - RNA, 13 nt, Human herpesvirus 8 [Kaposi`s sarcoma-associated h
cgggcuacguggu

SEQ ID NO: 2151824 - RNA, 20 nt, Human herpesvirus 8 [Kaposi`s sarcoma-associated h
ccggaugcgggcgauuacag

SEQ ID NO: 2151825 - RNA, 15 nt, Human herpesvirus 8 [Kaposi`s sarcoma-associated h
ccauguucagguggu

SEQ ID NO: 2151826 - RNA, 20 nt, Human herpesvirus 8 [Kaposi`s sarcoma-associated h
agcugcugguucaggauuuc

SEQ ID NO: 2151827 - RNA, 15 nt, Human herpesvirus 8 [Kaposi`s sarcoma-associated h
cuuuuuaacuucuga

SEQ ID NO: 2151828 - RNA, 23 nt, Human herpesvirus 8 [Kaposi`s sarcoma-associated h
caacuauuuccuuuuuucaaaag

SEQ ID NO: 2151829 - RNA, 13 nt, Human herpesvirus 8 [Kaposi`s sarcoma-associated h
cugcugcagcugg

SEQ ID NO: 2151830 - RNA, 18 nt, Human herpesvirus 8 [Kaposi`s sarcoma-associated h
ucgcgacagacugccucc

SEQ ID NO: 2151831 - RNA, 16 nt, Human herpesvirus 8 [Kaposi`s sarcoma-associated h
gccacguggagccaac

SEQ ID NO: 2151832 - RNA, 13 nt, Human herpesvirus 8 [Kaposi`s sarcoma-associated h
guaucuuaaagcg

SEQ ID NO: 2151833 - RNA, 18 nt, Human herpesvirus 8 [Kaposi`s sarcoma-associated h
cccuuaucagcucacugu

SEQ ID NO: 2151834 - RNA, 21 nt, Human herpesvirus 8 [Kaposi`s sarcoma-associated h
cgccauuuuuguggcugccug

SEQ ID NO: 2151835 - RNA, 17 nt, Human herpesvirus 8 [Kaposi`s sarcoma-associated h
cuuaguuacgcagaccc

SEQ ID NO: 2151836 - RNA, 13 nt, Human herpesvirus 8 [Kaposi`s sarcoma-associated h
acccgagccacau

SEQ ID NO: 2151837 - RNA, 13 nt, Human herpesvirus 8 [Kaposi`s sarcoma-associated h
ccugucgaggaag

SEQ ID NO: 2151838 - RNA, 21 nt, Human herpesvirus 8 [Kaposi`s sarcoma-associated h
aagcgucugggucguggcgcc

SEQ ID NO: 2151839 - RNA, 22 nt, Human herpesvirus 8 [Kaposi`s sarcoma-associated h
ucgcgcgaacacguaccugacc

SEQ ID NO: 2151840 - RNA, 15 nt, Human herpesvirus 8 [Kaposi`s sarcoma-associated h
ggcugccuggacagu

SEQ ID NO: 2151841 - RNA, 15 nt, Human herpesvirus 8 [Kaposi`s sarcoma-associated h
agacgcgcaaagggg

SEQ ID NO: 2151842 - RNA, 15 nt, Human herpesvirus 8 [Kaposi`s sarcoma-associated h
auagugugcguuucu

SEQ ID NO: 2151843 - RNA, 16 nt, Human herpesvirus 8 [Kaposi`s sarcoma-associated h
caacgccaugcagcgg

SEQ ID NO: 2151844 - RNA, 17 nt, Human herpesvirus 8 [Kaposi`s sarcoma-associated h
acgagguugggaagagg

SEQ ID NO: 2151845 - RNA, 21 nt, Human herpesvirus 8 [Kaposi`s sarcoma-associated h
uacggaagggggcucccuggg

SEQ ID NO: 2151846 - RNA, 17 nt, Human herpesvirus 8 [Kaposi`s sarcoma-associated h
gccucucaucauuucug

SEQ ID NO: 2151847 - RNA, 13 nt, Human herpesvirus 8 [Kaposi`s sarcoma-associated h
guuuugcccugcc

SEQ ID NO: 2151848 - RNA, 18 nt, Human herpesvirus 8 [Kaposi`s sarcoma-associated h
ucgcccgucacuggaugu

SEQ ID NO: 2151849 - RNA, 14 nt, Human herpesvirus 8 [Kaposi`s sarcoma-associated h
gucugugcccugcg

SEQ ID NO: 2151850 - RNA, 24 nt, Human herpesvirus 8 [Kaposi`s sarcoma-associated h
gcccgccgcaaggagcagccugca

SEQ ID NO: 2151851 - RNA, 17 nt, Human herpesvirus 8 [Kaposi`s sarcoma-associated h
cagcagcaagcacagaa

SEQ ID NO: 2151852 - RNA, 14 nt, Human herpesvirus 8 [Kaposi`s sarcoma-associated h
augugacugaacau

SEQ ID NO: 2151853 - RNA, 18 nt, Human herpesvirus 8 [Kaposi`s sarcoma-associated h
uaauguguuuuauguuua

SEQ ID NO: 2151854 - RNA, 19 nt, Human herpesvirus 8 [Kaposi`s sarcoma-associated h
cgcugucccgugcccaggc

SEQ ID NO: 2151855 - RNA, 17 nt, Human herpesvirus 8 [Kaposi`s sarcoma-associated h
augcucaggucugucac

SEQ ID NO: 2151856 - RNA, 14 nt, Human herpesvirus 8 [Kaposi`s sarcoma-associated h
gagccuucacggca

SEQ ID NO: 2151857 - RNA, 15 nt, Human herpesvirus 8 [Kaposi`s sarcoma-associated h
cggugcugcccagga

SEQ ID NO: 2151858 - RNA, 14 nt, Human herpesvirus 8 [Kaposi`s sarcoma-associated h
cucgcuacacggag

SEQ ID NO: 2151859 - RNA, 16 nt, Human herpesvirus 8 [Kaposi`s sarcoma-associated h
auuaaagcacucggug

SEQ ID NO: 2151860 - RNA, 15 nt, Human herpesvirus 8 [Kaposi`s sarcoma-associated h
gccaacccucagugu

SEQ ID NO: 2151861 - RNA, 19 nt, Human herpesvirus 8 [Kaposi`s sarcoma-associated h
auguccugauuuuccaggg

SEQ ID NO: 2151862 - RNA, 12 nt, Human herpesvirus 8 [Kaposi`s sarcoma-associated h
ccccgugaaguu

SEQ ID NO: 2151863 - RNA, 15 nt, Human herpesvirus 8 [Kaposi`s sarcoma-associated h
aaagccgagccacaa

SEQ ID NO: 2151864 - RNA, 21 nt, Human herpesvirus 8 [Kaposi`s sarcoma-associated h
ccgucgccaaacaggcgcaga

SEQ ID NO: 2151865 - RNA, 16 nt, Human herpesvirus 8 [Kaposi`s sarcoma-associated h
ucacccgagccacauc

SEQ ID NO: 2151866 - RNA, 20 nt, Human herpesvirus 8 [Kaposi`s sarcoma-associated h
ccucuggccugugcccaaau

SEQ ID NO: 2151867 - RNA, 18 nt, Human herpesvirus 8 [Kaposi`s sarcoma-associated h
augcuagcgugucugaaa

SEQ ID NO: 2151868 - RNA, 17 nt, Human herpesvirus 8 [Kaposi`s sarcoma-associated h
ucaucguggugcccugc

SEQ ID NO: 2151869 - RNA, 13 nt, Human herpesvirus 8 [Kaposi`s sarcoma-associated h
uccugugggcuaa

SEQ ID NO: 2151870 - RNA, 17 nt, Human herpesvirus 8 [Kaposi`s sarcoma-associated h
accagcgguaaaggcgc

SEQ ID NO: 2151871 - RNA, 23 nt, Human herpesvirus 8 [Kaposi`s sarcoma-associated h
cagccacaucagcuuggcgaccu

SEQ ID NO: 2151872 - RNA, 22 nt, Human herpesvirus 8 [Kaposi`s sarcoma-associated h
aucucgaaaaaaauaaugcaga

SEQ ID NO: 2151873 - RNA, 20 nt, Human herpesvirus 8 [Kaposi`s sarcoma-associated h
gcgccucgcagacgaccccc

SEQ ID NO: 2151874 - RNA, 20 nt, Human herpesvirus 8 [Kaposi`s sarcoma-associated h
ugggagcggguugucuacau

SEQ ID NO: 2151875 - RNA, 20 nt, Human herpesvirus 8 [Kaposi`s sarcoma-associated h
cuuauugaagcauguugcgc

SEQ ID NO: 2151876 - RNA, 16 nt, Human herpesvirus 8 [Kaposi`s sarcoma-associated h
aagaaccaaaggacau

SEQ ID NO: 2151877 - RNA, 21 nt, Human herpesvirus 8 [Kaposi`s sarcoma-associated h
gugcguuugcagugugcagua

SEQ ID NO: 2151878 - RNA, 13 nt, Human herpesvirus 8 [Kaposi`s sarcoma-associated h
ccagcaaagcaca

SEQ ID NO: 2151879 - RNA, 13 nt, Human herpesvirus 8 [Kaposi`s sarcoma-associated h
acguggugcugcc

SEQ ID NO: 2151880 - RNA, 17 nt, Human herpesvirus 8 [Kaposi`s sarcoma-associated h
gugacggugacauugca

SEQ ID NO: 2151881 - RNA, 15 nt, Human herpesvirus 8 [Kaposi`s sarcoma-associated h
gcucugcgugcugga

SEQ ID NO: 2151882 - RNA, 17 nt, Human herpesvirus 8 [Kaposi`s sarcoma-associated h
cagggcacccuccccca

SEQ ID NO: 2151883 - RNA, 16 nt, Human herpesvirus 8 [Kaposi`s sarcoma-associated h
accggaguagugcaag

SEQ ID NO: 2151884 - RNA, 21 nt, Human herpesvirus 8 [Kaposi`s sarcoma-associated h
gcacggugaacguccccgcgu

SEQ ID NO: 2151885 - RNA, 17 nt, Human herpesvirus 8 [Kaposi`s sarcoma-associated h
ccgcguuagcagccaug

SEQ ID NO: 2151886 - RNA, 19 nt, Human herpesvirus 8 [Kaposi`s sarcoma-associated h
ccagcaauaaacccacagc

SEQ ID NO: 2151887 - RNA, 16 nt, Human herpesvirus 8 [Kaposi`s sarcoma-associated h
cucgcaugaauacccu

SEQ ID NO: 2151888 - RNA, 16 nt, Human herpesvirus 8 [Kaposi`s sarcoma-associated h
ucagaaaagggcaugu

SEQ ID NO: 2151889 - RNA, 21 nt, Human herpesvirus 8 [Kaposi`s sarcoma-associated h
caugccaucuuugggcuagug

SEQ ID NO: 2151890 - RNA, 20 nt, Human herpesvirus 8 [Kaposi`s sarcoma-associated h
cacccuauccaucagucagg

SEQ ID NO: 2151891 - RNA, 22 nt, Human herpesvirus 8 [Kaposi`s sarcoma-associated h
uccgucauucacccgagccaca

SEQ ID NO: 2151892 - RNA, 12 nt, Human herpesvirus 8 [Kaposi`s sarcoma-associated h
uugauugugacu

SEQ ID NO: 2151893 - RNA, 19 nt, Human herpesvirus 8 [Kaposi`s sarcoma-associated h
ugcuaggauucgugcagcc

SEQ ID NO: 2151894 - RNA, 21 nt, Human herpesvirus 8 [Kaposi`s sarcoma-associated h
caaugggaucgaacagaagac

SEQ ID NO: 2151895 - RNA, 18 nt, Human herpesvirus 8 [Kaposi`s sarcoma-associated h
uuggcguuuaccugcacu

SEQ ID NO: 2151896 - RNA, 18 nt, Human herpesvirus 8 [Kaposi`s sarcoma-associated h
cagaguccgccaucacca

SEQ ID NO: 2151897 - RNA, 20 nt, Human herpesvirus 8 [Kaposi`s sarcoma-associated h
caaagugagguggcauuugu

SEQ ID NO: 2151898 - RNA, 19 nt, Human herpesvirus 8 [Kaposi`s sarcoma-associated h
uugagaagcaguuucagga

SEQ ID NO: 2151899 - RNA, 21 nt, Human herpesvirus 8 [Kaposi`s sarcoma-associated h
gcugucuaguggagagggcca

SEQ ID NO: 2151900 - RNA, 23 nt, Human herpesvirus 8 [Kaposi`s sarcoma-associated h
aucuccggacuacauccaaauua

SEQ ID NO: 2151901 - RNA, 16 nt, Human herpesvirus 8 [Kaposi`s sarcoma-associated h
cacagucgagccgcca

SEQ ID NO: 2151902 - RNA, 16 nt, Human herpesvirus 8 [Kaposi`s sarcoma-associated h
cacgccauaccccugg

SEQ ID NO: 2151903 - RNA, 17 nt, Human herpesvirus 8 [Kaposi`s sarcoma-associated h
cagugaguccuggcccc

SEQ ID NO: 2151904 - RNA, 21 nt, Human herpesvirus 8 [Kaposi`s sarcoma-associated h
caguguaucccccacaggaca

SEQ ID NO: 2151905 - RNA, 20 nt, Human herpesvirus 8 [Kaposi`s sarcoma-associated h
uuggaugcucugcgugcugg

SEQ ID NO: 2151906 - RNA, 14 nt, Human herpesvirus 8 [Kaposi`s sarcoma-associated h
cuaugggugaccac

SEQ ID NO: 2151907 - RNA, 13 nt, Human herpesvirus 8 [Kaposi`s sarcoma-associated h
agccgccaggaac

SEQ ID NO: 2151908 - RNA, 19 nt, Human herpesvirus 8 [Kaposi`s sarcoma-associated h
agcauuuuaaaaugcguuu

SEQ ID NO: 2151909 - RNA, 15 nt, Human herpesvirus 8 [Kaposi`s sarcoma-associated h
ugggagcugucccac

SEQ ID NO: 2151910 - RNA, 20 nt, Human herpesvirus 8 [Kaposi`s sarcoma-associated h
gauuuugauaugugugccca

SEQ ID NO: 2151911 - RNA, 17 nt, Human herpesvirus 8 [Kaposi`s sarcoma-associated h
aacuaaacauuaccaau

SEQ ID NO: 2151912 - RNA, 16 nt, Human herpesvirus 8 [Kaposi`s sarcoma-associated h
gugucgccagugccug

SEQ ID NO: 2151913 - RNA, 14 nt, Human herpesvirus 8 [Kaposi`s sarcoma-associated h
aagccgagccacaa

SEQ ID NO: 2151914 - RNA, 21 nt, Human herpesvirus 8 [Kaposi`s sarcoma-associated h
aaauuguguguaccuagcccu

SEQ ID NO: 2151915 - RNA, 13 nt, Human herpesvirus 8 [Kaposi`s sarcoma-associated h
cuacgagguuggg

SEQ ID NO: 2151916 - RNA, 18 nt, Human herpesvirus 8 [Kaposi`s sarcoma-associated h
cucaaccggucgcagugg

SEQ ID NO: 2151917 - RNA, 13 nt, Human herpesvirus 8 [Kaposi`s sarcoma-associated h
uuccucuugcgcu

SEQ ID NO: 2151918 - RNA, 23 nt, Human herpesvirus 8 [Kaposi`s sarcoma-associated h
agggugccuuggacggacggcac

SEQ ID NO: 2151919 - RNA, 21 nt, Human herpesvirus 8 [Kaposi`s sarcoma-associated h
acugucuccagaagagcauuu

SEQ ID NO: 2151920 - RNA, 19 nt, Human herpesvirus 8 [Kaposi`s sarcoma-associated h
uacugugaaguuuacauua

SEQ ID NO: 2151921 - RNA, 20 nt, Human herpesvirus 8 [Kaposi`s sarcoma-associated h
cagcauggccuuuuuaagac

SEQ ID NO: 2151922 - RNA, 13 nt, Human herpesvirus 8 [Kaposi`s sarcoma-associated h
gugacccggccug

SEQ ID NO: 2151923 - RNA, 21 nt, Human herpesvirus 8 [Kaposi`s sarcoma-associated h
cggccgcaaucaugccugugg

SEQ ID NO: 2151924 - RNA, 15 nt, Human herpesvirus 8 [Kaposi`s sarcoma-associated h
ccagaaugaaggaca

SEQ ID NO: 2151925 - RNA, 19 nt, Human herpesvirus 8 [Kaposi`s sarcoma-associated h
cagggucucauccgcggca

SEQ ID NO: 2151926 - RNA, 17 nt, Human herpesvirus 8 [Kaposi`s sarcoma-associated h
aucacgccauaccccug

SEQ ID NO: 2151927 - RNA, 17 nt, Human herpesvirus 8 [Kaposi`s sarcoma-associated h
ucaucuacuuuggacag

SEQ ID NO: 2151928 - RNA, 14 nt, Human herpesvirus 8 [Kaposi`s sarcoma-associated h
gaggaaggaugugg

SEQ ID NO: 2151929 - RNA, 20 nt, Human herpesvirus 8 [Kaposi`s sarcoma-associated h
ugaaagcaggacguccaggc

SEQ ID NO: 2151930 - RNA, 14 nt, Human herpesvirus 8 [Kaposi`s sarcoma-associated h
acggaucaggcggg

SEQ ID NO: 2151931 - RNA, 20 nt, Human herpesvirus 8 [Kaposi`s sarcoma-associated h
gaggagggggugggggagac

SEQ ID NO: 2151932 - RNA, 20 nt, Human herpesvirus 8 [Kaposi`s sarcoma-associated h
caauacuuaagucccugaag

SEQ ID NO: 2151933 - RNA, 22 nt, Human herpesvirus 8 [Kaposi`s sarcoma-associated h
aagcacugggauccacugccga

SEQ ID NO: 2151934 - RNA, 20 nt, Human herpesvirus 8 [Kaposi`s sarcoma-associated h
uugccgagcccguuguggca

SEQ ID NO: 2151935 - RNA, 18 nt, Human herpesvirus 8 [Kaposi`s sarcoma-associated h
cuggccugugcccaaauc

SEQ ID NO: 2151936 - RNA, 18 nt, Human herpesvirus 8 [Kaposi`s sarcoma-associated h
uggccacccuggggacug

SEQ ID NO: 2151937 - RNA, 15 nt, Human herpesvirus 8 [Kaposi`s sarcoma-associated h
cuggucgguucacug

SEQ ID NO: 2151938 - RNA, 16 nt, Human herpesvirus 8 [Kaposi`s sarcoma-associated h
ugcaugcucggcaaca

SEQ ID NO: 2151939 - RNA, 20 nt, Human herpesvirus 8 [Kaposi`s sarcoma-associated h
gguuagggucgggugggacg

SEQ ID NO: 2151940 - RNA, 15 nt, Human herpesvirus 8 [Kaposi`s sarcoma-associated h
uaaugguguguuuau

SEQ ID NO: 2151941 - RNA, 21 nt, Human herpesvirus 8 [Kaposi`s sarcoma-associated h
cgcugccagucacgcacuugg

SEQ ID NO: 2151942 - RNA, 22 nt, Human herpesvirus 8 [Kaposi`s sarcoma-associated h
cuagcggcgagauuggaggcac

SEQ ID NO: 2151943 - RNA, 20 nt, Human herpesvirus 8 [Kaposi`s sarcoma-associated h
cugggccacaaaacugccaa

SEQ ID NO: 2151944 - RNA, 12 nt, Human herpesvirus 8 [Kaposi`s sarcoma-associated h
ugauuuuccagg

SEQ ID NO: 2151945 - RNA, 14 nt, Human herpesvirus 8 [Kaposi`s sarcoma-associated h
caccacgccacaac

SEQ ID NO: 2151946 - RNA, 15 nt, Human herpesvirus 8 [Kaposi`s sarcoma-associated h
auuggagcacuuuug

SEQ ID NO: 2151947 - RNA, 16 nt, Human herpesvirus 8 [Kaposi`s sarcoma-associated h
aaggacauuguauaac

SEQ ID NO: 2151948 - RNA, 18 nt, Human herpesvirus 8 [Kaposi`s sarcoma-associated h
augcucaucuacccugau

SEQ ID NO: 2151949 - RNA, 23 nt, Human herpesvirus 8 [Kaposi`s sarcoma-associated h
caacgaccugaugcaggccaccc

SEQ ID NO: 2151950 - RNA, 18 nt, Human herpesvirus 8 [Kaposi`s sarcoma-associated h
ccgugguucaucagccuc

SEQ ID NO: 2151951 - RNA, 20 nt, Human herpesvirus 8 [Kaposi`s sarcoma-associated h
agcacuccuguuagcacauu

SEQ ID NO: 2151952 - RNA, 14 nt, Human herpesvirus 8 [Kaposi`s sarcoma-associated h
caccuggcccaaac

SEQ ID NO: 2151953 - RNA, 23 nt, Human herpesvirus 8 [Kaposi`s sarcoma-associated h
ucguaggccaauacugcccaagu

SEQ ID NO: 2151954 - RNA, 14 nt, Human herpesvirus 8 [Kaposi`s sarcoma-associated h
ugcuucuguuugaa

SEQ ID NO: 2151955 - RNA, 14 nt, Human herpesvirus 8 [Kaposi`s sarcoma-associated h
cgcugcgcauggcu

SEQ ID NO: 2151956 - RNA, 11 nt, Human herpesvirus 8 [Kaposi`s sarcoma-associated h
caugugucuau

SEQ ID NO: 2151957 - RNA, 11 nt, Human herpesvirus 8 [Kaposi`s sarcoma-associated h
gggcaaaacac

SEQ ID NO: 2151958 - RNA, 15 nt, Human herpesvirus 8 [Kaposi`s sarcoma-associated h
cucuuggcuguuaca

SEQ ID NO: 2151959 - RNA, 22 nt, Human herpesvirus 8 [Kaposi`s sarcoma-associated h
cacauccccggauuccuccgca

SEQ ID NO: 2151960 - RNA, 21 nt, Human herpesvirus 8 [Kaposi`s sarcoma-associated h
ucagcaguguuugcugcugua

SEQ ID NO: 2151961 - RNA, 16 nt, Human herpesvirus 8 [Kaposi`s sarcoma-associated h
gguuuccuagccagau

SEQ ID NO: 2151962 - RNA, 16 nt, Human herpesvirus 8 [Kaposi`s sarcoma-associated h
cgacacgauguuuucc

SEQ ID NO: 2151963 - RNA, 20 nt, Human herpesvirus 8 [Kaposi`s sarcoma-associated h
uguguauccuagaaugaagu

SEQ ID NO: 2151964 - RNA, 12 nt, Human herpesvirus 8 [Kaposi`s sarcoma-associated h
uggcuguuacaa

SEQ ID NO: 2151965 - RNA, 17 nt, Human herpesvirus 8 [Kaposi`s sarcoma-associated h
acugugaaguuuacauu

SEQ ID NO: 2151966 - RNA, 20 nt, Human herpesvirus 8 [Kaposi`s sarcoma-associated h
gaagcggguuggacuggcag

SEQ ID NO: 2151967 - RNA, 16 nt, Human herpesvirus 8 [Kaposi`s sarcoma-associated h
gugcuuuaaugcggag

SEQ ID NO: 2151968 - RNA, 17 nt, Human herpesvirus 8 [Kaposi`s sarcoma-associated h
ccauuuuuuacggacaa

SEQ ID NO: 2151969 - RNA, 14 nt, Human herpesvirus 8 [Kaposi`s sarcoma-associated h
cuggaauggaucug

SEQ ID NO: 2151970 - RNA, 21 nt, Human herpesvirus 8 [Kaposi`s sarcoma-associated h
gcccaacucugcaagcuguug

SEQ ID NO: 2151971 - RNA, 15 nt, Human herpesvirus 8 [Kaposi`s sarcoma-associated h
aggaaugcauaugga

SEQ ID NO: 2151972 - RNA, 13 nt, Human herpesvirus 8 [Kaposi`s sarcoma-associated h
gacccuagucacu

SEQ ID NO: 2151973 - RNA, 17 nt, Human herpesvirus 8 [Kaposi`s sarcoma-associated h
guuucuaaagcacgcca

SEQ ID NO: 2151974 - RNA, 20 nt, Human herpesvirus 8 [Kaposi`s sarcoma-associated h
guccugauuuuccagggaca

SEQ ID NO: 2151975 - RNA, 19 nt, Human herpesvirus 8 [Kaposi`s sarcoma-associated h
aacaugcccuccugggcca

SEQ ID NO: 2151976 - RNA, 15 nt, Human herpesvirus 8 [Kaposi`s sarcoma-associated h
ugugguaagaaggaa

SEQ ID NO: 2151977 - RNA, 18 nt, Human herpesvirus 8 [Kaposi`s sarcoma-associated h
agucuaaggccagcgaga

SEQ ID NO: 2151978 - RNA, 16 nt, Human herpesvirus 8 [Kaposi`s sarcoma-associated h
gcuggagggcacagau

SEQ ID NO: 2151979 - RNA, 13 nt, Human herpesvirus 8 [Kaposi`s sarcoma-associated h
guggaccgugugu

SEQ ID NO: 2151980 - RNA, 16 nt, Human herpesvirus 8 [Kaposi`s sarcoma-associated h
cugaucucagaggccc

SEQ ID NO: 2151981 - RNA, 21 nt, Human herpesvirus 8 [Kaposi`s sarcoma-associated h
gucuagcacacacgaugaaga

SEQ ID NO: 2151982 - RNA, 14 nt, Human herpesvirus 8 [Kaposi`s sarcoma-associated h
cagagucugaaccc

SEQ ID NO: 2151983 - RNA, 15 nt, Human herpesvirus 8 [Kaposi`s sarcoma-associated h
uaugggcuuguacau

SEQ ID NO: 2151984 - RNA, 15 nt, Human herpesvirus 8 [Kaposi`s sarcoma-associated h
ccacauggcagcuga

SEQ ID NO: 2151985 - RNA, 17 nt, Human herpesvirus 8 [Kaposi`s sarcoma-associated h
cugacgacggucgccuc

SEQ ID NO: 2151986 - RNA, 17 nt, Human herpesvirus 8 [Kaposi`s sarcoma-associated h
uugcacucagaacauaa

SEQ ID NO: 2151987 - RNA, 20 nt, Human herpesvirus 8 [Kaposi`s sarcoma-associated h
gcggaggcccgagaaacacu

SEQ ID NO: 2151988 - RNA, 14 nt, Human herpesvirus 8 [Kaposi`s sarcoma-associated h
ucuuggcuguuaca

SEQ ID NO: 2151989 - RNA, 14 nt, Human herpesvirus 8 [Kaposi`s sarcoma-associated h
acgucccucuuggc

SEQ ID NO: 2151990 - RNA, 17 nt, Human herpesvirus 8 [Kaposi`s sarcoma-associated h
gagcgagugugccuccu

SEQ ID NO: 2151991 - RNA, 18 nt, Human herpesvirus 8 [Kaposi`s sarcoma-associated h
acaacuauguuuccuagc

SEQ ID NO: 2151992 - RNA, 17 nt, Human herpesvirus 8 [Kaposi`s sarcoma-associated h
uaaucuaaauauucucu

SEQ ID NO: 2151993 - RNA, 15 nt, Human herpesvirus 8 [Kaposi`s sarcoma-associated h
acacuuuacugugua

SEQ ID NO: 2151994 - RNA, 15 nt, Human herpesvirus 8 [Kaposi`s sarcoma-associated h
gagauggagaccccg

SEQ ID NO: 2151995 - RNA, 16 nt, Human herpesvirus 8 [Kaposi`s sarcoma-associated h
uuuagacugcgugcau

SEQ ID NO: 2151996 - RNA, 16 nt, Human herpesvirus 8 [Kaposi`s sarcoma-associated h
gacaccauucuuuuau

SEQ ID NO: 2151997 - RNA, 11 nt, Human herpesvirus 8 [Kaposi`s sarcoma-associated h
cugugcccaaa

SEQ ID NO: 2151998 - RNA, 17 nt, Human herpesvirus 8 [Kaposi`s sarcoma-associated h
cagagcagugcucccgu

SEQ ID NO: 2151999 - RNA, 19 nt, Human herpesvirus 8 [Kaposi`s sarcoma-associated h
aggucgcagagaccucuug

SEQ ID NO: 2152000 - RNA, 14 nt, Human herpesvirus 8 [Kaposi`s sarcoma-associated h
acauccgcugccac

SEQ ID NO: 2152001 - RNA, 18 nt, Human herpesvirus 8 [Kaposi`s sarcoma-associated h
auucggagaacaugcugg

SEQ ID NO: 2152002 - RNA, 15 nt, Human herpesvirus 8 [Kaposi`s sarcoma-associated h
uccccggcagcaccu

SEQ ID NO: 2152003 - RNA, 17 nt, Human herpesvirus 8 [Kaposi`s sarcoma-associated h
acacacggaaggcagug

SEQ ID NO: 2152004 - RNA, 16 nt, Human herpesvirus 8 [Kaposi`s sarcoma-associated h
aaaauguuuacugggu

SEQ ID NO: 2152005 - RNA, 16 nt, Human herpesvirus 8 [Kaposi`s sarcoma-associated h
aagcuuugcagccagg

SEQ ID NO: 2152006 - RNA, 17 nt, Human herpesvirus 8 [Kaposi`s sarcoma-associated h
auguaaauuggccacug

SEQ ID NO: 2152007 - RNA, 13 nt, Human herpesvirus 8 [Kaposi`s sarcoma-associated h
agugaccugcugu

SEQ ID NO: 2152008 - RNA, 21 nt, Human herpesvirus 8 [Kaposi`s sarcoma-associated h
ccuacgcguuaagaagccacu

SEQ ID NO: 2152009 - RNA, 14 nt, Human herpesvirus 8 [Kaposi`s sarcoma-associated h
cuccgccagggacg

SEQ ID NO: 2152010 - RNA, 17 nt, Human herpesvirus 8 [Kaposi`s sarcoma-associated h
cgugcaggucgcagaga

SEQ ID NO: 2152011 - RNA, 16 nt, Human herpesvirus 8 [Kaposi`s sarcoma-associated h
gaguauaucaggggaa

SEQ ID NO: 2152012 - RNA, 23 nt, Human herpesvirus 8 [Kaposi`s sarcoma-associated h
aguaagacaaacaugugggcuuc

SEQ ID NO: 2152013 - RNA, 15 nt, Human herpesvirus 8 [Kaposi`s sarcoma-associated h
aggaccuuucugcug

SEQ ID NO: 2152014 - RNA, 15 nt, Human herpesvirus 8 [Kaposi`s sarcoma-associated h
gcuagauuaaauuaa

SEQ ID NO: 2152015 - RNA, 16 nt, Human herpesvirus 8 [Kaposi`s sarcoma-associated h
aacaugcugccacugc

SEQ ID NO: 2152016 - RNA, 21 nt, Human herpesvirus 8 [Kaposi`s sarcoma-associated h
uuaacuucaccuccagacucu

SEQ ID NO: 2152017 - RNA, 16 nt, Human herpesvirus 8 [Kaposi`s sarcoma-associated h
cgugacacuacuaaug

SEQ ID NO: 2152018 - RNA, 23 nt, Human herpesvirus 8 [Kaposi`s sarcoma-associated h
gggccuuggaguuaaagcuguca

SEQ ID NO: 2152019 - RNA, 14 nt, Human herpesvirus 8 [Kaposi`s sarcoma-associated h
cgggcugcgccagc

SEQ ID NO: 2152020 - RNA, 19 nt, Human herpesvirus 8 [Kaposi`s sarcoma-associated h
cagauccuccacagagccu

SEQ ID NO: 2152021 - RNA, 12 nt, Human herpesvirus 8 [Kaposi`s sarcoma-associated h
cgcggaccucaa

SEQ ID NO: 2152022 - RNA, 23 nt, Human herpesvirus 8 [Kaposi`s sarcoma-associated h
guauuagaggguggacagugccu

SEQ ID NO: 2152023 - RNA, 16 nt, Human herpesvirus 8 [Kaposi`s sarcoma-associated h
ggcggguggcucacau

SEQ ID NO: 2152024 - RNA, 20 nt, Human herpesvirus 8 [Kaposi`s sarcoma-associated h
ugauuaaagggggugguauu

SEQ ID NO: 2152025 - RNA, 14 nt, Human herpesvirus 8 [Kaposi`s sarcoma-associated h
cgucuaccugccgg

SEQ ID NO: 2152026 - RNA, 15 nt, Human herpesvirus 8 [Kaposi`s sarcoma-associated h
cuugaggauggugcu

SEQ ID NO: 2152027 - RNA, 15 nt, Human herpesvirus 8 [Kaposi`s sarcoma-associated h
gucuuauaacagugc

SEQ ID NO: 2152028 - RNA, 17 nt, Human herpesvirus 8 [Kaposi`s sarcoma-associated h
uuccuuuuuucaaaagu

SEQ ID NO: 2152029 - RNA, 17 nt, Human herpesvirus 8 [Kaposi`s sarcoma-associated h
gugagagaccccgugau

SEQ ID NO: 2152030 - RNA, 20 nt, Human herpesvirus 8 [Kaposi`s sarcoma-associated h
acggugucguguaugccaau

SEQ ID NO: 2152031 - RNA, 14 nt, Human herpesvirus 8 [Kaposi`s sarcoma-associated h
caccgucuggcugg

SEQ ID NO: 2152032 - RNA, 18 nt, Human herpesvirus 8 [Kaposi`s sarcoma-associated h
ccagauaccccugcaccu

SEQ ID NO: 2152033 - RNA, 12 nt, Human herpesvirus 8 [Kaposi`s sarcoma-associated h
ccguggucauug

SEQ ID NO: 2152034 - RNA, 17 nt, Human herpesvirus 8 [Kaposi`s sarcoma-associated h
acaaucuggauguguau

SEQ ID NO: 2152035 - RNA, 19 nt, Human herpesvirus 8 [Kaposi`s sarcoma-associated h
acgccaggagcuagcuucc

SEQ ID NO: 2152036 - RNA, 19 nt, Human herpesvirus 8 [Kaposi`s sarcoma-associated h
uuaaguacauuaaaaggac

SEQ ID NO: 2152037 - RNA, 16 nt, Human herpesvirus 8 [Kaposi`s sarcoma-associated h
agcuuugcagccaggu

SEQ ID NO: 2152038 - RNA, 13 nt, Human herpesvirus 8 [Kaposi`s sarcoma-associated h
gcaccgcaagcag

SEQ ID NO: 2152039 - RNA, 16 nt, Human herpesvirus 8 [Kaposi`s sarcoma-associated h
ccugauaugcaugugu

SEQ ID NO: 2152040 - RNA, 24 nt, Human herpesvirus 8 [Kaposi`s sarcoma-associated h
gccucacggacaacgccaugcagc

SEQ ID NO: 2152041 - RNA, 18 nt, Human herpesvirus 8 [Kaposi`s sarcoma-associated h
auaagagcacacugugug

SEQ ID NO: 2152042 - RNA, 21 nt, Human herpesvirus 8 [Kaposi`s sarcoma-associated h
accagagcgacgcgggucuca

SEQ ID NO: 2152043 - RNA, 22 nt, Human herpesvirus 8 [Kaposi`s sarcoma-associated h
uccuuacuugguaacucccuca

SEQ ID NO: 2152044 - RNA, 20 nt, Human herpesvirus 8 [Kaposi`s sarcoma-associated h
uuagccugcaguguggggau

SEQ ID NO: 2152045 - RNA, 19 nt, Human herpesvirus 8 [Kaposi`s sarcoma-associated h
acagcccauaguauguaaa

SEQ ID NO: 2152046 - RNA, 15 nt, Human herpesvirus 8 [Kaposi`s sarcoma-associated h
ugcucagacagauuc

SEQ ID NO: 2152047 - RNA, 19 nt, Human herpesvirus 8 [Kaposi`s sarcoma-associated h
acauaaaacgaagcaaagu

SEQ ID NO: 2152048 - RNA, 11 nt, Human herpesvirus 8 [Kaposi`s sarcoma-associated h
ggcuguuacaa

SEQ ID NO: 2152049 - RNA, 11 nt, Human herpesvirus 8 [Kaposi`s sarcoma-associated h
ccgagccacaa

SEQ ID NO: 2152050 - RNA, 13 nt, Human herpesvirus 8 [Kaposi`s sarcoma-associated h
cuagacaauaaag

SEQ ID NO: 2152051 - RNA, 18 nt, Human herpesvirus 8 [Kaposi`s sarcoma-associated h
ccuuaagaaaguggauaa

SEQ ID NO: 2152052 - RNA, 17 nt, Human herpesvirus 8 [Kaposi`s sarcoma-associated h
ccacggcgcuguacagu

SEQ ID NO: 2152053 - RNA, 14 nt, Human herpesvirus 8 [Kaposi`s sarcoma-associated h
cugauuagcacugu

SEQ ID NO: 2152054 - RNA, 15 nt, Human herpesvirus 8 [Kaposi`s sarcoma-associated h
gcauaauaaaacaaa

SEQ ID NO: 2152055 - RNA, 17 nt, Human herpesvirus 8 [Kaposi`s sarcoma-associated h
acggccaccgagaagga

SEQ ID NO: 2152056 - RNA, 21 nt, Human herpesvirus 8 [Kaposi`s sarcoma-associated h
cggggagcgggguuuccaggg

SEQ ID NO: 2152057 - RNA, 18 nt, Human herpesvirus 8 [Kaposi`s sarcoma-associated h
uuauuaaaagcauugucu

SEQ ID NO: 2152058 - RNA, 15 nt, Human herpesvirus 8 [Kaposi`s sarcoma-associated h
cugugaaguuuacau

SEQ ID NO: 2152059 - RNA, 19 nt, Human herpesvirus 8 [Kaposi`s sarcoma-associated h
ccaauuaauuggagcucuu

SEQ ID NO: 2152060 - RNA, 22 nt, Human herpesvirus 8 [Kaposi`s sarcoma-associated h
ccucgucgacagagccagccug

SEQ ID NO: 2152061 - RNA, 23 nt, Human herpesvirus 8 [Kaposi`s sarcoma-associated h
agcaugccugcgcugcgcauggc

SEQ ID NO: 2152062 - RNA, 14 nt, Human herpesvirus 8 [Kaposi`s sarcoma-associated h
ugaccaacaggcug

SEQ ID NO: 2152063 - RNA, 19 nt, Human herpesvirus 8 [Kaposi`s sarcoma-associated h
gaacgccauggcccacggg

SEQ ID NO: 2152064 - RNA, 22 nt, Human herpesvirus 8 [Kaposi`s sarcoma-associated h
gcaccaagguaggccagcugcg

SEQ ID NO: 2152065 - RNA, 15 nt, Human herpesvirus 8 [Kaposi`s sarcoma-associated h
cgcggauaggcuggg

SEQ ID NO: 2152066 - RNA, 14 nt, Human herpesvirus 8 [Kaposi`s sarcoma-associated h
acuggaacgccaug

SEQ ID NO: 2152067 - RNA, 14 nt, Human herpesvirus 8 [Kaposi`s sarcoma-associated h
caccacaucugcug

SEQ ID NO: 2152068 - RNA, 19 nt, Human herpesvirus 8 [Kaposi`s sarcoma-associated h
cuucauucucuccacuaga

SEQ ID NO: 2152069 - RNA, 16 nt, Human herpesvirus 8 [Kaposi`s sarcoma-associated h
auggguuaacagugga

SEQ ID NO: 2152070 - RNA, 13 nt, Human herpesvirus 8 [Kaposi`s sarcoma-associated h
gaagagguggccg

SEQ ID NO: 2152071 - RNA, 23 nt, Human herpesvirus 8 [Kaposi`s sarcoma-associated h
gcgaugcauaucguugacaugug

SEQ ID NO: 2152072 - RNA, 15 nt, Human herpesvirus 8 [Kaposi`s sarcoma-associated h
acaacauauguuaaa

SEQ ID NO: 2152073 - RNA, 22 nt, Human herpesvirus 8 [Kaposi`s sarcoma-associated h
gaucuauuauuugucgcgccag

SEQ ID NO: 2152074 - RNA, 15 nt, Human herpesvirus 8 [Kaposi`s sarcoma-associated h
gcuucauuaugcaug

SEQ ID NO: 2152075 - RNA, 20 nt, Human herpesvirus 8 [Kaposi`s sarcoma-associated h
gccaggacccguaccacaag

SEQ ID NO: 2152076 - RNA, 19 nt, Human herpesvirus 8 [Kaposi`s sarcoma-associated h
ggaagaugaagaugaagaa

SEQ ID NO: 2152077 - RNA, 19 nt, Human herpesvirus 8 [Kaposi`s sarcoma-associated h
uccgcacagacgacugggc

SEQ ID NO: 2152078 - RNA, 14 nt, Human herpesvirus 8 [Kaposi`s sarcoma-associated h
ugaacagggcauga

SEQ ID NO: 2152079 - RNA, 19 nt, Human herpesvirus 8 [Kaposi`s sarcoma-associated h
ccaaacucgggaucggaaa

SEQ ID NO: 2152080 - RNA, 22 nt, Human herpesvirus 8 [Kaposi`s sarcoma-associated h
aggaccuuucugcugcaucacg

SEQ ID NO: 2152081 - RNA, 20 nt, Human herpesvirus 8 [Kaposi`s sarcoma-associated h
uagaugcgcuggaagagaau

SEQ ID NO: 2152082 - RNA, 23 nt, Human herpesvirus 8 [Kaposi`s sarcoma-associated h
gacagauguuagauagacccggc

SEQ ID NO: 2152083 - RNA, 14 nt, Human herpesvirus 8 [Kaposi`s sarcoma-associated h
ggcgagauuggagg

SEQ ID NO: 2152084 - RNA, 20 nt, Human herpesvirus 8 [Kaposi`s sarcoma-associated h
cacgguggcccugccuagug

SEQ ID NO: 2152085 - RNA, 13 nt, Human herpesvirus 8 [Kaposi`s sarcoma-associated h
uuaauuggagcuc

SEQ ID NO: 2152086 - RNA, 18 nt, Human herpesvirus 8 [Kaposi`s sarcoma-associated h
acuaguagucagagucug

SEQ ID NO: 2152087 - RNA, 22 nt, Human herpesvirus 8 [Kaposi`s sarcoma-associated h
guuuugcacuauaaauaucauu

SEQ ID NO: 2152088 - RNA, 18 nt, Human herpesvirus 8 [Kaposi`s sarcoma-associated h
accggaguagugcaagug

SEQ ID NO: 2152089 - RNA, 14 nt, Human herpesvirus 8 [Kaposi`s sarcoma-associated h
cagacaccaaagac

SEQ ID NO: 2152090 - RNA, 22 nt, Human herpesvirus 8 [Kaposi`s sarcoma-associated h
gucuguguuuuguaaacugaug

SEQ ID NO: 2152091 - RNA, 18 nt, Human herpesvirus 8 [Kaposi`s sarcoma-associated h
ucgcacguuagaaacccc

SEQ ID NO: 2152092 - RNA, 15 nt, Human herpesvirus 8 [Kaposi`s sarcoma-associated h
cacagauuguggcau

SEQ ID NO: 2152093 - RNA, 19 nt, Human herpesvirus 8 [Kaposi`s sarcoma-associated h
ggcgcgccugucgacaggc

SEQ ID NO: 2152094 - RNA, 19 nt, Human herpesvirus 8 [Kaposi`s sarcoma-associated h
ccagaguuuuaugggcuca

SEQ ID NO: 2152095 - RNA, 21 nt, Human herpesvirus 8 [Kaposi`s sarcoma-associated h
acauagugacuguagacaguu

SEQ ID NO: 2152096 - RNA, 15 nt, Human herpesvirus 8 [Kaposi`s sarcoma-associated h
acgcaggcgccuaug

SEQ ID NO: 2152097 - RNA, 23 nt, Human herpesvirus 8 [Kaposi`s sarcoma-associated h
gugcaggaaauagcccuggggga

SEQ ID NO: 2152098 - RNA, 15 nt, Human herpesvirus 8 [Kaposi`s sarcoma-associated h
aguccagccacggcc

SEQ ID NO: 2152099 - RNA, 21 nt, Human herpesvirus 8 [Kaposi`s sarcoma-associated h
cggcaacacuggacacuaaaa

SEQ ID NO: 2152100 - RNA, 12 nt, Human herpesvirus 8 [Kaposi`s sarcoma-associated h
ggcaugggcacc

SEQ ID NO: 2152101 - RNA, 16 nt, Human herpesvirus 8 [Kaposi`s sarcoma-associated h
aggacucacugggggu

SEQ ID NO: 2152102 - RNA, 19 nt, Human herpesvirus 8 [Kaposi`s sarcoma-associated h
guuguaaacuauauauaag

SEQ ID NO: 2152103 - RNA, 16 nt, Human herpesvirus 8 [Kaposi`s sarcoma-associated h
gccaggaaguucaaug

SEQ ID NO: 2152104 - RNA, 15 nt, Human herpesvirus 8 [Kaposi`s sarcoma-associated h
gucucccugcgugga

SEQ ID NO: 2152105 - RNA, 14 nt, Human herpesvirus 8 [Kaposi`s sarcoma-associated h
ccagugccucagca

SEQ ID NO: 2152106 - RNA, 23 nt, Human herpesvirus 8 [Kaposi`s sarcoma-associated h
ggcuguuacaauaaagccgagcc

SEQ ID NO: 2152107 - RNA, 17 nt, Human herpesvirus 8 [Kaposi`s sarcoma-associated h
caccauuccucuccgca

SEQ ID NO: 2152108 - RNA, 21 nt, Human herpesvirus 8 [Kaposi`s sarcoma-associated h
caugcucaucuacccugauua

SEQ ID NO: 2152109 - RNA, 14 nt, Human herpesvirus 8 [Kaposi`s sarcoma-associated h
uggcgugccagugg

SEQ ID NO: 2152110 - RNA, 12 nt, Human herpesvirus 8 [Kaposi`s sarcoma-associated h
ucucuucucuac

SEQ ID NO: 2152111 - RNA, 22 nt, Human herpesvirus 8 [Kaposi`s sarcoma-associated h
cgauagggggaugagccagaau

SEQ ID NO: 2152112 - RNA, 17 nt, Human herpesvirus 8 [Kaposi`s sarcoma-associated h
aagguaggccagcugcg

SEQ ID NO: 2152113 - RNA, 22 nt, Human herpesvirus 8 [Kaposi`s sarcoma-associated h
uggggcuacacaucauaaagua

SEQ ID NO: 2152114 - RNA, 16 nt, Human herpesvirus 8 [Kaposi`s sarcoma-associated h
caucucucacacccug

SEQ ID NO: 2152115 - RNA, 17 nt, Human herpesvirus 8 [Kaposi`s sarcoma-associated h
cugcuauuuuucaucug

SEQ ID NO: 2152116 - RNA, 14 nt, Human herpesvirus 8 [Kaposi`s sarcoma-associated h
caggagucagagca

SEQ ID NO: 2152117 - RNA, 19 nt, Human herpesvirus 8 [Kaposi`s sarcoma-associated h
ugggucuaucuggaaaaca

SEQ ID NO: 2152118 - RNA, 22 nt, Human herpesvirus 8 [Kaposi`s sarcoma-associated h
agcaaucggguuugauagcaga

SEQ ID NO: 2152119 - RNA, 22 nt, Human herpesvirus 8 [Kaposi`s sarcoma-associated h
agggaaguuucagagccuucac

SEQ ID NO: 2152120 - RNA, 13 nt, Human herpesvirus 8 [Kaposi`s sarcoma-associated h
acugaucacugcg

SEQ ID NO: 2152121 - RNA, 15 nt, Human herpesvirus 8 [Kaposi`s sarcoma-associated h
gauagacauggacau

SEQ ID NO: 2152122 - RNA, 19 nt, Human herpesvirus 8 [Kaposi`s sarcoma-associated h
gucuuuccgugucuccuug

SEQ ID NO: 2152123 - RNA, 20 nt, Human herpesvirus 8 [Kaposi`s sarcoma-associated h
accacauuuccacccaccua

SEQ ID NO: 2152124 - RNA, 16 nt, Human herpesvirus 8 [Kaposi`s sarcoma-associated h
cugugaagucucccug

SEQ ID NO: 2152125 - RNA, 21 nt, Human herpesvirus 8 [Kaposi`s sarcoma-associated h
gccauggcggggcggcugugg

SEQ ID NO: 2152126 - RNA, 16 nt, Human herpesvirus 8 [Kaposi`s sarcoma-associated h
cccaggccgccgacca

SEQ ID NO: 2152127 - RNA, 16 nt, Human herpesvirus 8 [Kaposi`s sarcoma-associated h
gcaaacuauacacaaa

SEQ ID NO: 2152128 - RNA, 17 nt, Human herpesvirus 8 [Kaposi`s sarcoma-associated h
cggagugccggcuggcc

SEQ ID NO: 2152129 - RNA, 19 nt, Human herpesvirus 8 [Kaposi`s sarcoma-associated h
uuggaguuaaagcugucac

SEQ ID NO: 2152130 - RNA, 14 nt, Human herpesvirus 8 [Kaposi`s sarcoma-associated h
agcaguguuugcug

SEQ ID NO: 2152131 - RNA, 13 nt, Human herpesvirus 8 [Kaposi`s sarcoma-associated h
gcguguugggaca

SEQ ID NO: 2152132 - RNA, 15 nt, Human herpesvirus 8 [Kaposi`s sarcoma-associated h
gugcgcgguguggca

SEQ ID NO: 2152133 - RNA, 21 nt, Human herpesvirus 8 [Kaposi`s sarcoma-associated h
ccagucacgcacuuggcccug

SEQ ID NO: 2152134 - RNA, 22 nt, Human herpesvirus 8 [Kaposi`s sarcoma-associated h
gaaucggugacuuuuugugaga

SEQ ID NO: 2152135 - RNA, 19 nt, Human herpesvirus 8 [Kaposi`s sarcoma-associated h
uuuaaaagacucuagauaa

SEQ ID NO: 2152136 - RNA, 15 nt, Human herpesvirus 8 [Kaposi`s sarcoma-associated h
guucccaugagccuc

SEQ ID NO: 2152137 - RNA, 20 nt, Human herpesvirus 8 [Kaposi`s sarcoma-associated h
caauauaacagcaacauguu

SEQ ID NO: 2152138 - RNA, 21 nt, Human herpesvirus 8 [Kaposi`s sarcoma-associated h
cggugaccacgcacuauagug

SEQ ID NO: 2152139 - RNA, 13 nt, Human herpesvirus 8 [Kaposi`s sarcoma-associated h
cgacaugugcuuu

SEQ ID NO: 2152140 - RNA, 22 nt, Human herpesvirus 8 [Kaposi`s sarcoma-associated h
uucccaaacacaucaguguccu

SEQ ID NO: 2152141 - RNA, 19 nt, Human herpesvirus 8 [Kaposi`s sarcoma-associated h
uugaggaagaucuaagccu

SEQ ID NO: 2152142 - RNA, 22 nt, Human herpesvirus 8 [Kaposi`s sarcoma-associated h
gaauguauguaucugauuuaau

SEQ ID NO: 2152143 - RNA, 19 nt, Human herpesvirus 8 [Kaposi`s sarcoma-associated h
cggaaguuggccuccagca

SEQ ID NO: 2152144 - RNA, 16 nt, Human herpesvirus 8 [Kaposi`s sarcoma-associated h
uucuuuauucugucaa

SEQ ID NO: 2152145 - RNA, 16 nt, Human herpesvirus 8 [Kaposi`s sarcoma-associated h
uuuacggacaauacug

SEQ ID NO: 2152146 - RNA, 20 nt, Human herpesvirus 8 [Kaposi`s sarcoma-associated h
cagacucuguguccuccucu

SEQ ID NO: 2152147 - RNA, 15 nt, Human herpesvirus 8 [Kaposi`s sarcoma-associated h
uagcagaguguccag

SEQ ID NO: 2152148 - RNA, 19 nt, Human herpesvirus 8 [Kaposi`s sarcoma-associated h
acgcugcaauguacugcca

SEQ ID NO: 2152149 - RNA, 22 nt, Human herpesvirus 8 [Kaposi`s sarcoma-associated h
uuacauuuucucgugugcccuu

SEQ ID NO: 2152150 - RNA, 23 nt, Human herpesvirus 8 [Kaposi`s sarcoma-associated h
augguaccauggcaaaaaacacu

SEQ ID NO: 2152151 - RNA, 14 nt, Human herpesvirus 8 [Kaposi`s sarcoma-associated h
gcuuugcagccagg

SEQ ID NO: 2152152 - RNA, 16 nt, Human herpesvirus 8 [Kaposi`s sarcoma-associated h
cuguuacaauaaagcc

SEQ ID NO: 2152153 - RNA, 14 nt, Human herpesvirus 8 [Kaposi`s sarcoma-associated h
ccaugaaagguggu

SEQ ID NO: 2152154 - RNA, 17 nt, Human herpesvirus 8 [Kaposi`s sarcoma-associated h
cucgcuguccuggagga

SEQ ID NO: 2152155 - RNA, 12 nt, Human herpesvirus 8 [Kaposi`s sarcoma-associated h
cgaagcaaagug

SEQ ID NO: 2152156 - RNA, 21 nt, Human herpesvirus 8 [Kaposi`s sarcoma-associated h
cuggugaggaagcaucugguc

SEQ ID NO: 2152157 - RNA, 16 nt, Human herpesvirus 8 [Kaposi`s sarcoma-associated h
cgccauuuuuguggcu

SEQ ID NO: 2152158 - RNA, 19 nt, Human herpesvirus 8 [Kaposi`s sarcoma-associated h
uagcacacacgaugaagag

SEQ ID NO: 2152159 - RNA, 14 nt, Human herpesvirus 8 [Kaposi`s sarcoma-associated h
auaacauuuuguaa

SEQ ID NO: 2152160 - RNA, 18 nt, Human herpesvirus 8 [Kaposi`s sarcoma-associated h
aagcggauugaguguaaa

SEQ ID NO: 2152161 - RNA, 14 nt, Human herpesvirus 8 [Kaposi`s sarcoma-associated h
ucuuuauugcuuuc

SEQ ID NO: 2152162 - RNA, 15 nt, Human herpesvirus 8 [Kaposi`s sarcoma-associated h
guucacuugggagcu

SEQ ID NO: 2152163 - RNA, 23 nt, Human herpesvirus 8 [Kaposi`s sarcoma-associated h
cagacgacaaaacgcacacgaau

SEQ ID NO: 2152164 - RNA, 17 nt, Human herpesvirus 8 [Kaposi`s sarcoma-associated h
auggccggcacgcggug

SEQ ID NO: 2152165 - RNA, 19 nt, Human herpesvirus 8 [Kaposi`s sarcoma-associated h
gggcgauucgaucccgcaa

SEQ ID NO: 2152166 - RNA, 19 nt, Human herpesvirus 8 [Kaposi`s sarcoma-associated h
gcgcaggagucagagcagu

SEQ ID NO: 2152167 - RNA, 11 nt, Human herpesvirus 8 [Kaposi`s sarcoma-associated h
gguugguggug

SEQ ID NO: 2152168 - RNA, 18 nt, Human herpesvirus 8 [Kaposi`s sarcoma-associated h
gcgcuguaugacugcccu

SEQ ID NO: 2152169 - RNA, 17 nt, Human herpesvirus 8 [Kaposi`s sarcoma-associated h
auacuuugcgugucuag

SEQ ID NO: 2152170 - RNA, 11 nt, Human herpesvirus 8 [Kaposi`s sarcoma-associated h
ucugguggugg

SEQ ID NO: 2152171 - RNA, 12 nt, Human herpesvirus 8 [Kaposi`s sarcoma-associated h
ggacaccacauu

SEQ ID NO: 2152172 - RNA, 22 nt, Human herpesvirus 8 [Kaposi`s sarcoma-associated h
cagacccggcaacacuggacac

SEQ ID NO: 2152173 - RNA, 18 nt, Human herpesvirus 8 [Kaposi`s sarcoma-associated h
gagagcuggagggcacag

SEQ ID NO: 2152174 - RNA, 15 nt, Human herpesvirus 8 [Kaposi`s sarcoma-associated h
guauaugacuacugu

SEQ ID NO: 2152175 - RNA, 15 nt, Human herpesvirus 8 [Kaposi`s sarcoma-associated h
cccggcaacacugga

SEQ ID NO: 2152176 - RNA, 16 nt, Human herpesvirus 8 [Kaposi`s sarcoma-associated h
cuguucuaccagguag

SEQ ID NO: 2152177 - RNA, 16 nt, Human herpesvirus 8 [Kaposi`s sarcoma-associated h
uguuaucuuugcagug

SEQ ID NO: 2152178 - RNA, 19 nt, Human herpesvirus 8 [Kaposi`s sarcoma-associated h
cugccuggacaguauucuc

SEQ ID NO: 2152179 - RNA, 15 nt, Human herpesvirus 8 [Kaposi`s sarcoma-associated h
cucaucauuucugaa

SEQ ID NO: 2152180 - RNA, 20 nt, Human herpesvirus 8 [Kaposi`s sarcoma-associated h
uaucuucaaggcccuguacu

SEQ ID NO: 2152181 - RNA, 19 nt, Human herpesvirus 8 [Kaposi`s sarcoma-associated h
uuaacaguggaugaccaac

SEQ ID NO: 2152182 - RNA, 13 nt, Human herpesvirus 8 [Kaposi`s sarcoma-associated h
uaaugcagacaga

SEQ ID NO: 2152183 - RNA, 20 nt, Human herpesvirus 8 [Kaposi`s sarcoma-associated h
acgcguuaucuccugcucau

SEQ ID NO: 2152184 - RNA, 18 nt, Human herpesvirus 8 [Kaposi`s sarcoma-associated h
gccugcguuaacuuccca

SEQ ID NO: 2152185 - RNA, 13 nt, Human herpesvirus 8 [Kaposi`s sarcoma-associated h
gcauuaaagcacu

SEQ ID NO: 2152186 - RNA, 19 nt, Human herpesvirus 8 [Kaposi`s sarcoma-associated h
ucugcgcgucagcaguguu

SEQ ID NO: 2152187 - RNA, 20 nt, Human herpesvirus 8 [Kaposi`s sarcoma-associated h
acauaauccccggcagcacc

SEQ ID NO: 2152188 - RNA, 18 nt, Human herpesvirus 8 [Kaposi`s sarcoma-associated h
ucaucgccgccgccaaac

SEQ ID NO: 2152189 - RNA, 19 nt, Human herpesvirus 8 [Kaposi`s sarcoma-associated h
uucauaccgggucugugcg

SEQ ID NO: 2152190 - RNA, 19 nt, Human herpesvirus 8 [Kaposi`s sarcoma-associated h
gcacaacauuaaacacaua

SEQ ID NO: 2152191 - RNA, 21 nt, Human herpesvirus 8 [Kaposi`s sarcoma-associated h
acccuuccuacccuacucccc

SEQ ID NO: 2152192 - RNA, 21 nt, Human herpesvirus 8 [Kaposi`s sarcoma-associated h
cgucugccgaagucagugcca

SEQ ID NO: 2152193 - RNA, 21 nt, Human herpesvirus 8 [Kaposi`s sarcoma-associated h
gucagguucacuugggagcug

SEQ ID NO: 2152194 - RNA, 17 nt, Human herpesvirus 8 [Kaposi`s sarcoma-associated h
uuacgguggugugccug

SEQ ID NO: 2152195 - RNA, 16 nt, Human herpesvirus 8 [Kaposi`s sarcoma-associated h
aagcacauuuugcacg

SEQ ID NO: 2152196 - RNA, 12 nt, Human herpesvirus 8 [Kaposi`s sarcoma-associated h
gcuggacccacg

SEQ ID NO: 2152197 - RNA, 22 nt, Human herpesvirus 8 [Kaposi`s sarcoma-associated h
accuaacugcguccgguggcaa

SEQ ID NO: 2152198 - RNA, 22 nt, Human herpesvirus 8 [Kaposi`s sarcoma-associated h
agaaggguggguggggaugggu

SEQ ID NO: 2152199 - RNA, 14 nt, Human herpesvirus 8 [Kaposi`s sarcoma-associated h
uaaaggagggauuu

SEQ ID NO: 2152200 - RNA, 17 nt, Human herpesvirus 8 [Kaposi`s sarcoma-associated h
auaaagcgcgaacaaga

SEQ ID NO: 2152201 - RNA, 13 nt, Human herpesvirus 8 [Kaposi`s sarcoma-associated h
cgguagcugccug

SEQ ID NO: 2152202 - RNA, 15 nt, Human herpesvirus 8 [Kaposi`s sarcoma-associated h
ucuguguccuccucu

SEQ ID NO: 2152203 - RNA, 13 nt, Human herpesvirus 8 [Kaposi`s sarcoma-associated h
gcugcagcuggac

SEQ ID NO: 2152204 - RNA, 19 nt, Human herpesvirus 8 [Kaposi`s sarcoma-associated h
ccugaagucccgaugccac

SEQ ID NO: 2152205 - RNA, 17 nt, Human herpesvirus 8 [Kaposi`s sarcoma-associated h
ggacaauugucggauuu

SEQ ID NO: 2152206 - RNA, 18 nt, Human herpesvirus 8 [Kaposi`s sarcoma-associated h
gccucccaacauguaaau

SEQ ID NO: 2152207 - RNA, 19 nt, Human herpesvirus 8 [Kaposi`s sarcoma-associated h
auugcaacugaccauguuc

SEQ ID NO: 2152208 - RNA, 14 nt, Human herpesvirus 8 [Kaposi`s sarcoma-associated h
agagaagagaccac

SEQ ID NO: 2152209 - RNA, 21 nt, Human herpesvirus 8 [Kaposi`s sarcoma-associated h
cugcaguuaucaacccuacuc

SEQ ID NO: 2152210 - RNA, 17 nt, Human herpesvirus 8 [Kaposi`s sarcoma-associated h
aucagcugcagccagga

SEQ ID NO: 2152211 - RNA, 19 nt, Human herpesvirus 8 [Kaposi`s sarcoma-associated h
aaagccugguccaggccuc

SEQ ID NO: 2152212 - RNA, 21 nt, Human herpesvirus 8 [Kaposi`s sarcoma-associated h
guguugguuacacuaaccaca

SEQ ID NO: 2152213 - RNA, 13 nt, Human herpesvirus 8 [Kaposi`s sarcoma-associated h
uuacauggaauac

SEQ ID NO: 2152214 - RNA, 22 nt, Human herpesvirus 8 [Kaposi`s sarcoma-associated h
acccguaccacaagggccaagc

SEQ ID NO: 2152215 - RNA, 19 nt, Human herpesvirus 8 [Kaposi`s sarcoma-associated h
uggccauucgcaccaggac

SEQ ID NO: 2152216 - RNA, 15 nt, Human herpesvirus 8 [Kaposi`s sarcoma-associated h
uggcucagacaccgu

SEQ ID NO: 2152217 - RNA, 18 nt, Human herpesvirus 8 [Kaposi`s sarcoma-associated h
cgcggugucaaccaggcc

SEQ ID NO: 2152218 - RNA, 18 nt, Human herpesvirus 8 [Kaposi`s sarcoma-associated h
uguuaucuuugcaguguc

SEQ ID NO: 2152219 - RNA, 17 nt, Human herpesvirus 8 [Kaposi`s sarcoma-associated h
gccaggcaccuguugga

SEQ ID NO: 2152220 - RNA, 13 nt, Human herpesvirus 8 [Kaposi`s sarcoma-associated h
gaagcgaaaagcc

SEQ ID NO: 2152221 - RNA, 22 nt, Human herpesvirus 8 [Kaposi`s sarcoma-associated h
uauuuauuuuuuacuacaggua

SEQ ID NO: 2152222 - RNA, 20 nt, Human herpesvirus 8 [Kaposi`s sarcoma-associated h
aggguuuauagaagagccug

SEQ ID NO: 2152223 - RNA, 16 nt, Human herpesvirus 8 [Kaposi`s sarcoma-associated h
cagaugaucccgccuu

SEQ ID NO: 2152224 - RNA, 12 nt, Human herpesvirus 8 [Kaposi`s sarcoma-associated h
ucuccugcucau

SEQ ID NO: 2152225 - RNA, 22 nt, Human herpesvirus 8 [Kaposi`s sarcoma-associated h
ugcggguugggucgcugcaccu

SEQ ID NO: 2152226 - RNA, 23 nt, Human herpesvirus 8 [Kaposi`s sarcoma-associated h
cugggacuugauaaucuccugga

SEQ ID NO: 2152227 - RNA, 19 nt, Human herpesvirus 8 [Kaposi`s sarcoma-associated h
cuuuggacaguuucuggag

SEQ ID NO: 2152228 - RNA, 15 nt, Human herpesvirus 8 [Kaposi`s sarcoma-associated h
ugacgcccugggugu

SEQ ID NO: 2152229 - RNA, 19 nt, Human herpesvirus 8 [Kaposi`s sarcoma-associated h
ugacuuuuuaaaggggacg

SEQ ID NO: 2152230 - RNA, 13 nt, Human herpesvirus 8 [Kaposi`s sarcoma-associated h
caugugggcuuca

SEQ ID NO: 2152231 - RNA, 17 nt, Human herpesvirus 8 [Kaposi`s sarcoma-associated h
gaagucucuuggacaag

SEQ ID NO: 2152232 - RNA, 17 nt, Human herpesvirus 8 [Kaposi`s sarcoma-associated h
gaucaacacuucguccc

SEQ ID NO: 2152233 - RNA, 16 nt, Human herpesvirus 8 [Kaposi`s sarcoma-associated h
gacagagccagccugg

SEQ ID NO: 2152234 - RNA, 23 nt, Human herpesvirus 8 [Kaposi`s sarcoma-associated h
cacuauauaaccuggcugccagg

SEQ ID NO: 2152235 - RNA, 14 nt, Human herpesvirus 8 [Kaposi`s sarcoma-associated h
ccagaggacagggu

SEQ ID NO: 2152236 - RNA, 16 nt, Human herpesvirus 8 [Kaposi`s sarcoma-associated h
accgucuaccugccgg

SEQ ID NO: 2152237 - RNA, 14 nt, Human herpesvirus 8 [Kaposi`s sarcoma-associated h
auuuaauaaacacu

SEQ ID NO: 2152238 - RNA, 22 nt, Human herpesvirus 8 [Kaposi`s sarcoma-associated h
gucaucucuaaucgaguacccc

SEQ ID NO: 2152239 - RNA, 23 nt, Human herpesvirus 8 [Kaposi`s sarcoma-associated h
auuuacgguggugugccuggugg

SEQ ID NO: 2152240 - RNA, 20 nt, Human herpesvirus 8 [Kaposi`s sarcoma-associated h
cuuggugugcugauguugua

SEQ ID NO: 2152241 - RNA, 15 nt, Human herpesvirus 8 [Kaposi`s sarcoma-associated h
gcuaaccaccacagu

SEQ ID NO: 2152242 - RNA, 13 nt, Human herpesvirus 8 [Kaposi`s sarcoma-associated h
aaucuccuggaga

SEQ ID NO: 2152243 - RNA, 19 nt, Human herpesvirus 8 [Kaposi`s sarcoma-associated h
caugcucucaccgcacccc

SEQ ID NO: 2152244 - RNA, 21 nt, Human herpesvirus 8 [Kaposi`s sarcoma-associated h
guuguagugguggcagaaaau

SEQ ID NO: 2152245 - RNA, 18 nt, Human herpesvirus 8 [Kaposi`s sarcoma-associated h
aauacccccaaaaugucc

SEQ ID NO: 2152246 - RNA, 14 nt, Human herpesvirus 8 [Kaposi`s sarcoma-associated h
auuaauaaccauga

SEQ ID NO: 2152247 - RNA, 16 nt, Human herpesvirus 8 [Kaposi`s sarcoma-associated h
accagacacugaggga

SEQ ID NO: 2152248 - RNA, 12 nt, Human herpesvirus 8 [Kaposi`s sarcoma-associated h
gguggcauuugu

SEQ ID NO: 2152249 - RNA, 18 nt, Human herpesvirus 8 [Kaposi`s sarcoma-associated h
gacuggugcgcacaggcc

SEQ ID NO: 2152250 - RNA, 22 nt, Human herpesvirus 8 [Kaposi`s sarcoma-associated h
guuagcgccaccguguggcugc

SEQ ID NO: 2152251 - RNA, 16 nt, Human herpesvirus 8 [Kaposi`s sarcoma-associated h
gaucacggagccggcc

SEQ ID NO: 2152252 - RNA, 20 nt, Human herpesvirus 8 [Kaposi`s sarcoma-associated h
auggcccacggggacaugga

SEQ ID NO: 2152253 - RNA, 14 nt, Human herpesvirus 8 [Kaposi`s sarcoma-associated h
gcucucgcugcuca

SEQ ID NO: 2152254 - RNA, 22 nt, Human herpesvirus 8 [Kaposi`s sarcoma-associated h
gcuugcacgccaacccucagug

SEQ ID NO: 2152255 - RNA, 22 nt, Human herpesvirus 8 [Kaposi`s sarcoma-associated h
ccgucugugaagucucccugcg

SEQ ID NO: 2152256 - RNA, 16 nt, Human herpesvirus 8 [Kaposi`s sarcoma-associated h
cugucuacagucacua

SEQ ID NO: 2152257 - RNA, 16 nt, Human herpesvirus 8 [Kaposi`s sarcoma-associated h
ccagaucacccagugu

SEQ ID NO: 2152258 - RNA, 13 nt, Human herpesvirus 8 [Kaposi`s sarcoma-associated h
agaaaacugucuc

SEQ ID NO: 2152259 - RNA, 15 nt, Human herpesvirus 8 [Kaposi`s sarcoma-associated h
ugagauagccacaua

SEQ ID NO: 2152260 - RNA, 19 nt, Human herpesvirus 8 [Kaposi`s sarcoma-associated h
uggggguuggguggggaga

SEQ ID NO: 2152261 - RNA, 19 nt, Human herpesvirus 8 [Kaposi`s sarcoma-associated h
cucccggaaacggacgcca

SEQ ID NO: 2152262 - RNA, 17 nt, Human herpesvirus 8 [Kaposi`s sarcoma-associated h
ugcgcgucagcaguguu

SEQ ID NO: 2152263 - RNA, 18 nt, Human herpesvirus 8 [Kaposi`s sarcoma-associated h
ggacucugguacgcaagg

SEQ ID NO: 2152264 - RNA, 17 nt, Human herpesvirus 8 [Kaposi`s sarcoma-associated h
ucggaaggcacaacucu

SEQ ID NO: 2152265 - RNA, 15 nt, Human herpesvirus 8 [Kaposi`s sarcoma-associated h
uggcagcccagccuc

SEQ ID NO: 2152266 - RNA, 22 nt, Human herpesvirus 8 [Kaposi`s sarcoma-associated h
augaaaaguguucccaaaaaac

SEQ ID NO: 2152267 - RNA, 16 nt, Human herpesvirus 8 [Kaposi`s sarcoma-associated h
gauaaucuccuggaga

SEQ ID NO: 2152268 - RNA, 14 nt, Human herpesvirus 8 [Kaposi`s sarcoma-associated h
gauacacuacuuau

SEQ ID NO: 2152269 - RNA, 14 nt, Human herpesvirus 8 [Kaposi`s sarcoma-associated h
acaugcugccacug

SEQ ID NO: 2152270 - RNA, 17 nt, Human herpesvirus 8 [Kaposi`s sarcoma-associated h
ugaguuccacacagauu

SEQ ID NO: 2152271 - RNA, 12 nt, Human herpesvirus 8 [Kaposi`s sarcoma-associated h
gagggaucccag

SEQ ID NO: 2152272 - RNA, 16 nt, Human herpesvirus 8 [Kaposi`s sarcoma-associated h
ccgucuccgccaggga

SEQ ID NO: 2152273 - RNA, 16 nt, Human herpesvirus 8 [Kaposi`s sarcoma-associated h
ucccacgaugggaacu

SEQ ID NO: 2152274 - RNA, 14 nt, Human herpesvirus 8 [Kaposi`s sarcoma-associated h
agauggguccguau

SEQ ID NO: 2152275 - RNA, 21 nt, Human herpesvirus 8 [Kaposi`s sarcoma-associated h
ggccaacaucaacaggagggc

SEQ ID NO: 2152276 - RNA, 19 nt, Human herpesvirus 8 [Kaposi`s sarcoma-associated h
cgugccuucgaggccaggc

SEQ ID NO: 2152277 - RNA, 23 nt, Human herpesvirus 8 [Kaposi`s sarcoma-associated h
ggagugcugaccacggcacagga

SEQ ID NO: 2152278 - RNA, 14 nt, Human herpesvirus 8 [Kaposi`s sarcoma-associated h
uaaacgacagcucg

SEQ ID NO: 2152279 - RNA, 15 nt, Human herpesvirus 8 [Kaposi`s sarcoma-associated h
aacaugcaacaagca

SEQ ID NO: 2152280 - RNA, 17 nt, Human herpesvirus 8 [Kaposi`s sarcoma-associated h
cugcccucaaauucuca

SEQ ID NO: 2152281 - RNA, 20 nt, Human herpesvirus 8 [Kaposi`s sarcoma-associated h
ugucugcguuccacaaacac

SEQ ID NO: 2152282 - RNA, 18 nt, Human herpesvirus 8 [Kaposi`s sarcoma-associated h
caggccaagauccaaccc

SEQ ID NO: 2152283 - RNA, 11 nt, Human herpesvirus 8 [Kaposi`s sarcoma-associated h
cggcagcaccu

SEQ ID NO: 2152284 - RNA, 21 nt, Human herpesvirus 8 [Kaposi`s sarcoma-associated h
ggccagagguuugaggcgcug

SEQ ID NO: 2152285 - RNA, 19 nt, Human herpesvirus 8 [Kaposi`s sarcoma-associated h
caaacuucggaauuuccua

SEQ ID NO: 2152286 - RNA, 16 nt, Human herpesvirus 8 [Kaposi`s sarcoma-associated h
gcugcagcuggacugg

SEQ ID NO: 2152287 - RNA, 16 nt, Human herpesvirus 8 [Kaposi`s sarcoma-associated h
aacaaggaaugcauau

SEQ ID NO: 2152288 - RNA, 21 nt, Human herpesvirus 8 [Kaposi`s sarcoma-associated h
cauuugcgugcaaaaugugcu

SEQ ID NO: 2152289 - RNA, 22 nt, Human herpesvirus 8 [Kaposi`s sarcoma-associated h
gccucccguucccaugaugcag

SEQ ID NO: 2152290 - RNA, 23 nt, Human herpesvirus 8 [Kaposi`s sarcoma-associated h
gaccacauaauuggauggggcau

SEQ ID NO: 2152291 - RNA, 17 nt, Human herpesvirus 8 [Kaposi`s sarcoma-associated h
gcgcagcuuuccuguga

SEQ ID NO: 2152292 - RNA, 19 nt, Human herpesvirus 8 [Kaposi`s sarcoma-associated h
aggaagcauccggacugag

SEQ ID NO: 2152293 - RNA, 20 nt, Human herpesvirus 8 [Kaposi`s sarcoma-associated h
acaucuguguacaaaccaaa

SEQ ID NO: 2152294 - RNA, 14 nt, Human herpesvirus 8 [Kaposi`s sarcoma-associated h
ucacuccauucccg

SEQ ID NO: 2152295 - RNA, 19 nt, Human herpesvirus 8 [Kaposi`s sarcoma-associated h
acuagaauuggagcacuuu

SEQ ID NO: 2152296 - RNA, 23 nt, Human herpesvirus 8 [Kaposi`s sarcoma-associated h
cccaguuaaccggcuuguacagu

SEQ ID NO: 2152297 - RNA, 23 nt, Human herpesvirus 8 [Kaposi`s sarcoma-associated h
caugucgcacacuuccaccuccc

SEQ ID NO: 2152298 - RNA, 16 nt, Human herpesvirus 8 [Kaposi`s sarcoma-associated h
ccaguguguuucugug

SEQ ID NO: 2152299 - RNA, 17 nt, Human herpesvirus 8 [Kaposi`s sarcoma-associated h
cacuagcagaaaacugu

SEQ ID NO: 2152300 - RNA, 17 nt, Human herpesvirus 8 [Kaposi`s sarcoma-associated h
cacucagguguuuucca

SEQ ID NO: 2152301 - RNA, 16 nt, Human herpesvirus 8 [Kaposi`s sarcoma-associated h
cacgucgcucuuuacu

SEQ ID NO: 2152302 - RNA, 17 nt, Human herpesvirus 8 [Kaposi`s sarcoma-associated h
cuggucgguucacugcu

SEQ ID NO: 2152303 - RNA, 17 nt, Human herpesvirus 8 [Kaposi`s sarcoma-associated h
gcgccacagucgagccg

SEQ ID NO: 2152304 - RNA, 13 nt, Human herpesvirus 8 [Kaposi`s sarcoma-associated h
gcgcggaccuguu

SEQ ID NO: 2152305 - RNA, 15 nt, Human herpesvirus 8 [Kaposi`s sarcoma-associated h
ucccagugccucagc

SEQ ID NO: 2152306 - RNA, 22 nt, Human herpesvirus 8 [Kaposi`s sarcoma-associated h
gcgagaauggcgugccagugga

SEQ ID NO: 2152307 - RNA, 18 nt, Human herpesvirus 8 [Kaposi`s sarcoma-associated h
ccagugccucagcaacug

SEQ ID NO: 2152308 - RNA, 15 nt, Human herpesvirus 8 [Kaposi`s sarcoma-associated h
gucuccgccagggac

SEQ ID NO: 2152309 - RNA, 16 nt, Human herpesvirus 8 [Kaposi`s sarcoma-associated h
cagagucuacgugcca

SEQ ID NO: 2152310 - RNA, 15 nt, Human herpesvirus 8 [Kaposi`s sarcoma-associated h
cgguggguggcuugg

SEQ ID NO: 2152311 - RNA, 20 nt, Human herpesvirus 8 [Kaposi`s sarcoma-associated h
cuauuugccguccuguggac

SEQ ID NO: 2152312 - RNA, 15 nt, Human herpesvirus 8 [Kaposi`s sarcoma-associated h
auuuuucaucugaaa

SEQ ID NO: 2152313 - RNA, 11 nt, Human herpesvirus 8 [Kaposi`s sarcoma-associated h
uguuuccugca

SEQ ID NO: 2152314 - RNA, 22 nt, Human herpesvirus 8 [Kaposi`s sarcoma-associated h
ucgagggcauacccguggcuca

SEQ ID NO: 2152315 - RNA, 21 nt, Human herpesvirus 8 [Kaposi`s sarcoma-associated h
uaacauaauuguaauguguuu

SEQ ID NO: 2152316 - RNA, 17 nt, Human herpesvirus 8 [Kaposi`s sarcoma-associated h
cagucgagccgccagga

SEQ ID NO: 2152317 - RNA, 19 nt, Human herpesvirus 8 [Kaposi`s sarcoma-associated h
uccuccuaaacguguucau

SEQ ID NO: 2152318 - RNA, 17 nt, Human herpesvirus 8 [Kaposi`s sarcoma-associated h
ucagagagacccugggc

SEQ ID NO: 2152319 - RNA, 19 nt, Human herpesvirus 8 [Kaposi`s sarcoma-associated h
cgauuucacugucacuuuc

SEQ ID NO: 2152320 - RNA, 20 nt, Human herpesvirus 8 [Kaposi`s sarcoma-associated h
cuuaacuguuuacugcuguu

SEQ ID NO: 2152321 - RNA, 19 nt, Human herpesvirus 8 [Kaposi`s sarcoma-associated h
accccagccccuugguucc

SEQ ID NO: 2152322 - RNA, 13 nt, Human herpesvirus 8 [Kaposi`s sarcoma-associated h
acuaaucaguguu

SEQ ID NO: 2152323 - RNA, 16 nt, Human herpesvirus 8 [Kaposi`s sarcoma-associated h
guuaugggugugugcc

SEQ ID NO: 2152324 - RNA, 17 nt, Human herpesvirus 8 [Kaposi`s sarcoma-associated h
acggccaguuauaugca

SEQ ID NO: 2152325 - RNA, 20 nt, Human herpesvirus 8 [Kaposi`s sarcoma-associated h
auuaaacgacaaagugauuc

SEQ ID NO: 2152326 - RNA, 17 nt, Human herpesvirus 8 [Kaposi`s sarcoma-associated h
gaucucuggagacggcc

SEQ ID NO: 2152327 - RNA, 21 nt, Human herpesvirus 8 [Kaposi`s sarcoma-associated h
auggccuccacccaccaagcu

SEQ ID NO: 2152328 - RNA, 12 nt, Human herpesvirus 8 [Kaposi`s sarcoma-associated h
guuugagucuuu

SEQ ID NO: 2152329 - RNA, 22 nt, Human herpesvirus 8 [Kaposi`s sarcoma-associated h
uacaagcgaucacgacggauuu

SEQ ID NO: 2152330 - RNA, 19 nt, Human herpesvirus 8 [Kaposi`s sarcoma-associated h
ccuaggugggugugcauuu

SEQ ID NO: 2152331 - RNA, 19 nt, Human herpesvirus 8 [Kaposi`s sarcoma-associated h
agcguuggcuagucauggc

SEQ ID NO: 2152332 - RNA, 18 nt, Human herpesvirus 8 [Kaposi`s sarcoma-associated h
auuagugacauacaugag

SEQ ID NO: 2152333 - RNA, 13 nt, Human herpesvirus 8 [Kaposi`s sarcoma-associated h
ccucgcaagcuug

SEQ ID NO: 2152334 - RNA, 23 nt, Human herpesvirus 8 [Kaposi`s sarcoma-associated h
ccacuacggucccguugucccuc

SEQ ID NO: 2152335 - RNA, 18 nt, Human herpesvirus 8 [Kaposi`s sarcoma-associated h
cccgacaaccggcugggg

SEQ ID NO: 2152336 - RNA, 19 nt, Human herpesvirus 8 [Kaposi`s sarcoma-associated h
auuggaggcacauaaggaa

SEQ ID NO: 2152337 - RNA, 15 nt, Human herpesvirus 8 [Kaposi`s sarcoma-associated h
uguuuauaacaauga

SEQ ID NO: 2152338 - RNA, 18 nt, Human herpesvirus 8 [Kaposi`s sarcoma-associated h
ggauagugucuggcuggc

SEQ ID NO: 2152339 - RNA, 21 nt, Human herpesvirus 8 [Kaposi`s sarcoma-associated h
augucucgugacggugacauu

SEQ ID NO: 2152340 - RNA, 10 nt, Human herpesvirus 8 [Kaposi`s sarcoma-associated h
aaugugacaa

SEQ ID NO: 2152341 - RNA, 19 nt, Human herpesvirus 8 [Kaposi`s sarcoma-associated h
cugcaauguacugccauga

SEQ ID NO: 2152342 - RNA, 21 nt, Human herpesvirus 8 [Kaposi`s sarcoma-associated h
cuuugcagugucuaugucugu

SEQ ID NO: 2152343 - RNA, 16 nt, Human herpesvirus 8 [Kaposi`s sarcoma-associated h
ccaaggccugugccca

SEQ ID NO: 2152344 - RNA, 23 nt, Human herpesvirus 8 [Kaposi`s sarcoma-associated h
acgcugucccgugcccaggccgc

SEQ ID NO: 2152345 - RNA, 19 nt, Human herpesvirus 8 [Kaposi`s sarcoma-associated h
aggugccgucgucgagcac

SEQ ID NO: 2152346 - RNA, 20 nt, Human herpesvirus 8 [Kaposi`s sarcoma-associated h
cagcagcugcuuggcgccca

SEQ ID NO: 2152347 - RNA, 18 nt, Human herpesvirus 8 [Kaposi`s sarcoma-associated h
ccggaugcagggccuggc

SEQ ID NO: 2152348 - RNA, 21 nt, Human herpesvirus 8 [Kaposi`s sarcoma-associated h
ggugucaagucucaugcuuua

SEQ ID NO: 2152349 - RNA, 15 nt, Human herpesvirus 8 [Kaposi`s sarcoma-associated h
agcuauaggacagaa

SEQ ID NO: 2152350 - RNA, 19 nt, Human herpesvirus 8 [Kaposi`s sarcoma-associated h
cagcacauaugucucccuu

SEQ ID NO: 2152351 - RNA, 15 nt, Human herpesvirus 8 [Kaposi`s sarcoma-associated h
uaagauaaucuaaau

SEQ ID NO: 2152352 - RNA, 16 nt, Human herpesvirus 8 [Kaposi`s sarcoma-associated h
aacuuuauuacaggua

SEQ ID NO: 2152353 - RNA, 18 nt, Human herpesvirus 8 [Kaposi`s sarcoma-associated h
caggucgcagagaccucu

SEQ ID NO: 2152354 - RNA, 20 nt, Human herpesvirus 8 [Kaposi`s sarcoma-associated h
ugcgauagggggaugagcca

SEQ ID NO: 2152355 - RNA, 16 nt, Human herpesvirus 8 [Kaposi`s sarcoma-associated h
caucguggugcccugc

SEQ ID NO: 2152356 - RNA, 23 nt, Human herpesvirus 8 [Kaposi`s sarcoma-associated h
guccccaauuucaguacuccuuc

SEQ ID NO: 2152357 - RNA, 15 nt, Human herpesvirus 8 [Kaposi`s sarcoma-associated h
cggaugacagggaag

SEQ ID NO: 2152358 - RNA, 20 nt, Human herpesvirus 8 [Kaposi`s sarcoma-associated h
gaccuaaccgcaaagauaag

SEQ ID NO: 2152359 - RNA, 18 nt, Human herpesvirus 8 [Kaposi`s sarcoma-associated h
cugguggaacaugcugcc

SEQ ID NO: 2152360 - RNA, 14 nt, Human herpesvirus 8 [Kaposi`s sarcoma-associated h
gccagauccuccac

SEQ ID NO: 2152361 - RNA, 23 nt, Human herpesvirus 8 [Kaposi`s sarcoma-associated h
gaacggacaauucugagaaagau

SEQ ID NO: 2152362 - RNA, 15 nt, Human herpesvirus 8 [Kaposi`s sarcoma-associated h
gcucucgcugcucag

SEQ ID NO: 2152363 - RNA, 17 nt, Human herpesvirus 8 [Kaposi`s sarcoma-associated h
cagggcagcgugucgcc

SEQ ID NO: 2152364 - RNA, 18 nt, Human herpesvirus 8 [Kaposi`s sarcoma-associated h
uaaagagggaucccaggc

SEQ ID NO: 2152365 - RNA, 18 nt, Human herpesvirus 8 [Kaposi`s sarcoma-associated h
ugccauggagaauaucca

SEQ ID NO: 2152366 - RNA, 12 nt, Human herpesvirus 8 [Kaposi`s sarcoma-associated h
acuuacagcaug

SEQ ID NO: 2152367 - RNA, 15 nt, Human herpesvirus 8 [Kaposi`s sarcoma-associated h
cuacggaucaugcuc

SEQ ID NO: 2152368 - RNA, 20 nt, Human herpesvirus 8 [Kaposi`s sarcoma-associated h
gccugcguuaacuucccagg

SEQ ID NO: 2152369 - RNA, 17 nt, Human herpesvirus 8 [Kaposi`s sarcoma-associated h
uguaaaacacuguuugg

SEQ ID NO: 2152370 - RNA, 22 nt, Human herpesvirus 8 [Kaposi`s sarcoma-associated h
gccuucgcaaguuuaucucaga

SEQ ID NO: 2152371 - RNA, 21 nt, Human herpesvirus 8 [Kaposi`s sarcoma-associated h
cuacgaaaaucuggcaugcug

SEQ ID NO: 2152372 - RNA, 18 nt, Human herpesvirus 8 [Kaposi`s sarcoma-associated h
augcucaggucugucacu

SEQ ID NO: 2152373 - RNA, 20 nt, Human herpesvirus 8 [Kaposi`s sarcoma-associated h
gucgccgguagcugccuggu

SEQ ID NO: 2152374 - RNA, 21 nt, Human herpesvirus 8 [Kaposi`s sarcoma-associated h
gagggcuccucgucuguguca

SEQ ID NO: 2152375 - RNA, 17 nt, Human herpesvirus 8 [Kaposi`s sarcoma-associated h
ggucucucuugcugguc

SEQ ID NO: 2152376 - RNA, 18 nt, Human herpesvirus 8 [Kaposi`s sarcoma-associated h
gaaacaaagcacuggcug

SEQ ID NO: 2152377 - RNA, 23 nt, Human herpesvirus 8 [Kaposi`s sarcoma-associated h
gccaggaacacgcgaaugcagca

SEQ ID NO: 2152378 - RNA, 24 nt, Human herpesvirus 8 [Kaposi`s sarcoma-associated h
cauugugugguuuggcagucacuu

SEQ ID NO: 2152379 - RNA, 12 nt, Human herpesvirus 8 [Kaposi`s sarcoma-associated h
uugcauugcucu

SEQ ID NO: 2152380 - RNA, 20 nt, Human herpesvirus 8 [Kaposi`s sarcoma-associated h
uggcauuauaaacccauccc

SEQ ID NO: 2152381 - RNA, 21 nt, Human herpesvirus 8 [Kaposi`s sarcoma-associated h
caugggaccguguguggcugu

SEQ ID NO: 2152382 - RNA, 14 nt, Human herpesvirus 8 [Kaposi`s sarcoma-associated h
agcugcagccagga

SEQ ID NO: 2152383 - RNA, 18 nt, Human herpesvirus 8 [Kaposi`s sarcoma-associated h
guaaauuuaggaaacacg

SEQ ID NO: 2152384 - RNA, 14 nt, Human herpesvirus 8 [Kaposi`s sarcoma-associated h
guaagaggacccag

SEQ ID NO: 2152385 - RNA, 16 nt, Human herpesvirus 8 [Kaposi`s sarcoma-associated h
cauacgucccucuugg

SEQ ID NO: 2152386 - RNA, 17 nt, Human herpesvirus 8 [Kaposi`s sarcoma-associated h
gcauuuuucccuccugc

SEQ ID NO: 2152387 - RNA, 18 nt, Human herpesvirus 8 [Kaposi`s sarcoma-associated h
aauccuuaagaaagugga

SEQ ID NO: 2152388 - RNA, 12 nt, Human herpesvirus 8 [Kaposi`s sarcoma-associated h
agagccagccug

SEQ ID NO: 2152389 - RNA, 23 nt, Human herpesvirus 8 [Kaposi`s sarcoma-associated h
uuaacagccacgacguggcccac

SEQ ID NO: 2152390 - RNA, 16 nt, Human herpesvirus 8 [Kaposi`s sarcoma-associated h
gcugucccgugcccag

SEQ ID NO: 2152391 - RNA, 18 nt, Human herpesvirus 8 [Kaposi`s sarcoma-associated h
auagggggaugagccaga

SEQ ID NO: 2152392 - RNA, 22 nt, Human herpesvirus 8 [Kaposi`s sarcoma-associated h
uggaggaagcauccggacugag

SEQ ID NO: 2152393 - RNA, 20 nt, Human herpesvirus 8 [Kaposi`s sarcoma-associated h
uugaaaaaaaauaaacauac

SEQ ID NO: 2152394 - RNA, 15 nt, Human herpesvirus 8 [Kaposi`s sarcoma-associated h
cugauuagcacugua

SEQ ID NO: 2152395 - RNA, 17 nt, Human herpesvirus 8 [Kaposi`s sarcoma-associated h
uggaggaagagggaugg

SEQ ID NO: 2152396 - RNA, 16 nt, Human herpesvirus 8 [Kaposi`s sarcoma-associated h
caucucgguacugcgc

SEQ ID NO: 2152397 - RNA, 22 nt, Human herpesvirus 8 [Kaposi`s sarcoma-associated h
aggagggcagguuaacguuucc

SEQ ID NO: 2152398 - RNA, 19 nt, Human herpesvirus 8 [Kaposi`s sarcoma-associated h
cacuuccucuaucagcugc

SEQ ID NO: 2152399 - RNA, 19 nt, Human herpesvirus 8 [Kaposi`s sarcoma-associated h
aucaggcuagugcuguaau

SEQ ID NO: 2152400 - RNA, 23 nt, Human herpesvirus 8 [Kaposi`s sarcoma-associated h
gagugucuucccguacuggggga

SEQ ID NO: 2152401 - RNA, 13 nt, Human herpesvirus 8 [Kaposi`s sarcoma-associated h
aggaggagggcag

SEQ ID NO: 2152402 - RNA, 21 nt, Human herpesvirus 8 [Kaposi`s sarcoma-associated h
accugccggacacugaacccu

SEQ ID NO: 2152403 - RNA, 19 nt, Human herpesvirus 8 [Kaposi`s sarcoma-associated h
cuggcagggugggaggaag

SEQ ID NO: 2152404 - RNA, 19 nt, Human herpesvirus 8 [Kaposi`s sarcoma-associated h
ccaccguggaguugccugu

SEQ ID NO: 2152405 - RNA, 14 nt, Human herpesvirus 8 [Kaposi`s sarcoma-associated h
auuaacaaacaagg

SEQ ID NO: 2152406 - RNA, 22 nt, Human herpesvirus 8 [Kaposi`s sarcoma-associated h
caggccaagauccaacccagca

SEQ ID NO: 2152407 - RNA, 14 nt, Human herpesvirus 8 [Kaposi`s sarcoma-associated h
uaugaaaauacagg

SEQ ID NO: 2152408 - RNA, 14 nt, Human herpesvirus 8 [Kaposi`s sarcoma-associated h
cgggguuuccaggg

SEQ ID NO: 2152409 - RNA, 19 nt, Human herpesvirus 8 [Kaposi`s sarcoma-associated h
uaucaggggaaccacggcg

SEQ ID NO: 2152410 - RNA, 21 nt, Human herpesvirus 8 [Kaposi`s sarcoma-associated h
uauuuugaugguguuggacac

SEQ ID NO: 2152411 - RNA, 15 nt, Human herpesvirus 8 [Kaposi`s sarcoma-associated h
cuggagacggggaag

SEQ ID NO: 2152412 - RNA, 19 nt, Human herpesvirus 8 [Kaposi`s sarcoma-associated h
gguguguugaaggacggau

SEQ ID NO: 2152413 - RNA, 18 nt, Human herpesvirus 8 [Kaposi`s sarcoma-associated h
cauucguaagaggaccca

SEQ ID NO: 2152414 - RNA, 17 nt, Human herpesvirus 8 [Kaposi`s sarcoma-associated h
ggcgagcccguguggga

SEQ ID NO: 2152415 - RNA, 15 nt, Human herpesvirus 8 [Kaposi`s sarcoma-associated h
auauaauuaucacgg

SEQ ID NO: 2152416 - RNA, 17 nt, Human herpesvirus 8 [Kaposi`s sarcoma-associated h
ccacguggugcugccua

SEQ ID NO: 2152417 - RNA, 13 nt, Human herpesvirus 8 [Kaposi`s sarcoma-associated h
agacuuucuaaag

SEQ ID NO: 2152418 - RNA, 14 nt, Human herpesvirus 8 [Kaposi`s sarcoma-associated h
caccaagaaggaau

SEQ ID NO: 2152419 - RNA, 15 nt, Human herpesvirus 8 [Kaposi`s sarcoma-associated h
cauucgugugguuug

SEQ ID NO: 2152420 - RNA, 16 nt, Human herpesvirus 8 [Kaposi`s sarcoma-associated h
ccuccacccaccaagc

SEQ ID NO: 2152421 - RNA, 17 nt, Human herpesvirus 8 [Kaposi`s sarcoma-associated h
ugcacauuuucagauau

SEQ ID NO: 2152422 - RNA, 15 nt, Human herpesvirus 8 [Kaposi`s sarcoma-associated h
cauccauuauagcac

SEQ ID NO: 2152423 - RNA, 13 nt, Human herpesvirus 8 [Kaposi`s sarcoma-associated h
ugcagugugcagu

SEQ ID NO: 2152424 - RNA, 17 nt, Human herpesvirus 8 [Kaposi`s sarcoma-associated h
acccugccaaaugccca

SEQ ID NO: 2152425 - RNA, 15 nt, Human herpesvirus 8 [Kaposi`s sarcoma-associated h
gccggcaccauggcc

SEQ ID NO: 2152426 - RNA, 21 nt, Human herpesvirus 8 [Kaposi`s sarcoma-associated h
cuuccucuaaggcccccacca

SEQ ID NO: 2152427 - RNA, 17 nt, Human herpesvirus 8 [Kaposi`s sarcoma-associated h
uaaaagagagaauuaga

SEQ ID NO: 2152428 - RNA, 22 nt, Human herpesvirus 8 [Kaposi`s sarcoma-associated h
cuuuaucaugugaacaauaaac

SEQ ID NO: 2152429 - RNA, 14 nt, Human herpesvirus 8 [Kaposi`s sarcoma-associated h
cccauagccaucca

SEQ ID NO: 2152430 - RNA, 20 nt, Human herpesvirus 8 [Kaposi`s sarcoma-associated h
uagagcgacugcuggcuuca

SEQ ID NO: 2152431 - RNA, 16 nt, Human herpesvirus 8 [Kaposi`s sarcoma-associated h
aggucuccgagcacug

SEQ ID NO: 2152432 - RNA, 12 nt, Human herpesvirus 8 [Kaposi`s sarcoma-associated h
gcgucuuggggg

SEQ ID NO: 2152433 - RNA, 17 nt, Human herpesvirus 8 [Kaposi`s sarcoma-associated h
gagucuuucuagcagag

SEQ ID NO: 2152434 - RNA, 19 nt, Human herpesvirus 8 [Kaposi`s sarcoma-associated h
cguguuugggcaaaacaca

SEQ ID NO: 2152435 - RNA, 20 nt, Human herpesvirus 8 [Kaposi`s sarcoma-associated h
caagcuguuggcgcuuugcu

SEQ ID NO: 2152436 - RNA, 16 nt, Human herpesvirus 8 [Kaposi`s sarcoma-associated h
ggcggccgcuaagaaa

SEQ ID NO: 2152437 - RNA, 14 nt, Human herpesvirus 8 [Kaposi`s sarcoma-associated h
cucguguguuuucg

SEQ ID NO: 2152438 - RNA, 15 nt, Human herpesvirus 8 [Kaposi`s sarcoma-associated h
gccguacauggagcg

SEQ ID NO: 2152439 - RNA, 18 nt, Human herpesvirus 8 [Kaposi`s sarcoma-associated h
aggaccucgucuagcaca

SEQ ID NO: 2152440 - RNA, 16 nt, Human herpesvirus 8 [Kaposi`s sarcoma-associated h
cagguaaaacggccaa

SEQ ID NO: 2152441 - RNA, 23 nt, Human herpesvirus 8 [Kaposi`s sarcoma-associated h
cuugcgucuucaccuucuggcuu

SEQ ID NO: 2152442 - RNA, 20 nt, Human herpesvirus 8 [Kaposi`s sarcoma-associated h
aggugguucuauauccacca

SEQ ID NO: 2152443 - RNA, 16 nt, Human herpesvirus 8 [Kaposi`s sarcoma-associated h
gagcggacgccauuug

SEQ ID NO: 2152444 - RNA, 13 nt, Human herpesvirus 8 [Kaposi`s sarcoma-associated h
ccaacuugcgucu

SEQ ID NO: 2152445 - RNA, 22 nt, Human herpesvirus 8 [Kaposi`s sarcoma-associated h
ccgaaugcguucuccugcauac

SEQ ID NO: 2152446 - RNA, 20 nt, Human herpesvirus 8 [Kaposi`s sarcoma-associated h
aaacgccccucuuggcuguu

SEQ ID NO: 2152447 - RNA, 14 nt, Human herpesvirus 8 [Kaposi`s sarcoma-associated h
ggagccguccacca

SEQ ID NO: 2152448 - RNA, 18 nt, Human herpesvirus 8 [Kaposi`s sarcoma-associated h
aaugaaauuguggcacug

SEQ ID NO: 2152449 - RNA, 21 nt, Human herpesvirus 8 [Kaposi`s sarcoma-associated h
ccuggagcagacgugcccaga

SEQ ID NO: 2152450 - RNA, 13 nt, Human herpesvirus 8 [Kaposi`s sarcoma-associated h
gcagugugcagua

SEQ ID NO: 2152451 - RNA, 12 nt, Human herpesvirus 8 [Kaposi`s sarcoma-associated h
gagucaggcgug

SEQ ID NO: 2152452 - RNA, 18 nt, Human herpesvirus 8 [Kaposi`s sarcoma-associated h
agacuaaaaaggccaccg

SEQ ID NO: 2152453 - RNA, 23 nt, Human herpesvirus 8 [Kaposi`s sarcoma-associated h
uaagaguuccccgggaacggaca

SEQ ID NO: 2152454 - RNA, 16 nt, Human herpesvirus 8 [Kaposi`s sarcoma-associated h
uacgaggcaauugcca

SEQ ID NO: 2152455 - RNA, 23 nt, Human herpesvirus 8 [Kaposi`s sarcoma-associated h
aggcccucuucuguugccaggcg

SEQ ID NO: 2152456 - RNA, 16 nt, Human herpesvirus 8 [Kaposi`s sarcoma-associated h
guuuaccugcacucca

SEQ ID NO: 2152457 - RNA, 14 nt, Human herpesvirus 8 [Kaposi`s sarcoma-associated h
ucccagcaauaaac

SEQ ID NO: 2152458 - RNA, 18 nt, Human herpesvirus 8 [Kaposi`s sarcoma-associated h
guugcugauuacgaaaag

SEQ ID NO: 2152459 - RNA, 21 nt, Human herpesvirus 8 [Kaposi`s sarcoma-associated h
agaaaauuucuguuuccagug

SEQ ID NO: 2152460 - RNA, 20 nt, Human herpesvirus 8 [Kaposi`s sarcoma-associated h
agucgccgguagcugccugg

SEQ ID NO: 2152461 - RNA, 21 nt, Human herpesvirus 8 [Kaposi`s sarcoma-associated h
aaccauuuuuuacggacaaua

SEQ ID NO: 2152462 - RNA, 16 nt, Human herpesvirus 8 [Kaposi`s sarcoma-associated h
auaaagcugagccaca

SEQ ID NO: 2152463 - RNA, 20 nt, Human herpesvirus 8 [Kaposi`s sarcoma-associated h
ucacggccguguuuuucugg

SEQ ID NO: 2152464 - RNA, 19 nt, Human herpesvirus 8 [Kaposi`s sarcoma-associated h
aggaccuuacgauggaaga

SEQ ID NO: 2152465 - RNA, 17 nt, Human herpesvirus 8 [Kaposi`s sarcoma-associated h
gucugcuuuugcgcagg

SEQ ID NO: 2152466 - RNA, 17 nt, Human herpesvirus 8 [Kaposi`s sarcoma-associated h
aagcuuugcagccaggu

SEQ ID NO: 2152467 - RNA, 20 nt, Human herpesvirus 8 [Kaposi`s sarcoma-associated h
cacauccgcugccaccugcg

SEQ ID NO: 2152468 - RNA, 20 nt, Human herpesvirus 8 [Kaposi`s sarcoma-associated h
cgccggagagcgucaucugc

SEQ ID NO: 2152469 - RNA, 16 nt, Human herpesvirus 8 [Kaposi`s sarcoma-associated h
ucguugaucuucuuga

SEQ ID NO: 2152470 - RNA, 22 nt, Human herpesvirus 8 [Kaposi`s sarcoma-associated h
gaauguggaauauaaugugaaa

SEQ ID NO: 2152471 - RNA, 20 nt, Human herpesvirus 8 [Kaposi`s sarcoma-associated h
uaaccgcaaagauaagccaa

SEQ ID NO: 2152472 - RNA, 13 nt, Human herpesvirus 8 [Kaposi`s sarcoma-associated h
ucagcugcagcca

SEQ ID NO: 2152473 - RNA, 13 nt, Human herpesvirus 8 [Kaposi`s sarcoma-associated h
cccuagccaugga

SEQ ID NO: 2152474 - RNA, 14 nt, Human herpesvirus 8 [Kaposi`s sarcoma-associated h
gcccaggggcagac

SEQ ID NO: 2152475 - RNA, 12 nt, Human herpesvirus 8 [Kaposi`s sarcoma-associated h
gaccugcuucac

SEQ ID NO: 2152476 - RNA, 13 nt, Human herpesvirus 8 [Kaposi`s sarcoma-associated h
aaugcggagagga

SEQ ID NO: 2152477 - RNA, 11 nt, Human herpesvirus 8 [Kaposi`s sarcoma-associated h
gcgcugugcuu

SEQ ID NO: 2152478 - RNA, 13 nt, Human herpesvirus 8 [Kaposi`s sarcoma-associated h
agagccagccugg

SEQ ID NO: 2152479 - RNA, 14 nt, Human herpesvirus 8 [Kaposi`s sarcoma-associated h
ggauucgugcagcc

SEQ ID NO: 2152480 - RNA, 19 nt, Human herpesvirus 8 [Kaposi`s sarcoma-associated h
ugcgcgcuggcucagacac

SEQ ID NO: 2152481 - RNA, 15 nt, Human herpesvirus 8 [Kaposi`s sarcoma-associated h
cuguucucgccugga

SEQ ID NO: 2152482 - RNA, 19 nt, Human herpesvirus 8 [Kaposi`s sarcoma-associated h
uccaagacuaaaaaggcca

SEQ ID NO: 2152483 - RNA, 15 nt, Human herpesvirus 8 [Kaposi`s sarcoma-associated h
gauccgcaaugucag

SEQ ID NO: 2152484 - RNA, 14 nt, Human herpesvirus 8 [Kaposi`s sarcoma-associated h
guaaagaaaguaga

SEQ ID NO: 2152485 - RNA, 15 nt, Human herpesvirus 8 [Kaposi`s sarcoma-associated h
acucuucgcugauga

SEQ ID NO: 2152486 - RNA, 15 nt, Human herpesvirus 8 [Kaposi`s sarcoma-associated h
gaggcuaggugccca

SEQ ID NO: 2152487 - RNA, 11 nt, Human herpesvirus 8 [Kaposi`s sarcoma-associated h
aauaaauguga

SEQ ID NO: 2152488 - RNA, 16 nt, Human herpesvirus 8 [Kaposi`s sarcoma-associated h
caaccuggcaagcagu

SEQ ID NO: 2152489 - RNA, 23 nt, Human herpesvirus 8 [Kaposi`s sarcoma-associated h
ccagccugaaacgucgcccaaau

SEQ ID NO: 2152490 - RNA, 20 nt, Human herpesvirus 8 [Kaposi`s sarcoma-associated h
gauaauugagcgcugugcuu

SEQ ID NO: 2152491 - RNA, 16 nt, Human herpesvirus 8 [Kaposi`s sarcoma-associated h
agggggaugagccaga

SEQ ID NO: 2152492 - RNA, 21 nt, Human herpesvirus 8 [Kaposi`s sarcoma-associated h
uacaauaaagccgagccacaa

SEQ ID NO: 2152493 - RNA, 21 nt, Human herpesvirus 8 [Kaposi`s sarcoma-associated h
agcuccuauugcaacugacca

SEQ ID NO: 2152494 - RNA, 17 nt, Human herpesvirus 8 [Kaposi`s sarcoma-associated h
ggccacauacgcucgcc

SEQ ID NO: 2152495 - RNA, 17 nt, Human herpesvirus 8 [Kaposi`s sarcoma-associated h
auccuuugggccguggu

SEQ ID NO: 2152496 - RNA, 22 nt, Human herpesvirus 8 [Kaposi`s sarcoma-associated h
gucuacaggggcuugacagagu

SEQ ID NO: 2152497 - RNA, 18 nt, Human herpesvirus 8 [Kaposi`s sarcoma-associated h
uuuucaaaugagugaaaa

SEQ ID NO: 2152498 - RNA, 19 nt, Human herpesvirus 8 [Kaposi`s sarcoma-associated h
ugccaacgaccugaugcag

SEQ ID NO: 2152499 - RNA, 15 nt, Human herpesvirus 8 [Kaposi`s sarcoma-associated h
cgaaagcuaugguuu

SEQ ID NO: 2152500 - RNA, 19 nt, Human herpesvirus 8 [Kaposi`s sarcoma-associated h
cuaucagcugcagccagga

SEQ ID NO: 2152501 - RNA, 17 nt, Human herpesvirus 8 [Kaposi`s sarcoma-associated h
ccugccaaaugcccaga

SEQ ID NO: 2152502 - RNA, 17 nt, Human herpesvirus 8 [Kaposi`s sarcoma-associated h
caugcgucgccguagug

SEQ ID NO: 2152503 - RNA, 16 nt, Human herpesvirus 8 [Kaposi`s sarcoma-associated h
acgugcaccagcucag

SEQ ID NO: 2152504 - RNA, 16 nt, Human herpesvirus 8 [Kaposi`s sarcoma-associated h
gccaugacaacugcca

SEQ ID NO: 2152505 - RNA, 11 nt, Human herpesvirus 8 [Kaposi`s sarcoma-associated h
auguaaauugg

SEQ ID NO: 2152506 - RNA, 14 nt, Human herpesvirus 8 [Kaposi`s sarcoma-associated h
uugugaagcauuuu

SEQ ID NO: 2152507 - RNA, 18 nt, Human herpesvirus 8 [Kaposi`s sarcoma-associated h
gaguccauggcaguggac

SEQ ID NO: 2152508 - RNA, 17 nt, Human herpesvirus 8 [Kaposi`s sarcoma-associated h
gauuccuccgcacagac

SEQ ID NO: 2152509 - RNA, 18 nt, Human herpesvirus 8 [Kaposi`s sarcoma-associated h
gaggguggacagugccug

SEQ ID NO: 2152510 - RNA, 21 nt, Human herpesvirus 8 [Kaposi`s sarcoma-associated h
acaggacccauuaacuuuccu

SEQ ID NO: 2152511 - RNA, 13 nt, Human herpesvirus 8 [Kaposi`s sarcoma-associated h
augguauggcgcu

SEQ ID NO: 2152512 - RNA, 17 nt, Human herpesvirus 8 [Kaposi`s sarcoma-associated h
guccauggcaguggaca

SEQ ID NO: 2152513 - RNA, 17 nt, Human herpesvirus 8 [Kaposi`s sarcoma-associated h
aaaacauagugccucau

SEQ ID NO: 2152514 - RNA, 12 nt, Human herpesvirus 8 [Kaposi`s sarcoma-associated h
guggugugccug

SEQ ID NO: 2152515 - RNA, 17 nt, Human herpesvirus 8 [Kaposi`s sarcoma-associated h
ucuggccugugcccaaa

SEQ ID NO: 2152516 - RNA, 19 nt, Human herpesvirus 8 [Kaposi`s sarcoma-associated h
ggauguaaguccggccacc

SEQ ID NO: 2152517 - RNA, 17 nt, Human herpesvirus 8 [Kaposi`s sarcoma-associated h
cagcaguagacgcaggc

SEQ ID NO: 2152518 - RNA, 23 nt, Human herpesvirus 8 [Kaposi`s sarcoma-associated h
cggcacacuacucccccuccuca

SEQ ID NO: 2152519 - RNA, 16 nt, Human herpesvirus 8 [Kaposi`s sarcoma-associated h
gcggagggcuguucuc

SEQ ID NO: 2152520 - RNA, 16 nt, Human herpesvirus 8 [Kaposi`s sarcoma-associated h
acgcggauaggcuggg

SEQ ID NO: 2152521 - RNA, 22 nt, Human herpesvirus 8 [Kaposi`s sarcoma-associated h
cugaugaaaucgagugggcgga

SEQ ID NO: 2152522 - RNA, 14 nt, Human herpesvirus 8 [Kaposi`s sarcoma-associated h
uguaugacugcccu

SEQ ID NO: 2152523 - RNA, 17 nt, Human herpesvirus 8 [Kaposi`s sarcoma-associated h
ggccauucuaggagacg

SEQ ID NO: 2152524 - RNA, 14 nt, Human herpesvirus 8 [Kaposi`s sarcoma-associated h
agaugagcaugacu

SEQ ID NO: 2152525 - RNA, 13 nt, Human herpesvirus 8 [Kaposi`s sarcoma-associated h
ggacuggcagggu

SEQ ID NO: 2152526 - RNA, 16 nt, Human herpesvirus 8 [Kaposi`s sarcoma-associated h
guauuaugccagggaa

SEQ ID NO: 2152527 - RNA, 21 nt, Human herpesvirus 8 [Kaposi`s sarcoma-associated h
ugacgcgugucccuuauuuca

SEQ ID NO: 2152528 - RNA, 19 nt, Human herpesvirus 8 [Kaposi`s sarcoma-associated h
gacuugauaaucuccugga

SEQ ID NO: 2152529 - RNA, 14 nt, Human herpesvirus 8 [Kaposi`s sarcoma-associated h
cucgugugcccuuc

SEQ ID NO: 2152530 - RNA, 13 nt, Human herpesvirus 8 [Kaposi`s sarcoma-associated h
gugagagaccccg

SEQ ID NO: 2152531 - RNA, 21 nt, Human herpesvirus 8 [Kaposi`s sarcoma-associated h
uuccaagagcgagugugccuc

SEQ ID NO: 2152532 - RNA, 16 nt, Human herpesvirus 8 [Kaposi`s sarcoma-associated h
gccaccgagaaggaag

SEQ ID NO: 2152533 - RNA, 19 nt, Human herpesvirus 8 [Kaposi`s sarcoma-associated h
uggguuguggugacgcugu

SEQ ID NO: 2152534 - RNA, 22 nt, Human herpesvirus 8 [Kaposi`s sarcoma-associated h
gucaugggaccguguguggcug

SEQ ID NO: 2152535 - RNA, 23 nt, Human herpesvirus 8 [Kaposi`s sarcoma-associated h
gacagggguguuaggucuggugg

SEQ ID NO: 2152536 - RNA, 23 nt, Human herpesvirus 8 [Kaposi`s sarcoma-associated h
cauucgugugguuugggagagcg

SEQ ID NO: 2152537 - RNA, 13 nt, Human herpesvirus 8 [Kaposi`s sarcoma-associated h
agagguuggucug

SEQ ID NO: 2152538 - RNA, 21 nt, Human herpesvirus 8 [Kaposi`s sarcoma-associated h
acuaggaggaagagcacuguu

SEQ ID NO: 2152539 - RNA, 18 nt, Human herpesvirus 8 [Kaposi`s sarcoma-associated h
uaaaagccugguccaggc

SEQ ID NO: 2152540 - RNA, 21 nt, Human herpesvirus 8 [Kaposi`s sarcoma-associated h
cugccuagaacuaaccacuca

SEQ ID NO: 2152541 - RNA, 23 nt, Human herpesvirus 8 [Kaposi`s sarcoma-associated h
gcagugcacgcaccaggauccag

SEQ ID NO: 2152542 - RNA, 23 nt, Human herpesvirus 8 [Kaposi`s sarcoma-associated h
auaaacagccuuggugcuaggca

SEQ ID NO: 2152543 - RNA, 17 nt, Human herpesvirus 8 [Kaposi`s sarcoma-associated h
gucuuuauugcuuucaa

SEQ ID NO: 2152544 - RNA, 19 nt, Human herpesvirus 8 [Kaposi`s sarcoma-associated h
auuaguguuauaagaaauu

SEQ ID NO: 2152545 - RNA, 17 nt, Human herpesvirus 8 [Kaposi`s sarcoma-associated h
ugucugaaacgggacau

SEQ ID NO: 2152546 - RNA, 15 nt, Human herpesvirus 8 [Kaposi`s sarcoma-associated h
ccagcgucggccaga

SEQ ID NO: 2152547 - RNA, 13 nt, Human herpesvirus 8 [Kaposi`s sarcoma-associated h
cggucgccagggu

SEQ ID NO: 2152548 - RNA, 14 nt, Human herpesvirus 8 [Kaposi`s sarcoma-associated h
ccagggaaacaugc

SEQ ID NO: 2152549 - RNA, 14 nt, Human herpesvirus 8 [Kaposi`s sarcoma-associated h
ggauaggcuggggg

SEQ ID NO: 2152550 - RNA, 14 nt, Human herpesvirus 8 [Kaposi`s sarcoma-associated h
gcgcuggcucagac

SEQ ID NO: 2152551 - RNA, 15 nt, Human herpesvirus 8 [Kaposi`s sarcoma-associated h
gacaucagaagaugc

SEQ ID NO: 2152552 - RNA, 13 nt, Human herpesvirus 8 [Kaposi`s sarcoma-associated h
acauaaaauuucu

SEQ ID NO: 2152553 - RNA, 15 nt, Human herpesvirus 8 [Kaposi`s sarcoma-associated h
aucugguccuaagag

SEQ ID NO: 2152554 - RNA, 20 nt, Human herpesvirus 8 [Kaposi`s sarcoma-associated h
augcaugugucugugcccug

SEQ ID NO: 2152555 - RNA, 12 nt, Human herpesvirus 8 [Kaposi`s sarcoma-associated h
ucgcccacggaa

SEQ ID NO: 2152556 - RNA, 19 nt, Human herpesvirus 8 [Kaposi`s sarcoma-associated h
cagacgugcccagacacca

SEQ ID NO: 2152557 - RNA, 19 nt, Human herpesvirus 8 [Kaposi`s sarcoma-associated h
acgcgcgacgcaucgucgc

SEQ ID NO: 2152558 - RNA, 22 nt, Human herpesvirus 8 [Kaposi`s sarcoma-associated h
ugacugccacggccgccuuugu

SEQ ID NO: 2152559 - RNA, 16 nt, Human herpesvirus 8 [Kaposi`s sarcoma-associated h
uaggcccaugugggcu

SEQ ID NO: 2152560 - RNA, 22 nt, Human herpesvirus 8 [Kaposi`s sarcoma-associated h
gcacaagcgcugacgaaagcua

SEQ ID NO: 2152561 - RNA, 13 nt, Human herpesvirus 8 [Kaposi`s sarcoma-associated h
cuggcaugcuggg

SEQ ID NO: 2152562 - RNA, 20 nt, Human herpesvirus 8 [Kaposi`s sarcoma-associated h
gcaaaauacauuuuaugagg

SEQ ID NO: 2152563 - RNA, 19 nt, Human herpesvirus 8 [Kaposi`s sarcoma-associated h
uaaaacggccaaagcaaag

SEQ ID NO: 2152564 - RNA, 22 nt, Human herpesvirus 8 [Kaposi`s sarcoma-associated h
gccauuuuuguggcugccugga

SEQ ID NO: 2152565 - RNA, 23 nt, Human herpesvirus 8 [Kaposi`s sarcoma-associated h
ggcuguuacaauaaagcugagcc

SEQ ID NO: 2152566 - RNA, 15 nt, Human herpesvirus 8 [Kaposi`s sarcoma-associated h
accggcuuguacagu

SEQ ID NO: 2152567 - RNA, 13 nt, Human herpesvirus 8 [Kaposi`s sarcoma-associated h
auggcguccgcuc

SEQ ID NO: 2152568 - RNA, 14 nt, Human herpesvirus 8 [Kaposi`s sarcoma-associated h
gcacuccaagccag

SEQ ID NO: 2152569 - RNA, 13 nt, Human herpesvirus 8 [Kaposi`s sarcoma-associated h
gccucccaacaug

SEQ ID NO: 2152570 - RNA, 14 nt, Human herpesvirus 8 [Kaposi`s sarcoma-associated h
gucuacccugccac

SEQ ID NO: 2152571 - RNA, 14 nt, Human herpesvirus 8 [Kaposi`s sarcoma-associated h
agaaaugaucaugu

SEQ ID NO: 2152572 - RNA, 18 nt, Human herpesvirus 8 [Kaposi`s sarcoma-associated h
gcggcuaagaauccccuu

SEQ ID NO: 2152573 - RNA, 11 nt, Human herpesvirus 8 [Kaposi`s sarcoma-associated h
cgucuucccac

SEQ ID NO: 2152574 - RNA, 21 nt, Human herpesvirus 8 [Kaposi`s sarcoma-associated h
ugccgucgucgagcacuccug

SEQ ID NO: 2152575 - RNA, 22 nt, Human herpesvirus 8 [Kaposi`s sarcoma-associated h
aaugacauaggcgacaaaguga

SEQ ID NO: 2152576 - RNA, 17 nt, Human herpesvirus 8 [Kaposi`s sarcoma-associated h
guaccaccaagaaggaa

SEQ ID NO: 2152577 - RNA, 16 nt, Human herpesvirus 8 [Kaposi`s sarcoma-associated h
ucuucuguugccaggc

SEQ ID NO: 2152578 - RNA, 20 nt, Human herpesvirus 8 [Kaposi`s sarcoma-associated h
caagauccaacccagcaugc

SEQ ID NO: 2152579 - RNA, 15 nt, Human herpesvirus 8 [Kaposi`s sarcoma-associated h
agagaauacagugcu

SEQ ID NO: 2152580 - RNA, 19 nt, Human herpesvirus 8 [Kaposi`s sarcoma-associated h
agccagguaacaaagccgc

SEQ ID NO: 2152581 - RNA, 18 nt, Human herpesvirus 8 [Kaposi`s sarcoma-associated h
ggcggugcaugugacccg

SEQ ID NO: 2152582 - RNA, 13 nt, Human herpesvirus 8 [Kaposi`s sarcoma-associated h
ugccugggugcug

SEQ ID NO: 2152583 - RNA, 17 nt, Human herpesvirus 8 [Kaposi`s sarcoma-associated h
uuaucuuugcagugucu

SEQ ID NO: 2152584 - RNA, 21 nt, Human herpesvirus 8 [Kaposi`s sarcoma-associated h
ccaccggcaggcagccaagaa

SEQ ID NO: 2152585 - RNA, 17 nt, Human herpesvirus 8 [Kaposi`s sarcoma-associated h
ccucgucgacagagcca

SEQ ID NO: 2152586 - RNA, 16 nt, Human herpesvirus 8 [Kaposi`s sarcoma-associated h
guacacagaugugacu

SEQ ID NO: 2152587 - RNA, 14 nt, Human herpesvirus 8 [Kaposi`s sarcoma-associated h
gguuccccguccac

SEQ ID NO: 2152588 - RNA, 12 nt, Human herpesvirus 8 [Kaposi`s sarcoma-associated h
aggauuucucgc

SEQ ID NO: 2152589 - RNA, 18 nt, Human herpesvirus 8 [Kaposi`s sarcoma-associated h
cuacuaauguaaccuaaa

SEQ ID NO: 2152590 - RNA, 15 nt, Human herpesvirus 8 [Kaposi`s sarcoma-associated h
caauaaacccacagc

SEQ ID NO: 2152591 - RNA, 17 nt, Human herpesvirus 8 [Kaposi`s sarcoma-associated h
ugccuucgaggccaggc

SEQ ID NO: 2152592 - RNA, 16 nt, Human herpesvirus 8 [Kaposi`s sarcoma-associated h
uuccggguauuggaga

SEQ ID NO: 2152593 - RNA, 18 nt, Human herpesvirus 8 [Kaposi`s sarcoma-associated h
caggcuguccucgcaagc

SEQ ID NO: 2152594 - RNA, 19 nt, Human herpesvirus 8 [Kaposi`s sarcoma-associated h
uuagauaguguugagguaa

SEQ ID NO: 2152595 - RNA, 19 nt, Human herpesvirus 8 [Kaposi`s sarcoma-associated h
cucaucauuucugaaacag

SEQ ID NO: 2152596 - RNA, 15 nt, Human herpesvirus 8 [Kaposi`s sarcoma-associated h
ucgguucaaccugga

SEQ ID NO: 2152597 - RNA, 14 nt, Human herpesvirus 8 [Kaposi`s sarcoma-associated h
cgguggugugccug

SEQ ID NO: 2152598 - RNA, 13 nt, Human herpesvirus 8 [Kaposi`s sarcoma-associated h
uagaccucacccc

SEQ ID NO: 2152599 - RNA, 17 nt, Human herpesvirus 8 [Kaposi`s sarcoma-associated h
gucucccuucgugcccc

SEQ ID NO: 2152600 - RNA, 17 nt, Human herpesvirus 8 [Kaposi`s sarcoma-associated h
ccccaagcggggagaag

SEQ ID NO: 2152601 - RNA, 18 nt, Human herpesvirus 8 [Kaposi`s sarcoma-associated h
acuucaccuccagacucu

SEQ ID NO: 2152602 - RNA, 18 nt, Human herpesvirus 8 [Kaposi`s sarcoma-associated h
gccuggagcagcgccagu

SEQ ID NO: 2152603 - RNA, 21 nt, Human herpesvirus 8 [Kaposi`s sarcoma-associated h
cagggcaugaggcuggaccuc

SEQ ID NO: 2152604 - RNA, 13 nt, Human herpesvirus 8 [Kaposi`s sarcoma-associated h
aguggaguggugu

SEQ ID NO: 2152605 - RNA, 16 nt, Human herpesvirus 8 [Kaposi`s sarcoma-associated h
gcuggucccgugguca

SEQ ID NO: 2152606 - RNA, 16 nt, Human herpesvirus 8 [Kaposi`s sarcoma-associated h
gagcacacuguguggu

SEQ ID NO: 2152607 - RNA, 12 nt, Human herpesvirus 8 [Kaposi`s sarcoma-associated h
ccugcugucuau

SEQ ID NO: 2152608 - RNA, 14 nt, Human herpesvirus 8 [Kaposi`s sarcoma-associated h
gcaaggcgggccag

SEQ ID NO: 2152609 - RNA, 15 nt, Human herpesvirus 8 [Kaposi`s sarcoma-associated h
augacaacugccaca

SEQ ID NO: 2152610 - RNA, 21 nt, Human herpesvirus 8 [Kaposi`s sarcoma-associated h
gcagggugcggugcugcccag

SEQ ID NO: 2152611 - RNA, 17 nt, Human herpesvirus 8 [Kaposi`s sarcoma-associated h
gggccaugacaacugcc

SEQ ID NO: 2152612 - RNA, 16 nt, Human herpesvirus 8 [Kaposi`s sarcoma-associated h
gaugccgcgcuugggu

SEQ ID NO: 2152613 - RNA, 17 nt, Human herpesvirus 8 [Kaposi`s sarcoma-associated h
uacagugaguggcugua

SEQ ID NO: 2152614 - RNA, 16 nt, Human herpesvirus 8 [Kaposi`s sarcoma-associated h
caguauuaugccaggg

SEQ ID NO: 2152615 - RNA, 18 nt, Human herpesvirus 8 [Kaposi`s sarcoma-associated h
cgcaugguugcaacagac

SEQ ID NO: 2152616 - RNA, 18 nt, Human herpesvirus 8 [Kaposi`s sarcoma-associated h
agugggguugggguccag

SEQ ID NO: 2152617 - RNA, 22 nt, Human herpesvirus 8 [Kaposi`s sarcoma-associated h
cgccgguguaugacccugagcu

SEQ ID NO: 2152618 - RNA, 12 nt, Human herpesvirus 8 [Kaposi`s sarcoma-associated h
auaacuucuggg

SEQ ID NO: 2152619 - RNA, 21 nt, Human herpesvirus 8 [Kaposi`s sarcoma-associated h
gcgccauuuuuguggcugccu

SEQ ID NO: 2152620 - RNA, 16 nt, Human herpesvirus 8 [Kaposi`s sarcoma-associated h
guggagcacgaagaca

SEQ ID NO: 2152621 - RNA, 19 nt, Human herpesvirus 8 [Kaposi`s sarcoma-associated h
agccgcgcuuuuuaacuuc

SEQ ID NO: 2152622 - RNA, 17 nt, Human herpesvirus 8 [Kaposi`s sarcoma-associated h
gggacagucuaaaaaag

SEQ ID NO: 2152623 - RNA, 18 nt, Human herpesvirus 8 [Kaposi`s sarcoma-associated h
cagacgaccccagccccu

SEQ ID NO: 2152624 - RNA, 15 nt, Human herpesvirus 8 [Kaposi`s sarcoma-associated h
cauauugguauauga

SEQ ID NO: 2152625 - RNA, 17 nt, Human herpesvirus 8 [Kaposi`s sarcoma-associated h
aggaccaccggcaggca

SEQ ID NO: 2152626 - RNA, 15 nt, Human herpesvirus 8 [Kaposi`s sarcoma-associated h
cgaacaucgccgugg

SEQ ID NO: 2152627 - RNA, 23 nt, Human herpesvirus 8 [Kaposi`s sarcoma-associated h
ggauuuaucuaccuuagaagacc

SEQ ID NO: 2152628 - RNA, 12 nt, Human herpesvirus 8 [Kaposi`s sarcoma-associated h
cugcagccagga

SEQ ID NO: 2152629 - RNA, 15 nt, Human herpesvirus 8 [Kaposi`s sarcoma-associated h
ugauuuuccagggac

SEQ ID NO: 2152630 - RNA, 17 nt, Human herpesvirus 8 [Kaposi`s sarcoma-associated h
gcagccucuacccugcc

SEQ ID NO: 2152631 - RNA, 17 nt, Human herpesvirus 8 [Kaposi`s sarcoma-associated h
acucguucacacucuuu

SEQ ID NO: 2152632 - RNA, 19 nt, Human herpesvirus 8 [Kaposi`s sarcoma-associated h
ggaucaucugcagacccuu

SEQ ID NO: 2152633 - RNA, 19 nt, Human herpesvirus 8 [Kaposi`s sarcoma-associated h
ugcccucccaaagaguguc

SEQ ID NO: 2152634 - RNA, 21 nt, Human herpesvirus 8 [Kaposi`s sarcoma-associated h
uacaaauguuuuaugcaaaau

SEQ ID NO: 2152635 - RNA, 22 nt, Human herpesvirus 8 [Kaposi`s sarcoma-associated h
caugcccuccugggccaggcac

SEQ ID NO: 2152636 - RNA, 17 nt, Human herpesvirus 8 [Kaposi`s sarcoma-associated h
ucucgcugcucagacag

SEQ ID NO: 2152637 - RNA, 17 nt, Human herpesvirus 8 [Kaposi`s sarcoma-associated h
ccucagaaaguggauug

SEQ ID NO: 2152638 - RNA, 22 nt, Human herpesvirus 8 [Kaposi`s sarcoma-associated h
ccggcgacugcgcagaacagua

SEQ ID NO: 2152639 - RNA, 23 nt, Human herpesvirus 8 [Kaposi`s sarcoma-associated h
agugguuauuuuuuuccuaggcg

SEQ ID NO: 2152640 - RNA, 14 nt, Human herpesvirus 8 [Kaposi`s sarcoma-associated h
aaguuucaaagucg

SEQ ID NO: 2152641 - RNA, 15 nt, Human herpesvirus 8 [Kaposi`s sarcoma-associated h
gacaccaaagacaag

SEQ ID NO: 2152642 - RNA, 12 nt, Human herpesvirus 8 [Kaposi`s sarcoma-associated h
aggccugugccc

SEQ ID NO: 2152643 - RNA, 16 nt, Human herpesvirus 8 [Kaposi`s sarcoma-associated h
cuagacacgcaaagua

SEQ ID NO: 2152644 - RNA, 22 nt, Human herpesvirus 8 [Kaposi`s sarcoma-associated h
auaugcaccguuuccacacagg

SEQ ID NO: 2152645 - RNA, 18 nt, Human herpesvirus 8 [Kaposi`s sarcoma-associated h
cucgggcgcggcgagccc

SEQ ID NO: 2152646 - RNA, 18 nt, Human herpesvirus 8 [Kaposi`s sarcoma-associated h
agacaguuaaucuuuauu

SEQ ID NO: 2152647 - RNA, 14 nt, Human herpesvirus 8 [Kaposi`s sarcoma-associated h
auagccgccgggag

SEQ ID NO: 2152648 - RNA, 18 nt, Human herpesvirus 8 [Kaposi`s sarcoma-associated h
ugcggugcugcccaggac

SEQ ID NO: 2152649 - RNA, 23 nt, Human herpesvirus 8 [Kaposi`s sarcoma-associated h
ucgaaaaaaauaaugcagacaga

SEQ ID NO: 2152650 - RNA, 19 nt, Human herpesvirus 8 [Kaposi`s sarcoma-associated h
gccagcaaccccucuggau

SEQ ID NO: 2152651 - RNA, 21 nt, Human herpesvirus 8 [Kaposi`s sarcoma-associated h
guugagagucagagaauacag

SEQ ID NO: 2152652 - RNA, 16 nt, Human herpesvirus 8 [Kaposi`s sarcoma-associated h
acccaauaaaagagag

SEQ ID NO: 2152653 - RNA, 23 nt, Human herpesvirus 8 [Kaposi`s sarcoma-associated h
gugucauugccacccagcuacug

SEQ ID NO: 2152654 - RNA, 16 nt, Human herpesvirus 8 [Kaposi`s sarcoma-associated h
gcguuuaccugcacuc

SEQ ID NO: 2152655 - RNA, 16 nt, Human herpesvirus 8 [Kaposi`s sarcoma-associated h
gcugucauugaggaag

SEQ ID NO: 2152656 - RNA, 22 nt, Human herpesvirus 8 [Kaposi`s sarcoma-associated h
agcgccuagaaaguuuccucuu

SEQ ID NO: 2152657 - RNA, 19 nt, Human herpesvirus 8 [Kaposi`s sarcoma-associated h
ggaaauggggaacacagaa

SEQ ID NO: 2152658 - RNA, 19 nt, Human herpesvirus 8 [Kaposi`s sarcoma-associated h
caaaugauauuuugauggu

SEQ ID NO: 2152659 - RNA, 15 nt, Human herpesvirus 8 [Kaposi`s sarcoma-associated h
auagcuacaaauguu

SEQ ID NO: 2152660 - RNA, 12 nt, Human herpesvirus 8 [Kaposi`s sarcoma-associated h
ccgucgcacccg

SEQ ID NO: 2152661 - RNA, 17 nt, Human herpesvirus 8 [Kaposi`s sarcoma-associated h
aauguuuguaauuuccu

SEQ ID NO: 2152662 - RNA, 12 nt, Human herpesvirus 8 [Kaposi`s sarcoma-associated h
cagcaaagcaca

SEQ ID NO: 2152663 - RNA, 13 nt, Human herpesvirus 8 [Kaposi`s sarcoma-associated h
aggagucagagca

SEQ ID NO: 2152664 - RNA, 23 nt, Human herpesvirus 8 [Kaposi`s sarcoma-associated h
ucggacaggacgcggccauccgc

SEQ ID NO: 2152665 - RNA, 12 nt, Human herpesvirus 8 [Kaposi`s sarcoma-associated h
gaagcccuugag

SEQ ID NO: 2152666 - RNA, 16 nt, Human herpesvirus 8 [Kaposi`s sarcoma-associated h
acaauagggauacugu

SEQ ID NO: 2152667 - RNA, 13 nt, Human herpesvirus 8 [Kaposi`s sarcoma-associated h
gguguucugucaa

SEQ ID NO: 2152668 - RNA, 13 nt, Human herpesvirus 8 [Kaposi`s sarcoma-associated h
gugaucucuggag

SEQ ID NO: 2152669 - RNA, 16 nt, Human herpesvirus 8 [Kaposi`s sarcoma-associated h
auuuauugcauggcau

SEQ ID NO: 2152670 - RNA, 22 nt, Human herpesvirus 8 [Kaposi`s sarcoma-associated h
agccacaaacgccccucuuggc

SEQ ID NO: 2152671 - RNA, 19 nt, Human herpesvirus 8 [Kaposi`s sarcoma-associated h
gaagagaauggagaggaga

SEQ ID NO: 2152672 - RNA, 20 nt, Human herpesvirus 8 [Kaposi`s sarcoma-associated h
uuaaccggcuuguacaguga

SEQ ID NO: 2152673 - RNA, 21 nt, Human herpesvirus 8 [Kaposi`s sarcoma-associated h
cgcaccugguaagcagggcgg

SEQ ID NO: 2152674 - RNA, 21 nt, Human herpesvirus 8 [Kaposi`s sarcoma-associated h
gacgcaucgucgcgccuggcg

SEQ ID NO: 2152675 - RNA, 23 nt, Human herpesvirus 8 [Kaposi`s sarcoma-associated h
gcggcccagcgucgucgauggga

SEQ ID NO: 2152676 - RNA, 23 nt, Human herpesvirus 8 [Kaposi`s sarcoma-associated h
uuauacaaacaacauaaacauua

SEQ ID NO: 2152677 - RNA, 15 nt, Human herpesvirus 8 [Kaposi`s sarcoma-associated h
uguaccuagcccugu

SEQ ID NO: 2152678 - RNA, 21 nt, Human herpesvirus 8 [Kaposi`s sarcoma-associated h
uuaagagugccacuaaaaccg

SEQ ID NO: 2152679 - RNA, 23 nt, Human herpesvirus 8 [Kaposi`s sarcoma-associated h
ccugccaaaugcccagaaugaag

SEQ ID NO: 2152680 - RNA, 19 nt, Human herpesvirus 8 [Kaposi`s sarcoma-associated h
cgagcucaugcccacccug

SEQ ID NO: 2152681 - RNA, 17 nt, Human herpesvirus 8 [Kaposi`s sarcoma-associated h
gcguccacauggcagcu

SEQ ID NO: 2152682 - RNA, 15 nt, Human herpesvirus 8 [Kaposi`s sarcoma-associated h
cagcugcagccagga

SEQ ID NO: 2152683 - RNA, 18 nt, Human herpesvirus 8 [Kaposi`s sarcoma-associated h
acaaugugucuguggcua

SEQ ID NO: 2152684 - RNA, 17 nt, Human herpesvirus 8 [Kaposi`s sarcoma-associated h
agcgccaccguguggcu

SEQ ID NO: 2152685 - RNA, 13 nt, Human herpesvirus 8 [Kaposi`s sarcoma-associated h
gagccggcccuga

SEQ ID NO: 2152686 - RNA, 19 nt, Human herpesvirus 8 [Kaposi`s sarcoma-associated h
gagcugucccaccagagcg

SEQ ID NO: 2152687 - RNA, 19 nt, Human herpesvirus 8 [Kaposi`s sarcoma-associated h
ggaccucgucuagcacaca

SEQ ID NO: 2152688 - RNA, 12 nt, Human herpesvirus 8 [Kaposi`s sarcoma-associated h
caugccugugga

SEQ ID NO: 2152689 - RNA, 20 nt, Human herpesvirus 8 [Kaposi`s sarcoma-associated h
caccgucgccaaacaggcgc

SEQ ID NO: 2152690 - RNA, 14 nt, Human herpesvirus 8 [Kaposi`s sarcoma-associated h
uacauaacacacac

SEQ ID NO: 2152691 - RNA, 21 nt, Human herpesvirus 8 [Kaposi`s sarcoma-associated h
gacgucuucgccgaggacacg

SEQ ID NO: 2152692 - RNA, 16 nt, Human herpesvirus 8 [Kaposi`s sarcoma-associated h
auugugucaaccaggg

SEQ ID NO: 2152693 - RNA, 17 nt, Human herpesvirus 8 [Kaposi`s sarcoma-associated h
acucugcaagcuguugg

SEQ ID NO: 2152694 - RNA, 19 nt, Human herpesvirus 8 [Kaposi`s sarcoma-associated h
cugcgcagaacaguaccca

SEQ ID NO: 2152695 - RNA, 21 nt, Human herpesvirus 8 [Kaposi`s sarcoma-associated h
uagagacuggcggguggcuca

SEQ ID NO: 2152696 - RNA, 12 nt, Human herpesvirus 8 [Kaposi`s sarcoma-associated h
uacuagcaccac

SEQ ID NO: 2152697 - RNA, 13 nt, Human herpesvirus 8 [Kaposi`s sarcoma-associated h
uggcgccaugggu

SEQ ID NO: 2152698 - RNA, 13 nt, Human herpesvirus 8 [Kaposi`s sarcoma-associated h
uacuguccauuac

SEQ ID NO: 2152699 - RNA, 14 nt, Human herpesvirus 8 [Kaposi`s sarcoma-associated h
ccgcauuaaagcac

SEQ ID NO: 2152700 - RNA, 18 nt, Human herpesvirus 8 [Kaposi`s sarcoma-associated h
acagucuguaaagaaagu

SEQ ID NO: 2152701 - RNA, 22 nt, Human herpesvirus 8 [Kaposi`s sarcoma-associated h
aaugaagugcaaccugcugcag

SEQ ID NO: 2152702 - RNA, 22 nt, Human herpesvirus 8 [Kaposi`s sarcoma-associated h
caucuacccugauuagcacugu

SEQ ID NO: 2152703 - RNA, 15 nt, Human herpesvirus 8 [Kaposi`s sarcoma-associated h
gacaaaugugugggu

SEQ ID NO: 2152704 - RNA, 21 nt, Human herpesvirus 8 [Kaposi`s sarcoma-associated h
uuaugaggucggauacuuauu

SEQ ID NO: 2152705 - RNA, 20 nt, Human herpesvirus 8 [Kaposi`s sarcoma-associated h
cgagcucaugcccacccugu

SEQ ID NO: 2152706 - RNA, 19 nt, Human herpesvirus 8 [Kaposi`s sarcoma-associated h
gauccaacccagcaugccu

SEQ ID NO: 2152707 - RNA, 14 nt, Human herpesvirus 8 [Kaposi`s sarcoma-associated h
uuggcgagaagccc

SEQ ID NO: 2152708 - RNA, 12 nt, Human herpesvirus 8 [Kaposi`s sarcoma-associated h
cgggggccagga

SEQ ID NO: 2152709 - RNA, 15 nt, Human herpesvirus 8 [Kaposi`s sarcoma-associated h
guuaucuuugcagug

SEQ ID NO: 2152710 - RNA, 20 nt, Human herpesvirus 8 [Kaposi`s sarcoma-associated h
agucugaaccccguguggga

SEQ ID NO: 2152711 - RNA, 20 nt, Human herpesvirus 8 [Kaposi`s sarcoma-associated h
ggaccucaaagaagaggugg

SEQ ID NO: 2152712 - RNA, 17 nt, Human herpesvirus 8 [Kaposi`s sarcoma-associated h
ccgggccuucgcacccc

SEQ ID NO: 2152713 - RNA, 15 nt, Human herpesvirus 8 [Kaposi`s sarcoma-associated h
ccaggacggagccgu

SEQ ID NO: 2152714 - RNA, 20 nt, Human herpesvirus 8 [Kaposi`s sarcoma-associated h
acaaugaauggggaccagag

SEQ ID NO: 2152715 - RNA, 13 nt, Human herpesvirus 8 [Kaposi`s sarcoma-associated h
uguagauaauuga

SEQ ID NO: 2152716 - RNA, 12 nt, Human herpesvirus 8 [Kaposi`s sarcoma-associated h
caaaaacacaau

SEQ ID NO: 2152717 - RNA, 18 nt, Human herpesvirus 8 [Kaposi`s sarcoma-associated h
gcugcaauguacugccau

SEQ ID NO: 2152718 - RNA, 18 nt, Human herpesvirus 8 [Kaposi`s sarcoma-associated h
cggaauggcucacggacu

SEQ ID NO: 2152719 - RNA, 21 nt, Human herpesvirus 8 [Kaposi`s sarcoma-associated h
uacaauaaagcugagccacaa

SEQ ID NO: 2152720 - RNA, 23 nt, Human herpesvirus 8 [Kaposi`s sarcoma-associated h
gcaccuguguacaauacgccuuc

SEQ ID NO: 2152721 - RNA, 13 nt, Human herpesvirus 8 [Kaposi`s sarcoma-associated h
uacugcuguuacc

SEQ ID NO: 2152722 - RNA, 18 nt, Human herpesvirus 8 [Kaposi`s sarcoma-associated h
cugguucaggauuucgaa

SEQ ID NO: 2152723 - RNA, 14 nt, Human herpesvirus 8 [Kaposi`s sarcoma-associated h
gacauguggagcca

SEQ ID NO: 2152724 - RNA, 14 nt, Human herpesvirus 8 [Kaposi`s sarcoma-associated h
aucuagacugcuag

SEQ ID NO: 2152725 - RNA, 23 nt, Human herpesvirus 8 [Kaposi`s sarcoma-associated h
ccaggccaccauuccucuccgca

SEQ ID NO: 2152726 - RNA, 13 nt, Human herpesvirus 8 [Kaposi`s sarcoma-associated h
ccguguggcugca

SEQ ID NO: 2152727 - RNA, 21 nt, Human herpesvirus 8 [Kaposi`s sarcoma-associated h
cugggacuugauaaucuccug

SEQ ID NO: 2152728 - RNA, 13 nt, Human herpesvirus 8 [Kaposi`s sarcoma-associated h
cauuuuguaauga

SEQ ID NO: 2152729 - RNA, 15 nt, Human herpesvirus 8 [Kaposi`s sarcoma-associated h
cguuuaguguggauc

SEQ ID NO: 2152730 - RNA, 19 nt, Human herpesvirus 8 [Kaposi`s sarcoma-associated h
acuagaguccaaccuggca

SEQ ID NO: 2152731 - RNA, 16 nt, Human herpesvirus 8 [Kaposi`s sarcoma-associated h
cugcaggggagcacac

SEQ ID NO: 2152732 - RNA, 13 nt, Human herpesvirus 8 [Kaposi`s sarcoma-associated h
ugcagccagguaa

SEQ ID NO: 2152733 - RNA, 23 nt, Human herpesvirus 8 [Kaposi`s sarcoma-associated h
ugggccgugguucaucagccuca

SEQ ID NO: 2152734 - RNA, 14 nt, Human herpesvirus 8 [Kaposi`s sarcoma-associated h
ccaccuacacccgg

SEQ ID NO: 2152735 - RNA, 16 nt, Human herpesvirus 8 [Kaposi`s sarcoma-associated h
uaaacccacagcccau

SEQ ID NO: 2152736 - RNA, 20 nt, Human herpesvirus 8 [Kaposi`s sarcoma-associated h
uucugaaacagaaacugcuc

SEQ ID NO: 2152737 - RNA, 17 nt, Human herpesvirus 8 [Kaposi`s sarcoma-associated h
cgccgguagcugccugg

SEQ ID NO: 2152738 - RNA, 23 nt, Human herpesvirus 8 [Kaposi`s sarcoma-associated h
ucguugacauguggagccacugg

SEQ ID NO: 2152739 - RNA, 15 nt, Human herpesvirus 8 [Kaposi`s sarcoma-associated h
agcaauaaagacaaa

SEQ ID NO: 2152740 - RNA, 13 nt, Human herpesvirus 8 [Kaposi`s sarcoma-associated h
ccuuccucagcga

SEQ ID NO: 2152741 - RNA, 17 nt, Human herpesvirus 8 [Kaposi`s sarcoma-associated h
gagacgcgcaaaggggg

SEQ ID NO: 2152742 - RNA, 17 nt, Human herpesvirus 8 [Kaposi`s sarcoma-associated h
aucuaucucugguggug

SEQ ID NO: 2152743 - RNA, 19 nt, Human herpesvirus 8 [Kaposi`s sarcoma-associated h
cggcgcaaaaacagcugga

SEQ ID NO: 2152744 - RNA, 17 nt, Human herpesvirus 8 [Kaposi`s sarcoma-associated h
uuacuaagagaacagca

SEQ ID NO: 2152745 - RNA, 20 nt, Human herpesvirus 8 [Kaposi`s sarcoma-associated h
uaaagagggaucccaggcag

SEQ ID NO: 2152746 - RNA, 24 nt, Human herpesvirus 8 [Kaposi`s sarcoma-associated h
cagcuccuauugcaacugaccaug

SEQ ID NO: 2152747 - RNA, 19 nt, Human herpesvirus 8 [Kaposi`s sarcoma-associated h
cacucgcuguccuggagga

SEQ ID NO: 2152748 - RNA, 22 nt, Human herpesvirus 8 [Kaposi`s sarcoma-associated h
cugcgcagaacaguacccacga

SEQ ID NO: 2152749 - RNA, 19 nt, Human herpesvirus 8 [Kaposi`s sarcoma-associated h
uaagacaaacaugugggcu

SEQ ID NO: 2152750 - RNA, 13 nt, Human herpesvirus 8 [Kaposi`s sarcoma-associated h
gcugcagccagga

SEQ ID NO: 2152751 - RNA, 23 nt, Human herpesvirus 8 [Kaposi`s sarcoma-associated h
acuuaacgugucugaauguggaa

SEQ ID NO: 2152752 - RNA, 22 nt, Human herpesvirus 8 [Kaposi`s sarcoma-associated h
ugacuaggaggaagagcacugu

SEQ ID NO: 2152753 - RNA, 16 nt, Human herpesvirus 8 [Kaposi`s sarcoma-associated h
ugguauauugguccag

SEQ ID NO: 2152754 - RNA, 18 nt, Human herpesvirus 8 [Kaposi`s sarcoma-associated h
cagacaguuaccauucau

SEQ ID NO: 2152755 - RNA, 16 nt, Human herpesvirus 8 [Kaposi`s sarcoma-associated h
cuucuauaagcaccuu

SEQ ID NO: 2152756 - RNA, 15 nt, Human herpesvirus 8 [Kaposi`s sarcoma-associated h
auacaagacaacuaa

SEQ ID NO: 2152757 - RNA, 23 nt, Human herpesvirus 8 [Kaposi`s sarcoma-associated h
auuuuccaaggccugugcccaac

SEQ ID NO: 2152758 - RNA, 17 nt, Human herpesvirus 8 [Kaposi`s sarcoma-associated h
ggcgcaggcgaucgccg

SEQ ID NO: 2152759 - RNA, 17 nt, Human herpesvirus 8 [Kaposi`s sarcoma-associated h
cgguuuacuugcagcag

SEQ ID NO: 2152760 - RNA, 23 nt, Human herpesvirus 8 [Kaposi`s sarcoma-associated h
caacccacgccgucacagucgcc

SEQ ID NO: 2152761 - RNA, 18 nt, Human herpesvirus 8 [Kaposi`s sarcoma-associated h
cgagcaccucagaaagug

SEQ ID NO: 2152762 - RNA, 16 nt, Human herpesvirus 8 [Kaposi`s sarcoma-associated h
caccacaucugcuguc

SEQ ID NO: 2152763 - RNA, 16 nt, Human herpesvirus 8 [Kaposi`s sarcoma-associated h
cagccggucgccaggg

SEQ ID NO: 2152764 - RNA, 17 nt, Human herpesvirus 8 [Kaposi`s sarcoma-associated h
ucacgcacuuggcccug

SEQ ID NO: 2152765 - RNA, 17 nt, Human herpesvirus 8 [Kaposi`s sarcoma-associated h
gugcccaaaucuguccu

SEQ ID NO: 2152766 - RNA, 23 nt, Human herpesvirus 8 [Kaposi`s sarcoma-associated h
auuucucgccucccaacauguaa

SEQ ID NO: 2152767 - RNA, 17 nt, Human herpesvirus 8 [Kaposi`s sarcoma-associated h
aucaauaaagagaccaa

SEQ ID NO: 2152768 - RNA, 24 nt, Human herpesvirus 8 [Kaposi`s sarcoma-associated h
cauuugcgugcaaaaugugcuuug

SEQ ID NO: 2152769 - RNA, 19 nt, Human herpesvirus 8 [Kaposi`s sarcoma-associated h
ucugaaacuaccagccauc

SEQ ID NO: 2152770 - RNA, 15 nt, Human herpesvirus 8 [Kaposi`s sarcoma-associated h
gagggaauggccucc

SEQ ID NO: 2152771 - RNA, 15 nt, Human herpesvirus 8 [Kaposi`s sarcoma-associated h
cggaaacugggcacg

SEQ ID NO: 2152772 - RNA, 19 nt, Human herpesvirus 8 [Kaposi`s sarcoma-associated h
ccauccccccaccccucau

SEQ ID NO: 2152773 - RNA, 13 nt, Human herpesvirus 8 [Kaposi`s sarcoma-associated h
agauuuaagauua

SEQ ID NO: 2152774 - RNA, 18 nt, Human herpesvirus 8 [Kaposi`s sarcoma-associated h
cagcaauaaacccacagc

SEQ ID NO: 2152775 - RNA, 23 nt, Human herpesvirus 8 [Kaposi`s sarcoma-associated h
cagguaugaccggcuuguuuaua

SEQ ID NO: 2152776 - RNA, 19 nt, Human herpesvirus 8 [Kaposi`s sarcoma-associated h
uuguggcaccugaggugcu

SEQ ID NO: 2152777 - RNA, 15 nt, Human herpesvirus 8 [Kaposi`s sarcoma-associated h
ugcugccacugccac

SEQ ID NO: 2152778 - RNA, 21 nt, Human herpesvirus 8 [Kaposi`s sarcoma-associated h
caacccagcaugccugcgcug

SEQ ID NO: 2152779 - RNA, 14 nt, Human herpesvirus 8 [Kaposi`s sarcoma-associated h
ccagaagagcauuu

SEQ ID NO: 2152780 - RNA, 21 nt, Human herpesvirus 8 [Kaposi`s sarcoma-associated h
gucucaggugucugcgggaca

SEQ ID NO: 2152781 - RNA, 18 nt, Human herpesvirus 8 [Kaposi`s sarcoma-associated h
ccgucagggcccacggug

SEQ ID NO: 2152782 - RNA, 15 nt, Human herpesvirus 8 [Kaposi`s sarcoma-associated h
gccguucccaugagc

SEQ ID NO: 2152783 - RNA, 15 nt, Human herpesvirus 8 [Kaposi`s sarcoma-associated h
gucugaaacgggaca

SEQ ID NO: 2152784 - RNA, 20 nt, Human herpesvirus 8 [Kaposi`s sarcoma-associated h
agaugaauaugauccuguag

SEQ ID NO: 2152785 - RNA, 13 nt, Human herpesvirus 8 [Kaposi`s sarcoma-associated h
cugccuaggaccu

SEQ ID NO: 2152786 - RNA, 21 nt, Human herpesvirus 8 [Kaposi`s sarcoma-associated h
gccuaucaaucugagaaaagu

SEQ ID NO: 2152787 - RNA, 21 nt, Human herpesvirus 8 [Kaposi`s sarcoma-associated h
uggggguggggggaggaggaa

SEQ ID NO: 2152788 - RNA, 16 nt, Human herpesvirus 8 [Kaposi`s sarcoma-associated h
cauggaauuguauaga

SEQ ID NO: 2152789 - RNA, 18 nt, Human herpesvirus 8 [Kaposi`s sarcoma-associated h
ggugaucuuaggccagga

SEQ ID NO: 2152790 - RNA, 16 nt, Human herpesvirus 8 [Kaposi`s sarcoma-associated h
aacacguaccugaccu

SEQ ID NO: 2152791 - RNA, 18 nt, Human herpesvirus 8 [Kaposi`s sarcoma-associated h
accgagcucugcugccug

SEQ ID NO: 2152792 - RNA, 12 nt, Human herpesvirus 8 [Kaposi`s sarcoma-associated h
aggccaggaccc

SEQ ID NO: 2152793 - RNA, 16 nt, Human herpesvirus 8 [Kaposi`s sarcoma-associated h
ugaaccccguguggga

SEQ ID NO: 2152794 - RNA, 17 nt, Human herpesvirus 8 [Kaposi`s sarcoma-associated h
augagugaaaaggaagc

SEQ ID NO: 2152795 - RNA, 20 nt, Human herpesvirus 8 [Kaposi`s sarcoma-associated h
gcugccccaaaaggcgaggc

SEQ ID NO: 2152796 - RNA, 13 nt, Human herpesvirus 8 [Kaposi`s sarcoma-associated h
gcugcucagacag

SEQ ID NO: 2152797 - RNA, 14 nt, Human herpesvirus 8 [Kaposi`s sarcoma-associated h
cccagacgacccca

SEQ ID NO: 2152798 - RNA, 13 nt, Human herpesvirus 8 [Kaposi`s sarcoma-associated h
guaauguguuuua

SEQ ID NO: 2152799 - RNA, 16 nt, Human herpesvirus 8 [Kaposi`s sarcoma-associated h
caucgcucaaacucau

SEQ ID NO: 2152800 - RNA, 12 nt, Human herpesvirus 8 [Kaposi`s sarcoma-associated h
gcaagcacagaa

SEQ ID NO: 2152801 - RNA, 22 nt, Human herpesvirus 8 [Kaposi`s sarcoma-associated h
ggcuagauuaaauuaaggggga

SEQ ID NO: 2152802 - RNA, 21 nt, Human herpesvirus 8 [Kaposi`s sarcoma-associated h
ugcagggcgcugcucuuguca

SEQ ID NO: 2152803 - RNA, 20 nt, Human herpesvirus 8 [Kaposi`s sarcoma-associated h
agacauagugacuguagaca

SEQ ID NO: 2152804 - RNA, 23 nt, Human herpesvirus 8 [Kaposi`s sarcoma-associated h
augaauaacuuuauuacagguau

SEQ ID NO: 2152805 - RNA, 17 nt, Human herpesvirus 8 [Kaposi`s sarcoma-associated h
cucagacaccgucgcca

SEQ ID NO: 2152806 - RNA, 11 nt, Human herpesvirus 8 [Kaposi`s sarcoma-associated h
ucccacugcug

SEQ ID NO: 2152807 - RNA, 14 nt, Human herpesvirus 8 [Kaposi`s sarcoma-associated h
auggcaacugccaa

SEQ ID NO: 2152808 - RNA, 19 nt, Human herpesvirus 8 [Kaposi`s sarcoma-associated h
cugccugucagauuuacaa

SEQ ID NO: 2152809 - RNA, 13 nt, Human herpesvirus 8 [Kaposi`s sarcoma-associated h
ugucugauucuua

SEQ ID NO: 2152810 - RNA, 18 nt, Human herpesvirus 8 [Kaposi`s sarcoma-associated h
acugcuuguucaggagcu

SEQ ID NO: 2152811 - RNA, 19 nt, Human herpesvirus 8 [Kaposi`s sarcoma-associated h
ccacaugauuugauacagg

SEQ ID NO: 2152812 - RNA, 15 nt, Human herpesvirus 8 [Kaposi`s sarcoma-associated h
acagacgacugggcc

SEQ ID NO: 2152813 - RNA, 15 nt, Human herpesvirus 8 [Kaposi`s sarcoma-associated h
uagcuucagcuucag

SEQ ID NO: 2152814 - RNA, 15 nt, Human herpesvirus 8 [Kaposi`s sarcoma-associated h
aaguagucagacauu

SEQ ID NO: 2152815 - RNA, 14 nt, Human herpesvirus 8 [Kaposi`s sarcoma-associated h
aagccgagcucggg

SEQ ID NO: 2152816 - RNA, 15 nt, Human herpesvirus 8 [Kaposi`s sarcoma-associated h
uacugguaccagaga

SEQ ID NO: 2152817 - RNA, 14 nt, Human herpesvirus 8 [Kaposi`s sarcoma-associated h
gccuucgcacccca

SEQ ID NO: 2152818 - RNA, 20 nt, Human herpesvirus 8 [Kaposi`s sarcoma-associated h
agcgcgcucugucgcucuuc

SEQ ID NO: 2152819 - RNA, 22 nt, Human herpesvirus 8 [Kaposi`s sarcoma-associated h
ugccagugggguugggguccag

SEQ ID NO: 2152820 - RNA, 19 nt, Human herpesvirus 8 [Kaposi`s sarcoma-associated h
caguguuaucuuugcagug

SEQ ID NO: 2152821 - RNA, 17 nt, Human herpesvirus 8 [Kaposi`s sarcoma-associated h
acgccgauagggcggcc

SEQ ID NO: 2152822 - RNA, 12 nt, Human herpesvirus 8 [Kaposi`s sarcoma-associated h
gcggugcugccc

SEQ ID NO: 2152823 - RNA, 19 nt, Human herpesvirus 8 [Kaposi`s sarcoma-associated h
uacgucccucuuggcuguu

SEQ ID NO: 2152824 - RNA, 22 nt, Human herpesvirus 8 [Kaposi`s sarcoma-associated h
gauaauugagcgcugugcuuuu

SEQ ID NO: 2152825 - RNA, 16 nt, Human herpesvirus 8 [Kaposi`s sarcoma-associated h
gcaggagucagagcag

SEQ ID NO: 2152826 - RNA, 16 nt, Human herpesvirus 8 [Kaposi`s sarcoma-associated h
uggaaagcuccucgag

SEQ ID NO: 2152827 - RNA, 23 nt, Human herpesvirus 8 [Kaposi`s sarcoma-associated h
aucccccccgcaggccagccacc

SEQ ID NO: 2152828 - RNA, 16 nt, Human herpesvirus 8 [Kaposi`s sarcoma-associated h
cggcuccguccuggug

SEQ ID NO: 2152829 - RNA, 14 nt, Human herpesvirus 8 [Kaposi`s sarcoma-associated h
gcuauaggacagaa

SEQ ID NO: 2152830 - RNA, 15 nt, Human herpesvirus 8 [Kaposi`s sarcoma-associated h
ugggaucgaacagaa

SEQ ID NO: 2152831 - RNA, 15 nt, Human herpesvirus 8 [Kaposi`s sarcoma-associated h
uauagugguuuacau

SEQ ID NO: 2152832 - RNA, 16 nt, Human herpesvirus 8 [Kaposi`s sarcoma-associated h
ccaguucccccacacc

SEQ ID NO: 2152833 - RNA, 19 nt, Human herpesvirus 8 [Kaposi`s sarcoma-associated h
aucugcugucuaguggaga

SEQ ID NO: 2152834 - RNA, 22 nt, Human herpesvirus 8 [Kaposi`s sarcoma-associated h
uccaccgccgcgcaugguguau

SEQ ID NO: 2152835 - RNA, 22 nt, Human herpesvirus 8 [Kaposi`s sarcoma-associated h
ccuucuggcuuggcgcuuagcc

SEQ ID NO: 2152836 - RNA, 18 nt, Human herpesvirus 8 [Kaposi`s sarcoma-associated h
aauuucuuauaacacuaa

SEQ ID NO: 2152837 - RNA, 13 nt, Human herpesvirus 8 [Kaposi`s sarcoma-associated h
aaucgaagccagg

SEQ ID NO: 2152838 - RNA, 15 nt, Human herpesvirus 8 [Kaposi`s sarcoma-associated h
accggcaucugcaag

SEQ ID NO: 2152839 - RNA, 16 nt, Human herpesvirus 8 [Kaposi`s sarcoma-associated h
auucccaaacacauca

SEQ ID NO: 2152840 - RNA, 17 nt, Human herpesvirus 8 [Kaposi`s sarcoma-associated h
agguugaaagccggggu

SEQ ID NO: 2152841 - RNA, 17 nt, Human herpesvirus 8 [Kaposi`s sarcoma-associated h
gacugggucuaucugga
